United States Patent Application Publication US 2008/0034453 A1 - sequence listing, part 23

SEQ ID NO: 196262 - DNA, 289 bp, Glycine max
cggctcgaggccagtagtcatatgcttgtctcaaagattaagccatgcatgtgtaagtatgaactaattcagactgtgaaactgcgaatggctcattaaatcagttatagtttgtttgatggtatctactactcggataaccgtagtaattctagagctaatacgtgcaacaaaccccgacttctggaagggatgcatttattagataaaaggtcaacacaggctctgcctgttgctttgatgattcatgataactcgtcggatcgcacggcctttgtgccggcgacgc

SEQ ID NO: 196263 - DNA, 284 bp, Glycine max
tgcgtacattgtgagacaggctgctaagagcattgtggcaagtggactagccagaaggtgcattgtgcaagtgtcttatgccattggtgtgcccgagcctttgtctgtctttgttgacacctatggcaccgggaagatccatgataaggagattctcaacattgtgaaggagaactttgatttcaggcacggtatgatctccatcaaccttgatctcaagaggggtgggaataacaggttcttgaagactgctgcatatggacacttcggcagagaggaccctg

SEQ ID NO: 196264 - DNA, 288 bp, Glycine max
tattgaatcattcatatttttgataaatgcataaaacctattcaaactatcaaaatagaaagctaaattctacaaaaaacctcctacggggtcttaggataaacaaattggattaaattaatgagtccgtttttacgttatttcgcactgtattgtacaattcctttatttgtgggattcatttctcacacgataattcattaaattatagaatggatttttacctatgcctagatctcggataaatgaaaattttattgataaaaccttttcaattgtagccaatat

SEQ ID NO: 196265 - DNA, 246 bp, Glycine max
cttcttttcacactgacgctgcaacaatggcttcagagaagaaactttcgaacccaatgagggagataaaagtgcagaagctcgttctcaatatctctgttggcgagagtggagatcgtctcaccagagccgccaaggttcacttcactcattgctcccgctttttttttttctaaatttttaatttcggttttcctccttgcaggtgttggaacaacttagtggccaaaccccagtgttttccaa

SEQ ID NO: 196266 - DNA, 287 bp, Glycine max
ctctcctcgccgtttctctcatcgctagtttcaagtctccttgtgacaatggtgagggttagtgtgttgaatgatgctctgaagagcatgtacaacgccgagaaacgggggaagcgccaagtcatgattaggccgtcctcgaaggtcataataaaattcctcttggtgatgcagaagcatgggtacattggtgagttcgagtatgttgatgaccacagggctgggaaaatcgtggttgaattgaatggcaggctgaataagtgtggggttataagccctcgctttga

SEQ ID NO: 196267 - DNA, 278 bp, Glycine max
gagacattaaatggacaggaggttgtaattaaagtacaaaggcctggtctcaaggatctttctgatattgatcttaaaaacctgagggttatcgctgaatatcattctacaatcgctccacaatcagatggcgcaaagagggattgggttgctatttatgatgaatgcgcctctgtcttatatcaggagattgattacaccaaggaggctgctagtgcagaattgtctgcaagtaactttaagaacatggattatgtgaaagttcctacaatctactg

SEQ ID NO: 196268 - DNA, 285 bp, Glycine max
gcctcaggtaagcaaaagccatggttaagcataacaatgttatccccaacggacacttccgtaagcactggcagaactatgtgaagacctggttcaatcagccagcacggaagacaagaagacggttggctcgtcagaagaaagctgtgaagattttccccagacctacagctggacctcttagacccattgtacatggtcaaactttgaaatacaacatgaaagtgagagctggaaggggattttcccttgaagaactcaaggcagcagggattcccaaaaagc

SEQ ID NO: 196269 - DNA, 283 bp, Glycine max
ctcagagcacttgcttcttgcagcatcaaaatgggcttctctctgttaccagaagcacatccttgcattttgttcttggctctgctgttttgtacttgcttcacttcgacagatgcttatgatccgcttgacccaaatgggaatatcacaatccaatgggatattataagctgtacccctgatggatatgtggctgttgttacgatgaacaacttccaacaatatcgtcatatcgcttcacctggctggtcaatgggatggacatgggcgaaaaaggaggtaa

SEQ ID NO: 196270 - DNA, 276 bp, Glycine max
cttgagatccccattttctccgaagcaaagccatggctaagggtcctggtctctactctgacatcggcaagaaagctagggatctgctgttcaaggactaccacagtgaccagaagttcaccatcaccacctactcaccgactggagtggctattacagcatcaggaaccaggaaaagtgaactgtttcttcctgatgtcaacacccagttgaagaacaataacatcactactgatatcaaagttgatacagattctaatctcttcacaactatca

SEQ ID NO: 196271 - DNA, 286 bp, Glycine max
ggacgctgacggaaagatcaagaagggcgccggaggaagaaatggcggcggccctaagaagaagccggtttcaaggtccgtcaaggccggtctccaattccccgtcggaagaattggccgttatttgaagaaaggaaggtacgcccagcgtgtcggtaccggtgctcccgtttacttggccgcagttctcgagtacctagctgctgaggtgcttgagttggctgggaatgctgcacgtgacaacaagaagaacaggattattcagagacatgtgctgttggctgta

SEQ ID NO: 196272 - DNA, 283 bp, Glycine max
agaccaaccttgtgccctaccctaggatccacttcatgctttcgtcctatgctccggttatctctgccgccaaggcctaccacgagcagttgtcggtgccggagatcaccaatgccgtgttcgagcccgccagcatgatggccaagtgtgatccaaggcacggcaagtacatggcttgctgcttgatgtaccgtggtgatgttgtccctaaggatgtcaatgctgctgttgccaccatcaagactaagaggactgttcagtttgttgattggtgtccactgga

SEQ ID NO: 196273 - DNA, 289 bp, Glycine max
  unsure (1)..(289): unsure at all n locations
ctttaggttgggatttgggaattagggttattcgcgtggcgaagatgattgacgtggttttgaacgatcgattggggaagaaggtgcgcgtgaagtgcaacgacgatgataccatcggcgacctgcagaagcttgtcgcggctcagactggcacaagagccgacaagatccgcatccagaagtggtacaccatctacaaggatcacatcactctcaaggattacgagatccatgacggcatgggtctcgaactctactacaactagacacaacaaggtgtngtttatgc

SEQ ID NO: 196274 - DNA, 287 bp, Glycine max
tcgaccttgtatgatgaatgggttaacaagggcaatgcaccggcactgcgcgagactcttaagaattacaacaagctggtgtctcttggcttcaagattatattcttgtcaggaagaacactggacaaacaggccgtaacagaagcacacttaaagaaggctggctaccacacatgggaagaatacattctcaaggatccacaagatccttgcactccaaatgcagtttcatacataacagcagcgagagagaaactgataaggcagggatacaacattgttgggat

SEQ ID NO: 196275 - DNA, 288 bp, Glycine max
caaaaatctcccttctaaccttattcttcttctcgtccttcaccatcattgcgcatgcaattgttcctcaaaacgaaaccttcaaatttgagaactcaggtgaacttggaccctacatcgttgagtacggtgcagattacagaatgataagcatcttcaactctccattccaagttggtttctacaacaccaccccaaatgccttcactctagctttgcgtgtagggctccaacgctcggagcagctatttcgttgggtttgggaggccaatagggccaacccagttg

SEQ ID NO: 196276 - DNA, 274 bp, Glycine max
ctcgaacgctcgagcgattcggctcagggactgcagccgtagaaggaaaaccgaaatcggtgcacgtctccttttacaggaactatggtactacgtttaagaagccccgccgtccgtacgagaaggagcgtctagacgcggagctgaagctggtgggggagtacgggctgcggtgcaagagggagctgtggagggtgcagtacgcgctcagccgcatccgcaacaacgcgcggaatctccttaccctcgacgagaagaacacgcgccggatctt

SEQ ID NO: 196277 - DNA, 263 bp, Glycine max
gtccccgctgcgtctctcgtaatcatgcctaagcaaatccacgagattaaggatttccttctcactgccagaaggaaggatgcgaggtcagtgaagatcaagaggagcagagatgtggttaagttcaaggtcagatgctccaagtacctctacacactttgtgtgtttcgacccagagaaagatgataaattgaagcaatctcttcctccaggtttgagtgttcaagacctgtaaaggtactgggcgagagatcaagaagaag

SEQ ID NO: 196278 - DNA, 284 bp, Glycine max
gtttcgctctcacaatggactccctctctctcttatgcaccggatgccttctcgccggcggcctctaacggttcgtctgtattctggggcccgccgagcagaagggcaaacgcgccaccgatctatacggcggctccatctccgccgagaaagtccaagacaactacaagcagtactggtccttcttccgccgccccaaggagatcgagaccgccgacaaagttcccgacttcgtcgacaccttctagaatctagtcaccgacatctacgagtggggctggggc

SEQ ID NO: 196279 - DNA, 282 bp, Glycine max
atcttagtcgcaattttctagggttttattcattttccgatggattctgcagatgttgagtaccgttgctttgtcggtgggctcgttcggcaactgacgaccatgccctcgacatagccttctctcagtacggcgaaatcgttgaaacgaggattatcaacgatcgtgagaatggcagatccaggggttttggatttgtgaccttcgcctcggagcagtccatgaaagatgcgatcggagcgatgaatggacagaacttggacggccgtaatatcactgtca

SEQ ID NO: 196280 - DNA, 285 bp, Glycine max
caccgtggtggccgccgaagaaggagagtagagagcgcaatcgagtcttcatcttcgactcaccatgaagctcgtcaggtttttaatgaagttgaacaatgaaaccgtgtcaattgagctcaagaatggcactattgttcatggcaccattacaggtgttgatatcagtatgaacacacatttgaaaacagttaaactaactctgaaagggaaaaatccagtcactctagatcatctcagtgtgaggggtaacaacatccgttactatattcttcctgacagctt

SEQ ID NO: 196281 - DNA, 286 bp, Glycine max
attttgatgggcaggaggctaagccatacaagaatgaccctgaacattttggcaatgacaaacttgatagcagcctatcagcggaatgaaatattggaatttgagaaaatcttgaagagtaacagaagaaccatcatggatgatccatttatcagaaactacattgaggatctgctaaagaatatcagaactcaagtcttgctgaagctcatcaaaccatatacaaggatcaggattccgtttatatccaaggaacttaatgtgcctgagcatgatgttgagcatt

SEQ ID NO: 196282 - DNA, 284 bp, Glycine max
tgaaaataaccctaagactcaagagcagcttggtaaaggttccaaaaaccattgtgaagagtctctagttacaaatacacaagttaacagtgacttcgaacccataccaagtgttaccaaatatgatgatttggaattcaagtcaagcattatcaagaacgatgattttgaatcgagaccaagtgttactaagtatgatgattttgaactcaagtcaagcgttaccaagaacaatgattttgaaccgagaccaagtgctaccaaatatgatgattttgaactca

SEQ ID NO: 196283 - DNA, 281 bp, Glycine max
tgaaaacactgacactgttattctctgaattttctcaccatctacaactgaagttttaaccaatatggagactgaaaagtctaatgtttcaaaggctgaagaatttaaactccttgccaatgaagtgatcaatgctcgagaatactcccaagccattgatctatatacacaagcaattgagctgaacagtcaaaatgcagtttacttttctaatcgtgcctttgcccatcttcggcttgaggaatatggtagtgcaatacaagatgccacaaaggctattg

SEQ ID NO: 196284 - DNA, 261 bp, Glycine max
taagattcaaaaagatagtgaagtgagactagagataattgggactcgagtggatgctacagaaattttctgcataggtaccataaaagatgatttcttgggtgtgatcaacgaccctgcaacagtttaaatacccctttctgtactattgtatcgtatatagtttgcatgacttggatttttacaccttaatccgattcagatattatgttttcttactcgattgttgaaagtactaagtcgttgagtttttagttccac

SEQ ID NO: 196285 - DNA, 286 bp, Glycine max
ggtatgtgttagtacatggaacgtaggtgggattgcaccggatgaagatttgaatatagatgatttgttggagacatgcaacaactcttgtgacatctatatactagggtttcaataaatagtgcctctaaaagcatcaaatgtattggggtccgaaaacaatgagatttctatgaaatggaattccataatcagggaagccttgaacaagaaaataacacatcaaagggacaaagatgctaaaaaacaggagctaaagaataattttcccaataagaaagaaaat

SEQ ID NO: 196286 - DNA, 285 bp, Glycine max
gatcggatagagctcgagccgaaaaattaagatggcgtggaaggagcaggatgtgtcgctgggatcgaacaacttcccggagagacagccgattcggacggctgcgcagagccaagacgacggcaacgactaccacgagcacggcgcggcgccactggttgacccgacggagtttacgtcatggtgcttttacagagcagggatagcagagtttgtggccacttttctgtttctatacatcactgtcttaaccgtcatgggagtcgccggggctagtctaagtgc

SEQ ID NO: 196287 - DNA, 268 bp, Glycine max
ggaagacttggcaacaacttaccaacccctcacgaagttgtggccctctacaatcaagccaacattcgcaggatgcgaatctacggtccagcacctttgttcgacccagaggagctcacacagtggtccttctatagagccctcatcgctgagttcatagcaacccctgtggatggagtgcctagcccagatgacattgctggtcctgaaccattcaagtttcagtttgatagacttggtgttagggttcctaccatcattatttctc

SEQ ID NO: 196288 - DNA, 266 bp, Glycine max
cggcttccaaatcaacggacacattattagttgggccaactggaagttccatattggatttgatccacgtgccggaattgtaatatcactggcatccatttatgatttggagaagcacaaatctcgtagagtgttatacaaaggttacatttctgagctgtttgtgccataccaagacccaacagatgatttttactataagactttctttgatgctggagagtttgggtttggtctctccacggtctcattggtgcccaaccgtg

SEQ ID NO: 196289 - DNA, 266 bp, Glycine max
ctcagactgttgtcctcaaagttggtatgtcatgtgaaggatgtgttggagcagtgaagagagttctaggaaaattggatggtgtggaatcatatgacattgatttgaaggaacaaaaggtggtagtgaaaggaaatgtccagccagacacagttctgcagaccgtttccaaaactgggaagaagactacctttcgggaaggtgaagcagcaacatctgaaactagcacagcaactgcctaaaacatttgcctctattctgtgcag

SEQ ID NO: 196290 - DNA, 265 bp, Glycine max
gccacaacagctatacactcgcgcgaagaccgaggaattcgacctcgaatcaggagaaaccctctacccagggctgagcgtcggcgagaaccagctccgatggggtttcatccgcaaggtctacggcatcctctccgcgcagatcgtcctcaccaccctcgtctccgtcaccaccgttttctatactccaatcaatgacctcctcaagggcaattccaccctcctcctcatcctcctcttccttcccttcatctttttgattccc

SEQ ID NO: 196291 - DNA, 264 bp, Glycine max
gctagctcgcacattaagttatataacacatatttgcttgcttagaaatactattattgaagatatggggagtgtagattatgagtaccctttgggcatgaacaactttgagagagtgccccaagtcgaggttccaccgccacagccgttcttcaagtctctaaagtactccttgaaggagactttcttccctgatgaccctttgaggcagttcacgaacaagccagcttccaagaagttcatgcttggccttcagttcttctt

SEQ ID NO: 196292 - DNA, 261 bp, Glycine max
cgtaaaaactccccaactctctcatgatgcacggtagaaacaatggcaagaaactcttggctgttaggatcatcaaacatgctatggagattattcatttgttgactgaccagaatcccattcaggttattgttgaagctgttgtcaacagtggtccacgtgaagatgcaacaagaattggttcagctggagttgttaggagacaggctgtggatatctcaccccttaggcgtgttaaccaggctatctatcttctaacaa

SEQ ID NO: 196293 - DNA, 262 bp, Glycine max
cctttttcttcttccactaatcatcatagttctggataagcattcatgtactcatctctagcttcaaaccactcaaatcttctaaaaatcccccggggcctcacccttttccaatcataggaaacatattggagcttggcaaccagcctcaccaagcacttgccaaactttctcaaatttatggtcctataatgagtcttaagctcggtaacactaccaccatagtcatttcctctccacaagttgccaaagaagtactgca

SEQ ID NO: 196294 - DNA, 257 bp, Glycine max
  unsure (1)..(257): unsure at all n locations
cgcgcagagctaaaccgcgatctctcgaactcttgaggggcgtttccacttcttgtttgagctggcgnttccacttcttgttagatagggcttctttctcgttggatgagctggttgatattttgaacgtgccagtggccttgatgatagccgactcggcgtgctccaagagccaccggatggtcttgccgtcgaacttgtggtcgatctcttgggtcagctggaagatccgggcgacgcaggcgttggtctacggc

SEQ ID NO: 196295 - DNA, 194 bp, Glycine max
ctttcctgtgttcaatttcgattctctcgttaatttaataagatgtttgggagggcaccgaagaagtagcgataatacgaggtatcacgaaatcctcggcgtctccaagaacgcttcgcatgatgatctgaagaaggcttacaagaaagccgccattaagtatcaccccgacaagggcggtgatcccgagaagt

SEQ ID NO: 196296 - DNA, 264 bp, Glycine max
cagaaatgctgctcatatggtgctggctgcaacaagttaatgaatggaatagtgaaaactgcaccagtgtgagtgctcttgatacattaccatatcagctggttgtacatcatctagaattatggccatacttcttagggacaagttttggtaattttaaggagataccgtgttaatggtgactaatattttattctgtaatcttcaaatagaggaccagaagggggaataaaattgaaaaccatgttgtctttgtttgagtca

SEQ ID NO: 196297 - DNA, 264 bp, Glycine max
gtaattctagagctaatacgtgcaacaaaccccgacttctggaagggatgcatttattagataaaaggtcaacacaggctctgcctgttgctttgatgattcatgataactcgtcggatcgcacggcctttgtgccggcgacgcatcattcaaatttctgccctatcaactttcgatggtaggatagtggcctaccatggtggtgacgggtgacggagaattagggttcgattccggagagggagcctgagaaacggctaccac

SEQ ID NO: 196298 - DNA, 267 bp, Glycine max
cgcgggttactgtctgttcaagctaccatctctctctctctttcttagtgcctccgtgccagaagttaaaatggcccaagaaactttcctattcacatctgaatcagtgaacgaggggcaccctgacaagctctgtgaccagatctccgatgctgtgcctcgatgcatgcttggagcaggaccctgacagcaaggttgcctgtgaaacctgcaccaagaccaacatggtgatggttttcggagagctcacaaccaaggccaacgtgg

SEQ ID NO: 196299 - DNA, 264 bp, Glycine max
ctcactcacaactcagtgaaagagaatccgaggcgaagagaagagaaaaattaagatggaggggaaggagcaggatgtgtcgctgggagcgaacaagttcccggagagacagccgattgggacggcggcgcagagccaagacgacggcaaggactaccaggagccggcgccggcgccactggttgacccgacggagtttacgtcatggtccttttacagagcagggatagcagagtttgtggccacttttctgtttctatacat

SEQ ID NO: 196300 - DNA, 264 bp, Glycine max
cgggctcgctctttcgtgtttttgttcgcgaaggaaactctatccttagctatcgcgatggatcggtaccagaaggtggagaagccaagagctgaaactccaatcgatgaaaacgagatccggattactagtcagggaaggatgcgcaactacattacttatgccatgagcttgcttcaggagaaaggttctaatgaaattgttttcaaagcaatggggagagctatcaacaaaaccgtgacaattgtggagttgatcaagagg

SEQ ID NO: 196301 - DNA, 228 bp, Glycine max
attaacctccgcatttgttactgattttccaggtgtgaatggtcttggtgtatctgtggcacggttagacatagccaaaggtggatcaatcccaatgcacacacaccctgctgttactgaacttcttctaatggtggaaggtcaaatcactgctggttttatgaccccaactgcactttataccaagacactgaaacctggagatattatggtttttccacacaacat

SEQ ID NO: 196302 - DNA, 257 bp, Glycine max
gagacatttagggctcgttataattcggtgaagggtgcaaaagttgtcattgataggctaactggccggaccaagggatatggctttgtaaggttttcagatgagagtgagcaagtgagggctatgactgagatgcaaggggttctttgctcaacaagacccatgaggattggacccgcctctaataaaacccccaccactcagtcccagcccaaagcttcatatcagaattctcaacctcaaggttcacagaatga

SEQ ID NO: 196303 - DNA, 256 bp, Glycine max
cttggtgatgtccctttctgttctcttcactcttggtcttgcgagagaaagccatgccagagtcgaagattgttggcatgctgtttggccaaacactcccattccaagttcattacgagcccatcccaagcctggccctgcaagtgttgaaatcgatgatcaccctatgcaaattgaagatacacagtacccgaaaaccttcttctataaagaagaccttcatccaggcaaaacaatgaacgtacaattcagcaag

SEQ ID NO: 196304 - DNA, 262 bp, Glycine max
cgccaaacactcccattccaagttcattgcgagagcttctaaagcctggccctgcaagtgttgaaatcgatgatcaccctatgcaaattgaagaaacacagtacccgaaaaccttcttctataaagaagaccttcatccaggcaaaacaatgaaagtacaattcagcaagcctccctttcaacaaccatggggtgttggtacatggttaaaggaaattaaagacactactaaagaaggatatagtttttgtagagctatgca

SEQ ID NO: 196305 - DNA, 259 bp, Glycine max
cctcgagcgattcggctcactctcacacacactttctcgctctctctctctcacccagatcttgtagcaaagcgcgagcgctcccactccacgcgaagagttcgtgtacatggcgaactggcggacaggccgagcgctacgaggagatggtggagttcatggagaaggtctccgcctccgccgagagcgaggagctgaccgtggaggagcgtaacctcctctccgtcgcctacaagaacgtgatcggcgctcgccgcgc

SEQ ID NO: 196306 - DNA, 262 bp, Glycine max
cggtgctgagatcattggaacctttgttttggtctacactgtgttctctgcaactgaccccaagaggaatgctagagattctcatgtgccggttttggctccacttccaattggctttgctgtgttcatggttcacttggcaaccatcccagtaacaggcactggcattaaccctgctaggagtctaggagctgctgtcatgtacaaccaacagaaggcctgggatgaccattggatcttttgggttggaccatttattgga

SEQ ID NO: 196307 - DNA, 262 bp, Glycine max
cgattggaggaacaccactgaacttaagcgcgtgttcttccattcaggcaagtccacaatcctcgtcatacccgagtcctgtaccatcctaccatgctagcccaacctcttcctcgttcccaagccccacgcgcattgacggaaaccacccttcttcctttctcatcccattcatccgcaacataacttccatccccgccaacctccctcctctcaggatatccaacagcgcccccgtcaccccacctctttcttctccccg

SEQ ID NO: 196308 - DNA, 260 bp, Glycine max
ctcgagcgattcggctcagatgttttccaatacataaaacgtgcagatggaaacatgtctggtcctcctggcgatgttgcaaattccctcatggacggctattccaagggtaataatgaagtgagacgtaggtctagattcttacgtagaagaggaagagtccgtcgattgaagtacacctggaaatctgctgcttatcattcaattaggaaaaggattacagagagaaaggatcaaccctgccgacagtataatccatg

SEQ ID NO: 196309 - DNA, 210 bp, Glycine max
gcatatgtgaacactgctgtttgagaaggccttaggatgtatgcaggcattgcaaagacggaagcataacgggcaacggttctgatagaaacacttcctgcagtgtctcagctggatgaaattctatatgagctgaaagagcattctgtgggtctaaactgtgggcgttgggattacattttcagttatgttaaaaccttccagactcac

SEQ ID NO: 196310 - DNA, 260 bp, Glycine max
cttcttcttcctccctctatcttgggaagggcttctcccatcgcaaattgtctcccagttatcacattcacaacaccattgacgtatactatgcagttatcttcgatgctggtagcacgggaagccgtgtacatgtctatcgttttaaccaacaattagatctccttcgcattggccaagaccttgagttgtttgtcaagactatgccaggtttaagtgcttacgctgagaatccacaagatgctgcagaatctcttatt

SEQ ID NO: 196311 - DNA, 261 bp, Glycine max
ggaaaaccctaagacatgaagagaactcctatattgttccctctcttctttcttctttgtgccttcacctcatatctaccttcagccaccgctgatgatgatcatgtgtacgacactgacggcgataagcttcaatacggtgtcaattatttcgtgttgccagtgataagaggaaatggcggtggaatacaagtagcaaaagcaggaaacgaaacctgccctctgactgtggtgcaatctggcaacgagctctctgagggg

SEQ ID NO: 196312 - DNA, 260 bp, Glycine max
ctttctaactaattattgtgcttattattattgttgagaaagaaaagaatggcaaagttaataaaattctttgagttgaacacaggggccaagattccttctgttgggttaggcacttggcaagctgagcctggtgttgtagccaaagctgtcaccacagccattctggttggatacaggcatattgattgtgctcaagcgtataacaatcaagcagagattggttctgctcttaagaagctttttgatgatggtgtggt

SEQ ID NO: 196313 - DNA, 259 bp, Glycine max
tgaattgtcaatgactgtggatccatccaacaccacagcagtgcacactgctgcattacaagggcatactgagatagtaaagcttctattggaagcaggtagtaatctggcaaccattgctagaagtaatgggaaaacagctttgcattctgctgcgagaaatggacatttggaggttgtgaaagcgctattggggaaggagcctgtggttgcaacgcggacagataagaagggacagacagcacttcacatggcagtg

SEQ ID NO: 196314 - DNA, 194 bp, Glycine max
cgatttagaagtgagagaagatggggttctcgttcacgaagctgttcagcaggttgtttgcgaagaaggaaatgaggattctgatggtaggtctcgatgctgctggtaagacaaccatcttgtacaagctcaagcttggagaaatcgtcaccactatccccaccatcggatttaatgttgagactgtggagtac

SEQ ID NO: 196315 - DNA, 253 bp, Glycine max
ggaaaatacagaaattagcgtgaaaaatgttgggtgtgttcagcagctccatagtgtcgccgccggaggagctcgttgccgccggcagccgtacaccgtcgccgaagatgacggcggcggcgctgcggaagtggttcgaggagaagaacccctccgcagtgtcggtggaggtcggagagcatgtccagctcgcttatacccaccagaacgagtcgccgtttcagcccagatcctttgctgtgaaggatgaggt

SEQ ID NO: 196316 - DNA, 260 bp, Glycine max
  unsure (1)..(260): unsure at all n locations
agagtccaacctttcattttcaattttcaaagatgcctcgtggaacacttgaagttgttctgatcagcgccanaggaatcgatgacaatgattttctctccagcatagatccttatgtgattctcacatacagggcacaggagaaaaagagcactgtgcaagaagatgctggatccaagccacaatggaatgagagctttcttttcactgtctctgacagtgcttctgaacttaatctgaagataatggataaagacaac

SEQ ID NO: 196317 - DNA, 259 bp, Glycine max
gcttggcggaatcagcggggaaagaagaccctgttgagcttgactctagtccgactttgtgaaatgacttgagaggtgtaggataagtgggagctggaaacagcgaaagtgaaataccactacttttaacgttattttacttattccgtgaatcggaagcggggcactgcccctctttttggacccaaggtcggcttcggccggtcgatccgggcggaagacattgtcaggtgaggaatttgacagcaagtgggccaag

SEQ ID NO: 196318 - DNA, 191 bp, Glycine max
tcgtttcgatcttcgatctctgaaaatgagagagtgcatttcaatccacatcggtcaggccggtattcaggtcggaaacgcctgctgggagctctactgcctcgaacacggcattcagcctgatgggcagatgccaagtgataagactgttggtggaggtgatgatgctttcaacaccttcttcagtgaaa

SEQ ID NO: 196319 - DNA, 257 bp, Glycine max
cgagaaagagagagagagagagagaaactgagagaaattcgcaaaccctaatttcggaaagatcggcgatggctgcctccaaggatcgcgagaacttcgtctacatcgccaagctcgccgaacaggccgagcgatacgaagagatggtggaatcaatgaagaacgttgcgaatctcgacgttgaactgactgtggaggagcggaatttactttctgttgggtacaagaatgtgattggtgctcggagacatcgtgga

SEQ ID NO: 196320 - DNA, 182 bp, Glycine max
cagggtcttttcataagtctgaaagagaaggggaaggttcttgaagtattgaaaaactggcctgagaggagtattcaagttattgttgtaacagatggcgaacgaattttgggacttggggatcttggatgtcaggggatgggaattcctgttggtaaattggccttgtacacagcactagg

SEQ ID NO: 196321 - DNA, 259 bp, Glycine max
ctgtcaccgttccgttccgttttcctctgttttttttttcttctctttcaaatccccgcttcgtggaaatcccgaaccagaaaccatgcttctccgaaccgctgctgcttctgcttcgtccctctccctcttcagcccgaacgccgaacctccccgttcggttcccgctcgtggattggtggttcgcgcagcaaaggatccacgaaccaccgttccctgaccggagtgatttttgaaccgttcgaagaggtgaagaagg

SEQ ID NO: 196322 - DNA, 258 bp, Glycine max
gttcagtatgtgatttactatgttctgaccaacgtaaaagactaatggaaattgttggctccatctttcatggaaagctcaatattctagtgaacaatgctgctacaaatataacaaagaagataacagattacacagcagaggatatatcagccataatgggcaccaattttgagtccgtttaccatttgtgtcaagttgcacacccacttctaaaagattctgggaatgggagcatagtatttatttcttccgtag

SEQ ID NO: 196323 - DNA, 251 bp, Glycine max
ggcgtagtaagcgacgaaatgcttcggggagttgaaaataagcgtagatccggggattcccgatataggtcaacctttcgaactgctgctgaatccacgggcaggcaagagacaacctggtgaactgaaacatcttagtagccagaggaaaagaaagcaaaagcgattcccgtagtagcggcgagcgaaatgggagcagcctaaaccgtgaaaacggggttgtgggagagctatacaagtgtcgtgctgct

SEQ ID NO: 196324 - DNA, 251 bp, Glycine max
ctcgagccgctcgagccgtggatgtccatctggccaaacagccaccatagttcttcgtggtggagatgatcagttcatagaggaagcagagcgaagtttgcatgatgcaatcatgattgttaggagggctttgaagaattcaacagtggttgctgggggaggtgcaatagatatggagataagccggtacctgaggcagcatgcacgtacaatagctggaaagtctcagcttttcattaactcctatgcaa

SEQ ID NO: 196325 - DNA, 253 bp, Glycine max
gcatagccttaaagttaagggcgaggttcaaacgaagaaaggcttatggtggatacctaggcacccagagacgaggaagggcgtagtaagcgacgaaatgcttcggggagttgaaaataagcgtagatccggggattcccgatataggtcaacctttcgaactgctgctgaatccacgggcaggcaagagacaacctggtgaactgaaacatcttagtagccagaggaaaagaaagcaaaagcgattcccgta

SEQ ID NO: 196326 - DNA, 276 bp, Glycine max
gccgcatcctcaacgtgaagaatatggtcctgttagcgaagtctacgtgccttcgagcgaaggagttgaagcttatatttggttattggcaaaggcttatgttgttgtaaatgactcgtgctaccatcaactcgttagccattggctaaacactcatgcggttgttgagccattcgtcatagcaacaaataggcatctgagtgtggttcaccctatttacaaacttttgtttcctcactatcgtgacaccatgaatattaattcacttgcccgcaa

SEQ ID NO: 196327 - DNA, 266 bp, Glycine max
cttgatgcttcataagtcgtcatcatcatcatcatcatcaccgttgattgaagaagatgacgatcagaaacatcgccatctgaacgcatgaagacgataatcaccacgatacgttgaaggagacgttggatgtcttcatctccacattgatcttcgagttcgatggttcatgttacggcatcgcatacaacaagctcaacgataacggcgccgccactctcgtcggcctcatctccgcttacatctcccatgatttcggactcttc

SEQ ID NO: 196328 - DNA, 275 bp, Glycine max
gaaaaattcacctctccaatcccaatcccatcgttgcaaatgatccgattcattctgttgcacaacaggcagggcaagacccgtcttgccaaatactacgttcctctcgatgactccgagaagcacaaggtcgaatacgatgctcaacggctcgtcgtaaacagagaccctaaatacacaaatttcgtcgagtttcgtacgcacaagataatatacaggcgatatgctgggttatttttctcactctgtgttgatatcactgataatgagttggc

SEQ ID NO: 196329 - DNA, 274 bp, Glycine max
aggccacttctttgccagaggtggccaagcagagtgagctaggtggaacattcaagtactttcaagttcctttgtcgatgagcaagaccaatacactgtggaaggagtgcagaatcttggacacaaagcagtgatgtgtcataggctaaatttcagaactgcagtattttactgccatgaagtccgtgaaacaacagctttcatggttacattggtgcgctggttatggaaccaaaactcaggcacttgctatttgccactcagatacttctgg

SEQ ID NO: 196330 - DNA, 275 bp, Glycine max
aggtcttccgaattcgaagttaatttgcaagatggctaaggaaaaggatcagatcaacattgtcgtggttggtcatgtggaccctgaggccgggaccaccattaacgagctgaagaagcctgttgtggagaaagaagctccagggcatgccatatgagggcatgcacgtacggcctcggaggggaaccagaaaattatgttaacaaaataatctggaaccctaatgtatcagtgtcatcatcagtgtgtagtttaagctagctttgctatggtta

SEQ ID NO: 196331 - DNA, 275 bp, Glycine max
agttggtctttatatttagttattgacatcaacaaagtcatggaggaagttaatgtggttcaaacccagaatcgaactgtttcagtagcttctgcgtttgctggccataaggaagctatacagcaaagggaccacaaatttttaagaattgctgttgaagaagcgtataaaggggtagactgtgaacatgggggtccctttggtgctattatagtttgtaatgatgaaattgttgctagatgtcacaacatggttctgaggaacacaggccccac

SEQ ID NO: 196332 - DNA, 273 bp, Glycine max
agtcgagcgattcggctcagatcctaagtctttgggaatagcgctgcaatggcttagagtcaggacgaggtgacacttttgggagctactggaagcccatttgcgtgcagggttcatattgccctcaagttgaagggagttcaatacaaatatgtcgaagaaaatttgaggaacaagagtgaactgcttctcaaatccaacccagttcacaagaaggttccagtgtttattcacaatgaggagcccatagcagagtctcttgtgattgttgaa

SEQ ID NO: 196333 - DNA, 87 bp, Glycine max
cttcgttgctttgtgatgtccctttctgttctcttcactcttggtcttgcgagagatagccatgtcagagacgtagatttttggcat

SEQ ID NO: 196334 - DNA, 272 bp, Glycine max
ctatctctatcggtcatgggtgcttttgcttttgatgaggaaaactcctccaccgtggatccggcaacactctacaaagctctgacaaaagatgctgacactatcatcccaaagattattggggccatccaaactattgaaatcgttgaaggaaatggaggacccggaaccgtcaagaagataacagctagtgaaggtgaccaaaccagtttcgtgctgcaaaaagtggatgcaattgacgaggctaacttggtatacgactacagcatagt

SEQ ID NO: 196335 - DNA, 168 bp, Glycine max
ggctcgagtctctctcttccccctcatggcttagaccaatcagcaaaccgtcgattaccctagtttcgaactcgtcatcgtcggtgacggtggtacaggaaaaacaacgtacgcgaaaaggcatcttaccggtgaatttgagaagaaatacgaaacgaccattggagt

SEQ ID NO: 196336 - DNA, 268 bp, Glycine max
aaattatggcacctgtcttttctcgtgaagcttggcgttgtgtgtggcacatgattcagaatgatctagtgcatggatggggattggactttgctctcagaagatgtgtagagccagcacatgaaaaaattggtgtaattgattcacaatggattgttcatcaagtaattccttctcttgggaaccaggttagacctcactagcttacaatatagttagggccacttattttctttgatgatatcattttaaattgagtgtgttttta

SEQ ID NO: 196337 - DNA, 271 bp, Glycine max
gtttaccacgaccacttctacatttaccatcttgaccttgacattgatggtgttgccaactcttttgagaagacaagtttgaagactgtaagagtgacagatgcgagttcgaagaggaaaagctattggacaactgaggttgaagctgccaagactgaaaatgatgcaaagataatacttgggttgagccctggtgagctttcagtggtgaatcctaacaagaaaacctctgttgggcatgatgtgggataccgtttgattccagcaatcc

SEQ ID NO: 196338 - DNA, 270 bp, Glycine max
aaccgaccgattcggctcaggccatggtaggcggaaccatgaccgctgcgtatttgccactatccatgcccacttcaccacagtcccccaccagctacgaggaacgagatgcagaaatctgaaaacttcttgctccgttaacagacccaaaattccaatgccccctctcaaccctaaagacccctttctctccaagctcgcttccgtcgctgcttcttcccctgaaacgctcctcaacactcccaaaaactccgacacccttccttatct

SEQ ID NO: 196339 - DNA, 267 bp, Glycine max
tgcactctgtgttttcagcgccgtctccgatctccgacaatggcgacccagatgagcaagaagagagagttcgtagctgatggagtgtactacgctgaagtcaacgaggttctgacaagagagttcgacgaggacggttactccgtcgtggaagttagggttacgccgttgcgcaccgaagtcgtaattggagccaccagaaccctagctagttctcgttgagaagggaaggagaatgacggagcttacatctgtggttcagagtag

SEQ ID NO: 196340 - DNA, 117 bp, Glycine max
ggctcgagcagcaatggtgtacgtcaaggctcagagatcaaaagcctacttcaagaggttcaagtcaagttcaagagaagaagagagggaaaaaccggttaccgtgccaggattcgg

SEQ ID NO: 196341 - DNA, 266 bp, Glycine max
ctggttctgaagaggacgatgaggggttcgactcttaccggaaaggagggtaccacgccgtaagagtcgccgaccagttcgccggcggcaggtacatggcgcagaggaagctcggctggggccagttttcaacagtttggcttgcctatgagcctactacatctgccgctgtcgctctcaagatccagaaaagtgcggcccagtttgttcaggctgcccttcatgaaattgatgttcttacatccctttctgatggtgccgacatg

SEQ ID NO: 196342 - DNA, 266 bp, Glycine max
cggctcgaggccagtattcatatgcttgtctcaaagattaagccatgcatgtgtaagtatgaactaattcagactgtgaaactgcgaatggctcattaaatcagttatagtttgtttgatggtatctactactcggataaccgtagtaattcttgagctaatacgtgcaacaaaccccgacttctggaagggatgcatttattagataaaaggtcaacacaggctctgcctgttgctttgatgattcatgataactcgtcggatcg

SEQ ID NO: 196343 - DNA, 271 bp, Glycine max
cacggctgcgagaagacgacagaagggggcatcaattcaaaatatatcatcaattataagcatggtgtttgtggaacacaacgaatgcagtgtcttgccgctttcacaagtttggtgatgatcaaaagaatctggtctccaaggtgatgccacgtcttcttccaggggcatagaactcacaaagttagacggtggaggaaaaccagtgggtggcagtgtggggagagtgttatactcttctccagtgcacctttgggaaagctctacagtg

SEQ ID NO: 196344 - DNA, 267 bp, Glycine max
acggctgcgagaagacgacagatgggggaagagagatagggcggttgcaattgcatagagaagtgcagagagagcgcactaaacgactcagtcaaacagtcggtaactctttcttttcttttctttctttctccgtcgcatcgctcgcaaccacaatcatgccttcccgtagaagaactctcttgaaggtcatcattctcggtgacagcggggtggggaagacgtctttgatgaacaagatgtgaataagaagtttagtaatcagta

SEQ ID NO: 196345 - DNA, 267 bp, Glycine max
cggctcgagcggctcgagacggctgcgagagacgacagaagggggggctattttcactgcactgtgctggctatatcatggagagaaagggtcaagtatgtctgggtcaatctctgaatattccgcttatacatggtgatacaacctgattaaccagtccaaggttgttgtcctgaaacagaaaatttcacataaattatcagcctgtcgcatagacaaacaatttcagagaaatcttattaagtaaccacataagaaccggaaatt

SEQ ID NO: 196346 - DNA, 268 bp, Glycine max
tacggctgcgagaagacgacagaagggggagagaaaaaatggccaaatcaatcaaattctttgagttgaacacaggggccaagattccttctcttgggttagggacttggcaagctgaacctggtgttgtagctgagctctcaccacagccattcaggttggatacaggcatattgactgtgctagtgcgtataagaatcaagcagagattggttctgctcttaagaagctttttgatgatggtgtggtgaagcgtgaggacttatgg

SEQ ID NO: 196347 - DNA, 156 bp, Glycine max
tgttaattcatccatgttactggcatgcgtgaatctaaatcggaatgcacttgatccagaggatgcagaggaggtatatgacgactatgatgttaataatgtctctgataatctcagccattaggagtatgacaataggtcatataactactcatc

SEQ ID NO: 196348 - DNA, 266 bp, Glycine max
tgcgagaagacgacagaagggggcaaaagttagtagtagtgaagaaaatgaaagtccttgttttctttgttgctatagttctagcagcatggcattgccatggctcagaccatgaccatgaccatggccacacctccaaattttccctctgagaatgaaaaccggccatggtggccactacattccggaggtatcatgccaaagttggaggcttggtgtggaagcacacaacgtcattgactggaaaaccgttcctcaagattgcg

SEQ ID NO: 196349 - DNA, 262 bp, Glycine max
ctaggctgcgagaagacgacagaagggggtatcaagcaaattaacaataattcagaaatgttactgcaaacattagctatccctacaatactccttgcgatattcatatgggtggtacaaccaaagcaacgtatgggaagattgcaccaggtcccaaggcgttgccaattattggtaacctccacatgctagggaaactcccgcaccgcacccttcaaacctttgcaagaaaatatggacccataatgtccttgaagctagg

SEQ ID NO: 196350 - DNA, 266 bp, Glycine max
ccggctgcgagaagacgacagaaggggaacctttgacgtatcgaaaccttaagtttcggatcaggtctgagcaatctggttggtagaacctttggtcttagagagtcaagttttatgtctgaattagacgatcaattcctactgccttcgatccttttgctgatgcaaatgctgatgactcgggtgctgggtcaaaggagtatgtgcatattcgcgtacagcagcgaaatggaaggaaaagcctgacaaccgttcagggattgaaa

SEQ ID NO: 196351 - DNA, 265 bp, Glycine max
acggctgcgagaagacgacagacggggggagcagttgtgcttgggaagaacgctcgctcgcactgtccagatcttaatcaagaggagtgagttttgtttttccagccatgacgccgcttatcctgcatgctgggaaaccaacaaaaattcttacaagacactcattgcagccgagtatgctggcgtccaagttgattttgcccctaattttgagatgggtgtctccaataaaactcctgaatttctcaagatcaatcctattggc

SEQ ID NO: 196352 - DNA, 267 bp, Glycine max
tacggctgcgagaagacgacagatgggggcacaagtttgttgagatagctagaagcaataagatgaaaatgaaagtgcttgttttgtttgttgctacagttttagtagcatatgaatgccatggctcagactacagaagttccctctccaaatgaaaactgggtttggtgggcaatacagcaatgaggtggcatgtgccagttggaggcttggcgtggaagcaaacaacgtagtcaagtggcaaactgttcctgcagcttgcggaga

SEQ ID NO: 196353 - DNA, 264 bp, Glycine max
ctacgagaagacgacagatgggggcacaagtttgttgagatagctagaagcaataagatgaaaatgaaagtgcttgttttgtttgttgctacagttttggtagcatatgaatgccatggctcagactaccagagttccctctccaaatgaaaactgggtttggtgggcaatacagcaatgaggtggcatgtgccagttggaggcttggcgtggaagcaaacaacgtagtcaagtggcaaactgttcctgcagcttgcggagagt

SEQ ID NO: 196354 - DNA, 260 bp, Glycine max
cggctgcgagaagacgacagaagggcagttatcgatctacgagtctttgccattgatgatcagcatttgggtcatgcacctattccttttccacctccttgcttctctcatgttacaatcctcttgccgcgagctccctttctcctcggtccacagagacaaaatgtaagacaggtgccaacagttcatcacgaaagaaaggactagctgagccgagatcactaactaaaacgaatttaatactaatcgaaaatactaat

SEQ ID NO: 196355 - DNA, 258 bp, Glycine max
acgacagaagggtacggctgcgagaagacgacagaaggggagagaaagagagagaaagatgtcgaagcgtggtcgtggtggttcggcggggaacaagttccgcatgtcgctgggtcttccagtggcggcacggtgaactgcgccgacaacacgggggcgaagaacctctacatcatttcggtgaaagggatcaaaggccgtttgaaccgtcttccctcggcctgcgttggcgacatggtgatggccaccgtgaagaag

SEQ ID NO: 196356 - DNA, 273 bp, Glycine max
tccaaagtttgtatagtgtaggatttgttggtattcgtgataaaaacacctcatcctattcattttgccatgacgggcgaactccagataaaggttttgaaagtaatgagaaattattaattcatccatgttactggcttgtttgaatctaaatcgtaatgcacttgctccagaggaagcagaggagataaatgacgaatatgatattaatattatttcagataattcagccattagaaataaaacaataggtcaaataactactcatctaga

SEQ ID NO: 196357 - DNA, 273 bp, Glycine max
ctaaatggcaattggcacagttgatacgactggttgcttctcggggattttcataaccctgctgtgcaaaaattggatatgcgtttgaaatgggtgctcgaattattatatatatcatgatcgatatggaaatggatcgagtaacccttcctttatacaagaaaaagcatttctagtttgcatggtctaatcattgatcctgaaaatttctacaataagattaggtaggtcactcgcatagttccctatccaagtcggggaacccctttattc

SEQ ID NO: 196358 - DNA, 263 bp, Glycine max
tactcgagccgaatcggctcgagctgcgagaagacgacagatgggatcagcggtgcctcccaggataacaacataatgctgtacgaatgctgtcatatttggtcctgatgatactccatgggatggaggcacgtcaagttgactctccagtttactgaggattatccaaataaaccaccaactgtgcgatttgtgtctcgcatgtttcatccaaatatttatgctgatggaagtatttgtttggatatactacaaaatcagtg

SEQ ID NO: 196359 - DNA, 261 bp, Glycine max
cggctgcgcgaggacgagagatggggaagatgaggggaaggcacataagtaggaggcactccttgcaactggtagcaatagtgatactggctacattgctcatgctccatctgagtcaaacggtctatctgatgtactaatagagtagtcctattttaactggcgtctcggcacgcgcacgtggtctcgcagcagctgctgctgcagcagcagcaggcggtgtatctggatttgagtttggtgttgatccaaacttggacc

SEQ ID NO: 196360 - DNA, 268 bp, Glycine max
attcgtctcgagacggctgcgataagacgacagaaggggaatataagtaatatagaatctaaatacttcacggttaggatagttctaaaccagctcattatatatatattacaacttactatgccaactatgaaacaacttttagaaacacaagacagccaatccgaaacgtcacaaaatccccagctcttcggggatgccctcagcgccgaggaacgtgtaccagggtgtatgtgcgactcgttcagatcatatactaagaagaaaa

SEQ ID NO: 196361 - DNA, 258 bp, Glycine max
tacggctgcggagaagacgacagaagggggctgcaaatcacttttctactttgagtcttcttgatccttctttttctccttgaactcaaacatggcagatgaggtggttctgctagatttctggtcaagccatttgggatgagggtcaggattgcacttgctttaaagggtatcaaatatgagtacaaagaagaggacttgaggaacaagagtcctcttctcctccaaatgaacccggttcacaagaagattccggtt

SEQ ID NO: 196362 - DNA, 257 bp, Glycine max
taagatcggtatcacatttggggatgctaatggcaaccaggtatatgaaccaagactggatgatccaatttcaaggacatttgagcagtgttcttcagatacatttcagatagatggtgcttgtgcatcccaatttgctatgtgtacctatatagatctggggcagaggaaggttgggagcctgagagtgtgaaaatctatggctacaactcagagcctattacttttgatttcaacacctccatccccaatggcac

SEQ ID NO: 196363 - DNA, 263 bp, Glycine max
tacggctgcgagaagacgacagaagggggttctagtgtgtgattgtttgttgttgtaactcgttcttcttcttttgttgttctgtgtttgtgtttgttttttctctcacctgaaaatgtcttgctgcggtggaactgtggttgcggaagctcctgcaagtgcggcaacggctgcggaggctgcaagatgtacccagacttgagctacactgagtcaaccaccaccgggaccttggtcatgggagtggcacctgttaaggctca

SEQ ID NO: 196364 - DNA, 261 bp, Glycine max
cggctcgagacggctgcgagaagacgacagatggggagagcggagacatgggcgagtcaagcgactctgtctccattgacattgatttgattcctttgggaggaaaggaatgcacggttaaaactagtaaagttccgtgtctgtgcttgtttgtggggatcaagaaaaacccgctctaataacctacccagacctggctctcaattatgtgtcttgtttccagggtcttttattctgcccagaggcagcttctttgttgct

SEQ ID NO: 196365 - DNA, 260 bp, Glycine max
tactgagacgactacagatggggacccacgttaaggaatcctcttttcttttcctctttctttctttctcgtaatctttcatttttttccctcttcccttttttcgatggacacggacagcttcgtttcctcgatcatgtttcgccggaggattcccacgaggttcatgtcttggccgttgatgacagcctcgtcgatcgaaaggtcattgaacgcttgcttaaaatctcagcttgtaaagttactgctgtggatagtgg

SEQ ID NO: 196366 - DNA, 258 bp, Glycine max
tacggctgcgagaagacgacagatgggatcagcggtgccccccaggataacaacataatgctgtggaatgctgtcatatttggtcctgatgatactccatgggatggaggcacgttcaagttgactctcagtttactgaggattatccaaataaacgaccaactgtgcgatttgtgtctcgcatgtttcatccaaatatttatgctgatggaagtatttgtttggatatactacaaaatcagtggagtcctatatatg

SEQ ID NO: 196367 - DNA, 257 bp, Glycine max
gaagacgacagaagggggggtttgaggaaactgagttaaggcttggactgcctggaaacggaggcactgaagaagtgctcatcaggaagaggggtttctctgagactgaaactggtcatgaagatgagctgccaccactgtggatttgatgcttaatctttcttctaaggaggccgcaaccactgctgctgctgctgcagatccaactgataagcacaagactttgcctaaggagaagacccttctgccagcagatc

SEQ ID NO: 196368 - DNA, 247 bp, Glycine max
gagagatgggcagttatcgatctacgagtctttgccattgatgatcagcatttcgggtcatgcacctattccttttccacctccttgcttctctcatggtacaatcctcttgccgcgagctccctttctcctcggtccacagagacgaaatgtaagacaggtgccaacagttcatcacgactgataaggactacgctgagccgagatcactagctatgacggatttcatactaatcgctaatactag

SEQ ID NO: 196369 - DNA, 256 bp, Glycine max
acggctgcgagaagacgacagatggggatagtggagtagggtttttttgcgtttgagagaagcatgagcaggagtttgggaattccggtgaagctgctccacgaggcttcggggcacgtggtgacggggagctcaagagcggagaactctacagaggcagcatgatcgagtgcgaggacaactggaactgccaactcgagagcatcacctacactgccaaggatggcaaaacatcgcaacttgagcatgtttttat

SEQ ID NO: 196370 - DNA, 258 bp, Glycine max
acctcgagcgctcgagcggctcagtacggctgcgagaagacgacaccagggaacggcttgaccttgaaaatggatattcctaaggataataactccccctacgttctgcattactctagctacgacggaaaaccaatggagctggtgagaagcgtaccttggaagttgacgctgtcattggcgccgatggggccaattctagagtcgccaagtctatcgatgccggtgattatgagtatgccatcgcttttcaggaga

SEQ ID NO: 196371 - DNA, 182 bp, Glycine max
tacggctgcggagaagacgacagatgggggctgcaaatcacttttctactttgagtcctcctaatcttcttttctccttggactcaaacatggcagattaagtggctctgctaaatttctgggcaatccatttgggatgaaggtcaagattgcacttgctgaaaagggtatcaaatatgagt

SEQ ID NO: 196372 - DNA, 276 bp, Glycine max
acggctgcgagaagacgacagaagggggaacctttgcattctattcattcaagattcagcaagtgcgttttggaagcagagaccgaaatacttcgagatggcccgtacaaagcaaactgctgtaagtcaactggaggaaaagctcccaggaagcagcttgcaaccaaggctgcacgtaagtctgcaccaacaactggtggtgtgaagaagcctcatcgttatcgcccgggaactgttgctcttcgtgagattaggaaataccagaagagcactgag

SEQ ID NO: 196373 - DNA, 227 bp, Glycine max
  unsure (1)..(227): unsure at all n locations
gngngaattncgtangcaatttgtaaagcntcgaccggattcgttttgaggagaagaatggcgtgaagcntccgagtnacagaggggataacattaacggagactctntcnacgannagtcgaggattccggatccgcanaggatgatagggcttatngccannccgcggcnacgctgaatcttctcanagcttttnccaccggnggttatgctgctatgcatngng

SEQ ID NO: 196374 - DNA, 268 bp, Glycine max
cggctcgagtacggctgcgagaagacgacagaagggtcgtgggatgataccacacaagacaaagcgcagggaagctgctcttgcgcgattgaaggtgtatgagggcattcctcctcctatgacaagaccaagaggatggttgttcctgatgctctcaaggtgttgaggcttcagaagggacacaaatactgtcatctgggccaattgtcatctgaggttggatggaactactatgataccatcagggaacttgagaagaagaggaagg

SEQ ID NO: 196375 - DNA, 265 bp, Glycine max
tcaggctgcgagaagacgacagaagggggatggccaatggccaatactcgttttgtcgcatgcccagcgatgggttggcggcatgcaagccgagtgtgagtggggactatcctgctgatccctccactgacttgttgctcagccattgccaaggctgatcttaaatgcttctgccgcttcaaggattcgggccttctctctatgtatggtgttgatcccaacaagtgcatggaactccctgttaagtgcaaggttgtcgactctt

SEQ ID NO: 196376 - DNA, 267 bp, Glycine max
cggctgcgagaagacgacagaagggggaaaaagggagtgcctgataacccataaccgaccgcaccaccgttttcctttgctttgcgttctacaatgtcgaaaacctcagagattattactgcaaagctgctatttgctggggaataggaaaacctgtgactgtggaagagatacaagtagaccctcccaaagccaccgaagttcgagttaagatgctttgtgccagtatatgctccacagacatctctagcacaaaaggattcccac

SEQ ID NO: 196377 - DNA, 280 bp, Glycine max
tccaaagtttgtatagtgtaggatttgttggtattcgtgataaaaacacctcatcctattcattttgccatgacgggcgaactccagataaaggttttgaaagtaatgagaaattattaattcatccatgttactggcttggtttgaatctaaatcgtaatgcacttgctccagaggaagcagaggagataaatgacgaatatgatattaatattatttcagataattcagccattagaaataaaacaataggtcaaataactactcatctagatcagat

SEQ ID NO: 196378 - DNA, 275 bp, Glycine max
gaggtcgagtttcacagcagcaatggtgtacgtcaaggctcagaaatcaaaagcctacttcaagagatatcaagtcaagttcaagagaagaagagagggaaaaaccgattaccgtgccaggatcggttgattaatcaggacaagaacaaatataacactccgaaataccgatttgttgttcgctttagcaacaaggacattgttgcacaaataatatctgctagcattgctggcgatattgttcttgctgcagcatatgcacatgagctgccaca

SEQ ID NO: 196379 - DNA, 284 bp, Glycine max
acggctgcgagaagacgacagaagggggcacaagtgagtttgttgatcgagataactagaaacagtgtgatgaaaatgaaggtccttgttttcttcgttgctacaattttggtagcattgcaatgcatgcgtacgatatgttccctctccgaatgaacactggctatggtgcccgtactccggagttgaaatgcgcaagttggaggcttgctgtggaagcacacaacatctttggctttgagaccattcctgaagagtgcgttgaagcaacaaaggaatacatc

SEQ ID NO: 196380 - DNA, 255 bp, Glycine max
tacggctgcgagaagacgacagaagggggatattgctgaggaggcaaccaccattaacgagctgaagaagcctgttgtggagaaagaagctccagggcatgccatatgaggcaatgcacgtacgcctcggaggggaaccagaaaattatgttaacaaaataatctggaaccctaatgtatcagtgtcatcatcagtgtgtagtttaagctagctttggctatggttacgttctttgagatgagagtcttgatgaa

SEQ ID NO: 196381 - DNA, 267 bp, Glycine max
tacggctgcgagaagacgacagaagggggaggtattggaactgtgccagtgggacgtgttgagaccggtgtcttgaagcctggaatggtggtgacttttgcaccaactgtactgacaatgaagtcaagtctgtggagatgcaccatgaatctcttacagaggcacatcctggtgacaatgtgggattcaatgttaagaatgttgctgttaaggatttgaagcgtggttatgttgcctcaaactcaaaggatgaccctgcaaaggagg

SEQ ID NO: 196382 - DNA, 239 bp, Glycine max
cggctcgaggctgcgagaagacgacagaaggggacaacacagaacaaaaacaaagagaaaaaccaaacccttagccaacacaaccatcatggccacctctgctattcagcaatcagcatcactggtacaaactgctctgaggcagctcaatgagttcgtccgcaagaccggtggcgccggcaaaggtcgcactaacatacgccgaaccgtcaagagtgctcctcagagcatttggtatg

SEQ ID NO: 196383 - DNA, 270 bp, Glycine max
ggtgcgagaagacgacagagggaggagggagagtgttgacgctccatcaagatgggtatttctagggattccatgcacaagaggcgtgccactggtggcaagaagaaggcatggagaaagacagaaagtatgagcttgggcgtcaggccgcaaacaccaagttatcaagcaacaaaactatccggaggattcgtgttcgaggtggcaatgttaaatggagggcattgaggttcgataccggcaattactcatggggtagtgaagcagtta

SEQ ID NO: 196384 - DNA, 263 bp, Glycine max
tacggctgcgagaagacgacagaaggggaattcaaaatatatcatcaattataagcatgggtttgtggaacacaacgaatgcagtgtcttgccgctttcacaagtttggtgatgaccaaaagaatctggtcttccaaggtgatgccacgtcttcttccaggggcatagaactcacaaagttagacggtggaggaaaaccagtgggtggcagtgtggggagagtgttatactcttctccagtgcacctttgggaaagctctaca

SEQ ID NO: 196385 - DNA, 262 bp, Glycine max
acggctgcgagaagacgacagaaggggtcacgttcgtttatcatccgggtttagctgggaaaattgcacacaagaatggtgtggatggagaaatggaaccgtttttcggtgaggagagtttgattttcttgtgtggttcaaggaaactgtgcagcatgctgattttgtggttctgaagatgcatgctggggaagttgaaatgaagttccttgcggatatatttgagagtggagctatatgctctgttgatgagttgtttctt

SEQ ID NO: 196386 - DNA, 268 bp, Glycine max
tcacggctgcgagacgacagaagggggaacaagaaagaaaagaaaagaagaggaaaaggagagtggagaggaagaaaaggattgaagttgttgctgtgagaaagagaaagagtgaaatggagtttgggaaggaattgcaatcaatggatgtgataaagacgcagcaaatctcatctcgaccaatcgagaaggtggtggttcaccctctcgtgcttctcagcatcgtcgacaactacaacagagtcgccaaagacactcgcaagcgcgt

SEQ ID NO: 196387 - DNA, 271 bp, Glycine max
gctgcgagaagacgacagaaggggccgtccgtgagtgagttggttgaatggcgagtagccggagaagaacgtttggcaacatgaggtcattcgtaagcaattcgatgggaggtctcagggcggaagcaaccttgcttcttgggtcgtcgccggaaccctagcctacttcctctggatcaaaccctcccaagacttcaagcgtcaacaacaggagaaggccactcttgccgccgctgagtctgattcttatcgtaaacccattcccgaccct

SEQ ID NO: 196388 - DNA, 265 bp, Glycine max
cggctgcgagaagacgacagaagggtcttcaagatctgattcacatttgctgcattattatatggactgcttcagcactccatgcagctgtgaatttcggacaatacccttatgcggtttcatcctaaatcgtccaactctaaccagaagattgctcccagagccaggaaccaaagaatatggtgaacttaccagtaatcatcaaaaggcttatttgagaacaattacaggaaagactgaggcccttgtggacctaacagtgata

SEQ ID NO: 196389 - DNA, 261 bp, Glycine max
taggctgcgagagacgacagaagggcagggaatcaggagtgttccaaggaggattagggtaagaattgctcgcaagaggaatgacgatgaagatgccaaggaagagctatactctcttgtcaccgttgttgagattcctaaggatgagctcaaagggttaggcaccaaggttattgatgatgaggattgatttgtatttgtttgaaccctggagacatatatgtaggttttttgtttctgcaattcagtcttgtttttcta

SEQ ID NO: 196390 - DNA, 266 bp, Glycine max
tacggctgcgagaagacgacagaagggggttgacagttgtggtggtcgttcaagatttttaacctgaaatcttcacttcacatctctctatcctctcattctcatcaccaacaagtgtttctgtaaccatggcatccaccactctatcccctacaaccccttctcagctatgctcaggaaaaagtgggattttcagttcctcacaggcacttcttgtgaagccagtgaagaggcagatgatggggaagagcaagggattgagaatt

SEQ ID NO: 196391 - DNA, 268 bp, Glycine max
cggctgcgagaagacgacagaagggggagaaagggatgatggactgcttatatgcaaaatgcaccccttgtattacggactgtgtgatggcagaactcgagaagttaggccaaaaatatcgtgtagctctaaggattgccaaggatcctcgatttgagagaatactatgtactcataaagggacctatgctgatgactgccttgttgagagagttactcagcacaagtgctacattgttgcaacatgtgattgggacttgaagaggag

SEQ ID NO: 196392 - DNA, 259 bp, Glycine max
tacggctgcgagaagacgacagaagggggcacaagtgagtgtgttgatcgagataactagaaacagtgtgatgaaaatgaaggtccttgttttcttcgttgctacaattttggtagcatggcaatgccatgcgtacgatatgttccctctccgaatgaacactggctatggtgcccgtactccggaggtgaaatgcgcaagttggaggcttgctgtggaagcacacaacatctttggctttgagaccattcctgaagag

SEQ ID NO: 196393 - DNA, 267 bp, Glycine max
acggctgcgagaagacgacagaaggggacctcacagcagagcaaaagatagatagaaactgcaacttcctctgttttgctcccctgtttaggccttttcataagcttagaatgacacacaaggaattttccattgctctagtgactctcattgctgttctctttgtcaacatgaacatccaaggtgccactgctgactatggtagttggcagagtgctcatgccactttttatggcgggggtgatgcttctggcacaatgggtggag

SEQ ID NO: 196394 - DNA, 274 bp, Glycine max
attcggctcgagtacggctgcgagaagacgacagaaggggggcgttctaaatatggggccaaaaagccaaaataaatgattttagcccttataaaagttataaaaaaacggattcctcctttcacgctcatgtcacggcgaggtactgcagaagaaaaaaccgcaaaatccgatccaatttatcgtaatcgattagttaacatgttggttaacactattctgaaacacggaaaaaaatcattggcttatcaaattatctatcgagctatgaaaa

SEQ ID NO: 196395 - DNA, 258 bp, Glycine max
atacggctgcgagaagacgacagaaggggggggtgttcctcttgccaatgcctattctcgcagggctgatatacttgttcgtggttatggtggatacaacactaagtgggctatgttcttactggaccatctcttccctctggactcaactaaaccacctattgctaccacaattttcttcggcgctaatgatgcagctttgttaggaagaaccagtgaaaggcaacatgtacctattgaagaattcaaagagaacct

SEQ ID NO: 196396 - DNA, 245 bp, Glycine max
gacgacagaaggggggagaattaggtttttagggtttacaccgagcagcgacacctccctcccgcagtagccatggttctcaaaactgaactatgccgattcagtggtgccaagatctaccccggaaagggcatcatatttgttcgttgtgattcttaggttttcctgtttgccaactcaaaatgtaagacatatttccacaaccggctactgccctcaaagctcacctagactgctatgtacag

SEQ ID NO: 196397 - DNA, 242 bp, Glycine max
tacggctgcgagaagacgacagaagggtattcctgtttcaaaaatggctaattttgtatctaattgtataaaggcaggcgcagatctatgaatgggagatgttgtgcgagtatctacaggacctaaattatcaatgggctctccaagcacgttgaaaattcgtcctagagttgctccacctactggaacacttagggcagctcctgtgtcaatcacttccattcctctcattagaccttctg

SEQ ID NO: 196398 - DNA, 252 bp, Glycine max
acggctgcgagaagacgacagaaggggatataacactttcactcttacaatctcagctcatagcattcttcttcttccaacgagaatcagtctttgtgttccaaatggctcgtacgaagcaaacagcaagaaagtccaccggaggaaaagctccaaggaagcagctcgccaccaaggcagcacgcaagtccgctccggcgacgggcggcgtgaagaagccccaccgtttcaggccggggacagtggctctga

SEQ ID NO: 196399 - DNA, 260 bp, Glycine max
agaagacgacagaaggggagagaaagagagagaaagatgtcgaagcgtggtcgtggtggttcggcggggaacaagttccgcatgtcgctgggtcttccagtggcggcgacggtgaactgcgccgacaacacgggggcgaagaacctctacatcatttcggtgaaagggatcaaaggccgtttgaaccgtcttctctcggcctgcgttggcgacatggtgatggccaccgtgaagaagggaagacccgatctgaggaagaa

SEQ ID NO: 196400 - DNA, 260 bp, Glycine max
tacggctgcgagaagacgacagaaggggaccacagagagagaggttttgatgcaacgctgtcactgagaaaggatctctatctacgaaggagcggaataaaacccttctctctgtgattaagagaatggcttcagatcggaaacttcacacttttgaggatgtggcaaagcacaaccagaccaaggattgcagtctcatcatttctggcaaggtgtatgatgtcacctctttcatggaggatcatcccggaggtgatgag

SEQ ID NO: 196401 - DNA, 253 bp, Glycine max
tacggctcgagaagacgacagaagggggcagcgcttgatttgaggccaggcaagccccactcaaccaccacacctctcctcgttcacgctacccctttctgctcttcttctacctttcaagttttaaaagtataaagatggcagagacattcctatttacctcagagtcggtgaacgagggacaccctgacaagctctgcgaccaaatctccgatgctgtcctcgacgcttgcctcgagcaggacccagacag

SEQ ID NO: 196402 - DNA, 244 bp, Glycine max
acggctgcgagaagacgacagaagggagaggagagagaaaatgaagaagcacaagcattactccaggaagctgaaaagcgtattaaaaagaagggaaagaaaccaatcatagagggggacaaaatcaccaagcagacattgatgaagttgactttgactgaacaactccgggaaagacaggaaatggaaaagaaactgcagaagttagcaaaaaccatggatcatttggaaagagcaaaaagag

SEQ ID NO: 196403 - DNA, 243 bp, Glycine max
gctgcgagaagacgacagaaggggagggaagaatagaatgggatctggaagtggaaaacacactggagagttcttcaggagaagggatgcatggaggaagcatccgatgctcaccaatcagctccgccacgccacccctggccttggcatcgccgtcgtcgccttcggtatctacctcgtcggcgaacaagtctacaataggctctatgctcccgatcctcattcgatttctcacgtgaaagc

SEQ ID NO: 196404 - DNA, 258 bp, Glycine max
acggctgcgagaagacgacagaagggtaatttgggaattattgctcccatcgccattggtttcattgtcggcgctaacattttgttgggtggggccttctctggagcggccatgaaccccgctgtgacatttgggcctgctgtcgtgagctggacctggaccaaccactggatctactgggccgggcctctcatcggtggtggaatcgctggccttgtttacgaggttgtctttatcagccacacccacgagcagctt

SEQ ID NO: 196405 - DNA, 251 bp, Glycine max
tacggctgtgagaagacgacagaagggattcatgaaaccgatgtgtataagtgggatcccgaggatttgcctgggcaatctatatttaaaacgggagataggcaatggttctttttctgtcacagagataggaaatatcctaatggtggaaggtctaaccgagcaaccagacgtgggtattggaaagcaacaggaaaggatcgtaacgtgatatgcaattctaggtcagttggcgtgaaaaagaccctggt

SEQ ID NO: 196406 - DNA, 240 bp, Glycine max
tacggctgcgagaagacgacagaagggggcacaagtgagtttgttgatcgagataactagaaacagtgtgatgaaaatgaaggtccttgttttcttcgttgctacaattttggtagcatggcaatgccatgcgtacgatatgttccctctccgaatgaacactggctatggtgcccgtactccggaggtgaaatgcgcaagttggaggcttgctgtggaagcacacaacatctttggctt

SEQ ID NO: 196407 - DNA, 252 bp, Glycine max
cggctgcgagaagacgacagaagggggcgtacacagcctcaacaaccctaacgcgtgcagagcagagagagacgcagccatggggcgaagacccgcgaggtgttataggcaaattaagaacaaaccataccccaagtcacggttttgccgtggtgttcctgatcccaagatcaggatttacgatgttggtatgaagaagaagggtgttgatgagtttcctttctgcgtccatctggttagttgggagaagga

SEQ ID NO: 196408 - DNA, 240 bp, Glycine max
acggctgcgagaagacgacagaagggggcacaagtgagtttgttgatcgagataactagaaacagtgtgatgaaaatgaaggtccttgttttcttcgttgctacaattttggtagcatggcaatgccatgcgtacgatatgttccctctccgaatgaacactggctatggtgcccgtactccggtcgtgaaatgcgcaagttggaggcttgctgtggaagcacacaacatctttggcttt

SEQ ID NO: 196409 - DNA, 256 bp, Glycine max
ataagaatacatattccattctatatcaaaacaaaatataaaaatttggaatagattctatgaaatctcaaaaaatcccgctattcaattattcattaaacatatgaatattagtgcatattattttatcgattagattaaatagattatctatatatatagatagatatctatttgaattgcttcattcgcgaggagccgtatgaggtgaaaatctcatgtacggttctgtaataaagatggaattgagaaacaa

SEQ ID NO: 196410 - DNA, 253 bp, Glycine max
gtataaattcattgaaaattgcctagcatcagttgacagacaaaaacagccatggctgatatttcttgcacatagggtacttggttattcttctgcaggattctatgtggcagaaggctcttttgaagaaccaatgggaagggaggaccttcaatatctttggtaaaagtataaggttgacatagcaatgtatggacatgtccataactacgaaaggacatgcccagtgtatcaaaatatctgcaccaacaaa

SEQ ID NO: 196411 - DNA, 247 bp, Glycine max
acggctgcgagaagacgacagaagggggaagaagaagaaggttggttgattggtcccattgattccgaagagaaaagaaaagatgtttgagccacaacagctatacactcgcgcgaagaccgaggaattcgacctcgaatcaggagaaaccctctacccagggctgagcgtcggcgagaaccagctccgatggggtttcatccgcaaggtctacggcatcctctccgcgcagatcgtcctcaccacc

SEQ ID NO: 196412 - DNA, 245 bp, Glycine max
acggctgcgagaagacgacagaagggggccattgttgttgctattatcatccgcagctgcttttattcgcaccgcaaacagtgagccatggccgtcggaaagaacaagcgcatcagataggggaagaagggtggcaagaagaaggcagctgatccctttgccaagaaggattggtatgacattaaggctccttctgtttttcaagtgaaaaatgttggcaaaaccctcgtctctcgtactcaggg

SEQ ID NO: 196413 - DNA, 241 bp, Glycine max
tacgctgcgagaagacgacagaaggggtgatgggaggaaactagtttcgggattgataccagattcgggcacaatccatgcacatggagaggatacagtcaagattcctcttactttgatttttgatgacataaggaatacctatgatgatattaaaccaggaagcatcattccttatagggtgaaggttgatcccattgtggatgttcctgtctttggaaggctcactctacctttggag

SEQ ID NO: 196414 - DNA, 239 bp, Glycine max
cggctcgagacggctgcgagaagacgcagaagggggaaacatgcagaaatatctgcaatctacaactgtaagagtggaggagatgagagtgaagagacaggacgcagaacagtggatgtcccaccgtatgctacctgagaacttgagggacaagaattagaaagtacgaacagtaccaatggcaagaaaataggggtgttgaggaggaggcattaattcgtaaccttcctaaagatctc

SEQ ID NO: 196415 - DNA, 236 bp, Glycine max
  unsure (1)..(236): unsure at all n locations
atgggaattcctgttggtaaattggccttgtacacagcactagganacnnttagaccatcagcatgtttgcctattacgattgatgtggggacaaacaatgagaaattactaaatgatgagttttacattgggcttagacaaaagagggcaactgggcaggaatattctgaacttttgcacgagttcatgactgctgtcaagcaaaactacggagaaaaagttcttgttcagtttg

SEQ ID NO: 196416 - DNA, 238 bp, Glycine max
cgagaagacgacagaagggggcacaagtttgttgagatagctagaagcaataagatgaaaatgaaagtgcttgttttgtttgttgctacagttttggtagcatatgaatgccatggctcagactaccagaagttccctctccaaatgaaaactgggtttggtgggcaatacagcaatgaggtggcatgtgccagttggaggcttggcgtggaagcaaacaacgtagtcaagtggcaaa

SEQ ID NO: 196417 - DNA, 254 bp, Glycine max
acggctgcgagaagacgacagaagggggcaagagtgaaaaccttctcttacccttctctcaagtttcaagagatttcatcatggctccaaagaaggacaaggctccaccaccttcctccaagcccgccaaatctggcggtggcaagcagaagaagaagaagtggagcaagggaaagcaaaaggagaaggtgaacaatatggtgctgtttgatcagggcacctatgacaagctcctttctgaagctcccaaatac

SEQ ID NO: 196418 - DNA, 244 bp, Glycine max
tacggctgcgagaagacgacagaagggggatcacaaatctttcgctaacactcattaattgcaagaatggcacttcgttgcttggtgatgtccctttctgttctcttcactcttggtcttgcgagagaaagccatgccagagacgaagatttttggcatgctgtttggccaaacactcccattccaagttcattgcgagatcttctaaagcctggccctgcaagtgttgaaatcgatgatcacc

SEQ ID NO: 196419 - DNA, 243 bp, Glycine max
acggctgtgagaagacgacagaagggctggtaaatgatgggtatcgctggcgcaaatatgggcagaagctagttaaagggaatacaaacccaagaagttattatcgatgctcgaatcctggatgccctgtcaaaaagcatgtggaaagggcctcttatgattctcaaactgtaatccgtacctatgagggacagcatgatcatgaaattcaccctggaaggactgtcactcagaatgcagcta

SEQ ID NO: 196420 - DNA, 235 bp, Glycine max
ctgcgagaagacgacagaagggggatgggatatttcttgttgtttgagaatatgttaaattcggtgctctatgctcgtgacaaatggcttgtggatggcggagttgtgctaccagacaaagcatccctccatctcactgctattgaagatgctgactataaagaagacaaaattgagttttggaacaatgtatatggatttgacatgagctgcatcaagaagcaagccataatgg

SEQ ID NO: 196421 - DNA, 236 bp, Glycine max
tacggctgcgagaagacgacagaagggggctgacaagccaatcctttgtgtaggtgctcaaccctagtaagccgcaatggtgaagtactcaagggagcctgacaatccaactaagtcttgcaaggctagaggcgccgaccttagggttcattttaagaacacaagggaaactgcctttgcaatcaggaagttgcccttggtcaaggctaaaaggtacttggaagatgttcttgccc

SEQ ID NO: 196422 - DNA, 242 bp, Glycine max
tctcgagccgaatcggctcgagtagaagacgacagaagggtacggctgcgagaagacgacacaagggatatcacattttatttttctgtttttcctttctataatattcatagtttcattaccccctttatgtgcattggtcttgcaggccttacagtatgtgcaggagaacccagatgaagtttgccctgctgggtggaagcctggggagaagtccatgaaaccagaccctaaacttagca

SEQ ID NO: 196423 - DNA, 242 bp, Glycine max
cggctgcgagaagacgacagaagggggtgtaaggaacacagcaaaacatactcttccgaggaagaaaaactgtacaggctcaaagtgttcgaggacaactatgcctttgtcgcccaacacaaccaaaacgccaataataacaataataatccaagctacactctttccctcaacgctttcgccgatctcacccaccatgaattcaaaaccactcgtctcggtcttccccctaccttgcttcg

SEQ ID NO: 196424 - DNA, 264 bp, Glycine max
acggctgcgaagacgacagaagggggagaagacaagtgacaatagtgtgaactgcggagggcttctccagcctagtttgttctcagatcttctgctgccatggaccagtacgagaaggtggagacgataggcgacgcaacatacggagtcgtttacaaggctcgcgaccgcgccaccaatgagacaatcgctctgaagaagattcgcctcgagcaggaggacgaaggcgttcccagcaccgacattcgcgagatttctcttctc

SEQ ID NO: 196425 - DNA, 279 bp, Glycine max
gcgtaaagacgacagaagggggccataagaaagagcaagtcgaaaagttcatctctccctctctctcacacatcccagccatgagcctgcttcggtataggcagaaaccagagaacattccgcccgaaaaaaagtactccttctggaagtaagggagctcaacttagaaaacatattgatgccacgttgggtagtggaaatctgagggaagcagtaaagctacctcctggggaggatttaaatgagtggctagctgtcaacactgttgatttcttcaac

SEQ ID NO: 196426 - DNA, 239 bp, Glycine max
  unsure (1)..(239): unsure at all n locations
ggcagttgtattgttgaacaagggtttctctgtctgcttcttcgctttctctcgtttcaatcganaccaaaacaaaaacatgggcagaaaattcttcgtcggtggcaactggaaatgcaatgggaccactgaggaggtaaagaagattgttactactttgaatgaggctaaagtccctggagaagatgtcgtagaagttgttgtgagccctccttttgtgttccttcctgttgtaaaaa

SEQ ID NO: 196427 - DNA, 190 bp, Glycine max
tcacgacatcatagtaagcactatattacaaaaaggacattcattcatctatggctacccttattgctcccagcatccactctccacaagaaaatgctgaaactctcagataggctattgaaggatggggaactgatgagaacactgtcatagtaatttggggtcatagaactgtgtatcagaggcatca

SEQ ID NO: 196428 - DNA, 272 bp, Glycine max
actgcgagaagacgacagaaggggacactagggagcagcgcatagaagaacctattctttacattaagatgcaaatagcaatattcaatcttgagcaaggtgatcaaaaggaatgcaagaaacttctagaagatgggaagagtacactcgacagcatgacagatattgatccatctgtatatgctagctattactgggtatcatctcagtttcataagacacgccaagaatttgctgagttctacataagtggcctgctctatttggcatac

SEQ ID NO: 196429 - DNA, 263 bp, Glycine max
agctgcgagaagacgacagaaggggattaagtccttggttgatgttggaggtggcattggagggtctctttcggagattgttagggcttatcctcatatcaatgccatcaactttgacttgcctcatgtggttgccactgctcctaagttcgatgggatcacccatgttggaggtgacatgttcgtgtccattcctagtgctgatgctatttacatgaagtggattctgcatgactggagcgacgagcactgcatcaagatct

SEQ ID NO: 196430 - DNA, 252 bp, Glycine max
cgatgagacgacagaaggggaccctaaagagagagagagggagtcagagaaaccctaggtaagaagaaaagatgccggctggtcatggtttgatatcccgcaccagagattccttctctcgtcctttcaggaagaagggaaccatcgccctcaccacatacctgaaaagctaccacgtcggcgactatgttgacgtcaaggttaacggtgccgttcacaagggaatgccccacaaattctaccatggccgca

SEQ ID NO: 196431 - DNA, 257 bp, Glycine max
  unsure (1)..(257): unsure at all n locations
aagtaagataggaattaggatagagaagagaagattgaggaagatattgggtttgggaagaagagtgaagatgttaatgagataaaaattaaataaattaatattaaaaaagaagatattgttgttgatgtgatcataaagaaaaagaataaggtgaagataaatcagattgacatagattaattggttgaaagtgatgngaggaagatagtttaaggattgataaatgatgagggtaaaataaatgaaaatggaga

SEQ ID NO: 196432 - DNA, 244 bp, Glycine max
gtcatgggcaagaacaaagtccttgtcaaggtccacccagaaggaaaatatgtcgttgatattgacaaaagtattgacattacaaagattactccatccactagagttgcacttcgcaacgacagttatgttcttcacttagttctgccaagtaaagttgatccattggtcaatctgatgaaagttgagaaggttcccgattctacttacgacatgattggtggtttagaccagcaaattaaag

SEQ ID NO: 196433 - DNA, 249 bp, Glycine max
  unsure (1)..(249): unsure at all n locations
ggggcagcagaagaacaagtagttgagaactaagaaggagaagcaaatggcttcctcaatgatctcttccccagctgttaccactgtcaaccgtgncggtgccggcatggttgctccattcactggcctcaagtccatggctggcttccccaccagaaagaccaacaatgacattacctccattgctagcaacggtggaagagtgcaatgcatgcaggtgtggccaccagttggcaagaagaagtttga

SEQ ID NO: 196434 - DNA, 262 bp, Glycine max
acggctgcgagaagacgacagaaggggaagtcagttgcgtctgatcctgatcagttgaagagcgccagacaagatatcaaggagcttctcaactccaagttctgccatcctattctcattcgtttgggatggcatgatgctggtacttatagcgagaatattgaggagtggccacagagaggtggagctaatggtagcttaagatttgaaattgagctgaaacatggagccaatgctggacttgtaaatgcattgaaacttc

SEQ ID NO: 196435 - DNA, 262 bp, Glycine max
gacgacagaagggggagaaagagagagagagagagagaaactgagagaaattcgcaaaccctaatttcggaaagatcggcgatggctgcctccaaggatcgcgagaacttcgtctacatcgccaagctcgccgaacaggccgagcgatacgaagagatggtggaatcaatgaagaacgttgcgaatctcgacgttgaactgactgtggaggagcggaatttactttctgttgggtacaagaatgtgattggtgctcggagac

SEQ ID NO: 196436 - DNA, 268 bp, Glycine max
acggagataagacgacagaagggcaccaaaggacagatgtctggcattttagtaagaaagattgatactggggaggaatatgtgcttgaggcaataaggctgttttatggcataggccattcgccaaataccgaactgttgaaaggccaagtcgaattagaccactcaggctatgtacaagttcaggagggtactgcaaaaacttcaattgaaggtgtatttgctgctggagatgtgcaggaccatgaatggaggcaagctataactg

SEQ ID NO: 196437 - DNA, 259 bp, Glycine max
aacggctgcgagaagacgacagaagggggctgacaagccaatcctttgtgtaggtgctcaaccctagtaagccgcaatggtgaagtactcaagggagcctgacaatccaactaagtcttgcaaggctagaggcgccgaccttagggttcattttaagaacacaagggaaactgcctttgcaatcaggaagttgcccttggtcaaggctaaaaggtacttggaagatgttcttgcccacaagcaggcaattccattcaga

SEQ ID NO: 196438 - DNA, 260 bp, Glycine max
cacggctgcgagaagacgacagaagggggagagtcagattcgcacgcattgcttcgcctcacaacagcagctgcagcagcaatggctcccaaacgaggtggaaaggctccggctcttgccgctaagaagaagcctgagaaggtcacgaatccgttgttcgagaagcgtccgaagcagttcggaatcggaggggcgttgcctccgaagagagacttgactaggttcgtgaagtggccaaagaatgttcaaattcagaggaa

SEQ ID NO: 196439 - DNA, 262 bp, Glycine max
cctcgagccgctcgagccgctcgagacggctgcgagaagacgaacgaagggggtatgaatcgattcttgacctattctatagtgcattcctttttaactgttttcttctcttcctttcctatggcttatacttttcttttggttatttcagtgttgagatttataagcatcctaaagaagaaagaatagcccgaacttggggaaccactgcccctggcctaccctatgttgaacaaactataaccaatgctggaaattggtt

SEQ ID NO: 196440 - DNA, 262 bp, Glycine max
acggctgcgagaagacgacagaaggggaaataaacaagtcaagggtttgatcaaaataatatattactatggttcgagagaaaataagagtatctactcggacactacaatggaaatgtgttgaatcaagaatagacagtaaacgtcattattatggacgctttattctgtctccacttatgaaaggtcaagccgatacaataggcattgcaatgcgaggagttttactcggagaaatagagttaaggtgtatcacacgtgt

SEQ ID NO: 196441 - DNA, 193 bp, Glycine max
aatcatagggcataatatcatagatcattcacaagattggggagacccttcatgtgggagggcacaagaaggatgatgagcataagggtgatctccatgctggagaatacaaaggggagcaccatggtgaagacagtagtgagtacaaaggagagcatcatgggtaacacaaagcttgagagtaccatggtga

SEQ ID NO: 196442 - DNA, 247 bp, Glycine max
cacgctgcgagaagacgacagaaggggggtgatgggtgggtgagtccgaattgtgaaagtaagcaaagatggctttcacggaatcgtctctcctccttccttcggtttcaggaaccaacaagaacaagaacaaggttccagaagacaaatggtatttagcctacattgtgtattttacccttagtctcggttaccttctcccatggaacgctttcatcaccgccgttgattacttctcctttctcta

SEQ ID NO: 196443 - DNA, 250 bp, Glycine max
gcgagaagacgacagaaggggaagaaaggaaggtacgcccagcgtgtcggtaccggtgctcccgtttacttggccgcagttctcgagtacctagctgctgaggtgcttgagttggctgggaatgcggcacgtgacaacaagaagaacaggattattccgagacatgtactattggctgtgaggaacgatgaggagttggggaaattgcttgctggtgtcaccattgcacatggtggtgtgcttccaaaca

SEQ ID NO: 196444 - DNA, 260 bp, Glycine max
tgagaagacgacagaaggggataccaaaaacaaaacacaagccaagtgaaagtgagaaaaaataaaaatcacagagcataatgtcagggatcattcacaagattgcggagacccttcatgtgggagggcacaagaaggaggaggagcataagggtgagcaccatgctggagaatacaaaggggagcaccatggtgaacacagtagtgagtacaaaggagagcatcatggtgaacacaaagctggagagtaccatggtgag

SEQ ID NO: 196445 - DNA, 216 bp, Glycine max
  unsure (1)..(216): unsure at all n locations
aacgactgataaaagacggcagaaggggatacacagcctctgcagcaatagcgagtgaagagcagnggaagacgcagcaatagggcaaagaccagcgaggtgttataggcaaattaagaacgagccataccccgaatagaggtcttgaagtggtgttcatgatccctagatcaggatttacgatgttggtatgaagaagaagggtagtgatgagtt

SEQ ID NO: 196446 - DNA, 237 bp, Glycine max
actcgagccgaatcggctcaagggctgcgagaagacgacagaaggcgggcacaagtttgtacagatagctagaagcaatacgatgaaaattaaagtgcttgtttggtttgttgctacagttttggtagcatatgaatgccatggctcagactaccagaagttccctctccaaatgaaaactgggtttggtgggcaatacagcaatgaggtggcatgtgccagttggaggcttggcgt

SEQ ID NO: 196447 - DNA, 266 bp, Glycine max
aacggctgcgagaagacgacagaagggaaagagacccggaaagggtgggaaccgcttttggaaatccattgggcttggatttaagactcccagggaagccatcgaaggaacctacattgacaagaagtgccccttcactggcaatgtttccatccgtggccgtatcatggctggaacatgtcacagtgctaagatgaacaggactattattgttaggaggaattatctccattttatcaagaagtaccagaggtacgagaaaaggc

SEQ ID NO: 196448 - DNA, 230 bp, Glycine max
aacggctgcgagaagacgacagaaggggactttgatcactgatctcatctcaattttaagatatgtcgacatatgataagccagtagaggtggaaaggggtagcaaggatgaaaagcacaaggaagatgatcaagaggaggggaagggtggattcattgagaaggtggaggatttcattcatgacattggtgagaagattgaggaagctattgggtttgggagccgagtg

SEQ ID NO: 196449 - DNA, 251 bp, Glycine max
tacggctgcgagaagacgacagaagggggcacaagtgagtttgttgatcgagataactagaaacagtgtgatgaaaatgaaggtccttgttttcttcgttgctacaattttggtagcatggcaatgccatgcgtacgatatgttccctctccgaatgaacactggctatggtgcccgtactccggaggtgaaatgcgcaagttggaggcttgctgtggaagcacacaacatctttggctttgagaccattc

SEQ ID NO: 196450 - DNA, 254 bp, Glycine max
acggctgcgagaaacgacagaagggatcgactcaacgaacacttccaagagttgggaaacgcgttagatcctgatagaccaaagaatgacaaggcaactatcctcactgaaaccgtccaaatgctaaaggacttaaccgctgaagttaataggcttaaaacagagcataaaacactttctgaagagtcacgcgaactaatgcaagaaaagaatgaactcagagaagagaagacatctcttaaatctgatataga

SEQ ID NO: 196451 - DNA, 235 bp, Glycine max
  unsure (1)..(235): unsure at all n locations
ggcaccttggtaaggtgaganaatatggcatttgcaggaacaacttcagaagtgcatggcttgtgacaaaacagtttatctggttgataagttgaccgcagataaccgagtgtaccataaggcttgcttcagatgccaccactgcaaaggaacactncaagctcagcaactataactcttttgaaggagttctttactgnaggccacactttgaccaactgttcaaaagaactgg

SEQ ID NO: 196452 - DNA, 143 bp, Glycine max
tgcgcgacgacgacagaaggggcgaagctcggatgactagcacaagcggtttaacgtgtttaaagcaaatgtgatgcatgtccattacactatcacgacggatatgccttactagctagaatctcaacaagattgctgccatg

SEQ ID NO: 196453 - DNA, 251 bp, Glycine max
acagctgctagaagaggagagaaggggatatgtaacttcatctaggtgtccggaaatcgttcctatcatcacttctctaatctcgaagcctactcgttcgtgccgctcactaggtcacacttcatcaatggtcggtagaggcaaaaccctaggatccagcgccgctaagaaggccacctcaaggagcagcaaagccggcctccaattccccgtcggtcgtatcgccaggttcttcaaggccggaaagtacg

SEQ ID NO: 196454 - DNA, 139 bp, Glycine max
tacggctgcgagaagacgacagaaggggattgttccaaattctgaaattcagaatataactactgagatggtgaagacaccagaggtctcaagatggatggatcaagtcatccctacaatagccccttgtgatgcagca

SEQ ID NO: 196455 - DNA, 250 bp, Glycine max
acggctgcgagaagacgacagaagggggagtttccaagtacatgcccaagtacttattacttcttgggttgtaattgctctcttattggtttcagccattctaattattcgaaatctgcaaaccattcccgctttcggtcagaatttctttgaatatgttcttgcattcattcgagacgtgagcaaaactcaaattggagaagaatatggtccgtgggttccttttattggaactttgtttctatttatt

SEQ ID NO: 196456 - DNA, 255 bp, Glycine max
tacggctgcgagaagacgacagaaggaggcacaagtgagtttgttgatcgagataactagaaacagtgtgatgaaaatgaaggtccttgttttcttcgttgctacaattttggtagcatggcaatgccatgcgtacgatatgttccctctccgaatgaacactggctatggtgcccgtactccggaggtgaaatgcgcaagttggaggcttgcagtggaagcacacaacatctttggctttgagaccattcctga

SEQ ID NO: 196457 - DNA, 248 bp, Glycine max
acttcgagaagacgacagaagggggagagaaagagatcacatagcagaatggcttctactcaatgtttcttgcaccaccatgctcttaccacgcctgccagatccccatcacaacgcatcatggttagcaccaagcctaaccagcttgtttgcaaggcacagaagcaagaggctattgatgtcagcccaatctctcgacggttagctctaatcgtgctcattggtgctgctgctgttggctccaaagt

SEQ ID NO: 196458 - DNA, 255 bp, Glycine max
acggctgcgagaagacgacagaagggggctgcaacagctacctcatattgttccgaatggaatgatattgccgggtgatacccttgcttaacgatgaagatgtcactggttcaacttcgacctctcttgacaaggcgagggttcagcacaagctctgagaaccttgttgcatctgtgctctttgagagactgccagtggtcattcccaaaattgaccctgtagtctatgcatttcaagaattctcgtttcgatgg

SEQ ID NO: 196459 - DNA, 146 bp, Glycine max
tctcgagcgaatcggctcgagtacggctgcgagaagacgacagctggggatttgggaaatccagtatgatccttcaactggtatttatggaatggagatctttgttgttctggagcgtcctggctatcgtgttggacgtcgccgca

SEQ ID NO: 196460 - DNA, 226 bp, Glycine max
tacggctgcgagaagacgacagaagggggcacaagtgagtttgttgatcgagataactaaaaacagtgtgatgaaaatgaaggtccttgttttcttcgttgctacaattttagtagcatggcaatgccatgcgtacgatatgttccctctccgaatgaacactggctatggtgcccgtactccgaaggtgaaatgcgcaagttggaggcttgctgtggcagcacac

SEQ ID NO: 196461 - DNA, 209 bp, Glycine max
aacggctgcgagaagacgacagatagggattgttccaaattctgaaattcagaatataactactgagatggtgaagacaccagaggtctcaagatggatggaacaagtcatccctacaatagccccttgtgatgcagcagaaccatggcaactagggtttcaagtatgcagcaacacctataatgcaaggaataatagacttacatcac

SEQ ID NO: 196462 - DNA, 238 bp, Glycine max
cactcgagcgaatcggctcgagtacggctgcgagtagacgacaacagggatcagtgacactccccaggataacaacataatgctgtggaatgctgtcatatttggtcctgatgatactccatgggatggaggcacgttcaaattgacactccaatttactgaggactatccagatacaccaccgactgtacgatttgtgtctcgcatgtttcatccaaatatttatgctcgatggaag

SEQ ID NO: 196463 - DNA, 256 bp, Glycine max
agacgacagaagaggaagcttagtgatgaccaagttaatctccttgaacaaaactttggaaatgaacacaaacttgagtccgagagaaaggacaggctggcaatggagcttggtttggaccctcgacaagttgctgtgtggtttcaaaacagaagagctcgttggaagaacaaaaagttggaagaagagtactccaaccttagaaataatcatgaagccaccttgctcgagaaatgtcgcctagagactgagccat

SEQ ID NO: 196464 - DNA, 254 bp, Glycine max
cagaccaacatgagtgtggatccaaagagaagtgcctctaatggccaggagaaaatgttaccatcactagaacagcaagcattgatcaatgaggtgagaaggttaattgggccacagtctggtaaggcgtccattttttgttctgatgcatgcatctcaaggtatttgagtgcacggaattggaatgttaagaaggcagccaaaatgttgaagctgaccttgaaatggagagaagaatacaaaccagaagagat

SEQ ID NO: 196465 - DNA, 258 bp, Glycine max
cgcgtatatacgctctgtattcgtctcgagacggctgcgagtagacgacattagggatctggaaacctctctaaccaattgatcatgaaaacatattcatcttttgcagtaggcttatctcctgaatgatcatagtcagaagtagtgtttgagtaggaaaagcccaccctagcaggggattccaagaacagcacatttgccactgcattatgaatgcacaattgtatgttcaatctgtcatgtttcacaagtgcatca

SEQ ID NO: 196466 - DNA, 233 bp, Glycine max
agctgcgagaagacgacagaagggggaagctggaaaagttagaagtagtgaagaaaatgaaagtcattgttttcttcgttgctataataattttaggtgcagaatggcaatgcaatgggtcagagcatgagcatgagcatggccacagctaccaaattttccctttgcgaatgacaaccagtcccggtggccactacattccggaggtatcgtgcaaaatttggaggcttggt

SEQ ID NO: 196467 - DNA, 271 bp, Glycine max
ccggctgcgagacgacgacagacggggaggcaagtgagtgagagaaagagatcacatagcagcctggcttctactcaatgtttcttgcaccaccatgctcttaccacccctgccagatcaacatcacaacgcatcatggttagcaccaagcctaaccagcttgtttgcaaggcacagaagcaagaggatattgatgtcagcccaatctctcgccggttagctctaaccgtgctcattggtgctgctgctgttggctccaaagtccaacctg

SEQ ID NO: 196468 - DNA, 271 bp, Glycine max
ctaggctgcgagaagacgacagaagggggcagcatcgtagagaaataagggaaaaatggtgtcgctgaaactgcagaagcgcctctccggaagcgtgctcaagtgcggcagaggaaaggtttggcttgaccccaatgaagtcaacgaaatctccatggccaattctcggcaaaacatcaggaagttggttaaggatgggtttatcatcaggaagccaaccaagattcactcccgctcacgtgctcgtaggatgaaggaggcaaagaggaag

SEQ ID NO: 196469 - DNA, 141 bp, Glycine max
ccgatctcacttctgctctcaacgaggaccatagagcagaccttgtcaatgctcttaagagcaagatacagagtttggctggacaacactcggatattctagagtctctgtcgcccaatgtccgaaagcgtgttgaggttc

SEQ ID NO: 196470 - DNA, 243 bp, Glycine max
tacgggaagacgacagaagggggagcgcagtcgaagatctagctagaggcagagaacgttctacttctccctgatcctctggaaagttcttagccgacagtgatcttctacgctttggtggccagaggtacggtggtgctggcggagttcagcgccgtcaccggcaacaccggcgccgtctcccgccgcattcttgagaagcttccggcggagtccgactccaggctctgcttctctcaggat

SEQ ID NO: 196471 - DNA, 251 bp, Glycine max
gaagggatagtaagtcttttgttgatagtcattggaactgacatgggaaacctgctttggaaatggttactcaaaaggactaagagaaaaaggcacaagctggaaagtgggctgaacctctagtggaaaccattaaaactaaatgggtcccagctgtaaaagaacagtggtctgtggtgaagacaaatgctgaacctcatgtgcaattattgaccacgaaaactgttgaactttacgaggcatcaaagaat

SEQ ID NO: 196472 - DNA, 274 bp, Glycine max
tacggctgcgagaagacgacagaagggggggaagagggatccccggacaatgaaaacgaatgggaagatcgaaaagttggaagaagaaagaattttttggttcgacgcatagaattagctaagcattttctccgaacaaatatagaaccagaatggatggttttatgtcttttaccagttctaccacccgaattgagaccgattattcaaatcgatgggggtaaactaatgagctctgatattaatgaactatatagaagagttatctatcgga

SEQ ID NO: 196473 - DNA, 270 bp, Glycine max
ccggcgagaagacgacagacggggctagtttttcgctactgcgactgcgcttcacgatgggtgcttacaagtatgtttcggagctctggcgcaagccgcagtctgatgttatgagattcttgcagcgggtgaggtgctgggagtaccgccagcaaccttctattgtccgtttgacaaggtctactcgcccagacaaggctcgccgcttgggtttcaaggctaagcagggttatgtgatttaccgtgttcgtgtacgaaggggtggccgga

SEQ ID NO: 196474 - DNA, 272 bp, Glycine max
aagtacggctgcgagaagacgacagaaggggattagaagattcctgcgtgcacgtgatttagatgtagagaaggcttcggcaatgctcctcaagtacttgaaatggagaaattcatttgttccaaatggctctgtatctgtgtcagatgttcctaacgaacttgcacaagataaggtgttcatgcaaggacaggacaagataggtcgacctatacttatggtcttcggtggaagactttttcagaacaaggatggtctatgagaattcaagc

SEQ ID NO: 196475 - DNA, 269 bp, Glycine max
gcgagaagacgacagagggcagctatggtagattatacttggtctgttggggatagggttgatgcatgcagtgaagacagttggcaggaaggagttattacagatcagaacaagaaagataaaacattaactgttcacttccctgtcagtggaaaaacaaaacttgtcagagcttggcatctacgtccatcccgtttttggaaggatgggaaatggattgagtatcccaaggttggaaccggtgacagttctacccatgagggtgatac

SEQ ID NO: 196476 - DNA, 226 bp, Glycine max
acggctgcgagaagacgacagaagggggggtgccattgttgctgtcatcatccgcagctgctgttattcgcaccgcaaacaaacagtgagccatggccgtcggaaagaacaagcgcatctccaaagggataaagggtggcaagaagaaggcagctgatccctttgccaagaaggattggtatgacataaaggccctactctttttcaagtgaaaaatgttggaaaa

SEQ ID NO: 196477 - DNA, 264 bp, Glycine max
ctcgagcgaatcggctgagacggctgcgagaagacgacaaccgcgggttcacatcagtattgtggtcattagccatgtcgactctgggaaatccactaccactggtcacctgatttacaagcttggaggcattgacaagcgtgttattgagaggtttgagaaggaagctgctgagatgctcaagaggtctttcaagtatgcctgggtgctggcctaacttaaggctgagcttgacaagaggatcaccattgatattgctttgtg

SEQ ID NO: 196478 - DNA, 270 bp, Glycine max
acggctgcgagaagacgacagacggggggctatgtgatacatattgaaattctttagttgtaactgacaaagttttctgagaaaataaggattattattgagagaatggctggctcatcggaagagggacaagtcattagctgccacaccgttgaagaatggaacgatcaactccagaagggcaacgaatccaagaaactcattgttgtggattttactgcttcttggtgtggaccatgccgtttcattgcaccattcttggctgagctg

SEQ ID NO: 196479 - DNA, 277 bp, Glycine max
tacggctgcgagaagacgagagaaggggacacatacatcatcaaaaaacacacacgacacactcccatacagacacgttgtctcgcaacaattccttcattccgcagcagcaaacctctttaacttacacgacaacaatggccgatgccgaggatattcaagccctcgtttgcgataatgacaacggaatggtcaaggctggttttgccggagatgatgcgccgagggcggtgttccccagcattgtggggcgtccacgtcacacgggagtgatggt

SEQ ID NO: 196480 - DNA, 264 bp, Glycine max
tacggctgcgagaagacgacagaagggggtgttaagacatttaagtgaggagctagagaatgatgatgaagtctgctatgtgtgcagtggtggttgtagcacttcttcttctggcggcggtggggcccatggctgaggctgtgacatgcaccccaacagagttgagtccgtgtcttccagcaatcacttccggtgctaaaccttccaatgcttgttgcacgaagctgaagcagcaaaaaccatgcttatgtggctacctcaaaa

SEQ ID NO: 196481 - DNA, 248 bp, Glycine max
tacggctgcgagaagacgacagaagggggcacaagtgagtttgttgatcgagatatctagaaacagtgtgatgaaaatgaaggtccttgttttcttcgttgctacaattttggtagcatggcaatgccatgcgtacgatatgttccctctccgaatgaacactggctatggtgcccgtactccggaggtgaaatgcgcaagttggaggcttgctgtggaagcacacaacatctttggctttgagacca

SEQ ID NO: 196482 - DNA, 269 bp, Glycine max
tacggctgcgagaagacgacagaaggggggagaagaaagagaagcgggcctgagcagcgaaaagaaggcctgggcttagttgataagcataactgggtgaggcagaaagaaagagagtgaagacgatggcgtcgagcggacgctaaccgttttggagggcggcggggatgacgtacaccgcatactcaaacatatgcgcgaatctgctcaggaattgcctcaaggaaccctacaaggccgaatccctctctcgtgagaagctccttttg

SEQ ID NO: 196483 - DNA, 213 bp, Glycine max
acggctgcgagacgacgacagaagggggggcgaggtagccagagagtgatacaatacagagtgcgttgttgctccttcgccacaactccctgccaacatgggtatctccagagattccatgcacaagaggcgtgccactggtggcaagaagaaggcatggaggaagaagagaaagtatgagcttggtcgccagcctcctagcactaagctgtc

SEQ ID NO: 196484 - DNA, 263 bp, Glycine max
tacggctacgagaagacgagagaagggggcacaagtgagtttgttgatcgagataactagaaacagtgtgatgacaatgaaggtccttgttttcttcgatgctacaattttggtagcatggcaatgccatgcgtacgatatgttccctctccgaatgaacactggctatggtgctcgtacttcggaggtgaaatgcgcaagttggaggcttgctgtggaagcacacaacatctttggctttgaaaccattcctgaagagtgcg

SEQ ID NO: 196485 - DNA, 205 bp, Glycine max
gctgcgagaagacgacagaagggaaagctgtgcagaaattacttgatgagcatcgcaaccaagctgatccttttaatcaaattgagcaaggatggtgtgatattcctggaactgtggatgaagttaaagcaaagctacaaatgaggcaagacggagccatcaagagggatagagcaatcgcatactctctctccacacagtcaag

SEQ ID NO: 196486 - DNA, 265 bp, Glycine max
cctcgagcgaatcggctcagacggctgcgagaagacgacagacgggggcacaagtttacttgagatagctagaagcactaagatgacaatgaaagtgcttgttttgtttgttgctacagttttggtagcatatgaatgccatggctcagactaccagaagttccctctccaaatgacaactgggtttggtgggcaatacagcaatgaggtggcatgtgccagttggaggcttggcgtggaagcaaacaacgtagtcaagtggcaa

SEQ ID NO: 196487 - DNA, 266 bp, Glycine max
acggctgcgagaagacgacagaagggttactgtagagtgatgcttattacgaaagtgaaaccacaagaattgtacgaaatgtaaaatggacggtgaatgttgtaatttttaaaataaatattgattaacatttttttaaaacatgtaatgtaggatttcgtggaaatcaactgtcgtgtgataataacgaaatccattttcttgacaaacaacattttccattactttttccaacttaagtataagggtgcatttagaatagttga

SEQ ID NO: 196488 - DNA, 268 bp, Glycine max
ccggctgcgagacgacgacagaaggggggaagatatattattgtgattgtgaacaaaaaagtgtagtgggaaatggcaggtgcgggtgcaggaggagggtatggggacgcgaaccagaggatagactacgtgttcaaggtggtgctgataggggactcggcggtggggaagtcgcagatactagctcggttcgcgaggaacgagttcagcttggactccccgtccaccatcggtgttgaatttcagacgaggactttggttatcgatc

SEQ ID NO: 196489 - DNA, 271 bp, Glycine max
gcgcgagacgacgacagacgggggtatcacaacacaagttgaaacacaaagaagaaaaaatgggttcctctttgtggacttgtctgattttgttatcacttgcttctgcttccttcgccgccaacccaagaacaccaattgatgtgccatttggcagaaactatgtgcctacttgggcctttgatcacatcaaatacctcaatggtggttctgagattcagcttcatcttgataagtacactggtactggcttccaatccaaaggatccta

SEQ ID NO: 196490 - DNA, 302 bp, Glycine max
agacgacagaagggggtgttaagaaatttaagtgaggagctagagaatgatgatgaagtctgctatgtgtgcagtggtggttgtagcacttcttcttctggcggaggtggggcccatggctgatgctgtgacatgcaccccaacagagttgagtccgtgtcttccagcaatcacttccggtgctaaaccttccaatgcttgttgcacgaagctgaagcagcaaaaaccatgcttatgtggctacctcaaaaacgctagcttgaagcagtatgttaactctcctaatgcccgaaaaaccgttg

SEQ ID NO: 196491 - DNA, 299 bp, Glycine max
tacggctgcgagaagacgacagaagggaaagagacccggaaagggtgggaaccgcttttggaaatccattgggcttggatttaagactcccagggaagccatcgaaggaacctacattgacaagaagtgccccttcactggcaatgtttccatccgtggccgtatcttggctggaacatgtcacagtgctaagatgaacaggactattattgttaggaggaattatctccattttatcaagaagtaccagaggtacgagaaaaggcactccaacattcctgctcatatatcacctgctt

SEQ ID NO: 196492 - DNA, 302 bp, Glycine max
acggctgcgagaagacgacagaagggggggtttgtctgtgagctttctcagcataatcttgctaccagatagttggaaatgcagctgaacatgcaggagcaatcatatttactttcaagaacaagctggacatttcattgggtgttgcattgggttcagcaactcagattgccatgtttgtggtctcattatgtgtaatcgttgcttggataatgggtatcgatatggacctgaacttcaacctcctagagacaggttcccttgcgttggcaataatagtcacatgcttcactttacaggat

SEQ ID NO: 196493 - DNA, 282 bp, Glycine max
ctgcgagaagacgacagaaggggtttctatttatttttgtttctaattggtcgggggctcttttaccttggaaaatcatacaattacctcacggggagttagctgcacccacaaatgatataaatactaccgttgctttagctttacttacatcaattgcatatttctatgcgggtctttcaaaaaaaggattagcttatttgaataaatacatccaaccaaccccaatccttttaccgattaacatcttagaagatttcacaaaacccttatctctaagtt

SEQ ID NO: 196494 - DNA, 311 bp, Glycine max
gctcgtgacagaatcccaacataaacccaaagttgaaacatcagccaaccctcaagggacagttgtagcacccatggcaggcttggtagttaaggttctagtggagaacaagacaagagtggaggaaggacaacctgtgttagtattggaagcaatgaagatggagcatgttgtaaaggcaccttcttctggctatgtgcatgggcttcaacttatggtgggtgaacaggtttcagatggcagtgttcttttcagtgtaaaggatcaataaaatcgcacttgacagctttacgccaagactttggcaaagg

SEQ ID NO: 196495 - DNA, 305 bp, Glycine max
ctgcgagaagacgacagaagggaccatatgtttgttgatgagatctttatgcaccattttctcttatctagtcttgtctagacccttaatcctaaagaagcttattggttttatacccttttctacaccacctgtgacttgacaccaaatggccttcctttacctttaaagtcaccacgaatgatgagatctgccatacaacttattttttcacactggcctcattggaatatgacaacaggggaagctcatttctttgtgacccccatgaatttggggcgtgcttccattatcaagtaagaaat

SEQ ID NO: 196496 - DNA, 308 bp, Glycine max
tacggctgcgagaagacgacagaaggggcacttcaaagtggagaaaaacacacacggttggttcattctctctcttttctttttcctcaaaaagttgaaaaagaataaagggggaacaatcgtgtgaagttgttgctcttcaatagtaaacttacctatggaggagggaagggttgtgagtgagtacacaaaagatggaactgtggatcttaaagggaaacccattctcaaatccaaaagtggtggttggaaagcatgctcctttgttgttgtgtacgagatatttgaaagaatggcttattatggaa

SEQ ID NO: 196497 - DNA, 293 bp, Glycine max
tctcgagccgaatcggctcgagacgctgcgagaagacgacagaacggggcacaagtgagtatgttgatcgagataactagaaacagtgtgatgaaaatgaaggtccttgttttcttcgttgctacaattttggtagcatggcaatgccatgcgtacgatatgttccctctccgaatgaacactggctatggtgcccgtactccggaggtgaaatgcgcaagttggaggcttgctgtggaagcacacaacatctttggctttgagaccattcctgaagagtgcgttgaagcaac

SEQ ID NO: 196498 - DNA, 299 bp, Glycine max
cgggggctggcgagaagacgacagaagggtccgtttttacgttatttcgcactgtattgtacaattcctttatttgtgggatttatttctcacacgataattcattaaattatagaatggatttttacctatgcatagatctcggataaatgaaaattttattgataaaaccttttcaattgtagccaatatcttattacgaataattccgacaacttcgggagaaaaaagggcattcacttattacagagatggtgcgatttgattctatttttttaccgaaatcggtaaaaagtgga

SEQ ID NO: 196499 - DNA, 297 bp, Glycine max
tacggctgcgagaagacgacagaaggggggcgcacccagagaggaggaagctttgagagagagagggaggagggagagtgttgacgctccatcaagatgggtatttctagggattccatgcacaagaggcgttccactggtggcaagaagaaggcatggagaaagaagagaaagtatgagcttgggcgtcaggccgcaaacaccaagttatcaagcaacaaaactatccggaggattcgtgttcgaggtggcaatgttaaatggagggcattgaggttggataccggcattactcat

SEQ ID NO: 196500 - DNA, 306 bp, Glycine max
aactcggaatcggtcgatatgagcgaatcggctcgagtacggctgcgagaagacgacaacagggggagaggagtatggagagaagagtgaagaaggcaaatcgcgaagactagatctgatctgagagaatggctcctcagtctagcagcaaggacgcccaagaccttttccgcgctctttggtctgcttatgctgcaacccccactaatctcaagatcattgatctctatgtcatctatgccgtattcaccgctttcatccaggttgtttacatggctttggttggatcatttccatttaactcct

SEQ ID NO: 196501 - DNA, 305 bp, Glycine max
cggtgcgagaagacgacagaagggcgagcgagggagttgaagcttacatttggttactggcaaaggcttatgttgttgtgaatgattcgtgctaccatcaactcgtcagccactggctaaacactcatgcggttgttgagccattcgtcatagcaacaaacaggcatctgagcgtggttcaccctatttacaaacttttgtttcctcactatcgtgacactctgaacattaattcacttgcccgcaaatccttggtcaatgcagacggtattatagagaaaacattcttgtggggtaggtactct

SEQ ID NO: 196502 - DNA, 307 bp, Glycine max
gggaccacattccaaaacacaaacacatacattgtagtatcacttttgtctcggaatttgttcttttgagttatggcaagcttaaaggttgcatgtgtggttttgatgtgcatggctgtgatgagtgcaccaatgatggtgcaagccgtgtcatgcaatgatgtttctgtgaacctagcactgtgcctatcttacctgatgcagggtggagatgttccagaatcgtgctgtagcggagtgaggaacattctgggttctgccagcaccacctttgacaaacaaaccgtgtgcaaatgtcttcagcaag

SEQ ID NO: 196503 - DNA, 297 bp, Glycine max
gacgacagaaggggtttatttaatttgttgcaatttaagaaacaatgcaggaatatttggaacccctttcaagctttctgaggacaatattgaactgcaatttgccacaaatcacatgggtcattttcttttaacaaatctgttgttggatactataaagagaacaacgcatgaaagtaagaaagaaggaagaattgttaatatctcctctagtggtcatcaatggctcaactatcgtggaggatcctttttgataaaattaacgatgaatccagttatcagaaattctgcgcgcat

SEQ ID NO: 196504 - DNA, 298 bp, Glycine max
agacgacagaagggggccgcgaaaacagaacagggactcactctggcagcggcactctcggtggctataatctttctgtggtgagttgtcaagatgtacacatcaaggaagaaaatccacaaggataaggatgctgagccaactgaatttgaggaatcagtcggacaggcattgtttgatctggaaaataccaacaatgagctgaaaagtgatctgaaagatttatacataaactcagctgtccaaattgatgtttctgggaaccgcaaagctgtggttatccatgtcccctacagat

SEQ ID NO: 196505 - DNA, 295 bp, Glycine max
tacggctgcgagaagacgacagaaggggcacaagtgagtttgttgatcgagataactagaaacagtgtgatgaaaatgaaggtccttgttttcttcgttgctacaattttggtagcatggcaatgtcatgcgtacgatatgttccctctccgaatgaacactggctatggtgcccgtactccggaggtgaaatgcgcaagttggaggcttgctgtggaagcacacaacatctttggctttgagaccattcctgaagagtgcgttgaagcaacaaaggaatacatccatggcgaac

SEQ ID NO: 196506 - DNA, 297 bp, Glycine max
  unsure (1)..(297): unsure at all n locations
atcgagcgaatcggctcgagacggctgcgagaagacgacagaaggggataccanaaacaaaacacaagccaagtgaaactgagaaaaaataaaaatcaaagagcataatgtcagggatcattcacaagattggggagacccttcatgtgggagggcacaagaaggaggaggagcataagggtgagcaccatgctggagaatacaaaggggagcaccatggtgaacacagtagtgagtacaaaggagagcatcatggtgaacacaaagctggagagtaccatggtgagcacaagccag

SEQ ID NO: 196507 - DNA, 281 bp, Glycine max
acggctgctagaagacgacagaagggggcagcgcttgatttgaggccaggcaagccccactcaaccaccacacctctcctcgttcacgctacccctttctgctcttcttctacctttcaagttttaaaagtataaagatggcagagacattcctatttacctcagagtcggtgaacgagggacaccctgacaagctctgcgaccaaatctccgatgctgtcctcgacgcttgcctcgagcaggacccagacagcaaagttgcctgcgaaacatgcaccaaa

SEQ ID NO: 196508 - DNA, 302 bp, Glycine max
atgcgagaagacggcagaagggggcacaagtgagtttgttgatcgagataactagttacagtgtgatgaaaatgaaggtccttcttttcctcgctgctacaattttcgtagcatggcaatgccatgcgtacgatatgttccctctccggatgaacactggctatggtgctcgtactccggaggtgagatgcgcaagctggaggcttgccgtggaggcacacaacatctgtggcttcgagaccattcctgaagagtgcgttgtagcgacacaggactccatccgtggcgttcaatatagatca

SEQ ID NO: 196509 - DNA, 297 bp, Glycine max
ttgattagtaacgttagatgccatagcagtagtgaatccaatccaattgaaagagacttcagtcattgatgccagtgccactccacctactactggtacaagggaagaaaccacccagaaagtaggcatctcacccagtaaaagggcagaaagaactacagtgaagaaaggctccatagctttgattgtgtgagtgaaagatacagcaaccttgccaagactaatgttggtcaagaggtttcccattgtgtgagccacagccagtggaaggattgctgcaaactgtgaaccactgat

SEQ ID NO: 196510 - DNA, 292 bp, Glycine max
tagacgacagaagggcaaagatagaagaagaaatactggaagcagaagaagaaccgcagtttcccgataacgagccacttatcgtgagagacgcgaacagaaggctaatgcaagatatggattgtggtgggttgtgcaagacgaggtgcagtgcacattcgaggcccaacttgtgcactagggcgtatggcacgtgctgtgtgaggtgcaagtgtgtcacacctggtacatctggaaatagggaactatgtggaacctgctacactgatatgaccacccatggcaacaagac

SEQ ID NO: 196511 - DNA, 297 bp, Glycine max
tacggctgtgagaagacgacagaaggggactacagccacttctatagcttcaatttataagaatggcactttctcctattcgttcttcttctttctcttcatcagctattgttgcattggctgtgttactgcttcttacagggacctcttcagctaacctctcaaagaacttctattccaagacatgtcccaacgttttcaacactgtaaaatctgtagttaaatctgctgttgtcagagaacctcgcattggggcatctattgttcgtctcttcttccatgactgctttgttcaag

SEQ ID NO: 196512 - DNA, 175 bp, Glycine max
tacggctgcgagaagacgacagaagggatatgttagataaaatagattaattaatctatttcacaaaaaaataatgtatccatagcacagtttcgtcttataatacctcgggtgctaatgaaactattttagtgaaatttaactgtctcaattcccgggcgattccacacaacat

SEQ ID NO: 196513 - DNA, 296 bp, Glycine max
tacggctgcgagaagacgacagaagggggcacaagtgagtttgttgatcgagataactagaaacagtgtgatgaaaatgaaggtccttgttttcttcgttgctacaattttggtagcatggcaatgccatgcgtacgatatgttccctctccgaatgaacactggctatggtgcccgtactccggaggtgaaatgcgcaagttggaggcttgctgtggaagcacacaacatctttggctttgagaccattcctgaagagtgcgttgaagcaacaaaggaatacatccatggcgaac

SEQ ID NO: 196514 - DNA, 277 bp, Glycine max
ggaagaagctgctagctattagctatgggctagaggaaagatccagatcaagaggatagagaacaacaccaaccgccaggtcacttactctaaacgacggaatggccttttcaagaaggccaacgagcttaccgttctctgcgatgccaaggtttctattattatgttctccagcactggaaaactccaccagtacatcagcccctccacctcaacaaagcatacttcgatcaataccagatgactctgggagttgatctctggaactctcattacg

SEQ ID NO: 196515 - DNA, 295 bp, Glycine max
gctgcgagaatactacagaagggggtagagtgaagagaatggctcccaagggtttaacctttccggctgtgttaatatgcgtttcagcactgtcactgagtccttctgttgcgggggaagggcaaaataatggccttgttatgaacttctacaaggaatcatgccctcaggctgaagacatcatcacagaacaagtcaagcttctctacaagcgccacaagaacactgctttctcctggctcaggaacatcttcacatgactgtgctgttcagagttgtgatgcttcactgttgc

SEQ ID NO: 196516 - DNA, 297 bp, Glycine max
acggctgcgagaagacgacagaagggggttgtaaacatcccttctttcatctttcaactctctctctcaccccctctttctctcacacacaaatgtctaaaataacaataacctctccaaaacactgtgctgacaaagaaggactaaaaatcaagaactacaagaagatctacttcactttctcagcatttttcatcacaatcctactactaatacttgttatatggctcatcctccaccctgcaaagcctcaattctccctcaaagaagtcgacatcttccaacttaacctttcag

SEQ ID NO: 196517 - DNA, 298 bp, Glycine max
agacgacagaaggggggtggtgagcgtgccaaaatctatgagaatggaaaccttctcacactctcccttgacagagcctctggctctggctttcgttccaaaaaagagtacttgttcggaaaaattgacatgcagctcaagcttgtgcctggtaactctgctggaacggtaactgcctattatttatcttctctggggcctactcatgacgaaatagactttgagtttttgggtaacttgagtggtgatccttacactctccacacgaacgtattcaggtcaaggaaagggaacagag

SEQ ID NO: 196518 - DNA, 301 bp, Glycine max
acattttgaaaaagtttatatgcatagcagatcttcgaacacaaatttctgggtacatgtatggcgtaagtcctccagataatcctcaggttaaagaaattcgctgcattgtgatgccaccacaatgggggacacatcaacaagttcatctgccatcagctcttccagagcatgatttcttgaatgatttggagcctttaggatggatgcatactcaaccaaatgaacttcctcagttgtcgcctcaggatctcacttcacatgccaagatcctagagaacaataagcaatgggatgggga

SEQ ID NO: 196519 - DNA, 293 bp, Glycine max
acggctgcggaagacgacagaggggatcgaacagagagagagagaatggcagcacttggtgggaatcgtgatgtgacaggaagccagaacagcgttgagatcgatgctctagctcgctttgctgttgaagaacacaacaaaaaacagaatgcccttttggagtttgaaaaggtggtaactgcggaacagcaagtggtttctggtaccttgtacaccatcactttggaggcaaaagatggtgggcaaaagaaggtttatgaagccaaagtttgggagaagtcatggttgaactt

SEQ ID NO: 196520 - DNA, 279 bp, Glycine max
gcttcgagtagacgacagaaggggatttttgtttcaaaatatgaactcaccaccccatctaggttggcctcctaatggtgatgatccatgtggacaatcttggaaaggcatcactttctcaggcaaccgtgttacagagattaagctatctacatcttggactaactggatcggttccttacggattacaagtcttgacatctttgaatgacctagacatgagtagcaaccgtcttggtggaagcataccttaccaacttcctccatatttgcagcgct

SEQ ID NO: 196521 - DNA, 293 bp, Glycine max
acggctgcgagaagacgacagaagggggaggttgaaaggggatggtgagagtaagcaaagaggctctgcaaaaagcagccaaaaccctatccgaaatcctcgtgtgccctctctctaagcagcctttgaggtattgtgaggaatcaaattccttaatcagcgatgctattggcgttgccttccccataaaaaatgggataccatgcttggttccaagagatgggaagatacttgaggaagaagatgcctcaaaacctgataatgataccaatttatctgcagtaaatgaagag

SEQ ID NO: 196522 - DNA, 297 bp, Glycine max
tacggctgcgagaagacgacagaagggggagtgtgagagaaaccagtgactgacttttcgagaaagaaaaacaaaaatgagtttccgtcattccatcatgaacgctcttcctattctcctcttcttcctcttcgtttctgcattagtttctgcgaagaaaactggtgatgtgacggatatgcaaattggcgtgaagcataaaccagtatcatgtgaagttcaggcacacaaaggtgacagagtcaaagtacactataggggaaaactcactgatggaactgttttcgattctagctt

SEQ ID NO: 196523 - DNA, 297 bp, Glycine max
tacggctgcgagaagacgacagaagggggatcctttgtattctattcttcaagattcaggtactgcgtttcggaagcagacacagatggctcgtacgaagcaaaccgctcgtaagtccacaggaggaaaggctcctaggaagcagcttgcaaccaaggctgcacgtaagtctgcaccaactactggtggtgtgaagaagccccaccgttatcgtcctggtaccgttgctcttcgtgagattaggaaataccagaagagtaccgagcttttgatccggaagctccccttccagaggct

SEQ ID NO: 196524 - DNA, 299 bp, Glycine max
tacggctgcgagaagacgacagaaggggccttaatagtgaacattggagacatgatggagaggtggacaaattgtttatacaggtcaacacttcacagggttatgccaacaggaaaagaacgttattccgtggcattcttctttgacccggcctcagactgtgtggtggagtgctttgaaagttgctgcagtgaatcatctcctcccagattctctccaatacgtagtggggactacttgaatgaacggttcagactcacctatggttctgaaaaggatctaaaatgtgatttatccag

SEQ ID NO: 196525 - DNA, 212 bp, Glycine max
gcgagaagacgacagaagggggagaagagagatggatccagacgcgttggcagaggcattcgtggagcactactacagcaccttcaacaccaaccggaacggtttagcgaatctgtatcaggagggttccatgctgaccttcgaagggcagaagatccagggcgcttccagcatcgtcgctaagctcacttccctccctttccagcagtgcc

SEQ ID NO: 196526 - DNA, 163 bp, Glycine max
tacggctgcgagaagacgacagaagggaacgttaacatgaagaatgttttagtaaggtcagctgcgcgagctctgcttggcggcggtgggcggactactaccgccagctctcaacggcggcgatcgtggaacagagacaccagcacggtggcggcgcgtttgg

SEQ ID NO: 196527 - DNA, 279 bp, Glycine max
tgctgcgagaagacgacagaagggggggagagaatagagaagagagatggatccagacgcgttggcaaaggcattcgtggagcactactacagcaccttcgacaccaacaggaacggcttagcgaatctctaccaggagggttccatgctcactttcgaagggcagaagatccaaggcgcttccaacatcgtagaccaagctcacctccctcccttttcagcagtgccaccactcaatctccaccgtcgactgccagccctccggcgtcaacgccggca

SEQ ID NO: 196528 - DNA, 278 bp, Glycine max
aagacgacagaagggggcactgcaaatcacttttctactttgagtcttcttgatccttctttttctccttgaactcaaacatggcagatgaggtggttctgctagatttctggccaagtccatttgggatgagggtcaggattgcacttgctgaaaagggtatcaaatatgagtacaaagaagaggacttgaggaacaagagtcctcttctcctccaaatgaacccggttcacaagaagattccggttctcatccacaatggcaaacccatttgtgaa

SEQ ID NO: 196529 - DNA, 246 bp, Glycine max
gatgcataagaacaagcacaaggtctgattcgtgtttccttacatcaacttgtggtctaaaaatgggaaggatgccatgctgtgagaaggtagggttgaacaaaggaccatggaaaaccgaagaagatgagaagctcgtggcttatgttgaaaggcatgttcctggaaactggcgttcagtgcctgccaagcgggtcttcaaagatgtggcagagttgtagactgaggtggatcactactaaaccc

SEQ ID NO: 196530 - DNA, 278 bp, Glycine max
tacgggcgataagacgacagaagggggtggcaggtgtgggttcttcaattcattctagttctggattccgactagccgcgttgactcggttccgtttttcattctcgcggatctaatattaaggaatagcttaagggcacattacaatgaaggcattgattctggttgggggatttggaacaaggctgaggccactgacactcagtttccctaagcctcttgttgattttgctaacaagcctatgattttgcatcagatagaagcccttaaggccatt

SEQ ID NO: 196531 - DNA, 253 bp, Glycine max
tacgctgcgagtagacgacagatgggtatgatggtgaattgaaacttccaagtcattaccttgtttctccaccagagattgacaggacttctggtgaatatttagtgtataatggtattcggacttttgcttgcagtgagactgttaaatttggccacgtcacattcttctggaatggaaactgctctgggtattttaatgcagaattggaggtatatgtggaaattcctagtgaatctgggattacattcat

SEQ ID NO: 196532 - DNA, 172 bp, Glycine max
cggctcgagcggctcgagacggctgcgagaagacgacagaagggatcagtggtgccccccaggctaacaacataatgctgtggaatgctgtcatatttggtcctgatgatactccatgggatggaggcacgttcaagttgacactccaatttactgaggcttacccaattaa

SEQ ID NO: 196533 - DNA, 254 bp, Glycine max
agcgtaaggccaacaaagtcactgtggtcggttacgtcgaggcctctaaggtggtcgcccgcatcgctcaccgcaccggcaagaaagcagagctctggccctacgtcccctacgacgtcgttgctcacccctacgcacccggagtctacgacaagaaagccccctccggttatgtccgcaacaccgatgatcctcactattcccatttcgcaggtgcacattccattgaggtccgttacaccatgctttaaggg

SEQ ID NO: 196534 - DNA, 266 bp, Glycine max
tacggctgcgagaagacgacagaagggaatggaggcattgaccatagtgcctgagcgctatgttcgaccagttcatgaacgtcctatattatctaactctacacctttacctgaaattcctgtcattgacttgagcaaattgttgtctcaagaccacaaggagcatgaactcgactggcttcactatgcatgcaaagaatggggtttctttcagctaattaatcacggagtggactcttcattggtggaaaaagtgaagagaggtg

SEQ ID NO: 196535 - DNA, 228 bp, Glycine max
agacgacagatgggggcgcgagatagagactgaagattgaagaacagtcgtcggctcctcgctcgcccttcgctgctgcgccatcaccgtgcccttctcaaagcgattttaacctaaccgcgttctttttttcttcagaaatcgagcataaggatttgaggattgaagtattgaacaccaaatcctttatactttgactgtccaggttgggcaagaagggagggaaaa

SEQ ID NO: 196536 - DNA, 276 bp, Glycine max
cggctgcgagaagacgacagaaggggcacaagtttgttgagataactagaagcaataagatgaaaatgaaagtgcttgttttgtttgttgctacagttttggtagcatatgaatgccatggctcagactaccagaagttccctctccaaatgaaaactgggtttggtgggcaatacagcaatgaggtggcatgtgccagttggaggcttggcgtggaagcaaacaacgtagtcaagtggcaaactgttcctgcagcttgcggagagtacatagctg

SEQ ID NO: 196537 - DNA, 153 bp, Glycine max
acggctgcgagaagatgacagaagagaaagatttccttcagatttgttgacacagctgaagacagattgtctcgtcctgcacaatcatcgttatgccatatccccacgcaagcttcaatataataccaagttatctgacttttttgagattct

SEQ ID NO: 196538 - DNA, 268 bp, Glycine max
tacggctgcgagaagacgacagaagggggtgcacaagtgagtttgttgatcgagataactagaaacagtgtgatgaaaatgaaggtccttgttttcttcgttgctacaattttggtagcatggcaatgccatgcgtacgatatgttccctctccgaatgaacactggctatggtgcccgtactccggaggtgaaatgcgcaagttggaggcttgctgtggaagcacacaacatctttggctttgagaccattcctgaagagtgcgttg

SEQ ID NO: 196539 - DNA, 268 bp, Glycine max
ctgcgagaagacgacagaagggaactgttgttgagggaactatacagaagctatttgaagggcatcatatgaattatatcgaatgcatcaatgtggactataaatcaactagaaaggagtcattttatgaccttcagcttgatgtgaagggctgtcctgatgttaatgcttcctttgacaagtatgttgaagttgaacgtcttgaaggggataacaaatatcatgcggaacaatatggtttgcaggatgctaagaggggtgtcctgtt

SEQ ID NO: 196540 - DNA, 269 bp, Glycine max
tgcgagaagacgacagaagggggggatgaattgtggcctgcggataagcttggatttactaaaaccgccatccaagcaaagccggactctgtctactttgttgtcagcaggggtgctgaagtagacgttaaaaagctcacaaagcgacctgctcctcctcgatttggaagaaaactgaccgagactcaaaaggcgagagctactcacatttgccttgattgtggatacatatacaccttacagaaaccttttgatgagcagccggacac

SEQ ID NO: 196541 - DNA, 271 bp, Glycine max
aaccattcacaacaaggtgcataatggtcttcttccaatattggatcatgtacagcaacaaggaagagtggtggatcttcaagatgtcttcaatcgcttcaccttcgataacatatgttctatagttcttggaaatgaccctaattgtctttccattgatttttctgaagttgccattgagaaggcttttaatgaagtagaagagtccatattctacagacatgtactgcctaggtgtgtttggaagatccagagatggcttcaaattggt

SEQ ID NO: 196542 - DNA, 186 bp, Glycine max
tctgaattcggctctagtactgctgtgagaactcgacagaagggggataatgggtttggacttgcctcacggatgacatttgtctcatggattcatgacacccaaaaaacgtgtatcatccacatcaatttatttttaatctatgccttatcgacttgatgaatcaacaggtcttattgattatga

SEQ ID NO: 196543 - DNA, 215 bp, Glycine max
gaagacgacagaaggggaaggaagaaccagctgaagaatctgatgatgacatgggtttcagtctgtttgactaatttatgtaatgcttttgttgagtttatttggttagaattgaagttgtgtttgcctttcatttcaggtgttattttagtgtattcatgttacattgcaactacttttaatttccatagttaattaaagcttcaacgtttctg

SEQ ID NO: 196544 - DNA, 266 bp, Glycine max
cctcgagcctattcggctcgagacggctgcgagatacgacagatgttcggcagcgctttatttcaggccaggcaagccccactcaatcaccacacctctcctcgttcacgctacccctttctgctcttcttctacctttcaagttttaaaagtataaagatggcagagacattcctatttacctcagagtcggtgaacgagagacaccctgacaagctctgcgaccaaatctccgatgctgtcctcgacgcttgcctcgagcagga

SEQ ID NO: 196545 - DNA, 263 bp, Glycine max
tcggctgcgagaagacgacagatggggaaatgagtgcggcagatagggaagcaaattttgttcctagagtttgtatatttgggggaaaagcatttgctacatatgtgcaagccaagagaattgtgaaatttattacagctgttggggctacagtaaatcatgaccctgaaataggagatctacttaaggttgtttttgtccctgattataatgtcagtgttgccgagatgcttattccagcaagtgaattgtcacaacatatc

SEQ ID NO: 196546 - DNA, 237 bp, Glycine max
gaagagtgagaatgcttaccactggatctggtgcatcgtcttccttgcacatcacccaagggaccccagttcccatttccacagccatttttgcagcccaattcacatagttttgaccagcagctccttgcaacttactctgtgccccatattcattctcaatctaaaactgcaaacacatggtgaatcatgaatgcatcattaaaattcaaactagatctagagtgaaaagctcat

SEQ ID NO: 196547 - DNA, 270 bp, Glycine max
tagacgacagatgggggcgcacccagagaggaagcttagagagagagagagagagagagagagagaggagagagtattggcgcttcatcaagatgggtatttctagggattccatgcacaagaggcgtgccactggtggcaagaaaaaggcttggagaaagaagagaaagtatgagcttgggggtcaggcagcaaacaccaagttatcaagcaacaagacaatcaggaggattcgtgttagaggtggcaatgttaaatggagggcattga

SEQ ID NO: 196548 - DNA, 265 bp, Glycine max
gagaagacgacagaaggggagctagggtttcagtggtgttagatctgtacccgcctagccattgatttggaaaagtccaagcttcaaagatgagtaagcttcagagtgatgctcttagagaagctatctcaggaatcatgactgattccaaggaaaagaacaggaaatttgtggagaccattgaactccaaattgggctgaaaaactatgatccccagaaggacaagcgttttagtggctctgttaagttgcctcacattcctcg

SEQ ID NO: 196549 - DNA, 246 bp, Glycine max
ggatgtggaacatatggaagacagaattgctggatggaagaagatttgatcacaaaagtgacgaatggttggaatccagtttcttcttctacgacgagaacagtaactatgtgcgtgtgaaggtcaaagactgcctcgactccaagaagatggggtatgattaccaacgtgttgaccttccatggctgttggctggggaactcatcaaaccaaagaaggagattaattcccttcgttcaaaaacag

SEQ ID NO: 196550 - DNA, 264 bp, Glycine max
cggctgcgagaagacgacagatgggggcacaagtgagtttgttgatcgagataactagaaacagtgtgatgaaaatgaaggtccttgttttcttcgttgctacaattttggtagcatggcaatgccatgcgtacgatatgttccctctccgaatgaacactggctatggtgcccgtactccggaggtgaaatgcgcaagttggaggcttgctgtggaagcacacaacatctttggctttgagaccattcctgaagagtgcgttg

SEQ ID NO: 196551 - DNA, 261 bp, Glycine max
tacggctgcgagaagacgacagaaggggagtgcagcatcatagagaaataagggaaaaatggtgtcgctgaaactgcagaagcgcctctccgcaagcgtgctcaagtgcggcagaggaaaggtttggcttgaccccaatgaagtcaacgaaatctccatggccaattctcggcaaaacatcaggaagttggttaaggatgggtttatcatcaggaagccaaccaagattcactcccgctcacgtgctcgtaggatgaagga

SEQ ID NO: 196552 - DNA, 225 bp, Glycine max
  unsure (1)..(225): unsure at all n locations
taggcgcgacttgactacagaantgggggtgccattgttgttgttattatcatccgcagctgcttttattcgcaccgcaaactgtgagccatggccgttggaaagtgcaagcgcatctccaatgggatgaagggtggcaagaagaaggcagctgatccctttgccaagaaggattggtatgtacttaagggtccttctgtttgtccagtgaaaaatgttggcaaa

SEQ ID NO: 196553 - DNA, 225 bp, Glycine max
agataattctaactttgctggttatacatgcagattcatacaaggctataaatgatgagggaatgcccatgtatcagaggtcattcatgaaggggaagctttacattcacttcactgtggagttcccagattccctaaaccctgaccaggttaaggccttggaagctgttctgtcaccaaagccttcttcacaattgacagacatggagctggatgattgtgagg

SEQ ID NO: 196554 - DNA, 269 bp, Glycine max
tacggctttgagaagacgacagaagggatttgagttcataatcaacaatggcggcattgattctgatgaggattacccataccgtggtgttgatggtagatgcgacacatataggaaaaatgctaaagtcgtttctattgatgactacgaagatgttcctgcctatgatgagttagccttgaaaaaggccgttgcaaatcagcccgtgagcgttgctattgaaggagggggcagggaatttcaattatatgtatctggtgtattcaggg

SEQ ID NO: 196555 - DNA, 279 bp, Glycine max
tacggctgcgagaagacgacagaagggggcacaagtttgttgagatagctagaagcaataagatgaaaatgaaagtgcttgttttgtttgttgctacagttttggtagcatatgaatgccatggctcagactaccagaagttccctctccaaatgaaaactgggtttggtgggcaatacagcaatgtcgtggcatgtgccagttggaggcttggcgtggaagcaaacaacgtagtcaagtggcaaactgttcctgcagcttgcggagagtacatagctg

SEQ ID NO: 196556 - DNA, 280 bp, Glycine max
gctcgagcggctcgagcggctgcgagaagacagaagggggtctccaaccggtgatgtctacgctggcggtacgactggcttggctatctgggctgtgactctacttggtcttttagctggtggtgcacttcttgtctacaacacaagtgctttcgttcaatagactttgcaaatcgatgtttaagttataacatagtccatgtaactatctaaaaatgaagaactattcgtgaagtactttgtggatatgttccttctgttctataaatgagtggatgtg

SEQ ID NO: 196557 - DNA, 268 bp, Glycine max
acggctgcgagaagacgacagaaggggagggttttgcgctgttgttgctgctcatcctccgtaacctccgagctctgcaccgaagaacgaagccatggggaagacacatggaatgggatctgctcgcaagctcaagtcccaccgcaggaggcaaaggtgggctgacaagtcatacaagaaatcacatcttggaaatgaatggaagaaaccttttgctggttcatcccatgccaagggaattgtccttgaaaagataggtattgaggct

SEQ ID NO: 196558 - DNA, 228 bp, Glycine max
tacggctgcgagaagacacagaagggatcagcggtgccccccaggataacaacataatgctgtggaatgctgtcatatttggtcctgatgatactccatgggatggaggcacgttcaagttgactctccagtttactgaggattatccaaataaaccaccaactgtgcgatttgtgtctcgcatgtttcatccaaatatttatgcgattggaagtatttgtttggata

SEQ ID NO: 196559 - DNA, 273 bp, Glycine max
acggctgcgagaagacgacagaagggggacaccagaatgaagattgcgcttgatgctgcaaggggactttcatacctgcatgaagactcacagccctgtgtaatacatagagacttcaaggcatccaacatattgcttgagaacaattttcatgctaaggttgcagattttggtcttgctaagcaagcacctgaaggcagatctaattatttgtctactcgtgtcatggggacatttgggtacgttgctcctgaatatgccatgactggacac

SEQ ID NO: 196560 - DNA, 269 bp, Glycine max
agaagacgacagaagggggcacaagtgagtttgttgatcgagataactagaaacagtgtgatgaaaatgaaggtccttgttttcttcgttgctacaattttggtagcatggcaatgccatgcgtacgatatgttccctctccgaatgaacactggctatggtgcccgtactccggaggtgaaatgcgcaagttggaggcttgctgtggaagcacacaacatctttggctttgagaccattcctgaagagtgcgttgaagcaacaaagga

SEQ ID NO: 196561 - DNA, 252 bp, Glycine max
cgagaagacgacagaagggggtttcggagaagaattaagcactcggttgcagaacagaacaaacttctttcactctttcgcttctgaatcttcaacaatggtgctcgaggcgacgatgatctgtatcgacaattctgaatggatgcgtaacggagattactctccttctcgatttcaagctcaagcagacgctgtcaatctcatatgcggtgctaaaacgcagtctaattccggaaaatacagtgggagtct

SEQ ID NO: 196562 - DNA, 269 bp, Glycine max
tacggctgcgagaagacgacagaagggggatttcatttcgtttgcaattgaatttcaatttccctaggggcttaatatctcccctcactagtgcctagccttatgtcatagtattatcattcattctcatctttctctcttctctctccacccaaaccctaactcccgaccctgttcccctctcgtatccgtcatgaaaggaggaaagtccaagaccgaatctaagagagccgatcccaaacttgctgtgaataagaagggacccgccc

SEQ ID NO: 196563 - DNA, 272 bp, Glycine max
tctcgagcgaatcggctcacggctgagagaagacgacagaagaggaggggggaaatggagcgtatgtgatgagagtgggattggcgtcgttcttcaccggggctgcagtggcgtcgtttctggggctctacaccctccacaaggattacaaggtcgcgcaccaatcctttactcaacagatgaatgacctccacaaatcgctggaaggtcgaatttcttccttggaaaaaatgaaacaaacggaaacgtctgaacaggttgaagcaattgat

SEQ ID NO: 196564 - DNA, 227 bp, Glycine max
agacgacagaagggggttctagtgtgtgattgtttgttgttgtaactcgtcctcctcctttggtggtcctgtgtttgggtttgtttttcctctcacctgaaaatgtcttgctgcggtggtaactgtggttccggaactcctgcaattccggcaacggctgcggaggctgcaagatgtacccagacttgagctacactgagtcatgccccaccgaaaccttggtcatg

SEQ ID NO: 196565 - DNA, 276 bp, Glycine max
acggctgcgagaagacgacagaaggggagggcaaagagaactctatcttcaactgcccaaaccaccattgaaattgattctctctatgagggaattgatttctactccaccattactcgtgctagatttgaggagctcaatatggatctcttccgcaagtgcatggaaccagttgagaagtgtttaagagatgctaagatggacaagaggactgtccatgatgttgtacttgttggtggttccaccagaattcccaaggtgcaacaactcctgcaa

SEQ ID NO: 196566 - DNA, 273 bp, Glycine max
acggctgcgagaagacgacagaagggcacatggtggggaatgtgtacgttcagttcagagaggaggagcatgccgctaatgctgttaggaacctcactggaaggttttatgcaggtcggccaattattgttgatttttcgccggtgacggatttccgagaagctacttgcaggcagtatgaggagaatacttgcaaccgtggtggttattgcaacttcatgcacttgaagagaattagcagggaattgaggcgtcagttgtttgggaagtccc

SEQ ID NO: 196567 - DNA, 270 bp, Glycine max
cctcgagccgaatcggctcgagtacggctgcgagaagacgacagaacggcacgcacaaatcgacgaatgaccctataaccaaagaggcactcgacacgtgcaagcaactcatgaacctctccatcggggagttcacgaggtcactcgacaagttcgccaagtttgacctgaacaaccttgacaacatcctcacaagtttgaaggtttggctcagcggtgcaatcacgtaccaagaaacatgtttagatgctttcgagaacacaaccaccg

SEQ ID NO: 196568 - DNA, 269 bp, Glycine max
tacggctgcgagaagacgacagaaggggatggtgtctttgcctcttccgatggaacaccatatctccaacccaacatgatttgcatttttgagagttatgctggtgacattgcgtggcgacatgcagagtgccccatcactgacctcaaggttacagaagtgaggccaaaggtgacactagtggttaggatggcagcagcagtagcaaactatgactatatcgtggattgggaatttcaaactgatgggctaatcagagcaaaggttgg

SEQ ID NO: 196569 - DNA, 259 bp, Glycine max
acggctcgagaagacgacagaagggggaacctttgcattctattcattcaagattcagcaagtgcgttttggaagcagagaccgaaatacttcgagatggcccgtacaaagcaaactgctcgtaagtcaactggaggaaaagctcccaggaagcagcttgcaaccaaggctgcacgtaagtctgcaccaacaactggtggtgtgaagaagctcatcgttatcgccctggtactgttgctcttcgtgagattaggaaata

SEQ ID NO: 196570 - DNA, 273 bp, Glycine max
tacggctgcgagaagacgacagaagggggagagagagagagaggggaaaggaggaaagatgagtagttcatcaaggccggtgccgaggagagagagtccatggggagtcaccggagagaatcatcctgaacccaaagctcaccgctgcaatgaccgtgtcgaggacgttattcaggcttgctttgagggaaacccattcaagactgttccgggacctttcaagctcttctggcagtgcatgtgttccaaacccgggtcagattctcatcttct

SEQ ID NO: 196571 - DNA, 269 bp, Glycine max
tacggctgcgagaagacagaaggggaggacagttcctttcctacctcatcaacttggccttcaccaaggcaccagggacatggaggtggatgttaggggtagcagcagtgccagctttgttacaaattgtactaatgttgacactcccagaatcgcctcgttggctttaccgcatgggtaaggaagaggaagcaaaatcgattctgaaaaagatttatccaccacatgaagttgaaggcgaaattcaggccttgaaagaatcagttgac

SEQ ID NO: 196572 - DNA, 216 bp, Glycine max
gctgcgagaagacgacagaagggggagcgaagaagatattagggtttttgagtgcggtgcggcgatcctagcactctcttctgcagctttcgccgacagcttcattcaccatggctgagcaaaccgagaaggcttttttgaaacaaccaaaagtgtttctcagctcgaagaaaactgggaagggaaagagacccggaaagggtgggaaccgctttt

SEQ ID NO: 196573 - DNA, 259 bp, Glycine max
tacggcgagaagacgacagaagggggcacaagtttgttgagatagctagaagcaataagatgaaaatgaaagtgcttgttttgcttgtcgctacagttttggtagcatatgcatgccatggctcagactaccagaagttccctctccaaatgaaaactgggtttggtgggcaatacagcaatgaggtggcatgtgccagttggaggcttggcgtggaagcaaacagcgtagtcaagtggcaaactgttcctgcagcttg

SEQ ID NO: 196574 - DNA, 189 bp, Glycine max
acggctgcggaagacgacagaagggggatgcagatgcagcctatcatggcagcctactaccccaacaacgtcaccactgatcacattcaacagtacctggatgagaacaagtccttgatcctgaagattgttgaaagccagaattctggcaagctgagcgagtgtgcagagacccattcagggctgcag

SEQ ID NO: 196575 - DNA, 267 bp, Glycine max
tacggctgcgaggacgacagaagggggcacaagtgagtttgttgatcgagataactagaaacagtgtgatgaaaatgaaggtccttgttttcttcgttgctacaattttggtagcatggcagtgccatgcgtacgatatgtcccctctccgaatgaacactggctatggtgcccgtactccggaggtgaaatgcgcaagttggagcttgctgtggaagcacacaacatctttggctttgagaccattcctgaagagtgcgttgaagc

SEQ ID NO: 196576 - DNA, 242 bp, Glycine max
  unsure (1)..(242): unsure at all n locations
ggatccaaatcaagctccagaagcgtcttctcagaagaaaatgggaagagggaagattgaaatcaaacggatcgagaacaccaccaataggcaagtcaccttctgcaagcgccgcaacggtttgctgaaaaaagcttatgaattatcagttctgtgtgatgctgaagttgccttgtggtcttctcaacccggggccgtttgtntgattatnccaacaacgtntngggccattttgggggntc

SEQ ID NO: 196577 - DNA, 270 bp, Glycine max
acggctgcgagaagacgacagaagggggaagaaatgcaagattggttattgagtgttggtattatatcccctgttacgaaagagtctgcgggtgctttgtatcatcaacaactttctcgtcagttggcagattttgttaaagttccacttgagaaagctgggggaattatcaatcttattgatatatattgtctcttcaaccgtgctcgtggcacagaattgatctcacctgatgatttgttgcaagcatgttctctgtgggagaagttt

SEQ ID NO: 196578 - DNA, 253 bp, Glycine max
tacggctgcgagaagacgcagaagggggcacaagtgagtttgttgatcgagataactagaaacagtgtgatgaaaatgaaggtccttgttttcttcgttgctacaattttggtagcatggcaatgccatgcgtacgatatgttccctctccgaatgaacactggctatggtgcccttgctccggaggtgaaatgcgcaagttggaggcttgctgtggaagcacacaacatctttggcttggagaccattcttg

SEQ ID NO: 196579 - DNA, 265 bp, Glycine max
ttacggctgcgagaagacgacagaaggggggatctgataggaatagatttcgtcagtgttgaaatcacgagaaattcatggctgctccaccggcaagagctcgtgcggattacgattatctcataaaacttctcttgattggcgatagtggtgtcggaaagagttgccttcttctacgattctctgatggttctttcacaactagtttcatcacaactataggcattgattttaagataagaaccattgagcaggatggaaaacg

SEQ ID NO: 196580 - DNA, 175 bp, Glycine max
acggctgcggaagacgacagaaggggaagaggggtgagtttctcaagtgggacactaggctcaaaatagccatagaagctgcaaaaggactttgctatttgcaccatgattgttcccctttgatcatccatagggatgtcaagtcaaacaacatactgctgaactctgattttga

SEQ ID NO: 196581 - DNA, 265 bp, Glycine max
tacggctgcgagaagacgacagaagggggcacaagtgagtttgttggtcgagataactagaaacagtgtgatgaaaatgaaggtccttgttttcttcgttgctacaattttggtagcatggcaatgccatgcgtacgatatgttccctctccgaatgaacactggctatggtgcccgtattccggaggtgaaatgcgcaagttggaggcttgctgtggaagcacacaacatctttggctttgagaccattcctgaagagtgcgtt

SEQ ID NO: 196582 - DNA, 270 bp, Glycine max
gaagacgacagaagggggcacaagtgagtttgttgatcgagataactagaaacagtgtgatgaaaatgaaggtccttgttttcttcgttgctacaattttggtagcatggcaatgccatgcgtacgatatgttccctctccgaatgaacactggctatggtgcccgtactccggaggtgaaatgcgcaaattggaggcttgctgtggaagcacacaacatctttggctttgagaccattcctgaagagtgcgttgaagcaacaaaggaat

SEQ ID NO: 196583 - DNA, 207 bp, Glycine max
  unsure (1)..(207): unsure at all n locations
acggctgcgaaagacgacagaaggggtagatgggagaggaccaagcatatgggacacctacactagacagcatactgaaaagatttgggatcatagcaccggtgacatgggagctgatttttatcatcgatacaagggtgacataaaaatagcgaaagaaattgggctgaatancttcagattctctatctcatggtcaagaatatt

SEQ ID NO: 196584 - DNA, 261 bp, Glycine max
tacggctgcgagaagacgacagaagggacagcaacaacaagtgaatggtggtgaggtacaaagtagccgtagggcagtgctttcacttgttgctgctggtttgaccactggctcttttgttcaagctgtgcttgctgatgccaaacctatcaaagttggaccacctcaccgaccttctggcggattacctggaacattgaactcagatgaaccaagagaccttaagctgccattgaaagataggttcttccttcaaccatt

SEQ ID NO: 196585 - DNA, 236 bp, Glycine max
tacggctgcgagaagacgacagaaggggatgatggtgaaacggtaggcatggagacagaaggttttgccatttatgatgcaatgatgcagttgaaaaatgagatacacacagtggcggttggatctgctataggtcaagcctgtttgctactttcagcagggtctccgggtaaacgctttatgatgccacatgctaaagccatgattcagcagcctcgtattccttcccttggttg

SEQ ID NO: 196586 - DNA, 301 bp, Glycine max
gaagacgacagaaggggacattccaaaacacaaacacatacattgtagtatcacttttgtctcggaatttgttcttttgagttatggcaagcttaaaggttgcatgtgtggttttgatgtgcatggctgtgatgagtggcacaatgatggtgcaagccgtgtcatgcaatgatgtttctgtgaacctagcaccgtgcctatcttacctgatgcagggtggagatgttccagaatcgtgttgtagcggagtgaggaacattctggggtctgccagcaccacctgtgacaacaaaacgtgtgc

SEQ ID NO: 196587 - DNA, 285 bp, Glycine max
tacggctgcgagaagacgacagaagggaaggtgatcatcatagacatggtggtggagaatgagaagagagatgatgaatcagttgaaacacagctcttctttgatatgctgatgatggtgttggtcactggaaaagagagaagcaagaaagcatgggctaagttgatttcctctgctggttataacaactacaagataactccagtcttgggcttaaggtctctcattgggatctatccatagtaagttaatgagatgtgccagcactctatcattcatatatgt

SEQ ID NO: 196588 - DNA, 302 bp, Glycine max
cggctcgagcggctcgaggagaagacgacagatagggggaggggaagacatgtggaaaagcttggagtaggcctgagtggtattgctgtgtttgattgtcacggccatcgccgaacaatgcggtcgtcaagctggcgggcagacatgtcccaacaacctatgctgcagccagtacggttggtgtggaacttccgaagaatactgttccccttctaagaactgccagatcaactgctgggggagcggcggcggtggcggtggctgcgtcggcggtgaaagtgctctaatgtcgcgccacatat

SEQ ID NO: 196589 - DNA, 299 bp, Glycine max
tacggctgcgagaagacgacagaagggggcacaagtgagtttgttgatcgagataactagaaacagtgtgatgaaaatgaaggtccttgttttcttcgttgctacaattttggtagcatggcaatgccatgcgtacgatatgttccctctccgaatgaacactggctatggtgcccgtactccggaggtgaaatgcgcaagttggaggcttgctgtggaagcacacaacatctttggctttgagaccattcctgaagagtgcgttgaagcaacaaaggaatacatccatggcgaacaat

SEQ ID NO: 196590 - DNA, 301 bp, Glycine max
cggctcgaggacgacagaagggggatgcaaaagttagtagtagtgaagaaaatgaaagtccttgttttcattgttgctatagttctagcagcatggcattgccatggctcagaccatgaccatgaccatggccacacctaccaaattttccctctgagaatgaaaactggccatggtggccactacattccggaggtatcatgccaaagttggaggcttggtgtggaagcacgcaacgtcattgactggaaaaccgttcctcaagattgcgagggatatattgggaactacatgcttggcg

SEQ ID NO: 196591 - DNA, 294 bp, Glycine max
cgagcgatggtcgagcggctcgagtacggctgcgagaagacgacagaagggggcacccagagaggaggaagctatgagagagagagagggaggagggagagtgttgacgctccatcaagatgggtatttctagggattccatgcacaagaggcgtgccactggtggcaagaagaaggcatggagaaagaagagaaagtatgagcttgggcgtcaggccgtaaacaccaagttatcaagcaacaaaactatccggaggattcgtgttcgaggtggcaatgttaaatggagggcat

SEQ ID NO: 196592 - DNA, 301 bp, Glycine max
cggctcgagtgctgcgagaagacgacagaaggggtagtcatagctgatattcaagacgacttgggtctctctgttgccatagagttagaatctgcttcctatgtccattgcgatgtgacaaaggaagaggacgttgaaaactgcgtgaacacaacggtttccaagtatggcaaattaggtatcatgtttaacaatgcaggtgtatctgatgagatcaaaacaagcattctttacaacaacaagtctgattttgagagagtgataagtgttcacttggttggtccttttctgggaacaaagc

SEQ ID NO: 196593 - DNA, 298 bp, Glycine max
tacggctgcgagaagacgacagaaggggacacgaacttttataaacccttgacttcatttctttccaatctctcttaatacatatcactttcttcaccgttcgatctttctttctcccctacacaaaacatggctttgcccaatcagcaaaccgtcgattaccccagcttaaggcttgtcatcgtcggcgacggtggaacaggaaagacaaccttcgtgaagaggcatctcactggtgatttcgagaagaaatatgcaccgaccatgggtgtggaggttcacggttggatttttcacg

SEQ ID NO: 196594 - DNA, 196 bp, Glycine max
tacggctgcgagaagacgacagaagggtagaaatggaaggttttttttctagcgatctgaatactgtttctaagaatgatgatgatcattacatgtatgagactcaatttagttttaacaataatattactaggtttcattgatagttgcattgagagtttcaatttaggggatattgaccaattacaatgatatt

SEQ ID NO: 196595 - DNA, 255 bp, Glycine max
tcggctcgacgcgagaagacgacagaagggggtgcacaagtgagtttgttgatcgagataactagaaacagtgtgatgaaaatgaaggtccttgttttcttacgtgctacaattttggtagcatggcaatgccatgcgtacgatatgttccctctccgaatgaacactggctatggtgcccgtactccggaggtgcaatgcgcaagttggaggcttgctgtggaagcacacaacatctttggctttgagaccatt

SEQ ID NO: 196596 - DNA, 295 bp, Glycine max
acggctgcgagaagacgacagaaggggacgggctcacggcctgtaaccctcgaaacgcgaatagccgtgtcggccacctaattctctgtttaacgtcttcaatccttcttccattgatcactatttcgcagtgtttgccttagtctcttgaggtgcaatgagattggagaagtgttggttctgatcttctaccacataccctggacatggaatccagtttgttcgtaacgatgccaagatttttcggttttgtagatctaaatgccacaaaaacttcagaatgaagaggaccctc

SEQ ID NO: 196597 - DNA, 298 bp, Glycine max
acggctgcgagaagacgacagaaggggggtatctaggcgctctgaatatcgtgttctagtcactggattgccctcttcggcatcctggcaggatcttaaggatcacatgcgcaaggcaggggatgtttgcttttctcaagtttttcatgatggaaggggtactaccggtattgtggattacacaaattatgatgatatgaaatatgctattaggaagcttgatgactctgagttccggaatgcattttccaagggatatgttcgggtgagggaatatgattcaaggcgggattcttct

SEQ ID NO: 196598 - DNA, 297 bp, Glycine max
tatcgagcgctcgagtacggctgaagacgacagaagggggagcgacgaagatattagggtacttgagtgacgtgcggctatcctagcactctcttctgcagctttcgccgacagcttcattcaccatggctgagcaaaccgagaacggttttttgaaacatacaaaagtgtttctcagctcgaataaaactgggaatggaaagagacccggaaagggtgtgaaccgcttttggaaatccattgggattggatttaggactcaccaggaagctatcgaaggaacctacattgacaaga

SEQ ID NO: 196599 - DNA, 297 bp, Glycine max
acggctgcgaaagacgacagaagggggttgcatcagatgaaagctatggagttggtgggagagaaatggatagaaattgtgacgtgtttggtaatttcaacaacattaatgcggagtgtaagtggaagtgaaagcgagtgcattttcccagcgatattcaacttgggagactcgtattcagacactggcggtctctcagcagcgttcggacaagctcatccccccaacggaatcacttatttccactcccctaacggacgcttctccgatggtcgtctcataatcgattttatagcc

SEQ ID NO: 196600 - DNA, 279 bp, Glycine max
ctcttaacccacccctctccggtctcaaagccagcgaccgcgcatccgtgccatggaagcaaaactccagcctctccttctccagcccgaagcccctcaagttctccagaacaatcagagcagcagccgccgacgagaccacagaggcaccagcaaaagtagaggctgcatcggtcgggttcaccccaccagaacttgacccaaacaccccttccccgatcttggggggcagcaccggcgggctcatgcgaaggcacaggtggaggagttttatgtcat

SEQ ID NO: 196601 - DNA, 289 bp, Glycine max
taacgacagaagggggcgcattgaacgaaaattagggtttgtagtgtagcaggaacaagcagcaatggcgcagaaggtaacacgcaaggttagcagaaaccccgaattgataaaggggattggaaagtactccaggtcgcagatgtaccacaagaggggcattggggctatcaaggacaaaaatgggggcattgtacctcgccacggccctgaacccaacctgaagcacccgctgaaagaccaccaagattttacgctgctgatgatatcaggagcccttgtaaaaagc

SEQ ID NO: 196602 - DNA, 299 bp, Glycine max
cggctcgagcggctcgaggcgagaaagacgacagaaggggtgtacgctcattttcctatcaacgctagcattggcaacaacagcaagtccatcgagatcagaaatttcctcggcgagaagaaggtgaggaaagtggacatgcttgggggcgtgtcggttgttagatctgacaaggtcaaagatgaattggtcttggatggaaacgacattgaacttgtttctaggtcatgtgctctcattaaccagaaatgtcatgttaaggacaaggatatccggaagtctcttgatgcgtattatgt

SEQ ID NO: 196603 - DNA, 289 bp, Glycine max
gggtagatctcttggtctgcatgttggcaggagaagaccacctcatatggcctttctaggcaaccctggaacaggtaaaactatggtagcacggattcttggaaaattactccatatggtgggaattctacccactgataaagtgacagaagtacagcggactgatttagttggtgaatttgttgggcacactggtccaaaaacaaggaggaagatcaaggaagcagaggggggaattctttttgttgatgaagcctatagattgataccaatgcaaaagtccgacgat

SEQ ID NO: 196604 - DNA, 296 bp, Glycine max
tcgagaagacgacagaagggggagatctcacactgcaattccttcttctcccagaatcggtcactaaatccgcaatcatgaagctcgataccaccggtctcgaatcgtttcccacactgcttgcgcctcaaaacgacgtcgttggagaactctccgccgctccatccttcgaccttccgaattccaacgatttcgatgggtttgtgaaagaacctattcagatggtgaagcccgcggagggtactacgactcttgcatttatattgaaggagggtgttatggtagctgctgattct

SEQ ID NO: 196605 - DNA, 297 bp, Glycine max
tggctgcgagaagacgacagaagggggcacaagtttgttgagatagctagaagcaataagatgaaaatgaaagtgcttgtttggtttgctgctacagttttggtagcatatgaatgccatggctcagactaccagaagttccctctccaaatgaaaactgggtttggtgggcaatacagcaatgaggtggcatgtgccagttggaggcttggcgtggcagcaaacaacgtagtcaagtggcaaactgttcctgcagcttgcggagagtacatagctgactacgttctaggagaccaa

SEQ ID NO: 196606 - DNA, 274 bp, Glycine max
tacggctgcgagaagacgacagaaggggactttaacattggctgatgtcagcagagagcatggactcttgatgataaattatgctactgggtgcatatttgagtatgatgcagctcatccagagggttctggcattggctttaaggatgaagacagacccaacttcattggttctttctattccaaaactaaggctatggttgaggagctcttaaaagaatatgacaatgtgtgcacacacagggttcgcaagccaatttcatctgacttgagc

SEQ ID NO: 196607 - DNA, 297 bp, Glycine max
tacggctgcgagaagacgacagaaggggactttaacattggctgatgtcagcagagagcatggactcttgatgataaattatgctactgggtgcatatttgagtatgatgcagctcatccagagggttctggcattggctttaaggaggaagacagacccaacttctttggttctttctattccaaaactaaggctatggttgaggagctcttaacagaatatgtagatgtgtgcaccctcagggttcgcatgccaatttcatctgacttgagcaatccacgcaatttcatcaccag

SEQ ID NO: 196608 - DNA, 269 bp, Glycine max
ctatcgaccgaatcggctcgagacggctgcgagaagacgacagaagagggtttcagcgatctttggaaagagtcctagcaaaggagtaaatcccgatgaggcagttgccatgggagcagctattcagggtggtatcctacgtggagatgttaaagagctactactcctagatgtcactccactttctctgggtattgagactttgggtggtatctttaccaggttgattaaccgcaacaccacaattcctgactaaaaggagtcagggg

SEQ ID NO: 196609 - DNA, 278 bp, Glycine max
  unsure (1)..(278): unsure at all n locations
gttgccgagcacactgtcagagcccttcagagaancgtgcctgctgcagttcctgctgtcgttttcttgtctggtggccagagtgaggaggatgcatccgtcaacctcaacgccattaaccaggtcaatgggaagaagccatggtcatctctttctcctttggaagggcacttcancagagcacccttaaggcatggggcggaaaagaagagaatgtgaagaaggctcaggaagcccttttggtaagagccaaggntaatcagaggcaactctgggaa

SEQ ID NO: 196610 - DNA, 293 bp, Glycine max
tacggctgcgagaagacgacagaaggggatcacaatctcattcgttaacacatcaatttctatctctcttatactctcactactctctttgctctttcttttctccactatggatgcacaagaaaacaacttccaagactacttgcctgtgatggccaacaagcttggtggggatggcctaattgatgaactgtgcaatgggttcgatcttttgaaggattctgataaaggggtcatcacttttgagagcctcaagaggaattcttacttgcttggtcttcagggtctcagtg

SEQ ID NO: 196611 - DNA, 198 bp, Glycine max
tgacgacagaagggggatgcacaagtttgttgagatagctagaagcaataagatgaaaatgacagtgcttgttttgtttgttgctacagttttggtagcatatgaatgccatggctcagactacagaagtccctctccaaatgaaacctgggttggtgggcaatacagcaataggtgcatgtgcagttggaggttggc

SEQ ID NO: 196612 - DNA, 282 bp, Glycine max
tacggctgcgagaagacgacagaaggggtccacattcatattttcctttcgtttcctttcattttccctcactttctcgctccccaaacgcccctctctctcctccaatggccgagtagctcaccgacgagcagatcgccgagttcaaggaggccttcagcctcttcgacaaggacggcgatggttgcattactaccaaggaacttgggactgttatgaggtcactggtcaaaaccaactgaggcagactgcaggatatgataaacgaggtcgtgctgatgg

SEQ ID NO: 196613 - DNA, 289 bp, Glycine max
tacggctgcgagaagcgacagaagggggcacaagtgagtttgttgatcgagataactagaaacagtgtgatgaaaatgaaggtccttgttttcttcgttgctacaattttggtagcatggcaatgccatgcgtacgatatgttccctctccgaatgaacactggctatggtgcccgtactccggaggtgaaatgcgcaagttggaggcttgctgtggaagcacacaacatctttggctttgagaccattcctgaagagtgcgttgaaacaacagaggaatacatccatg

SEQ ID NO: 196614 - DNA, 291 bp, Glycine max
gcgagaagacgacagaagggggggtgctgcggctgaagatctcgattagccgaaaattgcaagaacggcttcaggctcttgcgatcaacaaacgcagcgttttgatctcagatttgagggggagagaatggcaacaacagtgagaagtctgaagataaagacaagtacgtgcaaacgtatagtgaaggagctgcattcttatgagaaggaagttgagagagaagctgccaaaacagctgatatgaaggaaaaaggagccgatccctatgatctcaagcaacaggaaaatgt

SEQ ID NO: 196615 - DNA, 290 bp, Glycine max
tacggctgcgaagacgacagaagggggagcagaggacaagatgggtagtgtgagttatagcaatctgaagaacgccatgatagcattcttggtccctctaccctccatcctattctacctctcattccaatcggccattagtactccttcttcttggtcttctctgtggacatggtgatatcaccaccctctgctattggccaatgtccttttccccttcaatggcaattactcttctggctcatcggcctaatccaatccaagcactgggtacacttccaactttttct

SEQ ID NO: 196616 - DNA, 215 bp, Glycine max
cggctcgagtacggctgcgagaagacgacagaagggggcacaagtgagtttgttgatcgagataactagaaacagtgtgatgaaaatgaaggtccttgatttcttcgttgctacaattttggtagaatggcaatgcaatgcgtacgatatgatcactctccgaatgaacactggatatggtgcaaatactccggaggtgaaatgcgcagttggag

SEQ ID NO: 196617 - DNA, 265 bp, Glycine max
  unsure (1)..(265): unsure at all n locations
gggcaatatcaaggagaccctcttgantccaagattctacaccactgactttgatgagatngagacactcttcaacactgagatcancaaaaacctcaaccaggatgagtttgaggcactgctccaggagttcaagactgactacaaccagacacactttgtcaggaacaggagttcaaggaagccgctgacanncttgagggtcccctcagacagatcttgtggagttccttgagaggtcntgcactgctgaattctctggctt

SEQ ID NO: 196618 - DNA, 293 bp, Glycine max
agaagcgacagaagggggaaaaagttttgaagcaaagtctggtctatgcaggggctgagctacaattaaagccaaagaaggactttgatgcacaaagagaaaaggaattagaagagcaagaaaaattccggccaccttagggttcaggtcaccagaataacacaaatacagaagcaaactaccctaaaggcttacttatagccttcaaactaaagagcatttctgatcaagttccattggatcagaataacattgatcagcaagccaatgacagtaatgttgtgaaggataat

SEQ ID NO: 196619 - DNA, 288 bp, Glycine max
  unsure (1)..(288): unsure at all n locations
acacaccgtttgttctattcttaactcaacttctggctacccactctcttcttccaagtccaaccacgcttttctctacagtcgtgggcaaggtcaagatcggaatcaacggatttggaagaattggccgtttggttgccagagtcgctctgcaaanagacgatgtggagctcgttgccgttaacgaccctttcattaccaccgattacatgacatacatgtttaaatacgacagtgntcacggacactggaagcatcacgatgtcaccgttaaggacgagaagaccc

SEQ ID NO: 196620 - DNA, 265 bp, Glycine max
  unsure (1)..(265): unsure at all n locations
gaggtaccgagagcttgctaaccgagttgatgaggcccttggattcatgggctgctgctgggctcanggtggaccatcccataatgagaacaactgaattctgggacatctcatgagtgcttattgttggccttatgancaatccctcacaaggttggattcaacttctggtctctactatgaatgttcagcccatatgatctgggttggagaacgaaccaggcagcttgatggtgcncatgttgagtttctaagaggagttgct

SEQ ID NO: 196621 - DNA, 281 bp, Glycine max
acggctgcgagaagacgaccgaagggggggtttatcaggacccatgcttcgggcttccggaatacaatgggatctccgtaaagtggataattatgaatgttacgaagaatttgattgggaagttcaatggcaaaaagaaggggattccttagctcgttatttagttcgaattggtgaaatgatggaatccataaaaattattcaacaggctttggaaggaattctcggcggaccatatgaaaatttagaaattcgctgctttgatagagaataagagccag

SEQ ID NO: 196622 - DNA, 285 bp, Glycine max
tcggctgcgagaagacgacagaagcgcacgaagaagagcgtggagacctacaagatctacatcttcaaggtcctcaagcaggttcaccccgacattggtatttccagcaaggccatgggcatcatgaacagcttcatcaacgacatcttcgagaagctcgcccaggaagtgtcgcgtttggctcgctacaacaagaagcccaccatcacctcgagggagatccagaccgccgtgcgtctcgtgctccctggtgaattggccaaacacgccgtttctgaagggacc

SEQ ID NO: 196623 - DNA, 284 bp, Glycine max
tacggctgcgagaagacgacagaaggggatgcaaactcgtgaagagttgattgaagcctcggctaccctcgtatggatcgcttcagcccttcatacagctgttaactttggacagtatccatatggaggtttaatcctaaacaggccaaccattagcaggagattcatgcctgagaaagggtctgctgagtatgcagctttggctaagaaccctgagaaggagtttttgaagactattactggcaagaaggagaccctcattgaccttacaattatagaaatct

SEQ ID NO: 196624 - DNA, 279 bp, Glycine max
tacggctgcgagaagacgacagaagggggtctcgtggaagtgtaagcaagcaaaaccctagcggcgcctgctttctttgttcgtgttttgcatcaggatggagtctcaggtgaagcacgcacttgttgtactagttatgggtcgtactggatccagaggacaagtgacccaggttagagtgaagtttttggatgatcagaaccgtcacatcatgaggaatgtgaaaggacctgtgagagaaggagacattctcaccctactcgagtctgaaagggaagc

SEQ ID NO: 196625 - DNA, 219 bp, Glycine max
gctcggaattctccaaagtttgtatagtgtaggatttgttggtattcgtgataaaaacacctcatcctattcattttgccatgacgggcgaactccagataaaggttttgaaagtaatgagacattattaattcatccatgttactggactggtttgaatctaaatcgtaatgcacttgctccagaggaagcagaggagataaatgacgaatatgatat

SEQ ID NO: 196626 - DNA, 197 bp, Glycine max
tacggctgcgagaagacgacagaagggggcagttcaattccaatatattccattctctctgtgtatttccctacctctcccttcaagatgcagatcttcgtcaagactctcaccggcaagaccatcacccttgaggtgaaagctcctgcaccatcgacaagttcaaagccagattccaggacaaggaaggattcccc

SEQ ID NO: 196627 - DNA, 273 bp, Glycine max
tacggctgcgagaagacgacagaagggcactgaggataaggaagaggaacaaccagtggagcggcctcgaaagacatcaaaatatatgactaagtatgagcgtgctaggattttaggtacccgtgctcttcaaatcagtatgaatgcacctgtcatggttgagttggagggggaaactgacccacttgagattgctatgaaggagctccgagagcggaaaataccctttacaattcggcgctacttgcctgatggaagttatgaagattgggg

SEQ ID NO: 196628 - DNA, 283 bp, Glycine max
tacggctgcgagaagacgacagaagggggggtgccattgttgctgtcatcatccgcagctgctgttattcgcaccgcaaacaaacagtgagccatggccgtcggaaagaacaagcgcatctccaaagggaaaaagggtggcaagaagaaggcagctgatccctctgccaagaaggattggtatgacattaaggccccttctctttttcaagtgaaaaatgttggcaaaaccctcgtctctcgtacgcagggtaccaagattgcttctgaaggacttaaacata

SEQ ID NO: 196629 - DNA, 275 bp, Glycine max
cggctgcgagaagacgacagaagggggtaccgatcaattaacaaccatatctatctattgagaaacatgaagaaggtttcacccttggcattttccattctctttttggccttcaccatagaaccctttattggcattgctgcagcagcaccagaagcagtgcttgacacctcaggccagaagctgagaacaggtgtcaagtactacattctgccagtgttcagaggcaaaggtggaggcctaacagtttcaagcagtggcaacaacacatgccc

SEQ ID NO: 196630 - DNA, 266 bp, Glycine max
tacggctgcgagaagacgacagaaggggacaagtgagtttgttgatcgagataactagaaacagtgtgatgaaaatgaaggtccttgttttcttcgttgctacaattttggtagcatggcaatgccatgcgtacgatatgttccctctcgaatgaacactggctatggtgcccgtactccggtagtgaaatgcgcaagttggaggcttgctgtggaagcacacaacatctttggctttgagaccattcctgaagagtgcgttgaag

SEQ ID NO: 196631 - DNA, 130 bp, Glycine max
acggctgcgagaagacgacagaaggggatatttcaattccagctaatgatgatgctatagcctcaattcgattaattcttaacaaattagtatttgcaatttgtgagggccgttctagctatatacgaaa

SEQ ID NO: 196632 - DNA, 261 bp, Glycine max
cggctcgagtacggctgcgagaagacgacagaaggggattcacaacttcaatccctcttttgctttaccaaattccattttccaattcaaaaccctaactccgttcgaagcaccaaatcgtgatggcaccaaaggcagagaagaagccagcaggaagaagcctgtggaggagaagaaatcgacggtgggagacaaagctccggcggataagaagccaagggcggaaaagagccttccgaagagggaagcggcggcggagaa

SEQ ID NO: 196633 - DNA, 288 bp, Glycine max
cggctgcgagaagacgacagaagggggagagaagttattagggtttttgagtgcggcggtccaaacactcttctctgcagcttttgcctacaactcccttcaccatggctgaacaaaccgagaaagcttttctgaagcaaccaaaagtgtttctagcaccaagaagactgggaaggggaagagacctggaaaaggtggggaacgcttttggaagtccattgggctcggatttaagactcccagggaagccatcgaaggaacctatattgacaagagtgccccttcact

SEQ ID NO: 196634 - DNA, 234 bp, Glycine max
tctgcgagaagacgacagaagggggcgagatagaagagaaagccgtcgctatcctagtctcttcttcccctctacccatttcagtttcaggatggaatctcaggtgaagcacgcccttgttgtcaaagttatgggtcgtactgggtctagggggcaagtgatcaggttagagtgaagttttggatgatcaaaccgacacatcatgaggaactgaagggcccgtgagagaggaga

SEQ ID NO: 196635 - DNA, 281 bp, Glycine max
gtcctaaagtagtggcggattttcgtggctacgcaaacttctgcttcaagacctttggagacagagtcaaatattgggtcactttgaatgaacccttatcatttagtctcaatggctacaatggtggcacctttgcaccaggtagatgttcaaatacgttgccaattgtagtgctggcgattcatccactgaaccctatatcgttggacactacttattacttgctcatgaatctgctgccacattatacaagacaaaatatcaggctcgtcaaaaaggac

SEQ ID NO: 196636 - DNA, 277 bp, Glycine max
tacggctgcgagaagacgacagaaggggattccggagagggagcctgagaaacggctaccacatccaaggaaggcagcaggcactatcttcatatgtattcatagcagctaatgtcattctcaactcatctaaagatgttcaatctagtcatttgaacgaattgtttcctcctctagttccattattaacatcacatgctcatagcttacgtggttttacccagttacttgcatatcaaattctacataaacggtttccttggcggaattatggatc

SEQ ID NO: 196637 - DNA, 263 bp, Glycine max
acggctgcgagaagacgacagaaggggatacacgctacttttaagtttgattgaatacaagacacttgtcatgcgtggtgatttggaaagggccaatgaaattctaccatcaattcctaaagagcatcataacagtgtggctcatttctggaatcacgagggatgatagaggatgctcttggaagtagcgaccgaccctgactataggtttgatcgagccatacagcttggaagattagaggtacctaagggtattgccactg

SEQ ID NO: 196638 - DNA, 265 bp, Glycine max
cgagaagacgacagaagggaaagagacctggaaaaggtgggaaccgcttttggaagtccattgggcttggatttaagactcccagggaagccatcgaaggaacctatattgacaagaagtgccccttcactggcaatgtttccatccgtggcgtatcttggctggaacatgtcacagtgctaagatgaacaggactattattgttagagggatttatctccattttatcaggagtaccagagtacgagaggaggcactcaatatt

SEQ ID NO: 196639 - DNA, 281 bp, Glycine max
acggctgcgagaagacgacagaagggggaggcaagaagttgtattttggcatccccgtggcttcaagaagagaatctcaatggaggcccaggagctgaagcgcgtgttccagatgttcgaccgcaacggcgacgggagaataacgaagaaggagctgaacgactcgctggagaacctgggcatcctcatctctgacaaggacctgagccaaatgatccagaggatcgacgtcaacggcgacggttgcgtggacatggacgagtttggggagctgtatcaga

SEQ ID NO: 196640 - DNA, 267 bp, Glycine max
ctgcgagaagacgacagaaggggcacaaagcaaagctcatccttgagttaaaaaatggcagcagcttcttccatggctctctcatccccatccttggctggcaaggccgtgaagctgggcccatcagccccagaagtgggaagggtgagcatgaggaagaccgtcaccaagcaggtctcctcaggaagcccatggtacggcccagaccgagtcaagtacttgggcccattctctggcgagcccccgtctacctaacggtgagtccca

SEQ ID NO: 196641 - DNA, 272 bp, Glycine max
tgctgcgagaagacgacagaaggggtggctcatatggggtttctagtcgggaaaatttaagtgaaagtagattgatggatctccttcatggttcagaatatgttcttacctatgaagacaaggatggagattggatgctagttggtgatgttccgtgggagatgttcactgagtcttgcaagaggctgaggataatgaagagttctgaagcaattgggctagcacctagagccatggaaaagtgcaaaagtcgctactagctagtgcaatgc

SEQ ID NO: 196642 - DNA, 282 bp, Glycine max
tactcgagccgattcggctcgagtacggctgcgagaagacgacagaacggggcatcaattcaaaatatatcatcaattataagcatgggtttgtggaacacaacgaatgcagtgtcttgccgctttcacaagtttggtgatgaccaaaagaatctggtcttccaaggtgatgccacgtcttcttccaggggcatagaactcacaaagttagacggtggaggaaaaccagtgggtggcagtgtggggagagtgttatactcttctccagtgcacctttgggaa

SEQ ID NO: 196643 - DNA, 238 bp, Glycine max
tacggctgcgagaagacgacagaaggggacgcaactgaaaaagaaaagccttccactattccatatatagcagccaaaaaagaatgaagaatactgcgttgttcactatctttctactccttgctttcacctcatacctaccttcaaccccgctgctagtgtgtacgatacggatggtaatattcttcaagagggtcgcacatattttgtgttggcagctacaagaggacccggcggt

SEQ ID NO: 196644 - DNA, 217 bp, Glycine max
tacggctgcgagaagacgacagaagggggcacaagtgagtttgttgatcgagataactagaaacagtgtgatgaaaatgaaggtccttgttttcttcgttgctacaattttggtagcatggcaatgccatgcgtacgatatgttcccttccgaatgaacactggctatggtgcccgtatctcggaggtgaaatgcgacagttggaggcttgctgtgg

SEQ ID NO: 196645 - DNA, 283 bp, Glycine max
tggctgagaagacgacagaaggggggtgctgtgagtgagattacccatagatagagagcgcggcataacctaaacttacccttcttctctctgtgtgtgtgcgcatcaaacgcaaccagaagcagccatggccactgcaagaactgtgaaggacgtttctccctcatgaggtcgtcaaagttactcttctcacctcaagcgatttggcaagatggaactgccagagtggactgatattgtgaaaactgccaagattaaggaagtggctccttatgatcctgac

SEQ ID NO: 196646 - DNA, 282 bp, Glycine max
cgagaagacgacagaagggggagttcacagagagaatggctgcggaaaacgttgttgagttcacagacttacccgtcaagaggccaagagaagaagaagaaggaaccaatggcgtctccaacgacgccgtttcagcgctccccaatgaccctcaataccctggcatctctgcggttattcccggttggttctccgaaatcagcccaatgtggcccggggaggcacattccttgaagatggaaaagattttgtttcaagggaagtctgactatcagaatgtca

SEQ ID NO: 196647 - DNA, 279 bp, Glycine max
tacggctgcgagaagagacagaagggggcgcaagcaaagatgaatgaagcggaggagcaactttgcgaggcggccagaaaaggtgacacggagaaagtgaggtctctcatagactccggcgctgacgtcagccacttcgacggcggggcctcaatcctctgatgcacgccgcaaagcacggccatgcacccgtcctcaccctcctcctctccgccggcgctccctggaacgctctttccccctccaacctctccgccggcgactacgccatgcaagaag

SEQ ID NO: 196648 - DNA, 276 bp, Glycine max
agaagacgacagaagggtacggctgcgagaagacgacagaagggggagaggagtgttcccaaaatcgcaataccttcaactctatctgcaacagccaactttctcgttcgtcgatcacaaaaatggcggcgaaacttcaaatatttacgggattgccccccgcgccatttcaatcttcctcctccactctctgcgtactcaagaagcctctcactacctccttcttcggcactgcacgagtggaagttctgaaactacgagtgatgaggattgcga

SEQ ID NO: 196649 - DNA, 277 bp, Glycine max
tacggctgcgagaagacgacagaagggggaacctttgcattctattcattcaagattcagcaagtgcgttttggaagcagagaccgaaatacttcgagatggcccgtacaaagcaaactgctcgtaagtcaactggaggaaaagctcccaggaagcagcttgcaaccaaggctgcacgtaagtctgcaccaacaactggtggtgtgaagaagcctcatcgttatcgccctggaactgttgctcttcgtgagattaggaaataccagaagagcactga

SEQ ID NO: 196650 - DNA, 252 bp, Glycine max
gacgcaccgtttgttctattcttaactcaacttctgctacccactctcttcttccaagtccaaccacgcttttctctacagtcatgggcaaggtcaagatcggaatcaacggatttggaagaattggccgtttggttgccagagtcgctctgcaaagagacgatgtggagctcgttgccgttaacgaccctttcattaccaccgattacatgacatacatgtttaaatacgacagtgtttcacggacatggg

SEQ ID NO: 196651 - DNA, 237 bp, Glycine max
  unsure (1)..(237): unsure at all n locations
ggacaaaaggaaaggnagaaatgcaagaaccaagcttgggattgatgggtgaggtctccggcgatcaccaccgtcagctgaaggcggagataacgactctccggctgttacgatcagcttctggnagcacacgtggcatgcctccgtgtggncaccccgatcgacaagcttccanncatccatgctcantnatcttcagttctcaccaccttctaagcttcttattctcaaaaaacc

SEQ ID NO: 196652 - DNA, 266 bp, Glycine max
tcggctcgagcggctcgagggggaaggcaaatcgcgaagactagatctgatctgagagaatggctcctcggtctagcagcaaggacgcccaagaccttttccgcgctctttggtctgcttatgctgcaacccccactaatctcaagatccatgatctctatggcatctatgccgtattcaccgctttcatccaggttgtttacatggtttggttggatcattccatttaaatcctcctatcagagtacttcttgtgtaggaatgct

SEQ ID NO: 196653 - DNA, 281 bp, Glycine max
tacggctgcgagaagacgacagaaggggatcgaagcaaaaaatgaaaacccaaagtgcttctctcctctgtctttttcactctcttgctatccttttggctagtggcactgctgcaagtgcaactccaagaagcgcagtgccaagccaccatgtttcaacattcaacagaagcctttttccttccacttttctctttggaattggttcttctgctcaccaggcagaaggagcagcaagtgtagatgggagaggaccaagcatatgggacacctacactaga

SEQ ID NO: 196654 - DNA, 278 bp, Glycine max
ggctgcgagacgacagaaggggagaaactgtcattccatttaatttaattgggatgccctgaatctgacatgtctcttggaatgagtaacatgaaactcagaattatggatgtattgaatactccctaataaaaagggaattggtctatggtcaattcagtaacaaaaaatatgaaattataaatataaatttctaactgtacgtacctcgtgaaaaaaaaaatattttttcttgtagaattagcgattccatcttttttagaaagaactgaaattat

SEQ ID NO: 196655 - DNA, 279 bp, Glycine max
actcgagccgaatcggctcgagtacggctgcgagaagacgacagaaggggaagggaaaaatggtgtcgctgaaactgcagaagcgcctctccgcaagcgtgctcaagtgcggcagaggaaaggtttggcttgaccccaatgaagtcaacgaaatctccatggccaattctcggcaaaacatcaggaagttggttaaggatgggtttatcatcaggaagccaaccaagattcactcccgctcacgtgctcgtaggatgaaggaggcaaagaggaagggcc

SEQ ID NO: 196656 - DNA, 275 bp, Glycine max
tacggctgcgagaagacgacagaaaggggcccttctagctttttcccagtccaagcagcctccaattcgtgccactctcttcaaaatggccgttaccttctcaaatctccacacagaatcaggtctcaagtccctcgacgacttcctctctgggaaggtctacgtttctggggatcagttcacaaaggacgacatcaaagtgtatggtgctgttttggagaagccaggtgactcttttcccaatgctgccaagtggtacgaggttgtctcatctc

SEQ ID NO: 196657 - DNA, 272 bp, Glycine max
gggcacaagtttgttgagatagctagaagcaataagatgaaaatgaaagtgcttgtattgtttgttgctacagttttggtagcatatgaatgccatggctcagactaccagaagttccctctccaaatgaaaactgggtttggtgggcaatacagcaatgaggtggcatgtgccagttggaggctcggcgtggaagcaaacaacgtagtcaagtggcaaactgttcctgcagcttgcggagagtacatagctgactacgttctaggagacca

SEQ ID NO: 196658 - DNA, 272 bp, Glycine max
acggctgcgagaagacgacagaagggggatcacagtttgatgctcgtcaatatgataccaagatgaatgagttgcttacatctgatggacaggattttttcacatcttatgatgaagtttatgacagttttgatgctatgggcttgcaggagaatctcctgagaggcatttatgcatatggttttgagaagccatcagctattcagcagagaggaatagttcctttctgcaagggacttgatgttatacaacaggcccagtctggaactggg

SEQ ID NO: 196659 - DNA, 274 bp, Glycine max
tacggctgcgagaagacgacagaagggcggaaaggaactttgcaagagtattaacccagatgaagctgttgcttatggtgctgcagtgcaggctgcgattctcagtggcgagggtaatgagaaagtgcaggatcttcttttgttggatgttactcctctatccactggtttggagactgcaggaggagtcatgactgtgttgattcccagaaacacaaccattcccaccaagaaggagcaggtgttctcaacctactctgacaaccagcccggt

SEQ ID NO: 196660 - DNA, 281 bp, Glycine max
tacggctgcgagaagacgacagagggggaagaagaaggttggttgattggtcccattgattccgaagagaaaagaaaagatgtttgagccacaacagctatacactcgcgcgaagaccgaggaattcgacctcgaatcaggagaaaccctctacccagggctgagcgtcggcgagaaccagctccgatggggtttcatccgcaaggtctacggcatcctctccgcgcagatcgtcctcaccaccctcgtctccgtcaccaccgttttctatactccaatca

SEQ ID NO: 196661 - DNA, 275 bp, Glycine max
tacggctgcgagaagacgacagaagggggaagatgcctgaggagaagaccttgagtagttttggacacactgcgatgtacagaagatacaccattgaggaaatggaagatgcaacaaacatgttctcggagtctctcaagatcggggaaggacggtatgggccagtatacaggtgcgaactagattgcacccaggttgcaataaaggtgttaaagccagatgcagcacaagggagctagcagttccagcaggaggtggaagtgctgagttgcata

SEQ ID NO: 196662 - DNA, 275 bp, Glycine max
cgagaagacgacagaagggggaacataaagtgaggaaaacgagtcaattcatcatttgctctctgctctgcttgttcaaattttaggagcggagaatccagagaaagagagatgtctggtatcgcccgtggacgtcttgccgaggagcgaaagtcatggcgcaaaaaccaccctcatggtttcgttgccaagcccgagactctccctgatgccaccgttaatttgatggtctggcattgcactattcctggcaaggctgggactgattgggaggg

SEQ ID NO: 196663 - DNA, 272 bp, Glycine max
tacggctgcgagaagacgacagaaggggggagatagtgattctggttctgttctgttcttctttctactcacaacaacatcagaatcagaaacaacaatggccaacactaacttggaagatgttccctctctggatctcatgactgagctccttcgtcgtctcaagtgctcttccaaacctgacaagcgtcttattctcattggcccacctggatctggaaaaggcacccagtcaccaatcataaaagatgagtactgcttatgccacttag

SEQ ID NO: 196664 - DNA, 271 bp, Glycine max
tacggctgcgagaagacgacagaagggggagctggtgttcaaggaggacgggcaggagtacgcgcaggtgctccggatgctggggaacgggcggtgcgaggcgatgtgcatcgacgggacgaagaggctctgccacatccgcgggaagatgcacaagaaggtgtggatcgccgccggagacatcatcctggttggactcagggactaccaggacgacaaggctgacgtcatcctcaagtacatgcccgacgaggccaggctcctcaaggcc

SEQ ID NO: 196665 - DNA, 270 bp, Glycine max
tacggctgcgagaagacgacagaagggggcagcgcttgatttgaggccaggcaagccccactcaaccaccacacctctcctcgttcacgctacccctttctgctcttcttctacctttcaagttttaaaagtataaagatggcagagacattcctatttacctcagagtcggtgaacgagggacaccctgacaagctctgcgaccaaatctccgatgctgtcctcgacgcttgcctcgagcaggacccagacagcaaagttgcctgcgaa

SEQ ID NO: 196666 - DNA, 272 bp, Glycine max
acggctgcgagaagacgacagaagggggttgttcactttcttccaacctctcaagtccaacctacccctttttcttctcccaccaacttcaccgtcttcttcctcgatcatgtctcacttcaagggcaagtaccatgatgagcttattgccaatgctgcttacattggcactcctggaaagggtattcttgctgctgatgagtcaacagggacaattggcaagcgtttggccagcatcagtgtagagaatgttgaatccaacaggcgtgctc

SEQ ID NO: 196667 - DNA, 271 bp, Glycine max
cggctgcgagaagacgacagaaggggggtgctgtgagtgagattacccatagatagagagcgcggcataacctaaacttacccttcttctctctgtgtgtgtgcgcatcaaacgcaaccagaagcagccatggccactgcaagaactgtgaaggacgtttctcctcatgagttcgtcaaagcttactcttctcacctcaagcgatctggcaagatggagctgccagagtggactgatattgtgaaaactgcaagatttagggagttggctc

SEQ ID NO: 196668 - DNA, 275 bp, Glycine max
cgagaagacgacagaaggggggtatcgccaatggtgtaataaactgtggaatgcagtacgatttgctatgagcaagcttggggatgattatatccctcctgctaatttgattccagaggttctcccatttagctgccagtggatactctcagtgttaaataaaaccatatccaagacagtgaattcacttgaatcatttgatttctcacaagctaccactgctgtgtattcttggtggcagtatcaattgtgtgatgcatttatcgaagtgatta

SEQ ID NO: 196669 - DNA, 274 bp, Glycine max
acggagaagacgacagaagggggaaccaacgagtacccacttggactagaagctgccacttttgccaatcttttccactccaaagctttctttttcatctctttacccttttcaccatccatcaactccctcacaaggctctctattttgcccctctcaatatcctcaatctccaacccaatcccccactccttgcaacagaaccgacaattggtatgttgctctgcaaaaaaaggccaacatatcattggaacacctccacacacactttcca

SEQ ID NO: 196670 - DNA, 272 bp, Glycine max
acggaagacgacagaagggacaaatagaccaatcccttgcggttggcagaagacgatctggcagatcaatcagcatcctagatatttatggctttgagtcattcaataggaacagtcttgagcagttctgcataaattatgctaatgagagattacaacaacacttcaatcgtcagttattcaagttagaccaggaggaatatatccaagatggaattgattgggctaaagttgaatttgatgacaatcacgattgccttaatctttttgga

SEQ ID NO: 196671 - DNA, 272 bp, Glycine max
tctcgagccgaatcggctcgagtacggctgcgagaagacgacagaacggggagaatcagatacctgagcatgtcacgaatccgttgttcgagaagcgtccgcagcagttcggaatcggaggggcgttgcctccgatgagagacttgactaggttcgtcatctggccacggattgttcatattcagaggaagaggaggattctggagtagaggttgaatgttcccccagctttgaaccagtttaccaaaactcgtggcaaaaacctagtaaca

SEQ ID NO: 196672 - DNA, 271 bp, Glycine max
tacggctgcgagaagacgacagaagggaaagagacccggaaagggtgggaaccgcttttggaaatccattgggcttggatttaagactcccagggaagccatcgaaggaacctacattgacaagaagtgccccttcactggcaatgtttccatccgtggccgtatcttggctggaacatgtcacagtgctaagatgaacaggactattattgttaggaggaattatctccattttatcaagaagtaccagaggtacgagaaaaggcactcc

SEQ ID NO: 196673 - DNA, 270 bp, Glycine max
tacggctgcgagaagacgacagaagggggaacaaaacaagtgtttcgaatagattatcctaagtctttgggaatagtgctgcaatggcttcaagtcaggaggaggtgacccttttgggagctactggaagcccatttgtgtgcagggttcatattgccctcaagttgaagggagttcaatacaaatatgtcgaagaaaatttgaggaacaagagtgaactgcttctcaaatccaacccagttcacaagaaggttccagtgtttattcaca

SEQ ID NO: 196674 - DNA, 267 bp, Glycine max
tacggctgcgaggacgacagaaggggatccaaaggaacaaaaatattattaagatgatcaacattattggagcacttgttctactctttgcatttctcttcctcagttgtgtgtatgcacaagacacaacaacccttgtgcctgcaatcataacttttggtgattctgctgtggatgtagggaacaatgactatcttcccacccttttcaaggctgattaccctccttatgggagggactttgttaaccaccaacctactgggaggt

SEQ ID NO: 196675 - DNA, 267 bp, Glycine max
actcgagccgaatcggctcgagtgcgagaagacgacagaagggggacatatccaaaggaacaataatattattaagatgatcaacattattggagcacttgttctactctttgcatttctcttcctcagttgtgtgtatgcacaagacacaacaacccttgtgcctgcaatcataacttttggggattctgctgtggatgtagggaacaatgactatcttcccacccttttcaaggctgattaccctccttatgggagggactttgt

SEQ ID NO: 196676 - DNA, 253 bp, Glycine max
ggctcgagtacggctgcgagaagacgacagaagggggtagtggttggtgtctgaggatgagtttcagggaagagagtggcgatgcgagggatcttcagaaaccgttcctccacacggggagttggtacaagatgggttccaggcagtccagcatcatgggatcctccactcatgtcatccgcgacggcgccgtctccgtcctcttctgcgtcctcatcgtcgcattggatcccatccaattcggcttcacgtg

SEQ ID NO: 196677 - DNA, 268 bp, Glycine max
acggctgcgagaagacgacagaagggggagacaggtagggtttcgagttacagccgcaccttgattcagagcagagcgaccttgaagagctatggctgtcggaaagaataagaggatttccaagggaaagaagggtggcaagaagaaagccgctgatccctttgccaagaaggactggtacgatatcaaggccccttccgtctttcaggtcaagaatgttggcaaaaccctcgtctctcgtacccagggaaccaagattgcttctgaa

SEQ ID NO: 196678 - DNA, 269 bp, Glycine max
acggcgcgagaagacgacagaagggggcacaagtttgttgagatagctagaagcaataagatgaaaatgaaagtgcttgttttgtttgttgctacagttttggtagcatatgaatgccatggctcagactaccagaagttccctctccaaatgaaaactgggtttggtgggcaatacagcaatgaggtggcatgtgccagttggaggcttggcgtggaagcaaacaacgtagtcaagtggcaaactgttcctgcagcttgcggagagta

SEQ ID NO: 196679 - DNA, 268 bp, Glycine max
gggagagggaaccgtggaaacttcaaccgggcaacaagtacttcttcaccagaaaccactccaccatcgtcgccttcgccatcggcaaaaagtatgtttctggaaatggattccacataatcggggctcacacggatagtccttgtctcaaactcaagcctgtcaccaaggttgttaaggctgggattttggaggttggtgtccaaacctatggaggaggcttgtggcacacatggtttgatcgagacttgaccgtggcggggagggt

SEQ ID NO: 196680 - DNA, 272 bp, Glycine max
actcgagccgaatcggctcgagtacggctgcgagaagacgacagaacgggaatagaaatagaactgtcttttcatatagatatcccttcaacacaacataggtcaacgaaaggatctcgaagacccaccaacgcacgaaagccgggatctttcagaaaatggattcctattcgaagggtgcataaccgcatggataagctcacactaacccgtcaatttgggatccaattcggttccttaggaggtatcgggaaggaattttggaatgtaat

SEQ ID NO: 196681 - DNA, 264 bp, Glycine max
cggctgcgagaagacgacagaaggggttcctcttcaatttcgcatcttctccttctcattccaactccaaaatacacacacacgatggaaaccttcctcttcacctcagaatctgtaaacgagggccaccccgacaagatctgtgaccaggtttctgatgccatcctcgatgcttgcttggagcaagacccagagagcaaggttgcctgcgagacctgtacaaaaaccaacatggtcatggtctttggggagatcacaaccaag

SEQ ID NO: 196682 - DNA, 238 bp, Glycine max
gacacaccatccgttctagtctcaacttctgctcttccaactcctacaacgcttttctctgcactcatgggcaaggtcaagatcggaatcaacggatttggaagaattggccgtttggttgccagagtcgctctgcaaagagacgatgttgaactcgttgccgttaacgaccctttcattaccaccgattacatgacatacatgtttaaatacgacagtgttcacggacactggaagc

SEQ ID NO: 196683 - DNA, 260 bp, Glycine max
tacggctgcgagaagacgcagaaggggaagataaagaaaagagaaatggcaacagaaacaaaagtggcagtattaggtggcatcaccgaagtgcagggagctgccaacagcgtcgagatcaacaatctcgctcgctttgctgtagaggaacaaaacaaaagagagaattcagttctggagtttgtgagggtgattagtgcaaagcagcaagtggttgctggagtgaattactacataacattggaagcaaaagatggtga

SEQ ID NO: 196684 - DNA, 263 bp, Glycine max
agacgacagaagggggcacaagtgagtttgttgatcgagataactagaaacagtgtgatgaaaatgaaggtccttgttttcttcgttgctacaattttggtagcatggcaatgccatgcgtacgatatgttccctctccgaatgaacactggctatggtgcccgtactccggaggtgaaatgcgcaagttggaggcttgctgtggaagcacacaacatctttggctttgagaccattcctgaagagtgcgttgaagcaacaaa

SEQ ID NO: 196685 - DNA, 274 bp, Glycine max
ccggtcgagaagacgagacaagggggagctgttgggcattctcagcaatcggtgcagtagaacgcatcaatacgatagtatcaggcgcactgatctcgttatcagaacaagaattggtggattgtgatactggatataaccaaggatgcaatggaggacttatggactatgcatttgagttcataatcaacaatggcggcattgattctgatgaggattacccataccgtggtgttgatggtagatgcgacacatataggaaaaatgctaaagt

SEQ ID NO: 196686 - DNA, 265 bp, Glycine max
tacggctgcgagaagacgacagaagggaaagagacccggaaagggtgggaaccgcttttggaaatccattgggcttggatttaagactcccagggaagccatcgaaggaacctacattgacaagaagtgccccttcactggcaatgtttccatccgtggccgtatcttggctggaacatgtcacagtgctaagatgaacaggactattattgttaggaggaattatctccattttatcaagaagtaccagaggtacgagaaaagg

SEQ ID NO: 196687 - DNA, 266 bp, Glycine max
tacggctgcgagaagacgacagaagggggaagagcgaaggatgcaattgagagagagagagaaatggagaagacaggagtgttatcggcgaaggaggcattcgagaagcttgaaaaggtgggagaagggacatatgggaaggtgtacagagcaagagagaaggcaactgggaagatcgtggctctgaagaagactcgtctccacgaggacgaagaaggtgtccctcccaccactctccgtgaggtttccattctgcgaatgctctc

SEQ ID NO: 196688 - DNA, 260 bp, Glycine max
cagctgcgagaagacgacagaagggggggtgccattgttgctgtcatcatccgcagctgctgttattcgcaccgcaaacaaacagtgagccatggccgtcggaaagaacaagcgcatctccaaagggaaaaagggtggcaagaagaaggcagctgatccctttgccaagaaggattggtatgacattaaggccccttctctttttcaagtgaaaaatgttggcaaaaccctcgtctctcgtacgcagggtaccaagattg

SEQ ID NO: 196689 - DNA, 261 bp, Glycine max
tacggctgcgagaagacgacagaaggggatgaaaaagggagtgcccgataacccataaccgaccgcaccaccgttttcctttgctttgcgttctacaatgtcgaaaacctcagagattattacatgcaaagctgctatttgctggggaatatgaaaacctgtgactgtggaagagatacaagtagaccctcccaaagccaccgaagttcgagttaagatgctttgtgccagtatatgctccacagacatctctagcacaaa

SEQ ID NO: 196690 - DNA, 259 bp, Glycine max
tacggctgcgagaagacgacagaaggggaatggtccggtgaagtgttcggattgcggcgacgtgagcggttcgctgcccgcgacgttgtgagaagtccactgaaccttatcatttagagggaaggaggagaagacaaattaaccaccaacaacagcagaagaaaataaaggagcaaactaaaatggcagcaaataaatacgttgcattgttgttggtggtgttccttatcgctggaagtgctaatgctagaccaaaaga

SEQ ID NO: 196691 - DNA, 262 bp, Glycine max
cgagaagacgacagaagggggtccttctttgcgagattgaatcgtaagcagcggctaccctaatcctctcctcttcctctctactaatttcagctatggccgacgaagctgtggttgttccagatcccacccagatcgatgtcaagctctttaaccgctggagcttcgacgatattgagattactgacatttctctggctgattatatcggagtggcgacatccaagcacgccacgtatgtgcctcacaccgccggcaggta

SEQ ID NO: 196692 - DNA, 284 bp, Glycine max
aatcggcactcggctcgagtacggctgcgagaagacgacagaagggggcgcaagtttgttgagatagctagaaggaataagatggaaatgacagtgcttgttttgtttgttgctacagttttggtagcatatgaatgccatggctcagactaccaggagttccctctccaaatgacaactgggtttggtgggcaatacagcaatgaggtggcatgtgccagttggaggcttggcgtggaagcaaacaacgtagtcaagtggcaaactgttcctgcagcttgcgg

SEQ ID NO: 196693 - DNA, 266 bp, Glycine max
cggctgcgagaagacgacagaaggggaagatgggtgtagaagtgtatcacaatttgaagtctgtgattaagaagaaatatggtcaagatgcaataaatgttggtgacgaaggtggctttgcccctaacatccaggaaaacaaggaaggcttggaattgctgaaaactgccatcgccaaagctggttacacaggcaaagttgtcattggaatggatgttgcagcttctgaattctacaaggaagacaaaacatacgatttgaacttc

SEQ ID NO: 196694 - DNA, 264 bp, Glycine max
gaatcaactcctcacagttgtccatgataaagacacggcggacataaagcttaatattgttaggcttcttccttgtgtcaaagaggtcaaaaggtgccctcttaggaacaaagaggatagccttaaactccaactgtccctcaactgagaagtgcttgacagccaaatgctcttcccagtcattggtgagactcttgtagaaagcagaatactcctcctttgtgatctcctcaggctttcccatccaaatgggcttctgcttgt

SEQ ID NO: 196695 - DNA, 266 bp, Glycine max
tacggctgcgagaagacgacagaagggggcagagagaagagggtcagagtgagaaagagagagagagggagagaaactgagagaaattcgcaaaccctaatttcggaaagatcggcgatggctgcctccaaggatcgcgagaacttcgtctacatcgccaagctcgccgaacaggccgagcgatacgaagagatggtggaatcaatgaagaacgttgcgaatctcgacgttgaactgactgtggaggagcggaatttactttctgt

SEQ ID NO: 196696 - DNA, 260 bp, Glycine max
gctgcgagaagacgacagaaggggggtgatgggtgggtgagtccgaattgtgaaagtaagcaaagatggctttcacggaatcgtctctcctccttccttcggtttcaggaaccaacaagaacaagaacaaggttccagaagacaaatggtatttagcctacattgtgtattttaccctgggtctcggttaccttctcctatggaacgctttcatcaccgccgttgattacttctcctttctctaccctgacgccagcgtt

SEQ ID NO: 196697 - DNA, 258 bp, Glycine max
acggctgcgagaagacgacagaagggtggccaggttatctggtgtcttgctcatacgatttggatcggaaattccgtggctgttgcagcttcaattggcttaattgcacatcatctatttggtgtctggaatggagacaggcgactggctataagatatggggaggattttgaattagtcaagagtcgaacaagtgttgtcccttttgcagcaatccttgatggccgacaaaagctacctaaagatttctacaaggag

SEQ ID NO: 196698 - DNA, 262 bp, Glycine max
tacggctgcgagaagacgacagaagggggggcgaggaagccacatagagacacaatacagagtgagttgttgctccttcgccacaactctctgccaacatgggtatctccagagattctatgcacaagaggcgtgccactggtggcaagaagaaggcctggaggaaaaagagaaagtatgagcttggtcgccagcctgctaacactaagctgtcaagcaacaagacagtcaggaggatccgtgttagaggtggaaatgtgaa

SEQ ID NO: 196699 - DNA, 263 bp, Glycine max
agaagacgacagaaggggaacgcagccaagaaaagaaaatcctcacccattttcttcgtagccaaacactctgaaattctcagttatgtcgtggcaagcgtatgtggatgatcaccgactgtgtgaaatcgaaggtaaccacctcactcacgccgctatcatcggccaagacggaagcgtttgggctcagagcaccaacttccctcagttcaaacctgaggaaataactgccatcaataatgactttaatgagcctggatcac

SEQ ID NO: 196700 - DNA, 144 bp, Glycine max
tacggctgcgaaagacgacagaagggcgctgacgatgccgctccgataaactccggcaagaaccgcgaccgcaagcgagggattccatggacggaggaagagcacaagctattcttggtggggttgcagaaagtggggaaaggt

SEQ ID NO: 196701 - DNA, 217 bp, Glycine max
tacggctgcgagaagacgacagaaggggcaacaggtcatcagagtggagctgtcaaggtgtggcagatgattcactgctccaacccagatagctcccttagcaaatcaggttttggtgggtcgggaggtttaaatcttggtggattagaaccagaatacaagttggtcctacgcaaagtgctaaagtttcataagcattcggctactgcccttcacc

SEQ ID NO: 196702 - DNA, 166 bp, Glycine max
tacggctgcgagaagacgacagaagggtgtgtgaagaaatcatggccaggggcattcagaactctgtatggtgatcatgaaagatatgaaacaacatatttcaagccattttccggatactatttcagtggtgatggttgcagcagggataaagatggataccatt

SEQ ID NO: 196703 - DNA, 221 bp, Glycine max
tacggctgcgagaagacgacagaagggggcacaagtgagtttgttgatcgagataactagaaacagtgtgatgaaaatgaaggtccttgttttcttcgttgctacaattttggtagcatgccaatgccatgcgtacgatatgttccctctccgaatgaacactggctatggtgcccgtactccggaggtgaaatgcgcaattggaggcttgctgtggaagc

SEQ ID NO: 196704 - DNA, 272 bp, Glycine max
  unsure (1)..(272): unsure at all n locations
tcggatgcgagatgacgacagatgggggcacaagtgagtttgttgatcgagataactagaaacagtgtgatgaaaatgaaggtccttgttttcttcgttgctacaattttagtagactggcaatgccatgcgtaagatatgttccctctacgaataaacactggctatggtgcccgtactccgagagtgaaatgcgcnagttggaggcttgctgtggtagcacacaacatctttggctttgagaccattcctgaagagtgcgttgaagcaac

SEQ ID NO: 196705 - DNA, 146 bp, Glycine max
acgtaagctcctcgatacggctgcgtgaagacgacagaagggtaatttgggaattattgctcccatcgccattggtttcattgtcggcgctaacattttgttgggtggggccttctctggagcggccatgaaccccgctgtgacat

SEQ ID NO: 196706 - DNA, 209 bp, Glycine max
ttgcgagatgacgacagatggggcctcttctctcgcgtcgctccgcaccagtttcaccgcacgaatatcttgttgtttggagcgatccgagaaaaaactacgtaaacatgttggtttaccaggacctccttacaggtgatgagcttctctctgactccttccgttacaaggaaattgagaatggaatgctgtgggaagttgaggggaag

SEQ ID NO: 196707 - DNA, 265 bp, Glycine max
tacggctgcgagaagacgacagaagggtgtgtgtgctatctcagactgtcaatgacagcagggtgttgcttggaggtgggtggcctgagatggtgatggcaaaagaagttgatgcattggctaagaaaactcctggaaagaagtctcttgctattgaggcattctcccgtgcactcttggctattccaacaatcattgctgataatgctggtttggacagtgctgagttgatttctcagctccgtgcagagcatcagaaggaggg

SEQ ID NO: 196708 - DNA, 288 bp, Glycine max
tctcgagacgaatcggctcgaggctgcgagaagacgacagatgggacttatatgctatttcagctgagtaacctgaattcagctacaagggtaagacactagtctttcaattttctgttaagcacgaacagaagcttgactgtggtggtggctacatgaagttgctcagtggggatgttgatcagaagaaatttggcggggatactccttacagtattatgtttggcccagatatctgcggaaacagtaccaagaaagttcacgctattcttaactacaataacacaa

SEQ ID NO: 196709 - DNA, 147 bp, Glycine max
tacggcgagaagacgacagaagggtcaggaaacattgaaccaactgaattactggctgacatggacaatcagatagcaacagcaaaagaagaagctttaagccgaaaagatatattggacaaggttgagaaatggatgtcagcatgt

SEQ ID NO: 196710 - DNA, 221 bp, Glycine max
tacggctgcgagtagacgacagatgggggcacaagtgagtttgttgatagagataaatagaaacagtgtgatgaaaatgaaggtccttgttttcttcgttgctacaattttggtagcatggcaatgccatgcgtacgatatgttccctctccgaatgaacactggctatggtgcccgtactccggaggtgaaatgcgcaagttggaggcttgctgtggaag

SEQ ID NO: 196711 - DNA, 158 bp, Glycine max
tggtgatcggtgactgaggaatacagcgacaaagtaatgggtctagcttgcaagctcatggaggtgttgtccgaagcaatggggttagagaaagagggtttaagcaaagcatgtgttgacatggaccagaaggtggtggttaattactaccccaaatg

SEQ ID NO: 196712 - DNA, 222 bp, Glycine max
ttcggctgcgagaagacgacagatgggggccaagtgagtttattgatcgagataactagaaacagtgtgatgaaaatgaaggtccttgttttcttcgttgctacaattttggtagcatggcaatgccatgcgaccgatgtgttccctctccgaatgaacactggctatagtgaccgtaatacggaggtgaaatgcgcaagttggaggcttgctgtggaagcc

SEQ ID NO: 196713 - DNA, 156 bp, Glycine max
gtagtattgcacaaaaggtggactttgcatacagtttctttgagaaacaggttcctattgatgcagtgttccagaaggatgagatgattgacatcattggtgtgaccaagggtaaaggttatgagggtgttgtcactcgttggggtgttacccgcc

SEQ ID NO: 196714 - DNA, 277 bp, Glycine max
tacggctgcgagaagacgacagatgggtcatatgcatggacacggccagcaaaaaccaagtcaacgcgtgcctcataaagcaactcctccatggcttgtctcatggattcaccttcaccttggtgtgcctcattagtattataccaaggtgcatgcagcaacacaatcacccaaggtgtcttgaccctatcaatgttggcgaggtcagattgaagccacgtgtactgaagtgattgggagtcaaaatcagtgtaggaacctagcatgatgacgtggg

SEQ ID NO: 196715 - DNA, 245 bp, Glycine max
ggaagaaatctgcttctgggaaaagtgtatccatcatcaaccccactaccagaaagactcaatacaaagttcaagcttgttcacaagaggaggttaataaggtcatggacttagcaaaatctgcacaaaagttatgggcaaagaccccactatggaaacgtgctgaacttcttcacaaggcagctgctatccttaaagagcacaaaactccattgcagagtgcctggtgaaagaaatagcaagcc

SEQ ID NO: 196716 - DNA, 197 bp, Glycine max
cggctgcgagaagacgacagaagggggatccttctacactaactaaagccgagcagcgagagagagaaaccctagcaaaaatgccggctggtcacggtttgagatcccgcaccagagattccttctctcgtcccttcaggaagaagggtaccatcgccctcaccacatacctctcaacctaccacgtcggcgattat

SEQ ID NO: 196717 - DNA, 325 bp, Glycine max
tcgcacgcacatgcgaggtcgactacgaagacgacagaagggatctgttgattgtcttaaagttgttcatagcttgcatgtctattttcttcttgtgggggattttaacatacccattatatatcaagttaagcgtctccgtgatgggaagagttttgctactaggaaagtggatgcaattcaaaagggaaatgtcatattcactttgctggcttcatttcacaaggaagaagtagggtttcaccaccaggaagtgtctatcccatcagtccctgctccagatacgcttttatcgttggaagagcttcgggaacaacgtcttact

SEQ ID NO: 196718 - DNA, 301 bp, Glycine max
tacggctgcgagaaacgacagaaggggaccacgattactaccaagtgaaaaagcaattaactaagcatatatagcgtgtaagacagtgagaaaaaaagtgttgtgtagagagaaatggctaggtggtgcatcttggtggttcttgcccttgtcgtggttgcaagtgccagaaacatgcccaatgacgcaggtttggaggaccagaagaacttcctcgggtatgggttctctggagttggcaacaatgggcttccctttggaggagtgggttctgggtttgatggtaatatgggtgggcctt

SEQ ID NO: 196719 - DNA, 253 bp, Glycine max
  unsure (1)..(253): unsure at all n locations
tacggctgcgagaagacgacagaagggatggaaattcaggttaatggtggtagtattgcacaaaaggtggactttgcatacagtttctttgagaaacaggttcctattgatgcagtgttccagaaggatgagatgattgacatcattggtgtgaccaagggtaaaggttatgagggtgttgtcnatcgttggggtgttacccgccttccccgtaagactcacagaggtttgaggaaggttgcttgtattggtg

SEQ ID NO: 196720 - DNA, 295 bp, Glycine max
ctgcgagaagacgacagaaggggagagaaagagagagaaagatgtcgaagcgtggtcgtggtggttcggcggggaacaagttccgcatgtcgctgggtcttccagtggcggcgacggtgaactgcgccgacaacacgggggcgaagaacctctacatcatttcggtgaaagggatcaaaggccgtttgaaccgtcttccctcggcctgcgttggcgacatggtgatggccaccgtgaagaagggaaaacccgatctgaggaagaagtctggccagctgtcatcgttcgccacgca

SEQ ID NO: 196721 - DNA, 309 bp, Glycine max
acggctgcgagaagacaacagaagggggttccgttttggtacgaattgaacttgcgttgctgaagaataacatagtgagttgtgcactctgcagaagctccacgtacttccgcacgaccttttcattaagaatgaagcttgacgtagatgtcttgagatatctctccaaagatgattttagggttctcactgctgttgaattgggcatgcggaatcatgaaatcgtacccactgaactcatagaccgaatagcgcgtctcaagcatggaggcacgcacaagggtttgaaaaacttgctcaagcataagt

SEQ ID NO: 196722 - DNA, 281 bp, Glycine max
acggctgcgagaagacgacagaagggggcatatccaaaggaacaaaaatattattaagatgatcaacattattggagcacttgttctactctttgcatttctcttcctcagttgtgtgtatgcacaagacacaacaacccttgtgcctgcaatcataacttttggtgattctgctgtggatgtagggaacaatgactatcttcccacccttttcaaggctgattaccctccttatgggagggactttgttaaccaccaacctactgggaggtttgcaatgg

SEQ ID NO: 196723 - DNA, 302 bp, Glycine max
tacggctgcgagaagacgacagaagggggggagaaagatgagcgaggggatgagctccatgagtttcaagctcaaggagttcttccagcctgggcccaatcaggccgacaagcttgtggaggacgctacttccgaggccctggacgagcccgaatgggccctcaatctcgatctctgcgacctcgtcaacaccgacaagctcaactgcgtcgaactcgtccgcggaatcaagaagcggatcattctcaagagccctagggttcagtacctcgcccttgtcctcctcgaaaccctagtcaaga

SEQ ID NO: 196724 - DNA, 302 bp, Glycine max
acggctgagaagacgacagaaggggataccaaaaacaaaacacaagccaagtgaaagtgagaaaaaataaaaatcaaagagcataatgtcagggatcattcacaagattggggagacccttcatgtgggagggcacaagaaggaggaggagcataagggtgagcaccatgctggagaatacaaaggggagcaccatggtgaacacagtagtgagtacaaaggagagcatcatggtgaacacaaagctggagagtaccatggtgagcacaagccagagcacaaagaggggttcctagacaaag

SEQ ID NO: 196725 - DNA, 316 bp, Glycine max
tccaaagtttgtatagtgtaggatttgttggtattcgtgataaaaacacctcatcctattcattttgccatgacgggcgaactccagataaaggttttgaaagtaatgagaaattattaattcatccatgttactggcttggtttgaatctaaatcgtaatgcacttgctccagaggaagcagaggagataaatgacgaatatgatattaatattatttcagataattcagccattagaaataaaacaataggtcaaataactactcatctagatcagataccgataggaaatgaaggtgccactgaatttgaaca

SEQ ID NO: 196726 - DNA, 268 bp, Glycine max
tacggctgcgagaaacgacagaagggaccttttgagttgttctgccggatcggtcgctcaagacctttggtctctacccggacctgatgaaaaaaatgggatcacatcttatggactcgttgagaataattctgatctagttcatggcctattagaagtagaaggcgctctggtgggatcctcacgtacagaaaaagattgcagtcagtttgataaggatcgagtgacattgcttctgcggtccgaaccagggaatccattaaatatg

SEQ ID NO: 196727 - DNA, 207 bp, Glycine max
tacggctgcagaagacgacagaagggggcacaagtgagtttgttgatcgagataactagaaacagtgtgatgaaaatgaaggtccttgttttcttcgttgctacaattttggtagcatggcaatgccatgcgtacgatatgttccctctccgaatgaacactggctatggtgcccgtactccggaggtgaaatgcgcaatttggagg

SEQ ID NO: 196728 - DNA, 298 bp, Glycine max
tctcgagcgctcgagcggctcagtacggctgcgagaagacgaacgaaggggggtttgtacccatgtcatccgttgaggaagactcgaagcggctgctaagcagttcaatggctatgaacttgatggaagatcattgagagtgaattctggaccacctcctgctcggaatgagagtgctcctcggtttagaggtggttcttctttcggttccagaggtggtggtccttcagatagtgaaaccgtgttcatgtaagtaatcctgcttggggtgttgacgatgtagcacttgagtctttgt

SEQ ID NO: 196729 - DNA, 294 bp, Glycine max
tacggctagacgacagaagggggaacaaaacaagtgtttcgaatagattatcctaagtctttgggaatagtgctgcaatggcttcaagtcaggaggaggtgacccttttgggagctactggaagcccatttgtgtgcagggttcatattgccctcaagttgaagggagttcaatacaaatatgtcgaagaaaatttgaggaacaagagtgaactgcttctcaaatccaacccagttcacaagaagattccagtgtttattcacaatgagaagtccatagcagagtctcttgtgt

SEQ ID NO: 196730 - DNA, 305 bp, Glycine max
tctcgagccgaatcggctcgagggctgcgagaagacgacagaaggacggaaaaagggagtgcctgataacccataaccgaccgcaccaccgttttcctttgctttgcgttctacaatgtcgaaaacctcagagattattacatgcaaagctgctatttgctggggaataggaaaacctgtgactgtggaagagatacaagtagaccctcccaaagccaccgaagttcgagttaagatgctttgtgccagtatatgctccacaggcatctctagcactaaaggattcccacataccaattttccta

SEQ ID NO: 196731 - DNA, 308 bp, Glycine max
tacggctgcgagaagacgacagaagggaaagagacccggaaagggtgggaaccgcttttggaaatccattgggcttggatttaagactcccagggaagccatcgaaggaacctacattgacaagaagtgccccttcactggcaatgtttccatccgtggccgtatcttggctggaacatgtcacagtgctaagatgaacaggactattattgttaggaggaattatctccattttatcaagaagtaccagaggtacgagaaaaggcactccaacattcctgctcatatatcacctgctttccgtgtga

SEQ ID NO: 196732 - DNA, 311 bp, Glycine max
tacggctgcgagaagacgacagaagggggggaggggagaagagaaagaaggaaggagacatttataaaaagctctttcccttcccctaaatccctcacactcattccatttttacctttctctctcgctcgcaaacgcaaataataaaaaacaaggttttagccatggcatcgaagcggatcttgaaggaactcaaggatctccaaaaggatcctcctacctcatgcagcgccggtcctgttgctgaagacatgtttcactggcaagcaacaattatgggtcctccagacagtccttatgctggaggtgtt

SEQ ID NO: 196733 - DNA, 265 bp, Glycine max
acggctgcgagaagacgacagaagggatggttcagcgcactagtctaagatcaagtccaagattttctactaagtgtgcttagatgtcatgagacatgtaaagcatgaaggatatgcacaaagtggtctcacctccccattaggatggtccaaaatgtaattggattgaacttctcccaattcaattaaatttctctcccaacacacacattgcacttaatgcaagtaaaattataaaattacccctaatataaaaactaatcta

SEQ ID NO: 196734 - DNA, 291 bp, Glycine max
ctgcgagaagacgacagaagggggaggaagagagaaaagaaaaccggtgctgttgaggcagagattcaagagaatggaaggtgtgagccctgagcccttgagatcagaattggattccaaatccaaacaagacacagcgaaagaagaagatgacgacacattcaaagaaagcactgacgccgaggtcactaaaattcgtctcatgagagcctttgttgaaagccgagatccctcttccaaggaagtagatgatttgatgattagaagattcttgcgggctcgtagtttaga

SEQ ID NO: 196735 - DNA, 159 bp, Glycine max
gggagagagagatgggaaggtccccttgctgtgagaaagcacacacaaacaaaggtgcatggaccaaagaagaagatcatcgcctcatttcttacattagagctcacggtgaaggctgctggcgctctctccccaaagccgccggccttctccgttgcg

SEQ ID NO: 196736 - DNA, 291 bp, Glycine max
tacggctgcgagcagacgacagaagggggaaaaggatctaattagacaatgactttatcttggactgtagatgagtgaacagcataaaagcacaacttgactgacatacgcaaccaaactaaagataaacaaaatttagaaacaaaaacatgttggtgaaggtgtacggtccaacctatggagcccccaagagggtgctggtgtgtctgattgagaaggaaattgagtttgaaacagtacatattgatctcttcaagggagagaataaggaacctgagttcctaaagctgc

SEQ ID NO: 196737 - DNA, 298 bp, Glycine max
tacggctgcgagacggctacgagagggggaggagagggtggtgcgctggtggtatctttgaaacctctttgcttgcggaggcaggagtgcgtctgagagagcgcttcgtgaaagaatcgtgtggcgcggtgaaaggtttcccgttggggtttccggccccctggtcttcacctaattgtggaagaggggaggtgcattgagtataaactctctctcgcgcctttagcttgttcctgttcgtctattcgggacggggcaggcagcccacatacatgaagagaagaagagaggagagggg

SEQ ID NO: 196738 - DNA, 290 bp, Glycine max
agacgacagatggggtatcaccccatcgtgggttgctttcgccgacagtgagagactcattggggatgctgccaagaatcaggcagctgtcaacccagaaaggaccatctttgatgtcaagagacttatcggaagaaagttcgaagataaggaggttcaaaaagacatgaagcttgttccttataagattgtcaacaaggatggaaaaccttacattcaggtgaaaattaaggatggtgagaccaaggtgttcagccctgaggaaatcagtgccatggttctgatcaaga

SEQ ID NO: 196739 - DNA, 307 bp, Glycine max
ctccgaatacggctcgagacggctgcgagaatacgacagaattggaggtgcggctggatcagcacaagattgcaaaatgaagttcaacattgcaaatcccaccactgggtgccagaagaagctggaaatcgatgacgacctgaagcttcgagcattttgggacaagaggatctctcaggaggttcttggtgatgctctgggtgaggagtttaaaggatatgttttcaaaatcaccggtgggtgtgacaaacaaggattccctatgaagcagggagtgctgacccctggtcgtgttcgacttttgctc

SEQ ID NO: 196740 - DNA, 207 bp, Glycine max; identical to SEQ ID NO: 163078

SEQ ID NO: 196741 - DNA, 293 bp, Glycine max
ctacggctgcgagaagacgacagaagggatcagtggtgccccccaggataacaacataatgctgtggaatgctgtcatatttggtcctgatgatactccatgggatggaggcacgtccaagttgacactccaatttactgaggactatccaaataaaccaccgactgtacgatttgtgtctcgcatgtttcatccaaatatttatgctgatggaagtatttgtttggaaatattacaaaatcagtggagtcctatttatgatgtggctgctatgctcacatctacccagtcat

SEQ ID NO: 196742 - DNA, 300 bp, Glycine max
cgagaagacgacagaaggggacggcactcgttttcgttctcgttctggtttatagatctttgcgaaggaggtttacagcgctcaaccaaagatgcagaacgaggaaggacagatcactgagctttacattcctaggaagtgctccgccacaaacagattgattaccgctaaggaccatgcttcggttcagatcaacattgggcatgtggatgagaatggcgtctacaatggccatttctccacttttgccctctgcggattcatccgtgctcagggtggtgctgacagtgctctagaccg

SEQ ID NO: 196743 - DNA, 250 bp, Glycine max
cggctgcgagaagacgacagaagggggcagcgcttgatttgaggccaggcaagccccactcaaccaccacacctctcctcgttcacgctacccctttctgctcttcttctacctttcaagttttaaaagtataaagatggcagagacattcctatttacctcagagtcggtgaacgagggacaccctgacaagctctgcgaccaaatctccgatgctgtcctcgacgcttgcctcgagcaggacccagac

SEQ ID NO: 196744 - DNA, 247 bp, Glycine max
tacggctgcgagaagacgacagaagggggatggccaatggccaatactcgttttgtcgcatgcccagcgatgggttggcggcatgcaagccgagtgtgagtggggactatcctgctgatccctccactgcttgttgctcagccattgccaaggctgatcttaaatgcttctgccgcttcaaggattcgggccttctctctatgtatggtgttgatcccaacaagtgcatggaactccctgttaagtg

SEQ ID NO: 196745 - DNA, 246 bp, Glycine max
acggctgcgagaagacgacagaagggggcagcagttgagaggaggcactgtggcagaagtcctaggagtgtaaaacagagacgcaaaatgaagacgatcttgtcgtctgagaccatgaatattcccgacggcgtgagcatcaaggttcacgctaaggttatcgaggttgagggccctcgtggaaaactcgtgcgagacttccaccatctgaacttggacttccaacttattaccgacgatggcggt

SEQ ID NO: 196746 - DNA, 209 bp, Glycine max
gctgcgagaagacgacagaagggggtggactttgcatacagtttctttgagaaacaggttcctattgatgcagtgttccagaaggatgagatgattgacatcattggtgtgaccaagggtaaaggttatgagggtgttgtcactcgttggggtgttacccgccttccccgtaagactcacagaggtttgaggaaggttgcttgtattgg

SEQ ID NO: 196747 - DNA, 231 bp, Glycine max
ctgcgagaagacgacagaagggggcggaccacctgttaagaagcaaagtgctggagagttgcgtcttcacaaagatataagtgagctgaatctaccaaaatcatgtaccatgcaattccccaatggcaaagatgatctgatgaactttgaagtttcaattcgacctgatgatggatattacttaggtggcacatttttgttttcctttcaagtgtctcccatctatccaca

SEQ ID NO: 196748 - DNA, 222 bp, Glycine max
ggctgcgagaagacgacagaaggggagagtggtggagtgtgcaaaagagcgtcgtagtcgcaaccctaatcagaagaagcgcacttcaagcgagtgacagccaccagccatgggtcgcatgcacagccgcggtaagggtatatcctcttctgctttgccctacaaaaggacacctcctagctggctcaagatctcttcgcaagatgtcgaagaaaatatctg

SEQ ID NO: 196749 - DNA, 252 bp, Glycine max
tactcgagccgaatcggctcgagacgcgacagaagggggcctacgacgagagaaattgagtttcctgagataaccacttttcactttgattcatcaatggcaaccgcgaggaccgtgaaggatgtttcgcctcacgatttcgtgaaggcttacgcctcccatctcaagcgttccggcaagatggagcttcctgagtggactgatattgtaaaaacagcaaaatttaaggaattggctccatatgatcctgac

SEQ ID NO: 196750 - DNA, 221 bp, Glycine max
actcgagccgaatcggctcgagacggctgcgagaagacgacagaaggggggagtagggtttgtttgcgtttgagagaagcatgagcaggagtttgggaattccggtgaagctgctccacgaggcttcggggcacgtggtgacggtggagctcacgagcggagaactctacagaggcagcatgatcgagtgcgaggacaactggaactgcaatctcggggca

SEQ ID NO: 196751 - DNA, 236 bp, Glycine max
tacggctgcgagagacgacagaagggattagagatggacccaatcttgtgaagaacatggaccgtttggaggcctacaataaaggattaaccacttgggctaattgggttgaccagaatgttgatccctccaaaactaaagtcttctttcaaggcatttctcctacacactatcagggcaaggattggaatcaaccaaaaagaagctgtagtggagagcttcaaccattgtctgga

SEQ ID NO: 196752 - DNA, 218 bp, Glycine max
ggcatagaactcacaaagttagacggtggaggaaaaccagtgggtggcagtgtggggagagtgttatactcttctccagtgcacctttgggaaagctctacagtggtcgcaagctttgaaaccgacttcaccttttccatctcatcagactctactactccaggtgatggccttgccttcttcattgcaccatttgacactaaaatccctcaaaactc

SEQ ID NO: 196753 - DNA, 247 bp, Glycine max
cggctcgagtgcgagaagacgacagaaggggaggtttttagggtttacaccgaggagacacaccttcagcagcagcagccatggttctcaaaaccgaactatgccgattcagcggtgccaagatctacccagggaaaggcatcagatttgttcgtggtgattctcaggttttcctgtttgctaactcgaaatgtaagaggtatttccacaacaggttgaagccatcaaagctcacctggactgcaat

SEQ ID NO: 196754 - DNA, 200 bp, Glycine max
gcaaggacgacagaaggggaggtttgaggaaggttgcttgtattggtgcctggcatcctgcaagagtttcattcactgttgccagggctggtcagaatggataccaccaccgaactgagttgaacaagaaggtttacaagcttggcaaagctggagatgaatctcactctgctcttactgagtttgataggaccgagaaa

SEQ ID NO: 196755 - DNA, 247 bp, Glycine max
ctgcgagaagacgacagaagggggcgaaacactccccttgctgcggttgctccatcacctaatcacttccccacttcccctgtaaatcacgtttagttcgcacaaggttttaaaaaatggctgatgctgaggacattcaacctcttgttgttgataatggaactggaatggtcaaggcgggttttgcaggtgatgacgctcctagggccgtgttccccagtattattgggctaccacgccataccgg

SEQ ID NO: 196756 - DNA, 252 bp, Glycine max
gctgcgagaagacgacagaaggggacctcaaaaaacaaaaatcaataccttagagaaaacaaaagcacagaatcgaaagaagagttcttttttgagagagattgggatggcttcgacgaagaagatcacactgaagagttcggacggcgaggccttcgaggtggaggaggcggtggcggtggagtcccagacgatcaagcacatgatcgaggacaactgcgccgacagcggaattcctctccccaatgttac

SEQ ID NO: 196757 - DNA, 245 bp, Glycine max
cggctcgagtgcgagaagacgacagaaggggaggtttttagggtttacaccgaggagacacaccttcagcagcagcagccatggttctcaaaaccgaactatgccgattcagcggtgccaagatctacccagggaaaggcatcagatttgttcgtggtgattctcaggttttcctgtttgctaactcgaaatgtaagaggtatttccacaacaggttgaagccatcaaagctcacctggactgca

SEQ ID NO: 196758 - DNA, 192 bp, Glycine max
acggctgcgagaagacgacagaagggggccgtggaagagagaaaccctagggtttggaagaagctgatcggagaagatggtgcagcgtctcacctaccgcaagcgccacagctatgccaccaaatccaaccagcacagagtcgtcaagactcccggtggcaagcttgtttatcagaccacgaagaagagggc

SEQ ID NO: 196759 - DNA, 212 bp, Glycine max
agaacgaagttcgtttactatctaaacttcagcaccgaaatttagttaggctacttggtttctgtgtggaaggaaaagaaagactacttgtctatgaatttgttataaataaaagccttgattacttcatatttgatcaaactaagagagcacaattagattgggaaaaacgctacaaattcattactggtattgctcgaggaattctctac

SEQ ID NO: 196760 - DNA, 216 bp, Glycine max
gctgcgagaagacgacagaagggttggccactgaggatgaaacctgaagccaaagggtaccataatatattaaaggagaatgtgcttccctcctttgacatgaaaggaatatgggaagctatggaagagtgttacagattgggcttagccaagtccattggtgttagcaacttcggcatcaaaaagctcacccagctcgtggaaaatgcaaccatc

SEQ ID NO: 196761 - DNA, 222 bp, Glycine max
tacggctgcgagaagacgacagaagggggtaactaaaggagagtgcaattacgtagtgtgtgggagacaaagagagatggctaagtggtgtatgttggtgttggttcttgctctagctctggctgtggccacaagtgccagagatgcacccgaagatgttggtctcaaggaccagaagaacttcatcagctatgctggagttggtggctattcaggatttgg

SEQ ID NO: 196762 - DNA, 221 bp, Glycine max
tacggctgcgagaagacgacagaaggggacagctattcctcttaagcttgctactgagtttccacactgcataccttaggtcttccgaattcgaagttaatttgcaagatggctaaggaaaaggctcagatcaacattgtggtggttggtcatgtggaccctgaggaggcaaccaccattaacgagctgaagaagcctgttgtggagaaagaagctccagg

SEQ ID NO: 196763 - DNA, 194 bp, Glycine max
aagacgacagaagggggcacaagtgagtttgttgatcgagataactagaaacagtgtgatgaaaatgaaggtccttgttttcttcgttgctacaattttggtagcatggcaatgccatgcgtacgatatgttccctctccgaatgaacactggctatggtgcccgtactccggaggtgaaatgcgcaaattgga

SEQ ID NO: 196764 - DNA, 248 bp, Glycine max
actcgagccgaatcggctcgagcgagaagacgacagaaggggaggcgcggcgggatcagcacaagattgcaaaatgaagttcacacattgcaaatcccaccactgggtgccagaagaagctggaaatcgatgacgacctgaagcttcgagcattttgggacaagaggatctcccaggaggttcttggtgatgctctgggtgaggagtttaaaggatatgttttcaaaatcaccggtgggtgtgacaaa

SEQ ID NO: 196765 - DNA, 246 bp, Glycine max
tacggctgcgagaagacgacagaagggggagaagacaagtgacaagagtgtgaactgcaaagggcttctccagcctagtttgttctcagatcttcttcttccatggaccagtacgagaaggtggagaagataggcgagggaacatacggcgtcgtttacaaggctcgcgaccgcgccaccaatgagacaatcgctctgaagaagattcgcctcgagcaggaggacgaaggcgttcccagcaccgcc

SEQ ID NO: 196766 - DNA, 242 bp, Glycine max
ggggtgtgatatatttaatgacctgaaagataggtttttaagttttaaaaagaataaatacatgaaaaatattgaacagtttgaaaatcttgcaaaggttcaaacaccaaagttcatggttattgcttgtgcagattctagagtatgcccttataatgttttgggatttcaaccaggagaagcattcatgattcgcaatgttgctaatttggttcctacctttgagagtggaccctcagaaa

SEQ ID NO: 196767 - DNA, 245 bp, Glycine max
acggctgcgagagacgacagaggggggatgattggcaaaagtggataagtattcgaggtggtattggtgttccttcaaacaagagttgggagtcatggtggaatgaggaacaggagcatctgcagcacactggatttctggggcggatatgtgagattatacttgacctgcgtttctttgtctatcagtatggtattgtgtatcatctcaatgtagccagaggtgacaagagcatcttggtttat

SEQ ID NO: 196768 - DNA, 268 bp, Glycine max
acggctgcgagaagacgacagaaggggaggaagcagcagcggcggcagcagggagagaagatgaagttcaatccacgtgtgtcgagcagccgccgcaagagccgaaaggctcatttcacggcgccatcgagcgtgcggcgggtgcttatgagcgcccctctgtcggcggagctgcggtctaagtacaacgtgaggtcgatcccagtacggaaggaggacgaggtgcaggtgatgcgaggaacatacaagggtcgcgcagggaaagtga

SEQ ID NO: 196769 - DNA, 269 bp, Glycine max
acggctgcgagaagacgacagaagggggactgtcagcagcgcattatagcacaccacacaaaaaagcaaaacagagagaacaactgttactcacacacgccatgggtaaatgaatggtttttgagcaacagcagttaaaagagaaaagggattcagcgaagatgacatcggttggtgtggcaccaactccgggtttgagagaagccagtgggcatggagcagcagctgcggatagattgccagaggagatgaacgatatgaaaattagg

SEQ ID NO: 196770 - DNA, 264 bp, Glycine max
tgaacctttccgtgcattgccagaatgggaatttaaaagttatcttgggtggcatgaacagggcgatggcaagtttttttatggtcttcatgttgataatggtcgtattggtggaaagatgaaaaagacattgagggaggttattgagaaatataatttgaatgcaagaatcactccaaatcagaatatcatcttgactgatgttcgtgctgcatggaagcgtccagttacaaccactcttgctcaagctggtttgctgcaacc

SEQ ID NO: 196771 - DNA, 260 bp, Glycine max
gctgcgagaagacgacagaagggggcatcaattcaaaatatatcatcaattataagcatgggtttgtggaacacaacgaatgcagtgtcttgccgctttcacaagtttggtgatgaccaaaagaatctggtcttccaaggtgatgccacgtcttcttccaggggcatagaactcacaaagttagacggtggaggaaaaccagtgggtggcagtgtggggagagtgctatactcttctccagtgcacctttgggaaagctc

SEQ ID NO: 196772 - DNA, 266 bp, Glycine max
cggctcgagtacggctgcgagaagacgacagaagggtacggctgcgagaagacgacagaagggggatcagtgagtgctcaagaagtttcaccaaatgaattatacagccagtctgcaatatacattgctgctgcccatgcattgaaaccaaattattcagtttatagcagtgccttgcggttggtgcgttctatgctaccattaccacaccttaaagttggatatttaaccgcacctcctgtgggggcatctattgcacctcataa

SEQ ID NO: 196773 - DNA, 260 bp, Glycine max
acggctgcgaggacgacagaagggggaagcagaatcatcagagaagatcaacatagtcaaacttttaagaacttcagctgtgagaagaggtttatatgctggtgtgggcctcttaatcttccagcagtttgtgggaatcaacactgtgatgtattatagtcccaccattgttcagttggctggttttgcatctaacagggcagcattgcttctgtcactcatcacagctggcctcaatgcatttggttcaattctgagca

SEQ ID NO: 196774 - DNA, 270 bp, Glycine max
taggctgcgagaagacgacagaagggtggaggaaagtgagtgagagaaagagatcgcagacacagagcagaatggcttctacccaatgtttcttgcaccaccatgctcttaccacccctgccagtgccagatccccatcactacgcatcttggttagcaccaagcctaaccagcttgtttgcaaggcacagagacaacaaacaccacaagaggatattgatgtcagcccaatctctcgccgtttagctctaactgtgctcattggtgctg

SEQ ID NO: 196775 - DNA, 237 bp, Glycine max
ggcataagaacaagcacaaggtctgattcgtgtttccttacatcaacttgtggtctaaaaatgggaaggatgccatgctgtgagaaggtagggttgaacaaaggaccatggaaaaccgaagaagatgagaagctcgtggcttatgttgaaaggcatggccctggaaactggcgttcagtgcctgccaaagcgggtcttcaaagatgtggcaagagttgtagactgaggtggatcaac

SEQ ID NO: 196776 - DNA, 239 bp, Glycine max
agacgacagaagggggatgcacaagtttgttgagatagctagaagcaataagatgaaaatgaaagtgcttgttttgtttgttgctacagttttggtagcatatgaatgccatggctcagactaccagaagttccctctccaaatgaaaactgggtttggtgggcaatacagcaatgaggtggcatgtgccagttggaggcttggcgtgggagcaaacaacgtagtcaagtggcaaactg

SEQ ID NO: 196777 - DNA, 213 bp, Glycine max
tacggctgcgagaaacgacagaagggggtaagaaagagggtgtgaagagagtggggagaagatttggtgttgtggccatggcggagtctaagagtactgtgcttgttacgggagcgggtggtcgcacaggacaaatagtttacaaaaaattaagagagacgccaaaccaatatgtggctagaggtctggttagaaccagatgaaagcaaacag

SEQ ID NO: 196778 - DNA, 265 bp, Glycine max
gaagacgacagagggggatagcgtttttcattgtgcattattcaatggccaccacagcagctctatccggaaccatggtgagcacctccttcatgaggaagcaacctatgacgaccaagagcctaaagacattccccaacgctctttttggtctgaaaggtggacgaggtggtcgtgtaacttgcatggcctcgtacaaggtgaagctcataaccccagaaggagaagtggagtttgaatgcccagatgatgttttcattgttga

SEQ ID NO: 196779 - DNA, 261 bp, Glycine max
gctgcgagaagacgacagaaggggaggaaaataaatgcaactaccacaaagacttatgctaccagaaccatatttttcttgaaaagtgatggaactttgacgccattggccattgagttaagtaagccgcatcctcaaggtgaagaatatggtcctgttagcgaagtctacgtgccttcgagcgaaggagttgaagcttatatttggttattggcaaaggcttatgttgttgtaaatgactcgtgctaccatcaactcgtt

SEQ ID NO: 196780 - DNA, 261 bp, Glycine max
cgcttgaatgtggggagtggaagcagggtggcctcagtcacacgtgcagggttcacagttagagcacagcaacaacaagtgaatggtggtgaggtacaaagtagccgtagggcagtgcttccacttgttgctgctggtttgaccactggctcttttgttcaagctgtgcttgctgatgccaacctatcaaagttggaccacctcacccaccttctggcggattacctggaacattgaactcagatgaaccaagagacctta

SEQ ID NO: 196781 - DNA, 260 bp, Glycine max
tctcgagccgaatcggctcgagacggctgcgagaagacgacagaagtgggacacgacacaacactacacaagctttattcttattcttcgcttcttctgtacagcacccaagattgaagatgatagaccttgcgcgcgtgcagaaggagcttgtggaatgcagcaaggacgcggagggatcgggcatcaaagtcagccccaaaaacgacaaccttgttctcttgatcggcaccattcctggccccgtcggaactccatat

SEQ ID NO: 196782 - DNA, 260 bp, Glycine max
acggctgcgagaagacgacagaagggggcacaagcgagtttgttgatcgagataactagaaacagtgtgatgaaaatgaaggtccttgttttcttcgttgctacaattttggtagcatggcaatgccatgcgtacgatatgttccctcttagaatgaacactggctatggtgcccgtactccggaggtgaaatgcgcaagttggaggcttgctgtggaagcacacaacatctttggctttgagaccattcctgaagagtg

SEQ ID NO: 196783 - DNA, 258 bp, Glycine max
cggctgcgagaagacgacagaagggggcacaagtgagtttgttgatcgagataactagaaacagtgtgatgaaaatgaaggtccttgttttcttcgttgctacaattttggtagcatggcaatgccatgcgtacgatatgttccctctccgaatgaacactggctatggtgcccgtactccggaggtgaaatgcgcaagttggaggcttgctgtggaagcacacaacatctttggctttgagaccattcctgaagagt

SEQ ID NO: 196784 - DNA, 262 bp, Glycine max
tgaagacgacagaagggggtgagagaaagggagaaaaggtgtgagaatggagagcaaagaggaagatgtaagggttggagcaactaagttctcagaaaggcaaccaattggtacagcagctcagggtgacaaggactacaaagaaccacccccagcacctttgtttgagcctggtgagctaaagtcatggtccttctacagagctggaattgctgagtttgtggccactttcttgttcctctacactaccatcttaactgtc

SEQ ID NO: 196785 - DNA, 259 bp, Glycine max
tctcgagccgaatcggctcgagtacggctgcgagaagacgacagaaggggagtgaattacattgcattgggttctagcagcgtatttcactcaccatgcaggctagtgataggtttaacatcaattctcagctcgagcatctccaagccaaatatgttggaactggccatgctgatttgaacagatttgagtgggcagtgaacattcaacgtgatagctatgcatcatatattgggcactaccctttactgggattctt

SEQ ID NO: 196786 - DNA, 207 bp, Glycine max
tctcgagccgaatcggctcgagacggctgcgagaagacgacagaagagggcaaactgttcctgacagcttgcggagagtacatagctgactacgttctaggagaccaatatagatcagattccaaaacagttaaccaacaagcttatttctatgctaaatccctcaaactcaccaacaaagatgtctttgtcttggacgttgacgac

SEQ ID NO: 196787 - DNA, 226 bp, Glycine max
tacggctgcgagaagacgacagaaggggggaagaagaaaaagaggaacaagaagagcgtggagacgtacaagatatacatattcaaggtactgaagcaggtccaccctgacattggtatctcaagcaaggccatgggaatcatgaacagcttcatcaacgacatcttcgagaagcttgctcaggaatcttccagacttgcgcgctacaacaagaagcccaccatca

SEQ ID NO: 196788 - DNA, 261 bp, Glycine max
tacggctgcgagaagacgacagaagggggcacaagtgagtttgttgatcgagataactagaaacagtgtgatgaaaatgaaggtccttgttttcttcgttgctacaattttggtagcatggcaatgccatgcgtacgatatgttccctctccgaatgaacactggctatggtgcccgtactccggaggtgaaatgcgcaagttggaggcttgctgtggaagcacacaacatctttggctttgagaccattcctgaagagtg

SEQ ID NO: 196789 - DNA, 300 bp, Glycine max
acggctgcgagaagagacagaaggggggggcgaggtagccagagagtgatacaatacagagtgcgttgttgctccttcgccacaactccctgccaacatgggtatctccagagattctatgcacaagaggcgtgccactggtggcaagaagaaggcatggaggaagaagagaaagtatgagcttggtcgccagcctgctaacactaagctgtcaagcaacaagacagtcaggaggatccgggttagaggtggaaatgtgaagtggagggcactgagatggatactggaaattactcctgg

SEQ ID NO: 196790 - DNA, 231 bp, Glycine max
agaagacgacagaaggggacagcacagcactctttgcaacacaacaaaaaaagacaacacagagagaagcgtcttaataaacgctcttctctgaaaaacctgatttcttctcttcttctcttctctttcgtttcgatcttcgatctctgaaaatgagagagtgcatttcaatccacatcggtcaggccggtattcaggtcggaaacgcctgctgggagctctactgcctcg

SEQ ID NO: 196791 - DNA, 279 bp, Glycine max
tagtctcaatggctgcaatggtggcacctttgcaccaggtagatgttctaaatacgttgccaattgtagtgctggcgattcatccactgaaccctatatcgttggacactacttattacttgctcatgaatctgctgccacattatacaagacaaaatatcaggctcgtcaaaaaggacaaattgggatcactaatccaacacactactttttgccaaaatctcaaagtgctgcagattacaaggcagcaagtagagctctggactctctttggttggt

SEQ ID NO: 196792 - DNA, 271 bp, Glycine max
tacggctgcgagaagacgacagaaggggactgagagcaattgcatcaacaacaaattgaaaggatgtcgatcttcgagtacaacggaagcgccgtggtggctatggtcggcaagaactgcttcgccattgccagcgaccgaaggctcggcgttcagctccaaaccatagccacggatttccaacgcatttccaagattcacgacaagctcttcatcgctctctctggcctcgccaccgatgctcaaacattgtatcagcgttgttttccgg

SEQ ID NO: 196793 - DNA, 281 bp, Glycine max
acggctgcggaaaacgacagaaggggggcactcgaagaacaacaacgatctcgcgttcttcacgtacgacgagaagcggaaactaggttatggtacccagaaggagaggttgggaaaggactccattaagcccttcgatgcttgctctctctgccttaaatccctaatcgaccctatgagctgccagaagggccatctcttttgcaaagagtgcattctccagtacctcttgtctcagaagaaagacattcaaaggaagctgcagcccatgctgctcagca

SEQ ID NO: 196794 - DNA, 279 bp, Glycine max
ttgatctggccatcaagaggaacagtttgattggaggagatgactttaagagtggtcagaccaaaatgaaatctgtgttggtggatttccttgtgggggccggcatcaagccaacatctatagtgagttacaaccatctgggcaacaatgatggcatgaatctctcagcccctcaaaccttacgctctaaggaaatctccaagagcaatgttgttgacgatatggtcaacagcaacgccatcctctatgagcccggtgaatccagaccatgtggttgtc

SEQ ID NO: 196795 - DNA, 288 bp, Glycine max
tccaaagtttgtatagtgtaggatttgttggtattcgtgataaaaacacctcatcctattcattttgccatgacgggcgaactccagataaaggttttgaaagtaatgagaaattattaattcatccatgttactggcttggtttgaatctaaatcgtaatgcacttgctccagaggaagcagaggagataaatgacgaatatgatattaatattatttcagataattcagccattagaaataaaacaataggtcaaataactactcactagatcagataccgatagg

SEQ ID NO: 196796 - DNA, 280 bp, Glycine max
  unsure (1)..(280): unsure at all n locations
acggctgcgagaagacgacagaaggggcactgaataaagttctgccatatatggactacgtttttggtaatgagactgaagcaagaacactttctaaagctcaaggctgggagactgataatgttgaggaaatagctttgaagatttctcagttgccaaaggcatcggaaacacataaaaggattacggttatcacccaaggtgcagatcctgtttgcgttgccgaggatggaaaagtgaaaatttaccccgtgataccgtacctaaagaganattagtt

SEQ ID NO: 196797 - DNA, 278 bp, Glycine max
atcttgaaggtcatccgtaagaacttggtcaagaagtgccttgagctcttctttgaaattgcagagaacaaggaggattacaacaagttctatgaggctttctctaagaacttaaagcttggtatccatgaggattcccagaacaagggaaagattgctgaattgctcaggtaccactccaccaagagtggtgatgagctgacaagcctcaaggattatgtgaccaggatgaaggaaggtcagagtgacatctactacacaccggtgaaagcaagaag

SEQ ID NO: 196798 - DNA, 279 bp, Glycine max
tacggctgcgagaagacgacagaaggggaggaaaataaatgcaaataccacaaagacttatgctacaagaaccatatttttcttgaaagatgatggaactttgacaccattggccattgggttaagtaagccacatcctcagggtgaagaatatggtcctgttagcgaagtctacgtgcctgccagcgaaggagtggaagcttatatttggttactggcaaaggcttatgttgttgtgaatgatgcatgctaccatcaaacatagccattggctaagca

SEQ ID NO: 196799 - DNA, 279 bp, Glycine max
tacggctgcgagaagacgacagaaggggatatcatttacaatttcaatctctctctctctctgtctctctctctctagacttagattttgtgaatggctgaagtggaagagggacaggtcatcggcgtccacaccgttgatgagtggaagctgcaactccagaatgcaaaagactccaaaaaactgattgtggtggattttactgcttcctggtgtggtccatgccgttttatggccccagttcttgcagagattgcaaaaaactcctgaattgatctt

SEQ ID NO: 196800 - DNA, 292 bp, Glycine max
tacggctgcgagaagacgacagaagggggtagagacacaatacagagtgagttgttgctccttcgccacaactctctgccaacatgggtatctccagagattctatgcacaagaggcgtgccactggtggcaagaagaaggcctggaggaaaaagagaaagtatgagcttggtcgccagcctgctaacactaagctgtcaagcaacaagacagtcaggaggatccgtgttagaggtggaaatgtgaaatggagggcattgagattggatactgaaattactcctggggaagt

SEQ ID NO: 196801 - DNA, 287 bp, Glycine max
ataggctgcgagaagacgacagaaggggttgtcataggaaacaaaatagatattgatggtggaaacagcagagtggtgtcagaaaagaaggctcgggcttggtgtgcatcaaaaggaaatatatcatattttgagacatctgccaaagaaggtattaatgttgtagaagcattccaatgcatagcaaagaatgccctgaaaagtggagaagaagaagaattatacctgccagacacaattgatgttggaaacagcagtcagccacggcacaggatgtgagtgctgaa

SEQ ID NO: 196802 - DNA, 282 bp, Glycine max
cgacagaagggcaaggcagcaagtagagctctggacttcttctttggttggtattctgatccggttttctatggtgactatccggagagtatgaaatcttcagtaggttctaggctcccaaaattcacaaaagctgaatctgaaggtctaaaaaattccatagattttcttggtgtgaattactacaccacttattatgcggaacatgctgaacctgtcagtgccaaccgaaccttctacacagacatactagccagtctcatacggaaaggaatggtctac

SEQ ID NO: 196803 - DNA, 276 bp, Glycine max
tacggctgcgagaagacgacagaagggagtagcggcattaaaaatgcagatcttcgtgaaaactctgacagggaagactataaccctcgaggtcgagagcagcgacaccatcgacaatgtcaaggccaagattcaagacaaggaaggcattcctccggatcagcagcgtttgattttcgccgtaaagcagcttgaagatggaaggaccctggccgattacaacatccagaaggaatcaacccttcatctcgtcctcagttcgtggtggcatcatga

SEQ ID NO: 196804 - DNA, 279 bp, Glycine max
tctcgagccgattcggctcgagatggtttgctggcaacttggcctatggtggtgctgctggagcctcatcccttttgtttgactactctcttgactatgcccgtacccgtcttgccaatgatgctaaggctgcaaagaagggaggagagagacagttcaatggccttgttgatgtctacaggaagacattggcatctgatggtgttgctgggctctaccgtggtttcaacatctcatgtgttggaatcattgtgtatctggtctgtactttggattgta

SEQ ID NO: 196805 - DNA, 279 bp, Glycine max
atgcgagaagacgacagaaggggaaagatataaaattttgagagagcttggggatggttcttgcggtcatgtgtataaagcccgtgatatgagaacatatgagattgtcgcggtcaaaaggttgaaaagaaagttttgtttctgggaagaatacacaaatttaagagaagttatgatcctccgtaaaatgaatcacccaaatatcataaagttgaaagaggttgttagagaaaataatgaactatttttcatttttgaatcatggattgtaatctttat

SEQ ID NO: 196806 - DNA, 276 bp, Glycine max
agcgagaagacgacagaaggggggaagctgcagaacgaaggcatttcattagcagcgttaaagaagagagaagaaaaatgcgaaagttcgatccatggcccgttttcttcaagcgcgagtggaaacgtaactggcccttcctcgttggattcgcagtcaccggagctctaatcaccaaactttcccttggccttaccgaggaagatgctaagaattccaaattcgttaaggcgcacaaaaggtgatttctgaatcgtgaattgcctggctttgcac

SEQ ID NO: 196807 - DNA, 293 bp, Glycine max
cggtggtcctactcctcctccagcgtggttacaccgtccatgccaccgtccaagatatcaaggatgaaaatgagacgaaacatttggaggaaatggaaggagcaaagagtcatctccattttttgaaatggatcttcttgacatcgactccattgccgctgccataaagggttgttccggcgtaatccaccttgcatgtcctaacatcattggtcaagtcgaagatcccgagaaacagatattggaaccggcgataaaaggaacggttaatgttgaaggcggcgaaggaagca

SEQ ID NO: 196808 - DNA, 276 bp, Glycine max
tcaaatctcttcagatccgccaggtcctcacccaggctgtgagcctaggcatgattgttacgtctgcactgataatatggaaggcattgatgtgcgttactggcagtgaatctcccgttgttgttgttctttctggaagcatggaacccggattcaagcggggagacatcttgttcttgcacatgagtaaagatcctattcgggcaggggagattgttgtgtttaatgttgatggacgtgagattccaattgttcatggtaattaaggtacatgaa

SEQ ID NO: 196809 - DNA, 275 bp, Glycine max
tacggctgcgagaagacgacagaagggggcgcattgaacgaaaattagggtttgtagtgtagcaggaagaagcagcaatggcgccgaagataacacgtaaggttagcagaaaccctgaattgataaggggaatcggaaagtactcgaggtcgcagatgtaccacaagaggggcatttgggctatcaaggccaaaaacggtggcgttttacctcgccacgaccctaaacccaagcctgaagctcctgctgaaaaacaccaaattttaccctgctga

SEQ ID NO: 196810 - DNA, 277 bp, Glycine max
tacggctgcgagaagacgacagaagggggaagagagatggatccagacgcgttggcaaaggcattcgtggagcactactacagcaccttcgacaccaaccggaacggtttagctaatctgtatcaggagggttccatgctgaccttcgaagggcagaagatccagggcgcttccagcatcgtcgctaagctcacttccctccctttccagcagtgccaccactccatctccaccgtcgactgccagccctccggtgtacgctggcatgcttgtcttt

SEQ ID NO: 196811 - DNA, 279 bp, Glycine max
agacgacagaagggggaacacaaacagcgcgagacagaggcacagagagaaaatggcttcggggtcagggatctgtgccaagagggtaattgtggacgcacgacaccacatgctggggaggctggcatcgatcgtggcgaaagaacttctgaatgggcagaaggtggtggtggtacactgcgaggagatttgcatctccggtgggctcgtcaggcagaagatgaagtacttgcgtttcctccgcaagcgcatgaacacagccctctcacggccccatca

SEQ ID NO: 196812 - DNA, 277 bp, Glycine max
tacggctgcgagaagacgacagaaggaacgccactctggatatggtaagcgtaagggtacaagagaggctaggctccccaccaaaatcctttggatgaggaggatgcgtgtcctcagacgattgcttcgcaagtacagggaagcaaagaagattaacaagcatatgtaccatgatatgtacatgaaggtaaagggtaatgtcttcaagaacaagagagtcttgatggagagcatacacaagtcaaaggctgagaaggagagagaagaccttacctga

SEQ ID NO: 196813 - DNA, 275 bp, Glycine max
cggctcgagcggctcgagcggctcgagcggctcgagtacggctgcgagaagacgacagaagggggtcaggggaattggcaaatattcgaggtcgcagatgtaccacaagaggggcatctgggccatcaaggccaaaaacggcggtgttttgcccctccacgatcccaagcccaaacccgaggccccggcccagaagccgcccaagttctacccggccgatgacgtgaagaagcccctcgtcaacaagcacaagccagcccgcgatactcagggct

SEQ ID NO: 196814 - DNA, 275 bp, Glycine max
gctgcgagaagacgacagaaggggaaactaaagataaacaaaatttagaaacaaaaacatgttggtgaaggtgtacggtccaacctatggagcccccaagagggtgctggtgtgtctgattgagaaggaaattgagtttgaaacagtacatattgatctcttcaagggagagaataaggaacctgagttcctaaagctgcagccatttggatcacttcctgttattcaagatggtgattatactctctatgaatctggcaataatcagatacttt

SEQ ID NO: 196815 - DNA, 272 bp, Glycine max
cgagaagacgacagaagggggcgtacgcagcttcatccctaacgcgtgcatagcagagtcagagacagagacgcagccatggggcggagacctgcgaggtgttataggcaaattaagaacaagccataccccaagtcacgtttctgccgtggtgttcctgatcccaagatcaggatttatgatgttggtatgaagaagaagggtgttgatgagtttcctttctgtgtccatctggttagttgggagaaggaaaatttcaagtgaggccctgg

SEQ ID NO: 196816 - DNA, 276 bp, Glycine max
tacggctgcgagaagacgacagaagggagggttcctgatgaagaggcatctgttaaaaccattgtattgatggttgtgggggcagggcgtgggcctcttgtgcgggcttcattacaggctgctgaagaaactgggcggaagctcaaagtttatgctgttgaaaagaatccgaatgctgttgttaccctacatgcattagtcaagttagaaggatgggagtatactgtgaccatagtctcaagtgacatgcgtcattgaatgcccctgaaaaagctg

SEQ ID NO: 196817 - DNA, 292 bp, Glycine max
cgtcattattcggctcgagtacggctgcgagaagacgacagagggggcagcatcgtagagaaataagggaaaaatggtgtcgctgaaactgcagaagcgcctctccgcaagcgtgctcaagtgcggcagaggaaaggtttggcttgaccccaatgaagtcaacgaaatctccatggccaattctcggcaaaacatcaggaagttggttaaggatgggtttatcatcaggaagccaaccaagattcactcccgctcacgtgctcgtaggatgaaggagaaagaggaagggccg

SEQ ID NO: 196818 - DNA, 279 bp, Glycine max
tacggagagacgacagaaggggagaagaaaagatgcaatttgtcatcaattatgcttgagatggatcgaatactaaggcctggtggacgggcatacatccgtgatactcttgccatcatggatgagcttatggagattggcaaggctatgggctggcaaatgtcactgcaagatacagctgagggtcctcgtgcaagttatagggtcttggtttgtgataagcgccttcgttaatgcaaactcgctcacttgttttttaccttcaatggggaaatcaac

SEQ ID NO: 196819 - DNA, 227 bp, Glycine max
tacggctgcgagaagacgacagaagggggcagcgcttgagaccaagccccactcaaccaccacaccactctctctgctcttcttctacctttcaagtttttaaagtattaagatggcagagacattcctatttacctcagagtcagtgaacgagggacaccctgacaagctctgcgaccaaatctccgatgctgtcctcgacgcttgccttgaacaggacccagaca

SEQ ID NO: 196820 - DNA, 277 bp, Glycine max
gaagacgacagaaggggactttgagttgcgttacatcacaacaacaacatggctgccactgctgctgcaggcatagcttccttgttttcttcttctattaacagtgtcaaatgtcttcgttcctccaagaactgctccataatagaccctctcataacaacagtgccctcaaaccgtggcatgtttgggtcacacttagtggaacctttgtccattaattcgcacaagttgtggggacctagaatttctgctgctgtgcacaagaagaggctgttgt

SEQ ID NO: 196821 - DNA, 273 bp, Glycine max
tacggctgcgagaagacgacagaagggatcagtggtgccccccaggataacaacataatgctgtggaatgctgtcatatttggtcctgatgatactccatgggatggaggcacgttcaagttgacactccaatttactgaggactatccaaataaaccaccgactgtacgatttgtgtctcgcatgtttcatccaaatatttatgctgatggaagtatttgtttggatatattacaaaatcagtggagtcctatatgatgtggctgctatacc

SEQ ID NO: 196822 - DNA, 272 bp, Glycine max
tacggctgcgagaagacgacagaagggggaggtagccagagagtgatacaatacagagtgcattgttgctccttcgccacaactccctgccaacatgggtatctccagagattctatgcacaagaggcgtgccactggtggcaagaagaaggcatggaggaagaagagaaagtatgagcttggtacgtggcctgctaacactaagctgtcaagcaacaagacagtcaggaggatccgggttagaggtggaaatgaagtggagggcactgaga

SEQ ID NO: 196823 - DNA, 272 bp, Glycine max
tgcgagaagacgacagaagggaagaagaagaagagaaacaagaagagcgtggagacatacaagatctacatcttcaaggttctgaagcaggttcaccctgacattggtatctcaagcaaggccatgggaatcatgaacagcttcatcaacgacatcttcgagaagcttgcccaggaatcttctagacttgcccgctacaacaagaagcccaccatcactccaagggaaattcagaccgcggtcaggcttgtgctgcggtgaattggccaagc

SEQ ID NO: 196824 - DNA, 275 bp, Glycine max
agacgacagaagggggcagttcaaagcgaagaaagattcgagacgaagaaagaaagcgttgtgaagaatggcggaagagggacaagtgatcggtgtccacagcgtagaggattggaaggaacatctcaagaagggagaagtgtccaagaaattgattgtggtggattttactgcttcttggtgcggtccatgccgtttcattgcgccaattcttgcagaatttgctaaaaagttgccgaatgtcaccttcctcaagggatgtggatgaattggag

SEQ ID NO: 196825 - DNA, 251 bp, Glycine max
tacggctgcgagaagacgacagaaggggaatctaaagataaataaaattcaggaaaaaaaaaaaaacatggtggtgaaggtgtatggtccaacctatggatcccccaagagggtcctggtgtgtctgattgagaaggaaattgagtttgaaacagtgcatgttgatctcttcaagggagagaataaggaacctgagttccttaagctgcagccatttggatcccttcctgttattcaagacggtgattata

SEQ ID NO: 196826 - DNA, 276 bp, Glycine max
cggctgcgagaaaacgacagaagggcaacgaatccaagaaactcattgttgtggattttactgcttcttggtgtggaccatgccgtttcattgcaccattcttggctgagctggctaagaagttcacaagtgtcatattcctaaaggtggatgtggacgaattaaagagtgtttctcaagattgggctattgaggctatgcccacttttgtgtttgtgaaagagggaacgcttctggacaaagtggtgggagcaaagagatgagctgcagcagaaa

SEQ ID NO: 196827 - DNA, 272 bp, Glycine max
tacggctgcgagaagacgacagaaggggattgggaaaggaaatataaaatgatagctcttacctttactgggcatacaagaacaacattccagttttctgtcagggcttaactgatggctcattgggggacatgctgtacttccattccttccgcaatcctggtctgattgtggacatagtgcaagatataagggcaatgaacggagaagcagtacatgcaagtcccaggaagaccggaatgataattttagcagtggccttccaaaacatc

SEQ ID NO: 196828 - DNA, 275 bp, Glycine max
acggctgcgagaagacgacagaagggggcatcaattcaaaatatatcatcaattataagcatgggtttgtggaacacaacgaatgcagtgtcttgccgctttcacaagtttggtgatgaccaaaagaatctggtcttccaaggtgatgccacgtcttcttccaggggcatagaactcacaaagttagacggtggaggaaaaccagtgggtggcagtgtggggagagtgttatactcttctccagtgcacctttggaaagctctacagtggtcgca

SEQ ID NO: 196829 - DNA, 255 bp, Glycine max
tacggctgcgagaagacgacagaagggggagagaagttattagggtttttgagtgcggcggtccaaacactcttctctgcagcttttgcctacaactcacttcaccatggctgaacaaaccgagaaagcttttctgaagcaaccaaaagtgtttctcagcacaaagaagactgggaagggaaagagacctggaaaaggtgggaacgcttttggaagtccatgggcttggatttaagactcccagggaagccatcg

SEQ ID NO: 196830 - DNA, 265 bp, Glycine max
tacgctgcgagaagacgacagaaggggtccctaatcaagagatcctagcaattggtcaatcaaataccacagcagcaaaatgggtttcccataatgtgatagcacattaccctgccactaatataacaactatttgtgttggttctgaggtcttaactaccctcccctatgcagcgaaagtgcttgtcagtgcccttaagttccttcactcagcacttgttgcttccaatcttgatcaccagatcaaagtctcaccccctttcct

SEQ ID NO: 196831 - DNA, 252 bp, Glycine max
  unsure (1)..(252): unsure at all n locations
agcggctcagtcgacgaatcggctcgagcggctgcgagaagacgacaactggagagtcaaatggtntgttgatcgagataactagagacagtgtgatgaaaatgaaggtccttgttttcttcgttgctacaattttggtagcatggcaatgccatgcgtacgatatgttccctctccgaatgaacactggctatggtgcccgtactccggaggtgaaatgcgcaagttggaggcttgctgtggaagcacaca

SEQ ID NO: 196832 - DNA, 262 bp, Glycine max
tggctgcgagaagacgacagaaggggagagaaagagagagaaagatgtcgaagcgtggtcgtggtggttcggcggggaacaagttccgcatgtcgctgggtcttccagtggcggcgacggtgaactgcgccgacaacacgggggcgaagaacctctacatcattccggtgaaagggatcaaaggccgtttgaaccgtcttccctcggcctgcgttggcgacatggtgatggccaccgtgaagaagggaacacccgatctaga

SEQ ID NO: 196833 - DNA, 267 bp, Glycine max
atggctgcgagaagacgacagaaggggacagctattcctcttaagcttgctactgagtttccacactgcataccttaggtcttccgaattcgaagttaatttgcaagatggctaaggaaaaggctcaatacaacattgtggtggttggtcatgtggaccctgaggaggcaaccaccattaacgagctgaaatagcctgttgtggagaaagaagctccagggcatgccatatgagggcatgcacgtacggcctcggggggcaacagaa

SEQ ID NO: 196834 - DNA, 263 bp, Glycine max
tacggctgcgagaagacgacagaagggggcgaaagaacttgatgaaactagcccaaagaatgataaaaacgtttagccttaatatgagtacctctggtggtcaatcatggacagccatatcagattcccctgaagacactgttagaatcacaactaggaaaatcacagagcctggccaacctaatggcgtgattctaagtgcagtttcaaccacttggttgccctattctcacaccaaggtctttgatctcccaggatgaacg

SEQ ID NO: 196835 - DNA, 262 bp, Glycine max
tacggctgcgagaagacgacagcagggggcacaagtgagtttgttgatcgagataactagaaacagtgtgatgaaaatgaaggtccttgttttcttcgttgctacaattttggtagcatggcaatgccatgcgtacgatatgttccctctccgaatgaacactggctatggtgcccgtactccggaggtgaaatgcgcaagttggaggcttgctgtggaagcacacaacatctttggctttgagaccattctgagagtgcgt

SEQ ID NO: 196836 - DNA, 270 bp, Glycine max
tgctgcgagaagacgacagaaggggatagaaagagaaaatgaagtcggtgggtagggttggcggaggagaatcagagcaacgtggacattttcagatgccactgcactatccaaggtacacacaggctgactatgaaacaatgcctgagtggaggcttgattctttgctcaaagagtacggcttaccaatcattggagatcttcatcaaaagagaaactttgccatcggagcccttctttgggctcactgaaacctcctatgttgtatca

SEQ ID NO: 196837 - DNA, 273 bp, Glycine max
acgctgcgagaagacgacagaagggggtatgtgttagtttgttgacttctttcaacctaacccatcgttcgcacggagccgtggtggttctggctctgtccttttttcctttctctcgttaccagaaccagaagaaccatttgtggccaacatggatttggaccagtggatctccaaggtcaaagagggccagcatcttcttgaagacgagcttcaacttctctgcgaatatgtacaagagatccttatcgaggagtccatggcagcctgtca

SEQ ID NO: 196838 - DNA, 270 bp, Glycine max
tacggctgcgagaagacgacagaagggggcagccaagaaaagaaaatcctcacccattttcttcgtagccaaacactctgaaattctcagttatgtcgtggcaagcgtatgtggatgatcacctactgtgtgaaatcgaaggtaaccacctcactcacgccgctatcatcggccaagacggaagctcttgggctcagagcaccaacttccctcagttcaaacctgaggaaataactgccatcaataatgactttaatgactggatcactt

SEQ ID NO: 196839 - DNA, 261 bp, Glycine max
tagatgcatattttgctgcaactgatggtagcccacaacacttggagaatgcaatttgtgtgtttgaacaatacggtggtatcagttggcgtcacactgaaacaggccttgatgagatatttacagaagtcagaacagatgtgagtctaattgttagatcaattgttaccgtcggcagatacgacaatatagtagattgggagttcaagacaagtggttcaatcaagccctacgatatcactatcaggcattggaagttaa

SEQ ID NO: 196840 - DNA, 256 bp, Glycine max
acggctgcgagaagacgacagaagggggaagaagaactacattttcccgataacgagccacttattgtgagagacgggaacagaaggctaatgcaagacatagattgtggtgggttgtgcaagacgaggtgcagtgcacattcgagacccacttgtgcactagggcgtgtggcacgtgctgtgtgaggtgtaagtgtgtcccactggcacatctggaaatagggactatgtggaacttgctacactgaagactacc

SEQ ID NO: 196841 - DNA, 263 bp, Glycine max
acggctgcgagaagacgacagaaggggggttgaatatcaaactaaaccaggtggtactggtgtttcttcatttaaacatcttttagcgaaactaccccctagggttcactcagtatactacagggatggaataggaaatatttcctcttcacatctacgtacagattcttggaagtcagaacttgaaattgaacctcggtatcctctatttggaggctggaaatcaaccttcgtcattggttatgggctacatgcaagacttc

SEQ ID NO: 196842 - DNA, 268 bp, Glycine max
tacggctgcgagaagacgacagaaggggaacatgaatatgaggactcagcagctgaggctggtgggaaagaccaattgcctgaagcagaaaaaagtgacattgctactgaatttggggatgatgagcaaaaattgtctttcattgatgaagatgagaaagagaagcatgatgaacttcttgcccttccacctcatggttctgaagtctttattggtggacttcctcgggatgtatgtgaagatgatttaagggaatgtgcgagcctat

SEQ ID NO: 196843 - DNA, 268 bp, Glycine max
acggctgcgagaagacgacagaaggggacaacacaaacaattaacacacacaaacagaggctacgtacgatcaaattaattaagatggcggaagtgaggaacaaacaagtggttctgagggactatgtgagtggttttcctaaggaatccgacatgaacatagttgaaggaaccacaatatttaagcttctacaaggttccaatgatgtgcttctaaaaaatctctacctttcctgtgacccttacatgagaatgtctgaccaaggtg

SEQ ID NO: 196844 - DNA, 265 bp, Glycine max
tgtggcattctaggatttcgaccttcacatggtgctgtttcgcatatgggaatcatacctatttcaacaagtctggacactgttggttggtttgcaaaggatcccaatatattgcgtcgtgttggccatatacttttacaagcaccatttgtaatgcaacgcagtcctcggcaaatagttatagctgatgattgttttcagcatataaatgttcctcttgacaggagttctcaagtggtggtcaaagccactaaagctttttgga

SEQ ID NO: 196845 - DNA, 261 bp, Glycine max
gctgcgagaagacgacagaagggggaacaagcaaaattaagcacaaaagcccaaccctctctctcgctgttggtctctcctatttggcattcgcagatcgattacgaagtaatttcactgaatcttattgaagatgtttctcacaaggactgagtatgaccgaggagtcaacaccttttctcctgaaggccgtttatttcaggttgaatatgcaatcgaagccatcaagctgggatcaactgcaattgggtgagacgaaag

SEQ ID NO: 196846 - DNA, 261 bp, Glycine max
tacggctgcgagaagacgacagatgggggcactgcaactttgctctctgtgaggcttcaatttctaattagggtttcgcttagagtaaccaataaccatgggagtcttcacctttgtcgtccgcaaatccggcagcgaatggagcgccaagcaacattccggcgacatcgaggcctccgccgattccaccttcgatctccaacggaagctcgtgcaagctgctctcgccgttgattcctccggtggagtcagtctctttct

SEQ ID NO: 196847 - DNA, 262 bp, Glycine max
ctgcgagaagacgacagaaggggaaagaaaagagaaatggcaacagaaacaaaagtggcagtattaggtggcatcaccgaagtgcagggagctgccaacagcgtcgagatcaacaatctcgctcgctttgctgtagaggaacaaaacaaaagagagaattcagttctggagtttgtgagggtgattagtgcaaagcagcaagtggttgctggagtgaattactacataacattggaagcaaaagatggtgagattaaatgag

SEQ ID NO: 196848 - DNA, 260 bp, Glycine max
acggctgcgagaagacgacagaagggggcacaagtgagtttgttgatcgagataactagaaacagtgtgatgaaaatgaaggtccttgttttcttcgttgctacaattttggtagcatggcaatgccatgcgtacgatatgttccctctccgaatgaacactggctatggtgcccgtactccggaggtgaaatgcgcaagttggaggcttgctgtggaagcacacaacatctttggctttgagaccatccgaagagtgcg

SEQ ID NO: 196849 - DNA, 259 bp, Glycine max
tacggctgcgagatgacgacagaagggctccaacctcgaatcgttggtgaagaacattatgagactgcgcaaagagttaaacaaactttacaacgttacaaagaacttcaagacattatagctatccttggcttggacgaattatccgaagaagatcgcttaaccgtagcaagagcacgaaaaattgagcgtttcttatcacaaccttttttcgtagcagaagtttttaccggttcggcggggagatatgttagtctag

SEQ ID NO: 196850 - DNA, 253 bp, Glycine max
tacggctgcgagaagacgacagcaggggcggatcacagagactggctcaagcaatggcatcaatggctggcttgcgtggttcctctcaggctgtgttggaaggtagccttcaggtgagtggctccacacgcttgaatgtggggcgtggaagcagggtggcctcagtcacacgtgcagggttcacagttagagcacaacaacaacaagtgagtggtgcggtacaaagcagccgtcaggcagtgctttcacttgt

SEQ ID NO: 196851 - DNA, 263 bp, Glycine max
gtagacgacagatggggggcatccaaggactcctttttaccaggcttttcttaaactgaccaagtcaatttggcttttacacaggttggcttattcttttgagccgaatgttaaggtatttcaggttaaaggagggagtgagttctctgatgtttatatggaaagtgtggtcaagaatctgataatggatgacaatgatgaaaaacccaaaattggtttgatggttatgcctggattttggattgggggaattgattcagagt

SEQ ID NO: 196852 - DNA, 262 bp, Glycine max
gctgcgagaagacgacagaaggggacacgataacaagagaaaagagaaggcaatggctatcaggttgatggatttggactctccattcttcaacactctgcacagaatcatggatctgacggaggacgccgagaagaacttgaacgctccgactcggacatacgtgcgcgacgccaaggcgatggctgcgactcctgctgacgtgaaggagtaccctaactcgtacgttttcgtgatcgacatgcctggcctaatctgggga

SEQ ID NO: 196853 - DNA, 261 bp, Glycine max
tacggctgcgagaagacgacagaagggtagaaaaaggagcatgttgattatatagaaagtaaagggcaacaatcatttttgtttaccatgggtaaggacaccatcgctgacataataacctatataagaacatgctgacatgaataaaaaaggaatggttcaaataccatttactaacataacagacaacattgtaaaaatacttttacgcgagggttttgttgcaaacgtcagaaaacatagagaaaacgacatattttt

SEQ ID NO: 196854 - DNA, 264 bp, Glycine max
cggctgcgagaagacgacagaaggggactacatgcttggccaaagctcctgtgctctgtatctcagtcttcggtatcatcttctgcatccagactacttgttttatagaataaggaagttgcagaagaatttcaagcttcgtgtggttttatgccatgttggaagatgtaataaagcgtcttcttgaagttacaaaaacagctttgcttcatgactgtacactcctatatggatggagcctggaggaatgggcgttacttggaa

SEQ ID NO: 196855 - DNA, 258 bp, Glycine max
tctcgaccgctcgagtacggctgcgagaagacgcagaagggtaatttgggaattattgctcccatcgccattggtttcattgtcggcgctaacattttgttgggtggggccttctctggagcggccatgaaccccgctgtgacatttgggcctgctgtcgtgagctggacctggaccaaccactggatctactgggccggcctctcatcggtggtggaatcgctggccttgtttacgaggttgtctatcagccacacc

SEQ ID NO: 196856 - DNA, 257 bp, Glycine max
ctaggctgcgagacacgacagacggggattgtctcaagttccaggtttcagcgatttcgatctcgcatagcattctacaatggccactattccagttaaccccaagcctttcttgaacaatttgactgggaagcccgtaattgtgaaactacaagtggggaatggagtacaagggctatctcgtttccgttgattcctacatgaacttgcagctggccaacactgaagagtacattgagggacagttatggaaattt

SEQ ID NO: 196857 - DNA, 310 bp, Glycine max
acgacagaagggggagaatggaaggagggaaacgaggcacgattctggtcaccaacgacgacggtatcgatgctcctggcttaagagcattggttcactccctcgtcaacgccaaccttttcaacgttctagtgtgcgctcctgatagcgagaaatcagctgttagccacagcatcacttggtccatccagtagctgttaagaagtacagatcgagggaaccaccgcatttgctgtttctgggactcccgctgattgtgcttctctagggatttccaaagctctctttcccacagtacctgatctggtgg

SEQ ID NO: 196858 - DNA, 309 bp, Glycine max
tacggctgcgagaagacgacagaagggtccaatgtaaatataaatgcaaagcttttaaatttagtaaaatatacaaaaattgctgaaattccgaaacattgatgtacagttcaacatacctccacaattatcctcccatctaagttccttgaaccaccaggaattctatctccaactttgggcttcaaggtttgacttcccctgtcagtgctcgatggtaattgtggcactgccttggaatacttcacaatctactggcacagactaatcacaacaccatccccattacttcaataatctgctgtataa

SEQ ID NO: 196859 - DNA, 310 bp, Glycine max
acggctgcgagaagacgacagaagggggcatcaattcaaaatatatcatcaattataagcatgggtttgtggaacacaacgaatgcagtgtcttgccgctttcacaagtttggtgatgaccataagaatctggtcttccaaggtgatgccacgtcttcttccaggggcatagaactcacaaagtcaacggtggaggaaaaccagtggtggcagtgtggggagagtgttatactcttctccagtgcactttgggaaagctctacagtggtcgcaagctttgaaaccgacttcaccttttacatctcatcag

SEQ ID NO: 196860 - DNA, 180 bp, Glycine max
  unsure (1)..(180): unsure at all n locations
acggctgcgagaagacgacagaaagggaaggtgcaagagtttgttgtgagctataagctagtttatcgtgaagagaatatgaagttgtttgttttctttgttgctgcagtagttttggtagcatggccatgccatggcgcaggctaccanagggttcctctccgaatgaaaactggctat

SEQ ID NO: 196861 - DNA, 133 bp, Glycine max
gagaagacgacagaacggaaagatacacggaaacggtgggaaccgctttcggaaatccattgggcttggatgtaagactcccacggaagccatcgaatgaacctacattgacaagaagtggcccttcactggc

SEQ ID NO: 196862 - DNA, 284 bp, Glycine max
tagacgacagaaggggacagttcaattccaatatattccattctctctgtgtatttccctacctctcccttcaagatgcagatcttcgtcaagaccctcaccggcaagaccatcacccttgaggtggaaagctctgacactatcgacaacgtcaaggccaagatccaggacaaggaaggatcccccggaccagcacgttcattttcccggaagcaattgatgactgcgtaccttgctgactacacatcagaagagatactatcactcgtctcgtctcgtggtgc

SEQ ID NO: 196863 - DNA, 164 bp, Glycine max
tggctgcgagaagacgacagaaggggagagatagagagagacagatgtcgaagcgtggtcgtggtggttcggcggggaacaagttccgcatgtcgctgggtcttccagtggcggcgacggtgaactgcgccgacaacacggggggcgaagaaccttctacatca

SEQ ID NO: 196864 - DNA, 212 bp, Glycine max
acggctgcgagaagacgacagaagggagaacatgaaaccataagctcccaagcagtgggaggaggctcgggactctgaccgcgtgcctgttgaagaatgagccggcgactcataggcagtggcttggttaagggaaaccaccggagccgtagcgatagcgagtctcacagggcaattgtcactgctatggacccgaactggtgatctatcat

SEQ ID NO: 196865 - DNA, 282 bp, Glycine max
tacggctgcgagaagacgacagaagggggtagtgagagagagaaggcaagatgtcgcagagaggacgcggtggttcggcgcggaacaagttcgggagtcgctgggtctgccgtggcgccacggtgaatgcgccgatatacgggggcgagaactctacatcatatcggtgaaagggttaagggctttgaaccgtctccctcggcttgcgttggcgacatggtgatggacaccgtgatgaaggggaacccgatctgaggaagaaggttttgcagctgtcattgt

SEQ ID NO: 196866 - DNA, 300 bp, Glycine max
  unsure (1)..(300): unsure at all n locations
ggctgcgagaagacgacagaagggggagagtgaaagagaacaatggaaggcataacagagggtgtgaacaacatcaacattaacatctccgattcgtataagaagaatcgcattcaggtctctaacaccaagaagcccctcttcttctacgttaatctcgccaagagatatatgcaatgacnatgatgagtcgagctctagctctaggaatggctattgccacagtagtaactggtgctgaaattttgaaaaaccacggacttgctggtgaaaaggaaatcacgacatcaactgttgaca

SEQ ID NO: 196867 - DNA, 294 bp, Glycine max
tacggctgcgagaagacgacagaagggggtggcactcaaacattgtttgatgtaggaagaggaatcttgagaaatggcatgggacagcaagagcaagattctgttcatcggatggactggttacatcggaaaattcatcgtggaagccagcaccagagctggctcaccaactttcctttggtgatggagtcgatctcgcgacccgcaaagtcaccctcatcgacaattcaaaggcctcggtgtcgacctgttttaggagactatacgatcaccaagttggtgatgctataagca

SEQ ID NO: 196868 - DNA, 292 bp, Glycine max
tacggctgcgaagacgacagaagggggcatcaattcaaaatatatcatcaattataagcatgggtttgtggaacacaacgaatgcagtgtcttgccgctttcacaagtttggtgatgaccataagaatctggtcttccaaggtgatgccacgtcttcttccaggggcatagaactaatgaagttagacggtggaggaaaccagtgggtggcagtgtggggagagtgttatactcttctccagtgcacctttgggaaagctctacagtggtcgcaagctttgaaaccgacttc

SEQ ID NO: 196869 - DNA, 307 bp, Glycine max
  unsure (1)..(307): unsure at all n locations
tacggctgcgagaagacgacagaaggggatattgtgggagaaaaaatggaacttgaaaagttacatgattcaatcaatttgatactgtcacttcagagtaaaaatggaggtatgactgcgtgggagcccgcaggagcttataaatggttggaactactcaatcctacggaattttttgccgcatagtagttgagcacgaatatctgaatgcactgcatcagcaattcaggttttagtgttgttcaaaaagctttaccctgagcatagaaaggaagagatagagaacttcattgctanagcagtaaca

SEQ ID NO: 196870 - DNA, 229 bp, Glycine max
acggctgcgagaacgacagaagggggcacaagtttgttgagatagctagaagcaataagatgaaaatgaaagtgcttgttttgtttgttgctacagttttggtagcatatgaatgccatggctcagactaccagaagttccctctccaaatgaaaactgggtttggtgggcaatacagcacaggtggcatgtgccagttgaagcttggcgtggaagcaaacaacgtagt

SEQ ID NO: 196871 - DNA, 163 bp, Glycine max
tacggctgcgagaagacgacagaagagggcacaagtgagtttgttgatcgagataactagaaacagtgtgatgaaaatgaaggtccttgttttcttcgttgctacaattttggtagcatggcaatgccatgcgtacgatatgttccctctccgaatgaacact

SEQ ID NO: 196872 - DNA, 298 bp, Glycine max
gagaagacgacagaaggggactgcaaatcacttttctactttgagtcttcttgatccttctttttctccttgaactcaaacatggcagatgaggtggttctgctagatttctggccaagtccatttgggatgagggtcaggattgcacttgctgaaaagggtatcaaatatgagttaaagaagaggacttgaggacaagagtcctcttctcctccaaatgaacccggttcacaagaagattccggttctcatccacaatggcaaacccatttgtgaatccctcattgctgttcagtac

SEQ ID NO: 196873 - DNA, 267 bp, Glycine max
acggctgcgagaagacgacagaagggggcacaagtgagtttgttgatcgagataactagaaacagtgtgatgaaaatgaaggtccttgttttcttcgttgctacaattttggtagcatggcaatgccatgcgtacgatatgttccctctccgaatgaacactggctatggtgcccgtatcacggagtgaaatgcgcaattggaggcttgctgtggaagcacacaacatctttggctttgagaccattcctgaagagtgcgttgaagc

SEQ ID NO: 196874 - DNA, 297 bp, Glycine max
acggctgcgagaagacgacagaaggggaccacttctctctttcaatccctttatctgttggatagagcttcttgccttgtgttctacgttctgcattcttctcagcccgtaatctagctcctgtttgcagaaacaaggacctgtcatcaagatagtaaagttcacaactcacaggcttggcacataatggactgcaacacatattcgtaacatgtctgttattgcacacgtcaatcatggaaagatctacctcactgattctcttgtggctgcttctggtaatatcatagcacaaga

SEQ ID NO: 196875 - DNA, 306 bp, Glycine max
tacggctgcgagaagacgacagaagggggaggaagagcgaagagtgaagagaatggctcccaagggtttaacctttctggctgtgataatatgcgtttcagcactgtcactgagtccttctgttgcgggggaagggcaacataatggacatgttatgaacttctacaaggaatcatgcctcaggctgaagacttcatccagaacaagtcaagcttctctacaagcgccacaagaacactgctttctcctggctcaggaacatcttccatgactgtgctgttcagccttgtgatgcttcactgttgc

SEQ ID NO: 196876 - DNA, 285 bp, Glycine max
acggctgcgagaagacgacagaaggggttcattaaataaagacgaaaaatgacaaaaaagaaaacattcattccccttctatatcttacatctatagtctttttgccctggtgtatctctttcacatttaagaaagtctcggatcttggttaattgatgggtgaatactaggcatccgattttcttgaatgtattaagaaagagtttctaaaaaattcatagatttgaagactgtttttcttagtgactgttaaggatgtcggaacacattacaaactgcgtatg

SEQ ID NO: 196877 - DNA, 150 bp, Glycine max
acggctgcgagaagacgacagaagggcatggaaggatgagtgaaaatgaagcacgtagatatttccagcagcttataaatgctgttgattattgccatagcagggatgtctaccacagagacctgaagccagaaaatttgctattagata

SEQ ID NO: 196878 - DNA, 209 bp, Glycine max
tacggctgcgagaagacgacagaagggaaagagacccggaaagggtgggaaccgcttttggaaatccattgggcttggatttaagactcccagggaagccatcgaaggaacctacattgacaagaagtgccccttcactggcaatgtttccatccgtggccgtatcttggctggtcatgtcacagtgctaagatgacaggactattatt

SEQ ID NO: 196879 - DNA, 280 bp, Glycine max
ttcgagcgaatcggctcagggctcgagtgcgagaagacgaacgaagggagatgaaaactaaaggaaggaatgttgtagtggtcaattgcgatggatgagtgtctaattgaagccctggcagctcaggcaaaacgtggaaacaaaattgacaaatgtttcaatgaaaatgcatcactgctgcctgtgtagcagtaacacttgcttcagcttgaatttgaataatcagaaagttatcaaccggtttgaaacaattaagtagaggtatagagtaataaaagat

SEQ ID NO: 196880 - DNA, 275 bp, Glycine max
acggctgcgagaagacgacagaagggaaggaagtgagaagatagatgagattttagggacagacccgcttactcaaaagaggagtatgctggtggtgtctgagtttattggctgctcaccttcattaagtggggcaattcgagtgaatccatggaacattgattctgtcgctgagctatggattctgcattgaggtcccagaggctgaaaagcagatgcggcatgagaagcattatagatatgtcagtacacatgatgttgcttattgggcacgt

SEQ ID NO: 196881 - DNA, 264 bp, Glycine max
gctgcgagaagacgacagaaggggtacctttaggcatctttgaaggggatcacatagatactcagtaattttatcgacacgaatacagcccattgtccgtacagctaaggcacgaattaaaggatttggatcttgtgaatcctgtgcatcattatataaaatgaaattaaaaaaaacagcaacaaaccaattcagttcgcttccatcaaagagagtcagggaacaacactcagttcatgagtattattatccattcaataaaca

SEQ ID NO: 196882 - DNA, 182 bp, Glycine max
tgggacacctacactagacagcatactgaaaagatttgggatcatagcaccggtgacatgggagctgatttttatcatcgatacaagggtgacataaaaatagcgaaagaaattgggctggactctttcagattctctatctcatggtcaagaatattcccaaggggcaaggattcagttaa

SEQ ID NO: 196883 - DNA, 214 bp, Glycine max
gcgaggacgacacaaggggggaagaaaactggaagaggtcaaaaacgtgatacgcttacaattaagtttcttaaaaaatttatccactatgctaagcataggattcaacctgaactgactgatgaggcatctgagaacattgccacggcctatgctgagctagaaattcaagttcaaatgcagaaactggaggaacacttcccatagctgccag

SEQ ID NO: 196884 - DNA, 225 bp, Glycine max
cacacacactctcatacacacgttgtcgcgcacacattccttcattccgcagcaacaaacaaaaatcttttaccttaaacaacaatggccgatgccgaggatattcaacccctcgtttgcgataatggaaccggaatggtcaaggctggttttgctggagatgatgcacgagggctgtgttccctagcattgtggggcgtcaacgtaacactggggtgatggttg

SEQ ID NO: 196885 - DNA, 243 bp, Glycine max
gcgagaagacgacagaaggggagggttttagagtggtggagtgtgcagaagagcgtcgcagtcgcaaccctaatcagaagaagcgcacttcaagcgagtgacagccaccagccatgggtcgtatgcacagccgcggtaagggtatatcctcttctgctttgccctacaaaggacacctcctagctggctcaagatctcttcgcaagatgtcgaagaaaatatctgcaagtttgcgaagaaagg

SEQ ID NO: 196886 - DNA, 243 bp, Glycine max
  unsure (1)..(243): unsure at all n locations
tacggctgcgagaagacgacagaaggggacactaaacaagttaaaagaagagcatcactgaactaacaaagcaaccctatgtcgaaggtggtttgtgtcaccggagccagcggcgccatcggatcatgggtggtcctactcctcctccagcgtggttacaccgtcatngccaccgtccaagatatcaaggatgaaaatgagacgaaacatttggaggaaatggaaggagcaaagagtcatctc

SEQ ID NO: 196887 - DNA, 216 bp, Glycine max
  unsure (1)..(216): unsure at all n locations
acggctgcgagaagacgacagaagggggcacaagtttgttgagatagctagaagcaataagatgaaaatgaaagtgcttgttttgtttgttgctacagttttggtagcatatgaatgccatggctcagactaccagaagttccctctccaaatgaaaactgggtttgtngggcaatacagcaatgaggtggaatgtgccagttggaggcttggcgt

SEQ ID NO: 196888 - DNA, 251 bp, Glycine max
tacggctgcgagaagacgacagaagggggaacggaaaagcactggcgcagctaccctgaggcttctcttctcttctcttctctgtcgtgagtcaccatggtgagggttagtgtgctgaacgatgctctgaagagcatgtacaatgctgagaaaaggggaaagcgccagctcatcgattagcgccatcctccaaagtcattatcaaattccttttggtgatgcaaaagcacggatacatcggagagtttgat

SEQ ID NO: 196889 - DNA, 222 bp, Glycine max
gatgatcttaatgactatgatcaggagatgctcctttcctttgctactgaatgtgcaaattctgttattcctgcttatttacctatcatagagaaaaggaaggatttgcccttcaatgatcatcagaaagcatggcaacattggcgaaggggacgatatgttgaattcaatttggtatatgataggggtacaacatttggactgaaaactggagggagaata

SEQ ID NO: 196890 - DNA, 237 bp, Glycine max
acggctgcgagaagacgacagaaggggaaggaaggaaggaacagtgagcgtgaaagatgccttgggcgaggctttcagggtctccaaggctcgacgttgctattgacatgggcaatccatttctcaatctcactgttgatggtttccttaagatcggagctgcgcagccacgcgatcagctgctgtagatacttatcatattatccaaaaggggaatatctcaagtcatgatttcga

SEQ ID NO: 196891 - DNA, 235 bp, Glycine max
tacggatgcgagaagacgacagaaggggggtggtaatggcagcgtcactacaagcagcagctactttcatgcaacccaccaagttgagcaggagcaacactttgcagcaaaagtctactcagtccatttccaaggcttttggtttggaacctgttggagctaaaaggtcacatgctcccttcaggctgatcttaaggacttggctcacaagtgtgttgatgctaccaaaattgca

SEQ ID NO: 196892 - DNA, 237 bp, Glycine max
tacggctgcgagaagacgacagaacggggcacaagtgagtttgttgatcgagataactagaaacagtgtgatgaaaatgaaggtccttgttttcttcgttgctacaattttggtagcatggcaatgccatgggtacgatatgttccctctccgaatgaacgctgtatatggtgcacgtactccggaggtgaaatgcgcaatttggaggcttgccgtgggagcacacaacatcttggg

SEQ ID NO: 196893 - DNA, 210 bp, Glycine max
tacggctgcgagaagacgacagaagggtgcgattgttaacatgggttctggagctgctattgttattccttcggatcctctttatgctgtttatgctgccaccaaagcgtacatcgatcagttttcgagatgtctctatgttgaatacaagaggagtggattgacgttcagtgtcaggcaccattatatgtggcaaccaagatggcatcg

SEQ ID NO: 196894 - DNA, 240 bp, Glycine max
aagacgacagaagggggaaaagattggcgttatgtatacaaggcattagctgttatagaatatctggtagcacatggatctgaacgtgcggttgatgacattatagaacatacttttcagatatctgcactttctagtgttgaatatgtcgtgacctagtgtaaggatgtcgggactcaatgtaaggaagaaggctgaaaacattgtgtcgcttttgaatgataaagataagatacatga

SEQ ID NO: 196895 - DNA, 234 bp, Glycine max
tacggctgcgagaagacgacagaagggcaacacaacataggtcatcgaaaggatctcgaagacccaccaacgcacgaaagccgggatctttcagaaaatggattcctattcgaagggtgcataaccgcatggataagctcacactaacccgtcaatttgggaccaattgcggttccttaggaggtatcgggaaggaattttggaatgtaataatatcgattcatacagatacag

SEQ ID NO: 196896 - DNA, 230 bp, Glycine max
actcgagccgaatcggctcgagtacggctgcgagaagacgacagcagggggtgcacaagtgactttgttgatcgagataactagaaacagtgtgatgaaaatgaaggtccttgttttcttcgttgctacaattttggtagcatggcaatgccatgcgtacgatatgttcccatctcggaatgaacactggctatgggccccgtactccggaggtgaattccgcaattgga

SEQ ID NO: 196897 - DNA, 205 bp, Glycine max
acggctgcgagaagacgacagaagggggcacaagtgagtttgttgatcgagataactagaaacagtgtgatgaaaatgaacgtccttgttttcttcgttgctacaattttggtagcatggcaatgccatgcgtacgatatgttccctctccgattgaacactggctactggtgcacgtactccggaggtgaaatgcgcagttgga

SEQ ID NO: 196898 - DNA, 235 bp, Glycine max
tacctgcgagaagacgacagaagggcaattgaaattaaaaatatccaacgcggcaaacacggcagtgacactggagtctacgatactgaaggaaggtttgtaccttcaaaatttgaagaaatttttaacaagcatgcacatacacatccaaatgctttacatatgatgagttaacggagatgataaaggcaaatagagagcctaaagatttctcaggaaggattggtagtgtggt

SEQ ID NO: 196899 - DNA, 233 bp, Glycine max
acggctgcgagaagacgacagaagggacccctaatacaaaaactagtctaggtgcccaaaaatacaagggctgaaaaatcctatatttctagggtaccctacctacaatatggagccctatatacaaggaccaaatataatgacatcctagtctaatatgacaaagataattggacccaaccttggcccatgggctcagaaatctaccctaaggttcatgagaaccctagggc

SEQ ID NO: 196900 - DNA, 183 bp, Glycine max
tacggctgcgagaagacgacagaagggggcacaagtgagtttgttgatcgagataactagaaacagtgtgatgaaaatgaaggtccttgttttcttcgttgctacaattttggtagcatggcaatgccatgcgtacgatatgttccctctccgaatgaacatgggatatgggtgcccgtactc

SEQ ID NO: 196901 - DNA, 223 bp, Glycine max
cgagccgattcggctcaagtacggctgcgagaagacgacagaatggggtgagttgagaaagatctgagaagggcagtagccgagattccgtgagttgcaaaaatgaagacgattctttccaccgagaccatgaacatcccggacggcgtgagcatcaaattcaatgcaaaggtcatcgaagttgagggcccccgcggaaaattggtgcgagccttcaagcatt

SEQ ID NO: 196902 - DNA, 236 bp, Glycine max
tacggctgcgagaagacgacagaagggggtgcacaagtgagtttgttgatcgagataactagaaacagtgtgatgaaaatgaaggtccttgttttcttcgttgctacaattttggtagcatggcaatgccatgcgtacgatatgttccctctccgattgaacactggctatggtgcccgtactccggaggtgaaatgcgcaagttggaggcttgctgtggaagcacacaacatctt

SEQ ID NO: 196903 - DNA, 236 bp, Glycine max
acggctgcgagaagacgacagaaggggactctgttacggtgcaacctagcagcctccaaatccaatggcttcagagaagaaactttcgaacccaatgagggagataaaagtgcagaagctcgtcctcaatatctctgttggcgagagtggagatcgctcaccagagccgccaaggtgttggaacaacttagtggccaaaccccagtgttttccaaagcaaggtacactgttcgttc

SEQ ID NO: 196904 - DNA, 239 bp, Glycine max
ctgcgagaagacaacagaagggtactgtgcttaacaagattaaaaaaaaaaatcttcaaaggacaagtttattaccgatcatattgaaattgagctcagtcacagcagcaagtgcacatccaccaatgattggaattaaagacagatagacaggcacagtgaagctctcacccaaaagaaatcttgaaaccagaacactaaaagcaggttcaccactcttgataatatgtgtaaacgac

SEQ ID NO: 196905 - DNA, 198 bp, Glycine max
agacgacagaagggggcagttcaaagcgaagaaagattcgaaacgaagaaagaaagcgttgtgaagaatggcggaagagggacaagtgatcggtgtccacagcgtagaggagtggaaggaacatctcaagaagggagaagagtccaagaaattgattgtggtggattttactgcttcttggtgcggtcaatgccgttt

SEQ ID NO: 196906 - DNA, 233 bp, Glycine max
agctgcgagaagacgacagaaggggacacgcagttgtattgtagaactgaacaagggtttctctttctctttctctgtctgcttcttcactttctctcgtttcaatcgaaaaaaatcatgggcagaaaattcttcgtcggtggcaactgtaaatgcaatggaccactgcaggaggtgaagaagattgttactactttaaatgaactaaagtccctggagagatgttgtagaag

SEQ ID NO: 196907 - DNA, 212 bp, Glycine max
tacggctgcgagaagacgacagaagggggtacaaacaaatgcttctgaccatatgatcaaaatacatgattatgtttttgtagactgtaattaccatgataaatcaagcaatcggagcagctggagttgtaagcaaagaatgcaggtccgttgtcaataatatcggacaaacaatcttggaattgctcttggctgaagcaaagccacaaaag

SEQ ID NO: 196908 - DNA, 234 bp, Glycine max
tacggctgcgagaagacgacagaaggggattgggaaaggaaataaaaaatgaaagctcttacctttactgggcatacaagaacaacattccagttttctgtccgggcttaactgatggctcattgggggacatgctgtacttccattccttccgcatcctgggtctgattgtggacatagtgcaagatataggggcaatgaacggtgaagcagtacatgcaagtcccaggaaga

SEQ ID NO: 196909 - DNA, 209 bp, Glycine max
ctgcgagaagacgacagaagggaagaggatttcataccaatctctatgctgttcatggcatttacagtggtgggaaggaaggcaaaagtagagttcaatggcttagatcaatggttggaagtcctgaccttatctctataccaggagaaactggcagattgttatgaggcgaaatgttgatgatgttggctataggctggtggccatct

SEQ ID NO: 196910 - DNA, 300 bp, Glycine max
tacggctgcgagaagacgacagaagggggcatcaattcaaaatatatcatcaattataagcatgggtttgtggaacacaacgaatgcagtgtcttgccgctttcacaagtttggtgatgaccaaaagaatctggtcttccaaggtgatgccacgtcttcttccaggggcatagaactcacaaagttagacggtggaggaaaaccagtgggtggcagtgtggggagagtgttatactcttctccagtgcacctttgggaaagctctacagtggtcgcaagctttgaaaccgacttcacctt

SEQ ID NO: 196911 - DNA, 291 bp, Glycine max
tacggctgcgagaagacgacagaaggggtgattttccttttattccggactttatttattttccatttattccacaaggggccacgatggctttttatggaatcgcgggtctctttagtagtttttattttgggtcgattattttttgggatataggtggtggttttgatatcttcaataaaaaagggataggtacgttttgttcgttggggatttcctggaaaaaatcgtcgtattattctcgatatacctatgaacgagcttcactccatcagaataataacagaagtt

SEQ ID NO: 196912 - DNA, 295 bp, Glycine max
acggctgcgagaagacgacagaaggggacagaggagccgagtgatatttgcttggttagcttggagacagcctcagatgcttcttttggatgagccaactaatcatttggatattgagacaattgactcgttggccgaggcattgaatgaatgggacggtggcttggtgcttgtcagccatgattttaggctctaatcaggtggcgcatgagatatgggtatgtgctaatcaatctgtgaccagatgggagggtgacattatggaattcaaggcgcatctaaagtcgaaggcggg

SEQ ID NO: 196913 - DNA, 305 bp, Glycine max
tgagaagacgacagaaggggggattctgtggcgatttggatatgttatgtggttctcttggggatggggatattgctgtgagacaaactgaaccggatcctgtagttgaggatgactacagtgatgaagaaattgatgtggatgaactcgagaagaggatgcttagggacaaaatgcgtctcaagcgattgaaagaaaaccaagtccaaggaaggactgatgcagcaaagcaaaggcaatcccaagagcaggcaaggaggaaaaagatgtcaagagcccaagatggaatactgaagtacatgctg

SEQ ID NO: 196914 - DNA, 309 bp, Glycine max
  unsure (1)..(309): unsure at all n locations
tacggctgcgagaagacgacagaagggggtggcactcaaacattgtttgntgtaggaagaggaatcttgagaaatggcaggggacagcaagagcaagattctgttcatcggagggactggttacatcggaaaattcatcgtggaagccagcgccaaagctggccacccaactttccttttggtgagggagtccactctctccccccgcaaaatcacccctcatcgacaatttcaaaggcctcggtgtcaatcttgttttaggagatctatacgatcaccaaagtttggtgagtgctataaagcaggtcg

SEQ ID NO: 196915 - DNA, 296 bp, Glycine max
acggctgcgagaagacgacagaaggggacagatgagccgagtgatatttgcttggttagcttggagacagcctcagatgcttcttttggatgagccaactaatcatttggatattgagacaattgactcgtttgccgaggaattgaatgaatgggacggtggcttggtgcttgtcagccatgattttaggtctaaatcaggtggcgcatgagatatgggtatgtgctaatcaatctgtgaccagatgggagggtgacattatggaattcaaggcgcatctaaagtcgaaggcgggt

SEQ ID NO: 196916 - DNA, 238 bp, Glycine max
tcggaagacgacagaaaggggagctttagattcttttcccctagattcagccacagttggataaaaaaaaaaagtttttcgaaaggtcacttccgaggcattctgctcgtaagtccacaggaggtaaggcacctaggtgacagctcgcaaccagggctgaacgtaagtctgcagccaattgtggtgaccttagaacccaaatcgttaacggcctggtaccgttgctcttcgtgaaatt

SEQ ID NO: 196917 - DNA, 291 bp, Glycine max
tacggctgcgagaagacgacagaagggggattgaaaaggcgcccaagcaagtttgttctttcgccgccgtcgctcacaactcgcaaaccacaatgcctaagcagatccacgagattaaggatttccttctgacggcacggaggaaggatgcgaggtcggtgaaaatcaagaggagcagggatgtcgtagtttaaggttcgatgctccaagtatttgtacacgctttgtgtctttgatcctgttcctccgataaattgaagcaatctcttcctcccggtttgagtgttcaag

SEQ ID NO: 196918 - DNA, 289 bp, Glycine max
acggctgagaagacgacagaagggtggagatcggtgactgaggaatacagcgacaaagtaatgggtctagcttgcaagctcatggaggtgttgtccgaagcaatggggttagagaaagagggtttaagcaaagcatgtgttgacatggaccagaaggtggtggttaattactaccccaaatgccctcacctgacctcactcttggcctgaagcgccacacggatccgggcactatcaccttgctgcttcaggaccaagtgggtggacttcaagccaccagggacaatgg

SEQ ID NO: 196919 - DNA, 281 bp, Glycine max
  unsure (1)..(281): unsure at all n locations
acggctgcgagaagacgacagaaggggatcttcccttgttttgattcctaatacaaacatggctatgaagaagctcttgtgggttgtcctgtctctatctttggttcttggagtggccaatagctttgattttcacgacaaggatttggcgtccgaggaaagcttttgggacttgtacgagagatggagagtcaccacacggtttcgcgaacctcggtgacaagcacaagcggtttctgtgtntaaagcaaatgtgatgcatgtcttttacactaacaaga

SEQ ID NO: 196920 - DNA, 293 bp, Glycine max
cgagaagacgacagaagggggatgacaaagaatatattcctgatcctgaggataagaaaccagaggggtatgatgacatcccaaaagagctcccagaccccgaagccaagaagcctgaagattgggatgatgaggaagatggtgagtggacaccccctaccattgccaaccctgagtacaagggcccatggaaggagagaaaatcaagaaccccaactataaaggaagatggaaggcaccattgattgataacccagatttcaaggatgaccccgacctctatgtgttcccca

SEQ ID NO: 196921 - DNA, 293 bp, Glycine max
cggctcgagcggctcgagcggctcgagtacggctgcgagaagacgacagaaggggaaggatcagcagggagaactaggtttacagggtttacaccgagcagccacacctcccgcagcagccatggttctcgccactggctcatgccgcttcagtggtgccaagatctacccaggaaagggcatcagattcgtcgtggtgattcccaggttttcctgtttgcaaactcaaaatgttagaggtatttccacaatcgcctgaagccttcaaagctcacctggactgcaatgtacag

SEQ ID NO: 196922 - DNA, 288 bp, Glycine max
tacggctgcgagaagacgacagaagggacaagggatatcatcatgcgggaattccgttctgggtcctcccgtgttcttattaccacagatcttttggcccgtggtattgatgtccaacaagtctcacttgttataaattatgatctgccaactcagccagagaactatctccatcttattggtcgtaggacggtttgggagaaagggtgttgctatcaattttgtgactggggatgatgaaaggatgctgtttgacatccaaaagttttataatgtgcagattgagga

SEQ ID NO: 196923 - DNA, 289 bp, Glycine max
aagcaaaacgaaattcggatttggccgaaaaagaagcaacgctatggataccatgaccgatcaccatcgataaagaagaatctttctaaattacttcgggtcagcggggccttcaagcatccgaaatacgccggggttgtaaatgacatagcgttcctgatagaaaatgacgactccttcaaaaaagaagttatttaagttatttttccccaagaagtcccgctccgatattccgacgagtcatctatttaaaaggacctaccctgcagtgcgcccctccttgaattat

SEQ ID NO: 196924 - DNA, 292 bp, Glycine max
gaagacgacagaaggggactcctggcagcatatactcataaatcacatagctagttgtttaaagtaagagagaagaaagaagcaaatggcaaactttccagttgttgacatggggaagcttaacaccgaagagagacctgcagccatggagattataaaagatgcctgtgagaactggggtttctttgagttggtgaaccatgggatatccattgagcttatggacacagtggagaagctcacaaaagagcattacaagaagactaattggtcacaggttcaaagaaatggt

SEQ ID NO: 196925 - DNA, 295 bp, Glycine max
tacggctgcgagaagacgacagaagggaggccaagtattactacatttctggcttgttcctcactgtatctcctgattccatacaattggttgctgaacatgcagctgcaaataacaagatcttcatgatgaacctttctgctccctttatatgtgagttctttaagggtgcactggacaaagttctgccataatggattatgtttttggaaatgaaactgaagcaagaacattttctaaagctcaaggctgggagactgataatgttgaagaaatagctttaaagatttctcaa

SEQ ID NO: 196926 - DNA, 304 bp, Glycine max
acggctgcgataagacgacagaaggggacaaggataaggaccgacaatttaaaaggcttgagcttattgcttctgagaatttacatctagagcagtgatggaagcagttgggtcgtgcctcacaaacaagtactcagaaggattgccgggtaaaaggtactatggtggcaatgagtacattgatgagcttgacatctatgtcaacaaagggcactggctgcatttcatgtagatgaacacaaatggggtgttaatgttcaaactttatctggttcccctgctaattttgcagtatacactgcag

SEQ ID NO: 196927 - DNA, 293 bp, Glycine max
actgctgcgagaagacgacagaaggggatcatagtagatattcattccccttatctttctctcttctctctccccgcccaaaccctaactccctaccctattccgctttctctcatccatcatgaaaggaggaaagtccaagaccgaatctaagagagccgatgccaaacttgctgtgaataagaaggcgccgccaccaagactaggaaacccgccggaaaggggaaggcagcgaaagatcctaacaagccaaagaggcctccaagtgctttcttcgttttcatggaggaatt

SEQ ID NO: 196928 - DNA, 285 bp, Glycine max
acggctgcgagaagacgacagaagggggagaaaatagagggtgatcatcatcatcacaaggatgatgacacaagtgtccctgttgagaaagttgaggttgttgaaacagcacatgctgagtaaaagaaggggttcctcgacaagattaaggagaagctaccagggcacaagaatacagaggaggcacagctactactcctcctccaccaccacctgttgcatcattggagcatggtgaaggtgctcatcatgaaggagaggccaaggagaagcaaggtatattag

SEQ ID NO: 196929 - DNA, 290 bp, Glycine max
accgctgcgagaagacgacagaagggggcccgagatggatgagcgcctggttatacagcaacctctttcagccatagcagaggcgtttgagaaactgtccaagagggtgaaggagaggaacaacggcaacgatattcgcttggacacgttctgcgaggcagcgtctcccgtctgcgttctcgtccgtctcttggcctcgccttcaaatacgctgaattggaatacgtcgccaagctacatggactattggaagcatcaaagacatgttccactctacccgatattcttaa

SEQ ID NO: 196930 - DNA, 290 bp, Glycine max
tacggctaagacgacagaatgggatggtcatggaggttcacgaccacacctcttacttaatttacttcattagcactattactgtcttcgcgttattcaaatcagttcaaagatcggattccaaaacctcctctacctgctgcaaattgcccccaggaccaaggacactaccgctcataggtaacatcccagtttgttggctcactgccggttcatcactgcttaaaaaatttggcagataattatgggccgctaatgcatctaaaactaggagaggtatctaacatcat

SEQ ID NO: 196931 - DNA, 294 bp, Glycine max
tacggctgcgagaagacgacagaaggggattcatgagaagtgcaaaaacagtgtaacaaataggtaaagaaaaccaatatgaagttcactataatcacgatatttttctctttatttctacttgactttggttttgcacaacagggggatcttgacattatacgatgtggaggaaaaccaaatacaatataggccaggctttcttaagtgcctggactcaagcatgtgtctcaccaactgctgtcaaaacttgtgattccagctggcacataccaaatgggtgcagttgatgtc

SEQ ID NO: 196932 - DNA, 293 bp, Glycine max
tacggctgcgagaagacgacagaagggagcgagctttgtgatcgattgcgcgaaccgtgtggaggataaaattatggacattgcttctctggagaagttccttcaggagaggattaaggttggctgcaaggccggtgcactcggcgattccattactgtcactagggacaagagcaagatcaccgtcatccgacagcaacttctctaaacggtatctgaaatatttgaccaagaagtacttgaaaaagcacaatgtgagggattggcttcgcgtgattgcatccaacaaggag

SEQ ID NO: 196933 - DNA, 293 bp, Glycine max
acggctgcgagaagacgacagaagggggatcacaaatctttcgctaacactcattaattgcaagaatggcacttcgttgcttggtgatgtccctctctgttctcttcactctcggtcttgcgagagaaagccatgccagagacgaagatttttggcatgctgtttggccaaacactcccattccaagtcttgcgagatcttctaaagcctggccctgcaagtgttgaaatcgatgatcaccctatgcaaattgaagaaacacagtacccgaaaaccttcttctataaagaaga

SEQ ID NO: 196934 - DNA, 183 bp, Glycine max
tgcgagaagacgacagaagggtaatttgggaattattgctcccatcgccattggtttcattgtcggcgctaacattttgttgggtggggccttctctggagcggccatgaaccccgctgtgacatttgggcctgctgtcgtgagctggacctggaccaaccactggatctactgggccgggcc

SEQ ID NO: 196935 - DNA, 283 bp, Glycine max
gctcgcgtacggctgcgagaagacgacataaggggacaacacatcgcaacacaacgcgcactctctctattctctcttgactcagaaaccctatcgttctacgcggaatcgccgattctcgccatgctgaaagccaattccgacgccaaatccgccgatagcacggtgaagcgcaagggcgctggtgccaatggaagcaatcgaagtcagctgtctaggatcctaacaagccatagtgatctccaagcgctttctacgtttccatgtccgagttcatagagca

SEQ ID NO: 196936 - DNA, 291 bp, Glycine max
ttcggctcgagtacggctgcgagaagacgacagaagggggcagttcaaagcgaagaaagattcgaaacgaagatagaaagcgttgtgaagaatggcggaagagggataagtgatcggtgtccacagcgtagaggagtggaaggaacatctcaagaagggagaagagtccaagaaattgattgtggtggattttactctcttggtgcggtccatgccgtttcattgccccaattcttgcagagtttgctacaaagctgccgaatgtcacctgcctcaaggtggatgtgggtg

SEQ ID NO: 196937 - DNA, 290 bp, Glycine max
  unsure (1)..(290): unsure at all n locations
ctgcgagaagacgacataagggggtatcaattcaaaatatatcatcaattataagcattggnttttggaacacaacgtatgcagtgtcttgccgctttcacaagtttggtgatgaccaaaagattctggtcttccaaggtgatgccacgtcttcttccaggggcatagaactctctgagttagacgggaggaaaaccagtgggtggcagtgtggggagagtgttatactcttctccagtgcacctttgggatagctctacagtgtgtcgcaagctttgaaaccgacttca

SEQ ID NO: 196938 - DNA, 289 bp, Glycine max
tacggctgcgagaagacgacagaaggggaagaagaacaagctgtgattggattatggagttgcattgcttggttggtagggatgactgtggtcattgctgtgttgtctgaatatgtggtggatacaattgaggatgcatcagattcgtggggtttgtctgtgagctatctcagcataatcttgctaccaacgtggaaatgcagctgaacatgcaggagcaatcatatttgctttcaagaacaagctggacatttcattgggtgtggcattggggtcagcaactcagatg

SEQ ID NO: 196939 - DNA, 136 bp, Glycine max
actcgagatcggctagagcgagaagacgacagaagggggatgacaaagaatatattcctgatcctgaggataagaaaccagaagggtatgatcccatccctaaagagcgcacagaccccgaagccaagaagcctga

SEQ ID NO: 196940 - DNA, 281 bp, Glycine max
atacggctgcgagaagacgacagaagggggaggcagaggatgagtaacacaaccagtatgtctgaatctaacgcaattgccaatcgttttgctcgagcaagtggtggcattattgctctaatcagaacttatcctcttcaaacggtaaacacgcgccatcaaactgagagaacactcaagcgacaagcccagtttgccctccaactcaaccactgctcctggcactcttcttcagatctttcaggtcattggaactgaaggttggggtggactctatagtg

SEQ ID NO: 196941 - DNA, 289 bp, Glycine max
tacggctgcgagaagacgacagaagggggagagaagttattagggtttttgagtgcggcggtccaaacactcttctctgcagcttttgcctacaactcccttcaccatggctgaacaaaccgagaaagcttttctgaagcaaccaaaagtgtttctcagcacaaagaagactgggaagggaaagaacctggaaaaggtgggaaccgcttttggaagtccattgggcttggatttaagactcccagggaagccatcgaaggaacctatattgacaagaagtgccccttca

SEQ ID NO: 196942 - DNA, 286 bp, Glycine max
ggagagagtgagtgagatagagagagacgcttcgcaaatctcaatcgaatctcagaaaaattagaggaatcatcagcattcacataggtcaggccgggatccaggtcggaaactcctgctgggaactctactgcctcgaacatggcatccagcccgacggcatgatgccttctgactccacctcgtgtagcccacgacgccttcaacaccttcttcagcgaaaccggatctggcaagcacgtcccccgtgctgtcttcgtcgacctcgaacccaccgtcatcgacg

SEQ ID NO: 196943 - DNA, 244 bp, Glycine max
acggctgcgagaagacgacagaaggggagagaaagagagagaaagatgtcgaagcgtggtcgtggtggttcggcggggaacaagttccgcatgtcgctgggtcttccagtggcggcgacggtgaactgcgccgacaacacgggggcgaagaacctctacatcatttcggtgaaagggatcaaaggccgtttgaaccgtcttccctcggcctgcgttggcgacatggtgatggccaccgtgaaga

SEQ ID NO: 196944 - DNA, 232 bp, Glycine max
acggctgcgagaagacgacagaagggggaagaaggcaaatcgcgaagactagatctgatctgagagaatggctcctcggtctagcagcaaggacgcccaagaccttttccgcgctctttggtctgcttatgctgcaacccccactaatctcaagatcattgatctctatgtcatctatgccgtattcaccgttttcatacaggttgtatacatggctttggttggatcattt

SEQ ID NO: 196945 - DNA, 171 bp, Glycine max
acggctgcgagaagacgacagaaggggacaaggaaaaggaccgacaatttaaaagtcttgagcttattgcttctgagaattttacatctagagcagtgatggaagcagttgggtcgtgcctcacaaacaagtactcagaaggattgccgggtaaaaggtactatggtggca

SEQ ID NO: 196946 - DNA, 209 bp, Glycine max
acggctgcaagaagacgacagaaggggatcacaaatctttcgctaacactcattaattgcaagaatggcacttcgttgcttggtgatgtccctttctgttctcttcactcttggtcttgcgagagaaagccatgccagagacgaagatttttggcatgctgtttggccaaacactcccattccaagttcattgcgagattttctaaagc

SEQ ID NO: 196947 - DNA, 270 bp, Glycine max
tctcgagccgataccctccgtgggctcggagagtgctctggatcatggcagagctcgctctcattggctccgatattcaggaggttattgggagtgctattgctattaggattcttagtcatggggttgtgcccctttgggccggggtcgtcattactgctcttgattgtttaatttacctctttcttgaaaactatggtgtgaggatataggctttttttgtggctctcctcagtggtgtgatggcaatctcattggcatggatgtttg

SEQ ID NO: 196948 - DNA, 208 bp, Glycine max
tacggctgcgagaagacgacagaagggggcacaagtgagtttgttgatcgagataactagaaacagtgtgatgaaaatgaaggtccttgttttcttcgttgctacaattttggtagcatggcaatgccatgcgtacgatatgttccctctccgaatgaacactggctatggtgcccgtactccggaggtgaaatgcgcaatttggagg

SEQ ID NO: 196949 - DNA, 173 bp, Glycine max
tcggctgcgagaagacgacagaagggggtgcacaagtgagtttgttgatcgagataactagaaacagtgtgatgaaaatgaaggtccttgttttcttcgttgctacaattttggtagcatggcaatgccatgcgtacgatatgttccctctccgaatgaacactggctatggt

SEQ ID NO: 196950 - DNA, 280 bp, Glycine max
tacggcagacgacagaagggggaatcacagtggtgccttatcgctgtggttatcatcttcttcttcctctttcttagatctcttctttctctacgccgcacgccgaaaccatggccggaaaaggagagggtcctgctatcggaatcgatctcggaaccacctactcttgcgtcggtgtgtggcaacatgaccgcgttgaaatcatcgccaacgaccaagggaacagaaccacgccgtcttacgtcggattcactgacaccgagcgtctcatcggtgatgc

SEQ ID NO: 196951 - DNA, 252 bp, Glycine max
tgacgacagaagggcaacttctagaggtataatgacagatcgagaggctcgattagaaagaattggcggagaagttttatgttatatatggtaatctttctaacacccgaattatatgagaaacttcgatccatttttggtaaaaaaaaagaaagagaaaacgcaagtttctaggagaacttccccctttatgtatatttgtgaatgtgataagggatttaactggaattaaaaaaaggggggattcacgag

SEQ ID NO: 196952 - DNA, 268 bp, Glycine max
tacggctgcgagaagacgacagaagggggttgtggtgtagactgtcgagcagtgaataccagttgctcctatagccggcgctcaacaacatggcggacaaggcagtcaccatccgaaccagaaagttcatgacgaacaggcttctctccagaaagcaattcatcgttgatgtccttcatccagggagggctaatgtttccaaggctgaactgaaggagaatttgggcagtatgtatgacgtgaaagacactaacactgtatttgtctg

SEQ ID NO: 196953 - DNA, 190 bp, Glycine max
tacggctgcgagaagacgacagaagggggtctccactctcggcttcttcttcgttgcgctttttcccaaaaccaattgcatcactctcgtccgttaccgccgctgccctagaccaccgcaagcgacgtcgcacaccgccttcatccgttagggcaaaaatgagtcgaggaagtggaggtggatacgatcg

SEQ ID NO: 196954 - DNA, 227 bp, Glycine max
tacggctgcgagaagacgacagaaggggattgaatcataaaaaatttggagcgtgaagtgtaatgaaataaaattctatcgatttttttatttttagaggtggtatccagattattactcgaaattatgaataatttatggttggcttgattgaaccaataaaataaagtacccaggctctgtttagaaaaaaccaattggtaatatatctacgatcaccacttcta

SEQ ID NO: 196955 - DNA, 267 bp, Glycine max
taggctgcgagaagacgacagaaggggataccaaaaacaaaacaagccaagtgaaagagagaagaaaagtcaaagacaatgtcagggatcattcacaagattgaggagacccttcatgtgggaggccacaagaaggaggaggagcacaagggtgagcagcaccatggtggagaatacaaaggggagcatcatggtgaacacagtactgaatacaaaggagagcatcatgttggtgagcacaagccggagcaccatggaggagaagag

SEQ ID NO: 196956 - DNA, 262 bp, Glycine max
acggctgcgagaagacgacagaaggggggtgttagtgttactattctcactacccctgctattgcttcaacattccaaaatgccatagacagtgacttcaattgtggatatcacatcagaacccaagtggttccattcccttcagcccaagttggtctcattgatggacttgaaaacatgaaagatgccactaccctagaaatgttggttaaaatcggttatggactatcaacgctccaagatgaaattgagcttcggtttc

SEQ ID NO: 196957 - DNA, 245 bp, Glycine max
  unsure (1)..(245): unsure at all n locations
gacacaccatccgttctagtctcaacttctgctcttccaactcctacaacgcttttctctgcactcatgggcaaggtcaagatcggaatcaacggatttggaagaattggccgtttggttgccagagtcgctctgcaaagagacgatgttgaactcgttgcgttaacgaccctttcattaccancgattacatgacatactgtttaaatacgacgtgttcacggacatggaancntcnggtgccc

SEQ ID NO: 196958 - DNA, 243 bp, Glycine max
tacggctgcgagaagacgacagaaggggatgcacaagtttgttgagatagctagaagcaataagatgaaaatgaaagtgcttgttttgtttgttgctacagttttggtagcatatgaatgccatggctcagactaccagaagttccctctccaaatgaaaactgggtttggtgggcaatacagcaatgaggtggcatgtgccagttggaggcttggcgtggaagcaaacaacgtagtcaagtg

SEQ ID NO: 196959 - DNA, 256 bp, Glycine max
gcgtatggcatcgccactacctttgtgcagcatccactaattcggaacttaatttgaaagccatatttcgacccggacgttttcgggatgcccccaataaccaacgaatggcaagtgcttttccttgtgtggatcctatttcaacgggaacttgatgagttgatccgcctacgcgtcttgcttttactgctatatcgggagttactccacgtattgcttgacgtaaaccagatagtggatttgtttcggcctttgg

SEQ ID NO: 196960 - DNA, 268 bp, Glycine max
ctgcgagaagacgacagaagggggcacaagtgagtttgttgatcgagataactagaaacagtgtgatgaaaatgaaggtccttgttttcttcgttgctacaattttggtagcatggcaatgccatgcgtacgatatgttccctctccgaatgaacactggctatggtgcccgtactccggaggtgaaatgcgcaagttggaggcttgctgtggaagcacacaacatctttggctttgagaccattcctgaagagtgcgttgaagcaac

SEQ ID NO: 196961 - DNA, 222 bp, Glycine max
gctcgagcggctcgagggctgcgagaagacgacagaagggtgctacattcaccattgactgtgcaaagccagtggaagataagatcatggacattgcttctctcgaaaagtttcttcaagagaggatcaaggttggtggcaaagctggtgctcttggtgacagtatcactgttacccgcgagaagaccaagatcattgtcacctctgacagtaatttttcaa

SEQ ID NO: 196962 - DNA, 222 bp, Glycine max
tctcgagccgaatcggctcgagtacggctgcgagaagacgacagccgggatttgggctgttgctggctcgcaaggtgtctatgatccgagccatcatgtacatggtggctcagtgcttaggtgctatctgtggagttggtttggttaaggctttccaaaagtcttacttcaacaagtatggtggtggggctaattccctcgctgctgggtacagcacaggta

SEQ ID NO: 196963 - DNA, 181 bp, Glycine max
atcgatcggctcgagcggctcgagcggctcgagacggctgcgaaagacgacagaagggcaccattgatattgctttgtggaagtttgaaacaacaaagtattattgcacagttattgatgcgcctggacatagggatttcattaagaatatgattactgggacatcacaagctgactgtgc

SEQ ID NO: 196964 - DNA, 192 bp, Glycine max
acggctgcgagaagacgacagaaggggtcaaagacaaggtctatcctgaaggaacacactttatgattccgtggtttgagaggcctgttatctatgatgtccgtgcacgaccccatctagttgagagtacatctggtagtcgtgatctacagatggtgaaaattggacttcgagttcttactcgccctttgc

SEQ ID NO: 196965 - DNA, 142 bp, Glycine max
tacggctgcgagaagacgacagaagggtggtaagagggaaagcaaaagaacccaaggtcgacagtgagctcatttatgcatatgcaaaaatagataggctgagtgacattgaggagttcattcttatgcctaatgttgctaa

SEQ ID NO: 196966 - DNA, 215 bp, Glycine max
tacggctgcggacgacagaaggggagagcgaaagagatgtcgttggtttcaagcatgttcgggtgtggagtggtgatggcggcgtcgcaagcaatgggaattggaaggagaagcgatggtggattgacgatagtgtgttcgtctaggccgcagaagaaagcgacggcgcatcacatgaagactcggcctcggaagacgcaggcatgggatagaaa

SEQ ID NO: 196967 - DNA, 297 bp, Glycine max
gctgcgagaagacgacagaagggggcacaagtttgttgagatagctagaagcaataagatgaaaatgaaagtgcttgttttgtttgttgctacagttttggtagcatatgaatgccatggctcagactaccagaagttccctctccaaatgaaaactgggtttggtgggcaatacagcaatgaggtggcatgtgccagttggaggcttggcgtggaagcaaacaacgtagtcaagtggcaaactgttcctgcagcttgcggagagtacatacactacgttctaggagaccatataga

SEQ ID NO: 196968 - DNA, 285 bp, Glycine max
gcgagaagacgacagaaggggacgacaccaaaaacaaataaaacgaacgcttttggacgcagacggtagcaaggaaacccaacttaagcgaaaagcaatagaattcaaagagagagtttcttgttctgtattttttgatttgatcatttcaatcttcaatttttttttatatatccaccaattcgcaaagtgcaaatttctaatctttcacgtattgggttcttctcttttccctcttcgtctccgatcgatccaattctctccatggctacgatcggacacaac

SEQ ID NO: 196969 - DNA, 288 bp, Glycine max
tacgggctgcgaaaaagacgaccagaaggggcagaatggaatattatttatgacaagttggataaaatgtgtcagcagtggtgccaaagttgttctttcacgactggctattggtgatctagctacacagtattttgcagatcgagatattttctgtgctggtcgtgtagctgaagaagatctgaaaagggttgctgctgcgactggtggaaccgtacaaacatctgtgaataacattattgatgaggtccttggaacttgtgaattttgaggaaaggcaggttggaa

SEQ ID NO: 196970 - DNA, 287 bp, Glycine max
acgggcgagaagacgacagaagggatcgtttgcggcggatctccgctgaggaaagaaaccgatgaggcattcaaagctaagttccccaacgtcctcgtcatgcagggatacggtttaactgagtctgcagttacccgaaccactccagaggaggcaaatcaggtgggagcaacaggtaaactgataccaaatatagaagccaaaattgtgaacccagaaacaggggaagccatgtttcccggtgaacaaggagaactctggtcgaggaccttatgttatgaaaggtt

SEQ ID NO: 196971 - DNA, 289 bp, Glycine max
  unsure (1)..(289): unsure at all n locations
tacggctgcgagaagacgacagaaggggaggcgcggcgggatcagcacaagattgcanaatgaagttcaacattgcaaatcccaccactgggtgccagaagaagctggaaatcgatgacgacctgaagcttcgagcattttgggacaagaggatctcccaggaggttcttggtgatgctctgggtgaggagtttaaaggatatgttttcaaaatcaccggtgggtgtgacaaacaaggattccctatgaagcagggagtgctgccctggtcgtgttcgacttttgctcc

SEQ ID NO: 196972 - DNA, 290 bp, Glycine max
tacggctgcgagaagacgacagaagggggcagcagcaactttaaacgccgaagaaagttcatccaatctccgaagcccttcaccgcattgcaaccatgtcgagaagaaaggttagagagccaaaggaagaaaacgtgactctgggcccagctgttagagatggcgaacatgtctttggcgtcgctcgcatctttgcctccttcaatgataccttcattcatgtcactgatctgtccgggagggaaacacttgtccgcatcacaggtggaagagttaaggctgacagagat

SEQ ID NO: 196973 - DNA, 246 bp, Glycine max
gagaagacgacagaagggggcatttaactagccctaattcgccattgaaccctatactgtgcttccgccttgatctccgcagcaatggtgaacgttccgaagacaaagaagacctactgtaagagcaaggagtgcaggaagcacacgctccacaaggtcacccaatacaagaagggcaaggacagcatcgccgctcagggaaaacgccgttatgaccgcaaacagtccggttacggtggccagact

SEQ ID NO: 196974 - DNA, 284 bp, Glycine max
acggctgcgagaagacgacagaaggggggttctataacacagttaacagggatggctatggaccagttgcacagatgtttgctcggaactcgtgcaaaattatattacctggcatggacctttcggacgcgaaccaaccaaaggaaaaccattctagccctgagttgctacttgcacaaattatggaagcttgcaaaaagcatgaggttcaggtttcaggtcaaaattcgtctgaatctggtgttccaggggggtttgacattaagaagaatttatctggagat

SEQ ID NO: 196975 - DNA, 340 bp, Glycine max
  unsure (1)..(340): unsure at all n locations
ctcgagccggctcgagcggctcgagcganctcgagcgagcaggagntnnacggctgacgactgaatgacgagctagatagggggagcatgagctatagctaagtgtacgtgannctgctagnngcgaagcagnnctagaganatgggctgcaaccctnnagatgngacgagatgtaccanngtagccggaatagctatcactaagacttacgctactagacccggagtatcgcatggggggcacgtggatatacccgatgtgaatcagcaagggatccaccttgcaaggctaaatactcctggggtgaccgataggagtagtaccgtgagggaagggtga

SEQ ID NO: 196976 - DNA, 292 bp, Glycine max
aagacgacagaagggggttataacaatcatttttattctcaagtaatattagaaggttttgttgtcgtcgtggagattctattttccctacaattttgtatatcttccttaagggaattcgaaatcgtaaaatcttataataatttgcgatcaattcattccatttttccctatatttcgaagataaactgatatatttaaatcatgagtcagatatacgaataccctatcctatccacctggaaatcttggttcgaatccttcgaattggataaaagatgtctctttcttt

SEQ ID NO: 196977 - DNA, 285 bp, Glycine max
gctgcgagaagacgacagaaggggatagcaaaatcgtttctccaatttaatcaccattgtacaacccaattcccttcgtcgttttcgattaagagagcaatggcacgtaccaagcaaaccgctcgcaagtccaccggaggaaaggctccgaggaagcaattggcaaccaaagccgctcgaaagtcagccccggcgaccggcggagtgaagaagccccatcgcttcaggccaggaacggtggctctgaggtagattcgaaagtacaagaagcctgtttttctgatc

SEQ ID NO: 196978 - DNA, 293 bp, Glycine max
tacggctgcgagaagacgacagaagggggtgcgggttattatatataggggaagatcaacgagacgtatgtggcaggtgtgggttcttcaattcattctagttctggattccgactagccgcgttgactcggttccgtttttcattctcgcggatctaatattaaggaatagcttaagggcacattacaatgaaggcattgattctggttgggggatttggaacaaggctgaggccactgacactcagtttccctaagcctcttgttgattgctaacaagcctatgattttgc

SEQ ID NO: 196979 - DNA, 286 bp, Glycine max
tacggctgcgagaagacgacagaaggggggcatattgcttgtttatgatgttactgatgaagcatctttcaacaatattaggaattggattcgcaacattgaacaacatgcttctgacaatgtaaacaagatacttgtgggtaacaaggctgatatggatgaaagtaaaagggctgtgcctacctccaaaggtcaagcccttgctgatgagtatggtatcaagttttttgaaaccagtgcgaagacaaacatgaatgtggagagtttcttttcaatagcaagagat

SEQ ID NO: 196980 - DNA, 285 bp, Glycine max
ggatggtggttgctgccaacaactacaaataagaggatgaaaaaaattgatactgagatacgagcattacttaaaggtgtcatcaacaaacgagagaatgcaatgaaggctggtgaagtcttgaacaatgacttgttgggcatgcttttggaatcaaaccgtatggaaatacaagatcatggaaagaataacattattgcaatgactagcctagaggtaattgaggaatgcaatgcattctacatagcaggacaagaaacatcggttttactagtttggacaatg

SEQ ID NO: 196981 - DNA, 284 bp, Glycine max
tctcgagcgaatcggctcagtacggaaagacgacagaacgggactcacttatcatccttcgatcatacacttagttgcttccaattaagatggttctgctagagaagctctgggatgatgttgtggctggccctcaacctgagcgtggccttggcaagctcagaaaactcaccaccctcaaaactattgatgaaggagaaagtagcaagctgcagaagacgttgtcgatgccgtcgacaccaacaaccccgatgactcgcgactccaacgacaccgggatcggc

SEQ ID NO: 196982 - DNA, 286 bp, Glycine max
cggctgcgagaagacgacagaaggggatccccaagcattcatttgccatttttacaatatctactttgctcattcagctggtggtcgaatgattgggaaaaaggttgctgaaaagttacttaacaacaaggcgttggagttctacaaatgggatgatgaccttccgcgattgttgcagaatgtgagagacaagttgaataaagttgctgaaccttggagtcgggaagaaaaggaccgctgtctggaagaaacagaaaaatctcaagctctctggagagattctccg

SEQ ID NO: 196983 - DNA, 285 bp, Glycine max
acggctgcgagaagacgacagaagggggcggcacttcatctgtttttctgcatcggcgtgaacaatggcgacgtacgctgcgatgaagcccaataagcctggcttggaggagtcccaagaacagatccacaagataaggatcaccctttcctccaagcacgtcaaaaatctcgagaaggtttgtggggacttggttcgtggtgcaaaggataagaggctcagggttaagggacctgtcaggatgcccactaaggttctccatcactaccaggaagtccccctgtg

SEQ ID NO: 196984 - DNA, 284 bp, Glycine max
tacggctgcgagaagacgacagaagggtgggcgaagattcagagtgctaagtgtgagagatagaaaatgccaaagtctcaatttcgaaccccatttcttgtttctttttctcttttgttattcatcttcaacctcaccccttcatacgcactctatggagcatccacacccgtgcttcaactcactccctctaacttcaagtccaaggttctgaattcaaatggagttgttcttgttgaattctttgctccatggtgtggactgtcaggctctgactcctatat

SEQ ID NO: 196985 - DNA, 293 bp, Glycine max
tccaaagtttgtatagtgtaggatttgttggtattcgtgataaaaacacctcatcctattcattttgccatgacgggcgaactccagataaaggttttgaaagtaatgagaaattattaattcatccatgttactggcttggtttgaatctaaatcgtaatgcacttgctccagaggaagcagaggagataaatgacgaatatgatattaatattatttcagataattcagccattagaaataaaacaataggtcaaataactactcactagatcagataccgataggaaatg

SEQ ID NO: 196986 - DNA, 286 bp, Glycine max
tacggctgcgagaagacgacagaagggttatagattattaatatcattgatgttttaaatatataattatgaatgtgttaaaatttgagtttaatttataggcattttaagtataaaaacattttacattattgatcaattgaaaataatagttgacattctttttaacatgactattataaatgttcacaaacttattatattatgctgaaatgataattaaatttttttttacacaatcaacatatacattgttttctcaaaattaaatgtgtacatatttgtt

SEQ ID NO: 196987 - DNA, 286 bp, Glycine max
aagacgacagaagggggatgcacaagtttgttgagatagctagaagcaataagatgaaaatgaaagtgcttgttttgtttgttgctacagttttggtagcatatgaatgccatggctcagactaccagaagttccctctccaaatgaaaactgggtttggtgggcaatacagcaatgagtggcatgtgccagttggaggcttggcgtggaagcaaacaacgtagtcaagtggcaaactgttcctgcagcttgcggagagtacatgctgactacgttctaggagacc

SEQ ID NO: 196988 - DNA, 261 bp, Glycine max
tcggctgcgagaagacgacagaaggggatgtcttgtttttaccaattactggactaatgggtgcaaacatgaaaacaagagtggataaaagtgtttgtccatggtggaacgggccttgcttatttgaggcacttgacactattgaagttccacaacgagatcccaaaggacctttcaggatgcctattattgacaaattcaaagacatgggaactgttgttatgggcaagttgaatctggcgtgttcgtgagggagttcct

SEQ ID NO: 196989 - DNA, 289 bp, Glycine max
aagacgacagaagggggcattaagcagaatcataatctttcatcacatgcatcatatggcgcttctacttgtcgctctcttggctcttgttactacattaccatcggttactgttggagaagtgctttcacccattctcgacgttgcttcactgaaccgaaccagttttcccaagggctttatatatggggcaggatccgcatcgtatcagtacgaaggtggggcaaacgaaggtggcaaaggaccaagtatatgggatacctcccacaaatatccagataaaattgtg

SEQ ID NO: 196990 - DNA, 274 bp, Glycine max
gatctggacagcagaagaacaagtagttgagaactaagaaggagaagcaaatggcttcctacaatgatctcttccccagctgttaccactgtcaaccgtgccggtgccggcatggttgctccattcactggcctcaagtccatggctggcttccccaccaggaagaccaacaatgacattacctccattgctagcaacggtggaagagtgcaatgcatgcaggtgtggccatcagttggcaagaagagtttgagactctttcctacctgccaga

SEQ ID NO: 196991 - DNA, 271 bp, Glycine max
tctgacgaatcggctcagtacggctgcgagaagacaccagaagggggttatagtgtgtgattgtttgttgttgtaactcgttcttcttcttttgttgttctgtgtttgtgtttgttttttctctcacctgaaaatgtcttgctgcggtggtaactgtggttgcggaagctcctgcaagtgcggcaacggctgcggaggctgcaagatgtacccagacttgagctacactgagtcaaccaccaccgagaccttggtctggagtggcacccgt

SEQ ID NO: 196992 - DNA, 289 bp, Glycine max
tacggctgcgagaagacgacagaaggggccattgttgttgctattatcatccgcagctgcttttattcgcaccgcaaacagtgagccatggccgtcggaaagaacaagcgcatctccaaggggaagaagggtggcaagaagaaggcagctgatccctttgccaagaaggattggtatgacattaaggctccttctgtttttcaagtgaaaaatgttggcaaaaccctcgtctctcgtactcagggtaccaagattgcttctgaagacaagcatagagtgtttgaggtct

SEQ ID NO: 196993 - DNA, 279 bp, Glycine max
ctcgaggaatcggctcagtacggctgcgagaagacaccagaagggggaaacaaaagagtgaagaaaagaacgcagaaactgaaataaaaaatggcagaacccaaggttaaatacgatcgtcaactcagaatatggggtgaacaaggacaggcagcccttgagaagtctagtatttgcttacttaactgtggtcctactggttctgaaacacttaagaatcttgttcttggtggggttggaagcatcactgtagttgagatctaaagttgaagcgggaga

SEQ ID NO: 196994 - DNA, 284 bp, Glycine max
tacggctgcgagaagacgacagaagggttacccaatctctttctcgtcctttaaagaagcatgcaatgtccaaaaatatgtccttctgagaatgatctaagccatcataacttaattttaatactgtatgaatttccatactcgaaatcttttggagttttctcaattcactctcccatgcctctttactttttcgacgaagacttgcacccataacttttaaagccaaaggaatacctttgcaataggaaagtactcttctgataggtcttcatacccctctt

SEQ ID NO: 196995 - DNA, 283 bp, Glycine max
  unsure (1)..(283): unsure at all n locations
acggctgcgagaagacgacagaagggcccgctccttatccctcctgattctgtccctatcctgatctctgtccaagtcacgatctctgtatctttcacggtctcgatctcgctcccactccctgttcctatctcggtcacagtatctgtccctatcacgttccctatccctgtctctggaccgtgaccggtctcgttccctatccctatcaggatattcacggctctggctgcggcgattacttggagatcttctatacatcnatgccatttttttcatgaga

SEQ ID NO: 196996 - DNA, 284 bp, Glycine max
cgctgcgagaagacgacagaaggggaatgttaaatctggccttccagccacaacaagtactgagaggttggaacaactggatgatgaggagcacattcttggaataaggatagttggaggtgaccacaggctgaggaactattcttccataatcaccgtccatccggaggtcattgatgggagacccagtacaaagacaattgaatcatttgtggtggatgtgcctgatgggaacaccaggatgaaacttgttacttgggaggctttgatcaggtgtaacctaa

SEQ ID NO: 196997 - DNA, 287 bp, Glycine max
acggctgcgagaagacgacagaaggggataccaaaaacaaaacacaagccaagtgaaagtgagaaaaaataaaaatcaaagagcataatgtcagggatcattcacaagattggggagacccttcatgtgggagggcacaagaaggaggaggagcataagggtgagcaccatgctggagaatacaaaggggagcaccatggtgaacacagtagtgagtacaaaggagagcatcatggtgaacacaaagctggagagtacctgtgagcacaagccagagcacaaagagg

SEQ ID NO: 196998 - DNA, 282 bp, Glycine max
agacgacagaaggggacaagagaagatacgaagctctctcaatcttattttctgattaacactaacaaataacaatgacggatgctgctgaagacgctacacgccgccgtaatgcggtggccgagtaccgcaagaagcttcttcaacacaaggaattggagtccagagtacgatccgtccgagagaatttgcgtgcctcaaagaaagagttcaacaaaactgaagatgatctgaagtctcttcaaagcgtaggacagtcttggccgagttcttaggcctctc

SEQ ID NO: 196999 - DNA, 282 bp, Glycine max
accaggaggatcttgtgaagcgcctagagtctgagatcaaaggagactttgagaaagccgtgtaccgatggatactggaacctgcagatcgtgatgctgttttggccaatgttgccatcaagagtggcaaaaactacaatgtcattgtggaaattgccactatcctctccccggaagagcttttggcggttagacgcgcctatctcaaccgctacaagcactccttggaagaagatgttgcagctcatacctctgcatctacgccagcttttagtggggttg

SEQ ID NO: 197000 - DNA, 288 bp, Glycine max
tccaaagtttgtatagtgtaggatttgttggtattcgtgataaaaacacctcatcctattcattttgccatgacgggcgaactccagataaaggttttgaaagtaatgagaaattattaattcatccatgttactggcttggtttgaatctaaatcgtaatgcacttgctccagaggaagcagaggagataaatgacgaatatgatattaatattatttcagataattcagctcttagaaataaaacaataggtcaaataactactcactagatcagataccgatagg

SEQ ID NO: 197001 - DNA, 229 bp, Glycine max
cggctcgagtgcgagaagacgacagagggggagagaaagagagagaaagatgtcgaagcgtggtcgtggtggttcggcggggaacaagttccgcatgtcgctgggtcttccagtggcggcgacggtgaactgcgccgacaacacgggggcgaagaacctctacatcatttcggtgaaagggatcaaaggccgtttgaaccgtcttccctcggcctgcgttggcgacatg

SEQ ID NO: 197002 - DNA, 210 bp, Glycine max
gagacgacagaaggggtgatgcgaattatcaatgagcctactgcagctgccattgcttatggtcttgataagaaggccacaagtgttggtgagaagaatgtgttgatttttgaccttggtggtgggacatttgatgtttctttactaagcattgaggagggtatctttgaggtgaaagtcacagctggtgacacccatcttggaggtgag

SEQ ID NO: 197003 - DNA, 222 bp, Glycine max
cgcagagacgacagaagggggtgagttgagaggatcgtgagaggggcagtagccgagattccgtgagttgcaaaaatgaagacgattctttccaccgagaccatgaacatcccggacggcgtgagcatcaaagttcatgccaaggtcatcgaagttgacgggccccgcggaaaattggtgcgagacttcaagcatttgaatctcgattttcagctcattact

SEQ ID NO: 197004 - DNA, 264 bp, Glycine max
tacggctgcgagaagacgacagaaagggacacattgtgagtatcaacaagaatactcataatataggtagcatatagagctatagttatattgatattgctattttgtaagctcttatttcctcggccatggctaataatgaacgtgatctcttctcggcggagattgtgaatcgtggaattgaaccgtcgggacccaacgctggctcgttgacattctctgtgagggtgaggaggcgcttaccggattttctgcaatcggtga

SEQ ID NO: 197005 - DNA, 275 bp, Glycine max
acacctccaatgaaaaaatctcctatttcaatctgaaaaagaaaatttccttgttaaagtattttctgatgtgaataattacatatttaaaaggaattcctaatcaaactaaatgtgtatttgctaacctgccagtaacctttttcagtaatcggacataagtgtggtttcctttgaagtgctttgggtcaacaccaccataaactaattcgccaccttttttcgcatttggatccccattaagccaaaaagagaacaccttctcactgataagt

SEQ ID NO: 197006 - DNA, 273 bp, Glycine max
cggctgcgagaagacgacagaaggagtcacatatcatattatgaagctcacaggtttcctgcaagcggtgactcttgctttggtgttagccaccgtctctgcatcagatcctgatcctcttcaagacctctgtgtcgcagaccttgcttcagcggtaaagtgaatggattcacatgcaaagatgctgccaaggtaaatgcgagtgatttcttctcagacatactagccaaaccaggtgccacaaacaacacctatggctccctagtgactgga

SEQ ID NO: 197007 - DNA, 281 bp, Glycine max
cggctcgagtacggctgcgagaagacgacagaagggaaagagacccggaaagggtgggaaccgcttttggaaatccattgggcttggatttaagactcccagggaagccatcgaaggaacctacattgacgagaagtgccccttcactggcaatgtttccaccgtggccgtatcttggctggaacatgtcacagtgctaagatgaacaggactattattgttaggaggaattatctccattttatcaagaagtaccagaggtacgagaaaaggcactccat

SEQ ID NO: 197008 - DNA, 268 bp, Glycine max
ggctgcgagaagacgacagaaggggacagcagagcaaaagaaagaaagaaactgcaacttcctctgttttgctcccctgtttaggccttttcataagcttagaatgacacacaaggaattttccattgctctagtgactctcattgctgttcctttgtcaacatgaacatccaaggtgccactgctgactatggtagttggcagagtgctcatgccactttttatggcgggggtgatgcttctggcacaatgggtggagcatgtgggt

SEQ ID NO: 197009 - DNA, 237 bp, Glycine max
acgacagaagggggggcgatgtagccagagagtgatacaatacagagtgcgttgttgctccttcgccacaactccctgccaacatgggtatctccagagattctatgcacaagaggcgtgccactggtggcaagaagaaggcatggagggagaagaaaagtatgagcttggtcgccagcctgctaacactaagctgtcaagcaacaagacagtcaggaggatccggggtagaggtgg

SEQ ID NO: 197010 - DNA, 274 bp, Glycine max
  unsure (1)..(274): unsure at all n locations
tggctgcgagaagacgacagaagggggtttttaacaacagtccagacgagactgcatatttccgcatgttgttagacagggaaaatattagtaatgctgccgttatgattcagccgtcattgatatcgtattcatttaatgcactgcctgcaccgcattgttagatgtggcttccattgctgcagacaagantttgttgctagattcatattttagtgtggttatttttcatgggatgacaatagctcaatggcgctacttgggataccagaac

SEQ ID NO: 197011 - DNA, 251 bp, Glycine max
  unsure (1)..(251): unsure at all n locations
ggcacattgaaatctgaaccttccggatttcgttttgctttgttcaggtagccagccagtcatggtgctcttcaatgtttcacgcgtagagaccactcccttcgatggccagaagccnggaacctctggtctccgcaaagaaggtgaaagtgttcgtgcaacctcattacctccataactttgttcagtcaacattccaatggcattaactgtggganaaagttagaggtgcaacgctagttgtatctngt

SEQ ID NO: 197012 - DNA, 271 bp, Glycine max
cggctgcgagaagacacagaagggggtaccgatcaattaacaaccatatctatctattgagaaacatgaagaaggtttcacccttggcattttccattctctttttggccttcaccatagaaccctttattggcattgctgcagcagcaccagaagcagtgcttgacacctcaggccagaagctgagatcaggtgtcaagtactacaatctgccagtgttcagaggcaaaggtggaggcctaacagtttcaagcagtggcaacaacacatg

SEQ ID NO: 197013 - DNA, 264 bp, Glycine max
acggctgcgagaagacgacagaaggaattaatggctctcatgatgagtggaggagatctcggggtgtcggcttttcctgatggagagagtatttttacatggattggcacaattgaaggtggaaaagggactcagtatgagggtttacttataaactctccttacgttttcccctagactatccttttaagcccccccaagtgaagtttgagacaatgtgctttcatccaaatgttgaccagtttggcaacaattgtctggaca

SEQ ID NO: 197014 - DNA, 264 bp, Glycine max
acggctgcgagaagacgacagaagggggaacaatgattatctgcctacccttttcaaggctaactaccctccttatggaagggactttagcaaccatcaacccactgggaggttctgcaatgggaaactagctaccgatattactgctaaacactgggttttaagagttttgcacctgcatatcttagccctcaggcatcagggaagaatcttcttattggaggaaactttgcttcagctgcctctggtaatgatgaaaaggct

SEQ ID NO: 197015 - DNA, 245 bp, Glycine max
acggtgcgagaagacgacagaagggggagaacaaaacaagtgtttcgaatagattatcctaagtctttgggaatagtgctgcaatggcttcaagtcaggaggaggtgacccttttgggagctactggaagcccatttgtgtgcagggttcatattgccctcaagttgaagggagttcaatacaaatatgtcgaagaaaatttgaggaacaagagtgaactgcttctcaaatccaacccagttcac

SEQ ID NO: 197016 - DNA, 239 bp, Glycine max
tacggctgcgagaagacgacagaagggggtttgattagggtttgtcattagcacttcttcttttcacactgccgctgcaacaatggcttcagagaagaaactttcgaacccaatgagggagataaaagtgcagaagctcggtctcaatatctctgttggcgagagtggagatcgtctcatcagagccgccaaggtgttggaacaacttaagtggcaaaccccagtgttttccaaggcaa

SEQ ID NO: 197017 - DNA, 285 bp, Glycine max
  unsure (1)..(285): unsure at all n locations
ctcggaatcggctcgagtgcgagaagacgacagaagggggaagaaaatgaaagtcattgttttcttcgttgctataataattttaggtgcagaatggcaatgcaatgggtcagagcatgagcatgagcatggccacagctaccaaattatccctttgcgattacnaaccggccccggtgggcactacattccggaggtatcgtgcaaaagttggaggcttggtgtggaagcacacaacgtcattgactggagaaccattcctcaagattgcgagggatatatagg

SEQ ID NO: 197018 - DNA, 256 bp, Glycine max
ctgcgagaagacgacagaagggggccattgttgttgctattatcatccgcagctgcttttattcgcaccgcaaacagtgagccatggccgtcggaaagaacaagcgcatctccaaggggaagaagggtggcaagaagaaggcagcgatccctttgccaagaaggattggtatgacattaaggctccttcatgttttcaagtgaaaaatgttggcaaaaccctcgtctctcgtactcagggtaccaagattgcttct

SEQ ID NO: 197019 - DNA, 215 bp, Glycine max
  unsure (1)..(215): unsure at all n locations
ggatttggaagaatnggccgtttggttgccagantcgcttctgcaaagagacgatgtggagctcgttgccgttaacgaccctttcattaccaccgattcatgacatacatgtttaaatacgacagtgttcacggacactggangcntcacgatgtcaccgttaaggacgagaagacccttctcttcggtgacaagccagtcactgtttttggaca

SEQ ID NO: 197020 - DNA, 262 bp, Glycine max
acggctgcgaaagacgacagaaagggggatccagaaacgttgaaaacgcaagaagggaaagcacagtttgttttcattgggtgctgatcggaacaaacagggaatagaagagaggagaagatgggtctcataatggaatttgcgagaactcggtattaaagttgatggaagatccgaaggaaagggatcggaggttcagggagcacgtttatagagtgaaggacaggtgcgagaagacgaaggagatgtggagctaccctat

SEQ ID NO: 197021 - DNA, 248 bp, Glycine max
  unsure (1)..(248): unsure at all n locations
ggagttttcaccgataaggacaaggctgccggcacattttgaagggtggtgccaagaaaggttattatttctggccccccagtaaggatgnccccatgtttngtnggttggtgttaatgaagcacgagncaagccagagcttgatattatttccaacggtagntgaaaaaccaaactgccttggtccantnncnaagggtattcatganagntttggccntttttagggtttaagacantnttcattc

SEQ ID NO: 197022 - DNA, 260 bp, Glycine max
tacggctgcgagaagacgacagaaggggagagtggtggagtgtgcagaagagcgtcgcagtcgcaaccctaatcagaagaagcgcacttcaagcgagtgacagccaccagccatgggtcgtatgcacagccgcggtaagggaaatcctcttctgctttgccctacaaaaggacacctcctagctggctcaagatctcttcgcaagatgtcgaagaaaatatctgcaagtttgccgaagaaaggtttgaccccgtctcaga

SEQ ID NO: 197023 - DNA, 260 bp, Glycine max
tacggctgcgagaagacgacagaagggggcacaagtgagtttgttgatcgagataactagaaacagtgtgatgaaaatgaaggtccttgttttcttcgttgctacaattttggtagcatggcaatgccatgcgtacgatatgtccctctccgaatgaacactggcttaggtgcccgtactccggaggtgaaatgcgcaagttggaggcttgctgtgggaagcacacaacatctttggctttgagaccattcctgaagagt

SEQ ID NO: 197024 - DNA, 256 bp, Glycine max
acggctgcgagaagacgacagaaggggagagcagagaagagaagagagtttcaagaatggggagcgaagaggagaagggtgaattctacttgcgatactacgtgggccacaagggcaagttcgggcacgagtttctggagtcgagttcagacccgatggcaagctccgctacgcgaacaactccaactacaaaaacgacaccatcatccgcaaggaggtttacctcaaccctgccgttttgcgtgagtgccgccgt

SEQ ID NO: 197025 - DNA, 249 bp, Glycine max
tacgctgcgagaagacgacagaagggggcacacaacacacatattcgtgtgtgtttgaagtggaagaaagagaacgcataacacagaacacagtgcagacaacaagtgatgacgtcgaaacagacatacagcgtgtgcttctgcggcggcggcggttcaagctggcgctggcggaggcgccgtcggaaatcaagaccctattcaatgagtactccgagaatgagctcatgacaccttcgcatcttaaga

SEQ ID NO: 197026 - DNA, 228 bp, Glycine max
acggctgcgagaagacgacagaaggtggggaactggtagagcaaggcatggttcattgcgtgggcctcagttcaggggtggtgccaccatgcatggccctaagccccgaagccatgctttcaaagtcaataagaaggttcgacggctagggctgaaaatttgtttatccactcgtgcagcagaagggaagcttcttgtttttaaggatctggcggttcccacacataa

SEQ ID NO: 197027 - DNA, 271 bp, Glycine max
acggctgcgagaagacgacagaagggggcacaagtgagtttgttgatcgagataactagaaacagtgtgatgaaaatgaaggtccttgttttcttcgttgctacaattttggtagcatggcaatgccatgcgtacgatatgttccctctcgaatgaacactggctatggtgcccgtactccggaggtgaaatgcgcaagttggaagcttgctgtggaagcacacaacatctttggctttgagaccatcctgaagagtgcgttgaagcaaca

SEQ ID NO: 197028 - DNA, 220 bp, Glycine max
cggctgcgagaagacgacagaagggggggtcttcgttttcaccttgtctgtctacttcatgtcgaggccacgtcccatttacctcattgattttgcatgttataaacccgatgatgaactcaaggtgtcaagggagcagttgatggaggtagcaagaaaatcaggcaagttcgacgaaccaatttgattccaaaaggaggatgctgatgtcctccggaat

SEQ ID NO: 197029 - DNA, 255 bp, Glycine max
tcgaccgaatcggctcgagtacggctgcgagaagacgacagctggggggagaagaagtaagcactcggttgcagaacagaacaaacttctttcactctttcgcttctgaatcttcaacaatggtgctcgaggcgacgatgatctgtatcgacaattctgaatggatgcgtaacggagattactctcttctcgatttcaagctcaagcagacgctgtcaatctcatatgcggtgctaaaacgcagtccaatccgga

SEQ ID NO: 197030 - DNA, 262 bp, Glycine max
tacggctgcgagaagacgacagaaggggactcctggcagcatatactcataaatcacatagctagttgtttaaagtaagagagaagaaagaagcaaatggcaaactttccagttgttgacatggggaagcttaacaccgaagagagacctgcagccatggagattataaaagatgcctgtgagaatggggtttctttgagttggtgaaccatgggatatccattgagcttatggacacagtggagaagctcacaaaagagca

SEQ ID NO: 197031 - DNA, 252 bp, Glycine max
acggctgcgagaagacgacagagggacagaacaatactgcaatagagaaagaggcagatagaaaaaaagagcgacttttgagttcaaaagatgactaacttcccattgatcaacttggagaagctcagtggtgaggaaagaaacgataccatggaaaaaattaaagatgcttgtgaaaactgggatctttgagctggtgaatcatggcattcctcatgacatattggacactgtggagaggttgaccaaaga

SEQ ID NO: 197032 - DNA, 212 bp, Glycine max
  unsure (1)..(212): unsure at all n locations
tcgatctcgaccgattcggctcgagtacggctgcgagaagacgcagagtggggcacaagtgagtttgttgatcgagataactagaaacagtgtgatgaaaatgaaggtccttgttttcttcgttgctacaattttggtagcatggcaatgccatgcgtacgatatgttccctctccgaatgaacactgctaggtgnccgtactcccggagtg

SEQ ID NO: 197033 - DNA, 283 bp, Glycine max
tcggtattcggctcgatacggctgcgagaagacgacagaaggggcagtagaagagtcctgattccaaacgaaaaaattcaaacttgattgaaaaggatctttctgattattgaagaatgggacaaaaggattgatcgcgaaaaagatttcttgttcttattagaagatcgtgattggatccacatatgtttggtaaaaagaacgaaatattcttctttgagaaataataaaaaggaaagtgttcaattggaacattgaaacgtgacagaattgtcctagttac

SEQ ID NO: 197034 - DNA, 219 bp, Glycine max
tacggctgcgagaagacgacagaaggggtgtccaatttgtttggagtatcccatgtgtccgcagataaccacatgtggacatattttctgtttcccgtgtattctacagtacttattgatgggtgaagaggatcacaaaggtgatagctggaaaaggtgtcctttgtgctttgtgatgatatcgcgaggttttatataccttgcacgtcacaaatgtaa

SEQ ID NO: 197035 - DNA, 262 bp, Glycine max
agacgacagaaggggacacatacatcatcaaaaaacacacacgacacactcccatacacacacgttgtctcgcacacattccttcattccgcagcaaacatctttaccttaaacgacaacaatggccgatgccgaggatattcaacccctcgtttgcgataatggaaccggaatggtcaaggcggttagccggaatgatgcgccgagggcggtgttccccaacattgtggggctcccgtcacacacgggagtgatggttggg

SEQ ID NO: 197036 - DNA, 265 bp, Glycine max
tacggctgcgagaagacgacagagggacagaacaatactgcaatagagaaagaggcagatagaaaaaaagagcgacttttgagttcaaaagatgactaacttcccattgatcaacttggagaagctcagtggtgaggaaagaaacgataccatggaaaaaattaaagatccttgtaaactcgggtcttcagcaggtgaaacatcggggtttccctcagaacatattggcccttggggagaggttgaccaaggagcactacaggaa

SEQ ID NO: 197037 - DNA, 237 bp, Glycine max
ctgcgagaagacgacagaagggatcagcggtgccccccaggataacaacataatgctgtggaatgctgtcatatttggtcctgatgatactccatgggatggaggcacgttcaagttgactctccagtttactgaggattatccaaataacccccaaactgtgcgatttgtgtctcgcatgttcatcaaatatttatgctgatggaagtatttgtttggatatactacaaaatcagt

SEQ ID NO: 197038 - DNA, 265 bp, Glycine max
tgaagacgacagaaggggcgcattgaacgaaaattagggtttgtagtgtagcaggaagaagcagcaatggcgccgaagataacacgtaaggttagcagaaaccctgaattgataaggggaatcggaaagtactcgaggtcgcagatgtaccacaagaggggcatttgggctatcaaggccaaaacggtggcgttttacctcgccacgaccctaaaacccaagcctgaagctcctgctgaaaaaccacccaaattttaccctgctg

SEQ ID NO: 197039 - DNA, 262 bp, Glycine max
tacggctgcgagaagacgacagaaggggactcactcaacaaaaactatcagtgaggtcagtggcactgggagaaaaccttggaatcaaaagggaactggtagagcaaggcatggttcattgcgtgggcctcagttcaggggtggtgccaccatgcatggccctaagccccgaagccatgcttcaaagcaataagaaggttcgacgtctagggctgaagattgctttatcagctcgtgcagcagaaggaaagcttctggtttt

SEQ ID NO: 197040 - DNA, 257 bp, Glycine max
tcgaccggctcgagacggctgcgagaagacgacagaaggggacacaccgtttgttctattcttaactacaacttctgctacccactctcttcttccaagtccaaccacgcttttctctacagtcatgggcaaggtcaagttcggattcaagggttttggaaaattggccggttggtgcagaatgctctgtgaaaagacactatgtggagctcgttgccgttaacgaccctttcattaccaccgattacatgacatac

SEQ ID NO: 197041 - DNA, 258 bp, Glycine max
tacggctgcgagaagacgacagaagggggcatcaattcaaaatatatcatcaattataagcatgggtttgtggaacacaacgaatgcagtgtcttgccgctttcacaagtttggtgatgaccaaaagaatctggtcttccaaggtgatgccacgtcttcttccaggggcatagaactcacaaagtagacggtggaggaaaaccagtgggtggcagtgtggggagagtgttatactcttctccagtgcacctttgggaa

SEQ ID NO: 197042 - DNA, 186 bp, Glycine max
cggtcgagctcgaccgaatcggctcgagtacggctgcgagaagacgacagctgggggagagaagttgctagggtttttgagtgctacggtccaaacactcttctctgcagctcttgcctacaactcccttcaccatggctgaacaaaccgagaaagcttttctgaagcacccaaaagtgtttctca

SEQ ID NO: 197043 - DNA, 226 bp, Glycine max
  unsure (1)..(226): unsure at all n locations
gatgcataagaacaagcacaaggtctgattcgtgtttccttacatcaacttgtggtctaaaaatgggaaggatgccatgctgtgagaaggtagggttgaacaaaggaccatggaaaaccgaagaagatgagaagctcgtggcttagttnnaggcatggccctggaaactggcgttcagtgcctgccaaagcgggtcttcaaagatgtggcaagagttgtagactga

SEQ ID NO: 197044 - DNA, 234 bp, Glycine max
  unsure (1)..(234): unsure at all n locations
ggatttggaagaattggccgtttggttgccagantcgctctgcaaagagacgatgtggagctcgttgccgttaacgaccctttcattaccaccgattacatgacatacatgtttaaatacgacagtgtncacggncactggaagcatcacgatgtcacgttanggacgagaagacccttctcttcggtgacaagccagtcacnnttttggnccgnaccctnaagagatcccatg

SEQ ID NO: 197045 - DNA, 258 bp, Glycine max
agaagacgacagaagggggcacaagtttgttgagatagctagaagcaataagatgaaaatgaaagtgcttgttttgtttgttgctacagttttggtagcatatgaatgccatggctcagactaccagaagttccctctccaaatgaaaactgggtttggtgggcaatacagcaatgaggtgcatcgccagttggaggcttggcgtggaagcaaacaacgtagtcaagtggcaaactgttcctgcagcttgcggagagt

SEQ ID NO: 197046 - DNA, 219 bp, Glycine max
tcgagcgaatcggctcgagtacggctgcgagaagatgacaactgggggcagccaagagaagaaaatcctcacccattgtcttcgtagccaaacactctgaaattctcagttatgtcgtggcaagcgtatgtggatgatcacctactgtgtgaaatcgaaggtacccacctctctcgcgtatatcggcaagacggaagcgtttggggtcagagcaccaac

SEQ ID NO: 197047 - DNA, 226 bp, Glycine max
tctgctgcgagaagacgacagatgggggcagccaaagacgacaaacatcctcaattttctgaccagcctcacactctctctctgtctctcgacaattctcagtttgcagagaacatctgaatcatgtcgtggcaagcgtatgtcgacgatcatcttctgtgtgacatcgaacgtaaccacctcactcacgctgctatcatcggccaagacgtcaccgtttgggctc

SEQ ID NO: 197048 - DNA, 261 bp, Glycine max
acggctgcgagaagacgacagaagggggcgcacagagatcgtgatcgaaaatggcgacgttgaaggttcctgctcaacttccttctccagtggaagacagtgagcaattgcgaaaagcttttcaagggtggggaacgaatgaaggattgataatatcaatcctgggtcatagaaatgcactcacgtaagttgattcgtgaagcttatagtgcaactcatggagaagatctttttaaagatttagacaaagaactttcaagt

SEQ ID NO: 197049 - DNA, 259 bp, Glycine max
tacggctgcgagaagacgacagaaggggagtgttagtgttcctcaagccaccgtaccgtgttgcctctctgcaatctacagccaaaatgcctttcaagaggtacgttgagatcgggagggttgcccaaatcaactacggcaaggaatatggcaggctcgtcgtcattgtcgacgtcattatcaaacagagctcttgtcgatgcccctgatatggtgaggtcccaagtcaatttcaaaaggctttccctaaccgatatta

SEQ ID NO: 197050 - DNA, 259 bp, Glycine max
cgacagaaggggataccaaaaacaaaacacaagccaagtgaaagtgagaaaaaataaaaatcaaagagcataatgtcagggatcattcacaagattggggagacccttcatgtgggagggcacaagaaggaggaggagcataagggtgagcaccatgctggagaatacaaaggggagaccatggtgaacacagtagtgagtacaaaggagagcatcatggtgaacacaaagctggagagtaccatggtgagcacaagcc

SEQ ID NO: 197051 - DNA, 246 bp, Glycine max
tacggctgcgagaagacgacagaagggggaggacgcatgtttgccccgaccaagatctggcgccgctggcacaggaaaatcgatgtgaaccagaagcgctacgccgttgtctccgccatcgctgcctccgccatcccctccctcgtcctcgcccgcggccaccgcgtcgagtccggaggcgcacccactcgtcgttagccactcgagggtcgcgtaaacgaaacgaagcgatcaaagtcctcgagc

SEQ ID NO: 197052 - DNA, 257 bp, Glycine max
tacggctgcgagaagacgacagaagggggttgttgttaaggttgtagtagagaaatccagtgcgtgtgtgttgtagcagcgagagaaggaaggaggaaagatgaacacagacatcactgcatcgacgaagccagagtaccctgtcattgatcgtaaccctcccttcaccaaagtcgtcggaactcaacaccctcgactatctccgattcgtcaccatcaccggcgtttctgtcaccgtcggctatctctccgggatt

SEQ ID NO: 197053 - DNA, 255 bp, Glycine max
gacctcatggatgtaagtaatgaaattcaagagactttgggtagaagctataatgtgcctgatgacattgacgaggatgatcttatgggtgaacttgacgcattggaattagacatgggaaatgagactgaagctgatggggtcccatcctatctccaacctgataaagaacctgatttgatgcagaacttaacttacctccagctccaacaggacaaacggcagtgccacctggcagattcaatgcccagactg

SEQ ID NO: 197054 - DNA, 238 bp, Glycine max
tacggctgcgaaagacgacagaaggggtatttgggatgatgggtagtggtctttttaccgtacttttcgggttagggtattggttggatgttcatgtgttggggttttttgttggtgttcagattgtttgtggagtttttcagtcaattgggtgcccttgtgtgttcacatttggggattttgcctagggaccacaaaggggttcataaatgggggtatggaactcacatacctcggt

SEQ ID NO: 197055 - DNA, 253 bp, Glycine max
taagacgacagaaggggagagaaagagagagaaagatgtcgaagcgtggtcgtggtggttcggcggggaacaagttccgcatgtcgctgggtcttccagtggcggcgacggtgaactgcgccgacaacacgggggcgaagaacctctacatcatttcggtgaaagggatcaaagccgttgaaccgtcttccctcggcctgcgttggcgacatggtgatcgccaccgtgaagaagggaacacccgatctgagga

SEQ ID NO: 197056 - DNA, 257 bp, Glycine max
tacggctgcgagaagacgacagaagggggcacaagtgagtttgttgatcgagataactagaaacagtgtgatgaaaatgaaggtccttgttttcttcgttgctacaattttggtagcatggcaatgccatgcgtacgatatgttccctctccgaatgaacactggctatggtgccgtactccggaggtgaaatgcgcaagttggaggcttgctgtggaagcacacaacatctttggctttgagaccattcctgaaga

SEQ ID NO: 197057 - DNA, 247 bp, Glycine max
agcttcatcaccagccaatgaatttccaaaatttgatctcatgctgctgggcatgggccctgatggccacatagcttctctgttcccaggccatcctcttgtggaggagaaacaaagatgggttaccttcattaaggactccccaaaaccaccaccagagagaataactttcaccttaccagtattatacttctgcttacgcagcgcttgtggtaactggaaacagattggattcactctgtgttag

SEQ ID NO: 197058 - DNA, 252 bp, Glycine max
tacggctgcgagaagacgacagaaggggggagaaagacacgatgcaggaagcgacgaaggtgataataatcggtgccggaacttctggtatcgccaccgccggttgcttaacgaagcaatcaataccttacataatgctcgagagagaagactgtttcgcttcgctgtggcagaaatacacctacgatcgtctccaccttcatttgaggaagcaagtttgcgagttaccgcacttaccgtttcccaagtctt

SEQ ID NO: 197059 - DNA, 249 bp, Glycine max
gctgcgagaagacgacagaagggggagggtgacttgagcaagattgtcaagttgtatgagagatgtgtcattgcatgtgccaattatcctgagtattggatacgctatgttttgtgtatggaagccagtggaagcatggatcttgcaaataatgttcttgctcgggcaaccaagtctttgttaagagacaaccagagatacatattttttgtgctcggttcaaggagcagactggagatatagatggtg

SEQ ID NO: 197060 - DNA, 267 bp, Glycine max
tgcgagaagacgacagaagggggtgacactgatgacaagaatcatccgtttgatagaaatcaagcccgtactgctgtttccgactctagtgacagatcgaaagataaatcagatcagaagactctccgcaggcttgctcagaaccgtgaagcagtatgaaaaagccgcttgcgaaagaaagcgtatgtccaacagttggaaagtagtcgtttgaagctgacccaactagagcaagagcttcagcgagctaggcagcaggggattttc

SEQ ID NO: 197061 - DNA, 265 bp, Glycine max
acggctgcgagaagacgacagaaggggacaccaacaccaaaacaaacccactaagatggcttcctttgtatccttcctagtgctgcttcttgcagcccttatcctcatgcctcaagggcttgctacttactacaaaccaattaagaagccaccagtgtacaagcctccagtgtacaagccaccagtgtaggaaccaccggtttataagccaaaaccaccggtttacaagccgaaaccaccggtttacaagccaccatataagaag

SEQ ID NO: 197062 - DNA, 264 bp, Glycine max
agacgacagaaggggaccggcggtggaagagagatagaccaataatctgaatgctgaaacctccgtgttggtgttgcatatccaaaccctaatttggaaattgcattgttgcagggaagaagatcaagatggttctggcggagttaagtgggagcatttcgcgtgctctccagctgatgagcaatgcgacagtaatcgactagaacgtgctcaacgattgcctcaacgacatcactcgcgctcttcttcaatccgatcgtcaat

SEQ ID NO: 197063 - DNA, 238 bp, Glycine max
  unsure (1)..(238): unsure at all n locations
tggtagggagttccaatcgatgttggacggactcgancgaggaagggtgtgttgaagaaccggggtatcaatctgagaagaagcgtcgtctaagtgtggatcaagtgaaggctttggagaagaactttggggttgaaaacaagcttgaacctgagaggaaggtgaagctgcccaagaacttgggttgcaacctagacaggtagccgtatggttccaaaaccgtcgagccagatggaaa

SEQ ID NO: 197064 - DNA, 263 bp, Glycine max
acggctgcgagaagacgacagaagggggcacaagtgagtttgttgatcgagataactagaaacagtgtgatgaaaatgaaggtccttgttttcttcgttgctacaattttggtagcatggcaatgccatgcgtacgatatgttccctctccgaatgaacactggctatggtgcccgtactccggaggtgaaatgcgcaagttggaggcttgctgtgggagcacacaacatctttggctttgagaccattcctgaagagtgcgt

SEQ ID NO: 197065 - DNA, 260 bp, Glycine max
tacggctgcgagaagacgacagaagggtatatgaaatacgattctgatgctgattctaattcgaagtaaaactgaaattacttatattttcttaaagaacaatatgtttgttatgcttaatatctttaatttgggctgtatttgtattcactccgtccgtcattcaagtagttctttctcggcgaaattgcccgaagcctacgctttcttgaatccaattgtggatattatgccagtaataccctgacgcttttttcttt

SEQ ID NO: 197066 - DNA, 261 bp, Glycine max
gctgcgagaagacgacagaagggcgagaaggagatttctgacgatgaggatgaggaagagaagaaggatgaggagggtaaggtggaggatgttgatgaggagaaggagaaggaagaaaaaaagaaaaagaagatcaaggaagtgtcacatgaatggtccttggtgaacaagcagaagcctatttggatgaggaagcctgaggagatcacaaaagaggagtattctgctttctacaagagtcttaccaatgactgggaagag

SEQ ID NO: 197067 - DNA, 263 bp, Glycine max
gcagcgagaagacgacaaaaggggtagtggagaaatatttgacctatggtagtccttctgagcgcaaattactagtgtgtgagatgctcggcatcacagatgaaaatgagcctcttcaggcgatgatgaaagatcaatttgcaaattacgttgtacaaaaggtgctggaaacttgtgatgatcaacaacgcgagctgattctttaccgaattaaggttcatttgaatgcattgaaaaagtacacctatggaaagcacattgtc

SEQ ID NO: 197068 - DNA, 261 bp, Glycine max
acggctgcgagaagacgacagaagggtggcaaaagaagtttttgatgcttctgaagcgagtggggagaaactatggaggttgccgttagaagaaagttactgggagtcaatgaaatcaggagtagctgatatggtgaacactggtggtcgaccaggtagtgctattactgcggctcttttcttaaagcagtttgttgacgagaaggttcaatggatgcatattgacatggctggtccggtgtggaatgaaaagcagcgctg

SEQ ID NO: 197069 - DNA, 264 bp, Glycine max
tacggctgcgagaagacgacagaaggggctctttcttctgcatcactttccattctcttcaacctaacgcagcatcgctatactcttcattccatggctttgcccaatcagcaaaccgtggattaccctagtttcaaactcgttatcgtcggtgatggtggcacaggaaagacaacctttgtgaaaaggcatctcaccggagaattcgagaagaaatatgagccaaccatcggtgtggaggttcacccattggattttttcaca

SEQ ID NO: 197070 - DNA, 264 bp, Glycine max
ggctgcgagaagacgacagaaggggactgtcctccatttgacacattatggccacaccagcatccatcaccaatgtcactgtggagttccttcaattccccgcggtggtgacacctcctgcctctaccaaatcctatttccttggtggcgcaggggtgagagggttgaatattgaagaagaatttgtaaagttcacgggaataggtgtttatttggaagacaaggccgtgtcatcactcggtgccaaatggaagggcaaaagtg

SEQ ID NO: 197071 - DNA, 260 bp, Glycine max
ttgcgagaagacgacagaagggggaaaaccaagtgaaatcaatagccatgaagatcgttcggagagacctagtacctaatggacctggcagcgttaagatggtggcagtggattcggatgatctctggtttgcgtataacttgatagctcccggagactctgtcatggccgttactgtcaggaaggttctaagagaagctgctaatggcggacgggaagcagaacgcgtcaagctcaaattggaaattaaagtcgaagag

SEQ ID NO: 197072 - DNA, 260 bp, Glycine max
acggctgcgagaagacgacagaaggggcggctagaggatattggccatcatttgaaatgtgagtgtattgtaactgatgtgtttggaaggtcaggtgaggcggtatgcattgagacaaaacctgtattgccagggatccctagaatacataagctggagattgagggaagaggatttcataccaatctctatgctgttcatggcatttacagtggtgggaaggaaggcaaaagtagagttcaatggcttagatcaatggt

SEQ ID NO: 197073 - DNA, 264 bp, Glycine max
tgcgagaagacgacagaaaggacagaaaacaaagtaaaattctggggttttttattccccaattataatactaaattcaaaaaaaggagagtaatgagtataatctttcgctcagacgatgtactgatatattctatggcggaggttcgaagaacaagcaatttattttgggccgttttcactttgttaggttcattggggttattgttcgttgcaatttccagttatcttggtatggatttgttctttatttctgagaaaatt

SEQ ID NO: 197074 - DNA, 261 bp, Glycine max
tctcgagccgaatcggctcgagacggctgcgagaagacgacagaaggggcagtagccacagatactattctcaatcaacagggacaaaatgtaatatgtgtttatgtagctattggtcaaaaagcatcttctgtggctcaagtggtgaataccttacaagaaagaggagcaatggaatacactattgtagtagctgaaacagcggattctccagctacattacaatacctcgccccttatacaggagcagctctggctgaa

SEQ ID NO: 197075 - DNA, 258 bp, Glycine max
acggctgcgagaagacgacagaaggggagagtggtggagtgtgcaaaagagcgtcgtagtcgcaaccctaatcagaagaagcgcacttcaagcgagtgacagccaccagccatgggtcgtatgcacagccgcggtaagggtatatcctcttctgctttgccctacaaaaggacacctcctagctggctcaagatctcttcgcaagatgtcgaagaaaatatctgcaagtttgcgaagaaaggtttgaccccgtctcag

SEQ ID NO: 197076 - DNA, 260 bp, Glycine max
acggctgcgagaagacgacagaagggaggttcgcctgatattctttttggctgagatcaagcaaaaatgagcgtggttggatttgattttggtaatgagagctgcattgttgctgtcgcaagacaaagggggattgacgttgtgctcaacgatgagtcaaagcgtgaaacacctgcaattgtatgctttggtgacaaacagcggttccttgggacagccggggctgcttctactatgatgaacccaaagaattccatctc

SEQ ID NO: 197077 - DNA, 260 bp, Glycine max
agacgacagaaggggtgtttaggaacttcaaagcaatagctgagaaaaagaagagagttaccgatgttaatctcaaagcattggtatcagatcaagcttctcatgctgagcctatttggaagcttggtggtttgcaggtgacttgtggaactatgggttcttcaacagcaactatcaaacttgttactagtgatggtagcacacatgttgcttgtactgttggtgtaggaccagtagattcagcttacaaggctattaat

SEQ ID NO: 197078 - DNA, 260 bp, Glycine max
tacggctgcgagaagacgacagaagggggcacaagtgagtttgttgatcgagataactagaaacagtgtgatgaaaatgaaggtccttgttttcttcgttgctacaattttggtagcatggcaatgccatgcgtacgatatgttccctctccgaatgaacactggctatggtgcccgtactaggcaggtgaaatgcgcaagttggaggcttgctgtggaagcacacaacatctttggctttgagaccattcctgaagagt

SEQ ID NO: 197079 - DNA, 262 bp, Glycine max
gctgcgagaagacgacagaaggggacagcacagcactctttgcaacacaacaaaaaaagacaacacagagagaagcgtcttaataaacgctcttctctgaaaaacctgatttcttctcatcttctcttctctttcgtttcgatcttcgatctctgaaaatgagagagtgcatttcaatccacatcggtcaggccggtattcaggtcggaaacgcctgctgggagctctactgcctcgaacacggcattcagcctgatgggca

SEQ ID NO: 197080 - DNA, 259 bp, Glycine max
acgacagaaggaggagttcttgagagaaaacggcgacaacgacagccgttccgtctcgcggagtgacttccctcccaacttcatcttcggagttgccacttctgcatatcagatagaaggtgcttgtaaggagggtggtagaggtcctagcatatgggatgcctttacacacacggaaggaaaaattcttgacaaaagcaatggtgatgttgcagttaatcattatcatcggtacatggcagatattgatcttatagcc

SEQ ID NO: 197081 - DNA, 261 bp, Glycine max
tacggctgcgagaagacgacagaaggggaaaatgaagtaggcatatggcagtggttatttggcaaaactataactagcattgtactttgcaattctggaccaagcgatggatttgttggaattgctgcaccttattttgcaagaattcttccaattgatttggcaatgttcaatggggagattttgtgtcagccagatgcttttctttgctctgtcaatgatgtgaaggtcagcaacatagttgatcaaaggggacgaaat

SEQ ID NO: 197082 - DNA, 262 bp, Glycine max
ctgcgagaagacgacagaagggggcaccaacaacatgttgatgattcaaaacagaaaaaaaatgaggttttttacagtgaaagtagctctgtgctgtgtggtggttatgctactaaccctctcagatgcacagctagataactctttttacaaggacacgtgtccaagagtgcattctattgatgacgaagttgtcagaaatgtttccaaatctgatccccgcattcttgccagtctcataaggccccactttcatgattgt

SEQ ID NO: 197083 - DNA, 258 bp, Glycine max
tacggctgcgagaagacgacagaagggggcacaagtgagtttgttgatcgagataactagaaacagtgtgatgaaaatgaaggtccttgttttcttcgttgctacaattttggtagcatggcaatgccatgcgtacgatatgttccctctccgaatgaacactggctatggtgcccgtactccggaggtgaaatgcgcaagttggaggcttgctgtggaagcacacaacatctttggctttgagaccattcctgaaga

SEQ ID NO: 197084 - DNA, 260 bp, Glycine max
cgagaagacgacagaagggggggtggggtgtgcagaagagcgtcgcagttgtaaccctaatcagaagaagcgcacttcaagcgagtgacagccaccagccatgggtcgtatgcacagccgcggtaagggtatatcctcttctgctttgccctacaaaaggacacctcctagctggctcaagatctcttcgcaagatgtcgaagaaaatatctgcaagtttgcgaagaaaggtttgaccccgtctcagattggtgtcattc

SEQ ID NO: 197085 - DNA, 263 bp, Glycine max
acggctgcgagaagacgacagaaggggaacgcagccaagaaaagaaaatcctcacccattttcttcgtagccaaacactctgaaattctcagttatgtcgtggcaagcgtatgtggatgatcacctactgtgtgaaatcgaaggtaaccacctcactcacgccgctatcatcggccaagacggaagcgtttgggctcagagcaccaacttccctcagttcaaacctgaggaaataactgccatcaataatgactttaatgagc

SEQ ID NO: 197086 - DNA, 259 bp, Glycine max
atcaactgttttgttaacagacagttgatttacaattttccagaggagctctttgctgatgcaggaatattggctattgagcatgctgatttacgatggtattgagcgtctggctttggtaactggtggtgaaattgcatcaacctttgacaatcctgagtctgttaagcttgggcattgcgaccttattgaggagattatgattggcgaggataaactgattcatttttctggtgttgctatggggcaggcatgtaca

SEQ ID NO: 197087 - DNA, 257 bp, Glycine max
tgcgagaagacgacagaagggggcatacaaaacaaactttttcccgcgagtgtttggagtcccaagtcttgaaaaaactgctcatgatgattaccggaaacttgcctctgcaatctatcttcaagtgagcactattagtcaggctcttatatttgtaactcgatctcgaggttggtcttatgttgagcgtcctggtttattgctggtgtttgcttttgttgttgctcaactgattgccactttgattgcagtatatg

SEQ ID NO: 197088 - DNA, 256 bp, Glycine max
gggcagttcaattccaatatattccattctctctgtgtatttccctacctctcccttcaagatgcagatcttcgtcaagaccctcaccggcaagaccatcacccttgaggtggaaagctctgacaccatcgacaacgtcaaggccaagatccaggacaaggaaggaatccccccggaccagcaacgtctcattttcgccggaaagcaacttgaggacggccgtacccttgctgactacaacattcagaaggagagt

SEQ ID NO: 197089 - DNA, 259 bp, Glycine max
tacggctgcgagaagacgacagaaggggactacaaatcagttttttacttgaattttcttcatccttctctgttctcctagaacttgattacttgaacattccctatgacagatgaggtggttcttctggatttctggccaagtccatttgggataagggtcaggattgcacttgctgaaaagggtatcgaatatgagtacaaagaagaggacttgaggaacaagagtcctcttctcttacaaatgaacccggttcaca

SEQ ID NO: 197090 - DNA, 257 bp, Glycine max
acggctgcgagaagacgacagaagggggagtaactaaaggagagtgcaattacgtagtgtgtgggagacaaagagagatggctaagtggtgtatgttggtgttggttcttgctctagctctggctgtggccacaagtgccagagatgcacccgaagatgttggtctcaaggaccagaagaacttcatcagctatgctggagttggtggctattcaggaattggaagcaatggactaccttttggaggtgccggaata

SEQ ID NO: 197091 - DNA, 257 bp, Glycine max
acggcgcgagaagacgacagaagggggtcattggctggtcaatgtggttttctgagtatctttttctggagagaagttgggccaaggatgaaagcacattaaagtcaggcatccagcgactgagtgacttccctcttcccttttggctagctctctttgtagaaggaacgcgttttacacaggccaaactattagctgctcaggaatatgccacttccactggattgcctgttcctagaaatgttttgattccaaga

SEQ ID NO: 197092 - DNA, 259 bp, Glycine max
tacggctgcgagaagacgacagaagggggcacaagtgagtttgttgatcgagataactagaaacagtgtgatgaaaatgaaggtccttgttttcttcgttgctacaattttggtagcatggcaatgccatgcgtacgatatgttccctctccgaatgaacactggctatggtgcccgtactccggaggtgaaatgcgcaagttggaggcttgctgtggaagcacacaacatctttggctttgagaccattccagaagag

SEQ ID NO: 197093 - DNA, 259 bp, Glycine max
aaaacagatgcgagaagacgacagaaggggacagcacagcactctttgcaacacaacaaaaaaagacaacacagagagaagcgtcttaataaacgctcttctctgaaaaaaatgatttcttctcatcttctcatctcattcgtttcgatcttcgatctctgaaaatgagagagtgcatttcaatccacatagtagaagccggtattcaggtcggaaacgcatgctgggagctctactgaatcgaacacggcattcagcc

SEQ ID NO: 197094 - DNA, 256 bp, Glycine max
tacggctgcgagaagacgacagaagggatatccaaaggaacaaaaatattattaagatgatcaacattattggagcacttgttctactctttgcatttctcttcctcagttgtgtgtatgcacaagacacaacaacccttgtgcctgcaatcataacttttggtgattctgctgtggatgtagggaacaatgactatcttcccacccttttcaaggctgattaccctccttatgggagggactttgttaaccacca

SEQ ID NO: 197095 - DNA, 257 bp, Glycine max
gctgcgagaagacgacagaagggggtcacataaacaaaaaaaataaactggggagaagcatgttgttgatgttgggactatgcttcctattgttctctgcatttccacttgcgttctctgagagatgccacccacaagacaagaaagcgttgctccaactccggaaggacctcggcaacccttatcacatcatatcctggaacgcaaaggaggattgctgcgagtggttctgctgcgttaagtgtgacgagagaaca

SEQ ID NO: 197096 - DNA, 259 bp, Glycine max
acggctgcgagaagacgacagaagggtgctgagcaatataaacaacagggtgtcagctttttggtgggagatgttgagtctagtcaaggtgctttccagtattttggactgaaagaagagcaagtacctctaattatcattcaacataatgatgggaaaaagttttttaaacccaatttggaagctgatcacattccaacctggttgaaggcatacaaggatggtcatgttgcaccatttgttaagtctgaacccattc

SEQ ID NO: 197097 - DNA, 295 bp, Glycine max
tacggctgcgagaagacgacagaagggggcacaagtgagtttgttgatcgagataactagaaacagtgtgatgaaaatgaaggtccttgttttcttcgttgctacaattttggtagcatggcaatgccatgcgtacgatatgttccctctccgaatgaacactggctatggtgcccgtactccgggaggtgaatgcgcaagttggaggcttgctgtggaagcacacacatctttggctttgagaccattcctgaagagtgcgttgaagctacaaaggaatacatccatggcgaac

SEQ ID NO: 197098 - DNA, 289 bp, Glycine max
gctgcgagaagacgacagaaggggttgtggagaaatgtttgacctttggtggtccttctgagcgccaattactagtgtgtgagatgctcggcaccacagatgaaaatgagcctcttcaggcgatgatgaaagatcaatttgcaaattacgttgtacaaaaggtgctggaaacttgtgatgatacacacgcgagctgattctttaccgaattaaggttcatttgaatgcattgaaaaagtacacctatggaaagcacattgtcgcccgtgtggaagcacttgttgctgct

SEQ ID NO: 197099 - DNA, 223 bp, Glycine max
tacggctgcgagaagacgacagaagggggcacaagtgagtttgttgatcgagataactagaaacagtgtgatgaaaatgaaggtccttgttttcttcgttgctacaattttggtagcatggcaatgccatgcgtacgatatgttccctctccgaatgaacactggctatggtgcccgtactccggaggtgaaatgcgcaagttgggagcttgctgtggaagca

SEQ ID NO: 197100 - DNA, 296 bp, Glycine max
tacggctgcgagaagacgacagaagggggcacaagtgagtatgttgatcgagataactagaaacagtgtgatgaaaatgaaggtccttgttttcttcgttgctacaattttggtagcatggcaatgccatgcgtacgatatggtccctctccgaatgaacactggctatggtgcccgtactccggaagtgaaatgcgccagttggaggcttgctgtgggagcacacaacatctttgggcttgaggacaattctgaagagtgcgttgaagcaacaaaggtatacatccatggcgaac

SEQ ID NO: 197101 - DNA, 299 bp, Glycine max
tacggctgcgagaagacgacagaaggggatccaactctctaaacaacacattaacctttctcattccccatctcctcaccttattcagccactgctaatttctagggttccgaaatggacgctggcggaaagatcaagaagggcgccggaggaagaaatggcggcggccctaagaagaagccggtttcaaggtccgtcaaagccggtctcccattccccgtcggaagaattggccgttatttgaagaaaggaaggtacgcccagcgtgtcggtaccggtgctcccgtttacttggccgg

SEQ ID NO: 197102 - DNA, 294 bp, Glycine max
tgctgcgagaagacgacagaagggagagaaggtggataccatgattgtccaggctattggtttactagatgatcttgataaagagttgaatacctatgccatgagggttcgagaatggtatggttggcattttcccgagcttactaaaataatacaggacaacatcctatatgccagggcagtcaagttgatgggtgatcgtgttaatgcagctaacctggatttctctgagattttgccagaggaagttgaggcagagctgaaggaggcatctgtaatatctatgggaactga

SEQ ID NO: 197103 - DNA, 295 bp, Glycine max
tacggctgcgagaagacgacagaagggggccgctctctgagaaaaacagatagtgtgggagagagaagagcggaagagaaaatgacgaccaggttcaagaagaacaggaagaagagaggtcacgtcagcgccgggacacggccgtatcggaaagcaccgcaagcatcccggaggtcgcggtaacgccggtggcatgcatcaccaccgtatcctcttcgacaagtaccatcctggtttcttcgggaaagtaggcatgcgctacttccacaaattcgcaacaaatctacaatcgatc

SEQ ID NO: 197104 - DNA, 273 bp, Glycine max
  unsure (1)..(273): unsure at all n locations
gaccacacatttttcattaccgccgtgataacacactaacaccaccacctcatcaactttacttgacaacaatattgtaaaactcaaaatctagtttcatactttttttcttcttcttgaaatggctctccaggctgcttctcttgttcctgcttctttctcggttcttaaagagggaaagagtggtgtgtctctcaaggatccaccttgttcggtctttcatttcagaactatcaaagctaattcagctctnctgcatgaggtgcagaggga

SEQ ID NO: 197105 - DNA, 217 bp, Glycine max
ctgcgagacgacgacagaagggattcccaattgtcgtcagtagatcaaatgcgaggtatgaacatgccaaactttgctgccatggagcagactcgtatgcttgcaaacacgttgggccaaaatggtgaccccaaatttccagaatccaaattccctccaattggaaccaaagatgagcggtggtgagtgaataatgatgacatccaggttaagggga

SEQ ID NO: 197106 - DNA, 297 bp, Glycine max
  unsure (1)..(297): unsure at all n locations
tacggctgcgagaagacgacagaagggggattctgtggttgctggattccagtgcggcatcaaaagaaggtgctttggccgaagaaaacatgagagccatttgctttgaagtatgtgatgttgttctgcacgctgatgctatccacagaggangtgggtcaatcatccctactgccagagagtcttctatgcttcccagattacggccaaacccaggcttcttgagcctgcctacctggttgaaatccgggaatatgagcaagctcttggtggatctacagtgttctaaccagaaag

SEQ ID NO: 197107 - DNA, 290 bp, Glycine max
gagtacatagctgactacgttctaggagaccaatatagatcagattccaaaacagttaaccaacaagcttatttctatgctaaatccctcaaactcaccaacaaagatgtctttgtcttggacgttgacgacactactctctctaatctccagtattttgctaaccatggatttggtgtggaaccacacaatacggacggcgtttaagaactgggttcttgatggcgaggcattcgcactgccagagactcttaaaatgtacaacaaactgttggctctcggcatcaaga

SEQ ID NO: 197108 - DNA, 255 bp, Glycine max
tggatgtcatagtattatcattcattctcatctttctctcttctctctccacccaaaccctaactcccgaccctgttcccctctcgtatccgtcatgaaaggaggaaagtccaagaccgaatctaagagagccgatcccaaacttgctgtgaataagaagggagccggcaccaaggctagcatacccgccggcaaggggaaggcagcgaaagaccctaacaagctcaagaggcctccaagtgcttacttcgtttc

SEQ ID NO: 197109 - DNA, 295 bp, Glycine max
tacggctgcgagatgacgacagaaggggggttttggttgggattcaaaccaaccatccgcactgtgcatccctttcttccttcttcgtcttattattctccaaaacttccttcttactcttcttctttctgtttcgcagcctccaaacgacgttgtttctcgtcgttcagccatgtcgtacgactacctcttcaagtagatcatcatcggtgacacaggtgtagggaaatcgtgcctgctcctgcagttcagcgataagaggttccaaccggttcatgatctcatcattggtgtc

SEQ ID NO: 197110 - DNA, 281 bp, Glycine max
cttcgagccgaatcggctcgagtacggctgcgagaagacgacagaacggcatcttggtcatttacacttgacaaacctgcttcatgacaaaatgcaacaaactgcaaaagccactggaatagagggcaggatcataaatctgtcatcaattgcccataactacacttatagaaaggggattagatttataagatcaatgaacaaaaggttatggtaacaagaagcgttgggcagtcaagttagcaacatatacatacaatgagcttccgtcgctgcagaag

SEQ ID NO: 197111 - DNA, 290 bp, Glycine max
  unsure (1)..(290): unsure at all n locations
tacggctgcgagaagacgacagaaggggggttttcgttgtttacagtgttttgttgctgctggtccagttttggcttggtgaggctgagacattctcggtggatggaaagggtttggttttggacgaatccaacttcgattccgccatagcctccttcgatcacatcttggttgacttntacgctccctggtgtggcactgcaagcgtctctctcccgagttagatgcagccgcccctgtacttgcaaccttgaaggaacccataatcatagcaaaagtagatgcagaca

SEQ ID NO: 197112 - DNA, 278 bp, Glycine max
tacggctgcgagaagacgacagaaggggaacctaaaccctactcattctccatacctcaacgaagaggttaaagagacggcaacactttgctgtccgccttgaccgagcagagcttcgtcttgggcctcgattttgccctaaagtactctcagtcacaaacagacaccgtcgtcgtcgtcgtcatcaatggcaccgaagcagaccaaggctgagaagaagatcgcttacgatgcgaactgtgcgacttaatggaggagtacggccagatcctcgttgt

SEQ ID NO: 197113 - DNA, 293 bp, Glycine max
gctcgagcggctcgagtacggctgcgagaagacgacagaaggggagatagatctgcttcttgttgttggaaagaaaccctagcaagcggaacaatggcagacgttgaggtcgatgtggcggctgcagcagcagcagggcagccgaagaagagaacgttgcagaagttcagtttcaggggcgtggatctcgatgcgcttctggacatgtcaccgatgaactcgtgaagatgttcagtgctcgcgcacgtagaaggttccagagagggctcaccagaaagcccatggccttgatc

SEQ ID NO: 197114 - DNA, 262 bp, Glycine max
  unsure (1)..(262): unsure at all n locations
gacacaccatccgttctagtctcaacttctgctcttccaactcctacaacgcttttctctgcactcatgggcgaggtcaagatcggaatcaacggatttggaagaattggncgnttggttgccagagtcgtctgcaaagagacgatgttgaatcggtgccgtaacgaccctttcatancaccgattacatgacatacatgntaaatacgacagtgttcacggacactggaagcatcacgatgncaccgttaaagagagaaga

SEQ ID NO: 197115 - DNA, 258 bp, Glycine max
  unsure (1)..(258): unsure at all n locations
tacggctgcgagaagacgacagaaggggaagctattaaggccaacttcaatgacaagtacgatgaatacagaaagaagtggggtggtggaatcatgggttcgaagtcccaagccaagaccagggccaaggagaagctccttgccaaggaagcagcccaaagaatgaactagattaaatataatntacattattaaggttgtcatttttctatatcttatatgggagcatatacaagttaaaatgtgagggtttacttc

SEQ ID NO: 197116 - DNA, 288 bp, Glycine max
tgctgcgagaagacgacagaagggggcacaagtttgttgagatagctagaagcaataagatgaaaatgaaagtgcttgttttgtttgttgctacagttttggtagcatatgaatgccatggctcagactaccagaagttccctctccaaatgaaaactgggtttggtgggcaatacagcaatgaggtggcatgtgccagttggaggcttggcgtggaagcaaacaacgtagtcaagtggcaaactggtcctgcagcttgcgagagtactagctgatacgtctagagac

SEQ ID NO: 197117 - DNA, 295 bp, Glycine max
agaagacgacagaagggggcacaagtgagtttgttgatcgagataactagaaacagtgtgatgaaaatgaaggtccttgttttcttcgttgctacaattttggtagcatggcaatgccatgcgtacgatatgttccctctccgaatgaacactggctatggtgcccgtactccggaagtcgaatgcgcaagttggaggcttgctgtggaagcacacaacatctttggctttgagaccattcctgaagagtgcgttgaagcaacaaaggaatacatccatggccgacaatatagat

SEQ ID NO: 197118 - DNA, 226 bp, Glycine max
tacggctgcgagaagacgacagaaggggatccagatccaccccaacacaaatcttagccgccattgatttttcctcttccatttctcttactttctcagcctttttcgattacccatttgggtatttcggcctaatggctcttgctccatccaaagtttcaacctttcctggtttttctccaaaacccagtgtggggggtgctcagaaaaacccaacttgctctgt

SEQ ID NO: 197119 - DNA, 258 bp, Glycine max
  unsure (1)..(258): unsure at all n locations
caaggaccaagctgaagcaaacagaggtggattgcgagttcctgaagaaatgttgtgagaaactgaccgatgagaatctaaggctgaagaaggagttgcaagagctgcgtgcacaaaagcttggatcaacaccactgtacattcaatctccaaggcnacaacttgaccattgttcatcgtgcgaganactgttgaagcccaatgaagggaacaaaggagccttaacaattgcagaacatatagagttagggggtatct

SEQ ID NO: 197120 - DNA, 290 bp, Glycine max
cggctgcgagaagacgacagaagggggaagccgaacgaaacataaataaaaccttgcccttttttcacgccctagctcattttcttctccgttctcttctctctgttcctcactcactcgcatttattcaccatgactaagcaacaagctaattggtctccatacgataacaacggaggatcatgtgtttgcattgctggagcagattactgcgtcatcgccgcggatacgaggatgtccaccggttacaatatcctcactcgcgattactccagaatctcccaactggc

SEQ ID NO: 197121 - DNA, 284 bp, Glycine max
tacggctgcgagaagacgacagaagggggagcaaaaccctaatccctatttttcttcctcagtagtgtcatttacgcttctcttctctgcagcaactatgcctaaccctaaggtcttcttcgacatgaccatcggcggtcaatctgctggccgcatcgtgatggagctctacgcttacgtcactcccggaccgccgagaacttccgcgcgctttgcaccggcgagatagggcgtaggcggacggcaagcccctccactacaagggctcgtccttccaccgcgtg

SEQ ID NO: 197122 - DNA, 262 bp, Glycine max
tacggctgcgagaagacgacagaaggggctgagcaaaaccctaatccctatttttcttcctcagtagtgtcatttacgcttctcttctctgcagcaactatgcctaaccctaaggtcttcttcgacatgaccatcggcggtcaatctgctggccgcatcgtgatggagctctacgccgacgtcactccccgcaccgacgagaacttccgcgcgctttgcaccggcgagaagggcgtagggcgggacggcaagccccttccat

SEQ ID NO: 197123 - DNA, 284 bp, Glycine max
tacggctgcgagaagacgacagaaggggggacgcaaaaatggcacctgcaacactgtctctgtctctcctcctcctgttctcactcagcatcgccgtaaccgttagatcgagcgactacgactacgattgtgtgtacactgcatacgttagaaccggttcggtgttgaagggcggaacggactctaagatcgggctgaagctgtacgacaagtacggctactacatctacattaaaaacctcgaagcatggggcggcttgatgggcaagggctacgactacttc

SEQ ID NO: 197124 - DNA, 232 bp, Glycine max
taagtaagataggaattaagatagagtaaggatgaagaagaagaaagaagggggcaaaagtgagattgttgatagagataaatagaaaaagtgagatgaaaatgaaggtaattgtattattagttgataaaatattggtagaatggaaatgaactgagtacgaaatgttcaatataagaatgaaaaatggatatggtgaaagtaataaggaggtgaaatgagaaagttggag

SEQ ID NO: 197125 - DNA, 284 bp, Glycine max
tatcgagccgaatcggctcgagacggctgcgagaagacgacagaaaggggccattgttgttactattatcatccgcagctgattttattcgcaccgcaaacagtgagccatggccgtcggaaagaacaagcgcatctccaaggggaagaagggtggcaagaagaaggcagctgatccctttgccaagaaggattggtatgacattaaggctccttctgtttttcaagtgaaaaatgttggcaaaaccctcgtctctcgtactcagggtaccaagattgcttctg

SEQ ID NO: 197126 - DNA, 286 bp, Glycine max
tctagtcgacgacagaagggcttggttggatgaaaaaaggatacaaacatagacaagcatcacgtttagccgatttattagccttcagaaaggtcaaagctaggcttgggggtcgtgttcgactaataatatctggtggggcagccttgagcccagcggtggaagaattcttgcgtgtcactacttgtgcctttgtatgccaaggctatggtctgacagtaacatgtggaccaactactcttggctttcccgacgaaatgtgcatgcttggtaccgttggtgctgt

SEQ ID NO: 197127 - DNA, 284 bp, Glycine max
tatgagatgatccgcgaggccgacgtcgatggtgatggacagatcaactatgaggagttcgtcaaagtcatgatggccaagtgaggaccattcaaccataacctaaatttgaaaagcatataaagagaagagggacagtgcagataagttttgatgagaattctatttccattaggtccatcttgatttggggttattagcttttgttagttgagtgtctgtttttcatgtttgctttaactggtactacttctgctccctagttatactacttgtttgctttg

SEQ ID NO: 197128 - DNA, 285 bp, Glycine max
tacggctgcgagaagacgacagaagggcgaatcgaaagggttcgtggaagagatgaggttcgtggcgatgaggctgcacacgagggaccaggccagggatggcgagaaggaggtcaagcagcccgaggagaaagccgttaccaagtgggacccatccgtcgaagggtgcccgaaatttcttgtggacagtaagctcgtttatgacacgctggagaaaatcgttcaagaggctcctcatccttcttatgctgaattcagaaacactggattggaaaggtctgcaag

SEQ ID NO: 197129 - DNA, 282 bp, Glycine max
  unsure (1)..(282): unsure at all n locations
tacggctgcgagaagacgacagaaggggtaaaaaggtagcatccatacccttgaccgtttccattattgctgaggttgatatctacaagttagatccatgggacttaccagctaaggccactattggggagaaagaatggtatttcttcagtcctagagaccgaaagtacccaaatggtgcaaggacaaacagggcagctgcttcagggtgttggaaggccactggcactgatacgactatngtgacctcattgcaaggaggagcacaagagagcgttggtg

SEQ ID NO: 197130 - DNA, 280 bp, Glycine max
tacggctgcgagaagacgacagaagggggcgaggaagccacatagagacacaatacagagtgagttgttgctccttcgccacaactctctgccaacatgggtatctccagagattctatgcacaagaggcgtgccactggtggcaagaagaaggcctggaggaaaaagagaaagtatgagcttggtcgccagcctgctaacactaagctgtcaagcaacaagacagtcaggaggatccgtgttagaggtggaaatgtgaaatggagggcattgagattgg

SEQ ID NO: 197131 - DNA, 251 bp, Glycine max
gcagaaggtgtatgggctgtagttgatgtttccattgagataggtcacgatgctgctaatgcacagccatccattagctgtagaaggcttccttctggctgtattgtgcaggatatgccgaatggttactccaaggttacttggcttgagcattgggagtacgatgagaatgttgtccaccaactttatcgcccgttgctaagttctggtgttggattcggtgctcatagatggattgccaccctccaaag

SEQ ID NO: 197132 - DNA, 277 bp, Glycine max
tacggctgcgagaagacgacagaagggggagaagcagctgataacttcagccgtgctctcgaaatcagagtggcacattatggtgaacttgctcctgagtgtgtgcacacatattacaaatatgggtgtgcacttttatacaaggctcaggaggaagctgatcctttagctgatgtgcccaagaaggaggatggatctcaacatggctctaacaaagatggttctgtgaagggttctttgaatgctgaatcttccacagcttctatttcaaacaatg

SEQ ID NO: 197133 - DNA, 275 bp, Glycine max
tacggctgcgagaagacgacatcaagatttggcctcacagttttgaatttcgtcttagggtagctcttggatctggaggagatctgatgatgacatctcggatcaggaacactaacattgatgggaagccattttcattcacatttgctaatcatacatatttctctgtgtcagatataagtgaagtgcgggttgaaggattagagacattggattatcttgacaacttgcagaaaagggtatactttactgaacagggggatgctttaacattt

SEQ ID NO: 197134 - DNA, 280 bp, Glycine max
acgacagaagggggtaccgatcaattaacaaccatatctatctattgagaaacatgaagaaggtttcacccttggcattttccattctctttttggccttcaccatagaaccctttattggcattgctgcagcagcaccagaagcagtgattgacacctcaggacagaagctgagaacaggtgtcaagtactacattctgccagtgttcagaggcaaaggtggaggactaacagtttcaagcagtggcaacaacacatgcaccctctttgtggtgcaaga

SEQ ID NO: 197135 - DNA, 251 bp, Glycine max
gaattatccaaagtttgtatagtgtaggatttgttggtattagtgataaaaacacctcatcctattcatattgccatgacgggagaactccagataaaggttttgaaagtaatgagacattattaattcatccatgttactggattggattgaatctaaatcgtaatgcacatgctccagaggaagcagaggagataaatgacgaatatgatattaatattatttcagataattcagccattagaaataaa

SEQ ID NO: 197136 - DNA, 275 bp, Glycine max
ctcgtcgagtgaggctgcgagaagacgacagaggggggggaaaatttgtcaaataaattcatctaaccccaaacaaaaccctagcacacttttatcgcttagtggcagcagcagtggcgacaagcaactccatccgcaatgggaatcgatttgaaggcaggaggtaagtccaagaagaccaagcggaccgcccccaaatccgatgatatctacctcaagctgctcgtcaagctgtaccgttttcttgttcggaggactgggagtaacttcaatgc

SEQ ID NO: 197137 - DNA, 280 bp, Glycine max
agacgacagaagggatagcgatgatcgctacttggctgagccagcactggacaccgtgaagagaatgaagttatatgcagagtctcttgcacgctttcaaggagggtcaccttacatatatcctttgtatggtttaggagagcttccccaggcatttgcacggcttagtgctgtttatggtggaacatatatgttgaataagcctgagtgcaaggtagaatttgatgaggaaggaaaggttgttggtgttacatctgaaggggaaactgcaaagtgtaaa

SEQ ID NO: 197138 - DNA, 276 bp, Glycine max
acgacagaaggggggatttgggattgggaaggcgagggattgcgctgcgtctcttcctcttctctttcgattcatccctcattcataatcttccaatccaacaacctcagcctcacactcacacatacacacatctgaacgcgtatcgtccctcccatggcttcaaagcgcatcctcaaggagctcaaggacttgcagaaagacccaccaacttcttgcagcgctggtccagtagctgaggacatgttccattggcaagcaacgattatgggtcct

SEQ ID NO: 197139 - DNA, 276 bp, Glycine max
acggctgcgagaagacgacagagggggagcacgcgttccagatcctatggcgttaccagatcctggaccccgacagcgacatcgtggcctattggaaccgggtgttccttgttacgagcctcctcgccctcttcatcgaccctctctacttcttcctccccaccgttggcggccccgcctgcctccaggctgatcccaaactcagcatcctcgttaccatcctccgctccttcgccgacctcttctacgtcctccacatgatcatgaagtttcgca

SEQ ID NO: 197140 - DNA, 277 bp, Glycine max
tacggctgcgagaagacgacagaaggggacagcacagcactctttgcaacacaacaaaaaaagacaacacagagagaagcgtcttaataaacgctcttctctgaaaaacctgatttcttctcttcttctcttctctttcgtttcgatcttcgatctctgaaaatgagagagtgcatttcaatccacatcggtcaggccggtattcaggtcggaaacgcctgctgggagctctactgcctcgaacacggcattcagcctgatgggcagatgccaagtg

SEQ ID NO: 197141 - DNA, 276 bp, Glycine max
tatcgagccgaatcggctcgagtacggctgcgagaagacgacagaagctaaggtaaagcaaggtttagggggtagagtacgtcttcttttgtctggagccgcacctttatctgcacatgtggaaggttacttacgggtggttacttgtgctcatgtcctacaaggatatggtctgactgaaacctgtgcgggaacctttgtctcattaccaaatgaaatagaaatgcttggaacagtgggccctcctgtaccaaatggtgacgtgtgcctggaatc

SEQ ID NO: 197142 - DNA, 276 bp, Glycine max
tacgacagaaggggcacagtggtgtattttaagcacaatgacatggattctttaagagaaactttagagaacattactgccaaatataagaaggccaagaatttgaggcgttatattgttattgaagctgtctaccagaattctggggaaatagcacccttggacgaggtcattaaattgaaggaaaaatatcgctttcgtgttttgctagatgagagcaactcattgggtgtgcttggaagttctggaagaggtctcactgaatactgtggagtt

SEQ ID NO: 197143 - DNA, 280 bp, Glycine max
tacggctgcgagaagacgacagaaggggggtgtagcgcagagaaagaactagaactagggtttcatctttgccatcagtaaacgacaatgatttacgacgttaactctcctcttttccgatccttcctcagccagaagggaggctcctctgataagaggaaatcggacgaacagaagccaaaagagcagaaacccaaagccagcgagaacaaacctataatgactgagtgataacagctgagctgcattcagttgtagaatgaaaataggtggtaggtat

SEQ ID NO: 197144 - DNA, 280 bp, Glycine max
ggctgcgagaagacgacagaaggggacgattactaccaagtgaaaaagcaattaactaagcatatatagcgtgtaagacagtgagaaaaaaagtgttgtgtagagagaaatggctaggtggtgcatcttggtggttcttgcccttgtcgtggttgcaagtgccagaaatatgcccaatgacgcaggtttggaggaccagaagaacttcctcgggtatgggttctctggagttggcaacaatgggcttccctttggaggagtgggttctgggtttgatggt

SEQ ID NO: 197145 - DNA, 278 bp, Glycine max
acggctgcgagatgacgacagatggggatcgaagcaaaaaatgaaaacccaaagtgcttctctcctctgtctttttctctctcttgctatccttttggctagtggcactgctgcaagtgcaactccaagaagcgcagtgccaagccaccatgtttcaacattcaacagaagcctttttccttccacttttctctttggaattggttcttctgcttaccaggcagaaggagcagcaagtgtagatgggagaggaccaagcatatgggacacctacacta

SEQ ID NO: 197146 - DNA, 268 bp, Glycine max
tctcgcgccgaatcggctcgaggcacaagtgagtttgttgatcgagttaactagaaacagtgtgatgaaaatgaaggtcctagttttcttcgttgctacaattttggtagcatggcaatgccatgcgtacgatatgttccctctccgaatgaacactggctatggtgcccgtactccggaggtgaaatgcgcaagttggaggcttgctgtggaagcacacaacatctttggctttgcgaccattcctgaagagtgcgttgaagcaaca

SEQ ID NO: 197147 - DNA, 277 bp, Glycine max
ctgctcgagcggctcgagcggctgcgaaaagacgacagaaggggaaggaaggaagaaataaacagtatgagaacattaacctcttcttcttccactttcattccaaagcgttattccttcttcttcttcctctccattctcttcgctcttcgatcctcgtccgggggctgctccgaataccaccaccaccacgcgccgatagccacgataggaggcttacgcgactcccaaggctctcagaacagcgtccacaacgaggccctcgctcggttcgtcg

SEQ ID NO: 197148 - DNA, 227 bp, Glycine max
  unsure (1)..(227): unsure at all n locations
ggtggaagagctgattncatttaacatcattcctagcagcactggagctgccaaggctgttgggaaagtccttcctgctttgaatggaaaattgactggtatggcattccgtgttcccaccgtggatgtctctgttgttgacctcacggtgaggctggagaaggaagcctacatatgatgaaattaaaaatgctatcaaggaggaatcagagggcaattgaagggat

SEQ ID NO: 197149 - DNA, 274 bp, Glycine max
acggctgcgagaagcgacagagggagggattgtggagagtgttggagaaggtgttactaatgttcagcctggggatcatgtcattccctgttaccaggctgagtgtggggagtgcaagacttgcaaatcggggaagacaaacctctgtggcaaggttcgttccgccactggagttggggtcgtgctcaatgatggaaagagccggttctccattaatgggaagcccatttatcatttcatgggaacatccacttttagtcaatacactgttgtt

SEQ ID NO: 197150 - DNA, 276 bp, Glycine max
acggctgcgaagacgacagatggggactgcagaggtgtattttctcacttctcagcactcagcagcgatatcagttgaagaaacagaaacaaacaaaagaggcagaagatgttgtgggtggacaaatatcgtcccaaaaccctcgaccaggttatggtccacaccgacatcgctcgcaatctcaagaaattggtaacggaacaggattgcccccatttactcttctatggcccatctggctttggcaagaaaaccctaatcatggctcttctccgc

SEQ ID NO: 197151 - DNA, 276 bp, Glycine max
tacggctgcgagaagacgacagaagggtgcgattgttaacatgggttctggagctgctattgttattccttcggatcctctttatgctgtttatgctgccaccaaagcgtacatcgatcagttttcgagatgtctctatgttgaatacaagaggagtggaattgacgttcagtgtcaggttccattatatgtggcaaccaagatggcatcaatcaggaaatcttcattctttgttccatcaacagatggctatgccaaagcaggtgtgaaatggat

SEQ ID NO: 197152 - DNA, 279 bp, Glycine max
acggctgcgagaagagacagaagggggcacaagtgagtttgttgatcgagataactagaaacagtgtgatgaaaatgaaggtccttgttttcttcgttgctacaattttggtagcatggcaatgccatgcgtacgatatgttccctctccgaatgaacactggctatggtgcccgtactccggaggtgaaatgcgcaagttggaggcttgctgtggaagcacacaacatctttggctttgagaccattcctgaagagtgcgttgaagcaacaaaggaat

SEQ ID NO: 197153 - DNA, 281 bp, Glycine max
ggctgcgagaagacgacagaagggtacggctgcgagaagacgacagaaggggacaaaaatccattctcaattgagaaagcgaaacgcatagaatcgaaagaggggaaaagaaaaagaaaagttagggttagggattttgagagatggcatcgactaagaagatcaccctgaagagttcggacggtgaggccttcgaggtggaggaggcggtggcgctggagtcgcagacgatcaagcacatgatcgaggacgactgcgccgacagtggaatccctctcccc

SEQ ID NO: 197154 - DNA, 275 bp, Glycine max
tctcgagccgaatcggctcgagtacggctgcgaaagacgacagaagatggaaatgtcttgttactagctagtaaatatgcaagagcttccaaaagatatgaaaaggccgtgaagtacatagaatatgattcctcctttggtgaggaggagaaaaagcaggccaagaccttgaaggttgcctgcaatctgaacaatgctgcttgcaagttgaagttaaaagactatgctgtcgcagagaaattgtgtactaaggtgttggaccttgagagtacaaa

SEQ ID NO: 197155 - DNA, 273 bp, Glycine max
tacggctgcgagaagacgacagaagggggcatcaattcaaaatatatcatcaattataagcatgggtttgtggaacacaacgaatgcggtgtcttgccgctttcacaagtttggtgatgaccaaaagaatctggtcttccaaggtgatgccacgtcttcttccaggggcatagaactcacaaagttagacggtggaggaaaaccagtgggtggcagtgtggggagagtgttatactcttctccagtgcacctttgggaaagctctacagtggt

SEQ ID NO: 197156 - DNA, 277 bp, Glycine max
tctcgagccgcggctgcgagaagacgacagaaggggacaacgcaactattgacaatctctctatattctattcactccctccatttcttcaaactaaatttcctgagaatggcgaaggctgcggagaaaaagcctgcggccgagaaggctccggcggagaaaaagccaaaggcggagaagaaggttccaaaggaaggcagcggcggagagaagaagaagaagaggtcgaagaagagcgtggaaacgtacaagatctacatattcaaggtgctgaagc

SEQ ID NO: 197157 - DNA, 274 bp, Glycine max
cggctgcgagaagacgacagaaggggagaaatcagagggtatcacttctcctgaagaagaggtttacaacccctaattgggttaagcataaggaaccaagagaagttcatatgcttgttgatctatttcttcaagagcttgaaattatagttaacgaagtgaagcagattttgcctcaaggtagacgtaagcaccacaggactgatagtaatggcagtagtgcttcatcaaggagcaatcccttgcgggaggagaaactggttaggtcaaatac

SEQ ID NO: 197158 - DNA, 274 bp, Glycine max
tacgctgcgagaagacgacagaaggggacctcactcttattgttttcttaaaatttcttccttgccactgccagtgtgtcaccaccatggccaccgtcacaacccaagcctccgccgcgattttccggccatgtgcctcgaaatcgaggtttctgaccggctcttccggtaaactcaaccgggaagtgactatgaggccaatggggtgacctccttctgcctctttcaaggttgaagccaagaagggagagtggttaactggcttggactcccc

SEQ ID NO: 197159 - DNA, 278 bp, Glycine max
tacggctgcgagaagacgacagatggagggagaagatggaggaaattgaagcgaagatcaaagctctgagagaggagcaaacagctgcattggatagaattgaagcagaatatagggagcagttggcagggttgagaagagatgcagaaagcaaggagcagaagttggctgaacaatgggcttcaaaacacttgcgccttactaagtttctagaacaggtagggtgcagatcaaggctcactgaaccaaatggaagatagagtgacaccattcacaat

SEQ ID NO: 197160 - DNA, 281 bp, Glycine max
ctgcgagaagacgacagaagggggagataagatgaaccttgatatttcccctatatataaaaagccttagaatagagtatagaagataaagacaagagaaatggcaacagaaacaaaagtggcagtattaggtggcatcaccgaagtgcagggagctgccaacagcgtcgagatcaacaatctcgctcgctttgctgtagaggaacaaaacaaaagagagaattcagttctggagtttgtgagggtgattagtgcaaagcagcaagtggttgctggagtga

SEQ ID NO: 197161 - DNA, 271 bp, Glycine max
ctgcgagaagacgacagaagggggcacaagtgagtttgttgatcgagataactagaaacagtgtgatgaaaatgaaggtccttgttttcttcgttgctacaattttggtagcatggcaatgccatgcgtacgatatgttccctctccgaatgaacactggctatggtgcccgtactccggaggtgaaatgcgcaagttggaggcttgctgtggaagcacacaacatctttggctttgagaccattcctgaagagtgcgttgaagcaacaaa

SEQ ID NO: 197162 - DNA, 280 bp, Glycine max
acggctgtgagaagacgacagaaggggacctcaaaaaacaaaaatcaataccttagagaaaacaaaagcacagaatcgaaagaagagttcttttttgagagagattgggatggcttcgacgaagaagatcacactgaagagttcggacggcgaggccttcgaggtggacgaggcggtggcggtggagtcccagacgatcaagcacatgatcgaggacaactgcgccgacagcggaattcctctccccaatgttaccagcaagattctggccaaggttatc

SEQ ID NO: 197163 - DNA, 273 bp, Glycine max
cggctgcgagagacgacagatggggagtgttagaagctgaacccgtttcgccttcgatcaaagggaagaacaaacattcaattcatggcggctgcaaagcttcaagctttatggaatcacccagctgggcctaaaaccattcacttctgggcacctacctttaagtggggcatcagagttgccgacattgctgatttctcaaaaccacctgagaaactttcctatcctcagcaaatagcggtcacagctactggaattatctggtctcgttac

SEQ ID NO: 197164 - DNA, 269 bp, Glycine max
cggctcgagacggctgcgagaagacgacagaagggcagttacgaaaaatgcttgatcttcttgtgcatgcatctcaatgtcgttctgcccactgccaatatccaaattgtcgcaaggtgaaggggcttttccgtcatgggatgcattgcaaaatccgtgcctctggaggttgtgttctatgcaagaaaatgtggtatttgcttcaactccatgctcgtgcttgcaaggaatctgaatgccatgtaccacgttgcagagatttaaaagaa

SEQ ID NO: 197165 - DNA, 272 bp, Glycine max
cggctgcgagaagacgacagaagggggagagagggagtcagagaaaccctaggtaagaagaaaagatgccggctggtcatggtttgagatcccgcaccagagattccttctctcgtcctttcaggaagaagggaaccatcgccctcaccacatacctgagaacctaccacgtcggcgactatgttgacgtcaaggttaacggtgccgttcacaagggaatgccccacaaattctaccatggccgcaccggacgcgtctggaatgtcaccaaa

SEQ ID NO: 197166 - DNA, 247 bp, Glycine max
  unsure (1)..(247): unsure at all n locations
cacacacaaaatctgtcataaacaaaagacttgatggggtttgtgtgtgtattacctatggccgctgcagaactcatacagcttgccacggttggagaagataataagggcaacctcagcatcacagnggncagagagttcataagcctntttgagcaaaccattcntcctcnnngcnaatgtcacttgacggtttnncnggttctcantcctctncagntccncctttccnctacncatgtttnna

SEQ ID NO: 197167 - DNA, 278 bp, Glycine max
tacggctgcgagagacgacagatggggaagtcacactcatagcaaattaatcaaacatggctagggttagtgctttgtttcactctttgctcttgatttcttcccttgtattggcttctcaaatccatgtttcctctgggaaactagtccctggactatcatggaattactatttgttgacatgtcccaagcttgagaggattataaggaagcatcttgaggatgtcttcgagaaggacagtggagtagctcctggcatacttcgactcttcttccat

SEQ ID NO: 197168 - DNA, 260 bp, Glycine max
aagacgacagaagggaaagagacccggaaagggtgggaaccgcttttggaaatccattgggcttggatttaagactcccagggaagccatcgaaggaacctacattgacaagaaatgccccttcactggcaatgtttccatccgtggccgtatcttggctggtacatgtcacagtgctaagatgcccaggactattattgttaggaggaattatctccattttatcacgaagtaccatcggtacgagataaggcgctcca

SEQ ID NO: 197169 - DNA, 271 bp, Glycine max
  unsure (1)..(271): unsure at all n locations
gcgagaagacgacagaaggggattgaaagaaactgttgaatcgcgtcgattaaggttttgagatttctaggctttcatctcagacagtgaaaaaatgatagatataagtacacttaatgctgcacagattactgtgctgggatctgcctttcatgctatgctttccatgcatttcacgtcgcagttactgtctcagcatctcttttattggaagaatccgatagagcaaaaggctattatcattancatcctcatggctccaatctatgca

SEQ ID NO: 197170 - DNA, 268 bp, Glycine max
acggctgcgagaagacgacagaaggggactctcattataatagctgtttcatacctttccctgtttttgttttttcagttgcaacaaccctagtaactctctaaaagatcaaggaaggaaggaagcaagatgttgggtgttataaggctcaagagtattcgccatgccttctccgcaataagacacttgtcttctgcagctaaagagattactgtcagggaggctctgaactccgcactcgatgaggaaatgtcagctgatcctaaag

SEQ ID NO: 197171 - DNA, 270 bp, Glycine max
acggctgcgagaagacgacagaagggggtggtagtggggtaacgatacgtaataagttctatcattgaggaagtttcctgtgcatcgtctccgaaaatgaacgacgcagatgtctcaaagcaaatccagcagatggtgcagttcatccgccaggaagctgaggaaaaggccaacgagatctctgtctccgccgaagaggaattcaatatcgagaagctgcagttggtcgaagccgacaagaagaagatcaggcaagaatacgaacgcaaa

SEQ ID NO: 197172 - DNA, 272 bp, Glycine max
ctacggctgcgagaagacgacagaagggggtttgccgtggaagagagaaaccctagggtttggaagaagctgatcggagaagatggtgcagcgtctcacctaccgcaagcgccacagctatgccaccaaatccaaccagcacagagtcgtcaagactcccggtggcaagcttgtttatcagaccacgaagaagagggccagcggacccaagtgccctgtcactggaaagaggattcaagggattccacatttaaggccaacagaatataaga

SEQ ID NO: 197173 - DNA, 272 bp, Glycine max
tacggctgcgagaagacgacagaaggggaaaattctaattaaaaaaaaacaaaaataatttatattttcttaaagaacaaaatgtttgttatgcttaatatctttaatttggtctgtatttgtattcactccgtcctttattcatatagttttttctcggcgaaattgcccgaagcctacgctttcttgaatccaattgtggatattatgccagtaatacccttactcttttttcttttagcttttgtttggcaagctgctgtaagttttcg

SEQ ID NO: 197174 - DNA, 273 bp, Glycine max
tacggctgcgagaagacgacagaaggggatgcacaagtttgttgagatagctagaagcaataagatgaaaatgaaagtgcttgttttgtttgttgctacagttttggtagcatatgaatgccatggctcagactaccagaagttccctctccaaatgaaaactgggtttggtgggcaatacagcaatgaggtggcatgtgccagttggaggcttggcgtggaagcaaacaacgtagtcaagtggcaaactgttcctgcagcttgcggagagta

SEQ ID NO: 197175 - DNA, 267 bp, Glycine max
acggctgcgagagacgacagaagggggcacaagtgagtttgttgatcgagataactagaaacagtgtgatgaaaatgaaggtccttgttctcttcgttgctacaattttggtagcatggcaatgccatgcgtccgatatgttccctctccgaatgaacactggctatggtgcccgtatccggaggtgaaatgcgcaagttggaggcttgctgtggaagcacacaacatctttgcgcttgagacattcctgaagagtgtgttgaagca

SEQ ID NO: 197176 - DNA, 285 bp, Glycine max
tacgagacgacagaagggggatcgtgagagggacggtagcagagattccgtgagttgcaaaaatgaaaacaattctttctgcagagaccatgaacatcccggacggcgtgagcgtcaaggttaatgccaaggtcatcgaagttgagggcccccgcggaaaattggtgcgagacttcaagcacttgaatctcgattttcagctcatcactgacgacaacggtataaggtagctgaaggtggaggcctggttcggttctcggaaaacatccgccgccattcgcaccg

SEQ ID NO: 197177 - DNA, 128 bp, Glycine max
cacggctgcgacaagaccacagaagggatcactggtgccccccacgataacaacatcatgctgtgccaatgctgtcatatctcggtctgatgatactccatgggatcgacgcacattcaacttgacac

SEQ ID NO: 197178 - DNA, 289 bp, Glycine max
tctcgagccgaatcggctcgagtacggctgcgagaagacgacagaacggggagagtttgcagacctctacatcttcaagtggacatccttgttgatccctcccttgaccctactaatcataaacatcatcggagtcattgtcggtgtctcggatgctataaacaatggatatgattcatggggtcctttgtttgggaggctattttttgccctttgggtcattgtacacctttaccctttcctcaagggtgtcatgggaaaacaagaaggtgttcctaccatcattttg

SEQ ID NO: 197179 - DNA, 284 bp, Glycine max
aagacgacagaagggggcacaagtgagtttgttgatcgagataactagaaacagtgtgatgaaaatgaacgtccttgttttcttcgttgctacaattttggtagcatggcaatgccatgcgtacgatatgttccctctccgaatgaacactggctatggtgcccgtactccggaggtgaaatgcgcaagttggaggcttgctgtggaagcacacaacatctttggctttgagaccattcctgaagagtgcgttgaagcaacaaaggaatacatccatggcgaac

SEQ ID NO: 197180 - DNA, 288 bp, Glycine max
agaagacgacagaagggggaggtgacatgttcgtgtccattcctagtgctgatgctatttacatgaagtggattctgcatgactggagcgacgagcgctgcatcaagatcttgaagaactgcaggaaggcaataccagagaagacaggaaaagtcatatacgtggatcacgttcttcgacccgaaggcaacgaactcttcacagacgttggcatcgcattcgacatgatgcttctcgctcacaacgccggtggcaaagagaggaccgaagagaactggaagtggctgt

SEQ ID NO: 197181 - DNA, 282 bp, Glycine max
cgagaagacgacagaagggggcatcaattcaaaatatatcatcaattataagcatgggtttgtggaacacaacgaatgcagtgtcttgccgctttcacaagtttggtgatgaccaaaagaatctggtcttccaaggtgatgccacgtcttcttccaggggcatagaactcacaaagttagacggtggaggaaaaccagtgggtggcagtgtggggagagtgttatactcttctccagtgcacctttgggaaagctctacagtggtcgcaagctttgaaaccg

SEQ ID NO: 197182 - DNA, 283 bp, Glycine max
acggctgacgacagaagggggatacaatacagagtgcgttgttgctccttcgccacaactccctgccaacatgggtatctccagagattctatgcacaagaggcgtgccactggtggcaagaagaaggcctggaggaggaagagaaagtatgagcttggtcgccagcctgctaacactaagctgtcaagcaacaagacagtcaggaggatccgggttagaggtggaaatgtgaagtggagggcactgagattggatactggaaattactcctggggaagtgaa

SEQ ID NO: 197183 - DNA, 281 bp, Glycine max
tacggctgcgagaagacgacagaagggatcagcggtgccccccaggataacaacataatgctgtggaatgctgtcatatttggtcctgatgatactccatgggatggaggcacgttcaagttgactctccagtttactgaggattatccaaataaaccaccaactgtgcgatttgtgtctcgcatgtttcatccaaatatttatgctgatggaagtatttgtttggatatactacaaaatcagtggagtcctatatatgatgtggctgctatactcacatc

SEQ ID NO: 197184 - DNA, 279 bp, Glycine max
acggctgcgagaagacgacagaagaacaagttaaaaaccagcaaaaagcattagaggcaaacgaacgtgctagatctcatatgcagaccttcattgacaagttccgttataatgcgaagagggcatcacttgttcaatctagaatcaaggctttggatcgaatgggccatgtggatgaaattgttaatgatcctgactacaaatttgacttccccactccagatgatagacctggtgcaccataataagtttcagtgatgcatcattggttatctgggg

SEQ ID NO: 197185 - DNA, 288 bp, Glycine max
acggctgcgagaagacgacagaaggggatagctattcgcagttcccaaattcattttaatcctaattctgcacttcttgatcattcgatttttctcctcaagatgcagatattcgtaaaaactttgaccggcaagaccatcacccttgaggtggaatcctccgacaccattgacaacgtaaaagctaagattcaagacaaggaagggatcccacctgaccagcagagacttatctttgcgggtaaacaacttgaggatggtcgcacccttgccgattacaacatccaa

SEQ ID NO: 197186 - DNA, 293 bp, Glycine max
acgcgagaagacgacagaagggggatgcagagcagaagaagcagcgcaagcacgcacgcattctgtgtgttgtggtttctctgagttccgagtggactcagttacggagcaataatgagtcaggaatcgtttatatatagcttcgtggctcgtgggacgatggtgttggctgagtacacggagttcactggaaacttccctgccattgcagctcagtgtcttcagaagcttccatcttccaacaacaagttcacttacaactgtgacaaccacaccttcaatttcctagttga

SEQ ID NO: 197187 - DNA, 295 bp, Glycine max
tacggctgcgagagacgacagaaggggacagcagagcaaattaactacacattcctctgttttggctcccctgttaaaccaagaaacttccaatggcaccccatgcatcttcttttgctcttgttcttgtcatttttctctttgttgaaatgcacttccacggtgccactgctgactatggcggctggcagggtggtcatgctaccttctatggtggtggtgatgcttctggcacaatgggaggtgcatgtggctatgggaatttgtacagtcagggatatggaaccaacactgc

SEQ ID NO: 197188 - DNA, 287 bp, Glycine max
tctcgagccgaatcggctcgagacggctgcgagaagacgacagaaactggcacaagtgagtatgttgatcgagataactagaaacagtgtgatgaaaatgaaggtccttgttttcttcgttgctacaattttggtagcatggcaatgccatgcgtacgatatgttccctctccgaatgaacactggctatggtgcccgtactccggaggtgaaatgcgcaagttggaggcttgctgtggaagcacacaacatctttggctttgagaccattcctgaagagtgcgttg

SEQ ID NO: 197189 - DNA, 276 bp, Glycine max
cggctgcgagaagacgacagaaggggagaaatcagagggtatcacttctcctgaagaagaggtttacaacccctaattgggttaagcataaggaaccaagagatgttcatatgcttgttgatctaatgcatcaagagcttgaaattatagttaacgaagtgaagcagattttgcctcaaggtagacgtaagcaccacaggactgatagtaatggaagtagtgcttcatcaaggagcaatccctttcgggaggagaacatggttaggtcaaatactc

SEQ ID NO: 197190 - DNA, 282 bp, Glycine max
tacggctgcgagaagacgacagaaggggacaacacaacagagaaagaaaagagtaagagtatgggaggctcatggtcatggcagctcacatgtgccctcttgctactcttctccgccgtagtcaccgccactgaccacattgtgggtgcgaatcgtggctggaaccctggctttaactacactctttgggccaacaaccacactttctatgttggcgatcttatctcattcaggtaccaaaagaaccaatacaatgtgtttgaggtgaaccaaactgggtat

SEQ ID NO: 197191 - DNA, 287 bp, Glycine max
acggctgcgagaagacgacagaaggggattgtaaagcattcttcgcctttctctctcttctttttactctctctctgtctctctctacgctttctcgttcgagatccctcaagggatccactaactgaaggagaaatggggttgacattcaccaagcttttcagccggcttttcgccaagaaggaaatgcgaattctgatggtgggtctcgatgcagctggtaagaccaccatcctgtacaagctcaaacttggagagatcgttaccacaattcccaccattgggtt

SEQ ID NO: 197192 - DNA, 275 bp, Glycine max
tacggctgcgagaagacgacagaagggggcacaagtgagtttgttgatcgagataactagaaacagtgtgatgaaaatgaaggtccttgttttcttcgttgctacaattttggtagcatggcaatgccatgcgtacgatatgttccctctccgaatgaacactggctatggtgcccgtactccggaggtgaaatgcgcaagttggaggcttgctgtggaagcacacaacatctttggctttgagaccattcctgaagagtgcgttgaagcaacaa

SEQ ID NO: 197193 - DNA, 279 bp, Glycine max
tacggctgcgagaagacgacagatggggaggaaaggggaacccaaaccgaaaccctaaccctaacggagagatggcggacacttggcatcgatattcgggacggagaaggacagggtgaactgtccgttctacttcaagatcggcgcgtgcagtgtggcgaccggtgctcccggcttcacaccaagccgacaattagcccaacattggttctgtcgagcatgtaccagaggcccgacatgaactgagcattatcaccaaccccgatcaggcacaacccc

SEQ ID NO: 197194 - DNA, 280 bp, Glycine max
cggctcgagcggctcgagacggctgcgagaagacgacagaagggaaagagacccggaaagggtgggaaccgattttggaaatccattgggcttggatttaagactcccagggaagccatcgaaggaacctacattgacaagaagtgccccttcactggcaatgtttccatccgtggccgtatcttggctggaacatgtcacagtgctaagatgaacaggactattattgttaggaggaattatctccattttatcaagaagtaccagaggtacgagaaaa

SEQ ID NO: 197195 - DNA, 280 bp, Glycine max
tgcgaagacgacagaaggggataccaaaaacaaaacacaagccaagtgaaagtgagataaaataaaaatcaaagagcataatgtcagggatcattcacaagattggggagacccttcatgtgggagggcacaagaaggaggaggagcataagggtgagcaccatgctggagaatacaaaggggagcaccatggtgaacacagtagtgagtacaaaggagagcatcatggtgaacacaaagctggagagtaccatggtgagcacaagccagagcacaaaga

SEQ ID NO: 197196 - DNA, 289 bp, Glycine max
tacggctgcgagaagacgacagaagggagaattgaaggagaaatttgagggtctctgccatgtgatcaaggatgtgttgggtgacaaggtggagaaagttgtggtgtctgatcgtgttgtggattctccttgctgtctcgtgactggtgaatatgggtggacagccaacatggaaaggattatgaaagcacaggcattgagggacagcagcatggctggatacatgtcgagcaagaagaccatggagattaaccctgagaaccccatcatggatgaaccgaggaagcga

SEQ ID NO: 197197 - DNA, 268 bp, Glycine max
ctgcgagaagacgatagaagggcatcaattcaaaatatatcatcagttataagcatgggtttgtggaacacaacgaatgcagtgtcttgccgctttcacaagtttggtgatgaccaaaagaatctggtcttccaaggtgatgccacgtcttcttccaggggcatagaactcacaaagttagacggtggaggaaaaccagtgggtggcagtgtggggagagtgtaatactcttctccagtgcacttttgggaaagctctacagtggtcg

SEQ ID NO: 197198 - DNA, 277 bp, Glycine max
acggctgcggaagacgacagaaggggaggaagtcgatgagatgattcgcgaggctgacgttgatggtgatggtcagatcaactatgaggagtttgtcaaagtcatgatggccaagtgaggaccaatcaaccataacaaaaaaaaattgaaaaacacctgaacagaaaaaagacagggcagataagttttgatgagaattatattttcattaggacaatcttcatttggggtcattagtttttgttggtcggctttgtttgcttttatttattggtat

SEQ ID NO: 197199 - DNA, 280 bp, Glycine max
tacggctgcgagaagacgacagaaggggaccaaaaacaaaacacaagccaagtgaaagtgagaaaaaataaaaatcaaagagcataatgtcagggatcattcacaagattggggagacccttcatgtgggagggcacaagaaggaggaggagcataagggtgagcaccatgctggagaatacaaaggggagcaccatggtgaacacagtagtgagtacaaaggagagcatcatggtgaacacaaagctggagagtaccatggtgagcacaagccagagca

SEQ ID NO: 197200 - DNA, 279 bp, Glycine max
gctgcgagaagacgacagaagggggtcctccatttgacacattatggccacaccagcatccatcaccaatgtcactgtggagttccttcaattccccgcggtggtgacacctcctgcctctaccaaatcctatttccttggtggcgcaggggtgagagggttgaatattgaagaagaatttgtaaagttcacgggaataggtgtttatttggaagacaaggccgtgtcatcactcggtgccaaatggaagggcaaaagtgcagctgaattgctggactc

SEQ ID NO: 197201 - DNA, 286 bp, Glycine max
acggctgcgagaagacgacagaagggtgcgattgttaacatgggttctggagctgctattgttattccttcggatcctctttatgctgtttatgctgccaccaaagcgtacatcgatcagttttcgagatgtctctatgttgaatacaagaggagtggaattgacgttcagtgtcaggttccattatatgtggcaaccaagatggcatcaatcaggaaatcttcattctttgttccatcaacagatggctatgccaaagcaggtgtgaaatggataggctatgagc

SEQ ID NO: 197202 - DNA, 284 bp, Glycine max
ctgcgagaagacgacagatggggggacgtgggggttcttcacttatcttcttcaattcattctagttctggattccgactcgccgcattgactcggtccgggttggggtcgactcagttcggtttttcattctctcgcgaatctaatctataggaaaagctaagggcacatcacaatgaaggcattgattctggttggggggtttggaacaaggctgaggccactgacactcagttttcctaagcctcttgttgattttgctaacaaactatgattctgcatca

SEQ ID NO: 197203 - DNA, 291 bp, Glycine max
tacggctgcgagaagacgccagaagggggaagagaagttgatgtcaacagcagaagctcctcctccgttccaagaagcagcgcgatgcgttgtgtgcaattgcagtttcaacaccttcagaagaaggcatcactgtcgatcctgtgggagaacattgtgcaatgaacattcatcagatcaaatggctttaccacaatttggcatttactcaaatgtccgagtatgtgctgattgtttcaacaactcacggtctgggaaggatgaaccacagacttcttcagatggagtaaa

SEQ ID NO: 197204 - DNA, 277 bp, Glycine max
tacggctgcgagaagacgacagaagggggtgtcgtgtcgtgtcttcttctctaaaataaaaaaccctaacttctgaacctttcaccgcatcgccaccgattccctatctccactaatcaaagaaaagaaaatgagtagacgctcgagcagaactgtctacgctgggaatctacccggtgatatccgtgaaagagaagttgaagatttgtttctgaagtacggacacataacacacatcgacctaagagccccccgagaccacctggttatgcatttg

SEQ ID NO: 197205 - DNA, 277 bp, Glycine max
cggctcgagacggctgcgagaagacgacagaaggggaagtgaagcagattttgcctcaaggtagacgtaagcaccacaggactgatagtaatggaagtagtgcttcatcaaggagcaatcccttgcgggaggagaaactggttaggtcaaatactcaaagggcaaggagccagcttttggaaacgcatcttgcaaaattgtttaagcagaaagttgaaattttcacaaaagtagaatatacacaggagtctgttgttacaactttagttaaattggg

SEQ ID NO: 197206 - DNA, 277 bp, Glycine max
tacggctgcgagacgacagaagggatcagcggtgccccccaggataacaacataatgctgtggaatgctgtcatatttggtcctgatgatactccatgggatggaggcacgttcaagttgactctccagtttactgaggattatccaaataaaccaccaactgtgcgatttgtgtctcgcatgtttcatccaaatatttatgctgatggaagtatttgtttggatatactacaaaatcagtggagtcctatatatgatgtggctgctatactcacat

SEQ ID NO: 197207 - DNA, 283 bp, Glycine max
acggctgcgagaagacgacagaaggggacccacagggaggcgaacagagaaactcagagacccgaaggcagatttcaagatgaagttcaacattgcgaatcccaccaccggttgtcagaagaagctggagatcgatgatgacctgaagctgcgagcattttgggacaagaggatctcacaagaggttgttggtgatgctctgggtgaggaattcaaaggttatgtcttcaaaattactggaggttgcgacaagcaaggatttccaatgaagcaaggagtgttg

SEQ ID NO: 197208 - DNA, 285 bp, Glycine max
tacggctgcgagaagacgacagaagggggcatcaattcaaaatatatcatcaattataagcatgggtttgtggaacacaacgaatgcagtgtcttgccgctttcacaagtttggtgatgaccaaaagaatctggtcttccaaggtgatgccacgtcttcttccaggggcatagaactcacaaagttagacggtggaggaaaaccagtgggtggcagtgtggggagagtgttatactcttctccagtgcacctttgggaaagctctacagtggtcgcaagctttga

SEQ ID NO: 197209 - DNA, 288 bp, Glycine max
acggctgcgagaagacgacagaaggggatgggaacaatactagttgtgaaggtttctgcagagtcagcgagcgagttcggggaattagtagctgatccaaccactaatgaactattgcattacacagagaaacctgaaacttttgtaagtgatcgaataaactgcggtgtgtacatatttacacccaatatctttacagccattgagggtgtttctactcaacggaaagacagagctaatctaagacgtgtctccagctttgaagcaatgcagccagacacaaggagt

SEQ ID NO: 197210 - DNA, 276 bp, Glycine max
caccgaacaagttcatgcattgtgtaacgtgctatccgctgcaacaactcacttttggttcctgcttgatgaactatacggaaacaagtattcactatggtgcagatatgttggttactcagcatcatagatgctttacttttgacacatgctagaagaacttgtaatatcttcattaataccacttcttccgatccaggatcagtcacctcaaacctgcaactcgtgacagcatcaactaccaagtgcatggcatccccaactttaacagtgttt

SEQ ID NO: 197211 - DNA, 289 bp, Glycine max
aattcggctcgatgaagacgacagaagggggcaccaaaggtgcaaaaatattaagatgataaacattggagcacttgttgtactctttgcatttctcttcctcagttgtgcctatgcacaagacacaacaacccttgtgcctgcaatcataacttttggtgactcagccgtggatgtagggaataatgactatcttcccacccttttcaaggctgattaccctccttatgggagggactttgctaaccaccaacctactgggaggtttttgcatggcaaattagctact

SEQ ID NO: 197212 - DNA, 283 bp, Glycine max
tacggctgcgagaagacagaagggggggaaggtgagaagcgaagatgagcagcgacacaaaagccaacagcaacgttggagggggatccagatcgaggttaaatcactacctctatagcggtgacaagaaacatgtcttcgttggtttaactctcatcaccgctgtctttaccatctcatggttccttatgaacagagggaccaaacaccaatctcatcaagattacttggaaaaagctgataaagcaaggagccaaagactctcatccagttctgcttctgc

SEQ ID NO: 197213 - DNA, 261 bp, Glycine max
gggatgcaagatacaagactcagagaaccatcgcaacttcttacaatgctctcttccttggtggggccagaacactcctccaagtcatgtagacaagttttcccgaattggggttgacaatataggatttctttgagactagttggatcacatctgtgcgctatattgcaggctttccaagtgagacccccccagaagttctgctcacaggggagtctccattctcgagcttcttctaggcgcaatctgattttgtgaggg

SEQ ID NO: 197214 - DNA, 286 bp, Glycine max
tctcgagccgctcgagacggctgcgagaagacgacagaaggggacacttactagtagtaagcatggagtcctcaaagatctgtgcttacctcttcctctgcatgatctttctctcttccgccactcccattctcggttgtggctactgtggcaaaccccccaaaaagcacaagcctggtaaaacaccaaagacacccaaaacacccgttgttaagccaccagtcaccatccctcccattaatgttcctcccgttgttcttccaccaatagtgaagcccccaggtat

SEQ ID NO: 197215 - DNA, 282 bp, Glycine max
aagacgacagaagggggttcaaagcacgccgtgtttcgctgtctctcccatcctttcgcattctcaatacccttttgctttgtgaaaggaaagcaaacatggttgaacaggtccaacaccctacaatcatggacaaggatacaggaacgctccatctccgttgacggtcttgatctggtattagaggttatgatggagcctaccgcgacccagctatgtaccagagaccctcttttgggaattactcgaatgcggcattgcagtttcctgtgatgcccacat

SEQ ID NO: 197216 - DNA, 284 bp, Glycine max
cggctgcgagaagacgacagaagggtggcaagaagaaagccgctgatccctttgccaagaaggactggtacgatatcaaggccccttccgtctttcaggtcaagaatgttggcaaaaccctcgtctctcgtacccagggaaccaagattgcttctgaaggactcaaacatagagtgtttgaggtctcattggctgatctccaaggagatgaagaccatgccttcaagaagattcgtttgagagctgaggatgttcaagggaaaaatgttctgacaaacttttgg

SEQ ID NO: 197217 - DNA, 284 bp, Glycine max
acggctgcgagaagacgacagaaggggacaacatatccattttatttacaacaacaatggcttctgtgcctcaaccaaaaatctcccttctaaccttattcttcttctcgtccttcaccatcattgcgcatgcaattgttcctcaaaacgaaaccttcaaatttgagaactcaggtgaacttggaccctacatcgttgagtacggtgcagattacagaatgataagcatcttcaactctccattccaagttggtttctacaacaccaccccaaatgccttcact

SEQ ID NO: 197218 - DNA, 285 bp, Glycine max
cggctcgagacggctgcgagaagacgacagaaggggagaaagttgaggttgttgaaacagcacatgctgaggaaaagaaggggttcctcgacaagattaaggagaagctaccagggcacaagaagacagaggaggccacagctactactcctcctccaccaccacctgttgcatcattggagcatggtgaaggtgctcatcatgaaggagaggccaaggagaagaaaggtatattagaaaagataaaagagaagcttcctggttatcactccaagacagaggagg

SEQ ID NO: 197219 - DNA, 277 bp, Glycine max
acggctgcgagaagacgacagaagggggcatctgactcctatagtttcctctgctaattccatatccccgttttccttcactcttgaaccccgattcatttccaccagcacaagaagcatggctgcaatatcaataccttctcacatgaaagcttggacatactctgagtatggaaaatccaaggaagttctcaagtttaatcagagtgtggctttgcctgaggtgaaggaagaccaggtcctcatcaaggtcgctgctgcttcccttaaccccatt

SEQ ID NO: 197220 - DNA, 273 bp, Glycine max
acggctgcacgacagaaggggggatttgagatggttcaaggaccagtggagaatggtactgagggaggaaaacctgttttgaatgagaaggagaatggcaagctggaaaaagatgtgggagctgctgcggatgccatcaaatttgggacacatggagaggaatctgcaaaaaagaaagggaatgatgtttcagacgtgaatgccccgaaagatgctgctgaagattggcctgcacctaagcagattcattctttttattttgtcaggtggcgg

SEQ ID NO: 197221 - DNA, 279 bp, Glycine max
tacggctgcgagagacgacagaagggggatcaagtttatggaaaaatgattcaaaatgcttagcatggctagacaaatgggaacctaactcagtcatatatgttaattatggaagtataacggtgatgacagagcatcacttgaaagaatttgcttagggactagcaaatagcaagcaacatttcttatggataataaggccagatgtagtaatgggtgaatctatatctttgccacaagagttctttgatgcgatcaaggacaggggatatataacaa

SEQ ID NO: 197222 - DNA, 281 bp, Glycine max
ctgcgagaagacgacagaaggggacactaaacaagttaaaagaagagcatcactgaactaacaaagcaaccctatgtcgaaggtggtttgtgtcaccggagccagcggcgccatcggatcatgggtggtcctactcctcctccagcgtggttacaccgtccatgccaccgtccaagatatcaaggatgaaaatgagacgaaacatttggaggaaatggaaggagcaaagagtcatctccatttttttgaaatggatcttcttgacatcgactccattgccg

SEQ ID NO: 197223 - DNA, 280 bp, Glycine max
tacggctgcgagaagacgacagaagggggcacagcaaaacaattttcaaactcaattaccattccataacctaaatctcctctttgtttccgagtcagagagcaatggcacgtaccaagcaaaccgctcgcaagtccaccggcggaaaggcgccgaggaagcaattggcgactaaagccgctcgcaagtcagctccggccaccggcggagtgaagaagccccaccgcttcaggcccggaacggtggctctgagggagatcagaaagtaccagaagagcac

SEQ ID NO: 197224 - DNA, 280 bp, Glycine max
tagaagacgacagaaggggaagctgagaaacctgaaggatgggacaatgaacctgaggagatagatgatccagaggcaacaaaaccagaagattgggacgatgaggaggatggtgaatgggaagcccataagattgagaacccaaaatgtgtagcagcccccggttgtggtgagtggaagaggccaatgaagaggaatccagcttacaaaggaaaatggcatgccccactaattgaaaatcctgcttataagggaatttggaagcctcaggacattccaa

SEQ ID NO: 197225 - DNA, 281 bp, Glycine max
tacggctgcgagaacgacgacagaagggggcttcgaagatgggatctcagactcagcagcttcatcacctctctctttgattctcttcaaccttcagtaccactttaacaaactggtgccttttcttagttgcgctgcttttaaaaagtctgatgggttcaagattcccatctcatcagctcagtaatggcctgtatgtatcaggccgccctgaacagccaaaagaaaagactccgacaatgagttcagttgccatgccctataccggtggtgacatcaag

SEQ ID NO: 197226 - DNA, 281 bp, Glycine max
tatcgagccgaatcggctcgagtacggctgcgagaagacgacagatagggatgtaggagattacgggatgaatggcctcaaaacgctttgtcgtttgtggttattgagtcctgagtgatcttgtcatccgacctttgccatgacaggtgcgcttgcatggcaggtcaaaaaatgttaataaaaaaagttttattggtttggggagagatcgcacgggggttgcccggggtctcttcctcttgtgtggtgtggtgtttgctgtgctctccttttcgttatgc

SEQ ID NO: 197227 - DNA, 280 bp, Glycine max
tacggctgcgagagacgacagaagggggatcaagtttatggaaaaatgattcaaaatgcttagcatggctagacaaatgggaacctaactcagtcatatatgttaattatggaagtataacggtgatgacagagcatcacttgaaagaatttgcttggggactagcaaatagcaagcaacatttcttatggataataaggccagatgtagtaatgggtgaatctatatctttgccacaagagttctttgatgcgatcaaggacaggggatatataacaag

SEQ ID NO: 197228 - DNA, 282 bp, Glycine max
acggctgcgagaagacgacagaaggggacagcacagcactctttgcaacacaacaaaaaaagacaacacagagagaagcgtcttaataaacgctcttctctgaaaaacctgatttcttctcttcttctcttctctttcgtttcgatcttcgatctctgaaaatgagagagtgcatttcaatccacatcggtcaggccggtattcaggtcggaaacgcctgctgggagctctactgcctcgaacacggcattcagcctgatgggcagatgccaagtgataaga

SEQ ID NO: 197229 - DNA, 281 bp, Glycine max
acggctgcgagaagacgacagaagggaaagagacccggaaagggtgggaaccgcttttggaaatccattgggcttggatttaagactcccagggaagccatcgaaggaacctacattgacaagaagtgccccttcactggcaatgtttccatccgtggccgtatcttggctggaacatgtcacagtgctaagatgaacaggactattattgttaggaggaattatctccattttatcaagaagtaccagaggtacgagaaaaggcattccaacattcctgc

SEQ ID NO: 197230 - DNA, 277 bp, Glycine max
tctcgagccgaatcggctcgagtacggctgcgaaagacgacagaagagggaaatgtcttgtttatagctagtaaatatgcaagatgttccaaaagatatgaaaaggccgtgaagtacatagaatatgattcctcctttggtgaggaggagaaaaagcaggccaagaccttgaaggttgcctgcaatctgaacaatgctgcttgcaagttgaagttaaaagactacaaagaagcagagaaattgtgtactaaggtgttggaccttgagagtacaaatg

SEQ ID NO: 197231 - DNA, 278 bp, Glycine max
acggctgcgagaagacgacagaagggggccgctctctgagaaaaacagatagtgtgggagagagaagagcggaagagaaaatgacgaccaggttcaagaagaacaggaagaagagaggtcacgtcagcgccggacacggccgtatccggcaagcgccgcaagcatcccggaggtcgcggtaacgcacggtggcatgcatcaccaccgtatcctcttcgacaagtaccatcctggtttcttcgggaaggtaggcatgcgctacttccacaaacttcgca

SEQ ID NO: 197232 - DNA, 278 bp, Glycine max
tttcagctggtgtcaataccctgaactttttatcagcaccaattatgccaatttcaatgttttttcctgagatctgtccctcaaacccttccttcagagtcaacattgctgtgtggactgcatcatcaagctccatatcatctgtgtacctcttctcaagaaacgtctttgcattagaaacatttttccccatagcagaagctttccaagaaaaatatgaacctgatggatccacctgatataattgtggcccattatcatcaaacccggcaactagc

SEQ ID NO: 197233 - DNA, 276 bp, Glycine max
atggaagtgttggtgtacaaaattgtaatggggtggaggagaagcttgattgtttgagaaggcttattgggaagggtgatggtgaccctttgagaattgtgagtgttggagctggtgcttggggaagtgtttttgcagctttgctacaagacacttatgggcaatttagggataagatacagatcaggatatggagaagggcaggaagggcagtggatagagccactgctgaacatctctttgaggttatcaactcaagggaagatgtgttgagga

SEQ ID NO: 197234 - DNA, 281 bp, Glycine max
tacggctgcgagaagacgacagaaggggagagtggtggggtgtgcagaagagcgtcgcagttgtaaccctaatcagaagaagcgcagcttcaagcgagtgacagccaccagccatgggtcgtatgcacagccgcggtaagggtatatcctcttctgctttgccctacaaaaggacacctcctagctggctcaagatctcttcgcaagatgtcgaagaaaatgatctgcaagtttgcgaagaaaggtttgaccccgtctcagattggtgtcattctcaggga

SEQ ID NO: 197235 - DNA, 281 bp, Glycine max
ggctgcgagaagacgacagaagggatatatattttatcttatctaaaatctttctaactaaattaacatagttaaatagttagactcaaaataacacttttatatttcaagagacaaaaatagaataatttttttaaagaaacaaaaataaaatttgaaaattttaacgaaaataatatatttttctctactttttctatttaagataaaatgtacacaactgatttgatatgtaatatacaaatcaagaatgcataaaattaggaatgaaaaatgatgta

SEQ ID NO: 197236 - DNA, 278 bp, Glycine max
tacggctgcgagaagacgacagatggggattgacccgtattggacagtgatacctgtgatgcttgttcattactattcaactcaccctttggcacagtatcagtggtggaggtcgaggatcgtaacgttgttgacttgggcgtggagtgttaggctgatccacaactacttcaggcgagataagtggcagtggggtgccagggaggattggcgtttcactgatttgagccatcgctatggaaggcattggtggtgggcttctttcttcgccatctacg

SEQ ID NO: 197237 - DNA, 277 bp, Glycine max
tacggctgcgagaagacgacagaagggggcatcaattcaaaatatatcatcaattataagcatgggtttgtggaacacaacgaatgcagtgtcttgccgctttcacaagtttggtgatgaccaaaagaatctggtcttccaaggtgatgccacgtcttcttccaggggcatagaactcacaaagttagacggtggaggaaaaccagtgggtggcagtgtggggagagtgttatactcttctccagtgcacctttgggaaagctctacagtggtcgca

SEQ ID NO: 197238 - DNA, 280 bp, Glycine max
acgacagaaggggatcaacttctaccgttctacatagcatctcctttaccaccattctagatatcagagaactctgcagctctcttaggtttttaaaaaacaccacgcaaacagcaagatggccacttccgacagtaacatgctactaaattatgttccagtttatgtgatgctcccactcgtagttgtcaatgttgacaatgtttttgaagacccagatggccttaaagaacagctcttgcagcttcgagctgcgggtgttgacggggttatggttgat

SEQ ID NO: 197239 - DNA, 274 bp, Glycine max
cggctcgagaagacgacagaagggggcacaagtttgttgagatagctagaagcaataagatgaaaatgaaagtgcttgttttgtttgttgctacagttttggtagcatatgaatgccatggctcagactaccagaagttccctctccaaatgaaaactgggtttggtgggcaatacagcaatgaggtggcatgtgccagttggaggcttggcgtggaagcaaacaacgtagtcaagtggcaaactgttcctgcagcttgcggagagtacatagc

SEQ ID NO: 197240 - DNA, 279 bp, Glycine max
gcgagaagacgacagaagggatgcacaagtttgttgagatagctagaagcaataagatgaaaatgaaagtgcttgttttgtttgttgctacagttttggtagcatatgaatgccatggctcagactaccagaagttccctctccaaatgaaaactgggtttggtgggcaatacagcaatgaggtggcatgtgccagttggaggcttggcgtggaagcaaacaacgtagtcaagtggcaaactgttcctgcagcttgcggagagtacatagctgactacg

SEQ ID NO: 197241 - DNA, 279 bp, Glycine max
tatcgagccgattcggctcgagaagacgacagaaggggacagaacaactctgcaatagagatagctgcagatagagaaaaagagcgacttttgagttcaaaagatgactaacttcccattgatcaacttggagaagctcagtggtgaggtaagaaacgataccatggaaaaaattaaagatgcttgtgaaaactggggattctttgagctggtgaatcatggcattcctcatgacatattggacactgtggagaggttgaccaaagagcactacaggaa

SEQ ID NO: 197242 - DNA, 276 bp, Glycine max
agaagacgacagaagggggatgaactagtgtgacattagagaagaaccaatttaaaagaagagcagcggagtaaagaggggagaggagagaggagaagagaagctaaagatagaaaggagatgggagtggagaagcagttgttgaggtctggcaccggtccgaagccaattcccggtcagaacgtaaccgttcactgcactggtttcgggaagaacggtgacctttctcagaaattctggagcacaaaggatcctggccagaacccattcactttc

SEQ ID NO: 197243 - DNA, 277 bp, Glycine max
acggctgcgagaagacgacagaagggtccattatagtttatatgtctgaagggaggattatgcagtatagggcctttgttgtggctaattggttttgagatgagaccaaaaactttagtatctgcttttacatgttccaatttataggcttcctggatattgtcaagagaaggcagaccagggattggatttacctgccaatgattcatagacaaagaacccgccaaatttttgacttagaagctggcttattaatcctctttctccaacagaataa

SEQ ID NO: 197244 - DNA, 256 bp, Glycine max
  unsure (1)..(256): unsure at all n locations
nacggctgcggaaaacgacagaaggggatattttgcaacattttctcctcacttgtatgataacaccaaagaactacaaatagttctcattgcatagccatagatggaatttcccaacgaagcaataccagaagggtgttcacagaagaaaacgggaagggggaaaataggaatcaagcggatcgagaacacaacgaataggcaagttaccctcctgcaaaccgccgtaacgggttgctcaagtaaggcttatgaa

SEQ ID NO: 197245 - DNA, 271 bp, Glycine max
agacgacagaaggggaatggcatggttgcagttgcagagaatcatcaccaataccaagggaggtgctaatttgatctcaccgctcccacgattcttctcgaaatgttccccctatgttttgaaagttggaataccagagtttctaaacgggattgggaaaggggttgagtcccacgttcctaagcttgaatctgaaatcggtgatttccagaaacttctcgtcattcgaacccttaaactcaagaagctcggtattccttgcaaacatagg

SEQ ID NO: 197246 - DNA, 271 bp, Glycine max
acggctgcgagaagacgacagaagggggctttccttttttttaatttgaatacttcttatgcaactatagtgaggctaagagattggtccataattaatcaaaatgttggctatattccacaaagcttttgctcatccacctgaagagctcaacagccctgcatcttacaaaggttccaagaagcctaaggttcccgaggaaactctcaaagatttcctttcccaccatcctcacaacacttgctctatgagctttggtgatgctgctgtt

SEQ ID NO: 197247 - DNA, 272 bp, Glycine max
tacggctgcgagaagacgacagaagggggagaaagacacgatgcaggaagcgacgaaggtgataataatctgtgccggaacttctggtatcgccaccgccggctgcttaacgaagcaatcaataccttacataatgctcgagagagaagactgtttcgcttcgctgtggcagaaatacacctacgatcgtctccaccttcatttgaggaagcaagtttgcgagttaccgcacttaccgtttcccaagtcttaccctcactacgtgcctcgga

SEQ ID NO: 197248 - DNA, 276 bp, Glycine max
tacggctgcagaagacgacagaagggggaggaagaggaaaagaggattagagggtcgccacgtttagcaataaccaaaccctctctactcttttttcttctccttctcttcgctagggttttagcttcttcctcttcacttcgttctttcctcgcctctacaatgagcaacgacaaggacacattcaacgtcgccgatctcacttctgctctcaacgaggacaatagagcagaccttgtcaatgctcttaagagcaagatacagagtttggctgga

SEQ ID NO: 197249 - DNA, 275 bp, Glycine max
gagaagacgacagaagggggggaatttgttgatacagctataaatagatttgttctcattgcacttggtgctgctgtatctttgggagtcaatatctgcatatatccaatctgggctggtgaggatctgcatgatcttgtcacaaaaaatttcatgggtgttgcaacatctttggaaggtgttgtcaatcactaccttcattgtgttgaatataagaaggtgccatctaaaattcttacttaccaagctgctgatgacccaatttacagtggcta

SEQ ID NO: 197250 - DNA, 277 bp, Glycine max
acgaccgggagaagcaaaacgaaaatcggatatcgccgcaaaagtcgctatgccatggttaacatgatcgaacagcaacgatcaagatgacactttcaaaattcaagcgagacaactaggccaactagtatccggaatcagccgtgaaatttgatgatattaacgacaatattatatatgactgctacccttcctagatcagataaaatgtacacaactgatctcgaatgtaatatacacatcaagaatgcatagaattcggaatgaaaaatgctgt

SEQ ID NO: 197251 - DNA, 276 bp, Glycine max
acggctgcgagaagacgacagaaggggacttcaaaacactcataacacaaagcacaaagcaaagctcatccttgagttaaaaaatggcagcagcttcttccatggctctctcatccccatccttggctggcaaggccgtgaagctgggcccatcagccccagaagtgggaagggtgagcatgaggaagaccgtcaccaagcaggtctcctcaggaagcccatggtacggcccagaccgagtcaagtacttgggcccattctctggcgagcccccgt

SEQ ID NO: 197252 - DNA, 275 bp, Glycine max
gacagaaggggattttgagaatgagaaggcctctgggaaatctgtgggtgaaaaagcagcagaagatctgaggcaaagaataattggacataatattcttgttgtatcagaatactatgcaagaattacattgaagagacttgcagagcttttgtgcctcagtatacaggatgctgagaagcatctctcagatatggttgtgtctaaggcgctggtggcaaagattgataggccaatggggatagtctgtttccaaacagcaaaggatagcaatg

SEQ ID NO: 197253 - DNA, 268 bp, Glycine max
cggctgcgagaagacgacagaagggggttgtgcgtcggagctgtgtctggggaaatttgcgttgtttttcgcggtacagctcacacacactgaacggtaagtatggcggacaaggctgttacaatccgaacccgaaagttcatgaccaacaggcttctttccaggaagcagtttgtcgtcgatgttcttcatccagggagggcaaatgtttccaaggctgaacttaaggagaagctagctaggatttatgatgtgaaagacccaaata

SEQ ID NO: 197254 - DNA, 129 bp, Glycine max
tgcgagatgacgacagaagggggcaagagtttgttgtgagctatacgctagtttatcctgaggaggactatgacgttgtctggtttctatgttgctgcagtagttttggtagcatggccatgccatggc

SEQ ID NO: 197255 - DNA, 275 bp, Glycine max
tacggctgcgagaagacgacagaaggggaattgcaatcaaattagttcattctctttgcgcagttccctacctctcctttcaagatgcagatcttcgtcaagaccctcaccggaaagaccatcacccttgaggtggaaagctctgacaccatcgacaacgtcaaggccaagatccaggacaaggaaggaattcccccggatcagcaacgtctcatcttcgccggaaagcagctcgaggacggccgtaccctcgccgactacaacatccagaagga

SEQ ID NO: 197256 - DNA, 275 bp, Glycine max
ggctgcgagaagacgacagaaggggatagcatagagtgagaagtgagaagagaaaaatggcaatctccatacccagtagacaacttttcatagatggagagtggaaagtccctcttctcaatggtcggtttccgatcatcatccccgctactgaagacatcatagggcatattccagccgctactaaggaagatgttgaccttgcggtggatgctgctaaaagagccttttcccataacaaaggcaaagattggtcttcagctcctggctctgtt

SEQ ID NO: 197257 - DNA, 274 bp, Glycine max
tacggcagaagacgacagaagggggcatcaattcaaaatatatcatcaattataagcatgggtttgtggaacacaacgaatgcagtgtcttgccgctttcacaagtttggtgatgaccaaaagaatctggtcttccaaggtgatgccacgtcttcttccaggggcatagaactcccaaagttagacggtggaggaaaaccagtgggtggcagtgtggggagagtgttatactcttctccagtgcacctttgggaaagctctacagtggtcgcaa

SEQ ID NO: 197258 - DNA, 274 bp, Glycine max
gctgcgagaagacgacagaaggggaagaagaagggagcgagcttcgtgatcgattgcgcgaagcggtggaggataagattatggacattgcttctctggagaagttccttcaggagaggattaaggtcggcggcaaggccggtgcactcggcgattccattaccgtcaccagggacaagagcaagatcaccgtcacctccgacagcaacttctctaaacggtatctgaaatatttgaccaagaagtacttgaaaaagcacaatgtgagggattg

SEQ ID NO: 197259 - DNA, 294 bp, Glycine max
ctgcgagaagacgacagaagggatcagtggtgccccccaggataacaacataatgctgtggaatgctgtcatatttggtcctgatgatactccatgggatggaggcacgttcaagttgacaccccaatttactgaggactatccaaataaaccaccgactgtacgatttgtgtctcgcatgtttcatccaaatatttatgctgatggaagtatttgtttggatatattacaaaatcagtggagtcctatttatgatgtggctgctatactcacatctatccagtcattgctttg

SEQ ID NO: 197260 - DNA, 289 bp, Glycine max
tacggctgcgagaagacgacagaaggggggcgtttgggcctcagtgtttgctatgatttgagatttccagagatgtaccaattgctgcgtttccaacatgaagcacaggtactactggtgcctgcagcattcacaacagtaacaggtgaagcacgctgggagattcttcttcgtgcccgtgcaattgagacccaatgctatgtcattgctgctgcgcaagctggcaaacataatgataaaagagaaagctacggtgacacattaattatcgatccatgggggacaattg

SEQ ID NO: 197261 - DNA, 292 bp, Glycine max
gcgagaagacgacagaagggcaggtaatgagcagttcttgaatgaacttagcaaatggattttccatgaacgaggtcacctcaaggcggtgaatgtgcaacaccacaaagttggggaagctaatgaaccagccatctatcggatcaatgataatttggaatactctgttgaagtttatgagtggtctgggacagcatgggaaccttacgtagctgatgaatcctaagtgcaattttacatgatgagcccctatgtcttgaagactttatcaactgatggcaagggccgttat

SEQ ID NO: 197262 - DNA, 291 bp, Glycine max
tacggctgcgagaagacgacagaagggcaggtttaacgacagctacccaatattcgggagaaccttttcctgaacccatacgtgtttcagtaggtcttactgtaaccggtttgtctggaaatattcgtacccatatttgtccacctcggcgaacatttcgtgacattgcccgccgtcccgcttctatttgtctagatgttatccaagctggctcaagtgcttgaagagcatatcttccgaagcaaatatgattccctcgataggatattcctttcattcttcctctatgtt

SEQ ID NO: 197263 - DNA, 291 bp, Glycine max
tacggctgcgagaagacgacagaaggggaggaaaggggaacccaaaccgaaaccctaaccctaacggagagatggcggacacttggcatcgatattcgggacggagaaggacagggtgaactgtccgttctacttcaagatcggcgcgtgcaggcacggcgaccggtgctcccggcttcacaccaagccgacaattagcccaacattggttctgtcgaacatgtaccagaggcccgacatgaacatgagcattatcaccaaccccgatcagccacaaccccaatcccttga

SEQ ID NO: 197264 - DNA, 300 bp, Glycine max
tacggctgcgagaagacgacagaaggggaagaaattgaggttccagtttccaaagaaccagcaggagataataccaagatggaaactgatgaagctcctgccaatgttgctgcacctcctagcaccaatgacaatgatgttaacatgcaagatgctaattccaaggcaactgctgatgcccctgggtccgaaaatgggacccctgaggcaggagataagcctgtgcaaatggatactgataccaaggttgaggctccaaagaaaaaagttaagaaaataaacattcctgtggtggagtta

SEQ ID NO: 197265 - DNA, 287 bp, Glycine max
ctgcgagaagacgacagaagggggcagtgaacatgggggactcaacttgtctcatgcaacaaccattctgttatgcttcagggatttccaatgaagccagtgagaacaacccaattcatgcacttgagcagtcaatttcgtttgggagattcatgtcagagtccctggcatgggagaagtggtccagcttctcccacaaccgctatgtcgaagaggcagagaggtactcaagacctggttcagtggcacagaagaaggctttctttgaagctcactacaagaaactt

SEQ ID NO: 197266 - DNA, 289 bp, Glycine max
acctttgggactgtgtatcatgggaaatggcgaggaacagatgttgccattaaaagaataaagaaaatctgcttcactggtcgatcatctgagcaagagagactgactgtagaattctggcgggaagcagaaattctttccaagcttcatcatccaaatgtggtggcattttatggtgtagtgcaggatggaccaggaggaacgatggctactgttgcagagtacatggtggatggttctcttaggcatgtattacttcgcaacgataggtatcttgatcgtcgcaaga

SEQ ID NO: 197267 - DNA, 297 bp, Glycine max
gctgcgagaagacgacagaagggacataggagtgttgttgggttgctggtacttctgaaaagcccaccccaaagtcgaaacgaaagcgcagagagagcgaaacgatgtcgtacgacgatgtggagatcgaggacatggagtggaacgaggagttgcaggcgtacacgtacccgtgcccgtgcggggacctgttccagatcacgaaggaagaccttaagctcggcgaagagattgctcgatgccctagttgctctctctacatcaccgtcatctacaacctcgaagatttcctctccg

SEQ ID NO: 197268 - DNA, 299 bp, Glycine max
ataggctgcgagaagacgacagaaggggattggtgacaaagttagaaacaaggagaaagaaagaagatggcaggaaagataatcccagatgtgttgctgaattcaggacacaaaatgccagttataggcatgggaacttcagtggagaatcgtccatctaatgagacccttgcttctatctatgttgaagccattgaggtgggttaccgtcattttgacactgctgcagtgtatggaacagaggaagccataggcctagccgtggccaaagccatagacaaaggccttataaagagtag

SEQ ID NO: 197269 - DNA, 301 bp, Glycine max
tacggagaagacgacagaaggggggtccacaacgatgggttcaaatgtacgagatcttgtagcacttaccaacgaggccctatcgattagtattatacacaaaaaatccatcatagacactaatataattagatctgttcttcatagacaaacttgggatttccgatctcaggtaagatcggttcaggatcatgggatccttttctatcagataggaagggctgtttcacaaaatgtacttctaagtaattgctccatagatcctatatctatctatatgaagaagaaatcatgtgacggg

SEQ ID NO: 197270 - DNA, 287 bp, Glycine max
tacggctgcgagaagacgacagaagggggcgagagaagttattagggtttttgagtgcggcggtccaaacactcttctctgcagcttttgcctacaactcccttcaccatggctgaacaaaccgagaaagcttttctgaagcaaccaaaagtgtttctcagcacaaagaagactgggaagggaaagagacctggaaaaggtgggaaccgcttttggaagtccattgggcttggatttaagactcccagggaagccatcgaaggaacctatattgacaagaagtgccc

SEQ ID NO: 197271 - DNA, 290 bp, Glycine max
acggctgcgaagacgacagaagggggagtttagctgcagaaggtagagagagagagagatggagagcatagagcacagaacggtggaagtgaactgcataaagatgcatgttgcagagaaaggagaaggagcagtggtgttgttcttgcatggcttcccagaactctggtactcatggcgccaccagattctagctctgagctcgctcgggtaccgcgcggtggtacctgatctccgtagctacggtgacacagaagctccttcgacggtgaacagccacacgagttttc

SEQ ID NO: 197272 - DNA, 278 bp, Glycine max
  unsure (1)..(278): unsure at all n locations
tagacgacagaaggggaagggttcaatgtggtagatctgttaccggctaagaattgaattgggaaagttcaaagtttcaaagatgaataagctttagagtgatgcttttaagagnagctatctcaggaatcctggatgattcaaaggaaaagaacaggaaatttgtggagaccattgaactccaaattaggctgaaaaactatgatcctcagaaggacaagcgttttagtggctctgttaagttgcgtcacattccttgccccaagatgaagatttgt

SEQ ID NO: 197273 - DNA, 293 bp, Glycine max
acggctgcgaagacgacagaagggggagtttagctgcagaaggtagagagagagagagatggagagcatagagcacaggacggtggaagtgaacggcataaagatgcatgttgcagagaaaggagaacgagcagtggtgttgttcttgcacggcttcccagaactctggtactcatggcgccaccagattctagctctgagctccctcggttaccgtgcggtggcacctgatctccgtggctacggtgacacagaggccccttctacggtgaacagctacacgtgttttcatc

SEQ ID NO: 197274 - DNA, 294 bp, Glycine max
tacggctgagaagacgacagaagggggattcatgggatttagagagagagagaacttcaactgagggtgagagtgacacaaatctagggagcactactctaaaagttctattagattcttcaaaacatgaccatgcatcgcgagtcttgggcttttgtcttcggcgttatgggcaacatcatctcctttggagtgttccttgctccattgccaaccttttaccaaatctacaagaagaaatccactgaagggttccagtcacttccttatgttgttgcactgttcagtgcaatg

SEQ ID NO: 197275 - DNA, 298 bp, Glycine max
ttacggctgcgagaagacgacagaagggaaacttaaagaaggctggctaccacacatgggaaaaattaattctcaaggatccacaagatccttccactccaaatgcagtttcatacaaaacagcagcgagagagaaactgataaggcagggatacaaatatgttgggatcattggagaccaatggagcgatctcctcggaggccacagaggcgaaagcaggagctttaagcttcctaatcccctgtactacattcagtagttccttcacctctcgacaatctagcttgctcctatcta

SEQ ID NO: 197276 - DNA, 283 bp, Glycine max
cggctcgagtacggctgcgagaagacgacagaaggggcacaagtttgttgagatagctagaagcaataagatgaaaatgaaagtgcttgttttgtttgttgctacagttttggtagcatatgaatgccatggctcaggctaccagaagttccctctccaaatgaaaactgggtttggtgggcaattaagcaatgaggtggcatgtgccagttggaggcttggcgtggaagcaaacaacgtagtcaagtggcaaactgttcctgcagcttgcggagagtacata

SEQ ID NO: 197277 - DNA, 282 bp, Glycine max
gctgcgagaagacgacagatggggattacctggttgctaaaatgaatgatattgcaccaaatttggccactttaattggtgaagttgttggtgctcgtttgatttcccatgctggtagccccacaaatttggcaaagtgcccctcttcaactcttcaaattcttggtgcggagaaggctttgttcagggcattaaaaacaagaggaaacactcccaaatatggtttgatattccactcttcttttattggtcgggcatctgccaaaaataagggcagaatgg

SEQ ID NO: 197278 - DNA, 286 bp, Glycine max
tacggctgcgagaagacgacagaagggggttgagaggatcgtgagaggggcagtagccgagattccgtgagttgcaaaaatgaagacgattctttccaccgagaccatgaacatcccggacggcgtgagcatcaaagttcatgccaaggtcatcgaagttgagggcccccgcggaaaattggtgcgagacttcaagcatttgaatctcgattttcagctcattactgacgaaaacggtaaaagaaagctgaaaatcgacgcgtggtttggttctcggaaaacatcc

SEQ ID NO: 197279 - DNA, 279 bp, Glycine max
caccggtgacatgggagctgatttttatcatcgatacaagggtgacattcaaatagcgaaagaaattgggctggactctttcagattctctatctcatggtcaagaatattcccatagggcaatggagcagttaacccccttggggttaaattctacaacaatgtcatcgatgagatcctagcaaatggtttaaaaccttttgtcactctttttcattgggactttccacaagctcttgaagatgtgtatggatgattccgtagtcctaaagtagtggc

SEQ ID NO: 197280 - DNA, 287 bp, Glycine max
ctgcgagaagacgacagaagggggagtgagcgtagttgaggttttgcgcattcgaaaccaaattttcttccttcgttggcatctgtgatctcttctcctcacaatgagcagatcagggcaaccaccggatttgaagaagtacatggacaagaagcttcagatcaagctgaatgcaaatcgcatggttgttggtactctccgtggcttcgaccagtttatgaatttagttgttgacaacactgtggaagtgaatggcaatgagaaaaatgacatagggatggtggtaa

SEQ ID NO: 197281 - DNA, 283 bp, Glycine max
cggctcgagtacggctgcgagaagacgacagaagggggcacaagtgagtttgttgatcgagataactagaaacagtgtgatgaaaatgaaggtccttgttttcttcgttgctacaattttggtagcatggcaatgccatgcgtacgatatgttccctctccgaatggacactggctatggtgcccgtactccggaggtgaaatgcgcaagttggaggcttgctgtggaagcacacaacatctttggctttgagaccattcctgaagagtgcgttgaagcaaca

SEQ ID NO: 197282 - DNA, 292 bp, Glycine max
tacggctgcgagaagacgacagaagggggagggcgaggaagccacatagagacacaatacagagtgagttgttgctccttcgccacaactctctgccaacatgggtatctccagagattctatgcacaagaggcgtgccactggtggcaagaagaaggcctggaggaaaaagagaaagtatgagcttggtcgccagcctgctaacactaagctgtcaagcaacaagacagtcaggaggatccgtgttagaggtggaaatgtgaaatggagggcattgagattggatactgga

SEQ ID NO: 197283 - DNA, 284 bp, Glycine max
ctgcgagaagacgacagatgggggagtgagcgtagttgaggttttaccacttcgaaaccaaattttcttccttcgttggcatctgtgatctcttctcctcacaatgagcagatcagggcaaccaccggatttgaagaagtacatggacaagaagcttcagatcaagctgaatgcaaatcgcatggttgttggtactctccgtggcttcgaccagtttatgaatttagttgttgacaacactgtggaagtgaatggcaatgagaaaaatgacatagggatggtgg

SEQ ID NO: 197284 - DNA, 280 bp, Glycine max
atggctgcgaaagacgacagaagggggcacaagtgagtttgttgatcgagataactagaaacagtgtgatgaaaatgaaggtccttgttttcttcgttgctacaattttggtagcatggcaatgccatgcgtacgatatgttccctctccgaatgaacactggctatggtgcccgtactccggaggtgaaatgcgcaagttggaggcttgctgtggaagcacacaacatctttggctttgagaccattcctgaagagtgcgttgaagcaacaaaggaata

SEQ ID NO: 197285 - DNA, 281 bp, Glycine max
tacggctgacgacagaagggtacggctgcgagaagacgacagaaggggctgcgttgtgcgtcggagctgtctgtgcaaatttgcgttgttcttcgcggcacacctcactcactgaacggtaagtatggcggacaaggctgttacaatccgatcccgaaagttcatgaccaacaggcttctttccaggaagcagtttgtcgttgatgtccttcatccagggagggcaaatgtttccaaggctgaacttaaggagaagctggctaggatgtatgaagtgaaag

SEQ ID NO: 197286 - DNA, 280 bp, Glycine max
tacggctgcgagaagacgacagaagggggtcacaactcataaaggaaagctttgagatttgttggacattttagagtggtgagaggatggtgggtgttatttcgttggtaacaggaatggctggtccaagtgggtttggatcagcttcaactgcagaacaggttactgaaggagttgatgccagcaacctcactgcaattatcacaggaggagcaagtggtataggattggagacagcacgagtgttggctcttcgaaaggtccatgtcatcattgcagt

SEQ ID NO: 197287 - DNA, 283 bp, Glycine max
tgcaaagtttgtatagtgtaggatttgttggtattcgtgataaaaacacctcatcctattcattttgccatgacgggcgaactccagataaaggttttgaaagtaatgagaaattattaattcatccatgttactggcttggtttgaatctaaatcgtaatgcacttgctccagaggaagcagaggagataaatgacgaatatgatattaatattatttcagataattcagccattagaaataatacaataggtcgaataactactcatctagatcagatacc

SEQ ID NO: 197288 - DNA, 281 bp, Glycine max
tacggctgcgagaagacgacagaagggggcacaagtttgttgagatagctagaagcaataagatgaaaatgaaagtgcttgttttgtttgttgctacagttttggtagcatatgaatgccatggctcagactaccagaagttccctctccaaatgaaaactgggtttggtgggcaatacagcaatgaggtggcatgtgccagttggaggcttggcgtggaagcaaacaacgtagtcaagtggcaaactgttcctgcagcttgcggagagtacatagctgac

SEQ ID NO: 197289 - DNA, 274 bp, Glycine max
tacggctgcgagaagacgacagaagggggcatcaattcaaaatatatcatcaattataagcatgggtttgtggaacacaacgaatgcagtgtcttgccgctttcacaagtttggtgatgaccaaaagaatctggtcttccaaggtgatgccacgtcttcttccaggggcatagaactcacaaagttagacggtggatgaaaaccagtgggtggcagtgtggggagagtgttatactcttctccagtgcacctttgggaaagctctacagtggtc

SEQ ID NO: 197290 - DNA, 286 bp, Glycine max
ctcactggtccgtttcattgtaatatttgctttatggtacagaaccatggctttggccaagttgccaccaaacgcttcatcagttccagcagttttagcgtttggagattccatcgtggacccaggcaacaacaacaacataaaaacattgatcaagtgcaacttcccaccttatggaaaggattttcagggaggaaacccaacgggtcgattttgcaatggaaaaattccttctgacttaatagttgaacaattgggtattaaggagtatttgcctgcatatttg

SEQ ID NO: 197291 - DNA, 284 bp, Glycine max
tacggctgcgagaagacgacagatgggatcagcggtgccccccaggataacaacataatgctgtggaatgctgtcatatttggtcctgatgatactccatgggatggaggcacgttcaagttgactctccagtttactgaggattatccaaataaaccaccaactgtgcgatttgtgtcccgcatgtttcatccaaatatttatgctgatggaagtatttgtttggatatactacaaaatcagtggagtcctatatatgatgtggctgctatactcacatctat

SEQ ID NO: 197292 - DNA, 277 bp, Glycine max
tctcgagccgaatcggctcgagtacggctgcgagaagacgacagaagcgggggagagaatagaactgagagatggatccagacacgttggcaaaggcattcgtggagcactactacagcaccttcgacaccaacaggaacggcttagcgaatctctaccaggagggttccatgctcactttcgaagggcagaagatccaaggcgcttccaacatcgttgccaagctcacctccctcccttttcagcagtgccaccactcaatctccaccgtcgactg

SEQ ID NO: 197293 - DNA, 280 bp, Glycine max
gtaggctgcgagacgacagaagggatcagcggtgccccccaggataacaacataatgctgtggaatgctgtcatatttggtcctgatgatactccatgggatggaggcacgttcaagttgactctccagtttactgaggattatccaaataaaccaccaactgtgcgatttgtgtctcgcatgtttcatccaaatatttatgctgatggaagtatttgtttggatatactacaaaatcagtggagtcctatatatgatgtggctgctatactcacatcta

SEQ ID NO: 197294 - DNA, 284 bp, Glycine max
tacggctgcgagaagacgacagaagggggagagagagagagagaaccgacaagcaaacgaaaagtaaatcaatcaatcgttggaatctctcaacttatcgcttcttcctgatttgggggtttccgtttcaatggacgacggcgagttggatttctcgaaccatgaagtgttttcgagtccgaacatgggggagcttccgagcagcggttcaatggacagtttcttcgacgagcttctcaaggacacgcacgcgtgcacccacacccacacgtgcaaccctcccg

SEQ ID NO: 197295 - DNA, 283 bp, Glycine max
cggcgagaagacgacagaagggggtagccaaagaaaagaaaatcctcaattttctgagcagccaaacactctctctctgtctctcgaaaattctcagtttgcagagaaaatctgaatcatgtcgtggcaagcgcatgtcgacgatcaccttctgtgtgacatcgaaggtaaccacctcactcacgctgctatcatcggccaagacggcagcgtttgggctcagagtaccgacttccctcagttcaaacctgaggagataactgccatcatgaatgactttaat

SEQ ID NO: 197296 - DNA, 287 bp, Glycine max
tctcgagccgaatcggctcgaggggatttggctgagggtaagcgtctttactctctcgatgctggctcaatcatccatgcactctgcttcagccccaacaggtactggctctgcgccgccaccgagcagagcatcaagatctgggatttggagagcaagagtatcgttgaggtattgaaggttgaccccaagactgaggctgatgccacctccggtggtggtaacgccaacaagaagaaggttatttattgcacaagtttgaactggagtgcggatggaagcacttt

SEQ ID NO: 197297 - DNA, 297 bp, Glycine max
  unsure (1)..(297): unsure at all n locations
ctcgagacggctgcgagaagacgacagaagggcgatcaactggaanatattaccattttgttcggcttatgggacgtgcagcttcgcacattacactggaatgtgctttgcanactcatccanacattactattattggagaagaggttgctgccaagaagatgacactgaaggatgtcactgactacattgttaatatcatttctanaagagctgaggataattataactatggggtcattcttatccctgaaggtctaattgattttattcctgaggtccaacaccttattgcag

SEQ ID NO: 197298 - DNA, 234 bp, Glycine max
acggctgcgaagacgacagaagggggcacaagtttgttgagatagctagaagcaataagatgaaaatgaaagtgcttgttttgtttgttgctacagttttggtagcatatgaatgccatggctcagactaccagaagttccctctccaaatggaaactgggtttggtgggcaatacagcaatgaggtggcatgtgccagttggaggctttgcgttgaagcaaacaacgtagtca

SEQ ID NO: 197299 - DNA, 209 bp, Glycine max
tacggcgacagaaggggaaggtggttgtggaagaagagatggaggaagcaaagggagtagtgaagcacgtgctcctagctaagttcaaggacgacgtcactccagagaggattgaagagctcatcaaggactatgccaatctggtcaatctcatcccacccatgaagtcattccattggggcaaggatgtaagtgcctgaaacctgcat

SEQ ID NO: 197300 - DNA, 290 bp, Glycine max
acggctgcgagaagacgacagaaggggaagatgttcttattaaaattacacactgtggtgtttgcttcgccgatgtagtttggacaaggaataaacatggtgactcaaagtatcctgttgtgcctggtcacgagattgctgggattgtgacaaaggttggctccaatgtccaccgttttaaggttggtgaccatgttggagtggggacttatgtcaactcatgtaaggattgtgaacattgtaatgacagagaagaagttcattgtaccaagggatctgttttcactttt

SEQ ID NO: 197301 - DNA, 186 bp, Glycine max
tacggctgcgagaagacgacagaaggggaagccggatataaatttaatgaggaaaagttgttggagtataatcatatgagtttcggagggccgcctgttactgttggatcggacgaagaagcaaatgagctactgcggcacattgaagaagagtctgcccattgaagcagagtccttacagctcct

SEQ ID NO: 197302 - DNA, 192 bp, Glycine max
cggctgcgagaagacgacagaaggggcatgaggaagaccgtcaccaagcaggcctcctccggaagcccatggtacggcccagaccgcgtcaagtacttgggcccattctctggcgagcccccgtactacctcactggcgagttcccaggtgactacggctgggacactgctgggctttagggcgacccagaa

SEQ ID NO: 197303 - DNA, 282 bp, Glycine max
cgagaagacgacagatggggagtacaaggctgctactggggctttcacgcctgaccgtgttgctgtgtattgcaagtgcgagatgccttataacccagatgacctcatggtgcagtgtgaggggtgcaaggattggtaaagccagtgtattctgctttctttgtttactgttattacatttgtgagtggtttttggatgtccgggtctccaattttagcattagatgcgttgtttgctcggatgaaggaattctctggatatttcagctcctgcagagccag

SEQ ID NO: 197304 - DNA, 166 bp, Glycine max
tacggctgcgagaagacgacagaagggtgagatagcaaggaaatatgctatagtaatagaacttgatgaggccgtgagtctcaaggatgaaacagttgttcttcagtttgaaactcggcttcagaatggccttgagtgtggtggtgcatatctaaaatatctccga

SEQ ID NO: 197305 - DNA, 292 bp, Glycine max
cggctcgagtacggctgcgagaagttgacagaaggggccgtggcatatcgacaaatgtcattattgttacgccgaccatcaggccgtgaggctttcccaggcgatgttttctatttacattcccgtctcttagaaagagccgctaaacgatcggaccagacaggtgcaggtagcttgaccgccttacccgtcattgaaacacaagcgggagacgtatcggcctatattccaactaatgtgatctccattactgatggacaaatatgtttggaaacagagctcttttatcgcg

SEQ ID NO: 197306 - DNA, 260 bp, Glycine max
tacggctgcgagaagacgacagaagggggcacaagtgagtttgttgatcgagataactagaaacagtgtgatgaaaatgaaggtccttgttttcttcgttgctacaattttggtagcatggcaatgccatgcgtacgatatgttccctctccgaatgaacactggctaaggtgcccgtactccggaagtgaaattgccggcatttgaaggcctgccgtggaagcacacaacatctttggctttgagaccattcctgaaga

SEQ ID NO: 197307 - DNA, 227 bp, Glycine max
actcgaccgaatcggctcgagtacggctgcgagaagacgacagctggggaagcaacatagttaaccattctcttcactttaaagttacatagtttttcattgttttacttaatctacaatggctgcttcaacaatgactctctcctcatcatcattggctggccaagctatcaagcttgccccctccaaccctgagctttgtggttgaaagggtaacatgagggaaa

SEQ ID NO: 197308 - DNA, 283 bp, Glycine max
ctcgaccgattcggctcgagatgagcctgcagcttcgacatagtatcctacgcgctcacgtacaagtccacaatcacgcgtgtgatctccaagggcaggctctacaatctcaaaggtgtcaccgtcaaaatcctgctcctgtggctcaacatcgtcgaggtctctcgtcagggcaacgatatttacctctccgtcggcatcgcttccgctgatttcggcgtcgagaacttcctcgagagcccccaatgtggttgtggcttcgattgcaaaacgctccccttaa

SEQ ID NO: 197309 - DNA, 284 bp, Glycine max
gacagaagggggcaaagtttgttgagatagctagaagcaataagatgaaaatgaaagtgcctgttttgtttgttgctacagttttggtagccatatgaatgccatggctcagactaccagaagttccctctccaaatgaaaactgggtttggtgggcaatacagcaatgaggtggcatgtgccagttggaggcttggcgtggaagcaaacaacgtagtcaagtggcaaactgttcctgcagcttgcggagagtacatagctgactacgttctaggagaccaata

SEQ ID NO: 197310 - DNA, 291 bp, Glycine max
cggctgcgagaagacgacagaaggggaataataatagcaataacaatagcaacgagaaaaaattaacgagggaggggagaagagaaagaaggaaggagacatttataaaaagctctttcccttcccctaaatccctcacactcattccatttttacctttctctctcgctcgcaaacgcaaattataaaaaacaaggttttagccatggcatcgaagcggatcttgaaggaactcaaggatctccaaaaggatcctcctacctcatgcagcgccggtcctgttgctgaaga

SEQ ID NO: 197311 - DNA, 250 bp, Glycine max
atggctgcgagatgacgacagaagggggccattgttgttgctattatcatccgcagctgcttttattcgcaccgcaaacagtgagccatggccgtcggaaagaacaagcgcatctccaaggggaagaatggtggcaagaagaaggcagctgatccctttgccaagaaggattggtatgacattaagggctccttcctgttttccaagtgaaaatgtttggcaaaaccctcgtctctggtattcagggtac

SEQ ID NO: 197312 - DNA, 283 bp, Glycine max
tacggctgcgagaagacgacagaagggggagaacaaaacaagtgtttcgaatagattatcctaagtctttgggaatagtgctgcaatggcttcaagtcaggaggaggtgacccttttgggagctactggaagcccatttgtgtgcagggttcatattgccctcaagttgaagggagttcaatacaaatatgtcgaagaaaatttgaggaacaagagtgaactggttctcgaattccaccccgttcacaagaaggttccagtggttattcacaatgagaagccc

SEQ ID NO: 197313 - DNA, 190 bp, Glycine max
ctgctcgagctcgaccgaatcggctcgacggctcgagacggctgcgagaagctgacagatacgcaagctagggtacagcacaggtgttggattgggtgctgagattattggaaccttcgttttggtctacactgtcttctctgcaactgaccccaagaggaatgctagagattctcatgtgccggttttt

SEQ ID NO: 197314 - DNA, 288 bp, Glycine max
  unsure (1)..(288): unsure at all n locations
gagctgctcgactcgaccgaatcggctcgacggctcgagacggctgcgagaagacgacagatagtcanaccanggtacagcacaggtgttggattaggtgctgagattattggaaccttcgttttggtctacactgtcttctctgcaactgaccccaagaggaatgctagagattctcatgtgccggttttggcaccacttccaattggctttgctgtgttcatggttcacttggcaaccatcccagtaacaggcactggcattaaccctgctaggagcctaggagct

SEQ ID NO: 197315 - DNA, 271 bp, Glycine max
tacggctgcgagaagacgacagaaggggagtgaagaaaatgaaagtccttgttttctttgttgctatagttctagcagcatggcattgccatggctcagaccatgaccatgaccatggccacacctaccaaattttccctctgagaattgaaactggccatggtgggcactacaattcggaaggaaccagccaaaatttggaggcttgttttggaaccacacacggtaattgcctggaaaacggttcctcaagattccgagggatatattg

SEQ ID NO: 197316 - DNA, 188 bp, Glycine max
tacggctgcgagaagacgacagaaggggagtgaagataatgaaagtccttgttttctttgttgctatagttctagcagcatggcattgccatggctcagaccatgaccatgaccatggccacacctaccaaattttccctctgagtatcgaaactaggcatggtggccactacattccggaagtatca

SEQ ID NO: 197317 - DNA, 169 bp, Glycine max
cggctgcgagaagacaacagaagggtcactccaatggacatgcaatggcatggaagttgttgagagcaggttactactggatgtcgatggagacagattgttgcaaacacgcaaggtaatgccacaaatgccagatttatgctgacagaaatcatgtaccaccaactac

SEQ ID NO: 197318 - DNA, 286 bp, Glycine max
ctcgagccgcggctgcgaaagacgacagaaggggaccgtaatccttacgctctctcactcacaaacgcacactgaattcaaaaacatcgaaagagagaggcatggccgagcaaaccttcatcatgatcaagccagatggcgttcaaagaggccttattggcgagattattagcagatttgagaggaagggtttttacttgaaagggttgaaactcgttactgtggaccgtccttttgctgagaagcaccatgctgatttgtctgcaaagcctttccttagtgggtt

SEQ ID NO: 197319 - DNA, 162 bp, Glycine max
tctgtattcggctcgagcggctgcgagattacaacagatgggtcactccaatggtcatgcaatggcaaggaagttgttgagagcaggttactactggatgtcgatggagacagattgttgcaaacacgcaaggtaatgccacaaattccagatttatgctga

SEQ ID NO: 197320 - DNA, 232 bp, Glycine max
tacggctgcgagaagacgacagaaggggatctctttcaaacttcagatctatttcttcatcggttgttcaagtaaatggccttcgtcaccactgctgaagtgtgtgatgcgaacccccagttaattttgagtggggagcttcgtgcccttcagccagtttttcagatttacggtcgtcgacaggtcttctctggacctatagttaccttgaaggtgtttgaagacaatgttt

SEQ ID NO: 197321 - DNA, 155 bp, Glycine max
tatgacgacagaagggtactacttttattcctgtttcaaaaatggctaattttgtatctaattgtataaaggcaggcgcagatctatgaatgggagatgttgtgcgagtatctacaggacctaaatcatcaatgggctctccaagcacgttgaaa

SEQ ID NO: 197322 - DNA, 284 bp, Glycine max
tacggctgcgagaagacgacagaagggggccggaaaacatgaagcttaagcagttggaaggtctcctcggtggtcttcaacagttccctcaacccaaggtcgagcttgaacagtacccaacaggaccccttatagcttctcgaatgcttttcactgcagagaattcttttgaggatgtgagcgacaaagtagtggctgactttggatgcggttgtggtacgttaggtgttgcagctgcactgttgagtgcagaacatgttcttggcattgacattgatccagaa

SEQ ID NO: 197323 - DNA, 149 bp, Glycine max
atggctgcgagatgacgacagaagggggcacaagtgagtttgttgatcgagataactagaaacagtgtgatgaaaatgaaggtccttgttttcttcgttgctacaattttggtagcatggcaatgccatgcgtacgatatgttccctct

SEQ ID NO: 197324 - DNA, 252 bp, Glycine max
tacggctgcgagtagacgacagaagggcgatcaactaaagaaatatgtgctatctgagctcaagttgacagctgagagaaataagctgaggggatttgaacatatcaagggggtcatattagaaccgcaagaatttgacatggaaagagatttggtgactgcaacactaaagaatgtaagataccaactactcaagtattatcaggtgggaatagatgaactatacccaagttttgacagggaaaaagcata

SEQ ID NO: 197325 - DNA, 142 bp, Glycine max
acggctgcgagaagacgacagaagggggcacaagtgagtttgttgatcgagataactagaaacagtgtgatgaaaatgaaggtccttgttttcttcgttgctacaattttggtagcatggcaatgccatgcgtacgatatgt

SEQ ID NO: 197326 - DNA, 215 bp, Glycine max
tacggctgcgagtagacgacagaagggaagccagctggattcaaacaagaaagcaatgtcgatccagtgcaaggtgtgcatgcaaacatttatgtgcaccacatcggaagtgaagtgtagggagcatgctgaagccaaacaccctaaatctgatgtttaatgctgttttcctcatctcaaaaagtgaacattttggagagtgccaattggagaaa

SEQ ID NO: 197327 - DNA, 214 bp, Glycine max
tacggctgcgagaagacgacagaagggcttggcgaacaatatagatcagactccaaaatagttaaccaacaagcttatttctatgctaaaaccctcaatatcactgccaaaaccgcatgggtgttcgacatagatgagactacactctctaatctcccttactatgctgaccatgggattggggtggagttatataaatgaacatcgtttaata

SEQ ID NO: 197328 - DNA, 173 bp, Glycine max
tagaagacgacagaaggggagagaaagagagagatagatgtcgaagcgtggtcgtggtggttcggcggggaacaagttccgcatgtcgctgtgtcttccagtggcggcgacggtgaactgcgccgacaacacgggggcgaagaactctacatcattcggtgaaagggtcaaag

SEQ ID NO: 197329 - DNA, 286 bp, Glycine max
tacggctgcagaagacgacagaagggggtctctcaatcacttcacgcacactgtcacaggtgtagcggcgaaactgaggtcgtagaaagaatggcgaaaacgacgtcgttgttgctctttacactgctcctcttcggaaccttagctctcatccaggcgaagaaatcgaaggaggatttgaaggaagtgacccacaaggtttactttgatgttgagattaatggaaaagaagcaggtcgtattgtgatgggtctttttggaaaggctgttccaaaaactgcagaaa

SEQ ID NO: 197330 - DNA, 286 bp, Glycine max
tacggctgcgagaaggacagaagggggaagctggaaaagttagaagtagtgaagaaaatgaaagtcattgttttcttcgttgctataataattttaggtgcagaatggcaatgcaatgggtcagagcatgagcatgagcatggccacagctaccaaattttccctttgcgaatgaaaaccggccccggtggccactacattccggaggtatcgtgcaaaagttggaggcttggtgtggaagcacacaacgtcattgactggagaaccatcctcaagattgcgaggg

SEQ ID NO: 197331 - DNA, 288 bp, Glycine max
cggctcgagtacggctgcgagaagacgacagaaggggactcatccttcattaccaaacatatctcatttgaatacattccttgtagtttatactgaaagatgggtttgaagatggcgttactgatcctaggcctttccctacatgctccttttggtctcctctgaggtggcatccacgaatacaaaagaggaggcaaatggagtggatgatgccaaatatcccggtggaagctatggagggggttacccaggtcatggcggtggcggttatcctggccatggcggtgg

SEQ ID NO: 197332 - DNA, 285 bp, Glycine max
ttacggctgcgagaagacgacagaaggggagcgaagaagatataagggtttttgagtgcggtgcggcgatcctagcactctcttctgcagctttcgccgacagcttcattcaccatggctgagcaaaccgagaaggcttttttgaaacaaccaaaagtgtttctcagctcggagaaaactgggaagggaaagagacccggaaagggtgggaaccgcttttaggaaatccattgggcttggatttaagactcccagggaagccatcgaaggaacctactattgaca

SEQ ID NO: 197333 - DNA, 284 bp, Glycine max
tacggctgcgagagacgacagaagggggtggtagtggggtaacgatacgtaataagttctatcattgaggaagtttcctgtgcatcgtctccgaaaatgaacgacgcagatgtctcaaagcaaatccagcagatggtgcagttcatccgccaggaagctgaggaaaaggccagcgagatctctgtctccgccgaagaggaattcaatatcgagaagctgcagttggtcgaagccgacaagaagaagatcaggcaagaatacgaacgcaaagagcgccaagttga

SEQ ID NO: 197334 - DNA, 288 bp, Glycine max
acggttgcgagatgacgacagaagggggagggcgaggaagccacatagagacacaatacagagtgagttgttgctccttcgccacaactctctgccaacatgggtatctccagagattctatgcacaagaggcgtgccactggtggcaagaagaaggcctggaggaaaaagagaaagtatgagcgtggtcgccagcctgctaacactaagctgtcaagcaacaagacagtcaggaggatccgtgttagaggtggaaatgtgaaatggagggcattgagattggatact

SEQ ID NO: 197335 - DNA, 287 bp, Glycine max
ctcgagcgaatcggctcgagacggctgcgagaagacgacagactggggccaaaggaaactgctaaagagaagaaaaggcaaagcaagggaccaaccaaaacacacacagagaaacatgtcttccccaagcaagcgccgagagatggacttgatgaaactgatgatgagtgattacaaggtggagatgattaatgatggaatgcaagaattttatgtgcaatttcatggacccaatgacagtccttatcatggtggtgtgtggaaagtaagagttgagttaccggatg

SEQ ID NO: 197336 - DNA, 289 bp, Glycine max
tgacgacagaaggggagggtttcagtggtgttagatctgtacccgcctagccattgatttggaaaagtccaagcttcaaagatgagtaagcttcagagtgatgctcttagagaagctatctcaggaatcatgactgattccaaggaaaagaacaggaaatttgtggagaccattgaactccaaattgggctgaaaaactatgatccccagaaggacaagcgttttagtggctctgttaagttgcctcacattcctcgccccaagatgaagattgtatgcttggagatgc

SEQ ID NO: 197337 - DNA, 286 bp, Glycine max
acggctgcgagaagacgacagaaggggggtgttgtgttaatctcattcacacattcacagttatactctctctctctttgtcgcttggatcactgatctcatctcaattttcagatatgtcgacatctgataagccagaagtggtggaaaggggtagcaaggatgaaaaacacaaggaagatgatcaagaggaggggaagggtggattcattgagaaggtgaaggatttcattcatgacattggtgagaagattgccgaagctattgggtttgggaagccaactgc

SEQ ID NO: 197338 - DNA, 286 bp, Glycine max
tacggctgcgagaagacgacagaaggggctatcgagtatgctaaaaagcataatatacctgttcctgtgacaaagaaatccatttatagcagggataggaatctttggcacctaagccatgagggtgatattttggaagacccagctaatgagcctaaaaaggacatgtacatgatgtctgtagacgctgaggatgctcctgatgaagcagaatatgtggaaattgagatagagtctggccttcctgtttcagtcaatgggaagaggctttcgccagcaactttac

SEQ ID NO: 197339 - DNA, 283 bp, Glycine max
cggctgcgagatgacgacagatggggatcgaagcataaaatgaaaacccaaagtgcttctctcctctgtctttatctctctcttgctatccttttggctagttgcactgctgcaagtgcaactccaagaagcgcagtgccaagccaccatgtgtcaacattcaacagaagcctttttccttccacttttctctttggagttggttcttctgcttaccaggcagaaggagcagcaagtgtagatgggagaggaccaagcatatgggacacctacactagacagc

SEQ ID NO: 197340 - DNA, 282 bp, Glycine max
tacggctgcgagaagacgacagatggggattttggtgatcttgtgaattgatctgcgatgtcggacgaggtagttctgttggatacatgggctagcatgtatggtatgagggctaggattgcattggctgaaaagggtgttaggtatgaatacaaggaagagaatctcatgaacaggagtcctttgcttttgcagatgaacccaattcacaagaagattcctgttttgatcgctaatggcaaacccatttgtgagtctgcggtgcgtatgcagtacattgat

SEQ ID NO: 197341 - DNA, 286 bp, Glycine max
tacggctgcgagaagacgacagaaggggaccacttcaaaacactcataacacaaagcacaaagcaaagctcatccttgagttaaaaaatggcagcagcttcttccatggctctctcatccccatccttggctggcaaggccgtgaagctgggcccatcagccccagaagtgggaagggtgagcatgaggaagaccgtcaccaagcaggtctcctcaggaagcccatggtacggcccagaccgagtcaagtacttgggcccattctctggcgagccccgtcctacct

SEQ ID NO: 197342 - DNA, 289 bp, Glycine max
tacggctgcgagaagacgacagaaggggagactggggttgtgaagcctggtatggtggtgacttttggtcccactgggctgacaactgaggttaagtctgttgagatgcaccatgaggctctcacagaggctcttccaggtgacaatgttggatttaatgtgaagaatgttgcagtcaaggatctcaagcgtggttttgttgcatccaactccaaggacgaccctgccaaggaagctgccaacttcacatcccaagtcattatcatgaaccatcctggccagattggta

SEQ ID NO: 197343 - DNA, 287 bp, Glycine max
agacgacagaagggggatatccattttatttacaacaacaatggcttctgtgcctcaaccaaaaatctcccttctaaccttattcttcttctcgtccttcaccatcattgcgcatgcaattgttcctcaaaacgaaaccttcaaatttgagaactcaggtgaacttggaccctacatcgttgagtacggtgcagattacagaatgataagcatcttcaactctccattccaagttggtttctacaacggccacccaaatgccttcactctagctttgcgtgtagggc

SEQ ID NO: 197344 - DNA, 283 bp, Glycine max
tctgcgagatgacgacagatgggggcgcacccagagaggaggaagctttgagagagagagagggaggagggagagtgttgacgctccatcaagatgggtatttctagggattccatgcacaagaggcgtgccactggtggcaagaagaaggcatggagaaagaagagaaagtatgagcgtgggcgtcaggccgcaaacaccaagttatcacgcaacagaactatccggaggattcgtgatcgaggtggcatgttaaatggaaggcttgaggttggataccggc

SEQ ID NO: 197345 - DNA, 280 bp, Glycine max
cttcccagctagtggagtttttgaagtggagccaaggaaatgccctggattcatatatagatgttccatctctttgggtcaaaccaatatgaatccttctgaatttcgtacatttattgaaaacatggcttctgagtatcatggagatacctatcaccttataactaagaactgcaatcattttacagatgatctctcttatagattgactgggaaacaaatcccaggttgggtgaatcggcttgctaagctaggtgctttgtgcagctgtctacttcct

SEQ ID NO: 197346 - DNA, 285 bp, Glycine max
tacggctggagatgacgacagaagggaaagagacccggaaagggtgggaaccgcttttggaaatccattgggcttggatttaagactcccagggaagccatcgaaggaacctacattgacaggaagtgccccttcactggcaatgtttccatccgtggccgtatcttggctggaacatgtcacagtgctaagatgaacaggactattattgttaggaggaattatctccattttatcaagaagtaccagaggtacgagaaaaggcataccaacattcctgctcat

SEQ ID NO: 197347 - DNA, 263 bp, Glycine max
acggctgcgagaagacgacagatgggacatggaagtctaagctcaaagctcagtttcctagtctcaatgagtactctccgattctgggtgacttctctactgcgactggaattgccacattcacaatgatccttgtcagccagtttatatgtgacaactattgataggcagttgttgccataatcacccctacggtcctgcttttgacacgagctgggttcttccctcttcatattgcatgggggtccgcttgcacctggtct

SEQ ID NO: 197348 - DNA, 256 bp, Glycine max
acggctgcgagaagacgacagaagggcactggtagggctcctaattctaagaggctgaatttagaagctgttggtgttgagcttgactacactggagcaataaaggtggatgagtattcctgcacaagcatacctagcatatgggctgtgggtgatgtcacaaaccgaatgaatcttactccggtggccttgatggaagcaacgtactttgctaaaactgtatttggtgggcaaaaaatcaagccagactaccata

SEQ ID NO: 197349 - DNA, 282 bp, Glycine max
gagaagacgacagaaggggatcgcaaaatcagaacccaactaaccaaaccagctatggcggcgatgcagaggccactcaagagaaccattgcaatcgccaagctacgcgcgtgcttttcctctctccgacccgccgccgccgccgacatcgtcgcgtcccctccgccgcagctcctcatgttcgatcaccagccgcacccttacaacggtcccttcgccgatgaagtcctcgccaagcgcaaaacgttcctcggtccttccgtcttccactactataagaaa

SEQ ID NO: 197350 - DNA, 285 bp, Glycine max
tcggctgcgagaagacgacagaagggggcattatatttgagttcaaacaaatcaaagccatggccacctccaacttctctattgttctctccgtctccctagccttctttttggtgctacttaccaaggcacactcgaccgataccgtttctttcaccttcaacaagttcaacccagtccaaccaaacattatgctccaaaaagatgctagtatttcatcctctggggtgttacaactcaccaaagttggcagcaacggcgtgcccacctcgggatctctcggtc

SEQ ID NO: 197351 - DNA, 281 bp, Glycine max
ggggagttacagaagtttccagctaggctttttgcagtccctcctcgaatagcccagggcattattccaggggttacggctgaatcttatcaagaggacaacaaattatggaaaaagcatgttaacgcttacaaaagaatgaataaattgattggcactaccagatatcggaatgtgatggacatgaatgcaggccttggaggatttgcagctgtgcttgaatcacaaaagtcttgggtgatgaatgttgtggctacaattgctgagaacactttgggtgt

SEQ ID NO: 197352 - DNA, 202 bp, Glycine max
acggctgcgagaagacgacagaaggggataatgcttaattttaaaattgtatttgcaggagccagtttctcatgttgtggctcgtccttcaccgagtgatattcttgagtggcattatgtgttggagggaagtgaaggaacaccttttgcaggtggatattactatggaaaaatcaagtttcctcctgaatatccatataaa

SEQ ID NO: 197353 - DNA, 271 bp, Glycine max
  unsure (1)..(271): unsure at all n locations
ttaggctgcgagaagacgacagatgggggcacaagtttgttgagatagctagaagcaataagatgaaaatgaaagtgcttgttttgtttgttgctacagttttggtagcatatgaatgccatggctcagactaccagaagttccctctccanatgaaaactgggtttggtgggcaatacagcaatgaggtggcatgtgccagttggaggcttggcgtggaagcaaacaacgtagtcaagtggcaactgttcctgcacttgcggagagtaca

SEQ ID NO: 197354 - DNA, 280 bp, Glycine max
ctagaagacgacagatgggggacgatgatgagcagcagcaacaacaacgttggataatttggagacaccattctgaccaaggcatttgttgggggcttagcttgggagactccgatggatgcccttaaagaccactttgagaagtatggtcagatccttgaagctgtcatcatttccgataagcacactggcaaatccaaaggctatggctttgtgactttcaaggaggcttatgctgccatgatggcttgtgtagattctgcaactctcaacatcaatg

SEQ ID NO: 197355 - DNA, 280 bp, Glycine max
ttctcgagccgaatcggctcgagcggctgcgagaagacgacagatagtggcagttcaaagcgattgaaagattcgaaacgatgactagaaagcgttgtgaagaatggcggaagagggactagtgatcggtgtccacagcgtagaggagtggtaggaacatctcaagaagggagaagagtccaagaaattgattgtggtggattttactgcttcttggtgcggtccatgccgtttcattgccccaattcttgcagagtttgctgaaaaagttgccgaatgt

SEQ ID NO: 197356 - DNA, 285 bp, Glycine max
tacggctgcgagaagacgacagaaggggcgaacagaaactttacatcaacaatacgacttggtcaaagaaaggactatgaatggaaattcaatctatggttcccacgtgatgcagtatggtgacatagggcttagcaagaacaatcttgtctgatatttgggtacaaatcctgctaatgataattttacttttgtgcataaaaactcattggtgccaccttcaaaagcagtcaaccaacgtgatgcagatctcatccatttctgggataagttccgcaaagctcc

SEQ ID NO: 197357 - DNA, 283 bp, Glycine max
agatgacgacagaagggggcgcaggtagagagagcgagagaacaagaacataagggaaccacagcggcggtaacagaagaacaagcagagaatgggtcgagtgagaacgaagacggtgaagaaatcctctcggcaggtgatagagcgtcactactcgcgcatgaccctggacttccacacgaacaagaagcttctggaggaagtggcgataatcccgtcgaagaggctaaggaacaagatcgacgtgttctcgacgcacctgatgaagcgcatccagaagggc

SEQ ID NO: 197358 - DNA, 256 bp, Glycine max
gaatggggcatatccaaaggaacaaaaatattattaagatgatcaacattattggagcacttgttctactctttgcatttctcctcctcagttgtgtggatgcaccagaccccaccacccctgtggctggaaatcaaaacttttggggatcctgcggtggatgtggggaacatgggctaccttcccacccttttcaaggctgataaccctccttatgggagggactttgttaaccaccaactactgggaggttttg

SEQ ID NO: 197359 - DNA, 273 bp, Glycine max
ttaggctgcgagaagacgacagatgggctcggtaacaattttctcaccggaacagttccccaaggaattgctaagctcgttaatttaacctatttgagtctcgaaggaaaccaacttgaaggtaccataccggattttttctcttccttcacggatcttcggattcttaatttttcttacaacaaattttccgggaatatccccaactcgatttcttccctggcgccgaaactgacgtacttggagcttatcaacaactcactttccgggaaa

SEQ ID NO: 197360 - DNA, 272 bp, Glycine max
ctgcgagaagacgacagaaggggatggagaaggatacctccgtcgctgatcgtctcgctcgcatgaaagtcaactatatgaaggagggaatgaggaccagtgtggaaggaattttactggtacaagagcacaatcatcctcatatacttcttctgcaaattggaaacacattctgcaaactcccaggtggtcgtctcaaaccaggagagaatgaaaatgagggcttgaagagaaagttgactagcaacttggtgctaattcacagtcttgtg

SEQ ID NO: 197361 - DNA, 278 bp, Glycine max
ctgttgaggcatacagaaaggctataaagacctggggaaaatggatcgatgataatatcaatccacgaaaacagattgtctactatcgtggatattctaatgcccatttcagaggtggggactgggactcaggtgggtcatgctacggtgaaactgaaccagcttttaatggctctatcctgaataactatcctttgaaaatgaaggtagtagaggaagtgatccggggaatgaaggttcccgtaaagttattaaatgtcacaaagctgaccaatttc

SEQ ID NO: 197362 - DNA, 277 bp, Glycine max
tgacgacagaaggggatgaaaagtgaagtggctcaagctcatgctgtggtgcttaagctaaagggcacaattccaaaagggaaacatagttctgatgctatgagaatcgagcctgcgtgtttggacaacaatggtcaggtgttttggaagttgaaaagttataatagtgaatgtgctgttctgttgcaagatatcaaaattaaggatgaaactgctactgcacctgctgaaaaatggtttgtttatggtcctgaaaagaaggatgaggttgataagt

SEQ ID NO: 197363 - DNA, 281 bp, Glycine max
gttgcgagaagacgacagatgggggatgcacaagtttgttgagatagctagaagcaataagatgaaaatgaaagtgcttgttttgtttgttgctacagttttggtagcatatgaatgccatggctcagactaccagaagttccctctccaaatgaaaactgggtttggtgggcaatacagcaatgaggtggcatgtgccagttggaggcttggcgtggaagcaaacaacgtagtcaagtggcaaactgttcctgcagcttgcggagagtacatagctgact

SEQ ID NO: 197364 - DNA, 182 bp, Glycine max
tgagaagacgacagaagggtgaggctattactcttgggattgctgagatgactactgctgttatggccacttgtgatcatggagttgtggccaagatcaagacggtggtcatggatagggatacttatccaaggaagtagggtttagtgaccagggcttcatgaagaagaggcttattagtg

SEQ ID NO: 197365 - DNA, 261 bp, Glycine max
tagcgagaagacgacagataggggcagttcaaagcgatgaaagattcgaaacgaagaaagaaagcgttgtgaagaatggcggaagagggacaagtgatcggtgtccacagcgtaaaggaatgggaagaacatctcaagaaggggagaagagtccaagatattattgtgggtgattttactgcttcttggtgcggtacatgccgtttcattgccccaattcttgcagaatttgctaaaaagttgccgaatgtcaccttcctc

SEQ ID NO: 197366 - DNA, 272 bp, Glycine max
tacggctgcgagaagacgacagaaggggactcaccacttcaaaacactcataacacaaagcacaaagcaaagctcatccttgagttaaaaaatggcagcagcttcttccatggctctctcatccccatccttagctggcaaggcgtgaagcttggccatagccccagaagtgggaagggtgagcttgaggaagacgtcaccagcaggtctcctcaggaagccatggtacggcccagacgagtcaagtattgggcccatttctgggagccccg

SEQ ID NO: 197367 - DNA, 199 bp, Glycine max
tacggctgcgagaagacgacgaagggcatgaaagtatttacgcagatgtactagaccaacttattggagtctaaaaacaagtcaaaattgggaatcccttggagaacgggactctaagttggagtcttgcatactcctacttcaatggaaaatttcagaaggtatttcagtcataaagtctccgggagggaaagatcct

SEQ ID NO: 197368 - DNA, 226 bp, Glycine max
tacggctgcgagaagacgacagaaggggggtgtggcactcaaacattgtttgttgtaggaagaggaatcttgagaaatggcaggggacagcaagagcaagattctgttcatcggaaggactggttacatcggaaaatcatcgtggaagccagcgcaaactggccacccaactttccttttggtgaagggatccattctttccaacccggaaaaatcccccctcatc

SEQ ID NO: 197369 - DNA, 197 bp, Glycine max
tacggctgcgagaagacgacagaagggggcacaagtgagtttgttgatcgagataactagaaacagtgtgatgaaaatgaaggtccttgttttcttcgttgctacaattttggtaacatggcaatgccatacgtacgatatgttccctctccgaatgaacatggctatgatgcccagtactccggaggtgaaatgcg

SEQ ID NO: 197370 - DNA, 218 bp, Glycine max
tgtaaagtgagtttgttgatcgagataactagaaacagtgtgatgaaaatgaaggtccttgttttcttcgttgctacaattttggtagcatggcaatgccatgcgtacgatatgttccctctccgcatgaacactggctatggtggccgtaatccggagtgaatgggcagttggagacttctgtgaagccacacatctttggcttaagaccattctga

SEQ ID NO: 197371 - DNA, 197 bp, Glycine max
tacggctgcgagaagacgacagaagggcatcgtgatttgaaatccgcgaatatattacttgatcactcaatgagagctaaggtttctgattttgggttctcaaaggaagaggtctttgatggtcgtaattctggccttaaaggtacatatggctacaggacccagcatacatgtccctcagcaagttcacagtgaag

SEQ ID NO: 197372 - DNA, 166 bp, Glycine max
tacggctgcgagaagagacagatgggggtcatatgggatttccccgttttctcccccgatcgagatatcctctctttcacccccaaaagaagaatgattgaatcataaaaaatttggagcgtgaagtgtaatggaataaaattctatcgatttttttattttagaa

SEQ ID NO: 197373 - DNA, 275 bp, Glycine max
tacggctgcgagaagacgacagaaggggacaagtttgttgagatagctagaagcaataagatgaaaatgaaagtgcttgttttgtttgttgctacagttttggtagcatatgaatgccatggctcagactacccagaagttcctcctccaatgaaaactgggttgggtgggcaatacagcaatgaggtggcatgtgccaattggaggctaggcgtggaagcaaacaagtagtcaagtggcaactgttcctgcagcttgcggagagtacatagctg

SEQ ID NO: 197374 - DNA, 270 bp, Glycine max
atggtactgtggaaatcttgtgtttacatcatcacagttggaatgctggttgctttacttctaggtttaaatatgtcatggactgcaattactgctgcacttgctctcatagttcttgatttcaaagatgctacaccatgtttagagaagggttcgattcaactttgatatccttttgtggaatgtttattacagtggatggcctcaatagaactggaattccaatgctctgtgggacatatggagcctattctcatgttatcgtgctat

SEQ ID NO: 197375 - DNA, 266 bp, Glycine max
  unsure (1)..(266): unsure at all n locations
gggagatgagaatattcaagcatcatcaaaggggaaaatatgttgaaagcttcaactgctcggaggcaccaaggaagaaaagcaagaagatagaaaacaagaggaggtttagtgatgaacagataagatcactagaatgctatttgagtcagagtcaaagcttgagccaaggnagaagatgcaactggctagagatcttggcctgcanccttcgcccagtgggtntangggttccaaaaccagaaggccaggtgggaatccaaacc

SEQ ID NO: 197376 - DNA, 195 bp, Glycine max
tctcgagccgattcggctcgagtacggctgcgagaagacgacagatttgatcagcggtgcccactaggataacaacataatgctgtggaatgctgtcatatttggtcctgatgatactccatgggatggaggcacgttcaagttgactctccgtttactgaggattatccaataaacctacactgtgcgatttgt

SEQ ID NO: 197377 - DNA, 272 bp, Glycine max
  unsure (1)..(272): unsure at all n locations
acggctgcgagaagacgacagaagggggcgtacgcagcttcatccctaacgcgtgcatagcagagtcagagacagagacgcagccatgaggcggagacctgcgaggtgttataggcanattaagaacaatgcatgacccaagtcacgtttctgcgtagtgttcctgatcccaagatcaggatttatgatgttggtatgaagaagaagggtgttgatgagtttcctttctgtgtccatctggttagttgggagaaggaaaatgtttcaagtga

SEQ ID NO: 197378 - DNA, 213 bp, Glycine max
atgggaagacgacagaaggggggtgaactgctttgatacatttgatgcagcaattccctttggagggtacaaaatgagtggtcaaggaagagaaaaaggggaatacagtctcaagaattacttgcaagtgaaagctgttgttacattcctgaggaacccagctgggcttggacattcattagcttaaaattaatttaatgaaaggataattaa

SEQ ID NO: 197379 - DNA, 250 bp, Glycine max
  unsure (1)..(250): unsure at all n locations
tacggctgcgagaagacgacagaagggggcacaagtgagtttgttgatcgagataactagaaacagtgtgatgaaaatgaaggtccttgttttcttcgttgctacaattttggtagcatggcaatgccatgcgtacgatatgttccctctcgaatgaacactggctatggtgnccgtactccgggaggtgaaatgcgcaagttggaggcttgctgtggaagcacacaacatctttggctttgagaccatt

SEQ ID NO: 197380 - DNA, 280 bp, Glycine max
tacggctgcgagaagacgacagatggggggatggatgaaggcagatttgactttctgcatggtgccatgtcttttgataatatttgggatgagattagtcgtgctggacaagagtgccccagcaatggtgaacctcacatttatattgttagttggaatgatcattttttcatccttatagttgaatatgattgttattacatcattgacactttgggagagagactttatgaagggtgcaacaggcatatatcttgaaatttgacagcaacacaatgat

SEQ ID NO: 197381 - DNA, 282 bp, Glycine max
acggctgcgagaagacgacagaagggggcacaagtttgttgagatagctagaagcaataagatgaaaatgaaagtgcttgttttgtttgttgctacagttttggtagcatatgaatgccatggctcagactaccagaagttccctctccaaatgaaaactgggtttggtgggccatacagctatgaggtggcatgtgccagttggaggcttggcgtggaagcaaacaacgtagtcaagtggcaaactgttcctgcagcttgcggagagtacatagctgacta

SEQ ID NO: 197382 - DNA, 285 bp, Glycine max
tacggctgcgagaagacgacagaagggggcacaagtgagtttgttgatcgagataactagaaacagtgtgatgaaaatgaaggtccttgttttcttcgttgctacaattttggtagcatggcaatgccatgcgtacgatatgttccctctccgaatgaacactggctatggtgcccgtactccggaagtgaaatgcgcaagttggaggcttgctgtggaagcacacaacatctttggctttgagaccattcctgaagagtgcgttgatgcaacaaaggaatacat

SEQ ID NO: 197383 - DNA, 280 bp, Glycine max
tacggctgcgagaagacgacagaagggggcacaagtgagtttgttgatcgagataactagaaacagtgtgatgaaaatgaaggtccttgttttcttcgttgctacaattttggtagcatggcaatgccatgcgtacgatatgttccctctccgaatgaacactggctatggtgcccgtactccggaggttccatgcgcaagttggaggcttgctgtggaagcacacaacatctttggctttgagaccattcctgaagagtgcgttgtaagcacaaaagga

SEQ ID NO: 197384 - DNA, 272 bp, Glycine max
  unsure (1)..(272): unsure at all n locations
tacggctgcgagaagacgacagaagggtaatttgggaattattgctcccatcgccattggtttcattgtcggcgctaacattttgttgggtggggccttctctggagcggccatgaaccccgctgtgacatttgggcctgctgtcgtgagctggacctggaccaaccactggatctactgggccgggcctctcatcggtggtggaatcgctggccttgtttacgaggttgtctttccaagccacnaccacgagcagcttcccaccactgact

SEQ ID NO: 197385 - DNA, 271 bp, Glycine max
gctgcgagaagacgacagaagggggcatcaattcaaaatatatcatcaattataagcatgggtttgtggaacacaacgaatgcagtgtcttgccgctttcacaagtttggtgatgaccaaaagaatctggtcttccaaggtgatgccacgtcttcttccaggggcatagaactcacaaagttagacggtggaggataaccagtgggtggcagtgtggggagagtgttatactcttctccagtgcacctttgggaaagctctacagtggtcg

SEQ ID NO: 197386 - DNA, 144 bp, Glycine max
acggctgcgagaagacgacagatgggaacttcagtgagaagaatatactgggacaaggaggttttggaactgtttacaaaggtgaactgcatgatggcacgaagattgcagtgaaaaggatggaatctggggcaataagtggga

SEQ ID NO: 197387 - DNA, 246 bp, Glycine max
cggctgcgagaagacgacagaaggggagagaaagagatcacatagcagaatggcttctactcaatgtttcttgcaccaccatgctcttaccgcccctgccagatccccatcacaacgcatcatggttagcaccaagcctaaccagcttgtttgcaaggcacagaagcaagaggatattgatgtcagcccaatctctcgccggttagctctgaacgtgctcattggtgctgctgctgttggctccaa

SEQ ID NO: 197388 - DNA, 272 bp, Glycine max
gaagacgacagaagggggccgaacaccattgggttgggttatctgaagctttttcagcggaggaaacataactgcgcacgtttgggaaccctattttggtgaacatctcaagaatcagagttttttttaccactatcaggtttaggattattatctgaaatggcatcggtgtctactcagcaacagttccgttacacgcagccaccatccaaagtgcttcatttgaggaatttgccgtgggagtgcacagaggacgaactaattgaacttgg

SEQ ID NO: 197389 - DNA, 270 bp, Glycine max
tgcgagaagacgacagaagggggccgtgttggaagaaggtgatatattgaaaattgatatggcatgccatatagatgggttcattgctgtggtagctcacacccatgttcttcaggaaggtcctgttactggaagggcagctgatgtcattgctgctgctaatactgctgctgaggtggccttgaggcttgtcaggccgggaaagaagaacaaggatgtaagtgatgcaattcaaaaggttgctgctgcctatgactgtaaaattgttga

SEQ ID NO: 197390 - DNA, 255 bp, Glycine max
tgcgagaagacgacagaagggggttgtgcgtcggagctgtgtctggggaaatttgcgttgtttttcgcggtacagctcacacacactgaacggtaagtatggcggacaaggctgttacaatccgaacccgaaagttcatgaccaacaggcttctttccaggaagcagtttgtcgatgatgttcttcatccagggagggcaaatgtttccaaggctgaacttaaggagaagctagctaggatgtatgatgtgaaag

SEQ ID NO: 197391 - DNA, 202 bp, Glycine max
tacggctgcgagaagacgcagaagggagggaagaatattcacgccctggacccacaggctattcctactacagcagcaatgcaaagtgccaaaatagtggtggatagattgattgagaggcagaaagctgaaaatgggggaaagtatcctgagactgttgcacttgtattgtggggaacagataatattaagacatatggtg

SEQ ID NO: 197392 - DNA, 277 bp, Glycine max
tacggctgcgagaagacgacagaagggggaaatagagttgctgctcaaaatcaaggaagaagagttaaactcaattattgtggaaatgagaaggaattgcacttctttacaagagaaattagtgaaggaagaaacagaaaatacagtggctgcggaatctcttgttaaggagagaaaggctaggcttaactttcaaaagtcacagagtacactacaggaggatcttggacgagcacaacgagagctccaaagtgcaaatcagaagatattgtcactc

SEQ ID NO: 197393 - DNA, 246 bp, Glycine max
cgacattgaagagcttctttacagctcagtggagaatgaagaacacatatgtgtattgaaggaccgcaacaagccgatcatcttcaccatggcaagacttgaccgtgtgaagaacatcacgggacttgtggagtggtatggcaagaatgcgcgcctccgcgagttggtaaacctcgtggtggtggccggagacaggaggaaggagtcccaaggattggaagagaaggccgagatgaagaagatgtt

SEQ ID NO: 197394 - DNA, 224 bp, Glycine max
tacggctgcgagaagacgacagaagggcaatgaagacagttctactcgattatggtggtttcaagtttgcactgaagttgcattctttcaggtggctccatcaaatgatagtatacgctcctcagaaattgatgcaaaataccatatggacctttgcaaaaatatctttggagacggcatctctcctgatgttgatgcaactaatttatactacggaggcacaa

SEQ ID NO: 197395 - DNA, 274 bp, Glycine max
tacggctgcgagatgacgacagaaggggattcatctttttgttcgtgttgtgtttgctttgaagaagtgaggggtgttctttgttggtgaatacacccactcacgcgttcgtggttgcaggctctaatcagatcccaaatgatcaactttgtgcttctcattagtcgccaagggaagtgagactgacaaaatggtactccaccttattctcagaagaaaggagtaaagtaatcgtgagctcatggaatgattctttccgtgctcccagcaatgt

SEQ ID NO: 197396 - DNA, 179 bp, Glycine max
tgctgcgagaagacgacagaagggtatctcaactacatgaaatgacttcatgatagtcaatatggggtctcaccatccatcaatgcatggtcgtcttagaactattgttactctagacggtgaggatgttattgattgtgaacctatatttggttatctacaccgatgaatggaaaaat

SEQ ID NO: 197397 - DNA, 163 bp, Glycine max
ctcgagccgcggctgcgagaagacgacagaaggggggcttactgaccaagatatcgttgctctatctgggggtcacactattggagctgcacacaaggagcgttctggatttgatggtccctggacctctaatcctcttattttcgacaactcatacttcacg

SEQ ID NO: 197398 - DNA, 139 bp, Glycine max
tatggctgcgagatgacgacagaaggtggtggtgctggtgatgtgcattctgtttcaatcaagggttcaagaactggttggatgccaatgtcaagaaactggggtcagaactggcagagcaataactacctcgatggtc

SEQ ID NO: 197399 - DNA, 200 bp, Glycine max
tacggctgcgagaagacgacagaagggagagcttagagcagcaattcagagaatgttggacacccctggcccctaccttcttgatgtcattgtgccccatcgggagcatgtgttgccgatgattcccagtaatggatccttcaaggatgtgataactgagggtgatggtagaacgaggtactgattgcctagaccaaatg

SEQ ID NO: 197400 - DNA, 263 bp, Glycine max
  unsure (1)..(263): unsure at all n locations
gtgagaagacgacagaagggggagttgagaggatcgtgagaggggcagtagccgagattccgtgagttgcaaaaatgaagacgattctttccaccgagaccatgaacatcccggacggcgtgagcatcaaagttcatgccaaggtcatcgaagttgagggcccccgcgnaaaattggtgcgagacttcaagcatttgaatctcgattttcagctcattactgacgaaaacggtaaaagaaagctgaaaatcgacgcgtggttt

SEQ ID NO: 197401 - DNA, 216 bp, Glycine max
tacggctgcgagaagacgacagaagggacaagaggccaatcctattcatagctcgagatgggtgaagaagtgaaggtagttgttccagaatcagtgttgaagaagcgcaagagggaggaggaatgggcgttggccaagaagcaagaactcgatgctgccaagatgaagagagccgagagccgcaaactcatctacaacagagctaagcagtacgct

SEQ ID NO: 197402 - DNA, 163 bp, Glycine max
acggcgagaagacgacagaagggggaagagtgaagagaatggctcccaagggtttaacctttctggctgtgttaatatgcgtttcagcactgccactgagtccttctgttgcgggggaagggcaaaataatggccttgttatgaacttctacaagggatcatg

SEQ ID NO: 197403 - DNA, 276 bp, Glycine max
tacggctgcgagaagacgacagaagggggaatagaagaaggggagagattctcgaaccgaactaggaaacggatccaatgacttcaaaagaattgaacgaggagccatatgaagtgaaaatctcatgtacggttctgtagagtggcagtaagggtgacttatctgtcaacttttccactattacacccaaaaaaccaaactctgctttacgtaaagttgccagagtacgcttaacctctggatttgaaattactgcttatatacccggtattggcc

SEQ ID NO: 197404 - DNA, 268 bp, Glycine max
ctgctgcgagaagacgacagatgggggtgcaaaggatgaagaggaaaaagaggattggagggtcgccacgtttagcaacaaccaaaccctctctactctttcttcttctcttcgctagggttttagcttcttcctcttcacttcgttcttctggcctctacaatgagcaacgacaaggacaccttcaacgtcgctgatctcacttccgctctcaacttggacaatagagcagccttgtcaatgctctcaagagcaagatacagagttt

SEQ ID NO: 197405 - DNA, 269 bp, Glycine max
ttcggctgcgagaagacgacagatggggaagacagcaaaaacaatcatattcttgggacttcttggcgaaacagaaatccctgcttcctgcaagagtgcttttgatgttgtttgtttccgcatggaggataggttatcatacaccagcacagaaaaggatatggtgcttttgcaccatgaactggaaatagaatacccagatagccaaattacagagaagcatagagctaccttacttgaatttgggaagactcttgatggaaaaacca

SEQ ID NO: 197406 - DNA, 261 bp, Glycine max
tacggctgcgagaagacgacagaagggagaacatgcctttaccaaaggtgcctactttattgggaagatgatatggagcaaaggctacaaggaactgctccaacttcttaaagatcatgaaaaggaattatctgctcttgaggttgatttatttggcagtggagaggactcagatgaagttcaaaaagctgcagaaaagttggaactagcagttagagtccacccagctcgtgatcatgctgatgctctatttcatgatta

SEQ ID NO: 197407 - DNA, 192 bp, Glycine max
tacggctgcgagaagacgacagaaggggagagaaagagagagaaagatgtcgaagcgtggtcgtggtggttcggcggggaacaagttccgcatgtcgctgggtcttccagtggcggcgacggtgaactgcgccgacaacacgggggcgaagaacctctacatcatttcggtgaaagggttcaaaggcgtttg

SEQ ID NO: 197408 - DNA, 270 bp, Glycine max
tacggctgcgagaagacgacagaaggggaagacagcaaaaacaatcatattcttgggacttcttggcgaaacagaaatccctgcttcctgcaagagtgcttttgatgttgtttgtttccgcatggaggagaggttatcatacaccagcacagaaaaggatatggtgcttttgcaccatgaactggaaatagaatacgcagatagccaaattacagagaagcatagagctactttacttgaatttgggaagactcttaatggaaaaaccac

SEQ ID NO: 197409 - DNA, 266 bp, Glycine max
ctcgagccgaagctgaaaggcattgttggagagagcagaacaaactacatcctatccaatagtctttatcttgtggtggcaggtagtgacgacattgccaacacctattttgttgctcacgccagaatattacagtatgacattccttcttacaccgaccttatggtcaactcagcctctaattttgtaaaggaactgtataatctgggagctcgtagagtttcagtactgggtgcaccacgattggatgcgtgccatcacagaga

SEQ ID NO: 197410 - DNA, 218 bp, Glycine max
tacggctgcgagaagacgacagaagggggcacaagtgagtttgttgatcgagataactagaaacagtgtgatgaaaatgaaggtccttgttttcttcgttgctacaattttggtagcatggcaatgccatgcgtacgatatgttccctctccgaatgaacactggctatggtgcccgtactccggaggtgaaatgcgcaagttggaggcttcctgtgg

SEQ ID NO: 197411 - DNA, 99 bp, Glycine max
ctgcgagacgacagaagggggattttacgagttctttaagaagtactattctgatattgctggcccagagtatgcaagcaagtacaagaccttgatcta

SEQ ID NO: 197412 - DNA, 222 bp, Glycine max
tacggctgcgagaagacgacagaagggggaacttctcacgttcatttctacacatccctagctctgtcgttccgtcgttgacgatggcgtttcgggtgcgaaccctgacctccgctctctctttcttctctctctcttgtccatcgcttccgccaatgtcttcttcgaagagcgtttcgatgacgggtgggaaaatcgatgggttaaatcagattggaaaaa

SEQ ID NO: 197413 - DNA, 265 bp, Glycine max
gcgagaagacgacagaagggggcacaagtgagtttgttgatcgagataactagaaacagtgtgatgaaaatgaaggtccttgttttcttcgttgctacaattttggtagcatggcaatgccatgcgtacgatatgttccctctccgaatgaacactggctatggtgcccgtactccggaggtgaaatgcgcaagttggaggcttgctgtggaagcacacaacatctttggctttgagaccattcctgaagagtgcgttgaagcaa

SEQ ID NO: 197414 - DNA, 216 bp, Glycine max
cggctcgagtacggctgcgagaagacgacagaagggggatgcacaagtttgttgagatagctagaagcaataagatgaaaatgaaagtgcttgttttgttcgttgctacagttttggtagcatatgaatgccatggctcagactaccagaagttccctctccaaatgaaaactgggtttggtgggcaatacagcaatgaggtggcatgtgccggtt

SEQ ID NO: 197415 - DNA, 265 bp, Glycine max
agaagacgacagaagggggcaagaagcagaactctctccgcatagccggaataccaggagctatggaatcaatatcatcgcttctacaaactaataggagtgtgattcctgcagctgatgagattggtgaaaataaacttttatttgatcaccaaaattacgggttctggacatttaaccacttgggactcctcatactgaaaaaacttgcacgtgaccttgacaactgtggaaagattggaaacactaggggcctccttccaaa

SEQ ID NO: 197416 - DNA, 261 bp, Glycine max
acggctgcgagaagacgacagaaggggattgaggctaatacagtttatggtgcattgcgcggattagagacattcagccagttgtgttctttcgattatacaactacaacagtaataatatacaaggcaccttggtccatccaagataaacctagatttgcatatcgtgggcttatgctggatacatcgaggcactatttacctattgatgtaattaagcagattattgaatctatgtcctatgctatacttaatgttcta

SEQ ID NO: 197417 - DNA, 264 bp, Glycine max
tacggctgcgagaagacgacagaaggaataccttgatttttatactgaccttaccgctacatctccagccgtttctggagtgatggtatatatagcaactcccgacaagaaatctaatgtaaattatttgggccctgcatcgattgaagacattgcaaggcaaataattcaagctaaaggtcccgcaggacctaacagagattatcttttcaaccttgaaaaggctcttcatgaaataggatgcaaagacaaacatgtcattga

SEQ ID NO: 197418 - DNA, 269 bp, Glycine max
tacggctgcgaacgacagaagggggaacaaaacaagtgtttcgaatagattatcctaagtctttgggaatagtgctgcaatggcttcaagtcaggaggaggtgacccttttgggagctactggaagcccatttgtgtgcagggttcatattgccctcaagttgattggagttcaatacaaatatgtcgaagaaaatttgaggaacaagagtgaactgcttctcaaatccaacccagttcacaagaaggttccagtgtttattcacaatg

SEQ ID NO: 197419 - DNA, 251 bp, Glycine max
aatcgagcgaatcggctcgacggctcgagtacggctgcgagaactcgacagaaggggactgataagagaaatggcaagcgaaacaaacgtggcagtattaggtggcatcaccgaagtgcagggagctgccaacagcgtcgagatcaacaatctcgctcgctttgctgtagaggaacaaaacaaaagagagaattcagttctggagtttgtgagggcgattagtgcaaagcagcaagtggttgctggagtga

SEQ ID NO: 197420 - DNA, 259 bp, Glycine max
cggctcgagacggctgcgagaagacgacagaagggggtctcatgtgctgatatcttggacatacgcttctcgtgactctgttgttcttcttggagggccattttggaaagttagacttggaagaagggattccagaactgccaactttactgctgctaacactggtgttattccacctcccacatctaacctcaccaaccttatcacaaggtttcgagatcaaggactctctgctagggacatggttgctttatctgga

SEQ ID NO: 197421 - DNA, 255 bp, Glycine max
acggctgcgagaagacgacagaaggggacaagtatagatatgaaatcaaggacatacttgaaatggaaatgaagattttagaagctcttaattattacctggttgtataccatccataccgttcactatctccgttgcttcaggatgcaggtctgaatgatctaaacatgactcaactaacttgggggcttgtaaatgacacatacaagatggacctaattcttgtacatcctccgcatttgattgctttagctt

SEQ ID NO: 197422 - DNA, 261 bp, Glycine max
cgagaagacgacagaaggggacacacacaaacacaacaacatatggaggtgctaagggtgcaaaccatagcttccaaatccaaagatgctgccatcccagccatgtttgttagggcagagacagagcaaccaggcatcacaaccgttcaaggggtgaaccttgaggtgccaattattgattttagtgacccagatgaagggaaagtggtgcatgagattttggaggcaagtagggactggggcatgttccaaattgtgaac

SEQ ID NO: 197423 - DNA, 248 bp, Glycine max
tctcgagccgaatcggctcgagtacggctgcgagaagacgacagaagggtcatgctttcatcttatgctcccgtgatttcagctgagaaggctcaccatgagcagttatcagttggtgaaatcacaaacagcgcattcgagccatcatctatgatggccaagtgtgatcctcgccatggaaaatacatggcttgctgtctcatgtaccggggtgatgttgtgcctaaagatgttaatgcagctgtggg

SEQ ID NO: 197424 - DNA, 259 bp, Glycine max
ctgcgagaagacgacagaagggggaagaaatggtgaaggcaaagtttgaggctactgccatagaaaaagagctgagggagactcatggtgcttggcttcccccttggcttgctgttcactatattcatattaagtcttttgttgatagtcattggaacaaacatgggaaacctgctttggaaatggttactcaaaaggccctagagaaaaaggcacaagctggaaagtgggctgaacccatgtggaaaccattaaaact

SEQ ID NO: 197425 - DNA, 260 bp, Glycine max
gacgacagaaggggagagtggtggggtgtgcagaagagcgtcgcagttgtaaccctaatcagaagaagcgcacttcatcgcgagtgacagccaccagccatgggtcgtatgcacagccgcggtaagggtatatcctcttctgctttgccctacaacaggacacctcctagctggctcaagatctcttcgcaagatgtcgaagataatatctgcacatttgcgaagaaaggtttgaccccgtctcagattggtgtcattct

SEQ ID NO: 197426 - DNA, 252 bp, Glycine max
acggctgcgagaagacgacagaaggggacgtctaagtttgagtgagaagaaactgaaaagtgcttccgagtctcatggagccgaccttattaggttcacacagagaaatatcctcagagtttttcctaaaggagaacgtgtccaatcctcaaatttcaggccatatttagggtggttgtatggagttcagatggttgcattcaatatgcaggggcatggcaaatcactccggttgatgcggggtatgttcaa

SEQ ID NO: 197427 - DNA, 256 bp, Glycine max
acggctgcgagaagacgacagaaggggaagcataagttagttccaaacaaggatttagcagaagcagcattcagagatttgaagaagagggaacagactgcttacaatgttgttgcttacaaggataaaccacgtttgaagagtgctgtagaaatgcttaaaactaccgaagaaatagaacagcgattgaaagaagtatattttgatcttctggcttatctaaactaggtggttggagttggtgaaaatttggttt

SEQ ID NO: 197428 - DNA, 221 bp, Glycine max
  unsure (1)..(221): unsure at all n locations
aagacgacagaagggggcagactcaacactctctccagacacttccttcatcaaatggcttctcacgacggcatctccgctgcttcttcagattccgtcttcaatcacctcgttcgtgctcccgaagatcctatcctcggggtaactgttgcttataacaaagatccaagtccagttaagctcaacttggganttggtgcttaccgaactgangaaggaaa

SEQ ID NO: 197429 - DNA, 265 bp, Glycine max
acggctgcgagaagacgacagaaggggaggacaagtggctataacactacttgcattgagttagactttgatagtttgattagctctaataaggttaaggaccagagaaagagagaaagaaacagaatttggaagaaaaaaagcacaagatgggttattggaagtctaaggttcttcccaagatcaagaaggtttttgagaagaatagcaccaagaaagctgctgctgctgaggccaccaagtcctttgatgagtcaaaggagga

SEQ ID NO: 197430 - DNA, 259 bp, Glycine max
ctgcgagaagacgacagaaggggacaaacaggcacacagtcggttcttccttctcaaatattcttgagatccccattttctccgaagcaaagccatggctaagggtcctggtctctactctgacatcggcaagaaagctagggatctgctgttcaaggactaccacagtgaccagaagttcaccatcaccacctactcaccgactggagtggctattacagcattaggaaccaggaaaagtgaactgtttctggctgat

SEQ ID NO: 197431 - DNA, 235 bp, Glycine max
acggctgcgaaagacgacagaagggggcacaagtgagtttgttgatcgagataactagaaacagtgtgatgaaaatgaaggtccttgttttcttcgttgctacaattttggtagcatggcaatgccatgcgtacgatatgttccctctccgaatgaacactggctatggtgcccgtactccggaggtgaaatgcacaagttggaggcttgctgtggaagcacacaacatctttgg

SEQ ID NO: 197432 - DNA, 249 bp, Glycine max
tacggctgcgagaagacgacagaagggggtggtagtttggcagcgacacgtatcttcatcaataatcgcagaagcagtttccggtgcatctcatcgtcttccaaaatgaacgacgcagatgtctcgaagcaaatccagcagatggtgcgtttcatccgccaggaagctgaggagaaagcctacagatctctgtatctgccgaagaggaattcaatatcgagaagctgcagttggttgaagccgaaaaga

SEQ ID NO: 197433 - DNA, 260 bp, Glycine max
cgacagaaggggactcaagcacaacatctctatcgagtaaattaactatgaagcctaccctactattatccctttccttcctgcctctctttgctttcctggctctttcagaagatgttgaacaagttgtggacataagtggcaaccccattttcccttgtggcacatattacattatgccatcaacttggggcgctgccggtggtggattgaaactaggccggacaggaaactcaaactgcccagttactgttttgcaa

SEQ ID NO: 197434 - DNA, 262 bp, Glycine max
acggctgcgagaagacgacagaaggggcatgcgatctgtttttgagagctggttcatcgaatacaaagttgatgtgatctttgctggccatgtccatgcttatgaaagatcatatcgatactctaatgttgactacaacataacaggcggtaacaggtatccattacctaacaaatcagcacctgtttacataacagtcggagatggtggaagtcaagaaggtcttgcttcaaggtttttggatccacagccagaatattct

SEQ ID NO: 197435 - DNA, 215 bp, Glycine max
tacctgcgagaagacgacagaagggggcacaagtgagtttgttgatcgagataactagaaacagtgtgatgaaaatgaaggtccttgttttcttcgttgctacaattttggtagcatggcaatgccatgcgtacgatatgttccctctccgaatgaacactggctatggtgcccgtactccggaggtgaaatgcgcaagttggaggcttgctgtg

SEQ ID NO: 197436 - DNA, 253 bp, Glycine max
tacggctgcgaaaagacgacagaaggggaagccatttatgacatctgcaggcgttcactggacattgagaggccaacctacaccaaccttaatcgtttagtttctcaggtgatatcatcactgactgcttccctgaggtttgatggagccttgaatgttgatgtcaatgaattccagaccaaccttgtgccataccccaggattcattttatgctttcatcttatgctcctgtaatttcagccgagaaggctc

SEQ ID NO: 197437 - DNA, 252 bp, Glycine max
tacggctgcgagaagacgacagaaggggattgtaaagcattcttcgcctttctctctcttctttttactctctctctgtctctctctacgctttctcgttcgagatccctcaagggatccactaactgaaggagaaatggggttgacattcaccaagcttttcagccggcttttcgccaagaaggaaatgcgaattctgatggtgggtctcgatgcagctggtaagaccaccatcctgtacaatctcaaact

SEQ ID NO: 197438 - DNA, 251 bp, Glycine max
tacggctgcgagaagacgacagaaggggatagacgacggctgatcacacattcaaatgctaagagcaagagtgagaagtttcctcctccccaccaagatggagctctaggctatcctttgggttcttcacatcacatggatccagtttttgatccccctgatgttccatttagttctacaaacttctcacaacctaaagcaaatatccaaacctggtccggcccattggtagatccttctggtgtgggcgt

SEQ ID NO: 197439 - DNA, 252 bp, Glycine max
tacggctgcgagaagaccagaagggggcatatccaaaggaacaaaaatattattaagatgatcaacattattggagcacttgttctactctttgcatttctcttcctcagttgtgtgtatgcacaagacacaacaacccttgtgcctgcaatcataacttttggtgattctgctgtggatgtagggaacaatgactatcttcccacccttttcaaggctgattaccctccttatgggagggactttgttaac

SEQ ID NO: 197440 - DNA, 253 bp, Glycine max
tacggctgcgagaagacgacagaaggggattgtaaagcattcttcgcctttctctctcttctttttactctctctctgtctctctctacgctttctcgttcgagatccctcaagggatccactaactgaaggagaaatggggttgacattcaccaagcttttcagccggcttttcgccaagaaggaaatgcgaattctgatggtgggtctcgatgcagctggtaagaccaccatcctgtacaagctcaaactt

SEQ ID NO: 197441 - DNA, 247 bp, Glycine max
tactcgagccgaatcggctcgagcggctgcgagaagacgacagaaggaatcagcggtgcccccacggataacaacataatgcagtggaatgctgtcatatttggtcctgatgatactccatgggatggaggcacgttcaagttgactctccagtttactgaggattatccaaataaaccaccaactgtgcgatttgtgtctcgcatgtttcatccaaatatttatgctgatggaagtatttgtttgg

SEQ ID NO: 197442 - DNA, 246 bp, Glycine max
gctgcgagaagacgacagaagggggcagccaagaaaagaaaatcctcacccattttcttcgtagccaaacactctgaaattctcagttatgtcgtggcaagcgtatgtggatgatcacctactgtgtgaaatcgaaggtaaccacctcactcacgccgctatcatcggccaagacggaagcgtttgggctcagagcaccaacttccctcagttcaaacctgaggaaataactgccatcaataatga

SEQ ID NO: 197443 - DNA, 247 bp, Glycine max
acggctgcgagaagacgacagaaggggaacacgcggcttccgccggaggtgaaccgcgtgctgtacgttcggaaccttcccttcaacatcaccagcgaggagatgtacgacatctttggcaaatacggcgccattcgccagatccgcatcggcaccaacaaggacactcgcggaaccgctttcgtcgtctacgaggacatctacgacgccaaaaccgccgtcgaccacctctccggcttcaacgtcg

SEQ ID NO: 197444 - DNA, 197 bp, Glycine max
tacgactgcgagaagacgacagaagggaccctctacatcactcaacaaaataagaagatcagcttttaattccaatgccaataaagctgataaactgtcattatcccaaaatatgccagaagaatcctgcataaaatgatttagtgacactttaagtattctctagtctagtctcatacgtcacctgtttttttttt

SEQ ID NO: 197445 - DNA, 270 bp, Glycine max
acggctgcgagaagacgacagaaggggggaaaggaactactaaaaggaatatcagaaagcttgggattggaagccaattacatagaggatacaatgaacctagattctggttggcaaatgatagcagcaaatatgtatccaccttgtccacaacctgagcttgcaatgggaatacccccacattctgatcatggcctcttgaaccttctcctgcagaatggggttagtggtcttcaagtgcttcacaatggcaagtggatcaatgtcggt

SEQ ID NO: 197446 - DNA, 267 bp, Glycine max
tacggctgcgagaagacgacagaagggggagagatgcagcagcacctgatgcagatgcagcctatgatggcagcctactaccccaacaacgtcactactgatcacattcagcagtatctggatgagaacaagtccttaattctgaagattgttgaaagccagaattcaggcaagcttagcgagtgtgccgagaaccaagcaaggcttcagagaaatctcatgtacttagctgcaatagctgattctcaaccccaaccacccaccatg

SEQ ID NO: 197447 - DNA, 265 bp, Glycine max
gaagacgacagaaggggaataatataactatataagcggttcttccatttgactcttgttctgaacgacttttcaagagaatcaatccatggcagtgaaagtatacggtccccactgtgcttccaccaagcgggtgctggtttgtctggttgagaaggaagtcgaatttgaggttgtccctgttgatgtcactaagggggagcagaaggatcctgagtacctcaaactacagccatttggagttgttcctgtcatcaaagatgga

SEQ ID NO: 197448 - DNA, 257 bp, Glycine max
acggctgcgagaagacgacagaagggttatctattttatctcttgctattctcacacccttcgcaattgctgtggaaggaccgcaaatgtgggctgctggatggcaaacagccatgtctcaaattggaccccaattcatatggtggctagctgctcaaagtgtattctatcatctatacaatcaagtgtcatacatgtctctggatcagatctctcctttgacgtttagcattggaaacaccatgaaacgtatatct

SEQ ID NO: 197449 - DNA, 267 bp, Glycine max
tacggctgcgagaagacgacagaagggcaacaaacatgatgatgaatcaactgccgaaccctaatgatttggtcatgagcaccatgagagggggacctgaagaaacccctaagcctccatcagctaatagacctccagagaagagacagcgagttccatctgcttacaaccgcttcatcaaggatgagatccaacgtatcaaagctgggaatcctgatataagccacagagaggcctttagtgcagctgcaaagaattgggcccatt

SEQ ID NO: 197450 - DNA, 255 bp, Glycine max
tgcgagaagacgacagaaggggacttcagtcagtctttacgttttagctgtgtacctctgctctcacttccttccttccttccttcaattgttctaactcttagcagccatggcgagcaccaaagttcagagggttatgactcagcccattaacttgattttcaggtttcttcagagcaaagcacgcattcagatttggctatttgagcaaaaggatttgaggattgaaggcagaatcattggttttgatgaata

SEQ ID NO: 197451 - DNA, 256 bp, Glycine max
tacggctgcgagaagacgacagaagggggcacaagtgagtttgttgatcgagacaactagaaacagtgtgatgaaaatgaaggtccttgttttcttcgttgctacaattttggtagcatggcaatgccatgcgtacgatatgttccctctccgaatgaacactggctatggtgcccgtactccggaggtgaaatgcgcaagttggaggcttgctgtggaagcacacaacatctttggctttgagaccattcctgaa

SEQ ID NO: 197452 - DNA, 262 bp, Glycine max
acggctgcgagaagacgacagaagggggcatatccaaaggaacaaaaatattattaagatgatcaacattattggagcacttgttctactctttgcatttctcttcctcagttgtgtgtatgcacaagacacaacaacccttgtgcctgcaatcataacttttggtgattctgctgtggatgtggggaacaatgactatcttcccacccttttcaaggctgattaccctccttatgggagggactttgttaaccaccaacct

SEQ ID NO: 197453 - DNA, 261 bp, Glycine max
tacggctgcgagaagacgacagaagggggcatcaattcaaaatatatcatcaattataagcatgggtttgtggaacacaacgaatgcagtgtcttgccgctttcacaagtttggtgatgaccaaaagaatctggtcttccaaggtgatgccacgtcttcttccaggggcatagaactcacaaagttagacggtggaggaaaaccagtgggtggcagtgtggggagagtgttatactcttctccagtgcacctttgggaaag

SEQ ID NO: 197454 - DNA, 257 bp, Glycine max
gagaagacgacagaagggggggaatttgttgatacagctataaatagatttgttctcattgcacttggtgctgctgtatctttgggagtcaatatctgcatatatccaatctgggctggtgaggatctgcatgatcttgtcacaaaaaatttcatgggtgttgcaacatctttggaaggtgttgtcaatcactaccttcattgtgttgaatataagaaggtgccatctaaaattcttacttaccaagctgctgatga

SEQ ID NO: 197455 - DNA, 264 bp, Glycine max
cgagaagacgacagaaggggctcttcattcattttcattccaaaaacacacacacacacaaattctcaaacccaaatcccaagtctcctaaaaccctaattcgcagtgaaaatgagagaaatcttgcacatccagggagggcaatgcggtaaccagatcggagcgaagttctgggaggtgatatgcgacgagcacggcatcgaccacaccggaaagtacagcggcgactccgagctccaattggagcgcatcaatgtttattac

SEQ ID NO: 197456 - DNA, 261 bp, Glycine max
acggctgcgagaagacgacagaaggggcacaagtgagtttgttgatcgagataactagaaacagtgtgatgaaaatgaaggtccttgttttcttcgttgctacaattttggtagcatggcaatgccatgcgtacgatatgttccctctccgaatgaacactggctatggtgcccgtactccggaggtgaaatgcgcaagttggaggcttgctgtggaagcacacaacatctttggctttgagaccattcctgaagagtgcg

SEQ ID NO: 197457 - DNA, 265 bp, Glycine max
tacggctgcgagaagacgacagaagggcaacaaacatgatgatgaatcaactgccgaaccctaatgatttggtcatgagcaccatgagagggggacctgaagaaacccctaagcctccatcagctaatagacctccagagaagagacagcgagttccatctgcttacaaccgcttcatcaaggatgagatccaacgtatcaaagctgggaatcctgatataagccacagagaggcctttagtgcagctgcaaagaattgggccca

SEQ ID NO: 197458 - DNA, 263 bp, Glycine max
ggctgcgagaagacgacagaagggggcctacgcagagagcaattgagtttctgagataaccacttttctctttgattcatcaatggcaaccgcgaggaccgtgaaggatgtttcgcctcacgatttcgtgaaggcttacgcctcccatctcaagcgttccggcaagatggagcttcctgagtggactgatattgtagaaacagcgcaatttaaggaattggctccatatgatcctgactggtattatgttagggctgcctcaa

SEQ ID NO: 197459 - DNA, 262 bp, Glycine max
cggctcgagtacggctgcgagaagacgacagaaggggcccatccatcacacctcaaacccatttccttgatatcttagttatctaattacctcaattaatcccttaattgcaagcatcatggctgaggagaaacaccaccaccacttccaccaccacaagggcgatgatgtgcctggcgaggttgattataagaaggaggagaagcaccacaagcatcttgagcaccttggggaacttggtgctgcggctgtcggtgcttat

SEQ ID NO: 197460 - DNA, 261 bp, Glycine max
tacggctgcgagaagacgacagaagggggcacaagtttgttgagatagctagaagcaataagatgaaaatgaaagtgcttgttttgtttgttgctacagttttggtagcatatgaatgccatggctcagactaccagaagttccctctccaaatgaaaactgggtttggtgggcaatacagcaatgaggtggcatgtgccagttggaggcttggcgtggaagcaaacaacgtagtcaagtggcaaactgttcctgcagctt

SEQ ID NO: 197461 - DNA, 263 bp, Glycine max
gctgcgagaagacgacagaaggggaacacgcggcttccgccggaggtgaaccgcgtgctgtacgttcggaaccttcccttcaacatcaccagcgaggagatgtacgacatctttggcaaatatcgggccattcgccagatccgcatcggcaccaacaaggacactcgcggaaccgctttcgtcgtctacgaggacatctacgacgccaaaaccgccgtcgaccacctctccggcttcaacgtcgccaaccgctacctcatcgt

SEQ ID NO: 197462 - DNA, 262 bp, Glycine max
tacggctgcgagaagacgacagaagggggggttggcattttgggcatcgcttgggcctttggtggcatgatcttcatccttgtttactgcaccgccggtatttcaggaggacacataaacccggcggtgacattcgggttgttcctaggacgcaaggtgtcgttgataagggcgttgttgtacatggtggcacagtgtgccggtgctatctgtggtactggattggccaaggggttccaaaaagcatactacaacaggtatg

SEQ ID NO: 197463 - DNA, 262 bp, Glycine max
ccagctgaggaggctgcaatttctgcactaaagagagctttggctgctttgaacactcaccttgcttccaatacttacctggttgggcattctgtgaccctggctgacatcataatgacatgcaatttatatttgggttttgcaaacatcctggttaagtgctttacctctgagtttcctcatgttgagagatacttttggaccttggtcaatcagccaaacttccgaaaaataattgggcaggtcaagcaggctgaaacta

SEQ ID NO: 197464 - DNA, 261 bp, Glycine max; identical to SEQ ID NO: 197453

SEQ ID NO: 197465 - DNA, 244 bp, Glycine max
  unsure (1)..(244): unsure at all n locations
aacaaggactgtcctgccaatgaaaatgaagaaaaggagcctgaggacaaggagatgacactggaagagtatgagaaggtgctggaagagaaaagaaaggccctgcaggcacaaaaaactgaagtaagaaaggtggacatcaaggagtttgcatccatgcagccactgtctaacaagaaagaaaatgatgagatctttattaaattgggatctgacaaggataaacgcaaagatgctntagaga

SEQ ID NO: 197466 - DNA, 261 bp, Glycine max
acggctgcgagaagacgacagaagggggcacaagtgagtttgttgatcgagataactagaaacagtgtgatgaaaatgaaggtccttgttttcttcgttgctacaattttggtagcatggcaatgccatgcgtacgatatgttccctctccgaatgaacactggctatggtgcccgtactccggaggtgaaatgcgcaagttggaggcttgctgtggaagcacacaacatctttggctttgagaccattcctgaagagtgc

SEQ ID NO: 197467 - DNA, 263 bp, Glycine max
cggctcgagacggctgcgagaagacgacagaagggggaatgagtttgagtatcgatttattagtaaaaaaccgtctccgacttttgaattgccaaaacaagaactttatgtaagaattgaagcccccaagggagaattgggaatttttctaataggggatcaaaatggttttccctggagatggaaaattcgtccgccaggttttatcaatttgcaaattcttcctcaattagttaaaagaatgaaattggccgatattatga

SEQ ID NO: 197468 - DNA, 263 bp, Glycine max
acggctgcgagaagacgacagaagggggaagtgaaagagagattctgcgtgcaggaagagcgaagcgcgtgagtgtggcaatggcggaggagcaaggtgaattcaggatttacaattccatgactcagcagaaagagatcttcaaaaccaaagtccccggcaaggtttccatgtacgtttgcggagtcactgcctacgacttcagccatctcggtcacgctcgcgctgcggtttctttcgatatcctcttcaggtaccttaag

SEQ ID NO: 197469 - DNA, 265 bp, Glycine max
tacggctgcgagaagacgacagaaggggggtgtggaacgtgacaatggtggcgacgaacgtgaaggcagaaaccatgtctctgatggacaagcgcacgccttggaggctgagatgaactccatcatcgcccgcctctcccagccaggcgctcctggcctctccggaaatctcgtcgattccgaggattttccccattccgatatcgacgtccccgttgttcgagccgaacgacgtcgcctggcagagctgcgcagcgaccacaac

SEQ ID NO: 197470 - DNA, 267 bp, Glycine max
tacggctgcgagaagacgacagaaggggaacacgcggcttccgccggaggtgaaccgcgtgctgtacgttcggaaccttcccttcaacatcaccagcgaggagatgtacgacatctttggcaaatacggcgccattcgccagatccgcatcggcaccaacaaggacactcgcggaaccgctttcgtcgtctacgaggacatctacgacgccaaaaccgccgtcgaccacctctccggcttcaacgtcgccaaccgctacctcatcgt

SEQ ID NO: 197471 - DNA, 257 bp, Glycine max
acggctgcgagaagacgacagaagggggcacaggtgagtttgttgatcgagataactagaaacagtgtgatgaaaatgaaggtccttgttttcttcgttgctacaattttggtagcatggcaatgccgtgcgtacgatatgttccctctccgaatgaacactggctatggtgcccgtactccggaggtgaaatgcgcaagttgggggcttgctgtggaagcacacaacatctttggctttgagaccattcctgaaga

SEQ ID NO: 197472 - DNA, 261 bp, Glycine max
ctgcgagaagacgacagaaggggagctacttttgattctgcaatattttgttcattaattactccagattctttcatttccatataaagatcatttccctcacgagtacgttcacctactccgccaaatacagatacacctccatgagctttggcaatgttattgatcaattccataatcagtaccgttttacccactccagctccaccgaaaagtcctatttttcctccacgacgataaggagctaaaagatctactact

SEQ ID NO: 197473 - DNA, 258 bp, Glycine max
acggctacagaagacgacagaagggggggtgtgagagcgagaatcagaagatgaagaaggaagacacagtgaagctgatcagtgccgaaggttttgaatttgtggtcgacaaagaagctgcaatggtttcacagaccatacataacatgcttacttctccagggagtttcgctgagaggcagcacggcgaagttacctttcctgagatcagcaccaccattctcgagaagatttgccagtactcttattggcatctcc

SEQ ID NO: 197474 - DNA, 259 bp, Glycine max
tacggctgcgagaagacgacagaaggggagtgcaagaaaaaatgaccaagatcttctttgtattgctgttatgtctgatcatagcagcttcttctgggtttgtgaattgctttgatgttgaaaagaaggaaaagattggagtatttgagctcaataaaggtgacctttctttgaaggtcaccaactggggtgcttcaattttgtccctggtgattcctgataagaatggaaagttgagtgatgttgttcttggatatga

SEQ ID NO: 197475 - DNA, 261 bp, Glycine max
ggctgcgagaagacgacagaaggggataagaaagaagatcaaaagaaaaaagagaaacaaatggcagcactgggtggctttaccgacatcaccggagcacagaacagcatcgatatcgaaaatctcgctcgctttgctgttgatgaacacaacaaaaaagagaatgcagttctggagtttgtgagggtgattagtgcaaagaaacaagtggtttctggcaccttgtactatatcactttggaggcaaatgatggtgtgacg

SEQ ID NO: 197476 - DNA, 262 bp, Glycine max
acgacagaaagggacagacaaacaaacaatttaccagctatacttgttccttttgaaggttagaagtgctacaatacaaacaatggcagctactcaggaagatgtgaagcttttgggtattgtgggaagcccatttgtgtgcagggtccagattgcccttaagttgaagggagttgaatacaaatttttggaagaaaatttgggcaacaagagtgatttgcttctcaaatacaaccctgttcacaagaaggttccagtgttt

SEQ ID NO: 197477 - DNA, 261 bp, Glycine max
acgacagaagggggcgtacgcagcttcatccctaacgcgtgcatagcagagtcagagacagagacgcagccatggggcggagacctgcgaggtgttataggcaaattaagaacaagccataccccaagtcacgtttctgtcgtggtgttcctgatcccaagatcaggatttatgatgttggtatgaagaagaagggtgttgatgagtttcctttctgtgtccatctggttagttgggagaaggaaaatgtttcaagtgagg

SEQ ID NO: 197478 - DNA, 262 bp, Glycine max
cgctgcgagaagacgacagaagggggtggcgctcgatggcacagaagatgggaaactgtatttgctaacagttttgagaggactgacaatgaaatcctatcagacgcagttgcgcctgaaatggtaggatctactgcctctgtggtgattctatctggttgccaaattattacatccaactgcggcgactcaagggtagttctttaccgcaggacacaaactatccccttgacagtggatcagaagccggatagacaagatg

SEQ ID NO: 197479 - DNA, 258 bp, Glycine max
gctcgagaagacgacagaaggggattcaaacattggggcgaatccgacacaggcacattgttaggttgttgggcttctgttcaaatcatgagacaaaccttttggtctatgagtacatgcccaatggaagtttaggcgaggttcttcatggaaagaaagggggtcatttgcattgggatacaaggtataaaattgcggtggaggctgccaaggggctttgctatctgcaccatgattgttcgccactcattgtccatc

SEQ ID NO: 197480 - DNA, 258 bp, Glycine max
aagacgacagaaggggacaaaaccaaattataatatttcatgcttctctttcactcttgtcacattccacaaaaacgaagtactactacaagggaagaaaaacttagctactaaggaaggatcaaagagaatggctcaagcaatggcatcaatggctggcttgcgtggttcctctcaggctgtgttggaaggtagccttcaggtgagtggctccacacgcttgaatgtggggagtggaagcagggtggcctcagtcac

SEQ ID NO: 197481 - DNA, 257 bp, Glycine max
acggctgcgagaagacgacagaagggggcacaagtttgttgagatagctagaagcaataagatgaaaatgaaagtgcttgttttgtttgttgctacagttttggtagcatatgaatgccatggctcagactaccagaagttccctctccaaatgaaaactgggtttggtgggcaatacagcaatgaggtggcatgtgccagttggaggcttggcgtggaagcaaacaacgtagtcaagtggtaaactgttcctgcag

SEQ ID NO: 197482 - DNA, 261 bp, Glycine max
acggctgcgagaagacgacagaaggggcctccgaaaaccctaacaacacaggcgcagacgcaaacgcaaacgcaaacgcaaacgcaaacgcagagcgtgatccattgacgaagatggtgcagcgtctcacctaccgcaagcggcacagctatgccaccaagtccaaccaacacagggtcgtcaaaacccctggtgggaagctcgtttatcagactaccaagaagagggccagcggacccaagtgccccgtcactggcaaga

SEQ ID NO: 197483 - DNA, 260 bp, Glycine max
gcgagaagacgacagaaggatacggctgcgagaagacgacagaaggggggtgtggcactcaaacattgtttgctgtaggaagaggaatcttgagaaatggcaggggacagcaagagcaagattctgttcatcggagggactggttacatcggaaaattcatcgtggaagccagcgccaaagctggccacccaacttaccttttggtgagggagtccactctctccaaccccgcaaaatcacccctcatcgacaatttcaa

SEQ ID NO: 197484 - DNA, 261 bp, Glycine max
agacgacagaagggagaaggaggagacggcgacgcaattagaagaaaccgcgaaggaacgcgacgcgctgcgatcggagattgggaattcgagccacatgatggtcaccggcatggagaagatctcggcgaaggtgagcagcttctccggcaacgcgctgccgctgccgcgttcgcagaaatacaccggcatggcggcggtggcgtacggcgtaatcaagcgcgcgaatgagatcgtggaggagcttttgaagcagaacga

SEQ ID NO: 197485 - DNA, 262 bp, Glycine max
cgagaagacgacagaagggggagttcaacgagatggagcaaataaagcacagaacagttgaagtgaatggcataaaaatgcatgttgcagagaaaggagagggtccagtggtgttgttcctccacggcttccctgagctctggtactcatggcgccatcagattctctctctcagctccctcggctaccgcgccgtcgctcccgatctccgtggctacggtgacaccgaagcaccaccttcaatcagcagctacaactgctt

SEQ ID NO: 197486 - DNA, 319 bp, Glycine max
tcgcatgcacgcgcacaattcggctcgatacggctgcgagaagacgacagaagggggaagaaggttggttgattggtcccattgattccgaagagaaaagaaaagatgtttgagccacaacagctatacactcacgcgaagaccgaggaattcgacctcgaatcaggagaaaccctctacccagggctgagcgtcggcgagaaccagctccgatggggtttcatccgcaaggtctacggcactctccgcgcagatcgtcctcaccaccctcgtctccgtcaccaccgttttctatactccaatcaatgacctcctcaag

SEQ ID NO: 197487 - DNA, 285 bp, Glycine max
tacggctgcgagaagacgacagaagggccttatctgaagcccttctacttcactagctgcatctgaatgggaagtgaggccaaaaaccttctctggttgaggacatggtgggtaatagttcatcctcatagtctgcatacgatctttaaaaactctatcatttctgtttcttccatctttagagcttttcccattttttcaacaacaaccaggctagatttttaagttcctgtgtgtagagttctaaggtgttcctgagttacaaagagaagtgactctagcatg

SEQ ID NO: 197488 - DNA, 286 bp, Glycine max
tacggctgcgagaagacgacagaaggggacagcagagcaaaagaaagaaagaaactgcaacttcctctgttttgcccccctgtttaggccttttcataagcttagaatgacacacaaggaattttccattgctctagtgactctcattgctgttctctttgtcaacatgaacatccaaggtgccactgctgactatggtagttggcagagtctcatgccactttttatggcgggggtgatgcttctggcacaatgggtggagcatgtgggtatggaaatttgtata

SEQ ID NO: 197489 - DNA, 283 bp, Glycine max
gctgcgagaagacgacagaagggggagctgaaaccgagaagaagaagatggagatgtatcagatctggagcaggagaatagcgttgggagcgttcgcgtttgttctgcttttcctatcggcctcagcagacgacgtcgttgtgctctctgaagataacttcgagaaggaagttggtcaggacagaggagctctcgttgagttctatgctctggtgtggacatgcaaaaagcttgctccagaatatgaaaagcttggtagcagttcaagaaagccaaatctgtt

SEQ ID NO: 197490 - DNA, 288 bp, Glycine max
tctcgagccgaatcggctcgagacggctgcgagaagacgacagatacggggcacaagtgagtactgttgatcgagataactagaaacagtgtgatgaaaatgaaggtccttgttttcttcgttgctacaattttggtagcatggcaatgccatgcgtacgatatgttccctctccgaatgaacactggctatggtgcccgtactccggaggtgaatgcgcaagttggaggcttgctgtggaagcacacaacatctttggctttgagaccattcctgaagagtgcgttg

SEQ ID NO: 197491 - DNA, 287 bp, Glycine max
tcgagaagacgacagaagggggtctcgtggaagtgtaagcaagcaaaaccctagcggcgcctgctttctttgttcgtgttttgcatcaggatggagtctcaggtgaagcacgcacttgttgtcaaagttatgggtcgtactggatccagaggacaagtgacccaggttagagtgaagtttttggatgatcagaaccgtcacatcatgaggatgtgaaaggacctgtgagagaaggagacattctcaccctactcgagtctgaaagggaagcaagaagattgcgctag

SEQ ID NO: 197492 - DNA, 288 bp, Glycine max
tacgacagaaggggggttcgaggaagagggctaagagaaagggtagaggaatatccgcagggcaaggggcaagttgtggttttggatgagaggtcagaaatctcgatctggacctggcgttaggaagggtttcgaaggtggccagatgccgctttatcgccgaatccccaaactcagaggaattgcaggaggtatgcatgcgggattgcccatatgtccatgtaaatctgagagacatagaagatgctaaatttaaggaaggggaagaagtgtctctagagtcactga

SEQ ID NO: 197493 - DNA, 274 bp, Glycine max
actcgagccgaatcggctcgagcggctcgagacggctgcgagaaaccgacagaaggggatcatgaagaagagggtgaagaagttcaagaggcctcagagtgacaggaaaatttctgtcaagacaaactggcgcagaccaaagggtatcgattcccgtgttaggagaaagttcaagggatgcactttgatgccaaacattggttatggttcaacaagaagacccgccactatctccctaatggttctaagaagatttgttgttcacaatgtgaag

SEQ ID NO: 197494 - DNA, 284 bp, Glycine max
cctcgagccgaatcggctcgagtacggctgcgagaagacgacagaccgggatgatcattacacgtatgagactcaatttagttttaacaataatattactagtttcattgatagttgcattgagagtctcaatttaggcgatattgacaaatacaatgatatttatttttatagttacatttttttgaagggcagacattgtagtgaaacgataattctagtactagtataataaccagtacgaatgatacaaatgatagtgattccactataggagagagttc

SEQ ID NO: 197495 - DNA, 281 bp, Glycine max
tacggctgcgagaagacgacagaagggggcacaagtgagtttgttgatcgagataactagaaacagtgtgatgaaaatgaaggtccttgttttcttcgttgctacaattttggtagcatggcaatgccatgcgtacgatatgttccctctccgaatgaacactggctatggtgcccgtactccggaggtgaaatgcgcaagttggaggttgctgtggaagcacacaacatctttggctttgagaccattcctgaagagtgcgttgaagcaacaaaggaata

SEQ ID NO: 197496 - DNA, 285 bp, Glycine max
tctcgagccgaatcggctcgagacgacagaagggaaagagacccgaaaagggtgggaaccgactttggaaatccattgggcatggatttaagactcccagggaagccatcgaaggaacctacattgacaagaagtgccccttcactggcaatgtttccatccgtggccgtatcttggctgtaacatgtcacagtgctaagatgaacaggctattattgttaggaggaattatctccattttatcgagaagtaccagaggtacgagaaaaggcactccaacattcc

SEQ ID NO: 197497 - DNA, 282 bp, Glycine max
agacgacagaagggggtttctgtgtttctcatgccatccgggatgcttggaactctgctttctctgattgatgttttgcctttgttctcgaacactggttggggtcagaaagccaacctggattttctgaagaaacacatgggagctacatttgagaagcgcaccagccttggcgtgcatatatagatcctgcagatgttcattcagagacttcttagctgtgtcgaagatccggtgcacgctctgatgcgcctcagctctttccgacgttgtcactgttaa

SEQ ID NO: 197498 - DNA, 285 bp, Glycine max
tacggctgcgagaagacgacagaaggggggaagttttggaagaaaggaaaagattggtataggttggatggaaggacagagagttctgagaggcagaagcttgttgagagatttaatgagcctttgaataagagggtaaagtgcactctgatttcaaccagagcaggctctttgggtattaatcttcatgcagctaatcgtgttgttatgttgatggttcttggaatccaacgtatgatctccaggccatctatcgatcatggaggtatgggcagaaaaagcctg

SEQ ID NO: 197499 - DNA, 210 bp, Glycine max
tcggctcgagtacggctgcgagaagacgacagaagggggcacaagtgagtttgttgatcgagataactagaaacagtgtgatgaaaatgaaggtccttgttttcttcgttgctacaattttggtagcatggcaatgccatgcgtacgatatgttgcctctccgaatgaacacctggctatggtgccgtactccggaggtgaatgcgcaat

SEQ ID NO: 197500 - DNA, 288 bp, Glycine max
tacggctgcgagaagacgacagaaggggatcaattcaaaatatatcatcaattataagcatgggtctgcggaacacaacgaatgcagtgtcttgccgctttcacaagtttcgtgatgaccaaaagaatctggtcttccaaggtgatgccacgtcttcttccaggggcatagaactcacaaggttagacggtggaggaaaaccagtgggtgcagtgtggggcgagtgttatactcttctccagtgcagctatgggaaagctctacagtggtcgctagctttgaaaccga

SEQ ID NO: 197501 - DNA, 282 bp, Glycine max
acggccgacagaagggggggaaatcgttgggttaaatcagattggaaaaaagatgagaacctggctggggagtggaaccacacctctggccaatggaatggagacgctaacgacaaaggtattcaaaccagtgaggattacagattctacgctatttcagctcagtaccctgaattcagcaacaaggataagacactagtcttcgaatatctgtcaagcatgaacagaagcttgactgcagtggtggctacatgaagttgctcagtggtgatgttgatcaga

SEQ ID NO: 197502 - DNA, 282 bp, Glycine max
tctctagccgattcggctcgagacggctgcgagaagacgacagaggcttcagaaaattgacagtgacaactaccctgagtcactgaaccgtatgttcatcatcaatgctggttctggatttaggctcttgtggaacaccattaagtcattcctagatcccaagaccacctcataaatccttgtcctaggtaacaaataccagagcaagtgcttgaaatcattgatgccagtgaacttccagagttcttgggtggtacttgtacttgtgcagataaaggtggt

SEQ ID NO: 197503 - DNA, 282 bp, Glycine max
tcgagaagacgacagaagggggcataagaacaagcacaaggtctgattcgtgtttccttacatcaacttgtggtctaaaaatgggaaggatgccatgctgtgagaaggtagggttgaacaaaggaccatggaaaaccgaagaagatgagaagctcgtggcttatgttgaaaggcatggccctggaaactggcgttcagtgcctgccaagcgggtcttcaaagatgtggcaagagttgtagactgaggtggatcaactacctaaaccctaatatcaaacgagg

SEQ ID NO: 197504 - DNA, 283 bp, Glycine max
acggctgcgagaagacgacagaaggggaaccaaactaaagataaacaaaatttagaaacaaaaacatgttggtgaaggtgtacggtccaacctatggagcccccaagagggtgctggtgtgtctgattgagaaggaaattgagtttgaaacagtacatattgatctcctcaagggagagaataaggaacctgagttcctaaagctgcacatttggatcacttcctgttattcaagatggtgattatactctctatgaatctcgtgcaataatcagatactttg

SEQ ID NO: 197505 - DNA, 284 bp, Glycine max
agacgacagaagggggagtgtgagagaaaccagtgactgacttttcgagaaagaaaaacaaaaatgagtttccgtcattccatcatgaacgctcttcccattctcctcttcttcctcttcgtttctgcattagtttctgcgaagaaaactggtgatgtgacggagctgcaaattggcgtgaagcataaaccagtatcatgtgaagttaggcacacaaaggtgacagagtcaaagtacactataggggaaaactcactgatggaactgttttcgattctagcttt

SEQ ID NO: 197506 - DNA, 280 bp, Glycine max
tacggctgcgagaagacgacagaaggggagagtgagagaaactagtgactgacttttcgagaaaggaaaaaaaaagagtttccggcattattccatcatgaacgctcttcccattcttctcttcttcctcttcgtttcggcattagtttatgcgaagaaaactggcgatgtgacggagttgcgaattggcgtgaagcataaaccagatcatgtgaagttctggcacacaaaggtgacagagtcgaagtacactatcggggaaaactcactgatggaactg

SEQ ID NO: 197507 - DNA, 281 bp, Glycine max
tacggctgcgagaagacgacagaagggggagggttgtcatcagggagccatactaagaaaaatgatggaaagtctcatattagctctcatgggcatggaattcagagaaggaatgtcatcactggatccgattcacaatatataaatcaatcgggtcttgctctagttagaaagaagagggtgcatacacagttcaatgatctacagaatgttacctacaaaagcgacggcatgcagctgataggtcccatagccaacaagatagagatataagtctcata

SEQ ID NO: 197508 - DNA, 278 bp, Glycine max
aacgcgaccggaggggatattgtgaaactgagagaaattcgcaaaccctaatttcggaaagatcggcgatggctgcctccaaggatcgcgagatcttcgactacatggcacagctcgccgtacaggccgagcgatgcgaagagatggtgttgtcaatgattatcgttgcgaatctcgacgctgaactgactgtggaggctcggaattactttctgttgggtacaagaatgtggttggtcctcggaggcatcgttgaggatcctgtcttccattgagca

SEQ ID NO: 197509 - DNA, 270 bp, Glycine max
tacggatgcgagaagacgacagaaggggcacaagtgagtttgttgatcgagataactagaaacagtgtgatgaaaatgaaggtccttgatttcttcgttgctacaattttggtagcatgagaatgccatgcgtacgatatgttccctctccgaatgaacactggctatggtgcccgtactccggaggtgaaatgcgcgagttggaggctgctgtggaagcacacaacatctttggcttagagaccattcctgaagagtgcgttgaagcat

SEQ ID NO: 197510 - DNA, 261 bp, Glycine max
cagaaaattcttcgtcggtggcaactggaaatgcaatgggaccactgaggaggtaaagaagattgttactactttgaatgaggctaaagtccctggagaagatgtcgtagaagttgttgtgagccctccttttgtgttccttcctgttgtaaaaagtttgctgcgccctgatttccatgtttcggcacaaactgttgggttcgcaaaggtggtgcttataccggtgaggttagtgctgaaatgctgttaatttgggaatcc

SEQ ID NO: 197511 - DNA, 279 bp, Glycine max
caatacgacaactttgcaattttggtggtagaccaaggtaggtcaattgccatggacattggtggtgaagtggaagagaccgtgagagagttgaggcaatacttcaaaactggaaaaaccaagagtgtgacatggaggaaaaaccagctcacagctctcttagaccttgttcatgagaatgaagatgctatatttaagggcctcatcaagatcttgggaagcaccctgttgaggcttaccgtgatgaggttggaggggtagaaaaatccgccagcaatg

SEQ ID NO: 197512 - DNA, 276 bp, Glycine max
tacggctgcgagaagacgacagaagggggtcacaattcaaaatatatcatcaattataagcatgggtttgtggaacacaacgaatgcagtgtcttgctgctttcacaagtttggtgatgaccaaaagaatctggtcttccaaggtgatgccacgtcttcttccaggggcatagaactcacaaagttagacggtggaggaaaaagtgggtggcagtgtggggagagtgtatgactcttctccagtgcacctttgggaaagctctacagtggtcgcaa

SEQ ID NO: 197513 - DNA, 276 bp, Glycine max
tacggctgcgagaagacgacagaagggtaatttgggaattattgctcccatcgccattggtttcattgtcggcgctaacattttgttgggtggggccttctctggagcggccatgaaccccgccgtgacatttgggcctgctgtcgtgagctggacctggaccaaccactggatcttatgggccgggcctctcatcggtggtgaatcgctggccttgtttacgaggttgtctttatcagccacacccacgagcagcttcccaccactgactactag

SEQ ID NO: 197514 - DNA, 281 bp, Glycine max
tctcgagccgaatcggctcgagtacggctgcgagaagacgacagaaaggggcacaagtgagttacgttgatcgagataactagaaacagtgtgatgaaaatgaaggtccttgttttcttcgttgctacaattttggtagcatggcaatgccatgcgtacgatatgttccctctccgaatgaacactggctatggtgcccgtactccgaggtgaaatgcgcaagttggaggcttgctgtggaagcacacaacatctttggctttgagaccattcctgaagag

SEQ ID NO: 197515 - DNA, 266 bp, Glycine max
aagacgacagaaggggagagagagaaactgagagaaattcgcaaaccctaatttcggaaagatcggcgatggctgcctccaaggatcgcgagaacttcgtctacatcgccaagctcgccgaacaggccgagcgatacgaagagatggtggaatcaatgaagaacgttgcgaatctcgacgttgaactgactgtggaggagcggaatactttctgttgggtacaagaatgtgattggtgctcggagacatcgtggaggatctgtctt

SEQ ID NO: 197516 - DNA, 270 bp, Glycine max
tacggctgcgagacgacagaagggggagagggacggtagcagagattccgtgagttgcaaaaatgaaaacaattctttctgcagagaccatgaacatcccggacggcgtgagcgtcaaggttaatgccaaggtcatcgaagttgagggcccccgcggaaaattggtgcgagacttcaagcacttgaatctcgattttcagctcatcactacgaaaacggtaaaaggagctgaaggtggaggctggttcggtctcggaaacatcggcggca

SEQ ID NO: 197517 - DNA, 280 bp, Glycine max
tacggctgcgagaagacgacagaagggggcacaagtgagtttgttgatcgagataactagaaacagtgtgatgaaaatgaaggtccttgttttcttcgttgctacaattttggtagcatggcaatgccatgcgtacgatatgttccctctccgaatgaacactggctatggtgcccgtactccggaggtgaaatgcgcaagttgaggcttgctgtggaagcacacaacatctttggctttgagaccattcctgaagagtgcgttgaatcaacaaaggaat

SEQ ID NO: 197518 - DNA, 278 bp, Glycine max
ttacaatgaggaaaaaggaagggcttgctgattatcgatattttccagaaccagaccttccagcagtaatcctttctcaagaatatgttgatggtataaaaaattctttaccagagcttccagaaattaagcggagaagatatgagcagatgggcttaagcatgcaagatgttcttttcctggctaatgataaaaatattgcatttttttgatgcaactcttgcaaaaggtgctgacccaaagctggttgccaactggataatgagtgatattgctgc

SEQ ID NO: 197519 - DNA, 278 bp, Glycine max
tacggctgcgagaagacgacagaaggggattggaggaagaaaggtgctgtcactgatgtaaaggatcaaggccaatgcggtagttgttgggcgttttcaactattgtagctgttgaaggtattaaccaaatcaagacacataagctagttcccttgtctgagcaagaacttgtagattgtgacactacacaaaatcaaggatcaatggtgggttaatggaatctgcgttcgagtttatcaagcaatacggtataactacagcaagcaattacccttat

SEQ ID NO: 197520 - DNA, 277 bp, Glycine max
acggctgcgagaagacgacagaaggctcagcttgagttgtggaaggagaagagtaccggcaagtacgagaagaaagtttacgttttgcccaagcaccttgatgagaaggtggctgcacttcaccttggcaaacttggagctaagctcaccaagcttagcccggcccaggctgattacatcagtgtgcctgttgagggtccataaagcctgctcattacaggtactaagtaattgagattatcaacggaaagtgagggaaagacaaaatcggttttat

SEQ ID NO: 197521 - DNA, 275 bp, Glycine max
agaagacgacagaagggggagatagagagaggagaaaggaggaaagatgagtagttcatcaaggccggtgccgaggagagagagtccatggggagtcaccggagagaatcatcctgaacccaaagctcaccgctgcaatgaccgtgtcgaggacgttattcaggcttgcttagatggaaacccattcaagactgttccgggactttcaagctcttctggcagtgcatgtgttccaaacccggtgaggaaccaacagccccatttacttatctgga

SEQ ID NO: 197522 - DNA, 290 bp, Glycine max
ctgcgagaagacgacagaagggggaactcataatattcatcactagaagtgttggatgcatttctatttctaactaattattgtgcttattattattgttgagaaagaaaagaatggcaaagttaataaaattctttgagttgaacacaggggccaagattccttctgttgggttaggcacttggcaagctgagcctggtgttgtagccaaagcttcaccacagccattctggttggatacaggcatattgattgtgctcaagcgtataacaatcaagcagagattggtt

SEQ ID NO: 197523 - DNA, 268 bp, Glycine max
cggctcgagtacggctgcgagaagacgacagaagggtacggctgcgagaagacgacagaagggtgagtcttgaactatagctcccatcgccattggtttcattgtcggcgctagcattttgttgggtggggccttgtctggagcggccatgaaccccgctgtgacatttgggccttgtgtcgtgagctggacctggaccaccactggatctactgggccgggcctctcatcggtggtggaatcgctggccttgtttacgaggttgtct

SEQ ID NO: 197524 - DNA, 276 bp, Glycine max
acggcgagaagacgacagaaggggacaagcgagtttgttgatcgagataactagaaacagtgggatgaaaatgaaggtccttgttttcttcgttgctacaattttggtagcatggcaatgccatgcgtacgatatgttccctctccgaatgaacactggctatggtgcccgtactccggaggtgaaatgcgcaagttggagcttgctgtggaagcacacaacatctttggctttgagaccattcctgaagagtgcgttgaagcaacaaaggaatac

SEQ ID NO: 197525 - DNA, 257 bp, Glycine max
cggctcgagacggctgcgagacgacagaagggggtagtggttgggtttgagtgcgtgtgtgtgagaatggaagagagtggtgatgcgagggatcttcagaaaccgttcctccacacagggagttggtacaagatgggttccaggcagtccagcatcatgggatcctccactcacgtttgtcgcgacggcgccgtttccgtcctctctgggcctcatcgtcgccttggtccattcaatcggtttcagtgtgggtatct

SEQ ID NO: 197526 - DNA, 285 bp, Glycine max
acggctgcgagaagacgacagaagggggcacaagtgagtttgttgatcgagataactagaaacagtgtgatgaaaatgaaggtccttgttttcttcgttgctacaattttggtagcatggcaatgccatgcgtacgatatgttccctctccgaatgaacactggctatggtgcccgtactccggaggtgaaatgcgcaagttggaggcttgctgtggaagcacacaacatctttggctttgagaccattcctgaagagtgcgttgaagcaacaaaggaatacatc

SEQ ID NO: 197527 - DNA, 285 bp, Glycine max
tggcaaccttcttctacaaaccatgtaattatgagttgtttgtgaagcaatctttgaacatggaaatggctattgtcatggcaagggattctggagtggattggataattcatctggatactgatgagctgatgcatccagcaggaacgcaagagtattctttaagacagttgttagcagatgtgcctggaaatgttgatatggtcatttttccaaattacgaaagcagtgtggagcgagatgatatcaaggagcctttcagtgaggtttcaatgttcaagaaga

SEQ ID NO: 197528 - DNA, 286 bp, Glycine max
acggctgcgagaagacgacagaagggaactccttgggataaagatagtgttgccatgttttcaacgctctaactaaggcatacaactccttatcataagtagaatagttaagggtaggaccacttaatttttcactaaaataagcaattggatgaccttcttgtaacaatacagccccaatcccaacatttgaagcatcacattcaatttcaaaagattttgaaaaatttggcaaagcaagtatgggggcaaaggttaaattttgcttaggagcattgaaagcttc

SEQ ID NO: 197529 - DNA, 292 bp, Glycine max
tacggctgcgagaagacgacagaaggggacaccaacaccaaaacaaacccactaagatggcttcctttgtatccttcctagtgctgcttcttgcagcccttatcctcatgcctcaagggcttgctacttactacaaaccaattaagaagccaccagtgtacaagcctccagtgtacaagccaccagtgtacaaaccaccggtttataagccaaaaccaccggtttacaagccgaaaccaccggtttacaagccaccatataagaagccaccatacaagaaaccaccttatgg

SEQ ID NO: 197530 - DNA, 263 bp, Glycine max
acggctacggctacgcgacgtagaggccacggtgaccgtgcttgatgtttcgagaaatgcactttccggcgaggttccgccggaggtaggaaaccttatcaagttggaggagttgaagatggcgaataactccgtcacaggcaccatcacggtggaactcaagacacgcgggtcacgaagcgtcgatgagtctccgggcaacggatttcgtggcgaaggtccgtctcagtttcggtgctatgagtggcctcgctgtgctgtct

SEQ ID NO: 197531 - DNA, 261 bp, Glycine max
agacgacagcaaggggggagttcaacgggatggggcaggtaaggcacagaatagttgaagggaatggcatgaaaatgcatgttgcggagaaaggagagggtccagtggtgttgttcctccacggcttccctgagctctagtactcatggcgccaccagattctctctctcagctccctgcggctatcgcgacgtcgctcccgatctccgtggctaccgtgacaccgacgcagcgctgcaatcatcagctacgactgcttcc

SEQ ID NO: 197532 - DNA, 286 bp, Glycine max
actcgagccgaatcggctcgagacggcgagaagacgacagaaggagggaggaggaaatcggtcgtctataccgaataaggacgacggtgatgcagatgctgagggacagaaattttctggttggtgacttcgagatcaacatgtccaagcacgagttcaagtccaagtgcggcgaacacatgaagcgcgaggacctcgtcatcaacaaatccaagaaggacaactccggcgaccagatctacgttttcttccccgacgaacccaaggtcggcgtcaagaccatgaa

SEQ ID NO: 197533 - DNA, 285 bp, Glycine max
tcgaagagacagaaggggagaagcagaaagagaagcattagcaaaagcaagaagaactagtctaagcagaaatggcctcttcagtgatggcatctgtggccctcaaacctgcccctttcactgttgagaagtcctcagttagaggccttccctccctctcaaggaactcctcttcattcagagttgtggccagtggtggcaagaagatcaagactgacaagccttatggaattaatggtggcatggctttgagggaaggagttgatgcatctggcaggaaaggaa

SEQ ID NO: 197534 - DNA, 287 bp, Glycine max
tacggctgcgagaagacgacagaagggggcatcaattcaaaatatatcatcaattataagcatgggtttgtggaacacaacgaatgcagtgtcttgccgctttcacaagtttggtgatgaccaaaagaatctggtcttccaaggtgatgccacgtcttcttccaggggcatagaactcacaaagttagacggtggaggaaaaccagtgggtggcagtgtggggagagtgttatactcttctccagtgtacctttgggaaagctctacagtggtcgcaagctttgaaa

SEQ ID NO: 197535 - DNA, 286 bp, Glycine max
cgagaagacgacagaagggggaagcttatcagagaaacttatgcccagacctatggagaagatctcctcaaggccttggacaaagaactcacgagtgattttgagaggctggttcatctttggacacttgattctgctgaacgtgatgcatttttggcaaacgaggcgactaaaaaatggacttcaagcaatcaggttctggtggaaatagcctgcactaggtcctctgaacaattgtttgctgcgaggaaggcttaccatgttctttataagaagtctctggagg

SEQ ID NO: 197536 - DNA, 288 bp, Glycine max
tcaaagtgagtaaaaagcttttattctgataaaaatatcgctataaagaatgatgaaaaaatcgttatcatcgcaaataaaattttatagcttataattatttttttagattatttgtagttatttttttttcattttatacctgataatcaaataatttaaatacaggtttaactactaaaatgattttatatggttttttatgatttgccgcttaaaaaactaaaaattctaaataaaaagaattatcttaaaatctccacttgaaatatttaactataatgagtt

SEQ ID NO: 197537 - DNA, 286 bp, Glycine max
acggccgacagaagggggggaaatcgttgggttaaatcagattggaaaaaagatgagaacctggctggggagtggaaccacacctctggccaatggaatggagacgctaacgacaaaggtattcaaaccagtgaggattacagattctacgctatttcagctcagtaccctgaattcagcaacagtgataagacactagtcttccaattttctgtcaagcatgaacagaagcttgactgcggtggtggctacatgaagttgctcagtggtgatgttgatcagaaga

SEQ ID NO: 197538 - DNA, 284 bp, Glycine max
cggctgcgagaagacgacagaaggggggagttacttgaaacgacatcgtttcagggaagggagtgaagtgatagaggaaaccgtagaacagtggtggaaaaatgaaggcattgggatggtggctgatagcggtaggcacgcttcgattggcctccgtgtggttcggtttcttcgacatttgggctcttcgactcgccgtcttctccaacactacaatgactgaagttcatgggcgcacatttggaacttggacactgttgacctgcaccctttgctatatctgc

SEQ ID NO: 197539 - DNA, 285 bp, Glycine max
aagacgacagaaggggaagaaggtgttccattttcaacactcatcagatcccagtcatcaattgcgttaacaactcgtaaggcaaccatgaggggcattctttctgtaaggacagccttggttcaacatcgtagtgagaaattgggccttggtttcaggctatttagcactcagggtgcttccactgctagtaccccacagccgccgccaccacctccaccaccagagaaaacccattttggtggccttaaggatgaggacaggatatttactaacttatatggg

SEQ ID NO: 197540 - DNA, 286 bp, Glycine max
cggctcgagaagacgacagaagggggcacaagtttgttgagatagctagaagcaataagatgaaaatgaaagtgcttgttttgtttgttgctacagttttggtagcatatgaatgccatggctcagactaccagaagttccctctccaaatgaaaactgggtttggtgggcaatacagcaatgaggtggcatgtgccagttggaggcttggcgtggaagcaaacaacgtagtcaagtggcaaactgttcctgcagcttgcggagagtacatagctgactacgttct

SEQ ID NO: 197541 - DNA, 294 bp, Glycine max
acggctgcgagaagacgacagaagggggcacaagtgagtttgttgatcgagataactagaaacagtgtgatgaaaatgaaggtccttgttttcttcgttgctacaattttggtagcatggcaatgccatgcgtacgatatgttccctctccgaatgaacactggctatggtgcccgtactccggaggtgaaatgcgcaagttggaggcttgctgtggaagcacacaacatctttggctttgagaccatcctgaagagtgcgttgaagcaacaaaggaatacatccatggcgaac

SEQ ID NO: 197542 - DNA, 282 bp, Glycine max
acgggctgcgagaagacgacagatgggggaacggaaaagcactggcgcagctaccctgaggcttctcttctcttctcttctctgtcgtgagtcaccatggtgagggttagtgtgctgaacgatgctctgaagagcatgtacaatgctgagaaaaggggaaagcgccaagtcatgattaggccatcctccaaagtcattatcaaattccttttggtgatgcaaaagcacggatacatcggagagtttgagtatgttgatgaccacagggctggtaaaatcgtg

SEQ ID NO: 197543 - DNA, 283 bp, Glycine max
tacggctgcgagaagacgacagaagggggcacaagtgagtttgttgatcgagataactagaaacagtgtgatgaaaatgaaggtccttgttttcttcgttgctacaattttggtagcatggcaatgccatgcgtacgatatgttccctctccgaatgaacactggctatggtgcccgtactccggaggtgaaatgcgcaagttggaggcttgctgtggaagcacacaacatctttggctttgagaccattcctgaagagtgcgttgaagcaacaaaggaatac

SEQ ID NO: 197544 - DNA, 282 bp, Glycine max
cggctcgagaagacgacagaagggggcacaagtttgttgagatagctagaagcaataagatgaaaatgaaagtgcttgttttgtttgttgctacagttttggtagcatatgaatgccatggctcagactaccagaagttccctctccaaatgaaaactgggtttggtgggcaatacagcaatgaggtggcatgtgccagttggaggcttggcgtggaagcaaacaacgtagtcaagtggcaaactgttcctgcagcttgcggagagtacatagctgactacg

SEQ ID NO: 197545 - DNA, 282 bp, Glycine max
tacggctagacgacagaaggggagcgccaatgtttttttcagaggagtttcatcttgtaatcaaaagagtttatcttatagtaagaaatcgatgtcttactccattttaaggaacaaaacaagagaacaatagcctgacaaagggtttagccataaaatcgaatccatcattgatttgagatattgataaggtgaatactcatttctcgtcaatgctaggcataatgcgggtatagggacctaaaaaagattatcttttcttcctatcttatgaactttaag

SEQ ID NO: 197546 - DNA, 280 bp, Glycine max
agaagacgacagaagggggcgaggttgtgtcggccaaggtcattcgaaataagcaaactggtcagtctgagggatatggattcgtggagttctattcacgagcgacggctgagaaactcttgcagaactataatggcacgatgatgcccaatacagatcaggcattccgtctgaattgggccacattcagtgcgggggacaggcgttcttccgatgctacttctgatctctctatattcgtgggggacttggccattgatgttactgatgctatgctgca

SEQ ID NO: 197547 - DNA, 282 bp, Glycine max
acggctgcgagaagacgacagaaggggacactaaacaagttaaaagaagagcatcactgaactaacaaagcaaccctatgtcgaaggtggtttgtgtcaccggagccagcggcgccatcggatcatgggtggtcctactcctcctccagcgtggttacaccgtccatgccaccgtccaagatatcaaggatgaaaatgagacgaaacatttggaggaaatggaaggagcaaagagtcatctccatttttttgaaatggatcttcttgacatcgactccattg

SEQ ID NO: 197548 - DNA, 290 bp, Glycine max
actattttagtgaaatttcactgtctcaattcccgggcgattacacaaacgcatacattgcagtttggatttcctccctgaacaatgacaactgaagcattatcatcatactgaattattataccgttgctacgtttgagttctttacaagtacgtacaattacagctctgatcacttctgatctttctaagttcgtatttggcactgcttgtttgattacagcaacaacaatgtcaccaatataagcatatcgtcgattactagctcctaggattcgaatacacatcag

SEQ ID NO: 197549 - DNA, 282 bp, Glycine max
agacgacagaagggggagttcaacgagatggagcaaataaagcacagaatagttgaagtgaatggcataaaaatgcatgttgcagagaaaggagagggtccagtggtgttgttcctccacggcttccctgagctctggtactcatggcgccaccagattctctctctcagctccctcggctatcgcgccgtcgctcccgatctccgtggctacggtgacaccgaggcaccaccttcaatcagcagctacaactgcttccacatagtgggtgatctcgttgcg

SEQ ID NO: 197550 - DNA, 280 bp, Glycine max
tctcgagccgaatcggctcgagctgcgagaagacgacagaagggaagtagacccggaaagggagggaaccgcttttggaaatacattgggcttggatttaagactcccagggaagccatcgaaggaacctacattgacaagaagtgccccttcactggcaatgtttccatccgtggccgtatcttggctggaacatgtcacagtgctaagatgaacaggactattattgttaggaggaattatctccattttatcaagaagtaccagaggtacgagaaaa

SEQ ID NO: 197551 - DNA, 283 bp, Glycine max
aagacgacagaagggggagagagaagcctccatttataaaacatcgtgtgcgcactctctcttctcctaggtttcgctcccatcaacagcaacgatggtgcagaggctcacttatcgcaagcgccatagctatgctaccaaatccaaccagcaccgggttgttaagacccctggtgggaagttggtgtaccagaccactaagaagagagcaagtggacctaagtgccctgtcactggcaagaggatccaagggattccacacttaagacctgctgaatacaag

SEQ ID NO: 197552 - DNA, 283 bp, Glycine max
cggctgcgagaagacgacagatagggaagcataggattctctctctagcttggacgagtgaattagagtcatcatccagatgtcgcctctgatagcagaagatgtgaagagcagatcagaggtgtaccacggggacgaaatgtgccaagtgaagtccaaggagcttctcaaggaaatcgccctccccaacggccttcttcccctcaaggacatggaggagtgcggctacgacagacaaaccggcttcgtctggctcaaacaatagaagagttacacccacaag

SEQ ID NO: 197553 - DNA, 285 bp, Glycine max
acggctgcgagaagacgacagaagggatcctcttgaagtacttgtttatgttctcccatttctctttacacctctttgcacttcgatcataaccaatgctcttcatagccaaagatatctcctcccaaagaggccctttagacccattattactattattattattcccttgtgcctgcatctcaaactcagtccttaaccttatcaaagcctccacttcatccttcggccaccgcgaactactcatgtgcacaaaattcccaacactaacaccattatttccac

SEQ ID NO: 197554 - DNA, 294 bp, Glycine max
cggctgcggaagacgacagaaggggaggaccaagaagaagaaacaacctcaatatccctttcttgtgtcgattagattactttcacaccagagtcgttcgagtacttcaccttctttctctctaagcgcaaaacctcgtactgtttttggcggttaaggatgtcggggaaaggagcgaaggggttgatcacaggcaaaacctccgccgccaacaaatccaaggacaagaaggaacccatctcgcgttcttctcgtgccggccttcagttcccagttggtcgtatcctacggctt

SEQ ID NO: 197555 - DNA, 289 bp, Glycine max
taccgagaagacgacgaagggactggaagaagaactacattttcccgataacgagccacttattgtgagagacgggaacagaaggctaatgcaagacatagattgtggtgggttgtgcaagacgaggtgcagtgcacattcgagacccaacttgtgcactagggcgtgtggcacgtgctgtgtgaggtgtaagtgtgtcccacctggcacatctggaaatagggaactatgtggaacttgctacactgatatgactacccatggcaacaagaccaagtgcccttagaga

SEQ ID NO: 197556 - DNA, 282 bp, Glycine max
tacggctgcggaagacgacagaaggggggtgcctctgcttcctacacgcagggtttcccgaagatttaacacctatggctcctaaagctgatagtttaaagaaggctgatccaaaggcacaagccttgaaaactgctaaggctgttaagtcaggtgctactttaaagaaaaagaccaagaagatccgaacatctgttaccttccatcgaccaaagaccttgaaaaaggataggaaccctaaatacccacgcattagtgctccacccaggaacaagcttgatc

SEQ ID NO: 197557 - DNA, 280 bp, Glycine max
ttgcgagaagacgacagaaggggatggccgctgctctgcgtcgcgaaggaaggcgtttgacccaaccaatcaacgccctccgttcctctctcatctctcaagaccaatcccctcatggcgcgcgcttcatttccactcaagtggtgagaaaccgaatgaggagtgtgaggaatatccagaagatcaccaaggccatgaagatggttgccgcatccaagctgagagccgttcagaccagagctgaaaattcccgcggcctctggcagtcgttcaccgctct

SEQ ID NO: 197558 - DNA, 280 bp, Glycine max
acggctgcgagaagacgacagaaggggaaagtaagcagcgttgcaacgctgtttcctttctgtttcttttcttcttccttccgacgagatctacaacgttgttgatgtttagatcttgaatagtgttttggtgttcggtgagatgcgtgaaaggaagcaatcacgttatgtgaagttgactaaagatcagacacctctcgaagacattacccctggcgaactcaaccagccaattcaggttcctcagttggacgttcgcgagtgccctgaatgtagacag

SEQ ID NO: 197559 - DNA, 278 bp, Glycine max
tacggctgcgagaagacgacagaaggggaaaacaaacaatttaccagctatacttgttccttttgaaggttagaagtgctacaatacaaacaatggcagctactcaggaagatgtgaagcttttgggtattgtgggaagcccatttgtgtgcagggtccagattgcccttaagttgaagggagttgaatacaaatttttggaagaaaatttgggcaacaagagtgatttgcttctcaaatacaaccctgttcacaagaaggttccagtgtttgttcac

SEQ ID NO: 197560 - DNA, 278 bp, Glycine max
gggctcactcatctcttacaacgaaaccctcttcatcttgttctatctgtgacgagcatcatggcctcaagagcagtgttattgttggctatgtgtgtgcttccggcgatggttgtggccattcgcccagcaaagaaccctttttgcgtgaagggtcgtgtctactgtgacccttgccgtgctggttttgagacctcagctaccacctacattgctggtgctgagattatgttgcaatgcaagagcagggttagcaacgaggttgtgtacacgaagaa

SEQ ID NO: 197561 - DNA, 289 bp, Glycine max
tacggctgcgagaagacgacagaaggggaatcaatgactattcatgattccataattgaatcaattacatactggatccaagctaaaggaatgttatggtaaaacttcgtttgaaacgatgtggtaaaaagcaacgtgcgacttgaaagacatgattagattagctgtggattcttacatccggcattttttctagtatatagaaatgaacatgctcttgactcgacatcgtttgtactgttccactagaacttattgttttggggacgggagagcagttgatgatgta

SEQ ID NO: 197562 - DNA, 290 bp, Glycine max
tacggctgcgagaagacgacagaagggggcctgcgagtgtgcttaaaccctagcccctcttctcttcattcttcactcaggaaacaagcataatggccttctgtaataaggttggaaatgtcttgaggcagggtgctgctcgcagcacacaagcacctgtttcatccatgcttaattacattcgctgcatgtcttcaagcaagctttttattggaggcctttcatatggagttgacgatcagtctcttaaggatgcattttctggctttggagatgtggttgatgcaaag

SEQ ID NO: 197563 - DNA, 279 bp, Glycine max
aggctcgagctcgagccgaatcggctcgagacggctggagaagacgacagaaggggcttctgcatcgtatcttacttctcagcagcttcggctagggttcagaaacgaaaaagggttcggtgttctgttcgcgatgagagccaagtggaagaagaagcgtatgaggaggttgaagaggaagcgccgaaagatgagacagagatccaagtagtgcgttaaacctagtttgtttctgttgcttttacaattgcttatgttgtcgaatgggacacccagttg

SEQ ID NO: 197564 - DNA, 279 bp, Glycine max
ctgcgagaagacgacagaagggggaggaagccacatggagaccaatacagagtgagttgttgctccttcgccacaactctctgccaacatgggtatctccagagattctatgcacaagaggcgtgccactggtggcaagaagaaggcctggaggaaaaagagaaagtatgagcttggtcgccagcctgctaacactaagctgtcaagcaacaagacagtcaggaggatccgtgttagaggtggaaatgtgaaatggagggcattgagattggatactgg

SEQ ID NO: 197565 - DNA, 279 bp, Glycine max
tacggctgcgagaagacgacagaagggagttatcagattttgattgttgcaactggctcaacagttataaggctgacagattttggtgtagaaggagctgatgcgaaaaacatcttttatttgagggaggttgatgatgctgacaaattgtatgaggcaatcaaggcaaagaagaatgggaaagctgtggttgttgggggaggatacattggtctggagcttagtgcagtgttgaaactcaacaatattgacgttaccatggtctacccggagccttgg

SEQ ID NO: 197566 - DNA, 278 bp, Glycine max
tacggctgcgagaagacgacagaagggggcgcattgaacgaaattagggtttgtagtgtagcaggaagaagcagcaatggcgccgaagataacacgtaaggttagcagaaaccctgaattgataaggggaatcggaaagtactcgaggtcgcagatgtaccacaagaggggcatttgggctatcaaggccaaaaacggtggcgttttacctcgccacgaccctaaacccaagcctgaagctcctgctgaaaaaccacccaaattttaccctgctgatg

SEQ ID NO: 197567 - DNA, 278 bp, Glycine max
gcgagaagacgacagaaggggaaccccaattccaactctaattctcataacatatcaaatctctactcatggttacttgtttgcttcttggatcatacaatttatagccaccaatagcatggtaactaatcaatatgacttgctcacccttgtcatccagtttccttctcaattagtcaggaatatgtttgtagcagattgaaccaaacactctaaggtgagctacacatggtttcacaccagtccaagcttcttctagtgtcatacctgtaagtctc

SEQ ID NO: 197568 - DNA, 275 bp, Glycine max
acggctgcgagaagcgacagaaggggaagaaagatcatcattgatacctatggtggctggggtgctcatggtggaggtgccttttcagggaaggaccctaccaaggttgacagaagtggtgcctatattgtaaggcaggctgcaaagagtgtcgtggcaaatggccttgctagaaggtgcattgtgcaagtttcctatgccattggtgtccctgagcccttgtcagtgtttgtggacacttatggaactgggaagattcctgacaaggagattct

SEQ ID NO: 197569 - DNA, 278 bp, Glycine max
tacggctgcgagaagacgacagaaggggacgaggaagaggaaagaggattagagggtcgccacgtttagcaataaccaaaccctctctactcttttttcttctccttctcttcgctagggttttagcttcttcctcttcacttcgttctttttcgcctctacaatgagcaacgacaaggacacattcaacgtcgccgatctcacttctgctctcaacgaggacaatagagcagaccttgtcaatgctcttaagagcaagatacagagtttggctggac

SEQ ID NO: 197570 - DNA, 274 bp, Glycine max
cggctgcgagaagacgacagaagggggcacaagtgagtttgttgatcgagataactagaaacagtgtgacgaaaatgaaggtccttgttttcttcgttgctacaattttggtagcatggcaatgccatgcgtacgatatgttccctctccgaatgaacactggctatggtgcccgtactccggaggtgaaatgcgcaagttggaggcttgctgtggaagcacacaacatctttggctttgagaccattcctgaagagtgcgttgaagcaacaaa

SEQ ID NO: 197571 - DNA, 277 bp, Glycine max
tacggctgcgagaagacgacagaaggggtagctgaagttcttgagaggaacaaattacctggtgcaatattcacctctttctgtggaggtgctgacattggtcaggcaatagcaaaagacactcgcattcccctggtttcatttactggaagttcaaaggttggcttgatggtccagcaaacagttaatgagagatttggcaaatgcttgcttgcagttaagtggtaacaatgcaataattgtcatggatgatgcagacatcaaattggctgtacgc

SEQ ID NO: 197572 - DNA, 277 bp, Glycine max
tacggctgcgaagacgacagaaggggatcgaagcaaaaaatgaaaacccaaagtgcttctctcctctgtctttttctctctcttgctatccttttggctagtggcactgctgcaagtgcaactccaagaagcgcagtgccaagccaccatgtttcaacattcaacagaagcctttttccttccacttttctctttggaattggttcttctgcttaccaggcagaaggagcagcaagtgtagatgggagaggaccaagcatatgggacacctacacta

SEQ ID NO: 197573 - DNA, 278 bp, Glycine max
gctgcgagaagacgacagaagggggttgacaaaggaaacgtgtagtacgagggccaatttccaaaaaccttttgtctcgcaacctcacctcttcctccttcaatctctttcggaatttcccaaaatccttagtgggaggaagagatggttctgactcagaagattcacgaagctttcaaaggcaccgtcgagaggatcactggcccccgaaccgtttccgccttcaaagaaaaaggagttctcagtgtctccgagttcgtcaccgccggcgataatct

SEQ ID NO: 197574 - DNA, 275 bp, Glycine max
tacggctgcgagaagacgacagaagggggttttggggtttctgattaactctttcttctcataactctgccgccgcaacagccccaaatccaatggcttcagagaagaaactttcgaacccaatgagggagataaaggtgcagaagctcgtcctcaatatctccgttggcgagagtggagatcgtctcaccagagccgctaaggttttggaacagcttagtggccaaacccctgtgttttccaaagcaaggtacacggttcgttcctttgggatt

SEQ ID NO: 197575 - DNA, 275 bp, Glycine max
tagctgcaataagactacagaagggggagctaaatgatttgttcaaaatcgctgttactcaacccaaagtgcctgttggtgttgatcccaagtccatattatgtgagttttataaagtggggcagtgtgccaagggcttcaaatgcaagttctcgcatgatttgaatgttcagaggaaaggggagaagattgacatttacagtgataagcgtgaccaggaaacaatggaggattgggatcaagagaccttggagaaggtggtggagtcaaagaaa

SEQ ID NO: 197576 - DNA, 252 bp, Glycine max
  unsure (1)..(252): unsure at all n locations
gaagacgacagaagggggggtgccattgttgttgcattatcatccgcagctgcttttattcgcaccgcaaacagtgagccatggccgtcggaaagaacaagcgcatctccaaggggaagaagggtggcaagaagaaggcagctgatccctttgccaagaaggattggtatgacattaatggtnccctctgttttcaagtggaaaatgttggcaaaaccctcgtctcacgtactcagggtaccaagattgctt

SEQ ID NO: 197577 - DNA, 269 bp, Glycine max
tacggctgcgagaagacgacagaaggggtcgagatcgagatctaggtcaaggtcgagatctaggtcgaggtctaggcctagacaaaggccaagatcgcgttctagaagtcgtggcaggtcaaggtcaccaattcgtggaaggtcaaggtcaccaattcatggaaggtctgaacctacaaatcctggtgacacactttatgtaactggtctatcttcgagggtcaccgaaagagacctagaggggcatttctccaaggaaggaaaggttt

SEQ ID NO: 197578 - DNA, 247 bp, Glycine max
gggttgcaccttggtaaggtgagaaaatatggcatttgcaggaacaactcagaagtgcatggcttgtgacaaaacagtttatctggttgataagttgaccgcagataaccgagtgtaccataaggcttgcttcagatgccaccactgcaaaggaacactcaagctcagcaactataactcttttgaaggagttctttactgcaggccacactttgaccaactgttcaaaagaactggtagtcttgac

SEQ ID NO: 197579 - DNA, 272 bp, Glycine max
tacggctgcgagaagacgacagaaggggaaacattcattctttgtttgcttctcaagtctctcgaagcctctttctctctcttctagaagctatctgtgtttggtgttactaagtctccaacaagcaaagtacatggttgatttggaaatccaggtccccaccccattcgacccgtttgccgaggtgagagaatcggatgcccccggagcaaaggagtatgtgcatattcgaattcagcagaggaatgggaagaagagtctgaccacagtgc

SEQ ID NO: 197580 - DNA, 265 bp, Glycine max
acggccgagaagacgacagaaggggaaacaaggtcaagggataaatttgggttccaggaagagaacaaatttgattctcttaacttaagcatgttgaacctggactctaaatttactgagaatgtgagcaaaagcctcgcttcgaaatggtgtttatggtatgaatgcagtgtatcagaaaaacaatgcaaacttggtgagtaatgtgatcagtaacaagtacaatggtaatattcttcataacaaagagatcaacaacaacacc

SEQ ID NO: 197581 - DNA, 266 bp, Glycine max
tctcgagccgaatcggctcgagcggctcgagacgctgcgagaagacgacagaaggggactgacactttgctctctgtgaggattcaatttccaattagggtttcgcttagagtaaccaattaccatgggagtcttcacctttgtcgttcgcaaatccggcgccgaatggagcgccaagcaacattccggcgacatcgaggcctccgccgactccacctacgatctccaaaggaagctcgtgcaagccgctctcgccgttgattcct

SEQ ID NO: 197582 - DNA, 270 bp, Glycine max
tacggctgcgagagacgacagaagggaaagagcccggaaagggtgggaaccgcttttggaaatccattgggcttggatttaagactcccagggaagccatcgaaggaacctacattgacaagaagtgccccttcactggcaatgtttccatccgtggccgtatcttggctggaacatgtcacagtgctaagatgaacaggactattattgttaggaggaattatctccattttatcaagaagtaccagaggtacgagaaaaggcactcca

SEQ ID NO: 197583 - DNA, 266 bp, Glycine max
tacggctgcgagaagacgacagaaggggaggagagtgaagttttgtggtgtggtttagtgtcaaatggcggcgagtagaagcacttttcctctgatgaaatacttgagagtgcgcgtcgacgctcttccccgcaacactcccttaaccctcgctcccaactttttgattcgccgcttctgtgaagaggttaggggttgttttctcgacaagtctgaggtcacagatcgcgtcatttcctgcgtcaaaaacttccagaaagttgatc

SEQ ID NO: 197584 - DNA, 269 bp, Glycine max
tgcgagaagacgtcagaatggaagccaaatgcaagattcttcagctataatccagcaacaaagaagacaaccctgcttgcccaagacctctactttgccaatggggttgcagtttcagcagatcaacaatttgtggtcttctgtgaatctgtcttgatgagatgcaataaatatttcgtcctgggccctaaaacaggaaccatagagaagttctgtgacctgcctggcatgcctactaacattcattatgatggacaagggcactattt

SEQ ID NO: 197585 - DNA, 219 bp, Glycine max
agaccaaacaaaactttggcaccaggttaattaaggagagggtatagtatggcacagtctagtggcaaaactttggtgcagtggttggtagcagcattgctcattgccttgttgggtggtgcacaagctgttgcaatatgtaacatagactccaagtcaattaaacttgtgtcgtgctgcagttactggtcaaaaccctccaccaccggatgagaaatg

SEQ ID NO: 197586 - DNA, 267 bp, Glycine max
cggctgcgagaagacgacagaaggggagggtggaaatgggtatgtgatgagagtgagattggcgtcgttcttcaccggggctgcagcggcgtcgtttctggggctctacaccctccacaaggattacaaggtcccgcaccaatcctttactcaacagatcccatcatcatgatagacattgctcgtctcccacactttgtgtaaatcttctcaaaagcaaacaaaagacagaaaacatatattacaaagtgttgttgaaggaaacaa

SEQ ID NO: 197587 - DNA, 267 bp, Glycine max
tacggctgcgagaagacgacagaagggaacaccactactaccaagtgaaaaagcaactaagcatagtgtgtaagaaagggagaaaaacaagtgctgtgtagagagaaaaatggctaggtggtgcatgatcttggtggttcttgctcttgccgtggttgcaagtgccagaaacatgcccaatgacgctggtttggaggaccagaagaacttccttgggtatgggttttcgggagttggcaacaatggccttccctttggtggagtggg

SEQ ID NO: 197588 - DNA, 268 bp, Glycine max
tacggctgcgagagacgacagaagggggccgtctctgagaaaaacagatagtgtgggagagagaagagcggaagagagaatgacgaccaggttcaagaagaacaggaagaagagaggtcacgtcagcgccggacacggccgtatcggaaagcaccgcaagcatcccggaggtcgcggtaacgccggtggcatgcatcaccaccgtatcctcttcgacaagtaccatcctggtttcttcgggaaggtaggcatgcgctacttccacaaa

SEQ ID NO: 197589 - DNA, 275 bp, Glycine max
ttcggatcgagggggatttccaaagtttttaatagagggaagtctcaaaaaatcgaagaattacagacgaatatgcaaaaaaaactgaattgtgtgaatcgaaaactaaacattgctattgtaaaagttgcaaatgcttataaacaccccaatattattgcagaatttatagctggacaattacagcatagagtttcgtttcgtaaagcaatgaaaaaagctattgaattaactgaacaggcgggtacaaaaggagttcaagtacaaattgcagg

SEQ ID NO: 197590 - DNA, 258 bp, Glycine max
ctgcgagaagacgacagaagggggggtagaggatgagccaccagagcccgagattgaggaaggtgcagaggaagatttggagaacaaaaacgatgagttaactggagagcctattgacactgaggataaggaagaggaacaaccagtggagcggcctcgaaagacatcaaaatatatgactaagtatgagcgtgctaggattttaggtacccgtgctcttcaaatcagtatgaatgcacctgtcatggttgagttgga

SEQ ID NO: 197591 - DNA, 266 bp, Glycine max
cggctcgagtacggctgcgagaagacgaagaagggggcatcaattcaaaatatatcatcaattataagcatgggtttgtggaacacaacgaatgcagtgtcttgccgctttcacaagtttggtgatgaccaaaagaatctggtcttccaaggtgatgccacgtcttcttccaggggcatagaactcacaaagttagacggtggaggaaaaccagtgggtggcagtgtggggagagtgttatactcttctccagtgcacctttggga

SEQ ID NO: 197592 - DNA, 266 bp, Glycine max
tacggctgcgagaagacgacagaagggtaagagacccggaaagggtgggaaccgcttttggaaatccattgggcttggatttaagactcccagggaagccatcgaaggaacctacattgacaagaagtgccccttcactggcaatgtttccatccgtggccgtatcttggctggaacatgtcacagtgctaagatgaacaggactattattgttaggaggaattatctccattttatcaagaagtaccagaggtacgagaaaaggc

SEQ ID NO: 197593 - DNA, 265 bp, Glycine max
taggctgcgagaagacgacagaagggggagactaccattgctacgccccaaaagcacttttcctccctctgacttttgctgcaactactaccagtacaagttggaatggctcgattttcattggatgagatatcagacactggtgcctttgtgagatctgcttcaacattcagaaattggatttcgagggacccgaattcgctgtttccaccggaatcagggaggtatcatctctatgtatcatatgcttgtcctggggcttcca

SEQ ID NO: 197594 - DNA, 267 bp, Glycine max
tacggctgcgagaagacgacagaagggacacaagtgagtttgttgatcgagataactagaaacagtgtgatgaaaatgaaggtccttgttttcttcgttgctacaattttggtagcatggcaatgccatgcgtacgatatgttccctctccgaatgaacactggctatggtgcccgtactccggaggtgaaatgcgcaagttggaggcttgctgtggaagcacacaacatctttggctttgagaccattcctgaagagtgcgttgaa

SEQ ID NO: 197595 - DNA, 261 bp, Glycine max
gacgacagaaggggggcacaagtttgttgagatagctagaagcaataagatgaaaatgaaagtgcttgttttgtttgttgctacagttttggtagcatatgaatgccatggctcagactaccagaagttccctctccaaatgaaaactgggtttggtgggcaatacagcaatgaggtggcatacaccagttggaggcttggcgtggaagcaaacaacgtagtcaagtggcaaactgttcctgcagcttgcggagagtacat

SEQ ID NO: 197596 - DNA, 254 bp, Glycine max
acggctgcgagaagacgacagaagggggcatcaattcaaaatatatcatcaattataagcatgggtttgtggaacacaacgaatgcagtgtcttgccgctttcacaagtttggtgatgaccaaaagaatctggtcttccaaggtgatgccacgtcttcttccaggggcatagaactcacaaagttagacggtggagaaacaccagtgggtggcagtgtggggagattgtcatactcttctccagtgcacctggg

SEQ ID NO: 197597 - DNA, 190 bp, Glycine max
tacggctgcgaacgacagaaggggacacattggtatcgatgtcaactctattgtctccaaggcaactgctaggtgggagtggcaaaatggcaaaatagccactgtacatatcagctataactctgcctctaagagactcactgttgctgctttctatcctggcactcaaactgtgacactctcccatgat

SEQ ID NO: 197598 - DNA, 232 bp, Glycine max
cgacagaaggggaacgcagccaagaaaagaaaatcctcacccattttcttcgtagccaaacactctgaaattctcagttatgtcgtggcaagcgtatgtggatgatcacctactgtgtgaaatcgaaggtaaccacctcactcacgccgctatcatcggccaagacggaagcgtttgggctcagagcaccaacttccctcagttcaaacctgaggaaatacctgccatcaat

SEQ ID NO: 197599 - DNA, 261 bp, Glycine max
acggctgcgagaagacgacagaaggaattaatggctctcatgatgagtggaggagatctcggggtgtcggcttttcctgatggagagagtatttttacatggattggcacaattgaaggtggaaaagggactcagtatgagggtttatcttataaactctccttacgttttcccctagactatcctttaaagcccccccaaggtgtatttttcaaacaatgtgcttccatccaaatgttgaccagtttggcaacatttgtc

SEQ ID NO: 197600 - DNA, 177 bp, Glycine max
tacggctgcgagaagacgacagaagggggttgccacctgcttagtaaaagatccaaaaaagcgtccaagttcagaaaagcttttaaaacaccacttctttaaacaagcacgtgccagcaaatatctagctcgcaccattttagaaggccttgctcctttaggagaccgtttaggatg

SEQ ID NO: 197601 - DNA, 208 bp, Glycine max
tacggctgcgagaagacgacagaagggggcacaagtgagtttgttgatcgagataactagaaacagtgtgatgaaaatgaaggtccttgttttcttcgttgctacaattttggtagcatggcaatgccatgtgtacgatatgttccctctccgattgaacactgtatatggtgcccgtactccggaggtgaaatgcgcaagttggagg

SEQ ID NO: 197602 - DNA, 255 bp, Glycine max
tacggctggagaagacgacagaagggggttgctgacaagccaatcctttgtgtaggtgctcaaccctagtaagccgcaatggtgaagtactcaagggagcctgacaatccaactaagtcttgcaaggctagaggcgccgaccttagggttcattttaagaacacaagggaaactgcctttgaaatcaggaatttgcccttggtcaaggctaaaaggtacttggaagatgttcttgcccacaagcaggcaattcca

SEQ ID NO: 197603 - DNA, 228 bp, Glycine max
gctgcgagaagacgacagaagggccacatggaatatctaagctttgattccgttgataaatcagaaaccagtgaagattcgtatttccaatcaattactactgaattccttaattcattgaacacatccggtttgccaactcattctatcaaacttaaaattggaagtcctataatgttgttaaggaacctcgaccaaaatcaaggtctatgtaatggtactagatta

SEQ ID NO: 197604 - DNA, 220 bp, Glycine max
tgcctcagctgctctcactgtagacccttcactccacttgtcaagagcttctagcattgtgatgttgattgcatatgtagtctacattgtctttcaactgtggacacacaggcagttatttgaagccgaagatgagggtgaggatggtgaggacggtgaagaagaacaagctgtgattggattatgaagtggcattgcttggttggtagggatgactgtg

SEQ ID NO: 197605 - DNA, 261 bp, Glycine max
tacggctgcgaaagacgacagaagggggtctcgtggaagtgtaagcaagcaaaaccctagcggcgcctgctttctttgttcgtgttttgcatcaggatggagtctcaggtgaagcacgcacttgttgtcaaagttatgggtcgtactgggtccggaggacaagtgacccaggttagagtgaagtttttggatgatcagaaccgtcacatcatgaggaatgtgaaaggacctgtgagagaaggagacattctcaccctactc

SEQ ID NO: 197606 - DNA, 201 bp, Glycine max
tacggctgcgaggacgacagaagggggcgcattgaacgaaaattagggtttgtagtgtagcaggaacaagcagcaatggcgccgaaggtaacacgcaaggttagcagaaaccccgaattgataaggggaattggaaagtactcgaggtcgcagatgtaccacaagaggggcatttgggctatcaaggccaaaaatggtggc

SEQ ID NO: 197607 - DNA, 245 bp, Glycine max
tacggctgcgagaagacgacagaagggggcacaagtgagtttgttgatcgagataactagaaacagtgtgatgaaaatgaaggtccttgttttcttcgttgctacaattttggtagcatggcaatgccatgcgtacgatatgttccctctccgaatgaacactggctatggtgcccgtactccggaggtgaaatgcgcaagttggaggcttgctgtggaagcacacaacatctttggctttgaga

SEQ ID NO: 197608 - DNA, 206 bp, Glycine max
tacggctgcgagaagacgacagaagggaaagagacccggaaagggtgggaaccgcttttggaaatccattgggcttggatttaagactcccagggaagccatcgaaggaacctacattgacaagaagtgccccttcactggcaatgtttccatccgtggccgtatcttggctggaacatgtcacagtgctaagatgaacaggacta

SEQ ID NO: 197609 - DNA, 221 bp, Glycine max
tctcgagccgaatcggctcgagacggctgcgagaagacgacagaaacgaaggttgattttcgacatgctttcatagatttttcccagcttggggtaaatctttctaaagtaggagcttctgaggtcataaagacatgccctgctgcaatgggatttgcatttgctgctggaacaacagatggacctggagcttttgactttaagcaagtgatgatcaggga

SEQ ID NO: 197610 - DNA, 247 bp, Glycine max
tacggctgcgagaagacgacagaaggggactcctggcagcatatactcataaatcacatagctagttgtttaaagtaagagagaagaaagaagcaaatggcaaactttccagttgttgacatggggaagcttaacaccgaagagagacctgcagccatggagattataaaagatgcctgtgagaactggggtttctttgagttggtgaaccatgggatatccattgagcttatggacacagtggaga

SEQ ID NO: 197611 - DNA, 244 bp, Glycine max
agtacggctgcgagaagacgacagaagggggctcgaagaagtcccattcattgcactgatagcagcgatggggatcgatcttaaggctgggggtaagagcaacaagaccaaaagaacagcaccaaagtccaatgacatctacctcaaattacttgtcaagctttatcgatgccttgttcgaaggacagacagcaatttcaatgctgtgatactcaagcgcttgttcatgagcaaggttaacaag

SEQ ID NO: 197612 - DNA, 218 bp, Glycine max
agaagacgacagaaggggacacacaacatttacatttctctctccagtatggcttctactcacaatgagttttatgcacttatgctagtggtggtggttggctccatggtggcttcctgtggtgctaacttcaaccaagactttgatctaacatggggtgatcaccgtgctaagatattcaatggtggtcagcttctatctctttctcgggacaaagt

SEQ ID NO: 197613 - DNA, 228 bp, Glycine max
gacgacagaagggggcacaaaaatacaatacaaaacaaaacagagcaaagagagagtgtgtgaaaagtgaaacaaaaaacagaacaacaatggcgacacttaaggttcctcagcctcttccccccgttgcagatgattgtgagcagctccgaaaagccttctcaggttggggaactaacgaggagctgattgtatcgatcttggctcataggaatgctgctcagagga

SEQ ID NO: 197614 - DNA, 257 bp, Glycine max
acggctgcgagaagacgacagaagggggggagagaatagagaagagagatggatccagacgcgttggcaaaggcattcgtggagcactactacagcaccttcgacaccaacaggaacggcttagcgaatctctaccaggagggttccatgctcactttcgaagggcagaagatccaaggcgcttccaacatcgttgccaagctcacctccctcccttttcagcagtgccaccactcaatctccaccgtcgactgcca

SEQ ID NO: 197615 - DNA, 257 bp, Glycine max
tacggctgcgagaagcgacagaaggggacaacacaagtattcaaaatatctctatatattccctccatttctgagaatggcgaaggctgcggagaagaagccagcggctgagaagtctccggcggagaagaagcctaaggcagagaaaaagattccgaaggaaggcggtggcgagaagatgaagaagaggtcgaagaagagcgtggagacctacaagatctatatcttcaaggtgctgaagcaggtacaccctgaca

SEQ ID NO: 197616 - DNA, 212 bp, Glycine max
acggctgcgagaagacgacagaaggggacaatacagagtgagttgttgctccttcgccacaactctctgccaacatgggtatctccagagattctatgcacaagaggcgtgccactggtggcaagaagaaggcctggaggaaaaagagaaagtatgagcttggtcgccagcctgctaacactaagctgtcaagcaacaagacagtcaggagc

SEQ ID NO: 197617 - DNA, 209 bp, Glycine max
tacggctgcgagaagacgacagaagggggcacaagtttgttgagatagctagaagcaataagatgaaaatgaaagtgcttgttttgtttgttgctacagttttggtagcatatgaatgccatggctcagactaccagaagttccctctccaaatgaaaactgggtttggtgggcaatacagcaatgaggtggcatgtgccagttggagg

SEQ ID NO: 197618 - DNA, 232 bp, Glycine max
  unsure (1)..(232): unsure at all n locations
ggatgtgaggtggtttgtgatgggggatgatgacacggtttttgtggcagaaaatttggtgaaagtgttgcaaaaatatgaccacaatcagttttattacattgggagttcctcggagagtcacttgcaaaacatttatttttcttataatanggcttatgggggtggtggttttgccattagttatcccctggntgtggcatgggananncccnagggggttccagggtcc

SEQ ID NO: 197619 - DNA, 231 bp, Glycine max
tacggctgcgagaagacgacagaagggggattatacgggaggcatctccatgtatatagctggcctgggggcgaactgagacaaacaatggaccttggtgattcagggcttatacccttagagataaggtttttgcatgatcctgctaaagatacaggttttgtcggcagtgcattgacaagtaacatgatacgattttttaagacccaagatgaatcatggagccatgag

SEQ ID NO: 197620 - DNA, 278 bp, Glycine max
ccggctgcgagaagacgacagaagggggaaattgaattcacacaagagatggcttctcctcttcttactccttacaagatgggcaaattcaatctgtcccatagagttgttttggcaccgctgaccagacagaggtcttacgacaacgtcccacaaccccatgccatcctctataactcccagagatttccaagggggggccttctaattactgacccgggggttttaaaaggggaaagggtttcgaaaccccccggaaaggcgaagaactttttttt

SEQ ID NO: 197621 - DNA, 263 bp, Glycine max
tttgcgagaagacgacagaagggggaaacgaagaagccctaactacgcacgcattcgtgagaaaactcaatattcgtcgctcatggcactctcttctcgtctcttttccaaatccaaattgatctatggcagtcaaatacttctacaaaaggagcatgctattccagttcgtcactttgctaaaagagtctgcccctcctggccctaaagggaacgcagatgctgaagaacatttttgtggaggtgaagagcaatttgagacg

SEQ ID NO: 197622 - DNA, 277 bp, Glycine max
tctcgagccggctcgagacggctgcgagaagacgacagaagggaaaccaaagttgatggattcatgacattgatcgagaatgtaaattggatgggtgacgaggcacctcagagtggaaatgaatatgtaaacgaggtcataatttatttggaaattttggtttcaactgctcaacagatattgccttctcaagtccttaagagagtattacaggaagtttttgctccacaatcggagaagatagttgggactttaattagtgattctgttaagaggt

SEQ ID NO: 197623 - DNA, 208 bp, Glycine max
tacggctgcgagaagacgacagaagggggttctggtttgtcgttctttctctcgcaatcttcactacattcaccgagcatttgcattcacattgaatatggctgagactacacaatctaatgctgagttgttggagtggcctaagaaagttaagcgccgcttcctgcatgttgtgtatcgtgttggtgatcttgatcgcaccattaag

SEQ ID NO: 197624 - DNA, 282 bp, Glycine max
tacggctgcgagaagacgacagaaggggactgaagaaaacggcgattgagagggagagtttgagaatggtgaagaaggaggagttcttgagagaaaacggcgacaacgaaaaccgttccgtctcgcggagtgacttccctcccaacttcatcttcggagttgccacttctgcatatcagatagaaggtgcttgtaaggagggtggtagaggtcctagcatatgggatgcctttacacacgaccaaggaaaaattcttgacaaaagcaatggtgatgttgcat

SEQ ID NO: 197625 - DNA, 282 bp, Glycine max
cggctcgagtacggctgcgagaaacgacagaagggaactccacgtggtctccgaacattgaacactgtctgggctcagcatttgagtgaggaattgaaacgtaggttctacaagaactggtgcaagtccaagaagaaggccttcaccaagtactctaagcagtatgaaactgaggagggaaagaaaaacattgaggcgcagctggagaaactgaagaagtatgctactgtggttcgtgttttggctcacactcagatcaggaaaatgaaagggttgaagcag

SEQ ID NO: 197626 - DNA, 281 bp, Glycine max
tactcgagccgaatcggctcgagacggctgcgagaagacgacagaaacggagggttagattcgatgttgttgttctaaaacgtccacacattctccgtcgccacaacaacaatggctccgaagaaaggtgtgaaaggttccgttgtagcagcgaagaagaaggttcaggagaaggtgacgaatcctttgttcgagaagcgtccgaagcagttcgggatcggaggcgcgctgccgccgaagcgggacctgacgcggttcgtgaagtggccgaagaacgtcca

SEQ ID NO: 197627 - DNA, 173 bp, Glycine max
ggtgatggccttgccttcttcattgcaccatttgacactaaaatccctccaaactctggtgggagcaaccttggactcttcccatcagacaatgttgttgctgtcgagtttgacacctaccctaatcgtgataagggggatccagattatagacacattggtatcgatgtcaa

SEQ ID NO: 197628 - DNA, 228 bp, Glycine max
gcttgaggctttgattttgacctccgctgtggtttcatctcttactggctatgccttttgggcgtccaagaagggcaaggattttagcttccttggcccaatattgttcacctccctcattactctcatcctcactggcatgatgcagatgttcttccctcttggacctactgcccatgctatctatggtgcaattggtgctatgaaatcccctggcaccatggggta

SEQ ID NO: 197629 - DNA, 236 bp, Glycine max
acgagacgacagcaggggacgagagaggagaagagaagctaaagagagaaaggagatgggagtggagaagcagttgttgaagtctggcaccggtccgaaagccaattcccggtcagaacgtaaccgttcactgcactggtttcgggaagaacggtgacctttctcagaaattctggagcacaaaggatcctggccagaacccattcactttcaaaatcggccacggttctgttatc

SEQ ID NO: 197630 - DNA, 277 bp, Glycine max
agaagacgacagaaggggggatctgaattgcggaggaagatgattcagcttctgttcacggtgatattttcggaggcttcaatgatagcgttgctgctgttcaagacccctttgaggaagctcgtgataatgggcttggatcggttgaagcgaggtcgtggacccttgatggtgaagaccgttgcagggaccgttctcgtggtgttgttgtcgagtgtgtatagcatgttgaagattcagaagcgtgggatccaagagggtgctgttgccaacccca

SEQ ID NO: 197631 - DNA, 192 bp, Glycine max
tacggctgcgagaagacgacagaaggggacagcaacaaacatcttcacaaactagtaatattattcttcgaatccattttattattcataatgggtattttcacatttgaggatgaaaccacctcccctgtggctcctgctaccctttacaaagctctagttacagatgccgacaacgtcatcccaaaggct

SEQ ID NO: 197632 - DNA, 243 bp, Glycine max
  unsure (1)..(243): unsure at all n locations
attgctgaaatggctggtatgagtcacagaattagagagagaactgatgcccttgatgctgccggaaacacgactgccgctattgggaagggatttgccattggttctgctgcccttgnatcactggccctctttggtgcctttnnnanccgagcgcnattcanaactgntgatgtgtacccnnaannggttntcagnggnttgattgnggaaaaaatgcttccagggtggttcctaaaanaa

SEQ ID NO: 197633 - DNA, 277 bp, Glycine max
gaagacgacagaagggggagtgtgagagaaaccagtgactgacttttcgagaaagaaaaacaaaaatgagtttccgtcattccatcatgaacgctcttcccattctcctcttcttcctcttcgtttctgcattagtttctgcgaagaaaactggtgatgtgacggagctgcaaattggcgtgaagcataaaccagtatcatgtgaagttcaggcacacaaaggtgacagagtcaaagtacactataggggaaaactccactgatggactgttttcga

SEQ ID NO: 197634 - DNA, 239 bp, Glycine max
tacggctgcgagaagacgacagaaggggaacacgcggctgccgccggaggtgaaccgcgtgctgtacgttcggaaccttcccttcaacatcacgagcgaggagatgtacgacatcttcggcaagtacggcgccattcggcagatccgcatcggcaccaacaaggacactcgcggaacggcttacagcgtctacggggatatctacgacgcaaaacgcggggtagaccacctccggggtt

SEQ ID NO: 197635 - DNA, 279 bp, Glycine max
acggctgcgagaagacgacagaagggatccctgagatggatccaaccctccggaagcagattcaggagtgtaatttgcagattgtgaatgtcacaactcctgctaattttttccatgttctaaggaggcaggtacatagagattttcgcaaacctctcattgtaatgtcccctaagaacctgcttcgtagcaaggcttgcagatcaaatttatctgagtttgatgatgtccaaggccacccaggctttgacaaacagggaaccagattcaagcgcctca

SEQ ID NO: 197636 - DNA, 260 bp, Glycine max
cgagaagacgacgaatggggcatcaattcaaaatatatcatcaattattagcatgggtttgtggaacacaacgaatgcagtgtcttgccgctttcacaagtttggtgatgaccaaaagaatctggtcttccaaggtgatgctacgtcttcttccaggggcatagaactcacaaagttagacggtggaagaaaaccagtgggtggcactgtggggaaactttatactcttctccaatgcacctttgagaaagctctacagt

SEQ ID NO: 197637 - DNA, 276 bp, Glycine max
tacggctgcgagaagacgacagaaggacgatgagaagagtgtcttgttcacaccagatgatgctaagaatgatgttggtgttggattaaggtatgactacgggatattctatgcatccaagacgttttatgatcagaataaggagaggagacttttgtggggttggattggagagtctgacagtgaatatgctgatgtagccaaaggttgggcttcagttcagagtattcctagaactgtggagcttgataggaagactggcagcaacttgcttca

SEQ ID NO: 197638 - DNA, 260 bp, Glycine max
cgagaagacgacagaagggggcgtcgctccgcaccagtttcaccgcacgaatatcttgttgtttggagcgatccgagaaaaactctgtaaacatgttggtttaccaggacctccttacaggtgatgagcttctctctgactccttccgttacaaggaaattgagaatggaatgctgtgggaaattgaggggaattgggttgtaaaaggagcatttgatgtagacattggtccacacctttcggcggggggtgaaggagaa

SEQ ID NO: 197639 - DNA, 273 bp, Glycine max
tgcgagaagacgacagaagggggcacaagtgagtttgttgatcgagataactagaaacagtgtgatgaaaatgaaggtccttgttttctacgttgctacaattttggtagcatggcaatgccatgcgtacgatatgttccctctccgaatgaacactggctatggtgcccgtactccggaggtgaaatgcgcaagttggaggcttgctgtggaagcacacaacatctttggctttgagaccattcctgaagagtgcgttgaagcaacaaggga

SEQ ID NO: 197640 - DNA, 264 bp, Glycine max
ggctgcgcgaagacgacagaaggggatcttgcaaacttgcgcgcaaaaggtgtcgatgctaggatagcatcaggtggaggtcgtatgaatgtcacaatggatcgttatgagaatgattggagtgttgtgaaacgagggtgggatgctcaagttcttggtgaagccccttataagtttacaaatgctcttgaagctgtcataaagctgagggcagacccaaaggccaatgcccaatatttgcctccttaagttatggttgacgag

SEQ ID NO: 197641 - DNA, 188 bp, Glycine max
acggagacgacagaaggggtaggcgacggtattgctcgtatttatggtcttgatgaagtaatggcgggtgaattagtggaatttgaagagggtactataggcattgctttgaatttggaatccaaaaatgttggtgttgtattaatgggagatggtttgatgatacaagagggaggttctgtaaaagc

SEQ ID NO: 197642 - DNA, 211 bp, Glycine max
gaagacgacagaaggggtggaacccaagcaaagaagttgagtacacgggtcaggttgttagatatgaggataactttgactcaaccaccaacgtggttgtcaccatcactccaactgataagaagtccatcactgactatggttcacccgaagagttcctctctaaggtggattatttactaggaaaacaggctcttcttcggcgaaacac

SEQ ID NO: 197643 - DNA, 270 bp, Glycine max
ttgaacactttaaatggtcccataccgactactttgggcaaacttgcaaaactacgtttcctgcgtctcaataataatagcgtgacaggaggcatacccatatctttgacaaatgtttcttcactgcaagttcttgatctctcaaataaccatctaaaaggggaaatcccagtgaatggttcatttccataatttacccccatcagttatcaaaacaatcttggcttgatacaaccaaaatacactccatctccagtttctccaacacca

SEQ ID NO: 197644 - DNA, 245 bp, Glycine max
agacgacagaagggggcgtaggcaaagagagagagagaaaagcgtgaatcatgtcggacgaagagcatcacttcgattctcaggcggatgcgggagcgtccaagacgtatcctcagcaggctggtaccattcgcaagaatggctacatcgtcatcaaatccaggccttgcaaggttgtagaggtctctacgtcaaagacaggcaagcatggacatgcaaagtgtcactttgttacaattgatatc

SEQ ID NO: 197645 - DNA, 277 bp, Glycine max
acggctgcgagaagacgacagaaggggaaggatcagcagggagaattaggtttttagggtttacaccgagcagccacacctcccgcagcagccatggttctcaaaactgagctatgccgattcagtggtgccaagatctacccaggaaagggcatcagatttgttcgtggtgattctcaggttttcctgtttgcaaactcaaaatgtaagaggtatttccacaatcgcctgaagccttcaaagctcacctggactgcaatgtacagaaagcaacaca

SEQ ID NO: 197646 - DNA, 282 bp, Glycine max
acggctgcgagaagagacagaagggggaagaagaaggttggttgattggtcccattgattccgaagagaaaagaaaagatgtttgagccacaacagctatacactcgcgcgaagaccgaggaattcgacctcgaatcaggagaaaccctctacccagaactgagcgtcggcgagaaccagctccgatggggtttcatccgcaaggtctacggcatcctctccgcgcagatcgtcctcaccaccctcgtctccgtcaccaccgttttctatactccaatcaat

SEQ ID NO: 197647 - DNA, 284 bp, Glycine max
acggctgcgagaagacgacagaagggaaagagacccggaaagggtgggaaccgcttttggaaatccattgggcttggatttaagactcccagggaagccatcgaaggaacctacattgacaagaagtgccccttcactggcaatgtttccatccgtggccgtatcttggctggaacatgtcacagtgctaagatgaacaggactattattgttaggaggaattatctccattttatcaagaagtaccagaggtacgagaaaaggcactccaacattcctgctca

SEQ ID NO: 197648 - DNA, 283 bp, Glycine max
cgagccctggagttcagacccctctcatcgtccgtttctccactgttatccacgaacgtggcagccctgaaaccctcagggatcccagaggtttcgctgtgaaattctacactagagagggtaacttcgaccttgtgggaaacaacttccctgtcttcttcgtccgcgatggcctcaagtttcctgacatggtccatgctctcaaacccaaccccaagtcccacatccaggagaattggaggatcctcgatttcttctcccaccatcccgaaagccttcacat

SEQ ID NO: 197649 - DNA, 285 bp, Glycine max
tacggctgcgagaagacgacagaagggggcacaagtgagtttgttgatcgagataactagaaacagtgtgacgaaaatgaaggtccttgttttcttcgttgctacaattttggtagcatggcaatgccatgcgtacgatatgttccctctccgaatgaacactggctatggtgcccgtactccggaggtgaaatgcgcaagttggaggcttgctgtggaagcacacaacatctttggctttgagaccattcctgaagagtgcgttgaagcaacaaaggaatacat

SEQ ID NO: 197650 - DNA, 313 bp, Glycine max
cgtagtaactcggaattaactcgagcgagccctggagttcagacccctctcatcgtccgtttctccactgttatccacgaacgtggcagccctgaaaccctcagggatcccagaggtttcgctgtgaaattctacactagagagggtaacttcgaccttgtgggaaacaacttccctgtcttcttcgtccgcgatggcctcaagtttcctgacatggtccatgctctcaaacccaaccccaagtcccacatccaggagaattggaggatcctcgatttcttctcccaccatcccgaaagccttcacatgttct

SEQ ID NO: 197651 - DNA, 285 bp, Glycine max
ctgcgagaagacgacagaagggggtagcaaggaaacccaccgtaagcgataagcaatagaattcagagagagagagaaagagagtctcttgctctgtatctttgatttgatcattccaatcttcaatttttctatatatccatcaatccgctgagtgcaaagttctaatctttcgcctattgggttctactcctttctctcttcggttccgatcgatccaattttcttcccatggctacgatcggacacaacaatctcaatgccaaattggttcttctcggggac

SEQ ID NO: 197652 - DNA, 246 bp, Glycine max
tgacgacagaagggggtgcaaaggaggaagaggaaaaagaggattggagggtcgccacgtttagcaacaaccaaaccctctctactctttcttcttctcttcgctagggttttagcttcttcctcttcacttcgttcttctggcctctacaatgagcaacgacaaggacaccttcaacgtcggtgatctcacttccgctctcaacgaggaccatagagcagacttgtcaatgccctcaagagcaag

SEQ ID NO: 197653 - DNA, 268 bp, Glycine max
gggttgcaccttggtaaggtgagaaaatatggcatttgcaggaacaactcagaagtgcatggcttgtgacaaaacagtttatctggttgataagttgaccgcagataaccgagtgtaccataaggcttgcttcagatgccaccactgcaaaggaacactcaagctcagcaactataactcttttgaaggagttcttactgcaggccacactttgaccaactgttcaaaagaactggtagtcttgacaaaagcttcgaagggacaccaa

SEQ ID NO: 197654 - DNA, 280 bp, Glycine max
agacgacagaagggggcacaagtgagtttgttgatcgagataactagaaacagtgtgatgaaaacgaaggtccttgttttcttcgttgctacaattttggtagcatggcaatgccatgcgtacgatatgttccctctccgaatgaacactggctatggtgcccgtactccggaggtgaaatgcgcaagttggaggcttgctgtggaagcacacaacatctttggctttgagaccattcctgaagagtgcgttgaagcaacaaggaatacatccatggcga

SEQ ID NO: 197655 - DNA, 279 bp, Glycine max
tagaagacgacagaagggggagttcaacgagatggagcaaataaagcacagaatagttgaagtgaatggcataaaaatgcatgttgcagagaaaggagagggtccagtggtgttgttcctccacggcttccctgagctctggtactcatggcgccaccagattccctctctctcagctccctcggctaccgcgccgtcgctcccgatctccgtggttacggtgacaccgaggcaccaccttcaatcagcagctacaactgcttccacatagtgggtgat

SEQ ID NO: 197656 - DNA, 276 bp, Glycine max
tcttgaaggaaatcaaaggtggagttgttttggaaagccaggctgtctttattacaagcaggaaatcagtgatccaacggaaaggagtacttgaaacaacacatgagatgcttgagagattggaagcacatctcagggccattgggcagttcacggttactgcaaacatgaggggaagcagtgcagaggaagtggctgagagaatactgagtcaaccatcattaatgggtttgcagggacccactgtaagtcctgttttctgcaagcgtgatggga

SEQ ID NO: 197657 - DNA, 203 bp, Glycine max
acggctgcgagaagacgacagaagggaaagagacccggaaagggtgggaaccgcttttggaaatccattgggcttggatttaagactcccagggaagccatcgaaggaacctacattgacaagaagtgccccttcactggcaatgtttccatccgtggccgtatcttggctggaacatgtcacaagtgctaagatgaacagga

SEQ ID NO: 197658 - DNA, 286 bp, Glycine max
tacggctgcgagaagacgacagaagggcacgagaaatgcttcaacaacatagtagtctgaagacaatcaagaagaaacttattaggaaagcccttgatatgatccgcaggattgctgatgaggatcctgacgagtcaactgacaaagaaaagaaagaagatgcatcctctgacaatgatgagaagaaaggtcaatattctaagttctggaatgagtttggtaaatccattaaacttggtatcatcgaggatgccaccaacagaaatcgtttggcaaaactgctcag

SEQ ID NO: 197659 - DNA, 294 bp, Glycine max
ctgcgagaagacgacagaagggggagagaagttattagggtttttagagtgctggcggtccaaacactcttctctgcagcttttgcctacaactcccttcaccatggctgaacaaaccgagaaagcttttctgaagcaaccaaaagtgtttctcagcaccaagaagactgggaagggaaagagacctggaaaaggtgggaaccgcttttggaagtccattgggcttggatttaagactcccagggaagccatcgaaggaacctatattgacaagaagtgccccttcactggcaa

SEQ ID NO: 197660 - DNA, 281 bp, Glycine max
acggctgcggaagacgacagaagggggaaaccgagaagaagaagatggagatgtatcagatctggagcaggagaatagcgttgggagcgttcgcgtttggtctgcttttcctatcggcctcagcagacgacgtcgttgtgctctctgaagataacttcgagaaggaagttcgtcaggacagaggagcctccgttgagttctatgctccttggtgtggacactgcaaaaagcttgctccagcatatgaaaagcttggtagcagcttcaaggaagccaatctg

SEQ ID NO: 197661 - DNA, 223 bp, Glycine max
tacggctgcgagaagacgacagaagggggagaagtacgagccaattcatcattttctcacttctctgctacttcttgttcaaatcttaggagctgaggagaatcaatcgagattaatatgtctggtatcgctcgtggacgccttgctgaagaacgagagtcattgcgcaacaaccatccacacggttacgttgccaagcccgaggatctacctgatggcaccg

SEQ ID NO: 197662 - DNA, 278 bp, Glycine max
  unsure (1)..(278): unsure at all n locations
tacggctgcgagaagacgacagaaggggaaaaaaaaaagaaacaaattgagcaatgaatttgtaaatagggcaaaagtaatggataaggaattaatttctctggatatattagaaaaccgaattcgattgtctaatgatgaaactaaaacaaaatatttaactaaaatatatgatcctttcctgaacggacgctttcgtggacaaatcgaaaatgttttttcaacccataaccantatgnaaaaaatgaaaaaaaaaataccattttgataaataaaa

SEQ ID NO: 197663 - DNA, 259 bp, Glycine max
ggagatgatggcatcatttgcagggactactcagaagtgcaaagcatgtgagaagactgtgtatttggtggatcagctcactgctgacaacaagatctatcacaaatcatgtttcagatgctaccactgcaagggtacccttaagttgagtaattattgttcctttgagggtgtttatactgtaagcctccattttgatccactccttaagaagactggccagcttggaccaaagttttgaaggtattccagaactgca

SEQ ID NO: 197664 - DNA, 280 bp, Glycine max
cggctgcgagaagacgacagaaggggttgcttgaaatattgggcagcacaatcaatggttttgctttgcctttgaaggaagagcataagctgtttctggcccgggcattgatcccgcttcacaagcctaagtgtgttgcactttatcatcaacagctttcttattgcattactcagtttgttgagaaggacgtcaaactagctgatactgtggtaagaggtcttttgaaatattggccgataactaatagtgcaaaggaggtagtgttccttagtgagtt

SEQ ID NO: 197665 - DNA, 280 bp, Glycine max
acggctgcgagaagacgacagaagggggataaagaaaagagaaatggcaacagaaacaaaagtggcagtattaggtggcatcaccgaagtgcagggagctgccaacagcgtcgagatcaacaatctcgctcgctttgctgtagaggaacaaaacaaaagagagaattcagttctggagtttgtgagggtgattagtgcaaagcagcaagtggttgctggagtgaattactacataacattggaagcaaaagatggtgagattaaaaatgagtataaagcg

SEQ ID NO: 197666 - DNA, 273 bp, Glycine max
tacggctgcgagaagacgacagaaggggacacaaaaaatttctagagcgagaaagtgagaggagagagaaagtagctgatcctccatggcctccaccagggaacgcgaaaactttgtctacaccgccaagctcgccgaacaagccgaacgctatacagaaatggtggaagcaatgaagaatgtggcgaactgaacgtggaattgacggtcgaggagcggaaccttctgtcggtagggtacaagaacgtggtgggtgctcgtagggcttcgtgg

SEQ ID NO: 197667 - DNA, 283 bp, Glycine max
gcgagaagacgacagaagggggatttggatttgcatgacattctaattgagactgagaagcgtgggatagcttttgatcaattacttaccattcctgaacaagatgaatgggtatacagtgatgggaaatccacaacatgtgttgcctttattctttcaatgtataaagcggctggaatattcggccctatttctagctccattcaagtaactgaattcaaaattcgtgatgcaaacatgcttagggattttggaggataaccaaacacgtctaccaagatgg

SEQ ID NO: 197668 - DNA, 247 bp, Glycine max
acggctgcgagaagacgacagaaggggataataggtcatggtatcaactgttttgttaacagacagttgatttacaattttccagaggagctctttgctgatgcgggaatattggctattgaacatgctgattttgatggtattgagcgtctggctttggtaactggtggtgacattgcatcaacctttgaccatcctgagtctgttaagcctgggcattgtgaccctattgaggagattatgattg

SEQ ID NO: 197669 - DNA, 223 bp, Glycine max
tacggctgcgcgaagacgacagaagggggcacaagtgagtttgttgatcgagataactagaaacagtgtgatgaaaatgaaggtccttgttttcttcgttgctacaattttggtagcatggcaatgccatgcgtacgatatgttccctctccgaatgaacactggctatggtgcccgtactccgggagtgaaatgcgcaagttgaggctgctgtggagcacac

SEQ ID NO: 197670 - DNA, 253 bp, Glycine max
  unsure (1)..(253): unsure at all n locations
cacttaatcatggagttagagccatgtgtattaatattcccggatttgcataccacaaagcattcaaggcaaggaaaaatctagtggccatatttcaatctattgtggacgagagaagaaacttaaggaagggctatctgcctggaaaagccaaagatatgatggatgctctgatagatcttgaagatgatgaaagaaagttgagtgataaggacatcntgacatcatgttgatgtacttgaatgcgggncac

SEQ ID NO: 197671 - DNA, 279 bp, Glycine max
tctcgagccgaatcggctcgagacggctgcgagaagacgacagaagagggaacctttgcattcgattcattcaagattcagcaagtgcgttttggaagcagagaccgaaatacttcgagatggcccgtacaaagcaaactgctcgtaagtcaactggaggaaaagctcccaggaagcagcttgcaaccaaggctgcacgtaagtctgcaccaacaactggtggtgtgaagaagcctcatcgttatcgccctggaactgttgctcttcgtgagattagga

SEQ ID NO: 197672 - DNA, 255 bp, Glycine max
tgagaagacgacagaagggggcaccagagaggaggaagctttgagagagagagaaggaggagggagagtgttgacgctccatcaagatgggtatttctagggattccatgcacaagaggcgtgccactggtggcaagaagaaggcatggagatagaagagaaagtatgagcttgggcgtcaggccgcaaacaccaagttatcaagcaacaagactatccggaggattcgtgttcgaggtagcaatgtcaaatgga

SEQ ID NO: 197673 - DNA, 273 bp, Glycine max
tacggctgcgagaagacgacagaagggggcacaagtgagtttgttgatcgagataactagaaacagtgtgatgaaaatgaaggtccttgttttcttcgttgctacaattttggtagcatggcaatgccatgcgtacgatatgttccctctccgaatgaacactggctatggtgcccgtactccggaagtgaaatgcgcaagttggaggcttgctgtggaagcacacaacaactttgggctttgagacattcctgaagagtgcgttgaagcaac

SEQ ID NO: 197674 - DNA, 273 bp, Glycine max
tacggctgcgagaagacgacagaagggggcacaagtgagtttgttgatcgagataactagaaacagtgtgatgaaaatgaaggtccttgttttcttcgttgctacaattttggtagcatggcaatgccatgcgtacgatatgttccctctccgaatgaacactggctatggtgcccgtactccggaggtgaaatgcgcaagttggaggcttgctgtggaagcacacaacatctttggctttgagaccattcctgaagagtgcgttgaagcaac

SEQ ID NO: 197675 - DNA, 277 bp, Glycine max
cgagaagacgacacaagggggcatatccaaaggatcaaaaatattattaagatgatcaacattattggagcacttgttctactctttgcatttctcttcctcagttgtgtgtatgcacaagacacaacaacccttgtgcctgcaatcataacttttggtgattctgctgtggatgtagggaacaatgactatcttcccgcccttttcaaggctgattaccctccttatgggagggactttgttaaccaccaacctactgggacgtttgcaatggcaa

SEQ ID NO: 197676 - DNA, 212 bp, Glycine max
tacggctgcgagaagacgacagaaggggacacaacacagaacaaaaacaaagaaaaaaaaacccttagccaacacaaccatcatggccacctctgctattcagcaatcagcattcactggtcaaactgctctgaagcagctcaatgagttcgtccgcaagaccggtggcgccggcataggtcgcactaacatgcgccgcaccgtcaagagtg

SEQ ID NO: 197677 - DNA, 200 bp, Glycine max
tacggctgcgataagacgacagaaggtgacacacacgtaacttcatctgggttgcagggtcaaagactaataacatggggtccgataataccaacttggagttcttcaaggagatcggtttaggctcctccaacattggttcttacattaatggccaatggaaagccactggttcttctgacacttctgttaatccttct

SEQ ID NO: 197678 - DNA, 281 bp, Glycine max
tacgagaagacgacagaagggtacggctgcgagaagacgacagaagggtacggctgcgagaagacgacagaagggtacggctgcgagaagacgacagaaggggataccaaaaacaaaacacaagccaagtggaagtgagaaaaaataaaaatcaaagagcataatgtcagggatcattcacaagattggggagacccttcatgtgggagggcgcaagaaggaggaggagcataagggtgagcaccatgctggaggatacaaaggggagcaccatggtgaac

SEQ ID NO: 197679 - DNA, 275 bp, Glycine max
acggctgcgagaagacgacagaaggggggacggaaacaataagaagaggctataccagtactcaaaatatcctaccagcattgctgcactgtcgtttagcagagatggacgcctcttggctgttgcatcaagttacacattcgaagaagggcctaaagcaggaactaaagccgacgaacaagatgctatctacgtacgcagtgtaaacgagattgaggtcaagccgaagctcaaagtatatcccaatcctccagcttgattcctgatggtggcct

SEQ ID NO: 197680 - DNA, 273 bp, Glycine max
acggctgcgagaagacgacagaaggggggcttctgaaatgtatactagggttttggctgtgtggccaaaccattggcgagcccagctgaacaaggcggtgtcgctgctaggagctggggagactgaagaggccaaaagagctttgaaagaagcattgaaaatgacgaatagggttgagttgcatgatgcaatatctcatttgaagcagctgcagaaaaagaagaccaaacctagtaatgggggtgctccggggaggcacctttgttattgttg

SEQ ID NO: 197681 - DNA, 278 bp, Glycine max
tacggctgcgagaagacgacagaagggggcacaagtgagtttgttgatcgagataactagaaacagtgtgatgaaaatgaaggtccttgttttcttcgttgctacaattttggtagcatggcaatgccatgcgtacgatatgttccctctccgaatgaacactggctatggtgcccgtactccggaggtgaaatgcgcaagttggaggcttgctgtggaagcacacaacatctttggccttgagaccattcctgaagagtgcgttgaagcaacaaagg

SEQ ID NO: 197682 - DNA, 287 bp, Glycine max
tacggctgcgagaagacgacagaagggcatgagagtacattgtctaagcagagagaggacttgcgggaatgggaaaagaaactacaggagggtgaagagaggctggccaagggtcaaagaattatcaacgaaagagagcaaagggctaatgagaatgacagactatgcagacagaaagaaaaggaccttgaagaggcacagaagaagattgatgcaactaatgtaacactgagaaataaagaagatgatgtgaacaataggtttgcgaatattactctaaaagagaa

SEQ ID NO: 197683 - DNA, 198 bp, Glycine max
acagctgcgagaagacgacagaagggggtgttaagaaatttaagtgaggagctagagaatgatgatgaagtctgctatgtgtgcagtggtggttgtagcacttcttcttctggcggaggtggggcccatggctgaggctgtgacatgcaccccaacagagttgagtccgtgtcttccagaaatcacttggggtgcaaa

SEQ ID NO: 197684 - DNA, 247 bp, Glycine max
gcgagaagacgacagaagggggggagtgaactaaaaaagcataaagtatggcttcgacggcagcgtaccttgctcggcgcgcggcgcagaaggagagggtttggatcctctaccgccgcgccctcaaagacactctcaactgggccgtacatcgccacctcttctacgacgacgcttcaaacctccgcgaaaggttcgaggagaacagacacgtggaagaccctgataccattgacaggctcataac

SEQ ID NO: 197685 - DNA, 246 bp, Glycine max
ggctgagaagacgacagaagggggaagcaaaacaacattagcatcaaaaccagagtggttctagtaatccggtgctgctagaggatgggaactagtgaatggcatatcgagcgaagatctagcttcggcactgaatcccccttagcaagagaggcaggaaatgtgcctgaaactgggtcactctctattgttgtgcttggcgcttctggggatcttgctaagaagaagactttcctggaattttcc

SEQ ID NO: 197686 - DNA, 284 bp, Glycine max
acggctgcgagaagacgacagaagggggagaaagagagagagagagagagaaactgagagaaattcgcaaaccctaatttcggaaagatcggcgatggctgcctccaaggatcgcgagaacttcgtctacatcgccaagctcgccgaacaggccgagcgatacgaagagatggtggaatcaatgaagaacgttgcgaatctcgacgttgaactgactgtggaggagcggaatttactttctgttgggtacaagaatgtgattggtgctcggagacatcgtggag

SEQ ID NO: 197687 - DNA, 285 bp, Glycine max
acggctgcgagaagacgacagaaggggggggttttctgattaactctttcttctcataactctgccgccgcaacagccccaaatccaatggcttcagagaagaaactttcgaacccaatgagggagataaaggtgcagaagctcgtcctcaatatctccgttggcgagagtggagatcgtcttaccagagccgctaaggtgttggaacagcttagtggccaagcccctgtgttttccaaagcaaggtacacggttcgttcctttgggattagaagaaatgagaag

SEQ ID NO: 197688 - DNA, 285 bp, Glycine max
tacggctgcgagaagacgacagaagggggcacaagtttgttgagatagctagaagcaataagatgaaaatgaaagtgcttgttttgtttgttgctacagttttggtagcatatgaatgccatggctcagactaccagaagttccctctccaaatgaaaactgggtttggtgggcaatacagcaatgaggtggcatgtgccagttggaggcttggcgtggaagcaaacaacgtagtcaagtggcaaactgttcctgcagcttgcggagagtacatagctgactacg

SEQ ID NO: 197689 - DNA, 259 bp, Glycine max
tacggctgcgagaagacgacagaaggggaaagaaaagagtaagagtatgggaggctcatggtcatggcagctcacatgtgccctcttgctactcttctccgccgtagtcaccgccactgaccacattgtgggtgcgaatcgtggctggaaccctggctttaactacactctttgggccaacaaccacactttctatgttggcgatcttatctcattcaggtaccaaaagaaccaatacaatgtgtttgaggtgaaccaa

SEQ ID NO: 197690 - DNA, 280 bp, Glycine max
tactcgagccgaatcggctcgagacggctgcgagaagacgacagaaaggggatcaaaccataccataacaagaatcaaggaactaaccaaccaccccatttcagctctctctggatattgtaatggaagcaggtttagaatcaatgggagtatcagaggcttggaaggctcatgtgggcatggctctggtgcagctattctatggtggctaccatgtcctaaccaaagtggcacttaatgttgggatcaaccaactagttttctgcttttaccgcgattt

SEQ ID NO: 197691 - DNA, 276 bp, Glycine max
aagacgacagaagggggatcccatttgaaatcaaaatcaaaaacaccaaatcctctaattcaagtttgcaccaagttttcctgagaaaatgtctggtcgtggaaagggtggaaagggtttgggaaagggaggtgccaagaggcacaggaaggttcttcgcgacaacattcagggcattacgaaacctgcgattcgtaggttagcgagaagaggtggcgtgaagaggatcagtggtttgatctacgaggaaaccagaggggttctgaagatattctt

SEQ ID NO: 197692 - DNA, 285 bp, Glycine max
tgagaagacgacagaaggggacaacacagaacaaaaacaaagaaaaaaaaaaacccttagccaacacaaccatcatggccacctctgctattcagcaatcagcattcactggtcaaactgctctgaagcagctcaatgagttcgtccgcaagaccggtggcgccggcaaaggtcgcactaacatgcgccgcaccgtcaagagtgctcctcagagcatttggtatggccctgaccgtcccaagtacttgggtccattctcggagcagattccatcatacctgaccg

SEQ ID NO: 197693 - DNA, 283 bp, Glycine max
tacggctgcgagaagacgacagaagggggtttctcttgttttgtttcacagtctgcagagtgcagagccttctctcctctattttggcttccaacctttttgctccattcattctcaacaacaaaccaatctctatattttgcttagacaatgagggggagcttgtggcaacttgggcaatcgatcactcgccgtcttgcccatggagataagaaggctgttgctcgccgatgttttgcctcagaagctgagctgaaaaagacagtgtttcatgacttccatg

SEQ ID NO: 197694 - DNA, 281 bp, Glycine max
acggctgcgagaagacgacagaagggtattgcactctggtaggtcagtggacctcacaaaattcagtgattatggggaattaattactgaattggatcaactattcgaatttggaggtgaattaacttctccacaaaaggattggcttattgtctacactgataatgagggagatatgatgcttgttggtgatgatccgtggcaggaatttgttgcaatggttcgcaaaatttatatctaccccaaagaggagattcagaaaatgagcccgggtaccttga

SEQ ID NO: 197695 - DNA, 282 bp, Glycine max
acgacagaagggataaaagaagcaactttttcatcagtgcgtgagagctatgcagggcattatgttcctcaacttagccaagttattgtaaagtacaactcggttacaaaagaaaatgctataaatctgaaaggtttcatggtaggaaatgctctaacagatgatttccatgatcaattgggaatgtttgagtttatgtggtcaagtggtttgatttcggatcaaacatacaagcttttgaacctactatgtgattttcagtcagttgagcacccgtcacat

SEQ ID NO: 197696 - DNA, 283 bp, Glycine max
cggctcgagacggctgcgagaagacgacagaaggggacaccaacaccaaaacaaacccactaagatggcttcctttgtatccttcctagtgctgcttcttgcagcccttatcctcatgcctcaagggcttgctacttactacaaaccaattaagaagccaccagtgtacaagcctccagtgtacaagccaccagtgtacaaaccaccggtctataagccaaaaccaccggtttacaagccgaaaccaccggtttacaagccaccatataagaagccaccatac

SEQ ID NO: 197697 - DNA, 281 bp, Glycine max
acggctgcgagaagacgacagaagggggaaggctgaagaacacatagagagagagagagaagtgcagaaaaaatgagactgttcgatccatggcctgttttcttcaagagagaatggaagcggaattggcccttcttggttggattcgccatcaccggaactctcatcaccaaactttcccttggtctctctgaggaggaaaccaaaaagtcgaaattcgtccaggcacacaagaggtgactttagaatggaagatttgcagtggctttgcacattgtatt

SEQ ID NO: 197698 - DNA, 282 bp, Glycine max
tacggctgcgagaagacgacagaagggtgggatttccaaagtttttagatagagggtaagtctcaaaaaatcgaagaattacagacgaatatgcaaaaaaaactgaattgtgtgaatcgaaaactaaacattgctattgtaaaagttgcaaatgcttataaacaccctaatattattgcagaatttatagctggacaattaaagaatagagtttcgtttcgtaaagcaatgaaaaaagctattgaattaactgaacaggcgggtacaaaaggagttcaagta

SEQ ID NO: 197699 - DNA, 277 bp, Glycine max
tacggctgcgagaagacgacagaagggtggataatcgaatttatttgtataacactcttcaacttgaaaaaggggctttaaaatctttttctgggtgccgaattgaatcattttttgtaaagtctgcaattagccctgatgcatcgaacatagtcagtggttctagtgatggaaatgcctatgtttggaaggttgacaaacctctggaagatcctactattttgaaaggtcatgatggcgaagttacagcagttgactggtgtagctctgaaattgg

SEQ ID NO: 197700 - DNA, 280 bp, Glycine max
tacggctgcgagaagacgacagaagggacctcatatgatattggaactggatttggacattttgctatcgcaactccagatgtttacaaattggttgaagacatccgggctaagggtggaaatgtcaccagggagcctggtccagttaagggtgggaaatctgttattgccttcgtgaaggatcctgatggttatgcttttgagctcattcaaagaccttcaacccctgaaccattgtgccaagtaatgcttcgcgttggtgatttagagcgctcaatta

SEQ ID NO: 197701 - DNA, 288 bp, Glycine max
cgacagtagggctgcgagagagagagttcgaggcagctaaacaagttaaaagaagagcatcactgaactaacaaagcaaccctatgtcgaaggtggtttgtgtcaccggagccagcggcgccatcggatcatgggtggtcctactcctcctccagcgtggttacaccgtccatgccaccgtccaagatatcaaggatgaaaatgagacgaaacatttggaggaaatggaaggagcaaagagtcatctccatttttttgaaatggatcttcttgacatcggctccattg

SEQ ID NO: 197702 - DNA, 264 bp, Glycine max
tgcgagaagacgacagaaggggagagaaagaaaaggaggaaatggaggaagcactttttaagacggtgaagaagagcaaaggtgaaattatgggttcttctccggcaacatattgtgttaccggagcaacagggtatattggttcatggcttgtggaggctcttcttgaaagagggtacactgttcatgctactgttagagatcctgaaaagtcactacacctgttgtcattgtggacaagaggtgaccgattgagattttcca

SEQ ID NO: 197703 - DNA, 277 bp, Glycine max
cggctcgagacggctgcgagaagacgacagaaggggacaccaacaccaaaacaaacccactaagatggcttcctttgtatccttcctagtgctgcttcttgcagcccttatcctcatgcctcaagggcttgctacttactacaaaccaattaagaagccaccagtgtacaagcctccagtgtacaagccaccagtgtacaaaccaccggtctataagccattaccaccggtttacaagccgaaaccaccggtttacaagccaccatataagaagcca

SEQ ID NO: 197704 - DNA, 278 bp, Glycine max
gaagacgacagaaggggaattcaaaatatatcatcaattataagcatgggtttgtggaacacaacgaatgcagtgtcttgccgctttcacaagtttggtgatgaccaaaagaatctggtcttccaaggtgatgccacgtcttcttccaggggcatagaactcacaaagttagacggtggaggaaaaccagtggatggcagtgtggggagagtgttatactcttctccagtgcacctttgggaaagctctacagtggtcgcaagctttgaaaccgactt

SEQ ID NO: 197705 - DNA, 278 bp, Glycine max
ggggctgggcgagaagacgacagaagggggatgcaaaagttagtagtagtgaagaaaatgaaagtccttgttttctttgttgctatagttctagcagcatggcattgccatggctcagaccatgaccatgaccatggccacaccttccaaattttccctctgagaatgaaaactggccatggtggccactacattccggaggtatcatgccaaagttggaggcttggtgtggaagcacacaacgtcattgactggaaaaccgttcctcaagattgcga

SEQ ID NO: 197706 - DNA, 274 bp, Glycine max
gaagacgacagaaggggaagtgaaatggggaattgacttagcatctgagcatgaaagatacctaacagaggtaaagtttcagaagcccgtcattgtatataactatccaaaagatatcaaagcattctacatgcggcttaatgatgacttaaagacagtggctgctatggatgtgcttgtacccaaggttggagagctaattggtggaagccaaagggaagaacgttatgatgtcatccagacaagaataaaggagatgggtttgcctgttgag

SEQ ID NO: 197707 - DNA, 276 bp, Glycine max
aagacgacagaaggggaggaagatttctagtgacttcaacatgatgatggatcagaaactatacacatgtgagcatccccaatgcccttatagcgaagttcgccttggtttccatgataggtctgctagggacaatcatcaattgaattgtgcatacagaaacagttctgcagattatggtggtggtcccaatttccatgctactgaggataagccagtcatattcccccagtcctttgttcaacccaacactacaacacagtctgcaagtttggt

SEQ ID NO: 197708 - DNA, 281 bp, Glycine max
tacggctgcgagaagacgacagaagggggcgcatcgaaccaaaattagggtttttgtcgtagcaggaagaagcagcaattgcgccgaagataacacgcaaggtcagcagaaaccccgaattgataaggggaatcggaaagtactcgaggtcgcagatgtaccacaagaggggcatttgggctatcaaggccaaaaacggtggcgttttacctcgccacgaccccaaacccaaacctgaaactcccactgaaaaaccacccaaattttaccccgctgatgat

SEQ ID NO: 197709 - DNA, 272 bp, Glycine max
acggctgcgagaagacgacagaaggggaacactgttgctttggtgattataaatcctgggaatccttgtgggaatgtgtacagttaccatcatttggagaagattgctgaaactgcaaaacgggttggaacaattgtgattgctgatgaagtttatggccatcttgcatttgcgggcaagccttttgtgccaatgggagtttttggctctattgttcctgttctgactcttggttcattttctaagagatggatagttcctggatggaggct

SEQ ID NO: 197710 - DNA, 277 bp, Glycine max
acggctgcgagaagacgacagaaggggataccaaaaacaaaacacaagccaagtgaaagtgagaaaaaataaaaatcaaagagcataatgttagggatcattcacaagattggggagacccttcatgtgggagggcacaagaaggaggaggagcataagggtgagcaccatgctggagaatacaaaggggagtcaccatggtgaacacagtagtgagtacaaaggagagcatcatggtgaacacaaagctggagagtaccatggtgagcacaagcca

SEQ ID NO: 197711 - DNA, 237 bp, Glycine max
acggctgcgagaagacgcagaagggtgggagttcaacgagatggagcaaataaagcacagaacagttgaagtgaatggcataaaaatgcatgttgcagagaaaggagagggtccagtggtgttgttcctccacggcttccctgagctctggtactcatggcgccatcagattctctctctcagctccctcggctaccgcgccgtcgttcccgatctccgtggctacggtgacaccga

SEQ ID NO: 197712 - DNA, 260 bp, Glycine max
gactaaagtgttagatataatggattattattttagtgaaaaaggctttgcagtttgcaggattgatggtagtgtgaaactggaagagaggaaacaacagatccaggacttcaatgatgtaaatagcaattgtagagtttttcttctttctactagggctggtgggttgggaatcaatctcactgtagctgatacatgcattctttatgacagtgactggaatcctcaaatggatttacaagccatggatagatgtcata

SEQ ID NO: 197713 - DNA, 267 bp, Glycine max
gacgacagaagggggcatcaattccgaatatatcatcaattataagcatgggtacgtggaacacaacgaatacagtgtcttgccgctttcacaagtttcgtgatgaccaaaagaatctggtcttccaatgtgatgccacgtcttcttccaggggcatagaactcacaaagttagacggtggacgaaaaccagtgggtggcagtgttgggagagtgttatactcttctccagtgcacctttgggacagctctacagtggtcgcaagct

SEQ ID NO: 197714 - DNA, 278 bp, Glycine max
acggctgcgagaagacgacagaaggggggacttgctgctagggtggttgatagacagcaggtgcataggaccatttctaaagaagaaatgctgcatctgtttgagcttggtgatgatgacaaccctgagactttggctgatctaagtcaagaaaatgagcatcaagacaaccctattttggttgggcattcactgaaacacacagcaccacattcaaatggcagtagttattctgataagttaatggaaagcttacttagcaagcatcatccgcggtg

SEQ ID NO: 197715 - DNA, 277 bp, Glycine max
aagacgacagaagggggaacttcttcgcattttccaccgaaaatggcttcgcaaaacccagcagaggaagaaaattcaaatcgacattggtcccttgaagacttcgaggtcggtaaacctctcggtagacgcaaattcggtagagttttcgtcgccagagaagtcaagagcaaatttgttgtggcgttgaaggttatattcaaggaacaatttgataagtacagaattcatcaccaactgaggagatagatggagatactgaccagtctccggcaca

SEQ ID NO: 197716 - DNA, 267 bp, Glycine max
tctcgagccgaatcggctcgagtacggctgcgagaagacgacagacggggactaaacagagtaactaactaaattaaggagagtccaagtgtgtgggagacaaagagagacatggctaagtggtgtatgttggtgttggttcttgctctggctgtggctacaagtgccagagatgttcccaatcccaaggatgctggtctcaatgaccagaagaacttcatcagctatggtggagttggtggctattctggaattggaagcaatgga

SEQ ID NO: 197717 - DNA, 265 bp, Glycine max
cgaagacgacagaagggggagtttgatagcacatcccttgaagaaggagaagttgttgaagagggaatggatttgaaaaggtgccagctgcaagtgactgagagggctcttatcgagatgcttcttccttgcatagatcaaagttctgacggatcccgcaattcctttgcaagtgatatggtgaaacagttaagttatattgagcaacaaataactgctgttacaggtggaagtaaatcagtaggaagtgctcctcctggagttg

SEQ ID NO: 197718 - DNA, 266 bp, Glycine max
tatcgagccgaatcggctcgagtacgctgcgagaagacgacagaacgggatgaattgagaaggtattttgtaagtacataattatcttgaataaattcactatttctttattttccgatcgcctggaaagaacaagatgtttcttttgttctttcttcaacaatttctgatctctagtagacctctcagtaggattcgaactcagatgaagttctgaccatctgtcagagaaaaaagaacgagtagctctgtatcaatggaatctc

SEQ ID NO: 197719 - DNA, 266 bp, Glycine max
tacggctgcgagaagacgacagaagggaagaaaaaaacttaaatcaaaatacttaatagcatggcgatacatttatacaaaacttctaccccaagcacacgcaatggagccgtagacagtcaagtaaaatccaatccacgaaatcatttgatctatggacagcatcgttgtggtaaaggccgtaatgccagaggaatcattaccgcagggcatagagggggaggtcataagcgtctataccgtaaaattgattttcgacggaatga

SEQ ID NO: 197720 - DNA, 267 bp, Glycine max
acggctgcgagaagacgacagaagggggatacagaaaagaaaaaggaaaccctagctggataggtcaaacatcatcatgtcggacgaagagcaccatttcgagtccaaggcagacgccggtgcctccaaaacctaccctcagcaagccggtaccattcgcaagaacggctacatcgtcatcaaaggacgcccctgcaaggttgtggaagtttcgacttccaaaactggaaagcacggtcacgccaagtgccactttgttggaattga

SEQ ID NO: 197721 - DNA, 265 bp, Glycine max
acggctgcgagaagacgacagaagggatcagccacaaatttataccttcgtgtgaaccatatatatgtgaactctgaggatataaaggaaactggatacacctatattatgccaaagaacattttgaaaaagtttatatgcatagcagatcttcgaacacaaatttctgggtacatgtatggcgtaagtcctccagataatcctcaggttaaagaaattcgctgcattgtgatgccaccacaatgggggacacatcaacaagttc

SEQ ID NO: 197722 - DNA, 252 bp, Glycine max
tacggctgcgagaagacgacagaaggggactcacaactccataacacaaggcggaaagcaagctcatcctagagttttaaaaatggcagcagcctcctccatggctctctcttccccatccttggctggcaaggccgtgaagctgggcccatcagcccccgaagtcgggagggtcagcatgaggaagaccgtcaccaagcaggcctcctccggaagcccatggtacggcccagaccgcgtcaagtacttggg

SEQ ID NO: 197723 - DNA, 269 bp, Glycine max
tctcgagccgacggctgcgagaagacgacagaaggggggactaaacgataactaaactcccagatatttgttcacttcactttctcagtgcagttgttgcctaatgcaatggaggaagaagccaaggtggttttgttgggtgcacggttcagtatgtttgagatgagagttaagatagctttggcagagaaaggaatcaaatatgagtacatggaacaagatctcaccaacaagagtactttgcttcaagaaatgaacccaattcacaa

SEQ ID NO: 197724 - DNA, 270 bp, Glycine max
tacggctgcgagaagacgacagaagggggcgcattgaacgaaaattagggtttgtagtgtagcaggaagaagcagcaatggcgccgaagataacacgtaaggttagcagaaaccctgaattgataaggggaatcggaaagtactcgaggtcgcagatgtaccacaagaggggcatttgggctatcaaggccaaaaacggtggcgttttacctcgccacgaccctaaacccaagcccgaagctcctgctgaaaaaccacccaaattttacc

SEQ ID NO: 197725 - DNA, 269 bp, Glycine max
gcagcatatatattagatcatccaaaagctgggccacggttggtgacaggtgaagcactaggctttgctggggttcccccaactgttatggtccagtgcttacaccaagcctttaaccacccagatgggtttgattactcctcaaagcattccaaggtggggtccctgcagatgtttatgatcaatgatggtaactgtgaggaccttggaccaggggctttttctgcggaggaggtgcataagatcaccgtgcttgatctaagaatggc

SEQ ID NO: 197726 - DNA, 255 bp, Glycine max
acggctgcgagaagacgacagaaggggggctcgcataccaaaaggtgttcttcttgttggccctcctggaactgggaagacacttttagcaaaggctattgcaggtgaggcaggtgtcccattgttctcaatctcaggttctgagtttgtagagatgtttgttggtgtgggtgcttctcgagtccgggatttattcaggaaggccaaagagaatgcgccatgcattgtgtttgttgatgaaattgatgctgttgg

SEQ ID NO: 197727 - DNA, 261 bp, Glycine max
tacggctgcgaaagacgacagaagggggcacaagtgagtttgttgatcgagataactagaaacagtgtgatgaaaatgaaggtccttgttttcttcgttgctacaattttggtagcatggcaatgccatgcgtacgatatgttccctctccgaatgaacactggctatggtgcccgtactccggaggtgaaatgcgcaagttggaggcttgctgtggaagcacacaacatctttggctttgagaccattcctgaagagtgc

SEQ ID NO: 197728 - DNA, 265 bp, Glycine max
tctcgagccgaatcggctcgagtacggctgcgagaagacgacagaagggggagatagctagaagcaataagatgaaaatgacagtgcttgttttgtttgttgctacagttttggtagcatatgaatgccatggctcagactaccagaagttccctctccaaatgaaaactgggtttggtgggcaatacagcaatgaggtggcatgtgccagttggaggcttggcgtggaagcaaacaacgtagtcaagtggcaaactgttcctgc

SEQ ID NO: 197729 - DNA, 267 bp, Glycine max
tacggctgcgagaagacgacagaagggggtgctctgctcgtgcctctagggttatcatttctccatttccattttctctctcacttttcaagaatcgtaagctatgggaaagtcttacccaactgtgagtgctgattaccagaaggccgttgagaaggcgaagaagaagctcagaggcttcatcgctgagaagagatgcgctcctctaatgctccgtttggcatggcactctgctggaacctttgacaagggcacgaagaccggtgg

SEQ ID NO: 197730 - DNA, 274 bp, Glycine max
tacggctgcgagaagacgacagaagggggcaattgcatagagaagtgcagagagagcgcacttaacgactcagtcaaacagtcggtaactctttcttttcttttctttctttctccgatcgcatcgctcgcaaccacaatcatgccttcccgaagaagaactctcttgaaggtcatcattctcggtgacagcggggtggggaagacgtctttgattgaccagtatgtgaataagaagtttagtaatcagtacaaggcaaccattggagcggatt

SEQ ID NO: 197731 - DNA, 238 bp, Glycine max
gactcgcagttgtattgttgaacaagggtttctctgtctgcttcttcactttctctcgtttcaatcgaaaccaaaacaaaaacatgggcagaaaattcttcgtcggtggcaactggaaatgcaatgggaccactgaggaggtaaagaagattgttactactttgaatgaggctaaagtccctggagaagatgtcgtagaagttgttgtgagccctccttttgtgttccttcctgttgt

SEQ ID NO: 197732 - DNA, 259 bp, Glycine max
cggctcgagcggctgcgagaagacgacagaaggggaaatttggatggggatctgcatttgggtcactggcaattgcaatgggaatatctaacatggtcttcttcataggcactccattgtacaggcacaggttgccaggaggtagccctcttactcgtgttgctcaagtcttggttgctgcatttagaaagagaaatgcctctcttggtagcagtgagttcataggcttgtatgaggttcctggcagacagtctgctat

SEQ ID NO: 197733 - DNA, 262 bp, Glycine max
acggctcgagaagacgacagaagggcaagtttgttgagatagctagaagcaataagatgaaaatgaaagtgcttgttttgtttgttgctacagttttggtagcatatgaatgccatggctcagactaccagaagttccctctccaaatgaaaactgggtttggtgggcaatacagcaatgaggtggcatgtgccagttggaggcttggcgtggaagcaagcaacgtagtcaagtggcaaactgttcctgcagcttgcggaga

SEQ ID NO: 197734 - DNA, 261 bp, Glycine max
cgacagaaggggatgcacaagtttgttgagataactagaagcaataagatgaaaatgaaagtgcttgttttgtttgttgctacagttttggtagcatatgaatgccatggctcagactaccagaagttccctctccaaatgaaaactgggtttggtgggcaatacagcaatgaggtggcatgtgccagttggaggcttggcgtggaagcaaacaacgtagtcaagtggcaaactgttcctgcagcttgcggagagtacata

SEQ ID NO: 197735 - DNA, 261 bp, Glycine max
acggctgcgagaagacgacagaaggggacacaacattgatttctgagattcagatgatggcgagtgagtcgcaaaactgggtgttcatggtcactgcacagacaccaaccaacattgccgttatcaagtattgggggaaaagagacgaaaccctcatcttaccggttaacgacagtatcagtgtcactctcgatcccagccacctctgcaccaccaccactgctgccgccagtcccgctttccaccaagatcgcatgtggc

SEQ ID NO: 197736 - DNA, 264 bp, Glycine max
tacggtgcgagaagacgacagaagggggagagagtgagtgagatagagagagacgcttcgcaaatctcaatcgaatctcagaaaaatgagagaaatcatcagcattcacataggtcaggccgggatccaggtcggaaactcctgctgggaactctactgcctcgaacatggcatccagcccgacggcatgatgccttctgactccaccttcggtgtagcccacgacgccttcaacaccttcttcagcgaaaccggatctggcaa

SEQ ID NO: 197737 - DNA, 263 bp, Glycine max
cgaggacgacagaagggggtgatttgaaagataagccatggtggcaaaagatgcaaactcgtgaagagttgattgaagcctcggctaccctcgtatggatcgcttcagcccttcatgcagctgttaactttggacagtatccatatggaggtttaatcctaaacaggccaaccattagcaggagattcatgcctgagaaagggtctgctgagtatgcagctttggctaagaaccctgagaaggagtcttaacagactattact

SEQ ID NO: 197738 - DNA, 261 bp, Glycine max
tacggctgcgagaagacgacagaagggagagtcagcaggaaattttgtacaaccaacaattgttgagatttctcccgatgctcctgtagttaaagaagaattgtttggtccagttctgtatgttatgaaatttcagactctggaagaagcaattgccttgaacaattctgtacctcaaggattaagtagttcaatctttacccaaagacctggaactatattcaagtggattgggccacgaggtagtgatcgtggtatagt

SEQ ID NO: 197739 - DNA, 261 bp, Glycine max
  unsure (1)..(261): unsure at all n locations
cgagaagacgacagaagggggaggtgagctggcctaggctgtgatattggggcagcgcacaatacgtaacaagttctatcattgaggaagtttccggtctccgaaaatgaacgacgcagatgtctcgaagcaaatccagcagatggtgcggttcatccgccaggaagctgagganaaggccaacgagatctctgtctccgccgaagaggaattcaatatcgagaagctgcagttggtcgaagccgacaagaagaagatcag

SEQ ID NO: 197740 - DNA, 251 bp, Glycine max
tacggctgcgagaagacgacagaggggagggtattgcactgcggctgctacttcggctccatcttctccgatctcctcaaactctatcagcgcagaaccaagcctctatcaccatggggaagacacatggaatgggagctgcccgcaagctgaagtctcaccgtaggagacaaaggtgggctgacaagtcatacaaaaagtctcatctgggaaatgaatggaagaagcctttgctggttcatcccatgcca

SEQ ID NO: 197741 - DNA, 259 bp, Glycine max
agaagacgacagaaggggaagggaaaagcgaagtgtgaagacagacacagtgagaatgatgaagcgtcggttccttttggttctcttggttctctatgtcacagtggagttctacgtagaagcagatggtagtggtgggtttgtgagaacaagaggagtgcagcttatgctgaatgggagcccctactatgctaatggctttaatgcctattggctaatgtatcttgcctctgatccttctcagagaaacaaagtctca

SEQ ID NO: 197742 - DNA, 258 bp, Glycine max
agaagacgacagaagggggcacaagtgagtttgttgatcgagataactagaaacagtgtgatgaaaatgaaggtccttgttttcttcgttgctacaattttggtagcatggcaatgccatgcgtacgatatgttccctctccgaatgaacactggctatggtgcccgtactccggaggtgaaatgcgcaagttggaggcttgctgtggaagcacacaacatctttggctttgagaccattcctgaagagtgcgttgaa

SEQ ID NO: 197743 - DNA, 269 bp, Glycine max
tgcgagaagacgacagaagggggcagccaaagaaaagaaaatcctcaattttctgagcagccaaacactctctctctgtctctcgaaaattctcagtttgcagagaaaatctgaatcatgtcgtggcaagcgtatgtcgacgatcaccttctgtgtgacatcgaaggtaaccacctcactcacgctgctatcatcggccaagacggcagcgtttgggctcagagtaccgacttccctcagttcaaacctgaggagataactgccatcat

SEQ ID NO: 197744 - DNA, 270 bp, Glycine max
acggctgcgagaagacgacagaagggggcatatccaaaggaacaaaaatattattaagatgatcaacattattggagcacttgttctactctttgcatttctcttcctcagttgtgtgtatgcacaagacacaacaacccttgtgcctgcaatcataacttttggtgattctgctgtggatgtagggaacaatgactatcttcccacccttttcaaggctgattaccctccttatgggagggactttgttaaccaccaacctactgggag

SEQ ID NO: 197745 - DNA, 263 bp, Glycine max
acggctgagagaagacgacagaaggggatatcacagaaaactattgtggtttaatttgcctttcctcattcaagggagctcattgaagagacaaaaaacaatggctgaaacaaagttgagcatgatgaaggacaaaagatggtcactccgtggaatgactgctctcgtcacaggagccacccgaggcatagggcatgccattgttgaagaattggacaactttggagcaactgttcatatatgtgcacgtaatcaagatgata

SEQ ID NO: 197746 - DNA, 257 bp, Glycine max
tacggctgcgagaagacgacagaagggcttggtctttgcggaaacaaagtagatgctatcgatcatcacaacactgaaattgacaaactgtcaaaggaaatagcgttagagagggataatgtcagcaatgatcccaagtccatcatgcctgcggcatttgtttcgtttaaaacacgatgcgtgctgcagtttgtgcacaaacccaacaaaccagaaacccaacaaatgccttgacagagtgggcgccagagccacgt

SEQ ID NO: 197747 - DNA, 257 bp, Glycine max
tctcgagccgattcggctcgagcggctgcgagaagacgcagaagggacagaagtaaatccaaactcaataaaatggcttcaaattccagcaccaacaacgctggctaccccatcaaaaccatcgtcgttttggttcaagaaaaccgttcctttgaccacatgctcggttggatgaagtccctcgatccgaaaatcaacggtatcaccggttcagagtctaacccgatttccacatccaatcccaactcgaatctggt

SEQ ID NO: 197748 - DNA, 257 bp, Glycine max
cgagaagacgacagaagggggagtgagcgtagttgaggttttgccacttcgaaaccaaattttcttccttcgttggcatctgtgatctcttctcctcacaatgagcagatcagggcaaccaccggatttgaagaagtacatggacaagaagcttcagatcaagctgaatgcaaatcgcatggttgttggtactctccgtggcttcgaccagtttatgaatttagttgttgacaacactgtggaagtgaatggcaatg

SEQ ID NO: 197749 - DNA, 258 bp, Glycine max
gaagcaggaaggttaaggtcaaaaaagtccctaatttctggtgctgcttcctcaagtacaattgtttgactttgaaaatttcttgcactctcagacccaccagccaagtgatgagatctcttgtggccacccaaggcttggccagatggaaaaacctttgtggcaaattggacactcgtgccctttcaccttcttggaatctctcactgtttcaacctcattgtcaaattgagcagcagtagtagcagtagtaacatt

SEQ ID NO: 197750 - DNA, 260 bp, Glycine max
acggctgcgagaagacgacagaaggggagattattcatattagatcaccatgacacatttatgccatttttgagaaggatagatgaatctaaatcatcaaaggcttatgccactagaacaatccttttcttgaaagatgatgggaccttaaagccattggccatcgaattaagtttgccacatccaggtcaacaacagcttggtgcctatagtagagtcatcttgcctgcataccaaggtgtagatagtacaatttggct

SEQ ID NO: 197751 - DNA, 262 bp, Glycine max
tgggcatatccagctgacagaaaacgatgaatttgcttaccaagagatgctcactcaccttgcactctgttccattccagatccaaagaaggtgctgcttattggagggggagatggtggaattcttagggaaatatcacgccattcttctgttgagcatattgatatatgcgaactagaccaaatggtcattgatgtttattcggagtttttcccggatatagctgttggttacgaggatccccgagtgcatgttcatatc

SEQ ID NO: 197752 - DNA, 263 bp, Glycine max
cttgtgaagcgggatcaacgcacgggcaagaaacagcttatgctcttccttcaaaggcaaagcaaaaccattaattatgctgcccaatatttcaagcaactctgcaatcccactgtgtttctctgtctcaaatatgaacctgtaaaagatattgttgatggcttttctaatgaatggccgatgcaccatgaactttccataaatacggtggaggatagtcttcaggtaatccctctctctttggtcttctgagtcaaaaaggt

SEQ ID NO: 197753 - DNA, 265 bp, Glycine max
ctaaagactacagagagccaccgtcggcgcctctcttcgaaccgggagagttgtcatcgtggtctttctatagggctggcatagcagagtttgtggccactttcttgttcctctacatcacagtgctgactgtgatgggtgtgttcaaatctaagagcaagtgttccactgtgggtatccaaggcattgcttgggcttttgggggaatgatctttgctcttgtttattccactgctggaatctcagggggtcatattaacccagc

SEQ ID NO: 197754 - DNA, 178 bp, Glycine max
tacggctgcgaggacgacagaaggggatagtgggccaggatgtgcagctagtcatgttgggaactggaaggccggacttagaagatatgcttaggcagtttgagtcccaacaccgtgacaaagtcagaggatgggttggcttttcggtcaagatggctcaccggataacagcaggtgc

SEQ ID NO: 197755 - DNA, 215 bp, Glycine max
cgggtgcgataagacgacagtaggggaccgctattagggtttcggagtcgttgcagagctgcgcgatgatctacaaaaatggcgaggataaaggtgtacgagttgatgaataagacgaatgcggagctactaaaccagctcaaggatctcaaggcggagctagccctgctccgcgtcgccaaggttaccggaggggcaccaaacaagctctccaa

SEQ ID NO: 197756 - DNA, 282 bp, Glycine max
actcgagcgaatcgctcgagacggctgcgagaagacgacaacaggggtccgccattactcgtagctgctgttctagcgcgtgaacaagcctcaggtaagccaaaaccatggttaagcataacaatgttatcccaaacggacacttccgtaagcactggcagaactatgtgaagacttggttcaatcagccagcacggaagacaaggagacgattggctcgtcagaagaaagctgtgaagatattccccagacctacggctggacctctcaggcccattgtac

SEQ ID NO: 197757 - DNA, 249 bp, Glycine max
tacggctgcgagaagacgacagaagggagaatatgaaaaagaaaaaaaaaagattctaaagaaatataactaatattctttagaataatcaaaaagaatattaaattcaaataaattttagatagaaaaaagacttaaaaaggaggatttgaaatgcgagatctaaaaacatatctttccgtggcaccagtagtaagtactctatggttcggggctttggcgggtctcttgatagagatcatccgtttt

SEQ ID NO: 197758 - DNA, 152 bp, Glycine max
gttccaaggggttaagcgttttcagtgtgttattcttctcagcactgtcactgagtcgttgtcttgctgaggataatggacttgtgatgaccttctacatggagtcatcccctaaggctgaagacatcatcgaggatcatatcaagcttctc

SEQ ID NO: 197759 - DNA, 190 bp, Glycine max
tacggctgcgagaagacgacagaagggggcacaagtttgttgagatagctagaagcaataagatgagaatgaaagtgcttgttttgtttgttgctacagttttggtagcatatgaatgccatggctcagactaccagaagttccctctccaaatgaaaactgggtttggtggaaaaaacagcaggggggt

SEQ ID NO: 197760 - DNA, 216 bp, Glycine max
acggctgcgagaagacgacagaagggggcacaagtttgttgagatagctagaagcaataagatgaaaatgaaagtgcttgttttgtttgttgctacagttttggtagcatatgaatgccatgactcagactaccagaagttccctctccaaatgaaaactgggtttggtgggcaatacagcaatgaggtggcatgtgccagttggaggcttggcgt

SEQ ID NO: 197761 - DNA, 200 bp, Glycine max
tacgagaagacgacagaagggtgaaaactatcgaatatcctttgctcatggaatgggacttatttctgatgaactatacaggtcactgcaaaaaaattgtaaaggagagtacataaatgtagacaccaaaaatgtattatgttctagaaatatcgagacattcaatgaggttacatcaggacttagtatggtcaatattt

SEQ ID NO: 197762 - DNA, 260 bp, Glycine max
tatcgagcgaatcggctcgagacggctgcgagaagacgacaacaggggggaaaagttagaagtagtgaagaaaatgacagtcattgttttcttcgttgctataataattttaggtgcagaatggcaatgcaatgggtcagagcatgagcatgagcatggccacagctaccaaattttccctttgcgaatgaaaaccggccccggaggccactacattccggaggtatcgtgcaaaagttggaggcttggtgtggaagcac

SEQ ID NO: 197763 - DNA, 230 bp, Glycine max
tacggctgcgagaagacgacagaagggatcagcggtgccccccaggataacaacataatgctgtggaatgctgtcatatttggtcctgatgatactccatgggatggaggcacgttcaagttgactctccagtttactgaggattatccaaataaaccaccaactgtgcgatttgtgtctcgcatgtttcatccaaatatttatgctgatggaagtattggtttggatat

SEQ ID NO: 197764 - DNA, 205 bp, Glycine max
taggcacgacagaaggggaaggaatatgaacttctcagaaggtacttcagtgatactagttgctttggctttggtaatcaggagcatatcgatttgggagtcaagtatgatccttcaactggtatttatggaatggattctgtgttgttcgggaggtgctggctatcgtttcggacgccgccgaaggtgaaatccccgtgtggga

SEQ ID NO: 197765 - DNA, 128 bp, Glycine max
tacggctgcgagaagacgacagaagggggcacaagtgagtttgttgatcgagataactagaaacagtgtgatgaaaatgcaggtccttgatttcttcgattctacaattttgggctcatggcaattgc

SEQ ID NO: 197766 - DNA, 281 bp, Glycine max
tctcgagcgaatcggctcgagtacggctgcgagaagacgacacaagggggcagcgcttcatttgaggccaggcaagcaccactcaaccaccacacctctcctcgttcacgctacccctttctgctcttcttctacctttcaagttttaaaagtataaagatggcagagacattcctatttacctcagagtcggtgaacgagggacaccctgacaagctctgcgaccaaatctccgatgctgtcctcgacgcttgcctcgagcaggacccagacagcaaatt

SEQ ID NO: 197767 - DNA, 261 bp, Glycine max
cgagaagacgacagaaggggacagcacagcactctttacaacacaacaaaaaaagacaacacagagagaagcgtcttaataaacgctcttctctgaaaaacctgatttcttctcttcttctcttctctttcgtttcgatcttcgatctctgaaaatgagagagtgcatttcaatccacatcggtcaggccggtattcaggtcggaaacgcctgctgggagctctactgcctcgaacacggcattcagcctgatgggcagat

SEQ ID NO: 197768 - DNA, 276 bp, Glycine max
cggctgcgagaagacgacagaaggggacagcatatactgatcataaatcacatagctagttgtttaaagtgagagaaaaagaaagaagaaaatggcaaactttccagttgttgacatggggaaacttaacaccgaagagagagcagcagccatggagattataaaagatgcctgtgagaactggggtttctttgagttggtgaaccatgggatatcattgagttgatggacactgtggagaggctcacaaaagagcactacaagaagactatggag

SEQ ID NO: 197769 - DNA, 231 bp, Glycine max
tacggctgcgagaagacgacagaagggggaaggcatttcattagcagcgttaaagaagagagaagaaaaatgcgaaagttcgatccatggcccgttttcttcaagcgcgagtggaaacgcaactggcccttcctcgttggattcgcagtcaccggagctctaatcaccaaactttcccttggtcttaccgaggaagatgctaagaattccaaattcgttagggcgcaaaaa

SEQ ID NO: 197770 - DNA, 247 bp, Glycine max
  unsure (1)..(247): unsure at all n locations
ggcacattgaaatctgaaccttccggatttcgttttgctttgttcaggtagccagccagtcatggtgctcttcaatgtttcacgcgtagagaccactcccttcgatggccagaagcctngaacctctggtctccgcaagaaggtgaaagtgttcgtgcaacctcattacctccataactttgttcagtcaacattcatgcattactgtggaaanattagagnnccncnctttttnnggggggggttt

SEQ ID NO: 197771 - DNA, 189 bp, Glycine max
ggctgcgagaagacgacagaagggaagaatgttctgacaaatttctggggaatggatttcacaacagacaagctgaggtcattggtacgaaaatggcaaactcttattgaagcccatgtggatgtgaagacaactgataattacacattgaggatgtttcgcattggatcaaccaagagaagagctaac

SEQ ID NO: 197772 - DNA, 274 bp, Glycine max
tacggctgcgagaagacgacagaagggggagaaagagagagagagagagagaaactgagagaaattcgcaaaccctaatttcggaaagatcggcgatggctgcctccaaggatcgcgagaacttcgtctacatcgccaagctcgccgaacaggccgagcgatacgaagagatggtggaatcaatgaagaacgttgcgaatctcgacgttgaactgactgtggaggagcggaatttactttctgttggggtacagaatgtgattggtgctcggag

SEQ ID NO: 197773 - DNA, 197 bp, Glycine max
cggctgcgagaagacgacagaagggggcacaagtgagtttgttgatcgagataactagaaacagtgtgatgaaaatgaaggtccttgttttcttcgttgctacaattttggtagcatggcaatgccatgcgtacgatatgttccctctccgaatgaacactggctatggtgcccgtatccggaggtgaaatgcgcaa

SEQ ID NO: 197774 - DNA, 242 bp, Glycine max
acggctgcgacaagacgacaaaaaggggttctggtttgtcggtctttctctcggaatcttcactacattcaccgagcatttgcattcacattgaatatggctgagactacacaatctaatgctgagttgttggagtggcctaagaaagataagcgccgcttcctgcatgttgtgtatcgtgttggtgatcttgatcgcaccattaagttttatactgaattttagggaaaagttttgaggaa

SEQ ID NO: 197775 - DNA, 231 bp, Glycine max
cggctgcgagaagacgacagaaggggaccgcgcaccacactgagaggaagagggagtgagagagagtgttcttcgtttgctaccttctcccagaaatggttacgttcaggtttcaccagtaccaggtggtcgggagggctctcccaacggaagcagatcagcatccgaagatctaccgaatgaagctctgggccaccaacggggttcgcgcaaattctaagttcgggtatt

SEQ ID NO: 197776 - DNA, 274 bp, Glycine max
tacggctgcgagaagacgacagaaggggattgagcaatcgacatgatatatttgcttacattccgggcgaaggtcataattcgcaggaacattctatggtgttaataagaggaggtagagtgaaagatttgccaggtgtgaaattccattgtattcgaggagtcaaggatttgttgggaattccggatcgaagaagaggcagatccaaatatggtgcagaaaaacccaaatcgatatgaatggaggatgcctctggaacttcttttttttctcg

SEQ ID NO: 197777 - DNA, 249 bp, Glycine max
  unsure (1)..(249): unsure at all n locations
gaaggaacggtttgctgaagaaggcgaaggagcttgcgatcttgtgcgatgctgaagtcggagttatgatcttctccagcaccggaaaactctacgatttcgccagctccagcatgaaatcagtaatggaccgatacagcaantcaaangangancttgtcaccttgggngtccancctctgaattacgnagttattanaattntggcccnatntangccgngggntttacactcnccccaggnntttt

SEQ ID NO: 197778 - DNA, 230 bp, Glycine max
agacgacagaaggggggacagtccataaattctgaggatgacttttttacaaatcctgtggtgaagggatactacaaaaaccacatcaaggctgtacttacaagacgtaatagcatcactggagttgcttacaaagacgacccaactataatggcttgggaacttatgaatgagattaggtgcccttctgatcaatcaggaaggacagttcaggcttggatcactgagat

SEQ ID NO: 197779 - DNA, 132 bp, Glycine max
cgacagaaggggccatccagcggttcttgaagctgcagttgttgcaaagcctgatgatcattggggccaaactccttgtgcttttgtgaagttgaaagaagggtttgatttaggtgctctaagaataatcca

SEQ ID NO: 197780 - DNA, 295 bp, Glycine max
gaattcagctcgagttgcgagaagacgacagaaggggaatgaaattggccgatattatgacaatactaggtagcatagatattattatgggagaagttgatcgttgaaatgataatttatttaacagagatacaagatatccattttttgttcagattggaatcttttaaagagatatatggaattatatgggtatttgcccagattttgattcttatattgggaattacgataagtgtactagcaattgtatggttagaaagggaaatatccgcagggatactacaacgtattg

SEQ ID NO: 197781 - DNA, 278 bp, Glycine max
tggctgcgagaagacgacagaaggggaggatggttcagaagaacaagctgtgattggattatggagtggcattgcttggttggttggaatgactgtattcattgctgtgttgtctgaatatgtggtgggatccaattgaggatgcatcagattcatggggtttgtctgtgagcttcctaagcataatcttgctgccgatagttggcaatgcagctgaacatgcaggagcaattatatttgccttcaagaacaagctggacatctcattgggtgttgca

SEQ ID NO: 197782 - DNA, 287 bp, Glycine max
cacggctgcgagaagactacagaaggggcagattgcaaggagaaaaacattcaaactagccaggctttctcaggtttacggtggacagtagactgcaaagcagcaaatgggaacttttgaaggtcaaggggccggtaagcttgatgaatatggaaacttcaaagtttcccttcctcatgacactgtaaaagacgataaactgatagaagaatgctatgctcagctacttagtgcatcagctgcaccttgtcctacccatgatggcccattgagccacaaaatagtga

SEQ ID NO: 197783 - DNA, 281 bp, Glycine max
ccgctcgagctgcgagcagacgacagaaggggggaagcaaaacaacattaccagagtggttctagtaattcagtgctgctagaagatggaaactagtgaatggcatatcgagcgaagatctaacttcggctctggaatcccccttagcaagagaggcaggaaatgtgccctgaaactgggtcactctctattgtggtgcttggtgcttctggtgatcttgctaagaagaagacatttcctgcacttttccacctatacctgcagggattcttacaccagat

SEQ ID NO: 197784 - DNA, 279 bp, Glycine max
tacggctgcgaagacgacagaaggggggccaaggggcattacactgagggtgcggaattgattgattccgttctcgatgttgtgcgcaaggaggctgagaactgcgattggcttgcaaaggttttcaagtgtgcaattccctgggggaaggaactggatcaggaatgggaaccttgttgatttctaagatcagggaagagtacccagatagaatgatgcttactttctctgttttcccatctccaaaggtttcagacactgttgtggaaccctacaatg

SEQ ID NO: 197785 - DNA, 278 bp, Glycine max
tacggctgcgagaagacgacagaaggggacactaaacaagttaaaagaagagcatcactgaactaacaaagcaaccctatgtcgaaggtggtttgtgtcaccggagccagcggcggccttcgattcatgggtgtcctactcctcctcaagcgtggttacatagtccatgcgacggtccaagatatcaaggatgaaaatgagacgaaacatttggaggaaatggaaggagcaagagtcactccatttttttgaaatggatcttcttgacatcgactcca

SEQ ID NO: 197786 - DNA, 281 bp, Glycine max
acggctgcgagaagacgacagaaggggggtactgtctcttagctttgattctctgttctctgttttgttctgtttcgcgtacaggaacttaaacaatgaagactgcaaagggcaagggagcaccgaggccctcaaaagaatcactgaagcctgttgatgaccgaaaggttggaaagcggaaggcttctggtaagcctgagaaaagcagagcaccaaagaaggagaagaaggccaagaaagaccccaacaagcctaaaagaccaccgagtgctttcttcgtg

SEQ ID NO: 197787 - DNA, 273 bp, Glycine max
ctaaagactacagagagccaccgtcggcgcctctcttcgaaccgggagagttgtcatcgtggtctttctatagggctggcatagcagagtttgtggccactttcttgttcctctacatcacatgctgactgtgatggtgtgtcaatttagagcaatgttcaatgtgggtatccaaggcattgcttggcgttttgggggaatgaccttggctctggttaatccaactgctggaatctcagggggtcatattaacccagcagtgacgtttgggct

SEQ ID NO: 197788 - DNA, 287 bp, Glycine max
tgaagacgacagaaggggatcttagatttgactcttggttgagagtgagtttggaacttgaaagatactagaatggccactttagacgaacgcccttctgcgaaaaaggtggctcctcctcgaagctaaaccctgacttcatggaacagtttcctttggggtcttggccttcaattggatgaggcagattgcggtgatgtgtttggcttagatgaagagcttctggaaatggttcccaagccagttctcgccgtgctttttctttatccaattaccgcgaagtctga

SEQ ID NO: 197789 - DNA, 277 bp, Glycine max
ctgcgagaagacgacagaaggggggtggaaatggaatcggcagctgaaaaccctaattacccggcggcggactacaagcgaccttccatcttgtcatttcctcggaggcccgccctcagagttacatcggagttcgataatgaaagcgaagctttcttcaataagatttcctgcaagtcgttggacagccttgccaagttcaagttttcgttcaaccacagcggtaagggcggcgacatctccgaacctcaattcagctttgtctccaagcacctta

SEQ ID NO: 197790 - DNA, 131 bp, Glycine max
acggctgcgagaagacgacagaaggggaacacgcggctgccgccggaggtgaaccgcgtgctgtacgttcggaaccttcccttcaacatcacgaacgaggagatgtacgacatcttcgggcaagtacggcg

SEQ ID NO: 197791 - DNA, 275 bp, Glycine max
agacgacagaaggggatccaatccaattgaattctccagagagaagaagaaacttaatcgatcatcacttcacttcactaatacatcatggcagacgagacccagaacaagtatgagagctctgaagttgaagttccaggatcgcggtgtttttgactttctcggtaagaaaaaggatgaagaagacaagcctcatcctcaggaggaggtcatcgccaccgagtttcaaaaagtcactgtctcagaccaaggagagaacaagcacagcctcttag

SEQ ID NO: 197792 - DNA, 275 bp, Glycine max
agcaagtagagctctggacttcttctttggttggtattctgatccggttttctatggtgactatccggagagtatgaaatcttcagtaggttctaggctcccaaaaattcacaaaaagctgaaatcttgaaggctaaaaaaattccatagattttcttggtgtgaattactacaccacttattatgcggaacatgctgaacctgtcagtgccaaccgaaccttctacacagacatactagccagtctcagtacggaaaggaatggtctacatgtt

SEQ ID NO: 197793 - DNA, 261 bp, Glycine max
acgctgcgagaagacgacagaagggggcacaagtgagtttgttgatcgagataactagaaacagtgtgatgaaaatgaaggtccttgttttcttcgttgctacaattttggtagcatggcaatgccatgcgtacgatatgttccctctccggatgaacactggctatggtgcccgtactccggaggtgaaatgcgcaagttggaggcttgctgtggaagcacacaacatctttggctttgagaccattcctgaagattgcg

SEQ ID NO: 197794 - DNA, 276 bp, Glycine max
tgaagacgacagaagggcaactgatgtatttacatccgaggatcaaagggaaaggaggaagaaacgttctgcagtgggtacacctgattacttaaccccagagatacttttggaactggacatgggtttactgctgattggtggtctgttggggtaatttaatttgagttgcttgttggtattccacccttcaatgcagagaaccctcttagcacttgtgaaaacaaacgtaggaatctcagggggtcatattaacccagcagtgacgtttgggct

SEQ ID NO: 197795 - DNA, 281 bp, Glycine max
tacggctgcgagaagacgacagaagggggcacaagtgagtttgttgatcgagataactagaaacagtgtgatgaaaatgaaggtccttgttttcttcgttgctacaattttggtagccatgggaatgccatgcgtacgataattttccttctccgaatgaacactggctatggtgcccgtactccggaggtgaaatgcgcaagttggaggcttgctgtggaagcacacaacatctttggctttgagaccattcctgaagagtgcgttgaagcaacaaagga

SEQ ID NO: 197796 - DNA, 272 bp, Glycine max
acgacagaagggggaagagtgaagagaatggctcccaagggtttaacctttctggctgtgttaatatgcgtttcagcactgtcactgagtccttctgttgcggggggaagggcaaataatggccttggtatggacttctacaaggattcatgccctcaggctgaagacatcatcacagaccaagtcaagcttctctacaagcgccacaagaacactgctttctcctggctcaggaacatcttccatgactgtgctgttcagagttgtgatgc

SEQ ID NO: 197797 - DNA, 284 bp, Glycine max
ttaccgagaagacgacagaaggggtcttttcaaaactatcgtcctacaaaaaaaaatattcttgtggtaggccctgttcctggtcaaaaatattaaagaataacctttcctattctttccccggattccactactaagagagatgttcagtgcttaaaatatccaaaatacgtaggtgggaacaggggaaggggtcagattaatttggaggggagcaagagtattaatattgtgtataatgctacagcagcgggtatggtaaaaaaaatcatacggaaagaaaa

SEQ ID NO: 197798 - DNA, 267 bp, Glycine max
acggctgcgaaagacgacagaagggggggatattggcggtggttctgagcgaggaaaaggccttggctttgggcccagaaggcccacttgtggaagagttttgggacaacgtgatgagatatggactccacggcctcaacgtcagcacaggtgccctttacaccatcttccgccctatagcagaacttctcaagaatcccatttccgcaattttcatccttgctcttttcgggggttcaatcttcattgtttctcaagtcctctctg

SEQ ID NO: 197799 - DNA, 269 bp, Glycine max
acggctgcgagaagacgacagaaggggagtgaaagaaaggcagcgatggaagaagacttcgacatccccggcggcgaggaaatggatctcggcgaagacgatgtccgcgaggagagggagatcgggtctggcgggctcaagaagaagctcctcaaggaaggccaaggctgggaaacccccgaagtcggtgacgaagtccaagttcattacacggggactttgctcgacgggactaagttcgattcgagccgcgacagggattctccctt

SEQ ID NO: 197800 - DNA, 131 bp, Glycine max
agcaagtagagctctggacttcttctttggttggtattctgatccggttttctatggtgactatccggagagtatgaaatcttcagtaggttctaggctcccaaaatttcacaaaaggctgaatctgaaag

SEQ ID NO: 197801 - DNA, 273 bp, Glycine max
tacggctgcgagaagacgacagaagggggcacaagtgagtttgttgatcgagataactagaaacagtgtgatgaaaatgaaggtccttgttttcttcgttgctaacaatttgggaaccatggcattgccatgcgtacgatagtttccctctccgaatgaacactggctattttgcccgtactccggaggtgaaatgcgcaagttggaggcttgctgtggaagcacacaacatctttggctttgagaccattcctgaagagtgcgttgaagcaa

SEQ ID NO: 197802 - DNA, 303 bp, Glycine max
agaagacgacagaagggggcacaagtgagtttgttgatcgagataactagaaacagtgtgatgaaaatgaaggtccttgttttcttcgttgctacaattttggtagcatggcaatgccatgcgtacgatatgttccctctccgaatgaacactggctatggtgcccgtactccggaggtgagatgcgcaagttggaggcttgctgtggaagcacacaacatctttggctttgagaccattcctgaagagtgccttgaagcaacaaaggaatacatccatggcgaacaatatagatcagactcc

SEQ ID NO: 197803 - DNA, 302 bp, Glycine max
acggctgcgagaagagacagaagggggctgccgctctctgagaaaaacagatagtgtgggagagagaagagcggaagagaaaatgacgaccaggttcaagaagaacaggaagaagagaggtcacgtcagcgccggacacggccgtatcggaaagcaccgcaagcatcccggaggtcgcggtaacgccggtggcatgcatcaccaccgtatcctcttcgacaagtaccatcctggtttcttcgggaaggtaggcatgcgctacttccacaaacttcgcaacaaattctacaatccgatcatca

SEQ ID NO: 197804 - DNA, 204 bp, Glycine max
tacggctgcgagaagacgacagaaggggacaagcctcagtctcaacacagaagcagaaggaggagaagcagaaagaggagacgaagcaatggcgccgaagaagccccgaaccacgtcgaggaaccctgatttggtcaggggaattggcaaatattcgaggtcgcagatgtaccacaagaggggcatctgggccatcaaggccaa

SEQ ID NO: 197805 - DNA, 299 bp, Glycine max
tacggctgcgagaagacgacagaagggggagctgaaaccgagaagaagaagatggagatgtatcagatctggagcaggagaatagcgttgggagcgttcgcgtttgttctgcttttcctatcggcctcagcagacgacgtcgttgtgctctctgaagataacttcgagaaggaagttggtcaggacagaggagctctcgttgagttctatgctccttggtgtggacactgcaaaaagcttgctccagaatatgaaaagcttggtagcagcttcaagaaagccaaatctgttttaatcgg

SEQ ID NO: 197806 - DNA, 299 bp, Glycine max
ctgcgagaagacgacagaagggggcacaagtgagtttgttgatcgagataactagaaacagtgtgatgaaaatgaaggtccttgttttcttcgttgctacaattttggtagcatggcaatgccatgcgtacgatatgttccctctccgaatgaacactggctatggtgcccgtactccggaggtgaaatgcgcaagttggaggcttgctgtggaagcacacaacatctttggctttgagaccattcctgaagagtgcgttgaagcaacaaaggaatacatccatggcgaacaatataga

SEQ ID NO: 197807 - DNA, 310 bp, Glycine max
atcgagccgctcgagacggctgcgagaagacgacagaaggggtaagagtgaagagaatggctcccaagggtttaacctttctggctgtgttaatatgcgtttcagcactgtcactgagtccttctgttgcgggggaagggcaaaataatggccttgttatgaacttctacaaggaatcatgccctcaggctgaagacatcatcacagaacaagtcaagcttctctacaagcgccacaagaacactgctttctcctggctcaggaacatcttccatgactgtgctgttcagagttgtgatgcttcactgtt

SEQ ID NO: 197808 - DNA, 316 bp, Glycine max
  unsure (1)..(316): unsure at all n locations
cggctcatcgntcgagcggctcgagctcgagcgattcggctcgagacgactgcgagaagacgacagatatgggacattctcaaatcaacataacgcgcactctctcttttctctcttaacacaaaaaccctatcgttcttcgcggtttcgccgattctcgccatgccgaaagccaaatccgacgccaaagccgccgatagccggttgaagcgcaagggcgctggtgctggaaggaagcaatcgaagaaagctgctaaggatcctaacaagccaaagagacctccaagcgctttcttcgttttcatgtccgagttca

SEQ ID NO: 197809 - DNA, 303 bp, Glycine max
tacggctgcgagaagacgacagaagggtaaggaaactaggaacaccactgtgactggggtggaaatgtttcagaagattttggatgaggctttggctggggacaatgtggggttgttgcttaggggtattcagaagactgatattcagagagggatggttttggctaagcctggaaccattacccctcacaccaagttttccgcaattgtatatgttttgaagaaggaagagggtggcaggcactctccgttctttgccgggtacggcctcagttctacatgaggactaccgatgttactggc

SEQ ID NO: 197810 - DNA, 308 bp, Glycine max
tacgtgcgaagacgacagaagggggaagttcaaagtgtaggacgagaaagtagacacagccatgtccactactggtactgttcctggcttccactccaacacaaaggctattaggcaaagtggcattggttactggtggagcgtctggacattggagaaagcattgtgcgcctcttccatatccatggtgctaaacatatgtcatagctgatgtgcaagacaaccttggaaagcacgtctgtcagtgccttggtgatgaagcacatgttgtttttgtccattgtgatgttacagtagaggatgatgtt

SEQ ID NO: 197811 - DNA, 301 bp, Glycine max
taattccagagtcttatcttgctgccatctgtaagcaggtgctgaagggtctagtttatctccaccacgaaaggcatattatccacagagacttaaaaccttctaatttgttaataaatcatattggtgaagtaaagatcactgactttggtgtgagtgcaattatggaaagtacatctggtcaagcaaatactttcattggaacctgcaactatatgtctccagagagaatcaatggaagccaggaaggctacaacttcaaaagtgatatatggagtttgggactaatattacttgagtg

SEQ ID NO: 197812 - DNA, 293 bp, Glycine max
gacgacagaaggggggagggagggagccgtagcagcggaagctctagcttgggtagcgaatcacaatggcgagaggattaaagaagcatctgaagaggcttaatgccccaaagcattggatgcttgacaaactgggtggtgcatttgctcctaagccctcatctggaccacacaaatcgagggaatgcctgccactcatactcattttgcgaaaccggctgaagtatgctctaacataccgtgaagtcattgctattctgatgcagcgacatgtccttgttgatggcaaagtc

SEQ ID NO: 197813 - DNA, 317 bp, Glycine max
tcggctccggctcgagtacggctgcgagaagacgacagaaggggagtgagatacatataaggcaagatgtcgaagagaggtcgcggtgcttcggcggggaacaagttccggatgtcgctgggtctgccggtggctgcgactgtgaactgcgccgacaatacgggggcgaagaacctctacatcatatcggtgaaagggatcaaagggcgtttgaaccgtctcccctcggcttgcgttggcgacatggtgatggccaccgtgaagaaggggaaacccgatctgaggaagaaggttttgccagctgtcattgttcgcca

SEQ ID NO: 197814 - DNA, 266 bp, Glycine max
cacgtatacgtagactccggatcgagtacggctgcgagaagacgacagaaggggacactaattaacacacatcaaaacaaccttctttctttcaggttcttgatcagtgtcaaaaccgaaagggtggttgcaaattgcaatggctaagcatgatgttgagggtggttccttcgctgcaaaggactaccatgatcctcctccagcaccattgattgatgctgaggaactcacacagtggtccttctacagggctttgattgctgagt

SEQ ID NO: 197815 - DNA, 313 bp, Glycine max
tcggctggagaagacgacagaaggggactgttgttctcaagggattcgattctctctgcactcacttctagggttttctctgcgctataagcaatcatggcggatgaaacaccaaatgagatgaaggaggaggttccagaaattgttccttttgatcctaccaagaagaagaagaagaagaaaattacaattgtagatcctgctgatgaacctgtggagaaattggctgagaagacagaaaacctctcagtttccgagggggttgagactgcatttactggtttgaaaaagaagaagaggaagcctgttgaaa

SEQ ID NO: 197816 - DNA, 302 bp, Glycine max
acggctgcgagaagacgacagaagggccctccgtacaaaaactactcaaatatcagaaactgatagagaagggaagaagcaaatctgagagaacaaatatgcttagagtgaaatgtacttactcctgaataaatgattctccaaacttcctttttgcatgaactcataaaccagaagcctgtttttactttccaggcattagccattaggtttcaccaaatttacatgctgaagctgtccaagataattcacttcttgctgccagcaaaaagatagtaaaatcagtcatcagtagcaagaaa

SEQ ID NO: 197817 - DNA, 304 bp, Glycine max
acggctgcgagaagacgacagaagggccacaaacatacatcacatccacgtacgaaacatgggcgccatcaagtacatgaccacggatgaattaaagctcctaagcatcccgtcagaaatacttaaattctttaaccactctattttcccacataagggacatccgacaaggtcactgcaccccccccatgaacatacacaacatgcacatctcaatgcatttccaacatcatcaacattccatttcaatgtcattctcaacataaacatcatcttatttccatgacatcaccaataaccataa

SEQ ID NO: 197818 - DNA, 299 bp, Glycine max
tagaagacgacagaagggggagagaagttattagggtttttgagtgcggcggtccaaacactcttctctgcagcttttgcctacaactcccttcaccatggctgaacaaaccgagaaagcttttctgaagcaaccaaaagtgtttctcagcacaaagaagactgggaagggaaagagacctggaaaaggtgggaaccgcttttggaagtccattgggcttggatttaagactcccagggaagccatcgaaggaacctatagtgacaagaagtgccccttcactggcaatgtttccatcc

SEQ ID NO: 197819 - DNA, 294 bp, Glycine max
atcgagcgattcggctcgagtagcgagaagacgacagaaggagactgctacaaaaacattgaaagaaatagaaaaagcaaaactggtttctcgcatttcctccgaaacaaaccgtttcgctcgtttctcggatctgcaatggaagccccacccaaaggcgctgctggaagaagaggtgacaggaagaagtccgtttccaaatccatcaaagctggcctccaattccccgtcagccgcgtcgccaggtacttgaagaaaggccgttactctcgccgccttggcaccggcgctccc

SEQ ID NO: 197820 - DNA, 231 bp, Glycine max
tacggctgcgagaagacgacagaagggtgcattcaagaggtttccttcaccgtgacataaagccggacaattttctaatgggtctaggacgaaaggcaaatcaagtgtatgccattgactatggccttgcaaaaaaatatagggatcttcagactcataggcacataccatacagggaaaacaagaaccttacaggcacagcacgctacgcaagtgtcaacactcatcttg

SEQ ID NO: 197821 - DNA, 297 bp, Glycine max
tacggctgcgagaagacgacagaagggggcacaagtttgttgagatagctagaagcaataagatgaaaatgaaagtgcttgttttgtttgttgctacagttttggtagcatatgaatgccatggctcagactaccagaagttccctctccaaatgaaaactgggtttggtgggcaatacatcaatgaggtggcatgtgccagttggaggattggcgtggaagcaattatcgttaacaagtggcaaactgttcctgcagcttgcggagagtacatagctgactacgttctaggagacc

SEQ ID NO: 197822 - DNA, 295 bp, Glycine max
agacgacagaaggggacacttgattagctgaggaggaagagagaaaaaccatggcaataacactcaacaatggcttcaagatgcctatcattggattgggcgtgtggcgcatggaaggaaacgaaatcagggacctaattctcaattccatcaaaattggttatcgccattttgattgtgctgctgactacaaaaacgaagcagaagttggagatgcgcttaaggaggcttttgatagtggccttgtgaagagagaggatctcttcattaccaccaagctttggaattctgatca

SEQ ID NO: 197823 - DNA, 290 bp, Glycine max
cagacgacagacgggggagccagttcaatctgatgagaaggttgattttgaggaggcaaatgatccagaggaagcaatggaagaagaagtagaatatgacgaagtagaagaagaagaggaagtggaagagatagaagaggaggtggaagaggtggaagaagaggaggaagtggaggtggaagcagatgaagaggaggacgaggacgaggaagaagaggttgaagcagtggaagaagatgatgccatgcagcatcatatctgtgatgagacaaaggtggaagatgaggatg

SEQ ID NO: 197824 - DNA, 257 bp, Glycine max
tacggctgcgagaagacgacagaaggggggggtctggccaagagtggccctttgcgttttcgttccagtgatgtattcacaatggatttaagtgaggaagaaccttgttggagatgtgtaacggggagcggcatgcttggtgctggaaatcctgggggcacagctcctcctcctagacttgatcatgttgctgttattcttcccggtgggagaattctaatatttggtgggcctgttgctggtcttcactctgcctc

SEQ ID NO: 197825 - DNA, 238 bp, Glycine max
tacggctgcgagaagacgacagaagggggggcgaggtagccagagagtgatacaatacagagtgcgttgttgctccttcgccacaactccctgccaacatgggtatctccagagattctatgcacaagaggcgtgccactggtggcaagaagaaggcatggaggaagaagagaaagtatgagcttggtcggcagcctggtaacactatgcggtcaagcgacaagacagtcaggaaggt

SEQ ID NO: 197826 - DNA, 283 bp, Glycine max
tacggctgcgagaagacgacagaaggggacatcacaagaagcacaatttctctctttctttttgtgtccaaaatggctcctagttctactcacgatactgggttctatgtgcttatgctagttgggatagtgattagcactatggttgctacctgtgctggtagcttctaccaagactttgatctaacatggggtggtgaccgtgctaagatattcaatggtggccagcttctatctctttcccttgacaaagtctctagctctggcttcaaatcaaagaaag

SEQ ID NO: 197827 - DNA, 292 bp, Glycine max
tacggctgcgagaagacgacagaaggggacaccaacaccaaaacaaacccactaagatggcttcctttgtatccttcctagtgctgcttcttgcagcccttatcctcatgcctcaagggcttgctacttactacaaaccaattaagaagccaccagtgtacaagcctccagtgtacaagccaccagtgtacaaaccaccggtttataagccaaaaccaccggtttacaagccgaaaccaccggtttacaagccaccatataagaagccaccatacaagacaccaccttatgg

SEQ ID NO: 197828 - DNA, 264 bp, Glycine max
tctcgagccgattcggctcgagacgagaagacgacagaaggggactgttagtgttcctcaagccaccgtaccgtgttgcatctctgcaatctacagccaaaatgcctttcaagaggtacgttgagatcgggagggttgcccaaatcaactacggcaaggaatatggcaggctcgtcgtcattgtcgacgtcattgatcagaacagagctcttgtcgatgcccctgatatggtgaggtccaaagtcaatttcaaaggctttccct

SEQ ID NO: 197829 - DNA, 293 bp, Glycine max
  unsure (1)..(293): unsure at all n locations
tacggctgcgaaaagacgacagaagggggcacaagtgagtttgttgatcgagataactagaaacagtgtgatgaaaatgaaggtccttgttttcttcgttgctacaattttggtagcatggcaatgccatgcgtacgatatgttccctctccgaatgaacactggctatggtgcccgtnatccggaggtgaaatgcgcaagttggaggcttgctgtggaagcacacaacatctttggctttgagaccattcctgaagagtgcgttgaagcaacaaaggaatacatccatggcg

SEQ ID NO: 197830 - DNA, 289 bp, Glycine max
gctgcgagaagacgacagacggggattgacatgcatgcagtttcaaatttctgttctggaaagtgcaaaattcccgagggacagtgcccgactggaacaggacctggatggatatgctgcttggattgcaagaccatcaccacaacacggtgggatgatcctccatacaaaattaatgcctcaggactaaaagctcctattggcttcacaacaatagccactagtgcataccactataacggcgtcttggagtacgatgctcacagtctttatggcttctctcaatccg

SEQ ID NO: 197831 - DNA, 279 bp, Glycine max
cacggctgcgagaagacgacacgatgcagtcaatatgtgtccttcaccgtgacataaagccggacagttttctaatgagtctaggacgaaatgctcatcaagtgtatgccattgactacggccttgcgataaaatatagggatcttcagactcataggcacataccatacagggagcacaagaaccttacaggcacagcacgctacgcaagtgtcaacactcatcttggtatggagcaaatcagacgggatgatcttgcatctcttggttatgtgctca

SEQ ID NO: 197832 - DNA, 295 bp, Glycine max
tacggctgcgtgaagacgacagatacgggactgtagcataaatgggagtcgctctatctacgtatacattcagacatttgtgcagtttcagctaactgtaaatgttgttgctttgatcgtcaatttctcttctgcttgtttgactggaaatgctcccctcactgcggttcaacttctatgggtcaacatgattatggacactcttggagcacttgcactagccactgaacctcctaacgaggagttgatgacaagaccacctgttggtaggaaaggaaactttatcagtaatgtg

SEQ ID NO: 197833 - DNA, 249 bp, Glycine max
taagacgacagaaggggagatctttgatggatgttcctaggcttaagttgcagctgcttaatatgcccatggaggcaatcttgaaacataaattgagtcccttgaaggtgtgtatgcccactgaagtagtggaatttcttagacaggcaaaggctgctcaacttttcatggcatcagagtcatttgttttcgatgatatgcttgagcctgatctttccagggcttatggcgggatggatagacttgaca

SEQ ID NO: 197834 - DNA, 292 bp, Glycine max
tacggctgcgagaagacgacagaaggggacggcactcgttttcgttctcgttctggtttatagatctttgcgaaggaggtttacagcgctcaaccaaagatgcagaacgaggaaggacagatcactgagctttacattcctaggaagtgctccgccacaaacagattgattaccgctaaggaccatgcttcggttcagatcaacattgggcatgtggatgagaatggcgtctacaatggccatttctccacttttgccctctgcggattcatccgtgctcagggtgatgctg

SEQ ID NO: 197835 - DNA, 297 bp, Glycine max
tacggctgcgagaagacgacagaagggcaacgagaattaattattggagacagacaaacgggtaaaacagcagtatccacagatactattctcaatcaacagggacaaaatgtaatatgtgtttatgtagctattggtcaaaaagcatcttctgtggctcaagtggtgaataccttacaagaaagatgagcaatggaatacactattgtagtagctgaaacagcggattctccagctacattacaatacctcgccccttatacaggagcagctctggctgaatattttatgtaccgt

SEQ ID NO: 197836 - DNA, 182 bp, Glycine max
acggctgcgagaagaacagaaggggataccaaaaacaaaacaagccaagtgaaagagagaagaaaagtcaaagacaatgtcagggatcattcacaagattgaggagacccttcatgtgggaggccacaagaaggaggacgagcacaagggtgagcagcaccatggtggagaatacaaagggg

SEQ ID NO: 197837 - DNA, 292 bp, Glycine max
cggctgcgagaagacgacagaaggggacggtttgtcattagcacttcttcttttcacactgccgctgcaacaatggcttcagagaagaaactttcgaacccaatgagggagataaaagtgcagaagctcgttctcaatatctctgttggcgagagtggagatcgtctcaccagggaaaaaaaggtgttggcacaacttagtggccaaaccccagtgttttccaaagcaaggtacactgttcgttcctttgggattagaagaaatgagaagattgcatgctatgtcactgtca

SEQ ID NO: 197838 - DNA, 290 bp, Glycine max
cgcagacgacaggacacgagtgagcctgtcgatcgagataactagcaacagtgtgatgaaaatgaaggtccctgttttcttcgttgctacaattctggtagcatggcaatgccatgcgtacgatatgttccctctccgaatgaacactggctatggtgcccgtactccggaggtgaaatgcgcaagttggaggcttgctgtggaagcacacaacatctttggctttgagaccattcctgaagagtgcgttgaagcaacaacggaatacatccatggcgaacaatatagat

SEQ ID NO: 197839 - DNA, 287 bp, Glycine max
tacggctgcgagaagacgacagaaggggcgaataccatggatgtgggaaggtctgtgttggttcagactgagccccggacgaggttggatgctggcacgtgggggaccatgggggttggtcttggttactgcattgctgctgcggttgctgagcccgggcggctcgtggttgcagttgaaggagattctggatttgggtttagtgctatggaagttgagacatggttacggtacagctagctgtggtcgtgattgttttcaacaatggtggcgtatatggtggtgac

SEQ ID NO: 197840 - DNA, 294 bp, Glycine max
cacggctgcgagaagacgacagaaggggggtccatctgtaaggaggctctatgtccaaggcaaagagataaatggtgctggaattaatgcaagttttgcagtccaccaggatgtagatggcagggctactgatgttgctttgggatggtccgttgcccttggttctccattcacttttgccactacattagagcaggagtacaggagtgatatctttggggagagaggaattttacttggtgctgttcagatactactggaatcctgtttaggagatacatgataatggaatga

SEQ ID NO: 197841 - DNA, 310 bp, Glycine max
taagacgacagaaggggacacattgtgagtatcaacaagaatactcataatataggtagcatatagagctatagttatattgatattgctatttgttaagctcttatttcctcggccatggctaataatgaacgtgatctcttctcggcggagattgtgaatcgtggaattgaaccgtcgggacccaacgctggctcgttgacattctctgtgagggtgaggaggcgcttaccggattttctgcaatcggtgaaccttaagtacgtgaaattgggttaccattatctcataaaccatggcatatacttgt

SEQ ID NO: 197842 - DNA, 299 bp, Glycine max
taggctgcgagaagacgacagaaggggacgaaatgaattagcgttgccattctcatcctcctctgtctctctctctccaccattgccatggatccttacaagctccggccatccagcgccttcaattctcccttctggactacaaattctggtgctcctgtttggaacaacaactcctctttaaccgttggagctagaggtccaattctgcttgaggattatcatcttgtggagaagcttgcaaactttgacagggaacgtatcccagaacgtgttgtccatgccaggggagctagtgc

SEQ ID NO: 197843 - DNA, 299 bp, Glycine max
ggctcgagtacggctgcgatgcgacgacagaagggcagctggagctgagtcccactatgagcaactcctcctcctcgctatccatggagctggacgagtccccggagagcagaatccaacggttgatatcggagcacccggtcatcatcttcacccgatcctcctgctgcatgtgccacgtcatgaagaagctcctcgccaccatcggcgtccaccccaccgtcatcgaattggacgaccaggagatcgccgccctcgccgacaccagcgctccctcggcctttataggcggctactgc

SEQ ID NO: 197844 - DNA, 301 bp, Glycine max
tacggctgcgagaagacgacagaaggggacaccaacaccaaaacaaacccactaagatggcttcctttgtatccttcctagtgctgcttcttgcagcccttatcctcatgcctcaagggcttgctacttactacaaaccaattaagaagccaccagtgtacaagcctccagtgtacaagccaccagtgtacaaaccaccggtttataagccaaaaccaccggtttacaagccgaaaccaccggtttacaagccaccatataagaagccaccatacgagaaaccaccttatggaaagtacct

SEQ ID NO: 197845 - DNA, 310 bp, Glycine max
tacggctgcgagaagacgacagaagggggcatcaattcaaaatatatcatcaattataagcatgggtttgtggaacacaacgaatgcagtgtcttgccgctttcacaagtttggtgatgaccaaaagaatctggtcttccaaggtgatgccacgtcttcttccaggggcatagaactcacaaagttagacggtggaggaaaaccagtgggtggcagtgtggggagagtgttatactcttctccagtgcacctttgggataactctacagtggtcgcaagctttgaaaccgacttcaccttttccatctca

SEQ ID NO: 197846 - DNA, 307 bp, Glycine max
gcgagaagacgacagaaggggatgataaaatacatggacgttccagtggacattatgcacttgttacacaacaaccacttagaggaagggccaagcagggaggacaacgggtaggcgaaatggaggtttgggccttggaaggatttggtgttgctcatattttacaagagatgcttacttataaatctgatcatattaaaactcgccaagaagtactcgggactacgatcattggaggaacaatacctaaacctacagatgctccagaatcttttagattgctagttcgagaattacgatctttagc

SEQ ID NO: 197847 - DNA, 253 bp, Glycine max
tgctgcgagaagacgacagaaggggttggtcctattgttgaacagcctgagtataacctcttgtccaggcacaaggttgagtctgagtttcttcctctgtacaccaactatggcacaggcctcactacatggagtcctcttgcctctggagtgctcactgggaaatataagaaaggagttataccaccggatagcagattcgctttggaaaattacaaaaatctggcgtcaaggacagctgttgatgatgtgc

SEQ ID NO: 197848 - DNA, 314 bp, Glycine max
tacggctgcgagaagacgacagaagggggaagaagcaacacaagcaccagtgtgaataccctagatcggagtttcagtttcacccctcttttctcatctctaacatcatagtcctcagaggctagtcttcctattatcacaaacaatgtctgacagtcaagaatctgacaagaacattgagatatggaagatcaagaaattgatcaaggctctggaagctgctcgaggtaatggtaccggctcagattctctgataatgcctccacgcgatcaaatttcccgggtcactaagatgttgggagatgaatttggaa

SEQ ID NO: 197849 - DNA, 305 bp, Glycine max
tacggctgcgagaagacgacagaaggggatccttgaatagatcacataacatggcatcattggcatgcaacacgtttattgttagcagcacgttaagatcagttgttactcgtgcggaaccacctaaacctggtcctcttttcgatcttagttcattcaatcgccacagctttccggcaggcttcactttcggggcatcatcttccgcgtaccagtttgaaggtgcggcaaaagaatatggtagaggaccaagtatatgggatactttcatcaatcaacatccaggtaagatagcagatggaacg

SEQ ID NO: 197850 - DNA, 306 bp, Glycine max
tacggctgcgagaagacgacagaagggggttctagtgtgtgattgtttgttgttgtaactcgttcttcttcttttgttgttctgtgtttgtgtttgttttttctctcacctgaaaatgtcttgctgcggtggtaactgtggttgcggaagctcctgcaagtgcggcaacggctgcggaggctgcaagatgtacccagacttgagctacactgagtcaaccaccaccgagacctttgtcatgggagtggcacctgttaaggctcaatttgagggtgctgaaatgggtgtgcccgctgagaacgatgg

SEQ ID NO: 197851 - DNA, 309 bp, Glycine max
tacggctgcgagaagacgacagaaggggcttctccttcttcatttcgttgatgctgatcaatcggcacatgcacaaacgcaggggtctcttcttcagcagatagattgtaacggagcatgtgctgcgaggtgccgtttatcatctcgtccacgcctctgccaaagagcttgtggaaatggttgtagacgctgtaactgcgtgccacctggcactgctggaaaccaagaagtgtgtccctgctatgcaagtttgactactcatggtggcaaacgcaagtgcccttagacttaattggaccactatcctat

SEQ ID NO: 197852 - DNA, 306 bp, Glycine max
  unsure (1)..(306): unsure at all n locations
acggctgcgagaagacgacagaagggagtacatccattttctagctcaattggttaaatagagtgtgcgaattattataaatctctcagtatctgagttcgattcttactgataaaaaaaatagatgttatggctgaggagttcttaccatttttaatttctctgactttgtattcgtggaatgttttagggtccttagagtatcccaaaggatcaaaagcaccaccagggtatttcttcttttcagggtcttatgcaatctcttttggtgtnncacgaaggaaatagcaaggaattcaatggcca

SEQ ID NO: 197853 - DNA, 248 bp, Glycine max
tacggctgcgagaagacgacagaaagggggcagagagaagagggtcagagtgagaaagagagagagagagagagaaactgagagaaattcgcaaaccctaatttcggaaagatcggcgatggctgcctccaaggatcgcgagaacttcgtctacatcgccaagctcgccgaacaggccgagcgatacgaagagatggtggaatcaatgaagaaccgttgcgaatctcgacgttgaactgactgtggag

SEQ ID NO: 197854 - DNA, 308 bp, Glycine max
tacggctgcgagaagacgacagaagggggcacaagtgagtttgttgatcgagataactagaaacagtgtgatgaaaatgaaggtccttgttttcttcgttgctacaattttggtagcatggcaatgccatgcgtacgatatgttccctctccgaatgaacactggctatggtgcccgtactccggaggtgaaatgcgcaagttggaggcttgctgtggaagcacacaacatctttggcaatctagaccattcctgaagagtgcgttgaagcaacaaaggaatacatccatggcgaacaatatagatca

SEQ ID NO: 197855 - DNA, 304 bp, Glycine max
tacggctgcgagaaggacgacagaagggtcattaaaaaattcaggagaagcaaaaaaatgcaaggtcgtttgtcttcttggctagtcaaacatggactaattcatagatcattgggtttcgattaccaaggaatcgagactttacaaataaagcccgaggattggcattccattgctgtcattttatatgtatatggttacaattatctacgttcccaatgtgcctatgatgtagcaccaggaggactattagctagtgtatatcaccttacgagactagagtatggtatagatcaacccgaag

SEQ ID NO: 197856 - DNA, 301 bp, Glycine max
ctgcgagaagacgacagaaggggaattaacagaagtggagccctccaaagtgatggacgtcctgcagctcctaatcgaacccaacaggaacaactgcagcattggcagaaaaatcgacgaatgcttgcctattctacagttggaacacctgattatattgctccagaagttcttctgaagaaaggatatggcgtggaatgtgattggtggtctcttggagctataatgtatgaaatgcttgtggggtatccaccttttattcagatgaaccatgttgacttgtagaagtagtaactggaga

SEQ ID NO: 197857 - DNA, 310 bp, Glycine max
tgcgagaagacgacagaagggggagagtcagattcgctcgccttgcttcgccacacaacagcaactgcagcaatggctcccaaacgaggtggaaaggctccggctcttgccgctaagaagaagcctgagaaggtttcgaatccgttgttcgagaagcgtccaaagcagttcggaatcggaggggcgttgcctccgaagagagacttgactcggttcgtgaagtggccaaagaatgttcaaattcagaggaagaagaggattctgaagcagaggttgaaggttcctccagctttgaaccagttcaccaaaa

SEQ ID NO: 197858 - DNA, 306 bp, Glycine max
  unsure (1)..(306): unsure at all n locations
aagacgacagaaggggagagtggtggagtgtgcagaagagcgtcgcagtcgcaaccctaatcagaagaagcgcacttcaagcgagtgacagccaccagccatgggtcgtatgcacagccgcggtaagggtatatcctcttctgctttgccctacaaaaggacacctcctagctggatgaagatctcttcgcaagatgtcgaagaaaatatctgcaagtttgcgaagaaaggtttgaccccgtctcagattggtgtcattctcagagttnctcacggtattgctcaggtcaatagcgtcactggcag

SEQ ID NO: 197859 - DNA, 295 bp, Glycine max
cggctgcgagaagacgacagaaggggaactctatgcggactatgatccaaagatgctgctaccttttctccgtagcagtcaacactactcccttgagaaggcttacgaaatttgcattaaaagagacctattgagggagcaagtcttcatcctaggaaggatgggaaactcgaaacaagccctagctgttattataaacaaattgggggatatagaggaggccgtagagtttataaccatgcagcatgatgatgaactttgggaagaattaatcaagcaatgccttcacaaacct

SEQ ID NO: 197860 - DNA, 305 bp, Glycine max
ctgcgagaagacgacagaagggggcatcaattcaaaatatatcatcaattataagcatgggtttgtggaacacaacgaatgcagtgtcttgccgctttcacaagtttggtgatgaccaaaagaatctggtcttccaaggtgatgccacgtcttcttccaggggcatagaactcacaaagttagacggtggaggaaaaccagtgggtggcagtgtggggagagtgttatactcttctccagtgcacctttgggcaagctctacagtggtcgcaagctttgaaaccgacttcaccttttccatctca

SEQ ID NO: 197861 - DNA, 258 bp, Glycine max
  unsure (1)..(258): unsure at all n locations
gtggacagatctgcngctgtggatttcactggccgtgaattcaacaggaatcgtttaattgccttaatggcagctattgttcttgaggaacatcctggaacaactattgtcacagacagtgtgacttctgatgggcttaccacgtttattgagaagaaacttggtggcagacaccatcggttcaaaagaggctacaaagatgtgattnatgaagctattcgtttgaattctattggtgaggagtcacatttggcaatt

SEQ ID NO: 197862 - DNA, 304 bp, Glycine max
actcgagccgaatcggctcgagaagacgacagaagggggagttcaacgagatggagcaaataaagcacagaatagttgaagtgaatggcataaaaatgcatgttgcagagaaaggagagggtccagtggtgttgttcctccacggcttccctgagctctggtactcatggcgccaccagattctctctctcagctccctcggctaccgcgccgtcgctcccgatctccgtggctacggtgacaccgaggcaccaccttcaatcagcagctacaactgcttccacatagtgggtgatctcgttgc

SEQ ID NO: 197863 - DNA, 302 bp, Glycine max
tacggctgcgagaagacgacagaaggggacggcactcgttttcgttctcgttctggtttatagatctttgcgaaggaggtttacagcgctcaaccaaagatgcagaacgaggaaggacagatcactgagctttacattcctaggaagtgctccgccacaaacagattgattaccgctaaggaccatgcttcggttcagatcaacattgggcatgtggatgagaatggatactacatggccatttctccacttttgccctctgtcaattcatccgtgctcagggtgatgctgacagtgctcta

SEQ ID NO: 197864 - DNA, 306 bp, Glycine max
acggctgcgagaagacgacagaagggggcattattacaataatcaaatgcactaaccacactccatcacccccatatataccccctctcctctcacactaattaacacactcatcaaaaaacccttctttctttcaggttcattacttgatcagtgtcaaaagggtagttgcaaattgcaatggctaagcatgatgttgagggtggttccttctcagcaaaggactaccataaccaatcctccagcacctttgattgatgctgaggaactcacacagtggtccttctacagggctttgattgctga

SEQ ID NO: 197865 - DNA, 307 bp, Glycine max
tacggctgcgagaagacgacagaagggggcagcaacagcagcattcactgaaagcactcagtagggtttgcggtttcagagtttgtgacgcacgcatccatggccaccaccaccaacgccgccgcagccccgccgcgccagctctcccagaaggaagccgacatccagatgatgttagccgccgacgtccacctcggcaccaaaaactgcgacttccaaatggaacgttacatcttcaagcgccgcaacgacgggatttacattattaaccttgggaagacatgggagaagcttcagttagcagcta

SEQ ID NO: 197866 - DNA, 304 bp, Glycine max
acggctgcgagaagacgacagaaggggagtcaagttttatgtctggattagacgatcaaattcctactgccttcgatccttttgctgatgcaaatgctgatgactcgggtgctgggtcaaaggagtatgtgcatattcgcgttcagcagcgaaatggtaggaaaagcctgacaaccgttcagggattgaaaaaagaattcagctataacaagatacttaaagacgttaagaaagagttctgttgcaatggaatagttgttcatgacccagaactaggacaggttatacaacttcaaggtgatca

SEQ ID NO: 197867 - DNA, 261 bp, Glycine max
tacggctgcgagaagacgacagaaggggatgcagaatcaaagtacctagcaggccttggagtttctcgtcagcgccaagccatagttgatgggctaagagacagtgttctagcattttctggtaatgtgcctggaacatcatcaaaggatatcatggacatggttctcatgactcaatattttgacacaatgaaggagattggtgcatcctccaaatccaatgctgttttcattccacatggacctggtgctgtgagtgat

SEQ ID NO: 197868 - DNA, 305 bp, Glycine max
tacggctgcgagaagacgacagaaggggacacagaaacattcgcaaaaacaaaatcccagtatcaaaattcttctcggtttttcatatttcgcaaagacatggatttcagagtgatgggtttgtagtctccactgttccacacgctgcaacacatgatggacatgtcagaggacggtgcaggagacaacaagacacacaatgctccaacatggtcatacgttcgagacgcgaaagcaatggctgcaacacctgcggatgtgaaggagtatccgaattcttacgtgttcgagatcgacatgccggg

SEQ ID NO: 197869 - DNA, 304 bp, Glycine max
gctgcgagaagacgacagaagggggcagcgcttgagaccaagccccactcaaccaccacaccactctctctgctcttcttctacctttcaagtttttaaagtattaagatggcagagacattcctatttacctcagagtcagtgaacgagggacaccctgacaagctctgcgaccaaatctccgatgctgtcctcgacgcttgccttgaacaggacccagacagcaaggttgcctgcgaaacatgcaccaagaccacttggtcatgggcttcggagagatcaccaccaaggccaacgttgacta

SEQ ID NO: 197870 - DNA, 304 bp, Glycine max
agaagacgacagaaggggatgacctttttttccatgtttgatgttcctgtcttttggcctatattactctgttactgggttgttctctttgtccttacaatgaggcgtcaagttgcacacatgatgaaatacaaatatatccccttcaacttggggaagcagaagtataattggaaagaatcttctgcaagtagcagtggctctcgtgcagactgaaacttggttcttatgatttgaagatctactaagttaggttttgtgaacattcaggctagttaattttccccacttttttaatgaaaga

SEQ ID NO: 197871 - DNA, 282 bp, Glycine max
tacggctgcgagaagacgacagaaggggatcgaagcaaaaaatgaaaacccaaagtgcttctctcctctgtctttttctctctcttgctatccttttggctagtggcactgctgcgagtgcaactccaagaagcgcagtgccaagccaccatgtatcaacattcaacagaagcctttttccttccacttttctctttggaattggttcttctgcttaccaggcagaaggagcagcaagtgtagatgggagaggaccaagcatatgggacacctacactagac

SEQ ID NO: 197872 - DNA, 239 bp, Glycine max
gtgacgaccaagttcagactttattttggcgttttaaagcagtggctgagcaaaaaaagagggttactgatgctgacctcagagcattggtatcagatgaagtttttcaagcagagcctgtctggaaacttggtgatttgcaggtgacttgtggaactcttggcctttctacagcaactgtcaaacttttgagtagtgatggtagcacacatgttgcttgttctgttggtacaggacca

SEQ ID NO: 197873 - DNA, 300 bp, Glycine max
agaagacgacagaaggggggtgccagttggtgacatttcatggctagcaatccttcccctcacgggcacatgcatcagcatcagtttgcgttacagggcacagagtcaaagccttgtgacgcagaatcactggtgccggcgacccttttgattaagcacttgccagaagccattcctgacgtcaccctctctcggatcttggccaatttcggcgcttcctcagttcgcccttgctctactggcaggttgagaaattgtgcttttacggatttcaaaaatgagattgtggcatctcaagca

SEQ ID NO: 197874 - DNA, 299 bp, Glycine max
tacggctgcgagaagacgacagaaggggacagctattcctcttaagcttgctactgagtttccacactgcataccttaggtcttccgaattcgaagttaatttgcaagatggctaaggaaaaggctcagatcaacattgtggtggttggtcatgtggaccctgaggaggcaaccaccattaacgagctgaagaagcctgttgtggagaaagaagctccagggcatgccatatgagggcatgcacgtacggcctcggaggggaaccagaaaattatgttaacaaaataatctggaaccct

SEQ ID NO: 197875 - DNA, 287 bp, Glycine max
tacggctgcgagaagacgacagaaggggacagcagagccaccaaatacttgtgttgtgtcgattctctgccatccatgatccatcacttacaaactagtactacttgctttcaataaaaacaaaaacacactctttggtgaccacaacaacaataacaatggctgcctcactacaagctgcagctaccttcatgcaacccaccaaggttggcatagcctctcgcaacctcaaatctacacaatgcatttctaaggcttttggcttggaacctgctgcagctaaactc

SEQ ID NO: 197876 - DNA, 125 bp, Glycine max
tacggctgcgagaagacgacagaagggtaccaaatttgcattcaattatcactgcatctgatggggcaatggttgccagaggagatcttggcgctgagctccctattgaagaggttccacttttg

SEQ ID NO: 197877 - DNA, 292 bp, Glycine max
tcgcacgcacgtgcaggtcaacccatggttatgttccagtaactcgagcccttggggattgggacttgaaatttccacttggtgctgcatcccctcttattgctgagccagatgttcggctggttacattgactgagggtgatgagttcttgatcattgggtgtgatgggatttgggatgtaatgtctagccaagttgcagttagtcttgttcgccgaggattaagaaggcatgatgacccacagcaatgtgccggagagctagtcaaggaagcattgcgcctaaatacatc

SEQ ID NO: 197878 - DNA, 267 bp, Glycine max
tacggctgcgagaagacgacagaaggaggatgaaggggtgattgctctttggagaggaaacactgctaatgttatcagatacttccctactcaggctctgaattttgcttttaaggattatttcaagaggcttttcaacttcaaaaaggataaagatggctactggaaatggtttgctgggaatttagcatctggcggggctgctggggcttcctccctcttgtttgtctattctttggactatgcccgaacacgtttagcaaatga

SEQ ID NO: 197879 - DNA, 265 bp, Glycine max
tacggctgcgagaagacgacagaagggatcagcggtgccccccaggataacaacataatgctgtggaatgctgtcatatttggtcctgatgatactccatgggatggaggcacgttcaagttgactctccagtttactgaggattatccaaataaaccaccaactgtgcgatttgtgtctcgcatgtttcatccaaatatttatgctgatggaagtatttgtttggatatactacaaaatcagtggagtcctatatatgatgtgg

SEQ ID NO: 197880 - DNA, 265 bp, Glycine max
gggaagcaaaaaatgaaaacccaaagtgcttctctcctctgtctttttccctctcttgctatccttttggctagtggcactgctgcaagtgcaactccaagaagcgcagtgccaagccaccatgtttcaacattcaacagaagcctttttccttccacttttctctttggaattggttcttctgcttaccaggcagaaggagcagcaagtgtagatgggagaggaccaagcatatgggacacctacactagacagcatactgaaa

SEQ ID NO: 197881 - DNA, 262 bp, Glycine max
tacggctgcgagaagacgacagaaggggatgtcgaagaaaatatctgcaagtttgcgaagaaaggtttgaccccgtctcagattggtgtcattctcagagattctcacggtattgctcaggtcaatagcgtcactggcagcaaaatccttcgcatcctcaaagctcacggacttgcgcctgaaattccagaggacctgtaccatttgattaagaaggcagtttcaattaggaagcatcttgagaggaacaggaaggacaagg

SEQ ID NO: 197882 - DNA, 237 bp, Glycine max
  unsure (1)..(237): unsure at all n locations
gacaccgtttgttctattcttagctcaacttctgctacccactctcttcttccaagtccaaccacgcttttctctacagtcatgggcaaggtcaagatcggaatcaacggatttggaagaattggccgtttggttgccagagtcgctctgcaaagagacgatgtggagctcgttgccgtnaacgaccctttcattaccaccgattacatgacatacatgtttaaatacggcntgtcc

SEQ ID NO: 197883 - DNA, 269 bp, Glycine max
tacggctgcgagaagacgacagaaggggaacacgcggcttccgccggaggtgaaccgcgtgctgtacgttcggaaccttcccttcaacatcaccagcgaggagatgtacgacatctttggcaaatacggcgccattcgccagatccgcatcggcaccaacaaggacactcgcggaaccgctttcgtaggctacgaggacatctacgacgccaaaaccgccgtcgaccacctctccggcttcaacgtcgccaaccgctacctcatcgttc

SEQ ID NO: 197884 - DNA, 275 bp, Glycine max
ttcggctcgagacgtgcgagagacgacagaaggggacggacgagggtttcgtttcgggtttgacgttgttcacaatcactttctgcgcttcactcactcccttcgtgcggttttctttctttgtcgaactcgtgcgaaaatgcgtgagattcttcacatacagggagggcaatgcggaaaccagatcggagcgaagttctgggaggtggtgtgcgcggacacgggatcgattccacggggaggtaccagggggacaacgagttgcaactcgagcg

SEQ ID NO: 197885 - DNA, 266 bp, Glycine max
cgagaagacgacagaaggggcagccagagtctctaacaaccacaatgaggggggggcttatacatcgaggatctaacaaatccaagtctgttctgttgggtgggctgaaggatcacctcaaaacaattaggcgaagtagaaggatacttttcattggttgtggtacaagttataatgctgctttggcagctagacccatcttggaagaactttctggtgttcctgttactatggaaattgctagtgatctattggatcgggaggga

SEQ ID NO: 197886 - DNA, 264 bp, Glycine max
cggctgcgagaagacgacagaaggggacagaaaagaaaaaagaaaccctagctggataggtcaaacatcatcatgtcggacgaagagcaccatttcgagtccaaggcagacgccggtgcctccaaaacctaccctcagcaagccggtaccattcgcaagaacggctacatcgtcatcaaaggacgcccctgcaacgttgtggaagtttcgacttccaaaactggaaagcacggtcacgccaagtgccactttgttggaattgat

SEQ ID NO: 197887 - DNA, 259 bp, Glycine max
tacggctgcgagaagacgacagaaggggatgtaacagctgtgatgaaagactctggaactgctatgcttggtgtgggtgtttcctccagtaaaaaccgtgcagaagaagctgcagaacaggccactttgactcctttaattggctcatctattcagtcagctactggggtagtgtataacattactggaggaaaagacataactctacaggaagtgaacagagtgtctcaggttgtgactagtttagccgacccttctg

SEQ ID NO: 197888 - DNA, 260 bp, Glycine max
acggctgcgagaagacgacagaaggggagcgaagaagatattagggtttttgagtgcggtgcggcgatcctagcactctcttctgcagctttcgccgacagcttcattcaccatggctgagcaaaccgagaaggcttttttgaaacaaccaaaagtgtttctcagctcgaagaaaactgggaagggaaagagacccggaaagggtgggaaccgcttttggaaatccattgggcttggatttaagactcccagggaagcca

SEQ ID NO: 197889 - DNA, 257 bp, Glycine max
cggctgcgagaagacgacagaaggggagactcgaatggtagttttgtgaatggtgatttgggggagctcgggtacattgcgccagagtatcctagtacacttgttgcttcgttgaaaggggatgtgtatgggtttggtattttgcttttggagttggtgactgggcgaaaacctcttgatgtaagcaatggggaggtagagttcaagggtagcttggtggattgggtgaatatgcattctagttctggccgaatcaa

SEQ ID NO: 197890 - DNA, 268 bp, Glycine max
  unsure (1)..(268): unsure at all n locations
gctgcgagaagacgacagaaggggattgatcttccggtaaagtggaccggagatgccggttgccgcttccgccatttacttcctcaacctccgcggcgacgttctcatcaaccgcctctatcgcgacgatgtcggggcgaaatatggtggatgcttttaggacgcatattatgcaaacgaaggagcttggtacttgcccagtgaggcagattggtggatgctctntcttttacatgaggatcagtaatgtctacattgtcattgttgt

SEQ ID NO: 197891 - DNA, 260 bp, Glycine max
tacggctgcgagaagacgacagaagggggaagagtgaagagaatggctcccaagggtttaacctttctggctgtgttaatatgcgtttcagcactgtcactgagtccttctgttgcgggggaagggcaaaataatggccttgttatgaacttctacaaggaatcatgccctcaggctgaagacatcatcacagaacaagtcaagcttctctacaagcgccacaagaacactgctttctcctggctcaggaacatcttcca

SEQ ID NO: 197892 - DNA, 259 bp, Glycine max
tacggctgcgagaagacgacagaaggggataccaaaaacaaaacaagccaagtgaaagagagaagaaaagtcaaagacaatgtcagggatcattcacaagattgaggagacccttcatgtgggaggccacaagaaggaggaggagcacaagggtgagcagcaccatggtggagaatacaaaggggagcatcatggtgaacacagtactgaatacaaaggagagcatcatgttggtgagcacaagccggagcaccatgga

SEQ ID NO: 197893 - DNA, 258 bp, Glycine max
tctcgagcgattcggctcagacggctgcgagaagacgacagaagggaaagagacccggacaagggtgggaaccgctttacgaaatccattgggcttggatttaagactcccagggaagccatcgaaggaacctacattgacaagaagtgccccttcactggcaatgtttccatccgtggccgtatcttggctggaacatgtcacagtgctaagatgaacaggactattattgttaggaggaattatctccattttatc

SEQ ID NO: 197894 - DNA, 254 bp, Glycine max
taagaagacgacagaagggggcacaagtgagtttgttgatcgagataactagaaacagtgtgatgaaaatgaaggtccttgttttcttcgttgctacaattttggtagcatagcaatgccatgcgtacgatatgttccctctccgaatgaacactggctatggtgcccgtactccggaggtgaaatgcgcaagttggaggcttgctgtggaagcacacaacatctttggctttgagaccattcctgaagagtgc

SEQ ID NO: 197895 - DNA, 238 bp, Glycine max
ctcgagcgaatcggctcgaggcgagaagacgacagaagggcaaccaaattggttctgtaactgagagtattgaagctatcaggatgtccaaaaaagctggatggggtgtcatggccagtcacagaagtggagagactgaggataccttcattgctgacctttctgttggtttggctacgggtcaaattaagactggagctccatgcaggtctgagcgtcttgctaaatataaccagct

SEQ ID NO: 197896 - DNA, 260 bp, Glycine max
tacggctgcgagaagagacagaagggggcacaagtgagtttgttgatcgagataactagaaacagtgtgatgaaaatgaaggtccttgttttcttcgttgctacaattttggtagcatggcaatgccatgcgtacgatatgttccctctccgaatgaacactggctatggtgcccgtactccggaggtgaaatgcgcaagttggaggcttgctgtggaagcacacaacatctttggctttgagaccattcctgaagagtg

SEQ ID NO: 197897 - DNA, 255 bp, Glycine max
tacggctgcgagaagacgacagaaggggcatcacaacatcatagtaagcactatagtaaaaaaaggacattcattcatctatggctacccttattgctcccagcaaccactctccccaagaagatgctgaagctctcagaaaggcttttgaaggatggggaactgatgagaacactgtcatagtaattttgggtcatagaactgtgtatcagaggcagcaaatcagaagagtttatgaggaaatttaccaggagg

SEQ ID NO: 197898 - DNA, 259 bp, Glycine max
ctgcgagaagacgacagaagggggatcaccagtggatgtggctacagttgtatatgcgcacacgccctccatgggcatcaccttccatagaccatactaaacctcaaacaccatctggaattcagctatttaaagaagaaacaccatatctatttggcaacaattctacaccaccctccaagttgaaaagggattctgctgctactggttcatggagtattcaggatgaaatacgaagagtaagatccagggcaacaga

SEQ ID NO: 197899 - DNA, 209 bp, Glycine max
  unsure (1)..(209): unsure at all n locations
ggatgcataagaacaagcataaggtctgattcnngtttccttacatcaacttgtggtctaaaaatgggaaggatgccatgctgtgagaaggtagggttgaacaaaggaccatggaaaaccgaagaagatgagaagctcgtggcttatgttgaaaggcatggccctggaaactggcgttcagtgcctgccaaagcgggtcttcaaagatg

SEQ ID NO: 197900 - DNA, 251 bp, Glycine max
cgagaagacgacagaaggggacactaaacaggttaaaagaagagcatcactgaactaacaaagcaaccctatgtcgaaggtggtttgtgtcaccggagccagcggcgccatcggatcatgggtggtcctactcctcctccagcgtggttacaccgtccatgccaccgtccaagatatcaaggatgaaaatgagacgaaacatttggaggaaatggaaggagcaaagagtcatctccatttttttgaaatgg

SEQ ID NO: 197901 - DNA, 246 bp, Glycine max
tctctagagcctaaaaagtatgaaggtgcacgtactgcagaagcccttgcggcgtttgtgaacattgaagcaggtacaaatgtgaagatagcttctgttccatccagtgtggtagttctctctccagataactttgatgaggttgtcttggatgaaacaaaagatgttctggtggaattctatgcaccatggtgcggtcattgcaaggcccttgcccctatttatgagaaggttgctgcagcattt

SEQ ID NO: 197902 - DNA, 251 bp, Glycine max
tacggctgcgagaagacgacagaagggaaagagacccggaaagggtgggaaccgcttttggaaatccattgggcttggatttaagactcccagggaagccatcgaaggaacctacattgacaagaagtgccccttcactggcaatgtttccatccgtggccgtatcttggctggaacatgtcacagtgctaagatgaacaggactattattgttaggaggaattatctccattttatcaagaagtaccaga

SEQ ID NO: 197903 - DNA, 239 bp, Glycine max
acggctgcgagaagacgacagaaaggtggagatcggtgactgaggaatacagcgacaaagtaatgggtctagcttgcaagctcatggaggtgttgtccgaagcaatggggttagagaaagagggtttaagcaaagcatgtgttgacatggaccagaaggtggtggttaattactaccccaaatgccctcaacctgacctcactcttggcctgaagcgccacacggatccgggcactatc

SEQ ID NO: 197904 - DNA, 254 bp, Glycine max
acgggaagacgacagaagggggcacaagtgagtttgttgatcgagataactagaaacagtgtgatgaaaatgaaggtccttgttttcttcgttgctacaattttggtagcatggcaatgccatgcgtacgatatgttccctctccgaatgaacactggctatggtgcccgtactccggaggtgaaatgcgcaagttggaggcttgctgtggaagcacacaacatctttggctttgagaccattcctgaagagtg

SEQ ID NO: 197905 - DNA, 254 bp, Glycine max
tacggctgcgagaaacgacagaaggggttgtagcaaatggtatttcagatttacaagctcatactgataacggtgatcatgtctccttttggaatcctttgctatcagggttatcaaaactaacttctgatccaagatcagctatcagaaagagttctttggagatgctttttaacattttgaaggatcatggtcatctattctcccacacattttggaatagcattttctgttctgttattttccctgtatat

SEQ ID NO: 197906 - DNA, 253 bp, Glycine max
cggctgcgagaagacgacagaaggggagagacaatgcctagtgaattagctatgaacaatgatgagctacatgtggttatgttcccattccttgcatttggccacattagtccatttgttcagctctccaacaagttgttctctcatggtgttcatgtcactttcttgtcagctgcatccatcattcccagaatcagatcaactcttaatctcaatccagccatcaatgttatctcactaaagttcccaaatg

SEQ ID NO: 197907 - DNA, 252 bp, Glycine max
tacggctgcgagaagacgacagaaggggaccacactcttattgttttcttcatatcttccttgtcactgcccgtgtgtcgccgccatggccaccgtcaccacccaagcctccgccgcaattttccggccatgtacctcgaaatcgaggtttttgaccggctcttccggtaaacttaaccgggaagtgactatgcggccaatggggtgcccttctcctgcctctttcaaggttgaagccaagaagggagagtg

SEQ ID NO: 197908 - DNA, 245 bp, Glycine max
tacggctgcgagaagacgacagaagggggcgctagttctgagtattctgatcgctccctgagagagctcgtcgcggcggttgcagaagaagattgcaagatgaagttcaacatcgcgaatcccaccactggatgccagaagaagctcgagatcgacgacgatctgaaactgcgagcattttgggacaagaggatctcacaggaggtcatcggagatgcactcggtgaggaatttaagggctatgt

SEQ ID NO: 197909 - DNA, 254 bp, Glycine max
tccaaagtttgtatagtgtaggatttgttggtattcgtgataaaaacacctcatcctattcattttgccatgacgggcgaactccagataaaggttttgaaagtaatgagaaattattaattcatccatgttactggcttggtttgaatctaaatcgtaatgcacttgctccagaggaagcagaggagataaatgacgaatatgatattaatattatgtcagataattcagccattagaaataaaacgataggt

SEQ ID NO: 197910 - DNA, 258 bp, Glycine max
tctcgagccgaatcggctcgagacgcgagaagacgacagaaggggacatagtgagcggtccacagcccaccgcggtgagagacgcccaggcccacatgaccaacacctcctccacgcttttcgggctcctgatgatggccgacgacccattgaccgtgggccccgagcccgggtccaaactcgtgggaaaggcccaaggaatttacggatttgcgtcccaggaagatatgggtttattgatgatcatgaatttcgcgt

SEQ ID NO: 197911 - DNA, 258 bp, Glycine max
gacgacagaagggttcaacaagccaattactttgggtcgctgacccaggcatcagctatcagagtggggtctttccaaggggaagaaatatatgctccattcaagagcctgcttccaatggtgaaccctgatgatgttgttttgggggatgggatatcagtaacttgaacctggctgatgccatggccagggccaaggtgtttgatatcgacctgcagaaacagttgaggccgtacatggaatccatggttccactcc

SEQ ID NO: 197912 - DNA, 262 bp, Glycine max
cggctcgagtacggctgcgagaagacgacagaaggggaggttgtcttggatgaagccaaagatgtcttggttgagttttatgcaccatggtgtggacattgcaaaagtcttgctcctacttacgagaaagttgccacaacatttaaattggaggaagatgtagtaattgcaaatctggatgctgataaatatagggatctggctgaaaagtacgacgtgagtggatttcctaccttgaagttcttcccaaagggcaacaaag

SEQ ID NO: 197913 - DNA, 263 bp, Glycine max
tgctgcgagaagacgacagaagggggccgcagcaactcttgttgtttcttcagtttggtataaccttagccgaggtcacgaggagcactagctagtttcacaatttccaaatggctaggggattgaagaagcatctcaagaggctcaatgctcctaagcattggatgcttgacaaactgggtggtgcatttgcgcccaaaccctcatctggaccacacaaatctagggagtgccttcccctcatactcatcctacgaaaccgg

SEQ ID NO: 197914 - DNA, 259 bp, Glycine max
ctgcgagaagacgacagaagggggaggcaaatggcagcatcgtcaccatcgccgccgctgaaggcggtgcaggaccgcgtccaagcagccgccgaacgctctggccgtaatgtgcaagagattcgtgtagtggctgcgagcaaacgaagccagtttctgctctccgtgaggtatacgacgccggccttagatgcttcggcgagaactacgttcaagaactccttcaaaaggcaccacagcttcccgacgatatccagtg

SEQ ID NO: 197915 - DNA, 273 bp, Glycine max
cggaatcccgctcgacacggctagcggaagacgacagaagggggatctggaagaagaaatgagtgaagcgcagaagcacgtttgggaaggggcaattcctctccagattcacctccacgaatccgaagtcaccactctccctcctcctccacccgtctcgtgttggcacctcggctaggttatttgcctttgctgatttcgctattgaagcctcagttcagcagcacgcttccacctggagtcgacaccatttggtttgagtacaaaggcctc

SEQ ID NO: 197916 - DNA, 257 bp, Glycine max
tctcgaccgattcggctcgagtacggctgcgagaagacgacagacagggtagagaaagagacgagaaagatgtcgaagcgtggtcgtggtggttcggcggggaacaagttccgcatgtcgctgggtcttccagtggcggcgacggtgaactgtgccgacaacacgggggcgaagaacctctacatcatttcggtgaaagggatcaaaggccgtttgaaccgtcttccctcggcctgcgttggcgacatggtgatggc

SEQ ID NO: 197917 - DNA, 255 bp, Glycine max
aagacgacagaagggggagactaccattgctacgccccaaaagcacttttcctccctctgacttttgctacaactactaccagtacaagcatatagttggaatggctcgattttcattggatgagatatcagacactggtgcctttgtgagatctgcttcaacattcagaaattggatttcgagggacccgaattcgctgtttccaccggaatcagggaggtatcatctctatgtatcatatgcttgtccttggg

SEQ ID NO: 197918 - DNA, 257 bp, Glycine max
acggctgcgagaagacgacagaagggggaagatttccttcttcctattctaggtttttacgcaccacgtatccctgagaaaagagaggaaccacactctctaagccaaagcaaaagcagcagcagcagcaatggttaaagacacaaagcctttagcctatgctgccaataatggataccaacaaaagggttcttcttttgattttgatcctagcgctcctccaccgtttaagattgcagaaatcagagcttcaatac

SEQ ID NO: 197919 - DNA, 241 bp, Glycine max
cgagaagacgacagaaggggacactaaacaagttaaaagaagagcatcactgaactaacaaagcaaccctatgtcgaaggtggtttgtgtcaccggagccagcggcgccatcggatcatgggtggtcctactcctcctccagcgtggttacaccgtccatgccaccgtccaagatatcaaggatgagaatgtaacgaggcatttggaggaaatggaaggagcaaagagtcatctccatttt

SEQ ID NO: 197920 - DNA, 257 bp, Glycine max
ttcgaccgaatcggctcgaggagaagacgacagaagggggtgaattatgagattgctaatttaatctggtggaggaaaacttttggaaatgtagtgcttatcatgtattgcaatgggccggtggaacgaactgcccttgaatggaggttgctctatgggaggatattcagatctgttgttattttgtcagaaaagaaggatgtagatcttgttgtagaggagggtcatttggactacgcatacaggtacttgcccaa

SEQ ID NO: 197921 - DNA, 258 bp, Glycine max
gagaagacgacagaagggggtggcaggtgtgggttcttcaattcattctagttctggattccgactagccgcgttgactcggttccgtttttcattctcgcggatctaatattaaggaatagcttaagggcacattacaatgaaggcattgattctggttgggggatttggaacaaggctgaggccactgacactcagtttccctaagcctcttgttgattttgctaacaagcctatgattttgcatcagatagaagc

SEQ ID NO: 197922 - DNA, 258 bp, Glycine max
aagacgacagaaggggaaagagaaaatattgattgcagttgagttctaatgagtaacgaatacgattacctgttcaagcctctcctaatcggagactcttccgttggaaaatcctgcttgcttctcagattcgctgatgatcctatgtcgacagctacataagtaccattggagttgatttcaaaatcagaacggtggagctggaagggaaaaccgtcaagctgcagatttgggatacagctggacaggagcgattca

SEQ ID NO: 197923 - DNA, 253 bp, Glycine max
acggcgcgagaagacgacagaagggggcacaagtgagtttgttgatcgagataactagaaacagtgtgatgaaaatgaaggtccttgttttcttcgttgctacaattttggtagcatggcaatgccatgcgtacgatatgttccctctccgaatgaacactggctatggtgcccgtactccggaggtgaaatgcgcaagttggaggcttgctgtggaagcacacaacatctttggctttgagaccattcctga

SEQ ID NO: 197924 - DNA, 253 bp, Glycine max
tacggctgcgagaagacgacagaagggggagcgaagaagatattagggtttttgagtgcggtgcggcgatcctagcactctcttctgcagctttcgccgacagcttcattcaccatggctgagcaaaccgagaaggcttttttgaaacaaccaaaagtgtttctcagctcgaagaaaactgggaagggaaagagacccggaaagggtgggaaccgcttttggaaatccattgggcttggatttaagactccca

SEQ ID NO: 197925 - DNA, 254 bp, Glycine max
tacggctgcgagaagacgacagaagggtggagatcggtgactgaggaatacagcgacaaagtaatgggtctagcttgcaagctcatggaggtgttgtccgaagcaatggggttagagaaagagggtttaagcaaagctgtgttgacatggaccagaaggtggtggttaattactaccccaaatgccctcaacctgacctcactcttggcctgaagcgccacacggatccgggcactatcaccttgctgcttcag

SEQ ID NO: 197926 - DNA, 252 bp, Glycine max
tacggctgcgagaagacgacagaaggggatatatttatctatagatatctttagaaaaaaaaaagaagataaacaaataagacgtatcattttatgtatagtagtggggaattatggggacaaaaaataaatccgcttggtttcagacttggtacaactcaaagtcatgattctatttggtttgctcaaccaacaaattattccgagaatatacaagaggataaaaaaaatacgagattgtatcaaaaatta

SEQ ID NO: 197927 - DNA, 253 bp, Glycine max
aagacgacagaagggggagtggagactatttcaagatcaccatcactcctctcattttgcgggaaaggtttcgttcaagagaagatggtaactagaattgtggatcttcgttcagacacagttacaaagccaactgaagcaatgagagctgctatggcaagtgctgaagttgatgacgatgttctaggctatgatccaactgcttttcgcttagaaacagagatggcaaagacaatgggcaaagaagctgctc

SEQ ID NO: 197928 - DNA, 254 bp, Glycine max
tacggctgcgagaagacgacagaagggggatgcacaagtttgttgagatagctagaagcaataagatgaaaatgaaagtgcttgttttgtttgttgctacagttttggtagcatatgaatgccatggctcagactaccagaagttccctctccaaatgaaaactgggtttggtggacaatacagcaatgaggtggcatgtgccagttggaggcttggcgtggaagcaaacaacgtagtcaagtggcaaactgtt

SEQ ID NO: 197929 - DNA, 250 bp, Glycine max
acggctgcgagaagacgacagaaggggggtgaaacaggcaaagtctccagagctaacttccatgatcgacttgggaggactgtgcttattatgaggccagggatgcagaacacaacatcggctgaagataatatcaggcatttagtctatctgttggaaaatgctatcctaaatctttctgaaggtcaagaacaaatgtcatggttgatagacttcacaggattatcacttagtacaaatatgtctgtta

SEQ ID NO: 197930 - DNA, 252 bp, Glycine max
aactcgagccgattcggctcgagtacggctgcgagaagacgacagaagggggcagcgtcccaagttccaggtttcagcgagcactctacaatggctactataccagttaatcccaagcctttcttgaacaatttgactgggaagcctgtaattgtgaaactgaagtggggaatggagtacaagggctatctcgtttccgttgattcctatatgaacttgcagctggccaacaccgaggagtacattgaggga

SEQ ID NO: 197931 - DNA, 250 bp, Glycine max
tacggctgcgagaagacgacagaaggggacatcacaagaagcacaatttctctctttctttttgtgtccaaaatggctcctagttctactcacgatactgggttctatgtgcttatgctagttgggatagtgatagcactatggttgctacctgtgctggtagcttctaccaagactttgatctaacatggggtggtgaccgtgctaagatattcaatggtggccagcttctatctctttcccttgacaa

SEQ ID NO: 197932 - DNA, 254 bp, Glycine max
tacggctgcgagaagacgacagaagggggcatatccaaaggaacaaaaatattattaagatgatcaacattattggagcacttgttctactctttgcatttctcttcctcagttgtgtgtatgcacaagacacaacaacccttgtgcctgcaatcataacttttggtgattctgctgtggatgtagggaacaatgactatcttcccacccttttcaaggctgattaccctccttatgggagggactttgttaac

SEQ ID NO: 197933 - DNA, 212 bp, Glycine max
gatctttgcatcctcactggccttgggacatttcttcccttaactgaagctcttctcgggctcggttgcctctcgaaggaatatgatctttgttttggtgcactatgtgatttgactttggcccttcatgattcagtgcttgctatgtaatttgggaacaaaagatagtcatagggcatagattctacataaactggcctagggaaagcaaa

SEQ ID NO: 197934 - DNA, 249 bp, Glycine max
acggctgcgagaagacgacagaagggtataattaggagaaaatggaatttaaaaagagaaagaaagggtggaaattgtaggtgtggtgtgtttcacatttgaagtaacactgaaaagaaaggaaagtgaagttgagagtttaagaagaacaagaaatgggggttggttcccaggatgccatcaagcagttccagacattcattgaccaagttgaggagcctttgcgaacaacgtttcagaatgttcatc

SEQ ID NO: 197935 - DNA, 251 bp, Glycine max
tacggctgcgagaagacgacagaagggggagattttatgatgcaagattcgaagatcaccaaccccactttcttcaagcttgttctctttgcaagaagcgtctcggggataatagtgacatcttcatgtacaaagggacacgcctttttgcagcgaagagtgtagacaagagcaaatggagagagacgaagccaaggagaagaataataacctttcttcttcgatgaaggctttgagaaaaaaagagcaaa

SEQ ID NO: 197936 - DNA, 254 bp, Glycine max
tctcgagccgaatcggctcgagacggctgcgagaagacgacagaagcgaacaaagaagagcattgagacctacaagatctacatcttcaaggtgttgaagcaagtgcaccccgacatcgggatctccagcaaggctatggggatcatgaacagtttcataaacgacatcttcgagattctcgcccaggagtcatcgcgtctcactaggtacaacaagaagcccaccattacttccagggagatccaaacggcgg

SEQ ID NO: 197937 - DNA, 242 bp, Glycine max
cggctgcgagaagacgacagaagggggggaataatcatttagcttccaataaggtgcaagatatagccaagcctgttagactaaatggatcctcccatgagttgcggaatggcttagattcagcagtagtcatactcacagaattttagcaattttagaggcactattttcattgaagccatcttctgttggaaccccttggagttacagctcaaatgagatagttgcagctgctatggttg

SEQ ID NO: 197938 - DNA, 244 bp, Glycine max
agacgacagaaggggacggacgagggtttcgtttcgggtttgacgttgttcacaatcactttctgcgcttcactcactcccttcgtgcggttttctttctttgtcgaactcgtgcgaaaatgcgtgagttcttcacatacagggagggcaatgcggaaaccagatcggagcgaagttctgggaggtggtgtgcgcggagcacgggatcgattccacggggaggtaccagggggacaacgagttg

SEQ ID NO: 197939 - DNA, 249 bp, Glycine max
gctgcgagaagacgacagaagggggcacaaaaatacaatacaaaacaaaacagagcaaagagagagtgtgtgaaaagtgaaacaaaaaacagagcaacaatggcgacacttaaggttcctcagcctcttcccccgttgcagatgattgtgagcagctccgaaaagccttctcaggttggggaactaacgaggagctgattgtatcgatcttggctcataggaatgctgctcagaggaagcttatcagag

SEQ ID NO: 197940 - DNA, 249 bp, Glycine max
tacggctgcgagaagacgacagaagggctggagttgttgttgcattttatttgtctaattcagataaatttcctcacaaccatgatgagatagacattgaactgcttggtcatgataagagaaatgactgggttattcaaacaaatatctatgccaatggaagtgtcagcacagggagagaagagaaattctatttctggttcgacccaacacagcagtaccattattacagcatcttgtggaacagtt

SEQ ID NO: 197941 - DNA, 283 bp, Glycine max
tacggctgcgagaagacgacagaagggggcacagcaaaacaattttcaaactcaattaccattccataacctaaatctcctctttgtttccgagtcagagagcaatggcacgtaccaagcaaaccgctcgcaagtccaccggcggaaaggcgccgaggaggcaattggcgactaaagccgctcgcaagtcagctccggccaccggcggagtgaagaagccccaccgcttcaggcccggaacggtggctctgagggagatcagaaagtaccagaagagcactga

SEQ ID NO: 197942 - DNA, 275 bp, Glycine max
agctttggagccggtttattttctgataatattctttccaaccaatctgcatcaggatggagtgtgtctgagctaccaggaccaactagaatattggtaatgccagtcatctggaaggacatgtacgcattgaagtagtaaggagcaaacataaccacagaatcacccggatcacagagagtaagaactagattcacaaatgcctgattggcacctgatgtaaccattactgaagatttgtgcaaattattttcatcacgcaactttttgactaa

SEQ ID NO: 197943 - DNA, 278 bp, Glycine max
cggctgcgagaagacgacagaagggggcacaagtgagttcgttgatcgagataactagaaacagtgatgaaaatgaaggtccttgttttcttcgttgctacaattttggtagcatggcaatgccatgcgtacgatatgttccctctccgaatgaacactggctatggtgcccgtactccggaggtgaaatgcgcaagttggaggcttgctgtggaagcacacaacatctttggctttgagaccattcctgaagagtgcgttgaagcaacaaaggaata

SEQ ID NO: 197944 - DNA, 274 bp, Glycine max
acggctgcgagaagacgacagaagggggaaaaaaaaaaaagttgttcgagatggcacgtacgaagcaaactgctcgtaagtccacaggaggaaaggcacctaggaagcagctcgcaaccaaggctgcacgtaagtctgcaccaactactggtggtgtgaagaagccacatcgttatcgtcctggtaccgttgctcttcgtgagattaggaaataccagaagagtaccgagctttagatcaggaagctccccttccagaggctggttcgtgaaat

SEQ ID NO: 197945 - DNA, 275 bp, Glycine max
tacggctgcgagaagacgacagaaggggggtgctgtgagtgagacaccgatagatagagagcgcggcataacctaaacctatctttcttctctctctgtgtgtgcgcttcaacggcaaccagaagcagccatggccactgcaaggactgtgaaggatgtttcacctcatgagttcgttaaggcgtactcctctcacctcaagcgatccggcaagatggagctgccagagtggactgatattgtgaaaactgcaagatttaaggagttggctcctt

SEQ ID NO: 197946 - DNA, 273 bp, Glycine max
acggctgcgagaagacgacagaagggggaaaagagctatgaattgcctgacggacaggtcattacaataggttctgagagattccgttgcccagaagtactgttccagccttctctaattggtatggaagctactggaattcatgaaacgacgtacaactccatcatgaaatgtgatgttgatattagaaaggatctgtatggaaacatcgtgcttagtggagggtctactatgtttccgggaattgctgatcgtatgagcaaggaaattggt

SEQ ID NO: 197947 - DNA, 273 bp, Glycine max
gcaacgaatccaagaaactcattgttgtggattttactgcttcttggtgtggaccatgccgtttcattgcaccattcttggctgagctggctaagaagttcacaagtgtcatattcctaaaggtggatgtggacgaattaaagagtgtttctcaagattgggctattgaggctatgcccacttttgtgtttgtgaaagagggaacgcttctggacaaagtggtgggagcaaagaaggatgagctgcagcagaaaatacagaaacatgtggctt

SEQ ID NO: 197948 - DNA, 278 bp, Glycine max
gcgagaagacgacagaaggggcttcatctacgggaatgtgacatagcctctcatctagaatcttcaccactttgtctttgctccaatttgtttgcaacttggtccattgaacaatatctagaccttcttcaccaaaattccccactggccttctccctgttagtagttctagcagcaccactccaaagctatagacatcacttttctcatcaactttcaatgtgtatgcatattctgttatatataaatcaaaatcactacaccataatagttggctt

SEQ ID NO: 197949 - DNA, 280 bp, Glycine max
tacggctgcgagaagacgacagaaggggattagttgttcttgtttgctatatctttaaacctcttgcttttgttttgcttcaaggtgtggtgtgtttcacatttgaagtaacactgaaaagaaaggaaagtgaagttgagagtttaagaagaacaagaaatgggggttggttcccaggatgccatcaagcagttccaggcattcattgaccaagttgaggagcctttgcgaacaacgtttcagaatgttcatcaaggatttgtcactgcaactttaatgc

SEQ ID NO: 197950 - DNA, 277 bp, Glycine max
aagacgacagaagggcaaaggcaatgttgttcatcaacttcactgccgaaggtgctgaacctttcaaatcaaaataccgtgaagctgctgagcaacataaacaacagggtgtaagctttttggtgggagatgttgagtctagtcaaggtgctttccagtattttggactgaaagaaggacaagtacctctaattatcattcaacacaatgacgggaaaaagtcttttaaacccaatttggaagctgatcacattccaacttggttgaaggcgtacaa

SEQ ID NO: 197951 - DNA, 275 bp, Glycine max
atgctgcgagaagacgacaggagggggctgacgctctctgagaaaaacagatagtgtcggagacagaagagcggaagagtaaatgacgaccaggttcaagaagaacaggaagaagagaggtcacgtcagcgccggacacggccgtatcggaaagcaccgcaagcatcccggaggtcgcggtaacgccggtggcatgcatcaccaccgtatcctcttcgacaagtaccatcctggtttcttcgggaaggtaggcatgcgctacttccacgaacttc

SEQ ID NO: 197952 - DNA, 273 bp, Glycine max
tacggctgcgagaagacgacagaagggggaagagagatggatccagacgcgttggcaaaggcattcgtggagcactactacagcaccttcgacaccaaccggaacggtttagcgaatctgtatcaggagggttccatgctgaccttcgaagggcagaagatccagggcgcttccagcatcgtcgctaagctcacttccctccctttccagcagtgccaccactccatctccaccgtcgactgccagccctccggtgtcaacgctggcatgctt

SEQ ID NO: 197953 - DNA, 271 bp, Glycine max
tacggctgcgagaagacgacagaagggggcacaagtttgttgagatagctagaagcaataagatgaaaatgaaagtgcttgttttgtttgttgctacagttttggtagcatatgaatgccatggctcagactaccagaagttccctctccaaatgaaaactgggtttggtgggcaatacagcaatgaggtggcatgtgccagttggaggcttggcgtggaagcaaacaacgtagtcaagtggcaaactgttcctgcagcttgcggagagta

SEQ ID NO: 197954 - DNA, 275 bp, Glycine max
tacggctgcgagaagacgacagaagggaaagagacccggaaagggtgggaaccgcttttggaaatccattgggcttggatttaagactcccagggaagccatcgaaggaacctacattgacaagaagtgccccttcactggcaatgtttccatccgtggccgtatcttggctggaacatgtcacagtgctaagatgaacaggactattattgttaggaggaattatctccattttatcaagaagtaccagaggtacgagaaaaggcactccaaca

SEQ ID NO: 197955 - DNA, 276 bp, Glycine max
cggctgcgagaagacgacagaagggggcatcaattcagaatatatcatcaattataagcatgggtttgtggatcacgacgaatgcagtgtcttgccgctttcacaagtttggtgatgaccaaaagaatctggtcttccaaggtgatgccacgtcttcttccaggggcatagaactcacaaagttagacggtggaggaaaaccagtgggtggcagtgtgcggagagtgttatactcttctccagtgcacctttgggaaagctctacagtggtcgcaa

SEQ ID NO: 197956 - DNA, 278 bp, Glycine max
tacctgcgacaagacgacagaagggcacaaaaggctggcttcaaagctgtaattgtctatgacaatgaagatggcggcatcttggttgcgatggcaggaaattctgctggtacataaatacacgctgtacttgtatctaaagcttcaggtgacatactacgccaatatgctgggacacaataatgtggaaatatggctcattccaacttttgaaaactcagcgtggtctatcatggcaatttcatttatttccctgctagctatgtctgcggtgctgg

SEQ ID NO: 197957 - DNA, 276 bp, Glycine max
acggctgcgagaagacgacagaaggggaacacgcggcttccgccggaggtgaaccgcgtgctgtacgttcggaaccttcccttcaacatcaccagcgaggagatgtacgacatctttggcaaatacggcgccattcgccagatccgcatcggcaccaacaaggacactcgcggaaccgctttcgtcgtctacgaggacatctacgacgccaaaaccgccgtcgaccacctctccggcttcaacgtcgccaaccgctacctcatcgttctctattat

SEQ ID NO: 197958 - DNA, 268 bp, Glycine max
tacggctgcgagaagacgacagaaggggacatcacaagaagcacaatttctctctttctttttgtgtccaaaatggctcctagttctactcacaatactgggttctatgtgcttatgctagttgggatagtgattagcactatggttgctacctgtgctggtagcttctaccaagactttgatctaacatggggtggtgaccgtgctaagatattcaatggtggccagcttctatctctttcccttgacaaagtctctggctctggct

SEQ ID NO: 197959 - DNA, 270 bp, Glycine max
actcgagccgaatcggctcgagtacggctgcgagaagacgacagaaccgggatcacaaatctatcgctaacactcattaattgcaagaatggcacttcgttgcttggtgatgtccctttctgttctcttcactcttggtcttgcgagagaaagccatgccagagacgaagatctttggcatgctgtttggccaaacactcccattccaagttcattgcgagatcttctaaagcctggccctgcaagtgttgaaatcgatgatcaccctat

SEQ ID NO: 197960 - DNA, 206 bp, Glycine max
tacggctgcgagaagacgacagaaggggagggtttgtaactttgtcttttgcttgcgaatctgaatcgaataataatcaatcaatcatcatgtcgtcggcgaagaagatcacactgaagagttcggacggcgaggctttcgaggtggacgaggcggtggcgctggagtctcagacgataaagcacatgatcgaggacgactgcgcc

SEQ ID NO: 197961 - DNA, 272 bp, Glycine max
ggagagtggtggggtgtgcagaacagcgtcgcagttgtaaccctaatcagaagaagcgcacttcatagcgagtgtcagccaccagacatgggtcgtatgcacagccgcggtaagggtatatcctcttctgctttgccctacaaaaggacacctcctagctggctcaagatcactacgcaagatgtcgaagaagatatctgcaagtttgcgaagaaaggtttgaccccgtctcagattggtgtcattctcagagattctcacggtattgctca

SEQ ID NO: 197962 - DNA, 276 bp, Glycine max
gctcgagcggctcgagtacggctgcgagaagacgacagaagggggagcgagacggcagcacgcgcaaaaatggtgaagtttctgaaaccaaacaaagccgtcatcgtccttcagggacgctacgccggcaaaaaagccgtgatagtgcgaaccttcgatgaaggcacgcgcgagcgaccctacgggcactgcttggtggcagggataaagaagtaccctgcgaaggtgatcaagaaggattcggccaagaagacggccaagaagtcgcgtgtgaag

SEQ ID NO: 197963 - DNA, 270 bp, Glycine max
gctgcgagaagacgacagaagggcaaagagaggctgatatgactaaggaacgtattgaaaaactgctgaaggctggagctaatgttattctgacaactaaaggaattgatgacatggctcttaagtactttgttgaggctggggcgattgctgtaagacgtgtgcggaaagaggacatgcgccatgttgccaaggctactggtgcaacattggtctcaacatttgctgatatggaacgggaggaaacatttgaaccatcttttcttggat

SEQ ID NO: 197964 - DNA, 268 bp, Glycine max
tacggctgcgagaagactacagaagggggaacaccctgtgcttctcaccgaggcacctcttaatcctaaggctaatcgtgagaaaatgactcagatcatgtttgagaccttcaacacccctgctatgtatgtcgctatccaggccgtgctttccctttatgctagtggccgtacaactggtattgttctggactctggagatggtgtcagtcacacggttcctatctacgaaggttatgccctcccacatgcaatcctgcgtttggac

SEQ ID NO: 197965 - DNA, 240 bp, Glycine max
gacacaccgtttgttctattcttaactcaacttctgctacccactctcttcttccaagtccaaccacgcttttctctacggtcatgggcaaggtcaagttcggaatcaacggatttggaagaattggccgtttggttgccagagtcgctctgcaaagagacgatgtggagctcgttgccgttaacgaccctttcattaccaccgattacatgacatacatgtttaaatacgacagtgttc

SEQ ID NO: 197966 - DNA, 269 bp, Glycine max
acggctgcgagaagacgacagaagggggcacaagtttgttgagatagctagaagcaataagatgaaaatgaaagtgcttgttttgtttgttgctacagttttggtagcatatgaatgccatggctcagactaccagaagttccctctccaaatgaaaactgggtttggtgggcaatacagcaatgaggtggcatgtgccagttggaggcttggcgtggaagcaaacaacgtagtcaagtggcaaactgttcctgcagcttgcggagagt

SEQ ID NO: 197967 - DNA, 270 bp, Glycine max
tacctgcgagaagacgacagaagggcacaaaaggctggcttcaaagctgtaattgtctatgacaatgaagatggtggcatcttggttgcgatggcaggaaattctgctggtataaaaatacacgctgtatttgtatctaaagcttcaggtgaaatactaagcaaatatgctgggttgactaatgtggaaatatggctcattccaacttttgaaaactcagcgtggtctatcatggcaatttcatttatttccctgctagctatgtctgcg

SEQ ID NO: 197968 - DNA, 228 bp, Glycine max
acggctgcgacaagacgacagaaggggatcacttcatagtaagcactatagaaaaaacgacattcattcatctatggctacccttattgctcccagcaaccactctccccaagaagacgctgaggctctcagaagggcttttgaaggatgggggactgatgagaaaactgtcatagtaatattgggtcatggaactgtttatcagagggctatcatcagaagagtcta

SEQ ID NO: 197969 - DNA, 245 bp, Glycine max
gacatgcataagaacaagcacaaggtctgattcgtgtttccttacatcaacttgtggtctaaaaatgggaaggatgccatgctgtgagaaggtagggttgaacaaaggaccatggaaaaccgaagaagatgagaagctcgtggcttatgttgaaaggcatggccctggaaactggcgttcagtgcctgccaaagcgggtcttcaaagatgtggcaagagttgtagactgaggtggatcaactacc

SEQ ID NO: 197970 - DNA, 271 bp, Glycine max
tacggctgcgagaagacgacagaaggggggttcggaaacgaagaagggttctgttttcttttcgcgatgagggccaagtggaagaagaagcgtatgaggaggctgaagaggaagcgccgaaagatgagacagagatccaagtagtgcgttaaacctagtatgtttccgttgcttgcgtaattgcttatgttgtcaaataggacacccagttgttagtggcactggtctctcctttttgatgttttgatacattttgatggattttatttcg

SEQ ID NO: 197971 - DNA, 267 bp, Glycine max
acggctgcgaaagacgacagaaggggagagagaagagggtcagagtgagaaagagagagagagagagagagaaactgagagaaattcgcaaaccctaatttcggaaagatcggcgatggctgcctccaaggatcgcgagaacttcgtctacatcgccaagctcgccgaacaggccgagcgatacgaagagatggtggaatcagtgaagaacgttgcgaatcacgacgttgaactgactgtggaagagcggaatttactttctgttgg

SEQ ID NO: 197972 - DNA, 265 bp, Glycine max
acggctgcgagaagacgacagaaggggataccaaaaacaaaacacaagccaagtgaaagtgagaaaaaataaaaatcaaagagcataatgtcagggatcattcacaagattggggagacccttcatgtgggagggcacaagaaggaggaggagcataagggtgagcaccatgctggagaatacaaaggggagcaccatggtgaacacagtagtgagtacaaaggagagcatcatggtgaacacaaagctggagagtaccatggtg

SEQ ID NO: 197973 - DNA, 268 bp, Glycine max
acggctgcgagaagacgacagaagggggcacaagtgagtttgttgatcgagataactagaaacagtgtgatgaaaatgaaggtccttgttttcttcgttgctacaattttggtagcatggcaatgccatgcgtacgatatgttccctctccgaatgaacactggctatggtgcccgtactccggaggtgaaatgcgcaagttggaggcttgctgtggaagcacacaacatctttggctttgagaccattcctgaagagtgcgttgaag

SEQ ID NO: 197974 - DNA, 271 bp, Glycine max
tacggctgcgagaagacgacagaagggggatgcaaccctaattgaatccaagcaagcaggggaagtgggggtattacttgatcagaagcacaaagctcttcaaaacccaaacaacagctccacggaccacccctactgctctgctctgcaatggccgacgaggaacctgttgatcagaagagatatcttgaagagtcttgcaaaccaaaatgtgtaaaaccattactggaataccaggcgtgcattaaaaggatacatggtgatgattctg

SEQ ID NO: 197975 - DNA, 270 bp, Glycine max
acgcgagaagacgacagaaggggaggcgcggcgggatcagcacaagattgcaaaatgaagttcaacattgcaaatcccaccactgggtgccagaagaagctggaaatcgatgacgacctgaagcttcgagcattttgggacaagaggatctcccatgaggttcttggtgatgctctgggtgatgagtttaaaggatatgttttcagaatcaccggtgggtgtgacaaacaaggattccctatgaagcagggagtgctgacccctggtcgt

SEQ ID NO: 197976 - DNA, 261 bp, Glycine max
tacggctgcgagaagacgacagaatgggatcacaacatcatagttagcactatagtaaaaaaacgacattcattcatctatggctacacttattgctcccagcaaccattctccccaagaagatgttgaagctctcagagacgcttttgaaggatggggaactgatgagaacactgtcatagtaattttcggtcatagaactgtgtatcactggcagctaatcaggagagtttatgaggtaatttacctcgaggatccttt

SEQ ID NO: 197977 - DNA, 267 bp, Glycine max
tacggctgcgagaagacgacagaagggggaagcccaaagtgcaacgtactttgcaaaaaccctaaaccctctctttctctctccgcgactctgtactcatcaatggctacgaaatcgttagacgaagacacaactaagatagtcatacgacaggtcgagttttatttcggcgacagataccttctcaccgatggtttcatgaggaagagtatcactgaaagctgagatggcatgattagtttggcgctgatttgctcgtctaatcga

SEQ ID NO: 197978 - DNA, 265 bp, Glycine max
acggctgcgagaagacgacagaagggggcacaagtgagtttgttgatcgagataactagaaacagtgtgatcaaaatgaacgtccttgttttcttcgttgctacaattttggtagcatggcaatgccatgcgtacgatatgttccctctccgaatgaacactggctatggtgcccgtactcctggagtgaaatgcgcaagttgtaggcttgctgtggaagcacacagcatctttggctttgaggccattcctgtagagtgcgttg

SEQ ID NO: 197979 - DNA, 265 bp, Glycine max
gagaagacgacagaagggggaaacatttttaagaaagctttagagaaaaatgatgctggagaccatttcccagtaattgccttcaacttaggtggaaacctcgtaataaggatcgtaagcgagcaaactgatattcttgaaccatttactgcgtcgagtttgccaagttcccttatattgtggaaggaagcaaatgctaaaggaagtctatttcaaagatttccttcagatttgttgacacagctgaagacagattgtctcgtcc

SEQ ID NO: 197980 - DNA, 263 bp, Glycine max
tacggctgcgagaagacgacagaaggggagccaagaaaagaaaatcctcacccattttcttcgtagccaaacactctgaaattctcagttatgtcgtggcaagcgtatgtggatgatcacctactgtgtgaaatcgaaggtaaccacctcactcacgccgctatcatcggccaagacggaagcgtttgggctcagagcaccaacttccctcagttcaaacctgaggaaataactgccatcaataatgactttaatgagcctgg

SEQ ID NO: 197981 - DNA, 261 bp, Glycine max
actcgagccgaatcggctcgaggagaagacgacagaaggggatgcaaaagtttgttgagataactagaagcaataagatgaaaatgaaagtgcttgttttgtttgttgctacagttttggtagcatatgaatgccatggctcagactaccagaagttccctctccaaatgaaaactgggtttggtgggcaatacagcaatgaggtggcatgtgccagttggaggcttggcgtggaagcaaacaacgtagtcaagtggcaaa

SEQ ID NO: 197982 - DNA, 262 bp, Glycine max
agacgacagaaggggggcgaggatggcaaacacaaacagcgacaccaaagaagaaagcaaaaaatggatgaaagagagacaatacctctcctcacctcatacaagatgggaaattttaatctatcccacaggattgtgttggcaccgttaacacgatcaaggtcttacaacttcgttcctcagccgcatgctgctctgtattattctcaaagaactactaagggtggcttcttgatcggggaagctactggtgtatctgata

SEQ ID NO: 197983 - DNA, 264 bp, Glycine max
tacggctgcggaagacgacagaagggggcacaagtgagtttgttgatcgagataactagaaacagtgtgatgaaaatgaaggtccttgttttcttcgttgctacaattttggtagcatggcaatgccatgcgtacgatatgttccctctccgaatgaacactggctatggtgcccgtactccggaggtgaaatgcgcaagttggaggcttgctgtggaagcacacaacatctttggctttgagaccattcctgaagagtgcgtt

SEQ ID NO: 197984 - DNA, 252 bp, Glycine max
gctgcgagaagacgacagaaggggaggacatgagtattccactgaaggagttgatagagaggcactgtggaggtattcgaggaggatgggataatttacttgcagtgattccgggaggatcatctgttcctctgattccaaagcttgtatgtgatgatatctttatggattatgatgcattaaaggctgttgggacagggttggggactgcagctgtaattgtaatggataaatctacggatgttgtggatg

SEQ ID NO: 197985 - DNA, 181 bp, Glycine max
  unsure (1)..(181): unsure at all n locations
tacggctgcgagaagacgacagaagggggaatcggtggtgaagaaggagaaaaggaacgangagtgggctttggcgaagaagcaggaactcgaatgcgctaagaaaatgaggttccaaacgcggaagctgatttttaacagagccaaacaatactcaaagggatacgacgagcagccaaag

SEQ ID NO: 197986 - DNA, 265 bp, Glycine max
acggctgcgagaagacgacagaagggggaaaagagctatgaattgcctgacggacaggtcattacaataggttctgagagattccgttgcccagaagtactgttccagccttctctaattggtatggaagctactggaattcatgaaacgacgtacaactccatcatgaaatgtgatgttggaattggaaaggatctgtatggaaacatcgtgcttagtggagggtctactatgtttccgggaattgctgatcgtatgagcaagg

SEQ ID NO: 197987 - DNA, 262 bp, Glycine max
acggctgcgagaagacgacagaagggggaaaaggttcacatcagtattgtggttattggccatgttgactctgggaagtccactaccactggccacctgatctacaagcttggaggcattgacaagcgtgttattgagagatttgagaaggaagctgctgagatgaacaagaggtctttcaagtatgcctgggtgcttgataagcttaaggctgagcgtgaaagaggaatcacaattgatattgccttgtggaagtttgaaa

SEQ ID NO: 197988 - DNA, 265 bp, Glycine max
tacggctgcgagaagacgacagaagggggtctcactcacatcacacactctcatagctgtagcggcgacactaagatcggagaaagaatggcgaaaacgacgtcgttgctgctctttacactgctcctcttcggaaccctagctctcatccaggcgaagaaatcgaaggaggatttgaaggaggtgacccacaaggtttactttgatgttgagattaatggaaaagaagcaggtcgtattgtaatgggtctttatgggaaggctg

SEQ ID NO: 197989 - DNA, 266 bp, Glycine max
  unsure (1)..(266): unsure at all n locations
tactcgagccgaatcggctcgagacggctgcgagaagacgacagaacggggaagcagtgagtgccnggaataatgttgcggattgctcccaaattcttcaccacggttcctcttcggaccatttcacccttcgcatgtcgcttctcagtccgttccatcgctgactcttctcctttcaacaaaatccgcattcaaagggatgatactgcatttgatgcatatgtcgttggaaaaaacgacgctcctggaatcgttgtgcttcagga

SEQ ID NO: 197990 - DNA, 245 bp, Glycine max
tacggctgcgagaagacgacagaaggggggtgctgtgagtgagacaccgatagatagagagcgcggcataacctaaacctatctttcttctctctctgtgtgtgcgcttcaacggcaaccagaagcagccatggccactgcaaggactgtgaaggatgtttcacctcatgagttcgttaaggcgtactcctctcacctcaagcgatccggcaagatggagctgccagagtggactgatatggtga

SEQ ID NO: 197991 - DNA, 263 bp, Glycine max
gaagacgacagaagggggggtgccattgttgctgtcgtcatccgcagctgctgttattcgcaccgcaaacaaacagtgagccatggccgtcggaaagaacaagcgcatctccaaagggaaaaagggtggcaagaagaaggcagctgatccctatgccaagaaggattggtatgacattaaggccccttctctttttcaagtgaaaaatgttggcaaaaccctcgtctctcgtacgcagggtaccaagattgcttctgaaggac

SEQ ID NO: 197992 - DNA, 239 bp, Glycine max
gactcgcagttgtattgttgaacaaggggttctctggctgcttccttcactttctctcgtttcaatcgaaaccaaaacaaaaacatgggcagaaaattcttcgtcggtggcaactggaaatgcaatgggaccactgaggaggtaaagaagattgttactactttgaatgaggctaaagtccgggagaagatgtcgtagaagttgttgtgagccctcctttgtgttccttcctgttgtaa

SEQ ID NO: 197993 - DNA, 263 bp, Glycine max
tacggctgcgagaagacgacagaagggggaagtagttatgtataccttggtaggctgaaagatggtagcaatgtggcagttaaacgactaaaagatcaaggagggtcagaagcagactccgcatttttcaaggagattgaactattagctagacttcaccattgtcatttggttcctttgcttggatactgctcggagttaaaaggaaaacatgttcagaggttactagtatttgactacatggcaaatggaaatttgaggga

SEQ ID NO: 197994 - DNA, 266 bp, Glycine max
acgatctaaataccgcctacaaaaggccaaagtagagaagttcttgttaatagttgctaacagtttgcttcggtctaggcaatctcagtgggatatgaccaacatcaaaatttttcatgtagtggctgcattccaggtcttctcgtacatatcctttccccgttgatgcaaaggtttcaatagcaaaaaattcaccctcttccatctttgtctgctccccacccttcacaatgggaaccgattttccagcatggatttggtagcga

SEQ ID NO: 197995 - DNA, 260 bp, Glycine max
tacggctgcgagaagacgacagaagggggaaaatgtaactaatgaaaattgggtctgatggcactcttttgcagagcttattctaatctcccgtttggttttgtcttgctttaaatttttaatgatttatttaatctttaattttcttttcagttcactatactgggacgttgcttgatggcactaagtttgattccagcagagataggggaactcctttcagtttcacgcttggacaagggcaagttattaaaggatgg

SEQ ID NO: 197996 - DNA, 264 bp, Glycine max
acggctgcgagaagacgacagaagggggcacaagtgagtttgttgatcgagataactagaaacagtgtgatgaaaatgaaggtccttgttttcttcgttgctacaattttggtagcatggcaatgccatgcgtacgatatgttccctctccgaatgaacactggctatggtgcccgtactccggaggtgaaatgcgcaagttggaggcttgctgtggaagcacacaacatctttggctttgagaccattcctgaagagtgcgtt

SEQ ID NO: 197997 - DNA, 260 bp, Glycine max
cgagaagacgacagaaggggagggcagcttcaaaaaggcgtgggattcagataacttctatttcgaggccaatcaagccctctgatttcgttgactttgacctcattcttgctatggacaaacagaacagagaggacatatttgaggcctttaagagatggaaagatagacattctttaccggatggcgcacataaaaaggttaagttgatgtgctcgtactgtaagaagcatgatgaaagtgaagttccggatccttat

SEQ ID NO: 197998 - DNA, 261 bp, Glycine max
cgggcgagaagacgacagaaagggattctataaattggaatcactgctcctcataagattaatacaacctcaaaaagagttctttcaaaatgcaaacagccttaaccttcgctgcccccaacgttgtgccattggcacccacaaagagtgtctcccatattaccatctttcccaccaaattgaacaccccgcgctcctcacctcgttactctccgattagggttgcaaccgtggagcccgacacttcaactgtcgactaca

SEQ ID NO: 197999 - DNA, 252 bp, Glycine max
  unsure (1)..(252): unsure at all n locations
gaaaaagtatggagtttatacttcagagttcttattccacaaatagtccaagccaaggagatgatggtaactctggatccagtgctgtttgtgatgtaatatgcttgcaggctctctcaaagagaattcattatggcaaatatgtagctgaggcaaantatcaagctagtccagattcatataaagatgccattatagcacaggacaaggacaagttnttggaattgctaacatatcctgaagttgaagagg

SEQ ID NO: 198000 - DNA, 266 bp, Glycine max
acggctgcgagaagacgacagaagggcgagactccgacgagtggaaatcctattgcttcagggtggaggaaaaggttgctttcccagcagcagagattgataaaagaacagcggagcagaaggcaattgatgactggcttcccataacttcttcaaggaacgcaaaatggtggtactcagcttttcacaacgtcactgccatggttggagctggtgttctaagccttccttctgccatggcaagtcttggatggggtcctggggtg

SEQ ID NO: 198001 - DNA, 263 bp, Glycine max
acggctgcgagaagacgacagaaggggacagctattcctcttaagcttgctactgagtttccacactgcataccttaggtcttccgaattcgaagttaatttgcaagatggctaaggaaaaggctcagatcaacattgtggtggttggtcatgtggaccctgaggaggcaaccaccattaacgagctgaagaagcctgttgtggagaaagaagctccagggcatgccatatgagggcatgcacgtacggcctcggaggggaac

SEQ ID NO: 198002 - DNA, 263 bp, Glycine max
tacggctgcgagaagacgacagaaggggacccaaaggtgcaaaaatattaagatgataaacattggagcacttgttgtactctttgcatttctcttcctcagttgtgcctatgcacaagacacaacaacccttgtgcctgcaatcataacttttggtgactcagccgtggatgtagggaataatgactatcttcccacccttttcaaggctgattaccctccttgtgggatggactttgctaaccaccaacctactgggaggt

SEQ ID NO: 198003 - DNA, 245 bp, Glycine max
  unsure (1)..(245): unsure at all n locations
gatgcataagaacaagcacaaggtctgattcgtgtttcctttacatccaacnttgtggtctaaaaatgggaaggatgccatgctgtgagaaggtagggttgaacaaaggaccatggaaaaccgaagaagatgagaagctcgtggcttatgttgaaaggcatggccctggaaactggcgttcagtgcctgccaaagcgggtcttcaaagatgtggcaagagttgtagactgaggtggatcaactac

SEQ ID NO: 198004 - DNA, 260 bp, Glycine max
tacggctgcgagaagacgacagaagggggccattgttgttgctattatcatccgcagctgcttttattcgcaccgcaaacagtgagccatggccgtcggaaagaacaagcgcatctccaaggggaagaagggtggcaagaagaaggcagctgatccctttgccaagaaggattggtatgacattaaggctccttctgtttttcaagtgaaaaatgttggcaaaaccctcgtctctcgtactcagggtaccaagattgctt

SEQ ID NO: 198005 - DNA, 258 bp, Glycine max
cggctgcgagaagacgacagaaggggggtgctacgaaaggaggttgatcatgaattttcaataaaaactgaaatgtattcttcctgttcctgggtcgatgcccgagcggttaatggggacggactgtaaattcgttggcaatatgtctacgctggttcaaatccagctcggcccaataatttgccaatccactatgaagttatataacccatttattgttctccggaaatgactgatgtgctctgatacggaagaatc

SEQ ID NO: 198006 - DNA, 255 bp, Glycine max
tacggctgcgagaagacgacagaaggggggtcgtgtaacaggaattgacggaggcattcgaaatcggtgaagatggttgctatgaggtttcatcagtaccaggtggtgggaagggctcttcctaccgaatccgatgagcatcctaagatctaccgcatgaaactctgggcaactaacgaggtccgggccaaatccaagttctggtattttttgagaaaattgaagaaggttaagaaaagcaatgggcaagtgcta

SEQ ID NO: 198007 - DNA, 218 bp, Glycine max
tctcgagccgaatcggctcgagtacggctgcgagaagacgacagaacgggaagaaaggtagttccgtaccgaatgagagcttcaaactcttctccttcgatttccattgcgaacgctactttttcttcttctttctcttcattttcttcgctcttcgatcttcgtccggggactgctccgaataccaccaccaccactcgccgatggccacgatcgga

SEQ ID NO: 198008 - DNA, 264 bp, Glycine max
tctcgagccgaatcggctcgagtacggctgcgagaagacgacagaaggggaagtctaaagggtcgccttgagatcactttgagacatggtgaaggctgtggcagttcttggcagcagcgagggtgtcactggaactattttcttcactcaggagggagatggtccaaccaccgtaactggatctcttgctggtcttaagcctggtctccatggcttccatgtccatgccttaggggacactaccaatggttgcctgtcaactgg

SEQ ID NO: 198009 - DNA, 261 bp, Glycine max
tacggctgcgagaagacgacagaagggggcatcaattcaaaatatatcatcaattataagcatgggtttgtggaacacaacgaatgcagtgtcttgccgctttcacaagtttggtgatgaccaaaagaatctggtcttccaaggtgatgccacgtcttcttccaggggcatagaactcacaaatctagacggtggaggaaaaccagtgggtggcagtgtggggagagtgttatactcttctccagtgcacctttgggaaag

SEQ ID NO: 198010 - DNA, 262 bp, Glycine max
acggctgcgagaagacgacagaagggggcatcaattcaaaatatatcatcaattataagcatggggtttgtggaacacaacgaatgcggtgtcttgccgctttcacaagtttggtgatgaccaaaagaatctggtcttccaaggtgatgccacgtcttcttccaggggcatagaactcacaaagtaagacggtggaggaaaaccagtgggtggcagtgtggggagagtgttatactcttctccagtgcacctttgggaaagc

SEQ ID NO: 198011 - DNA, 261 bp, Glycine max
tacggctgcgagaagacgacagaaggggtatatggattcatagcaaaaattggggctggcttgtttttattgattcaagtgataattttacttgactttactcacacttggaatgatgcgtgggttgagaaagatgaacaaaaatggtatattgctttacttgctgtatcagtcggatgcttcattgcagcatttacagtgtcaggaatccttttcatttggttcaacccttccggatatgattgtagcctcaatatcttc

SEQ ID NO: 198012 - DNA, 260 bp, Glycine max
tacggctgcgagaagacgacagaagggaagatgagagggaacattctgagctacaacctcggcggaatggggtgcagcgcggggatcattggtgtggacttggccaaggatattctccaggcgaaccctaataactacgcggtggtggtgagcacggagatggtggggtacaactggtaccaggggaaggacaggtctatgcttatcccgaatagcttcttccgcatggggtgttctgctgttctgctttccaaccgtcg

SEQ ID NO: 198013 - DNA, 258 bp, Glycine max
acgctgcgagaagacgacagaaggggacagcaaaggagtgatttggagtttggagcgactgaactaatcattaatttgcactcgctgtttcagcttcatcacccttcttttgcatcatttatatctcttgagaaatggcacaagaaacctttctattcacatctgaatctgtaaacgagggtcaccccgacaagctgtgcgaccagatctctgatgcagtacttgatgcgtgccttgaacaggaccctgacagcaagg

SEQ ID NO: 198014 - DNA, 260 bp, Glycine max
  unsure (1)..(260): unsure at all n locations
acggctgcgagaagacgacagaaggggagtgaggaaagcataatcaaatcaaccatgggctaccttattgctcccatcaccttttcacctggtttagatgcagaagctcttaganaagctttccaaggatgggggatcgatgagaacaccgttattgcaatactgggtcatagaaatgttcatcagaggcaacacatcagacaggttatggggaaatttaccaagagacctcattaaacgcctggagtctgagctctctg

SEQ ID NO: 198015 - DNA, 262 bp, Glycine max
acggctgcgagaagacgacagaagggggagagtcagattcgcacgcattgcttcgcctcacaacagcagctgcagcagcaatggctcccaaacgaggtggaaaggctccggctcttgccgctaagaagaagcctgagaaggtcacgaatccgttgttcgagaagcgtccgaagcagttcggaatcggaggggcgttgcctccgaagagagacttgactaggttcgtgaagtggccaaagaatgttcaaattcagaggaagaa

SEQ ID NO: 198016 - DNA, 260 bp, Glycine max
acgggagaagacgacagaagggggaggtttggtggtgtggtttagtgtcaaaatggcggcgagtagaagcactttacctctgatgaagtacttgagagtgcgcgtggacgctcttccccgcaacactcccttgaccctcgcttccaacatgttgattcgccgcttctccgaagaggttaggggttgttttctcgacaagtccgaggtcacagatcgcgtcatttcctgcgtcaaaaacttccagaaagtcgatccttcta

SEQ ID NO: 198017 - DNA, 260 bp, Glycine max
tacggctgcggagaagacgacagaaggggactacaaatcagttttttacttgaattttcttcatccttctctgttctcctagaacttgattacttgaacattccctatgacagatgaggtggttcttctggatttctggccaagtccatttgggatgagggtcaggattgcacttgctgaaaagggtatcgaatatgagtacaaagaagaggacttgaggaacaagagtcctcttctcttacaaatgaacccggttcaca

SEQ ID NO: 198018 - DNA, 256 bp, Glycine max
gcgagaagacgacagaaggggagataaatttggatcgtgaacggagaaatagggaatgggctgaacttactaactgtattgaggaactcgaggttcaaagggataagctccaaaagcagagagaactgttgcatgctgatagaattgaaatttatgctcagactgaagaattgaaaaaactagaagatttgaaagctgtctctgatgataatgctatcactgaaatgcttaaatctgatatggagtctaaccaaaa

SEQ ID NO: 198019 - DNA, 257 bp, Glycine max
acggctgcgagaagacgacagaagggggatacatagtgggtccccctctctactggcatttcgttgcagtgaacaaccactcttcatcttctacttgtgcaccctgcatctgcgattgctcttcacaacccattctttctattccacaaggacttagcaacacttccttcggagattgtgcaaagcctgacccagaagtgagtggagacactgaaaagaattttgctgagctattgacagaagaactcaagcttcag

SEQ ID NO: 198020 - DNA, 256 bp, Glycine max
acggctgcgagaagacgacagaaggggagagtggtggagtgtgcagaagagcgtcgcagtcgcaaccctaatcagaagaagcgcgcttcaagcgagtgacagccaccagccatgggtcgtatgcacagccgcggtaagggtatatcctcttctgctttgccctacaaaaggacacctcctagctggctcaagatctcttcgcaagatgtcgaagaaaatatctgcaagtttgcgaagaaaggtttgaccccgtctc

SEQ ID NO: 198021 - DNA, 257 bp, Glycine max
tacggctgcgagaagacgacagaagggcaaggaaactcttcagaatttatgtttggagttagcaaccatgggtgatctcaaacttgttgagcgtccacaaaactgtacgcttgctccagaatcaagcaaacaaattaaagccaacattaaggtttcatcaactgaaacaggagttatatttggtaacatagtctatgagacatcttctaatgttcttgagagaacagttattgttctaaatgatatccatattgaca

SEQ ID NO: 198022 - DNA, 219 bp, Glycine max
gctgcgagaagacgacagaagggggggggaaggagtgaatgatggtttttctggacctgggaccaattgattcacttattcctggtcttattgatgatgtagccttgaattgtcttgcttgggttagtggatctgattatgccgtgctatcgtgtattaataaaaggttcaataaactgatcatagtggggatctatatgggttgaggaaacattgggg

SEQ ID NO: 198023 - DNA, 260 bp, Glycine max
  unsure (1)..(260): unsure at all n locations
acggctgcgagaagacgacagaagggggatgcacaagtttgnttgagatagctagaagcaataaggatgaaaatgaaagtgcttgttttgtttgttgctacagttttggtagcatatgaatgccatggctcagactaccagaaattccctctccaaatgaaaactgggtttggtgggcaatacagcaatgaggtggcatgtgccagttggaggcttggcgtggaagcaaacaacgtagtcaagtggcaaactgttcctgc

SEQ ID NO: 198024 - DNA, 260 bp, Glycine max
atactccaatcactgaggctgggtttactgggattggagttggcgctgcttactatggtctaaggcctgttagtggagttcatgacttttaacttctccatgcaggcactagatcatattattaactctgccgcaaaatcaaactacatgtctgctgggcaaatatctgtgcctattgtctttagaggacccaatggtgccgctgctggagttggtgctcagcattctcaatgttatgcatcttggtatggttcatgccc

SEQ ID NO: 198025 - DNA, 260 bp, Glycine max
ttgcgagaagacgacagaagggatggagggacctattatcccattactgtcaagaagcacctcaaggcgcaggagattgctgcccagtgcaaattgccctgcatatatcttgttgacagtggaggagcttttcttcccaagcaagctgaagtgtttccggacagagagaacttcggtagactgttctacaatcaggctgtaatgtctgctcaagggattcctcaaattgcattggtgttgggctcttgcactgctggtgg

SEQ ID NO: 198026 - DNA, 260 bp, Glycine max
agggcgaatagctccacgcttctcgttccttaaattcctcttcccaagctctctccctctctctctgcggggttttcccttcttgtccattcatatatatcacaatttcaactgcaaattttgaacaaaacttaattaagaaatccttctccggagccatggcagatctcaagtccacattcttgaacgtctattctgttctcaaatctgaactcctccacgaccctgcttttgagttctccgatgatgctcgtaattgg

SEQ ID NO: 198027 - DNA, 267 bp, Glycine max
gtaaccggaatcggtcgaattaaaatctatcatctgagtttggaaatgtgtggacggactcatgcagttgacagcaagtctgcatttgcaacaaaggccaaagttcgccgagctattgaggctgaaggaattcccttcacttatgtgtcaagcaacttctttgctggttacttcctgcccaacttgtcacagcctggagccacagctgcccccagagacagagttattatcctaggagatggaaaccccaaagctgtttttaacaag

SEQ ID NO: 198028 - DNA, 254 bp, Glycine max
  unsure (1)..(254): unsure at all n locations
acggctgcgagagacgacagaagaggacttgtaataattcttataacacaacacaacccatggccaccacctccgcattcctcctccttccactcctcctgctgctccacctcgccatcgccgctcacggcatcggcatcaactacggcacgctcggcgacaaccttccaccgcccgcggcggtgncgaacttcctgaagacgaagacgaccatcgaccgcgtgaagctctacgacgtgaacccggacatcctg

SEQ ID NO: 198029 - DNA, 254 bp, Glycine max
tctcgagccgaatcggctcgagagaagacgacagaagggagaggactacaaaaaattctgggagcatttggtaggtcataacataggttgcaatgaagacactgcaaatcataagcgcattacaccactattgaggttttacacttccaaaagtgaggaggagcttaaaagcctagatgattatgttgaaaatatgggtgaaaaccaaaaggctatcttttatctagcaactgacagcttgaagagtgcaaaga

SEQ ID NO: 198030 - DNA, 260 bp, Glycine max
  unsure (1)..(260): unsure at all n locations
tacggctgcgagaagacgacagaagggggatgcacaagtttgnttgagatagctagaagcaataagatgaaaatgaaagtgcttgttttgtttgttgctacagttttggtagcatatgaatgccatggctcagactaccagaagttccctctccaaatgaaaactgggtttggtgggcaatacagcaatgaggtggcatgtgccagttggaggcttggcgtggaagcaaacaacgtagtcaagtggcaaactgttcctgc

SEQ ID NO: 198031 - DNA, 269 bp, Glycine max
agacgacagcaggggaccaccactactaccaagtgaaaaagcaactaagcatagtgtgtaagaaagggagaaaaacaagtgctgtgtagagagaaaaatggctaggtggtgcatgatcttggtggttcttgctcttgccgtggttgcaagtgccagaaacatgcccaatgacgctggtttgaaacaaccagaagaacttccttgggtatgggttttcgggagttggcaacaatggtcttccctttggtggagtgggttctggggttgat

SEQ ID NO: 198032 - DNA, 273 bp, Glycine max
acggctgcggaagacgacagaaggggactgaacaacgacttcatcttcactcttccttcaaatttccaacaagaaagtttgttcaactgtccctttattggcgttagctatgctacctactggagcaaaagagacccaattacgtgagaacaacagccagaaggtccatcctcaaccaatggaagaggccatgaatcagaatccagaagcaatggaaaccctaatatctaaagtttttacaataacagcttccttgaagtcagcttatatcca

SEQ ID NO: 198033 - DNA, 270 bp, Glycine max
cggctgcgagacgacagaaggggaaggaagagtgagcgtgaaagatgccttgggtgaggctttcagagtctccaaggctcgacgttgctattgacatgggtaatccatttctcaatctcactgttgatggtttccttaagatcggagctgtcgcagccacgcgatcagctgctgaagatacttatcatattatccaaaaggggaatatctcaagtcgtgatttcgagaaaactttgaagaagatgtgtaaagaaggtgtatattggggaa

SEQ ID NO: 198034 - DNA, 280 bp, Glycine max
  unsure (1)..(280): unsure at all n locations
tctcgagccgaatcggctcgagtacggctgcgagaagacgacagaacggnggcacaagtttgtatcgagatagctagaagcaataagatgaaaatgaaagtgcttgttttgtttgttgctacagttttggtagcatatgaatgccatggctcagactaccagaagttccctctccaaatgaaaactgggtttggtgggcaatacagcaatgaggtggcatgtgccagttggaggcttggcgtggaagcaaacaacgtagtcaagtggcaaactgttcctg

SEQ ID NO: 198035 - DNA, 274 bp, Glycine max
tcggctcgagcggctcgaggacgacagaaggggggacagattagttttcaacaagataaaagaaaagcttggaagacgagttcggtttatggcatcaggtgcctcacctttatcacctgatatcatggaatttttaaagatttgctttggttgtcgagtgactgaaggatacggaatgacagagagtacttgtgttataagctgcatcgatgagggtgacaaacttggtggtcatgtaggctctcctaatctagcctgtgagataaaactagtg

SEQ ID NO: 198036 - DNA, 254 bp, Glycine max
ggctcgagacggaagacgacagaaggggggctttggtggcatgatcaccatccttgtttactgcaccgccggtatttcaggaggacacataaacccggcggtgacattcgggttgttcctaggacgcgaggtgtcgttgataagggcgttgttgtacatggtggcacagtgtgccggtgctatctgtggtactggattggccaaggggttccaaaaagcatactacaacaggtatggaggtggtgccactctgt

SEQ ID NO: 198037 - DNA, 273 bp, Glycine max
  unsure (1)..(273): unsure at all n locations
tacggctgcgagaagacgacagaaggggggtcgtgtaacaggaattgacggaggcattcgaaatcggtgaagatggttgctatgaggtttcatcagtaccaggtggtgggaagggctcttcctaccgaatccgatgagcatcctaagatctaccgcatgaaactctgggcaactaacgaggtccgggccanatccaagttctggtattttttgagaaaattgaagaaggttaagaaaagccatggggcagtgctagcccataatgagattttg

SEQ ID NO: 198038 - DNA, 276 bp, Glycine max
acggctgcgagaagacgacagaaggggggactaaagatcagcaaagacttaattgaaattgcgtggtgatgctctaaaaaccaacatcaccacactaggacccttggtgttacccttttctgagcagcttctcttctttagcacccttgtgtggaggcacttatttggcagcaaaaatgatgggaattcaccctcaatgatagtgcctacatccctgactacaaccgtggttttgagcacttttgtgttcatgctgcaagcaagaccattcttgat

SEQ ID NO: 198039 - DNA, 226 bp, Glycine max
tacggctgcgagaagacgacagaagggaaagagacccggaaagggtgggaaccgcttttggaaatccattgggcttggatttaagactcccagggaagccatcgaaggaacctacattgacaagaagtgccccttcactggcaatgtttccatccgtggccgtatcttggctggaacatgtcacagtgctaagatgaacaggactattaattgtaagagggaatat

SEQ ID NO: 198040 - DNA, 267 bp, Glycine max
ctgcgagaagacgacagaagggggcatcaattcaaaatatatcatcaattataagcatgggtttgtggaacacaacgaatgcagtgtcttgccgctttcacaagtttggtgatgaccaaaagaatctggtcttccaaggtgatgccacgtcttcttccaggggcatagaactcacaaagttagacggtggaggaaaaccagtgggtggcagtgtggggagagtgttatactcttctccagtgcacctttgggaaagctctacagtgg

SEQ ID NO: 198041 - DNA, 269 bp, Glycine max
tacggctgcgagaagacgacagaaggggactacaaatcagttttctacttgaatcttcgttatccttctttttttctccttgaactcgaatattcactatggcagatgaggtggttctgctagatttctggccaagtccatttgggatgagggtcaggattgcacttgctgaaaagggtatcaaatatgagtccaaagaagaggacttgcagaacaagagccctttgctcctcaaaatgaacccggttcacaagaaaatcccggttctc

SEQ ID NO: 198042 - DNA, 228 bp, Glycine max
acggctgcgagaagacgacagaaggggctttggaagaggagtgaagcagcagagggaggagcggcattaaaaatgcagatcttcgtgaaaaccctaacggggaagaccataaccctcgaggtcgaaagcagcgacaccattgacaatgtcaaggctaagattcaagacaaggaaggcatccctccggatcagcagcgtttgattttcgccggaaagcaacttgaagat

SEQ ID NO: 198043 - DNA, 271 bp, Glycine max
tacggctgcgagaagacgacagaagggccatcatgaaatgtgatgttgatattagaaaggatctgtatggaaacatcgtgcttagtggagggtctactatgtttccgggaattgctgatcgtatgagcaaggaaattggtgctcttgcacccagcagcatgaaaatcaaggtggttgcacctcctgagagaaagtacagtgtctggattggtggctctatcttggcatcacttagcaccatccaacagatgtggatctctaagggcgaata

SEQ ID NO: 198044 - DNA, 259 bp, Glycine max
atcgactcaacgaacacttccaagagttgggcaacgcgttagatcctgatagaccaaagaatgacaaggcaactatcctcactgagaccgtccaaatgctaaaggacttaaccgctgaagttaataggcttaaaacagagcataaaacactttctgaagagtcacgcgaactaatgcaagataagaatgaactcagagaagagaagacatctcttaaatctgatatagaaaatcttaatgtgcagtatcagcagagagt

SEQ ID NO: 198045 - DNA, 270 bp, Glycine max
tctcgagccgaatcggctcgagcggctcgagtacggctgcgagaagacgacagaaggggacagctattcctcttaagcttgctactgagtttccacactgcataccttaggtcttccgaattcgaagttaatttgcaagatggctaaggaaaaggctcagatcaacattgtggtggttggtcatgtggaccctgaggaggtaaccaccattaacgagctgaagaaccctgttgtggagaaagaagctccagggcatgccatatgagggcc

SEQ ID NO: 198046 - DNA, 264 bp, Glycine max
tacggctgcgagaagacgacagaagggggcacaagtgagtttgttgatcgagataactagaaacagtgtgatgaaaatgaaggtccttgttttcttcgttgccacaattttggtagcatggcaatgccatgcgtacgatatgttccctctccgaatgaacactggctatggtgcccgtactccggaggtgaaatgcgcaagttggaggcttgctgtggaagcacacaacatctttggctttgagaccattcctgaagagtgcgt

SEQ ID NO: 198047 - DNA, 266 bp, Glycine max
tgctgcgagaagacgacagaaggggggactattcaaggtggccagacacgccagaagggtggagatcggtgactgaggaatacagcgacaaagtaatgggtctagcttgcaagctcatggaggtgttgtccgaagcaatggggttagagaaagagggtttaagcaaagcatgtgttgacatggaccagaaggtggtggttaattactaccccaaatgccctcaacctgacctcactcttggcctgaagcgccacacggatccgggc

SEQ ID NO: 198048 - DNA, 263 bp, Glycine max
acggctgcgagaagacgacagaagggggaacaaaacaagtgtttcgaatagattatcctaagtctttgggaatagtgctgcaatggcttcaagtcaggaggaggtgacccttttgggagctactggaagcccatttgtgtgcagggttcatattgccctcaagttgaagggagttcaatacaaatatgtcgaagaaaatttgaggaacaagagtgaactgcttctcaaatccaacccagttcacaagaaggttcccagtgtta

SEQ ID NO: 198049 - DNA, 272 bp, Glycine max
agacgacagaaggggtcaaggatcagattggaacctacacatactttccatcgacttcactgcataaagcagctggagggtttggaggactcaatgtctaccatagatctgtcatcccagttccttatccgtaccctgatggagatttcactttactcattggtgattggtacaagactaaccacaaggtattaagagattctttggattctggaaaatctcttgcctttcctgatggtctccttatcaatggccaagctcatacaaccata

SEQ ID NO: 198050 - DNA, 270 bp, Glycine max
acgaagccgacagaaggggagttcagctgcgaaatccttgtgcaccgtaagggttgtgaagcaggcagagaagagccatggtgcacgtttccttctaccgaaactatgggaaaaccttcaagaagcctcgtcgtccgtacgagaaggagcgtttggacgccgagttgaagctggtcggtgagtacggacttcgctgcaagagggagttgtggagggttcagtacgctctcagccgcatgcgtaacaacgccagaaatcttttgaccctcg

SEQ ID NO: 198051 - DNA, 272 bp, Glycine max
tacggctgcgagaagacgacagaaggggaaagaaagaaagtgcaacttcctctgttttgctcccctgtttaagccttatcataagcttagaatggcacacaaggaattttccattgccctagtgactctcattgttctctttgtcaacacgaacctccaaggtgccacggctgactatggtggtggttggcagagtgctcatgccactttctatggtgggggtgatgcttctggcacaatgggtggagcatgtgggtatggaaatttgtata

SEQ ID NO: 198052 - DNA, 282 bp, Glycine max
tgcgagaagacgacagaagggggatttgagaattcttatggattcttcgttgatagaatggaaagaattaggggaagaggcatcgccggaacatgaaaacgaatgggaagatcgaaaagttggacgaagaaagaattgtctggtctcgacgctagagttagccaagcattctctccggagaactatagaaccagaatcggtggctttacgtcctttatcagcttttcgtcccgaattcagaccgattattcaaatcgacgggggtcaactcatgacctctga

SEQ ID NO: 198053 - DNA, 247 bp, Glycine max
gcaacgaatccaagaaactcattgttgtggattttactgcttcttggtgtggaccatgccgtttcattgcaccattcttggctgagctggctaagaagttcacaagtgtcatattcctaaaggtggatgtggacgaattaaagagtgtttctcaagattgggctattgaggctatgcccacttttgtgtttgtgaaagagggaacgcttctggacaaagtggtgggagcaaagaaggatgagctgca

SEQ ID NO: 198054 - DNA, 119 bp, Glycine max
acatcagtagtttacccatgcctggacaagttgatttcattaatggtggtcctccatgccagggtttctctgggatgactaggtttacccagagcagttggagtaaagtccagtgtgag

SEQ ID NO: 198055 - DNA, 225 bp, Glycine max
cgtaggctgcgagaagacgacagaaggggggatgaagagagcttacaaagggaaggtgaggactacatgtcagatgcacgcggtggggactctgatgataatttgcacagtcctttaatctcacgccaaacaacaacgcttgaaaaagacttggctcctcctcctccttcccatggcagtatccttggcagcatgaggcgtcacagtagtctcatgcaagggtca

SEQ ID NO: 198056 - DNA, 254 bp, Glycine max
cgtaccgctgccagcagacgacagaaggcggcacaagtcactttgttgatcgagatacctagaaacagtgtcatgaaaatgaaggtccttgtcttcttcgttgctacaattttggtagcatggcaatgccatgcgtacgatatgttccctctccgactgcacactggctatggtgccggtacccggaagctgaattcgcaagttcgaggcttgctgtgtgaaagcacacaacatcttcggccttgagaccattc

SEQ ID NO: 198057 - DNA, 204 bp, Glycine max
acggctgcgagaagacgacagaagggggcacttcaattgcaatcaaattagttcattctctttgcgcagttccctacctctcctttcaagatgcagatcttcgtcaagaccctcaccggaaagaccatcacccttgaggtggaaagctctgacaccatcgacaacgtcaaggccaacgatcacgaccaggaaggaattcccccg

SEQ ID NO: 198058 - DNA, 287 bp, Glycine max
tactcgagccgaatcggctcgagtacggctgcgagaagacgacagataggggcacaagtgagtatgttgatcgagataactagacacagtgtgatgaaaatgaaggtccttgttttcttcgttgctacaattttggtagcatggcaatgccatgcgtacgatatgttccctctccgaatgaacactggctatggtgcccgtactccggaggtgaaatgcgcaagttggaggcttgctgtggaagcacacaacatctttggctttgagaccattcctgaagagtgcgt

SEQ ID NO: 198059 - DNA, 274 bp, Glycine max
tagaagacagaagggggaagctggaaaagttagaagtagtgaagaaaatgaaagtcattgtattcatcgttgcaataataaatttaggtgcagaatggcaatgcaatgggtcagagcatgagcatgagcatggccacagctaccaaattttccctttacgaatgaaaaccggccccggtggccactacattccggaggtatcgtgcaaaagttggaggcttggtgtggaagcacacaacgatcttgactggagaaccatcctcaagatgcgggg

SEQ ID NO: 198060 - DNA, 274 bp, Glycine max
tacggctgcgagaagacgacagaagggggagaaaatgccactttttcacttggcactgatgggaaccttgtgttggcagatgctgatggcagaattgcatggcaaactaacactgccaacaagggtgttgtggccttcaggcttctttcaaatggtaacatggtccttcttgatgcacaaggcgggttcgtttggcagagttttgatcaccccacagatacccttttggttggtcaatatcctagagcaaaaaggccatccaagttggttagta

SEQ ID NO: 198061 - DNA, 241 bp, Glycine max
tacggctgcgagaagacgacagaaggggaccgccataggaatattaaagaaggagaaaatcaccattgacccagaagatccagctgctgtttctcattatgcaaaggtcatgaaaacaattagagagaaggcaagcttattgtcggagtcccaagacatactatccaccattgaaattgagacacaggatattccagatgctcggacctatctcctgactttgaggaaaagatcaagagag

SEQ ID NO: 198062 - DNA, 193 bp, Glycine max
tatgcgagaagacgacagaagggggagaacaacacaagtgtttcgaatagattatcctaagtctttgggaatagtgctgcaatggcttcaagtcaggaggaggtgacccttttgggagctactggaagcccatttgtgtgcagggttcatattgccctcaagttgaagggagttcaatacaaatatgtcgaag

SEQ ID NO: 198063 - DNA, 278 bp, Glycine max
acggctgcgagaagacgacagaaggggcaattcaaaaggttgctgctgcctatgactgtaaaattgttgagggtgttcttagccaccaaatgaagcagtttgttattgatgggaataaagttgtgcttagtttgtctaatccagacacaagggttgacgaagcagagtttgaggagaacgaagtttatgcaattgatatagtaacaagcactggggatggcaagcctaagctgttggatgagaagcagacaactatttataagagggctgttgacaag

SEQ ID NO: 198064 - DNA, 255 bp, Glycine max
gctgagaagacgacagaaggggacagcatatagtcacataggctattaagggtgagatatatagaaaaacaaaggagaaaagatagaaatggagaagtttccagttgttgacatggggaaccttaataatgaagagagatcagcaaccatggagataatcaaagatgcctgtgagaactggggtttctttgagttggtgaaccatgggtatccatagagttgatggacgtggagagttgcaaaagagcactacaa

SEQ ID NO: 198065 - DNA, 227 bp, Glycine max
tatcgagccgaatcggctcgagacggctgcgagaagacgacagaagagggcacttcaattccaatatattccattctctctgtgtatttccctacctctcccttcaagatgcagatcttcgtcaagaccctcaccggcaagaccatcacccttgaggtggaaagctctgacaccatcgacaacgtcaaggccaagatccaggacaaggaaggatccccccggaccag

SEQ ID NO: 198066 - DNA, 253 bp, Glycine max
ccgctcgagccgctcgagtacggctgcgagaagacgacagaagggggtggcactcaaacattgttcgttgtaggaagaggaatcttgagaaatggcaggggacagcaagagcaagattctgttcatcggagggactggttacatcggaaaattcatcgtggaagccagcgccaaagctgggcaaccaaattttcctttggggaaggagtccactctttcaaccccgcaaaatcacccctcatcgaccaatttc

SEQ ID NO: 198067 - DNA, 284 bp, Glycine max
  unsure (1)..(284): unsure at all n locations
tacggctgcgagaaaacgacagaaggggggaaaagttagaagtagtgaagaaaatgaaagtcattgtnttcttcgttgctataataattttaggtgcagaatggcaatgcaatgggtcagagcatgagcatgagcatggccacagctaccaaattttccctttgcgaatgaaaaccggccccggtggccactacattccggaggtatcgtgcaaaagttggaggcttggtgtggaagcacacaacgtcattgactggagaaccattcctcaagattgcgaggga

SEQ ID NO: 198068 - DNA, 282 bp, Glycine max
tgcgagaagacgacagaagggggcacaagtgagtttgttgatcgagataactagaaacagtgtgatgaaaatgaaggtccttgttttcttcgttgctacaattttggtagcatggcaatgccatgcgtacgatatgttccctctccgaatgaacactggctatggtgcccgtactccggaggtgaaatgcgcaagttggaggcttgctgtggaagcacacaacatctttggctttgagaccattcctgaagagtgcgttgaagcaacaaaggaatacatcca

SEQ ID NO: 198069 - DNA, 275 bp, Glycine max
acggctgcgagaagacgacagaaggggaagaaaatgattctcacaaagcagtaccgatgcatacactcagctagctgtcaatgtactaaagggcatttaagtgaagatgtgatattcttagtatttcataatttgaattggaatcccaagctaattgctactctatcatgtgtgtgcaaatggtttgatgatcttgccaagcgagttctatggaaagagttttgtagaacaagagctccgaaaatgttgtgtgatctgcaatctaatgggagcca

SEQ ID NO: 198070 - DNA, 223 bp, Glycine max
tgcgctcgagcggctgcgagaagacgacagaagggaactgttgttgagggaactatacagaagctatttgaagggcatcatatgaattatatcgaatgcatcaatgtggactataaatcaactagaaaggagtcattttatgaccttcagcttgatgtgaagggctgtcctgatgtttatgcttcctttgacaagtatgttgaagttgaacgtcttgaaggga

SEQ ID NO: 198071 - DNA, 230 bp, Glycine max
gacgacagaaggggagcctcagcagaagcagaacgaggagaagcagaaggagcaaaagcaatggcgccgaagaagccgagaaccacgacaaggaaccctgatttggttagggggattggcaagtattcgaggtcgcagatgtaccacaagaggggcatctgggccatcaaggccaaaaacggtggcgatttagcccgccacgatcccaagcccaagcccgaggccccggc

SEQ ID NO: 198072 - DNA, 264 bp, Glycine max
gcattgaataagaactttgtgaagcttgtttcttggtacgacaacgagtggggatacagctccacgtgtcattgacctgcttgtattcgttgccaagaagtctttttaaggtggtgtactgcaaagttgcttgtctacacattatgtgcttgtctagttgcgatttagtgtcttgctcgtgcaaaaaatgagaggtctgaataaatcggtttctggaaccagtggatttaccttgttaggagcattagctctattttggacttt

SEQ ID NO: 198073 - DNA, 254 bp, Glycine max
tacggccgacagaaggggattacgacagagggtataagcatgaccatcattcaacgttctctctatttgtcgttgtagcgccgcagccagcggttgaatttggaaaaagatgtctcaccggaagttcgagcacccgagacatggttcccttggctttctcccaaggaagcgagcttctcgtcatcgcggaaaggtgaaggctttcccaaaagacaatcctagtcaaccatgcgggttgactgcttttgtgggct

SEQ ID NO: 198074 - DNA, 279 bp, Glycine max
tgaagacgacagaaggggacattttctacgtattgaatctcaagattctaagagagattttgctgctctttgaagaagggtgtttgcttgattttggagatgtcgctgctctcagatctcatcaaccttaacctctcagacactactgagaaggtgatcgcagagtacatatggatcggtggatcaggaatggacctgaggagcaaagcaaggactctcccaggaccagttagcgacccttcaaagcttcccaagtggaactatgatggttccagcaca

SEQ ID NO: 198075 - DNA, 258 bp, Glycine max
tgggcatatccaaaggaacaaaaatattattaagatgatcaacattattggagcacttgttctactctttgcatttctcttcctcagttgtgtgtatgcacaagacacaacaacccttgtgcctgcaatcataacttttggtgattctgctgtggatgtagggaacaatgactatcttcccacccttttcaaggctgattaccctccttatgggagggactttgttaaccaccaacctactgggaggttttgcaatgg

SEQ ID NO: 198076 - DNA, 270 bp, Glycine max
tacggctgcgagaagacgacagaagggggcacaagtgagtttgttgatcgagataactagaaacagtgtgatgaaaatgaaggtccttgttttcttcgttgctacgattttggtagcatggcaatgccatgcgtacgatatgttccctctccgaatgaacactggctatggtgcccgtactccggaggtgaaatgcgcaagttggaggcttgctgtggaagcacacaacatctttggctttgagaccatcctgaagagtgcgttgaagca

SEQ ID NO: 198077 - DNA, 231 bp, Glycine max
tacggctgcgagaagcgacagaagggaactgttgttgagggaactatacagaagctatttgaagggcatcatatgaattatatcgaatgcatcaatgtggactataaatcaactagaaaggagtcattttatgaccttcagcttgatgcgaagggctgtcctgatgtttatgcttcctttgacaagtatgttgaagttgacggcctgaaggggattaccaatatcatgcgg

SEQ ID NO: 198078 - DNA, 264 bp, Glycine max
acggctgcgagaagacgacagaagggggatgcaaaagttagtagtagtgaagaaaatgaaagtccttgttttctttgttgctatagttctagcagcatggcattgccatggctcagaccatgaccatgaccatggccacacctaccaaattttccctctgagaatgaaaactggccatggtggccactacattccggaggtatcatgccaaagttcggaggcttgggtggaagcacacaacgtcattgactggcaaacgttcct

SEQ ID NO: 198079 - DNA, 282 bp, Glycine max
tgcgagaagacgacagaaggggagcgaaacagagagtgatttcagtgagtgatcggtgttcacttgatctcatcataatcgtcagcgtcaattgaagaagatgccgatcagaaacatcgccgtcggaaggcctgaagaggcgactcaccccgacacgttgaaggcggctttggctgagttcatctcaaccttcatcttcgtgttcgccggctcaggctccggcatcgcctacaacaagctcaccgacaacggcgctgccacccctgccggcctcatctccgc

SEQ ID NO: 198080 - DNA, 282 bp, Glycine max
ctgcgagaagacgacagaaggggtttgatttctgggtattttagttgtggaagaattgaggaagctttgcacttgtttgatcaagtgcctgagagaaacgtggtgttctggacttcagtggttttgggttttgcttgcaatgcattgatggatcatgctcggaggtttttctatctcatgcctgaaaagaatatcatagcttggacagctatggtcaaggcatatcttgacaatggctacttcagtgaggcttataagctcttccgtgaaatgcctgaaaga

SEQ ID NO: 198081 - DNA, 294 bp, Glycine max
cgtagtaactcggaatcggtcgattcgagcgatcggctcagggctcgagagatggtgcagcgtctcacctaccgcaagatgtacagctatgccaccaaatccaaccaacacagggtcgtcaaaacccctggtgggaagctcgtttatcagaccaccaagaagagggccagcgggcccaagtgccccgtcactggcaagaggattcaggggattccacacttgaggcctgcagagtacaagagatcaaggttacccagaaaccgtaggactgtcaaccgtgcatatggcggagtt

SEQ ID NO: 198082 - DNA, 272 bp, Glycine max
tacggctgcgagaaacgacagaaggggatcatgtgcatggccgtggtgggtgcaccgatgatggcgcaagccatgacatgcaatgatgtgacggtgaacatggcacagtgcctatcctacctgatgcagggaggaacaccttcaacactttgctgcagcggagtcaagaacattcttggcttcgctgtcaccaccgttgacaaacaaactgtgtgcaactgtctcaaggcggatgctgctaggtacaacatcaatgaccagtatgctcaggc

SEQ ID NO: 198083 - DNA, 270 bp, Glycine max
tacggctgcgagaagacgacagaagggatcagtggtgccccccaggataacaacataatgctgtggaatgctgtcatatttggtcctgatgatactccatgggatggaggcacgttcaagttgacactccaatttactgaggactatccaaataaaccaccgactgtacgatttgtgtctcgcatgtttcatccaaatatttatgctgatggaagtatttgtttggatatattacaaaatcagtggagtcctatttatgatgtggctgct

SEQ ID NO: 198084 - DNA, 272 bp, Glycine max
tacggctgcgagaagacgacagaagggggcacaagtgagtttgttgatcgagataactagaaacagtgtgatgaaaatgaaggtccttgttttcttcgttgctacaattttggtagcatggcaatgccatgcgtacgatatgttccctctccgaatgaacactggctatggtgcccgtactccggaggtgaaatgcgcaagttggaggcttgctgtggaagcacacaacatctttggctttgagaccattcctgaagagtgcgttgaagcaa

SEQ ID NO: 198085 - DNA, 272 bp, Glycine max
gagaagacgacagaagggggcacaagtttgttgagatagctagaagcaataagatgaaaatgaaagtgcttgttttgtttgttgctacagttttggtagcatatgaatgccatggctcagactaccagaagttccctctccaaatgaaaactgggtttggtgggcaatacagcaatgaggtggcatgtgccagttggaggcttggcgtggaagcaaacaacgtagtcaagtggcaaactgttcctgcagcttgcggagagtacatagctgac

SEQ ID NO: 198086 - DNA, 272 bp, Glycine max
tacggctgcgagaagacgacagaaggggataccaaaaacaaaacacaagccaagtgaaagtgagaaaaaataaaaatcaaagagcataatgtcagggatcattcacaagattggggagacccttcatgtgggagggcacaagaaggaggaggagcataagggtgagcaccatgctggagaatacaaaggggagcaccatggtgaacacagtagtgagtacaaaggagagcatcatggtgaacgcaaagctggagagtaccatggtgagcaca

SEQ ID NO: 198087 - DNA, 274 bp, Glycine max
tggcctccagtaagagtgagtcctaccgaaaatcctgacccgtccggcttaccttcaaacaaaactgtgatggccagttggcaggttgtgtgcaacataacaacagccaagagaacatcaagtaaatgctgtgcctcgttttcatcttattacaatgattcagttattccatgcaaaacatgtgcttgtggatgccccaagaacacagagagaacatgtagtactagtgctccagctatgtggcttccaccagaggcacttcttgttccctttg

SEQ ID NO: 198088 - DNA, 279 bp, Glycine max
tgcgagaagacgacagaagggggtcatgcagtgaatggggttgcagagatacatagtgaaattgtaaaagatgatgttttcaatgcattttataagttgtggcccgagaagttccaaaacaaaacaaatggtgtgacaccaaggagatggatcaggttctgcaatccagatctgagtaaaataataaccgagtggataggtactgaggattgggtcctaaatactggaagattagccgagctacggaagtttgtagacaatgaggatctacaagtgcag

SEQ ID NO: 198089 - DNA, 279 bp, Glycine max
tgacgacagaaggggaacactcctggcagcatatactcataaatcacatagctagttgtttaaagtaagagagaagaaagaagcaaatggcaaactttccagttgttgacatggggaagcttaacaccgaagagagacctgcagccatggagattataaaagatgcctgtgagaactggggtttctttgagttggtgaaccatgggatatccattgagcttatggacacagtggagaagctcacaaaagagcattacaagaagactatggagcaaaggt

SEQ ID NO: 198090 - DNA, 276 bp, Glycine max
tacggctgcgagaagacgacagaaggggatgtcagtatcttgacaattgataatggtgtttttgaagttcttgccacaaatggagatactcatcttggaggtgaggactttgatcagagaataatggagtacttcattaaattgatcaagaaaaagcatggaaaggatattagcaaggacaacagagcacttggcaagctgaggagagaggctgagcgtgcaaagagggctctcagcagccagcaccaggtccgcgtggaaattgaatcacttttt

SEQ ID NO: 198091 - DNA, 273 bp, Glycine max
tacggctgcgagagacgacagaaggggggcgaggatggcaaacacaaacagcgacaccaaagaagaaagcaaaaaaatggatgaaagagagacaatacctctcctcacctcatacaagatgggaaattttaatctatcccacaggattgtgttggcaccgttaacacgatcaaggtcttacaacttcgttcttcagccgcatgctgctctgtattattctcaaagaactactaagggtggcttcttgatcggggaagctactggtgtatctga

SEQ ID NO: 198092 - DNA, 277 bp, Glycine max
cggtcgattcgagcgaatcggtcgagcggctcgagagtatagtatcaacatggccaagttcttcaaccaaattcgaggtacgagactgtgctgaccggtcagcttcctcataatacatgtgcaaatcctggttgatgaaaatgctttgaagaactttcacaacttcaatggaaacgtacaaagaaattggaatcaagtaactatacaacataagtgcagtcaggaagtgcagcatggctgcgactggtgctttctttggatcaaagtaaattgtggt

SEQ ID NO: 198093 - DNA, 274 bp, Glycine max
tactcgagccgattcggctcgagacggctgcgagaagacgacagaaacgggctgccgctctctgagaaaaacagatagtgtacgagagagaagagcggaagagaaaatgacgaccaggttcaagaagaacaggaagaagagaggtcacgtcagcgccggacacggccgtatcggaaagcaccgcaagcatcccggaggtcgcggtaacgccggtggcatgcatcgccaccgtatcctcttcgacaagtaccatcctggtttcttcgggaaggta

SEQ ID NO: 198094 - DNA, 271 bp, Glycine max
agaagacgacagaaggggagagaaataatggagaagaaaagcataacaagcagagcacattgtttagtgctagcatttccaggtcaaggccatatcaatcccatgcttcaattctccaagctattggagcgtcaaggggtgagaataacacttgttactactcgtttctattccaagaatttgcaaaacgtgcctccttccattgctcttgaaaccatttctgatgggtttgatgaagttgggccccaagaggctgggagccccaaggcct

SEQ ID NO: 198095 - DNA, 272 bp, Glycine max
acggctgcgagaagacgacagaagggggagaaatgaaagtgaagagaggaagcagagtgtgtgactgttccccaatttcctgtgcttagagtgaagaagcatttagaaaaagcaagacacgatgccttcggctcaagatccattctacgttgtcaagcaagaaattcaagaatctattgataagctaaaatccacttttcaccaatgggaaaacactgctgatgttggcgagcgatccagtctatcaaaggaagttcttgctagttgtgaaa

SEQ ID NO: 198096 - DNA, 278 bp, Glycine max
tgcgagaagacgacagaaggggatcgaagcaaaaaatgaaaacccaaagtgcttctctcctctgtctttttctctctcttgctatccttttggctagtggcactgctgcaagtgcaactccaagaagcgcagtgccaagccaccatgtttcaacattcaacagaagcctttttccttccacttttctctttggaattggttcttctgcttaccaggcagaaggagcagcaatcgtagatgggagatgaccaagcatatgggacacctacactagacag

SEQ ID NO: 198097 - DNA, 276 bp, Glycine max
tacggctgcgagaagcgacagaagggggcacaagtttgttgagatagctagaagcaataagatgaaaatgaaagtgcttgttttgtttgttgctacagttttggtagcatatgaatgccatggctcagactaccagaagttccctctccaaatgaaaactgggtttggtgggcaatacagcaatgaggtggcatgtgccagttggaggcttggcgtggaagcaaacaacgtagtcaagtggcaaactgttcctgcagcttgcggagagtacatagc

SEQ ID NO: 198098 - DNA, 269 bp, Glycine max
tacggctgcgagaagacgacagaagggagagaaagtacatcaaagattaaaattttcagcaaaaatttccaggaaaagaggagtgtccgaccaacattttcagctgaaagaatatttggtggcactctactggcgatgtgctccaacgatttcatctgcttttatgactgggctgaatgcaggttgatctatcgcattgatgtcaatgtgaaaaacctctactgggctgacagtggtgatctagtaacaatgctagcgatacatcattc

SEQ ID NO: 198099 - DNA, 272 bp, Glycine max
acggctgcgagaagacgacagaagggggaggttgaaaacgaaaacggagacctaaacgacgccgttcttgttccaccccctaacttctccatggtcgaggactgcattttccgatccggcctccccaacccttccaatttcccctttctccaaaccctaaaccttcgttccatcatatacctgtgccctgagccttatccggaagaaaatctggacttccttcgttcgcagaatattcgcctttttcaatttggaattgaggggaaaacgga

SEQ ID NO: 198100 - DNA, 272 bp, Glycine max
tactcgagccgattcggctcgagacggctgcgagaagacgacagaaacgggcagccggagaacgcggtttatgatttcgaggacaagatcaactttgcggtgttcccttcgctgcagggtgggccccacaaccaccagatcggggctcttgccgtggcgctgaagcaggccgcgtcgcccgggtttaaggcctacgccaagcaggttaaggccaacgccgttgcgcttgggaattacttgatggggaaagggtacagtcttgtcactggagg

SEQ ID NO: 198101 - DNA, 268 bp, Glycine max
acggctgcgagaagacgacagaaggggggtgctgtgagtgagattacccatagatagagggcgcggcataacctaaacttacccttcttctctctgtgtgtgtgcgcatcaaacgcaaccagaagcagccatggccactgcaagaactgtgaaggacgtttctcctcatgagttcgtcaaatattactcttctcacctcaagcgatctggcaagatggagctgccagagtggactgatattgtgaaaactgcaagatttaaggagttg

SEQ ID NO: 198102 - DNA, 267 bp, Glycine max
aagacaacctcaactttatcgaagaacacaatgctgtgaaccggacatacaaggttggactgaaccggttcagtgatcttagcaacgaggagtaccggtcaaaatacctgggaaccaagattgatcccagcagaatgatggccagaccaagtagacgttactctccgcgcgtggctgacaatttgctcgaatctgttgattggaggaaagaaggtgctgttgtcagagtcaaaaaccaatcagaatgcgagggctgctgggcattct

SEQ ID NO: 198103 - DNA, 268 bp, Glycine max
tacggctgcgagaagacgacagaaggggaagtgagtttgttgatcgagataactagaaacagtgtgatgaaaatgaaggtccttgttttcttcgttgctacaattttggtagcatggcaatgccatgcgtacgatatgttccctctccgaatgaacactggctatggtgcccgtactccggaggtgaaatgcgcaagttggaggcttgctgtgggagcacacaacatctttggctttgagaccattcctgaagagtgcgttgaagcaa

SEQ ID NO: 198104 - DNA, 267 bp, Glycine max
atcgagcgaacggctcgagtacggctgcgagaagacgacagaaacgggcacaaaaatacaatacaaaacaaaacagagcaaagagagagtgtgtgaaaagtgaaacaaaaaacagaacaacaatggcgacacttaaggttcctcagcctcttccccccgttgcagatgattgtgagcagctccgaaaagccttctcaggttggggaactaacgaggagctgattgtatcgatcttggctcataggaatgctgctcagaggaagctta

SEQ ID NO: 198105 - DNA, 272 bp, Glycine max
tacggctgcgagaagacgacagaaggggggtatttagcctacattgtgtattttaccctgggtctcggttaccttctcccatggaacgctttcatcaccgccgttgattacttctcctttctctaccctgacgccagcgttgaccgcatcttcgccgtggtttacatgatagtcgggctggtggggatctccctcataatcctctacagccacaagtctgacgcctatgtgaggatcaacgttggattggccctattcgtcgtttcgcttct

SEQ ID NO: 198106 - DNA, 268 bp, Glycine max
tgcgagaagacgacagaaggggacaccaaacaagttaaaagaagagcatcactgaactaacaaagcaaccctatgtcgaaggtggtttgtgtcaccggagccagcggcgccatcggatcatgggtggtcctactcctcctccagcgtggttacaccgtccatgccaccgtccaagatatcaaggatgaaaatgagacgaaacatttggaggaaatggaaggagcaaagagtcatctccatttttttgaaatggatcttcttgacatcg

SEQ ID NO: 198107 - DNA, 266 bp, Glycine max
tacggctgcgagaagacgacagaaggggacagaacaatactgcaatagagaaagaggcagatagaaaaaaagagcgacttttgagttcaaaagatgactaacttcccattgatcaacttggagaagctcagtggtgaggaaagaaacgataccatggaaaaaattaaagatgcttgtgaaaactggggattctttgagctggtgaatcatggcattcctcatgacatattggacactgtggagaggttgaccaaagagcactacag

SEQ ID NO: 198108 - DNA, 265 bp, Glycine max
tacggctgcgagaagacgacagaagggggcacaagtgagtttgttgatcgagataactagaaacagtgtgatgaaaatgaaggtccttgttttcttcgttgctacaattttggtagcatggcaatgccatgcgtacgatatgttccctctccgaatgaacactggctatggtgcccgtactccggaggtgaaatgcgcaagttggaggcttgctgtggaagcacacaacatctttggctttgagaccattcctgaagagtgcgtt

SEQ ID NO: 198109 - DNA, 264 bp, Glycine max
tctgcgagaagacgacagaaggggatatctattacatataaactaggtagcgtagttctattattactaaaacttgttacatcaagccaatggagacacacgctgagataagggtgtcaaagttcaagagggtttgtgtcttctgtgggagtagccctggcaaaaagagaagctaccaagatgctgccattgaacttggcaatgaattggtctcaaggaacattgatctggtctatggaggaggaagcattggtttaatgggtt

SEQ ID NO: 198110 - DNA, 266 bp, Glycine max
tctgcgagaaacgacagaaggggggaaactcgcctgaggattgctgttggagcagccgaagggcttgcatatctccatcatgactgcaatccacgaatagttcacagagacatcaagtcttcaaatattctgttggatgagaactttgaggcgcatctttctgactttggcacggcaaaatgtatctcaacagcaaaaactcacgcatcaacttatgtccttggagctataggctatattgaccctgagtatgcccgaacatctag

SEQ ID NO: 198111 - DNA, 262 bp, Glycine max
tacggaagacgacagaaggggattgagctttgttctcttttgtgttagtgagagaaagttctctctgcttctctctcttagactcaaaaccctattgcgtgctttgcaatcgaccccgattatggccaacagtaacctccctcgaagaatcgtcaagggaacgcagcgtttgctcagtgagccagcacctggaattagtgcgtgcccttcggaagacaatatgcggtatttcaatgcgatgatccttggcccaactcagtcg

SEQ ID NO: 198112 - DNA, 264 bp, Glycine max
tctcgagccgaatcggctcgagtacggctgcgagaagacgacagaaaggggtgcacaagtgaatttgttgatcgagataactagaaacagtgtgatgaaaatgaaggtccttgttttcttcgttgctacaattttggtagcatggcaatgccatgcgtacgatatgttccctctccgaatgaacactggctatggtgcccgtactccggaggtgaaatgcgcaagttggaggcttgctgtggaagcacacaacatctttggctt

SEQ ID NO: 198113 - DNA, 264 bp, Glycine max
tacggctgcgagaagacgacagaaggggacaacagcatcgtcggcggcgtaaccctccaacaacaacacttcctcgtcagaaaatgtctctggtggcgaacgaggatttccagcacattctgcgtgtgctgaacaccaacgtggatgggaagcagaagataatgttcgcaatgacctccatcaagggtattggaaggagattcgccaacatcgcttgcaagaaggctgatgttgacatgaacaaaagggctggtgagttgactg

SEQ ID NO: 198114 - DNA, 266 bp, Glycine max
tacggctgcgagaagacgacagaaggggcagaggctgtgtttgaccaggagtttatcaacgtgaaactatctgattacattgggaagaaatatgttgtgctcttcttctacccgttggacttcacctttgtctgccccacagaaatcactgctttcagtgaccgacatgcagagttcgaggcactaaatactgagatattgggtgtttcagttgacagtgtgttctcgcaccttgcatggatccaaacagatagaaagtcaggtgg

SEQ ID NO: 198115 - DNA, 260 bp, Glycine max
gctgcgagaagacgacagaaggggaggaaataaacagcttccatttctttgcggtcttcctttccttgagagaagagcatctgaaacggcacatttagttgcagggagatctgggaagcatctcttcctcatggacaatgatgatggaaagcgtcctctgctcgtgcgaatggttaatgactctgatgatttaaagtttatgttagtattaaagtatcagttaagctcatcaaatgctagtatttgtttttgtattgttg

SEQ ID NO: 198116 - DNA, 260 bp, Glycine max
acggctgcgagaagacgacagaagggggtgctgcagttcaagctgctatcttgagtggtgagggtaatgagaaggttcaggatcttctccttcttgatgtcacccctctctctcttgggttggaaactgctggtggggtgatgacagtcttgatccccaggaacactactatcccaacaaagaaagaacaggttttctcaacctattctgacaaccagcctggtgtgttgatccaggtttatgaaggtgagagaacaagg

SEQ ID NO: 198117 - DNA, 261 bp, Glycine max
tacggctgcgagaagacgacagaagggtatacttacgccatatcaatgacacgttccttctcttgaggagccaaagccataacaggcagaaaagagcttgcactttgcagctacaaacagttaaagaactagttgtaagtgcatcatacaatattaaatgaaatgcaatagtaaaaagcccgcctaccatgtagaaaccagccatatactccggagtggcaccaataggcacttgagaatcatacacaacaagtccaacct

SEQ ID NO: 198118 - DNA, 260 bp, Glycine max
acggagaagacgacagaaggggttgaagaagtagatggaaaagtggggcctggtgcactgtttgtaaaggtcagtatggatggtgcaccttacttaagaaaagtagacttgaagaattacaatgcgtatgccgacctatcttctgcgctggagaatatgttcagttgttataccataggttcttgtggatctcatggaaatctgggaggggaggtgctgaatgaaaccaagctgaaggatctgcttcatggatcagaata

SEQ ID NO: 198119 - DNA, 239 bp, Glycine max
gacacaccgtttgttctattcttaactcaacttctgctacccactctcttcttccaagtccaaccacgcttttctctacagtcatgggcaaggtcaagatcggaatcaacggatttggaagaattggccgtttggttgccagagtcgctctgcaaagagacgatgtggagctcgttgccgttaacgaccctttcattaccaccgattacatgacatacatgtttaaatacgacagtgtt

SEQ ID NO: 198120 - DNA, 274 bp, Glycine max
tgcgagaagacgacagaaggggagtgaagagatggaaggcatagtacacaggacagttgaagtgaatggcataaaaatgcatgttgctgagaaaggtgaaggtcccgtggtcttgttcctccacggcttcccggagctctggtactcctggcgccaccagattctggctctcagcaacctcggctaccgcgccgtggctccagatctccgcggctacggagacaccgaggcaccagcttcaatcagcagctacaccatcctccacttagtttct

SEQ ID NO: 198121 - DNA, 271 bp, Glycine max
gctgcgagaagacgacagaaggggagaacgaaaaagaatcatcgatggcagagacgaaagatggttcaggttcggagatgtctctgaaggatcagggcaacgagtttttcaagtcaggaaagtatctcaaagctgctgcactctacactcaagacacaaagctagacccttctaaccctaccctctatagtaatcgtgctgcagcactactgcaattggataagcttaatagagctctagatgatgcagagatgacaatcaaattaaaacc

SEQ ID NO: 198122 - DNA, 276 bp, Glycine max
gcgagaagacgacagaaggggggtgttggttcttcttttgctatctcaatctcaatggcttctaagatcttctatctattatctctcctcttgctagcacaccttcttcagccacacgtatttgttaaaggagatggcagtttgatagagaaaacctgcaagaacaccaagtactacaatctgtgtttctcctccctgaaatccaatccaagcagcgcaaacgcggacccaaagggcttggctgtgatcatggttgggattggaatggccaatgcc

SEQ ID NO: 198123 - DNA, 282 bp, Glycine max
tacggctgcgagaagacgacagaagggggcacaagtgagtttgttgatcgagataactagaaacagtgtgatgaaaatgaaggtccttgttttcttcgttgctacaattttggtagcatggcaatgccatgcgtacgatatgttccctctccgaatgaacactggctatggtgcccgtactccggaggtgaaatgcgcaagttggaggcttgctgtggaagcacacaacatctttggctttgagaccattcctgaagagtgcgttgaagcaacaaaggaata

SEQ ID NO: 198124 - DNA, 289 bp, Glycine max
gagaagacgacagaaggggaagcacaaaccttattcaacactcatatccttatcctgtttctttcaatggaagtcatttctgcttctagcttgaatcccaacgctccgatgttcgttccactcgcctatcggacggtggaggatttctccgaccagtggtgggacttcgttcactcctccccctggttccgcgactactggctccgcgagtgcttccaagatccccagttccaaaacgacgacgctttcgacttcgactttgacctagatctccaagatgaagatgaaa

SEQ ID NO: 198125 - DNA, 276 bp, Glycine max
tacggctgcgagaagacgacagaaggggcagacgcatcacacattatgatgcgtgttattaaccataaccatgtcagacgaggaacaccacttcgagtcaaaggctgatgctggggcatcaaagacatttccccagcaagctggaaccatccgcaaaaatggttacattgtcatcaagaacaggccatgcaaggttgtggaggtttccacttccaaaactggcaagcatggacacgcaaagtgtcactttgttggaattgacatattcactgggaa

SEQ ID NO: 198126 - DNA, 275 bp, Glycine max
acggctgcgagaagacgacagaaggggtgaagtgttattgtttcatcacgaagatatgggaattccctgggaaattgctaagcttggagttcgacagggtatgtggggagctgtcaagaagtttgatccaggactacggacatatgagaaacaaagggtttctggtaccccattgtcaccctgtgcacgtgctgctaagatcaacactaaagtaaccatggactatgtgaggtctctggaaaacacgaccagtgacttgttggagactggaaatc

SEQ ID NO: 198127 - DNA, 274 bp, Glycine max
cggctgcgagaagacgacagaagggggaagatacggaggctgctgctatcgaatactcggataaggaggaacatctttccaatggcgtcccaaattacccgtgagtggtctggaatcaatacattcgcacctgctacccagactaagttgcttgaactcttgggaaaacttaaacaagagaatgtgaactccttaactatacttgtgatgggaaaaggtggtgttggaaaatcttcaactgtgaactccatcattggggatagagtggtttcga

SEQ ID NO: 198128 - DNA, 277 bp, Glycine max
gctgcgagaagacgacagaagggggcacaagtgagtttgttgatcgagataactagaaacagtgtgatgaaaatgaaggtccttgttttcttcgttgctacaattttggtagcatggcaatgccatgcgtacgatatgttccctctccgaatgaacactggctatggtgcccgtactccggaggtgaaatgcgcaagttggaggcttgctgtggaagcacacaacatctttggctttgagaccattcctgaagagtgcgttgaagcaacaaaggaat

SEQ ID NO: 198129 - DNA, 288 bp, Glycine max
tacggctgcgagaagacgacagaagggggtccacccgttcgttagatctaacaaccacttatcccctttctccttctaacgagtgaggaaaaatggcgcgtaagaagatcagagagtatgactcaaagaggttgttgaaggagcactttaagagactctctggcaaggagttgccgatcaagtctgtccaatataccgcatcaactgatttcactgagctacaagagcaggaaccctggctttcatcttctaaattggttgttaaacctgacatgtcatttggaaagc

SEQ ID NO: 198130 - DNA, 251 bp, Glycine max
tacggctgcagaagacgacagaaggggacgttgaggttgctgagcgtggctccttctctgggaaggactaccaggaccctccaccagcaccactcattgatgctgaggagctcacaaagtggtccttttacagggctctcattgctgaattcattgccactttgctcttcctctacattactgtgctcacagtcatagggtacaagcaccagactgacctctacggaaatggtgaaatctgtggtggggtt

SEQ ID NO: 198131 - DNA, 271 bp, Glycine max
tacggctgcgagaagacgacagaaggggggatctagggttgctcaaacctaaaagactaaactcacgggtccatacgttttccttcatccagatctggcagactagtatccgatcctctgtcctctcgaagctttcatcgttcaacatattctcaccatctcagtcatgggcctgctatcttgttttaggtctaccgtcctgagaaaatgttccaaaggaagctctggcatgtcaagattcctgtatacgaacaattttcaacgaaacttg

SEQ ID NO: 198132 - DNA, 269 bp, Glycine max
tacggctgcgagaagacgacagaaggggaaggtgcaagagtttgttgtgagctataagctagtttatcgtgaggagaatatgaagttgtttgttttctttgttgctgcagtagttttggtagcatggccatgccacggcgcaggctaccaaaggttccctctccgaatgaaaactggctatggtgagcgttcttcggaggtaaaatgcgcaagtttgaggcttgctgtggaagcacacaacatccgagcctttaaaaccattcctgaag

SEQ ID NO: 198133 - DNA, 271 bp, Glycine max
cggctgcgagagacgacagaaggggacaacacagaacaaaaacaaagaaaaaaaaaaaacccttagccaacacaaccatcatggccacctctgctattcagcaatcagcattcactggtcaaactgctctgaagcagctcaatgagttcgtccgcaagaccggtggcgccggcaaaggtcgcactaacatgcgccgcaccgtcaagagtgctcctcagagcatttggtatggccctgaccgtccaaattactggggtccattctgggagca

SEQ ID NO: 198134 - DNA, 277 bp, Glycine max
tacggctgcgagaagacgacagaagggcaacataggtcatcgaaaggatctcgaagacccaccaacgcacgaaagccgggatctttcagaaaatggattcctattcgaagggtgcataaccgcatggataagctcacactaacccgtcaatttgggatccaattcggttccttaggaggtatcgggaaggaattttggaatgtaataatatcgattcatacagatacagaagaaagggttctctattgattcaaacgctctacctacgagataggga

SEQ ID NO: 198135 - DNA, 283 bp, Glycine max
agacgacagaaggggatgtatggaagaacggagagggtgagaagcgcgatgaagttggtggccaagatgaaagaaagagggtgcaaaccaaatgtgtggatctataactccttgatagacatgcatgggagggacaagaatttgaagcagcttgagaagctgtggaaagaaatgaagagaagaagggtagcaccggataaggtgagttatactagcatcattggtgcttatagtaaagcaggtgagtttgaaacctgtgtgaagtttttcaatgagtatagga

SEQ ID NO: 198136 - DNA, 270 bp, Glycine max
ggctcgagacggctgcgagaagacgacagaaggggtccccgcgccaactcaaacgcctccagcgcctactctccatgacgggggagtattccccgaggaacatcctcggcggccgctggagagaatatcacggcagcaacgactggaaacggatgttagaccctctagacgagaatctccggcgagaggtcgttcgctacggcgaattcgtccaagccgcgtatcaagccttccattcagaccccgccatgtcaacggaggagccgccac

SEQ ID NO: 198137 - DNA, 272 bp, Glycine max
tacggctgcgagaagacgacagaagggggacgcgtataaaaaaataaaatcgagatgctgctacgacgtggcgtccaaactaagccacacggctaataaatacggccggcacactttcactgcatcaagaaaggaagaaacataccgaatgagagcatcaaactcttcttctgcgatttccattgcgaacgttacttattcttcttccttctcttcattttcttcgctcttcgatcttcgtccggggactgctccgaataccaccaccacca

SEQ ID NO: 198138 - DNA, 258 bp, Glycine max
tacggctgcgagaagacgacagaagggggaacctttgcattctattcattcaagattcagcaagtgcgttttggaagcagagaccgaaatacttcgagatggcccgtacaaagcaaactgctcgtaagtcaactggaggaaaagctcccaggaagcagcttgcaaccaaggctgcacgtaagtctgcaccaacaactggtggtgtgaagaagcctcatcgttatcgccctggaactgttgctcttcgtgagattagga

SEQ ID NO: 198139 - DNA, 268 bp, Glycine max
tacggctgcgagaagacgacagaagggggcacaagtgagtttgttgatcgagataactagaaacagtgtgatgaaaatgaaggtccttgttttcttcgttgctacaattttggtagcatggcaatgccatgcgtacgatatgttccctctccgaatgaacactggctatggtgcccgtactccggaggtgaaatgcgcaagttggaggcttgctgtggaagcacacaacatctttggctttgagaccattcctgaagagtgcgttgaa

SEQ ID NO: 198140 - DNA, 271 bp, Glycine max
acggctgcgagaagacgacagaagggggcagccaaagaaaagaaaatcctcaattttctgagcagccaaacactctctctctgtctctcgaaaattctcagtttgcagagaaaatctgaatcatgtcgtggcaagcgtatgtcgacgatcaccttctgtgtgacatcgaaggtaaccacctcactcacgctgctatcatcggccaagacggcagcgtttgggctcagagcaccgacttccctcagttcaaacctgaggagataactgccat

SEQ ID NO: 198141 - DNA, 267 bp, Glycine max
  unsure (1)..(267): unsure at all n locations
acgggacgacagaaggggagagtggtggggtgtgcagaagagcgtcgcagttgtaaccctaatcagaagaagcgcacttcaagcgagtgacagccaccagccatgggtcgtatgcacagccgcggtaagggtatatcctcttctgctttgccctacaaaaggacacctcctagctggctcaagatctcttcgcaagatgtcgaaganaatatctgcaagtttgcgaagaaaggtttgaccccgtctcagattggtgtcattctcaga

SEQ ID NO: 198142 - DNA, 280 bp, Glycine max
acggctgcgagaagacgacagaagggggcgcacccagagaggaagcttagagagagagagagagagagagagagagaggagagagtattggcgcttcatcaagatgggtatctctagggattccatgcacaagacgcgtgccactggtggcaagaaaaagtgctggagaaagaagagacagtatgagcttgggcgtcaggcagcacacaccaagttatcacgcaacaagactatcaggaggattcgtgttagaggtggcaatgttatatggagggcattg

SEQ ID NO: 198143 - DNA, 282 bp, Glycine max
acggctgcgagaagacgacagaaggggagtcttaccacacatccgccgcaacatcctcatctccgctacacctactttattctcatgttggctcttgaccgcccaacattctgttccgtacaaaatcgccggtcttaccgtagtccgataaaactttccctttagcttgatcggtacctttgcatcacataacacccccgatgcttttctccatttcatccatcctgcttgaatgcgatgattcacatccccttcaatttccccatcatcctgtattacaga

SEQ ID NO: 198144 - DNA, 252 bp, Glycine max
tacggctgcgagaagacgacagaagggtggaaatagaagagaaaattaacaaaatcaaatggtgccaaacagccaatggtgctttgttccttctatccacaaatgataaaaccatcaaattttggaaggtaaccagccatgagaccagtttgatggctcgatgccgtagagtatatgcccatgctcatgattatcatattaattctatttcaaataacagcgatggcgaaacttccatatcagctgatgatt

SEQ ID NO: 198145 - DNA, 267 bp, Glycine max
acggctgcgagaagacgacagaagggggaacaagactatgacatagggtccacaataagagacaagattattccccatgctgtatcatggtttactggggaggccattcagggggacgagtttggagatctggaggacgatgaggaagaatgaagatattgaagaggacgatgatgaagatgaagaggacgatgacgatgatgatgatgacgatgatgatgaggaagagagcaagaccgaaaagaagtcatcagcacctaagaagag

SEQ ID NO: 198146 - DNA, 266 bp, Glycine max
acggctgcgagaagacgacagaagggatcagtggtgccccccaggataacaacataatgctgtggaatgctgtcatatttggtcctgatgatactccatgggatggaggcacgttcaagttgacactccaatttactgaggactatccaaataaaccaccgactgtacgatttgtgtctcgcatgtttcatccaaatatttatgctgatggaagtatttgtttggatatattacaaaatcagtggagtcctatttacgatgtggct

SEQ ID NO: 198147 - DNA, 267 bp, Glycine max
tacggctgcgagaagacgacagaaggggactgatgaagaatttgctagagaaacgattgctggtgttaatccaaatgtcattaagattcttgaggagttcccaccacgtagcaagctagattctcaagcctacggtgatcatacctctataataacaagacaacacttggagcctaacttgggtgggctcaccgttgagcaggctatccagagcaagaagttgttcatcttagatcaccatgactatctcattccatacttgaggaa

SEQ ID NO: 198148 - DNA, 260 bp, Glycine max
  unsure (1)..(260): unsure at all n locations
acggctgccagcagacgacagcagggggatcttctcacgttcatttctacacatccctagctatantgttccgtcgttgacgatggcgtttcgggtgcgaaccctgacctccgctctctctttcttctctctctcttgtccatcgcttccgccaatgtcttcttcgaagagcgtctcgacgacgggtgggataatcgatgggttaaatcagattggaaaaaagattagatcgtggctggggagtggaaccacacctctgg

SEQ ID NO: 198149 - DNA, 268 bp, Glycine max
tacggctgcgagaagacgacagaaggggggagatttcaaacacaacttcgcttattaaatctcttcttccaattccttctttcattcattcccaggctgagatggcagcggcaccagcagctaccttcactattggaaccaccggttccctaggccaaagaggaaactcgcttcctcaattaaagtcttctgggtcgaaattcaactcccagaatcatttgaagagcttctgcggcctcaaggccatgtcatccgtgagatgtgagtc

SEQ ID NO: 198150 - DNA, 274 bp, Glycine max
acggctgcgagaagacgacagaaggggacacacacgtaacttcatctgggttgcagggaaaaagaaaaataaaatgggttccgataataccaacttggagttcttgaaggagatcggtttgggctcctccaacattggttcttacattaatggccaatggaaagccactggttcttctgtcacttctgttaatccctctaacaatcagagcatagctcaagtgactgaagcgactttgcaagattatgaggagggattgcaagcttgcagtgaa

SEQ ID NO: 198151 - DNA, 268 bp, Glycine max
gggcacttcaattgcaatcaaattagttcattctctttgcgcagttccctacctctcctttcaagatgcagatcttcgtcaagaccctcaccggaaagaccatcacccttgaggtggaaagctctgacaccatcgacaacgtcaaggccaagatccaggacaaggaaggaattcccccggatcagcaacgtctcatcttcgccggaaagcagctcgaggacggccgtaccctcgccgactacaacatccagaaggagtcaacccttca

SEQ ID NO: 198152 - DNA, 278 bp, Glycine max
gctgcgagaagacgacagaaggggatcgattgctacatccaaaccctcgccaaggttctcggaagcgaggaggaagctaagaagaagatttacagtgtttcatgtgagaggtactttggtttcgggtgcgaaattgatgaagagacttctaataagctcgaagggttgcctggagttctgtttgtgctaccggattcgtatgttgatccagagaacaaggactatggcgctgaattatttgtgaatggagagatcgttcagagatcacctgaaagaca

SEQ ID NO: 198153 - DNA, 281 bp, Glycine max
acggctgcgagaagacgacagaagggggcgcattgaacgaaaattagggtttgtagtgtagcaggaacaagcagcaatggcgccgaaggtaacacgcaaggttagcagaaaccccgaattgataaggggaattggaaagtactcgaggtcgcagatgtaccacaagaggggcatttgggctatcaaggccaaaaatggtggcgttttacctcgccacgaccctaaacccaaacctgaaacacccgctgaaaaaccacccaaattttaccctgctgatgata

SEQ ID NO: 198154 - DNA, 255 bp, Glycine max
cgagaagacgacagaagggggttctagtgtgtgattgtttgttgttgtaactcgttcttcttcttttgttgttctgtgtttgtgtttgttttttctctcacctgaaaatgtcttgctgcggtggtaactgtggttgcggaagctcctgcaagtgcggcaacggctgcggaggctgcaagatgtacccagacttgagctacactgagtcaaccaccaccgagaccttggtcatgggagtggcacctgttaaggctc

SEQ ID NO: 198155 - DNA, 263 bp, Glycine max
acgacagaagggggcacaagtttgttgagatagctagaagcaataagatgaaaatgaaagtgcttgttttgtttgttgctacagttttggtagcatatgaatgccatggctcagactaccagaagttccctctccaaatgaaaactgggtttggtgggcaatacagcaatgaggtggcatgtgccagttggaggcttggcgtggaagcaaacaacgtagtcaagtggaatactgttcctgcagcttgcggagagtacatagct

SEQ ID NO: 198156 - DNA, 266 bp, Glycine max
gcgagaagacgacagaaggggacagcgaaacagagagtgatttcagtgagtgatcggtgttcacttgatctcatcataatcgtcagcgtcaattgaagaagatgccgatcagaaacatcgccgtcggaaggcctgaagaggcgactcaccccgacacgttgaaggcggctttggctgagttcatctcgaccttcatcttcgtgttcgccggctcaggctccggcatcgcctacaacaagctcaccgacaacggcgctgccacccct

SEQ ID NO: 198157 - DNA, 266 bp, Glycine max
tacggctgcgagaagacgacagaagggggcacttcaattgcaatcaaattagttcattctctttgcgcagttccctacctctcctttcaagatgcagatcttcgtcaagaccctcaccggaaagaccatcacccttgaggtggaaagctctgacaccatcgacaacgtcaaggccaagatccaggacaaggaaggaattcccccggatcagcaacgtctcatcttcgccggaaagcagctcgaggacggccgtaccctcgccgact

SEQ ID NO: 198158 - DNA, 282 bp, Glycine max
acggctgcgagaagacgacataagggcaggaataaaagtagtagatcctatagctccttatcgtcgtggaggaaaaataggacttttcggtggagctggagtgggtaaaacggtactgattatggaattgatcaataacattgtcaaagctcatggaggtgtaactgtatttggcggagtacgtgaacgtactcgtgagggacatgatctttatatggaaatggcagaatctggagtaattaatgaacaatatattgcagaatcataagtagctctagtata

SEQ ID NO: 198159 - DNA, 279 bp, Glycine max
tacggctgcgagaagacgacagaaggggggaaccatcttgccagcctatcacgaaaatggaatttgaatttgaaaggcgaagagttacaaaggaagaaattcgtgagctgattttccgtgagattctagagtatcaccctcaactattgaaggactacatgaatggaacagagagaactaattttctttatccaagtgctgttgatcaattcagaaagcagtttgctcatttagaggaaaatggtaaaaatggtcctgttatgccacttgacagaaagc

SEQ ID NO: 198160 - DNA, 273 bp, Glycine max
acggctgcgagaagacgacagaaggggaactaaaggagagtgcaattacgtagtgtgtgggagacaaagagagatggctaagtggtgtatgttggtgttggttcttgctctagctctggctgtggccacaagtgccagagatgcacccgaagatgttggtctcaaggaccagaagaacttcatcagctatgctggagttggtggctattcaggaattggaagcaatggactaccttttggaggtgccggaataggtggtggcaccacgggata

SEQ ID NO: 198161 - DNA, 279 bp, Glycine max
tacggctgcgagaagacgacagaaggggcagacgcatcacacattatgatgcgtgttattaaccataaccatgtcagacgaggaacaccacttcgagtcaaaggctgatgctggggcatcaaagacatttccccagcaagctggaaccatccgcaaaaatggttacattgtcatcaagaacaggccatgcaaggttgtggaggtttccacttccaaaactggcaagcatggacacgcaaagtgtcactttgttggaattgacatattcactgggaaaaa

SEQ ID NO: 198162 - DNA, 277 bp, Glycine max
tacggctgcgagaagacgacagaagggggcatcaattcaaaatatatcatcaattataagcatgggtttgtggaacacaacgaatgcagtgtcttgccgctttcacaagtttggtgatgaccaaaagaatctggtcttccaaggtgatgccacgtcttcttccaggggcatggaactcacaaagttagacggtggaggaaaaccagtgggtggcagtgtggggagagtgttatactcttctccagtgcacctttgggaaagctctacagtggtcgca

SEQ ID NO: 198163 - DNA, 276 bp, Glycine max
aagacgacagaagggggggtcattactcattacaagctagtgttggtaagacttttgcatttagtttggggaattgcaatattggtcagctagctaggaagtggtgttgtttttgtgttagtgctatgggaaggcaaccctgctgtgacaaacttggggtgaagaagggtccatggactgctgaggaagacaagaagctcatcaacttcattctcaccaatggccaatgctgttggcgcgccgtgccaaagctcgctggcctcaagcgctgtggca

SEQ ID NO: 198164 - DNA, 277 bp, Glycine max
tacggctgcgagaagacgacagaagggggcacaagtgagtttgttgatcgagataactagaaacagtgtgatgaaaatgaaggtccttgttttcttcgttgctacaattttggtagcatggcaatgccatgcgtacgatatgttccctctccgaatgaacactggctatggtgcccgtactccggaggtgaaatgcgcaagttggaggcttgctgtggaagcacacaacatctttggctttgagaccattcctgaagactgcgttgaagcaacaaag

SEQ ID NO: 198165 - DNA, 275 bp, Glycine max; identical to SEQ ID NO: 198126

SEQ ID NO: 198166 - DNA, 279 bp, Glycine max
acggctgcgagaagacgacagaaggggaacacaaacagcgcgagacagaggcacagagagaaaatggtttcggggtcagggatctgtgccaagagggtaattgtggacgcacgacaccacatgctggggaggctggcatcgatcgtggcgaaagaacttctgaatgggcagaaggtggtggtggtacgctgcgaggagatttgcatctccggtgggctcgtcgggcagaagatgaagtacttgcgtttcctccgcaagcgcatgaacaccaagccctct

SEQ ID NO: 198167 - DNA, 277 bp, Glycine max
tacggctgcgagaagacgacagaaggggatatttgctggtaaacaacttgaggatggaagaaccttgctgattacaatattcagaaggagtctaccttacacttggttcctcgtttaagaggtggcatgcagattttcgtcaagactttgacgggaaagaccatcaccttggaggtggagagttcagataccatagacaatgtgaaagccaagattcaagataaggagggtatccccccagaccagcagaggcttatctttgctggtaaacagcttg

SEQ ID NO: 198168 - DNA, 268 bp, Glycine max
acggctgcgagaagacgacagaagggcaaggatggaacaaaagaagtttgtggcactattaatggtggttgtggtaatggcttcttctatgtggaaagggtccaaaggtcttagtctctgtaacatggatgaaggtggattggaggcttgcaagccctcagtgactcagccaaacccagttgatccatcccctgattgctgcaaggctttggctggtgctgacttgaaatgcctttgctcttacaagaactcatcagagttgcctttt

SEQ ID NO: 198169 - DNA, 272 bp, Glycine max
gaagacgacagaagggtacggctgcgagaagacgacagaagggaaggggtctgcgcctatcaacctttcagatcgtctgcatcaagttcttcggtgggctcttgggtctgttgagatttttttcagcagacattgtccaatccggtatggttatggtggtgggttgaaatggttggaacgattttcctacattaactcagttgtatatccctggacttccctcccactgcttgtctactgtactttaccagccatatgccttctgactggaa

SEQ ID NO: 198170 - DNA, 276 bp, Glycine max
acgacagaagggggaaaaagggagtgcctgataacccataaccgaccgcaccaccgttttcctttgctttgcgttctacaatgtcgaaaacctcagagattattacatgcaaaggaaaacctgtgactgtggaagagatacaagtagaccctcccaaagccaccgaagttcgagttaagatgctttgtgccagtatatgctccacagacatctctagcacaaaaggattcccacataccaattttcctatagcacttggacacgaaggagttggta

SEQ ID NO: 198171 - DNA, 265 bp, Glycine max
gagaagacgacagaaggagacaccaacaccaaaacaaacccactaagatggcttcctttgtatccttcctagtgctgcttcttgcagcccttatcctcatgcctcaagggcttgctacttactacaaaccaattaagaagccaccagtgtacaagcctccagtgtacaagccaccagtgtacaaaccaccggtttataagccaaaaccaccggtttacaagccgaaaccaccggtttacaagccaccatataagaagccaccata

SEQ ID NO: 198172 - DNA, 275 bp, Glycine max
cgagaagacgacagaagggcggacactacaatggaaatgtgttgaatcaagaatagacagtaaacgtctttattatggacgctttattctgtctccacttatgaaaggtcaagccgatacaataggcattgcaatgcgaagagttttactcggagaaatagagggaacatgtatcacacgtgtaaaattagaaaaaataccacatgaatattctaccataataggtattgaagaatcagtacatgaaattttaatgaatttgaaagaaattgtat

SEQ ID NO: 198173 - DNA, 273 bp, Glycine max
acggctgcgagaagacgacagaagggggcacaagtgagtttgttgatcgagataactagaaacagtgtgatgaaaatgaaggtccttgttttcttcgttgctacaattttggtagcatggcaatgccatgcgtacgatatgtcccctctccgaatgaacactggctatggtgcccgtactccggaggtgaaatgcgcaagttggaggcttgctgtggaagcacacaacatctttggctttgagaccattcctgaagagtgcgttgaagcaaca

SEQ ID NO: 198174 - DNA, 272 bp, Glycine max
ggctgcgagacgacagaagggggggatttgtcaggtagttggggatgatctcttgatgtcaaatgcaaaacgcattgagagagcaataactgagtctgcttgtaatgcccttcttctgaaggtcaaccaagttggaactattacagaggtcattgaagtggtgaagctggcaaaagaagcacattggggggtggtaacgtctcatagatgttgagaaactatagactctttcattgctgatttatctgttggccttgcttctggtgtaatta

SEQ ID NO: 198175 - DNA, 274 bp, Glycine max
cggattggcattcttggcattgcttgggcctttggtggcatgatcttcatccttgtttactgcactgctggaatctccgggggtcacataaacccagcagtgacatttgggctcttcttggctcgcaaggtatctttgattagagccataatgtacatggtggctcaatgcttgggagcctatgtggagttgggttggttaaggcattccaaaaggcatactacaacaggtatggtggtggagccaatgaactcagtgaagggtacagcacagg

SEQ ID NO: 198176 - DNA, 274 bp, Glycine max
tacggctgcgagaagacgacagaagggggcacttcaattgcaatcaaattagttcattctctttgcgcagttccctacccctcctttcaagatgcagatcttcgtcaagaccctcaccggaaagaccatcacccttgaggtggaaagctctgacaccatcgacaacgtcaaggccaagatccaggacaaggaaggaattcccccggatcagcaacgtctcatcttcgccggaaagcagctcgaggacggccgtaccctcgccgactacaacatc

SEQ ID NO: 198177 - DNA, 279 bp, Glycine max
cagtcgactcgaccgctgcgagaagacgacagaagggtccgatggatggaccagtttgctttgtacattggatccgatgacagccatgtccttccatgacgaaaccctgccagcagatggtgcaaaagtggctcatttctgctcaatgtgtggccctaaattctctctatgaagataacggaggatgtgaggaagtatgctgaggaacatggctatggaactgatgaagctttgcagcgtgggatggatgctatgagtgctgaatttcaagctgccaag

SEQ ID NO: 198178 - DNA, 272 bp, Glycine max
acggctgcgagaagacgacagaagggatcagcggtgccccccaggataacaacataatgctgtggaatgctgtcatatttggtcctgatgatactccatgggatggaggcacgttcaagttgactctccagtttactgaggattatccaaataaaccaccaactgtgcgatttgtgtctcgcatgtttcatccaaatatttatgctgatggaagtatttgtttggatatactacaaaatcagtggagtcctatatatgatgtggctgctata

SEQ ID NO: 198179 - DNA, 268 bp, Glycine max
tacggctgcgagaagacgacagaaggggaagaagaacaagctgtgattggattatggagtggcattgcttggttggtagggatgactgtgttcattgctgtgttgtctgaatatgtggtggatacaattgaggatgcatcagattcgtggggtttgtctgtgagctttctcagcataatcttgctaccaatagttggaaatgcagctgaacatgcaggagcaatcatatttgctttcaagaacaagctggactttccattgggtgttg

SEQ ID NO: 198180 - DNA, 266 bp, Glycine max
acggctgcgagaagacgacagaaggggaaccgctaatccattttgttcagtgtgggacatagaagctgttcttgtgtgtctgagagagagagatggagaaagaaacagagatgaagcaatccaagttcaagaggatttgtgtcttctgtggcagtagtccagggaacaaaactagttataaggacgctgctattgagcttggaagagaattggtgtcaagaaatattgatctagtatatggagggggcagcattggtttgaggggg

SEQ ID NO: 198181 - DNA, 272 bp, Glycine max
ccactcgcaagcttcttcgcttcaatgctctcgctaaacctcatgctcacacacgtgcttcttcttcccctgtcgctgctgttcttctcgaacgaacctccaatctgcttgttacaaaagaggaagggttggagctctatgaagatatgatattagggaggttctttgaggacaagtgtgctgagatgcattataggggcaaaatgtttggttttgttcacttgtacaatggccaagaggctgtgtcaactgggttcatcaagcttctgaag

SEQ ID NO: 198182 - DNA, 271 bp, Glycine max
tacggctgcgagaagacgacagaagggactcatgcggttgttgagccattcgtcatagcaacaaacaggcatctgagcgtggttcaccctatttacgaacttttgtttcctcactatcgtgacaccatgaacattaattcacttgcccgcaaatccttggtcaatgcagacggtattatagagaaaacattcttgtggggtaggtactctttggaaatgtctgctgttatttacaaggactgggttttcactgatcaagcattgcctaatg

SEQ ID NO: 198183 - DNA, 270 bp, Glycine max
acggtgcgagaagacgacagaaggggaagaagaagatggggaaacaggttgtgccggtgaaatcagtggtctacgcgctttcccctttccagcaaaagattatgccgggtctctggaaggacttgcccacgaagattcaccacaaggtctccgagaattggatcagcgccactcttttgctcggtcccctcgtcggcacctacgcgtatgttcaaaactacctggaaaaggagaagctggctcacaggtactgagctcttgcaagagctg

SEQ ID NO: 198184 - DNA, 265 bp, Glycine max
agaagacgacagaagggggccgagaaatggggtctgcagtattatcacaaacaataccagcagtcaaagtttcaaggctcttcatataccctatcaagtcatgccgtggaatttctgtttcctatgcccccctcactcctgctggacttcgatgggatcgagaatgggtggtggtgaattcccaagggagggcatgcactcaaagagttgatccaaagcttgctttggttgaggttgaattgccaaatgatgcacttgttgaaga

SEQ ID NO: 198185 - DNA, 268 bp, Glycine max
acggctgcgagaagacgacagaagggggagcgaagaagatattagggtttttgagtgcggtgcggcgatcctagcactctcttctgcagctttcgccgacagcttcattcaccatggctgagcaaaccgagaaggcttttttgaaacaaccaaaagtgtttctcagctcgaagaaaactgggaagggaaagagacccggaaagggtgggaaccgcttttggaaatccattgggcttggatttaagactcccagggaagccatcgaagg

SEQ ID NO: 198186 - DNA, 268 bp, Glycine max
tgctgcgagaagagacagaaggggaagaaaggaagaaacataccgaatgagagcatcaaactcttcttcttcgatttccattgcgaacgttactttttcttcttctttctcttcattttcttcgctcttcgatcttcgtccggggactgctccgaataccaccaccaccactcgccgatggccacgatcggaggcttacacgactcccaaggctctcaaaacagcgtcgaaaccgaagccctcgctcgattcgccgtagacgaacaca

SEQ ID NO: 198187 - DNA, 269 bp, Glycine max
acggctgcgagaagacgacagaagggggaagtgatatagcgttgccattctcatcctcttctttctctctctaccattgccatggatccctacaagcaccggccatccagcgccttcaattctcccttctggactacaaattctggtgctcctatttggaacaacaactcctctttaaccgttggagctagaggtccaattctgctggaggattatcatcttgtggagaagcttgcaaattttgatagggaacgtatcccagaacgtgt

SEQ ID NO: 198188 - DNA, 266 bp, Glycine max
acggctgcgagaagacgacagaagggggcgtcttcgagtttcacagcgaagtcgtaggagggtttcaaaagatggagaacatgcagagcttctggcaattgggcgatgaactccgtggacactcaaaagcatcggaggatcacaaatggttaatggttgcttcgaaattggcggaacagacaagattgaggggggagcgtgtgaacaaccttgatctttcaaagggccccattgaaacaaggtcaagggataaatttgggttccag

SEQ ID NO: 198189 - DNA, 265 bp, Glycine max
gacgacagaaggggatgacattgcattcaatggggaaaacccaaggcctggagtcatcattaacaaaccagatggaggtgatgtttatgaaggagttccaaaggattacaccggcgaagatgttactgttggtaacttttttgctgctttacttggaaacaagtcggcacttactggtggctgtgggaaggttgtggacagtggacctgatgatcatatatttgtatactatactgaccatggaggtccaggggtgctcgggatg

SEQ ID NO: 198190 - DNA, 236 bp, Glycine max
acggctgcgagaagacgacagaagggggttggccaaggtttgagagatgtggatattaaaaattatatcaaagttgagaaggtcccaggtgggcagctagaagattcaagagttctcaagggagttatgataaacaaagatgtggttgcccctggcaaaatgaggagaaagattgttactccacgtatcattcttcttgattgtccccttgagtataaaaagggtgaaaaccaaac

SEQ ID NO: 198191 - DNA, 264 bp, Glycine max
tacctgcgagaagacgacagaagggggcacaagtgagtttgttgatcgagataactagaaacagtgtgatgaaaatgaaggtccttgttttcttcgttgctacaattttggtagcatggcaatgccatgcgtacgatatgttccctctccgaatgaacactggctatggtgcccgtactccggaggtgaaatgcgcaagttggaggcttgctgtggaagcacacaacatctttggctttgagaccgttcctgaagagtgcgttg

SEQ ID NO: 198192 - DNA, 260 bp, Glycine max
tctcgagccgaatcggctcgagtacggctgcgagaagacgacagaatggggcacaagtgagactgttgatcgagataactagaaacagtgtgatgaaaatgaaggtccttgttttcttcgttgctacaattttggtagcatggcaatgccatgcgtacgatatgttccctctccgaatgaacactggctatggtgcccgtactccggaggtgaaatgcgcaagttggaggcttgctgtggaagcacacaacatctttggc

SEQ ID NO: 198193 - DNA, 266 bp, Glycine max
tacggctgcggaagacgacagaagaagaagaagaggacgatgtaattattgaatccgatgttgagcttgagggtgaaacctgtgagcctgatgatgatcctccacagaagatgggagacccctctgtcgaggttactgaagagaatcgtgatgcatcgcagatggccaaaattaaagccatggatgctatttctgaaggtaagttggaggaggcgattgagaacttaacagaagctatttcactcaatcctacctctgccataatg

SEQ ID NO: 198194 - DNA, 264 bp, Glycine max
acggctgcgagaagacgacagaagggcagagaggtacaacgaactatgttagaattgcttaatcagcttgatggttttagcagtgatgaccggatcaaggtgatagcagcaactaaccgtgcagatattcttgatcctgccctgatgcgttctggtcgtttggatcgtaaaattgagtttccacacccaagtgaagaagcaagagctcgaattctacagattcattcaaggaagatgaatgttcacccagatgtcaactttgaa

SEQ ID NO: 198195 - DNA, 263 bp, Glycine max
acagaaggggacagctattcctcttaagcttgctactgagtttccacactgcataccttatgtcttccgaattcgaagttaatttgcaagatggctaaggaaaaggctcagatcaacattgtggtggttggtcatgtggaccctgaggaggcaaccaccattaacgagctgaagaagcctgttgtggagaaagaagctccagggcatgccatatgagggcatgcacgtacggcctcggaggggaaccagaaaattatgttaac

SEQ ID NO: 198196 - DNA, 264 bp, Glycine max
tactcgagccgaatcggctcgagtacggctgcgagaagacgacagaactgggcacaagtgagactgttgatcgagataactagaaacagtgtgatgaaaatgaaggtccttgttttcttcgttgctacaattttggtagcatggcaatgccatgcgtacgatatgttccctctccgaatgaacactggctatggtgcccgtactccggaggtgaaatgcgcaagttggaggcttgctgtggaagcaccaacatctttggctttg

SEQ ID NO: 198197 - DNA, 262 bp, Glycine max
tctcgagccggctcgagtacggctgcgagaagacgacagaagaggacgcttagtgaggtgcaagttaatttacttgaacaaaactttggaaatgaacgcaaacttgagtccgaaagaaaggataggctggcaatggagcttggtttggaccctcgacaagttgctgtgtggtttcaaaacagaagagcccgttggaagaacaaaaagttggaagaagagtactccagccttaaaaaaaatcatgaagccaccttgcttgaga

SEQ ID NO: 198198 - DNA, 203 bp, Glycine max
tacggctgcgagaagacgacagaagggggcgcattgaacgaaaattagggtttgtagtgtagcaggaacaagcagcaatggcgccgaaggtaacacgcaaggttagcagaaaccccgaattgataaggggaattggaaagtactcgaggtcgcagatgtaccacaagaggggcatttgggctatcagggccaaaaatggtggc

SEQ ID NO: 198199 - DNA, 225 bp, Glycine max
tacggctgcgagaagacgacagaagggggcacaagtgagtttgttgatcgagataactagaaacagtgtgatgaaaatgaaggtccttgttttcttcgttgctacaattttggtagcatggcaatgccatgcgtacgatatgttccctctccgaatgaacactggctatggtgcccgtactccggaggtgaaatgcgcaagttgggggcttgctgtggaagcaca

SEQ ID NO: 198200 - DNA, 247 bp, Glycine max
tacggctgcgagaagacgacagaagggggggaaccctaattctgcgaggtgagtgaaaatggcggtacccttgctctccaagaagatcgtgaagaagcgcgtcaagaagtttatacgcccccagagtgatcgcaagatctccgtcaagccaagctggcgcagacccaagggtattgattctcgtgtcaggagaaagttcaaaggatgcactttgatgcccaacattggttatggctcagacaggaaa

SEQ ID NO: 198201 - DNA, 259 bp, Glycine max
tctcgagccgattcggctcgagtacggctgcgagaagacgacagattggcacagggagttatttgaagaagaagatgacggtaaagatggcgaggatggttcagaagaacaagctgtgattggattatggagtggcattgcttggttggttggaatgactgtattcattgctgtgttgtctgaatatgtggtggatacaattgaggatgcatcagattcatggggtttgtctgtgagcttcctaagcataatcttgctg

SEQ ID NO: 198202 - DNA, 240 bp, Glycine max
atgctgcgagaagacgacagaagggggtggtagtgtggcagcgacacgtatcaacttcaataatcgcatcgcagaagcagtttccggtgcatctcatcgtctccgaaaatgaacgacgcagatgtctcgaagcaaatccagcagatggtgcggttcatccgccaggaagctgaggaaaaggccaacgagatctctgtcttcgccgaagaggatttcaatatcgagaagctgcagttggtc

SEQ ID NO: 198203 - DNA, 246 bp, Glycine max
acggctgcgagaagacgacagaaggggaaatacaacacaaacaattaacacacacaaacagaggctacgtacgatcaaattaattaagatggcggaagtgaggaacaaacaagtggttctgagggactatgtgagtggttttcctaaggaatccgacatgaacatagttgaaggaaccacaatattgaagcttccacaaggttccaatgatgtgcttctaaaaaatctctacctttcctgtgaccc

SEQ ID NO: 198204 - DNA, 250 bp, Glycine max
gctgcgagaagacgacagaaggggagaacgaaaaagaatcatcgatggcagagacgaaagaaggttcaggttcggagatgtctctgaaggatcagggcaacgagtttttcaagtcaggaaagtatctcaaagctgctgcactctacactcaagccatcaagctagacccttctaaccctaccctctatagtaatcgtgctgcagcactactgcaattggataagcttaataaagctctagatgatgcaga

SEQ ID NO: 198205 - DNA, 261 bp, Glycine max
cacggctgcgagaagacgacagaaggggatctccctgattaaaggttatctctaaggtcctaaacaatcctctttcaaaaacataccgagaacagtgtggcaatgacgagaccatcattggtagagtctctagttcttcaactccatgagatctcagctgtcaaatttggcaacttcaagctcagatctggcatcttctcaccaatctacatagacctccgcctcatcatatcttacccttctctcctccaacagatctct

SEQ ID NO: 198206 - DNA, 237 bp, Glycine max
ctgcgagaagacgacagaagggggagagaaaggatagggtgtgagaagagaatggagagtaaagaggaagatgttaacgttggagcaaacaagttctcagaaaggcaaccaattggtacagcagctcaaggtggtggtgacaaggactacaaggaggcacccccagctcctttgtttgaacctggtgagctcaaatcatggtccttctacagagctggaattgctgagtttgtggca

SEQ ID NO: 198207 - DNA, 269 bp, Glycine max
cgagaagacgacagaagagaacaaagaagagggtcagagtgagaaagagagagagagagagagatactgagagaaattcgcaaacctaatttcggaaagatcggcgatggctgcctccaaggatcgcgagaaattcggctacatcgccaagtgcgccgaacaggccgagcgatacgaagagatggtggaatcaatgaagaacgttgcgaatctcgacgttgaactgactgtggaggagcggaatttactttctgctgggtacaagaatg

SEQ ID NO: 198208 - DNA, 224 bp, Glycine max
acggctgcgagaagacgacagaaggggacctcattctgcttggattgggtccagacggccacattgcctctttgtttcctaaccactcagcactcaatgaaagggaagaatgggtaactttcattagcgacttcctcaaacccccacctgagagaatcacattcaccttgcctgtcatcaattctgcatccaatgttgcagtagttgtcaccggtgaaagcaaa

SEQ ID NO: 198209 - DNA, 249 bp, Glycine max
agaagacgacagaaggggaagcacaacatctctatcgagtaaattaactatgaagcctaccctactattatccctttccttcctgcctctctttgctttcctggctctttcagaagatgttgaacaagttgtggacataagtggcaaccccattttcccaggtggcacatattacattatgccatcaacttggggcgctgccggtggtggattgaatctggcccggacaggattctcatactgcttagt

SEQ ID NO: 198210 - DNA, 231 bp, Glycine max
tacggctgcgagaagacgacagaagggggccccagagaggaggaagctttgagagagagagagggaagagggagagtgttgacgctccatcaagatgggtatttctagggattccatgcacaagaggcgtgccactggtggcaagaagaaggcatggagaaagaagagaaagtatgagcttgggcgtcaggccgcaaacaccaagttatcaagcaacaaaactatccggag

SEQ ID NO: 198211 - DNA, 246 bp, Glycine max
acggctgcgagaagacgacagaaggggactcacaactccataacacaaggcagaaagcaagctcatcctagagttttaaaaatggcagcagcctcctccatggctctctcttccccatccttggctggcaaggccgtgaagctgggcccatcagcccccgaagtcgggagggtcagcatgaggaagaccgtcaccaagcaggcctcctccggaagcccatggtacggcccagaccgcgtcaagtac

SEQ ID NO: 198212 - DNA, 264 bp, Glycine max
  unsure (1)..(264): unsure at all n locations
tacngctgcgagaagacgacagaagggggctcataatagcaatatttgcccttagcagtaacaaaattgccgtggtcaagtattctctgttggggtctattctttcagaccttcttctggatcttgggacctctctattatgtggtggcattgcaaacgttggagtggaacaaaaatatgatagaagacaagcagatgtgaactcacttatgctgttgttgggattgttgtgctacttgcttccaatgctgttcaaatacagtg

SEQ ID NO: 198213 - DNA, 123 bp, Glycine max
aactttgctacaatgtcctcgtcaactccaacggtgataacatgaggtgaaaaagccagtcctgcagaactgttcatccattcacctagagtggcaagctgttgcttccttccacttccaggt

SEQ ID NO: 198214 - DNA, 247 bp, Glycine max
acggctgcgagaagacgacagaagggggcagttcaaagcgaagaaagattcgaaacgaagaaagaaagcgttgtgaagaatggcggaagagggacaagtgatcggtgtccacagcgtagaggagtggaaggaacatctcaagaagggagaagagtccaagaaattgattgtggtggattttactgcttcttggtgcggtccatgccgtttcattgccccaattcttgcagagtttgctaaaaagttg

SEQ ID NO: 198215 - DNA, 228 bp, Glycine max
gactcgcagttgcattgttgaacaagggtttctctgtctgcttcttcactttctctcgtttcaatcgaaaccaaaacaaaaacatgggcagaaaattcttcgtcggtggcaactggaaatgcaatgggaccactgaggaggtaaagaagattgttactactttgaatgaggctaaagtccctggagaagatgtcgtagaagttgttgtgagccctccttttgtgttcc

SEQ ID NO: 198216 - DNA, 242 bp, Glycine max
acggctgcgagaagacgacagaaggggatggtttacaccgaggggacacaccttcagcagcagcagccatggttctcaaaaccgaactatgccgattcagcggtgccaagatctacccagggaaaggcatcagatttgttcgtggtgattctcaggttttcctgtttgctaactcgaaatgtaagaggtatttccacaacaggttgacgccatcaaagctcacctggacctgtatgtacaga

SEQ ID NO: 198217 - DNA, 257 bp, Glycine max
tacggctgcgagaagacgacagaaggggaagtaagaaaacacaacacgaatttcattgcagagtgttattttgagtatcagcatcaatggctccaattgcagtgggaaacgtgattccagacggcattttggcttacttggatgaagaaaacaaaccccaaactgtctccattcactctctcgccaccggcaagaaagtcatcatctttggggttcccggtgccttcactcctacttgcagcttgaagcacgttcct

SEQ ID NO: 198218 - DNA, 259 bp, Glycine max
tacggctgcgagaagacgacagaagggggccgtggaagagagaaaccctagggtttggaagaagctgatcggagaagatggtgcagcgtctcacctaccgcaagcgccacagctatgccaccaaatccaaccagcacagagtcgtcaagactcccggtggcaagcttgtttatcagaccacgaagaagagggccagcggacccaagtgccctgtcactggaaagaggattcgaagggttccacatttaaggctaacaga

SEQ ID NO: 198219 - DNA, 236 bp, Glycine max
gcgagaagacgacagaagggggcacaagtgagtttgttgatcgagataactagaaacagtgtgatgaaaatgaaggtccttgttttcttcgttgctacaattttggtagcatggcaatgccatgcgtacgatatgttccctctccgaatgaacactggctatggtgcccgtactccggaggtgaaatgcgcaagttggaggcttgctgtggaagcacacaacatctttggctttga

SEQ ID NO: 198220 - DNA, 255 bp, Glycine max
tacggctgcgagaagacaacagaaggggagagtggtggagtgtgcaaaagagcgtcgtagtcgcaaccctaatcagaagaagcgcacttcaagcgagtgacagccaccagccatgggtcgtatgcacagccgcggtaagggtatatcctcttctgctttgccctacaaaaggacacctcctagctggctcaagatctcttcgcaagatgtcgaagaaaatatctgcaagtttgcgaagaaaggtttgaccccgtc

SEQ ID NO: 198221 - DNA, 253 bp, Glycine max
ataggctgcgagaagacgacagaggcgaaagcaggacctttaagcttcctaatcccatgtactacattgagtagtaccttcacctctctcaacaatctagctagagtttgctcctatctatatgtaataaggtatgctgatatgcactattcatataggagcattagctatgtttgttaatgtcactttatgttatgtgggtaagtcacctaagacactccacgtacctacttgttgtctcttacgcggcttt

SEQ ID NO: 198222 - DNA, 255 bp, Glycine max
actgcgagaagacgacagatttgggaagtggttgttcattctaccattgaggggttgaggtttccaatgactgttcctatagggactgctttggttgacatgtacgcaaagtgtggttgcattgaaaaagctaggatcttgtttgatgggatggtgaagaaggatgtgtggacgtggaatgtcatgatttttgggctagcttcgcatgatcgtgcaaaggaggcactcacactgtttcagaggttcattgatgaa

SEQ ID NO: 198223 - DNA, 258 bp, Glycine max
cggctcgagtacggccgagaagacgacagaagggggcacccagagaggaggaagctttgagagagagagagggaggagggagagtgttgacgctccatcaagatgggtatttctagggattccatgcacaagaggcgtgccactggtggcaagaagaaggcatggagaaagaagagaaagtatgagcttgggcgtaaggccgcaaacaccaagttatcaagcaacaagactatccggaggattcgtgttcgaggtggc

SEQ ID NO: 198224 - DNA, 252 bp, Glycine max
acggctgcgagaagacgacagaagggggaagaagaagagagagtgatggagtgcgtattcggattggtgggtaatgggtttgcgatcgtggtggctgattcatcggcggtgcacagcatcctcgtccacaagtccaacgaggacaagatcatgctcctcgattcccacaaactcattgccgctagcggcgagcccggagacagggttcagttcacagagtacattcagaagaacgtcgccttgtatcagttc

SEQ ID NO: 198225 - DNA, 253 bp, Glycine max
acggctgcgagaagacgacagaaggggggcgcgggtgaggtagaacccttccactgtggtgactctgcgatgggtgcctacaagtatgtttcagagctatggcgcaagaagcagtctgatgtcatgcgcttcttgcagcgggtgaggtgctgggagtataggcagcaaccttccattgttcgtttgacagggtctacccgccctgacaaggctcgtcgcttgggcttcaaggctaagcagggctatgtgattt

SEQ ID NO: 198226 - DNA, 289 bp, Glycine max
ctgcgagaagacgacagaaggggaggttaaggaaacaattgaaggtaaacaagaaaatgaaaaagtggaagctgagaaaccagaagtagatgctatggaagtagagagtggcattccgcagaaggaggggagtgataaaaaggagaaaaaagatgtggcgatggaggaggaggatgaagatgagggtaaggataatattgataagtcaaaagaagaagagaaggcagaagatagtaagggtgagaaaagatcaaaaaaacgtgggagagggaatatcaatggggagaaa

SEQ ID NO: 198227 - DNA, 285 bp, Glycine max; identical to SEQ ID NO: 197526

SEQ ID NO: 198228 - DNA, 283 bp, Glycine max
  unsure (1)..(283): unsure at all n locations
tctcgagccgaatcggctcgagtacggctgcgagaagacgacagacagggggagttttcaaattggaattatttttgccagaagaatatccaatggctgctccaaaggttaggtttctgacaaaaatatatcatccaaacattgataagcttggcaggatatgtcttgacattctgaaagataagtggagttctgcccttcagattcgcactgtacttttgagtattcaagctcttctaagtgcaccaaccccagatgatccngtttctgagaacattgccaa

SEQ ID NO: 198229 - DNA, 264 bp, Glycine max
ggctcgagagacgacagaaggggtagtatcacttttgtctcggaatttgttcttttgagttatggcaagcttaaaggttgcatgtgtggttttgatgtgcatggctgtgatgagtgcaccaatgatggtgcaagccgtgtcatgcaatgatgtttctgtgaacctagcaccgtgcctatcttacctgatgcagggtggagatgttccagaatcgtgctgtagcggagtgaggaacattctgggttctgccagcaccacctttga

SEQ ID NO: 198230 - DNA, 278 bp, Glycine max
agaagacgacagaaggggacacacacgtaacttcatctgggttgcagggaaaaagaaaaataaaatgggttccgataataccaacttggagttcttgaaggagatcggtttgggctcctccaacattggttcttacattaatggccaatggaaagccactggttcttctgtcacttctgttaatccttctaacaatcagagcatagctcaagtgactgaagcgactttgcaagattatgaggagggattgcaagcttgcagtgaagcagccaagacat

SEQ ID NO: 198231 - DNA, 273 bp, Glycine max
cggctgcgagaagacgacagaagggggagcaagagtgaagagcgaagagaatggctcccaagggtttaatctttttggctgtgttatgcttctcagcactgtcactgagtcgttgtcttgcggaggataatggacttgttatgaacttctacaaggaatcatgccctcaggctgaagacatcaaactagaacaagtcaagcttctctacaagcgccacaagaacactgctttctcctggctcagaaacatcttccatgactgtgctgttcaga

SEQ ID NO: 198232 - DNA, 276 bp, Glycine max
tactcgagccgaatcggctcgagtacggctgcgagaagacgacagtacgggggggggaacaattggttgattagggtttcttcgggtgctaatgctcttgttttctcacagtcacacagcaatggaagcaatcacagagggagtgaacaacatcaacatctccgattcttacaagaagaatcgcattcaggtctccaacaccaaaaagcccctcttcttccacgtcaatctcgccaagaggtatatgcaacagcataatgaagttgagctctcagc

SEQ ID NO: 198233 - DNA, 277 bp, Glycine max
tacggctgcgagaagacgacagaaggggacatcttcttttacgtattgaatctcagaattctctaaaagagatctttttctgctctttgaagaaagaagggtctttgcttgattttggagatgtctctgctctcagatctcatcaaccttaacctctccgataccaccgagaaggtgatcgcagagtacatatggatcggtggatcaggaatggacctgaggagcaaagcaaggactctcccaggaccagttagcgacgcttcagagcttcccaagt

SEQ ID NO: 198234 - DNA, 157 bp, Glycine max
tgcgagaagacgacagaagggggcacaagtgagtttgttgatcgagataactagaaacagtgtgatgaaaatgaaggtccttgttttcttcgttgctacaattttggtagcatggcaatgccatgcgtacgatatgttccctctccgaatttccacc

SEQ ID NO: 198235 - DNA, 282 bp, Glycine max
cggctcgagcggctgcgagaagacgacagaagggggggttttatctcattaacgtttcttctcttcactctgcccgctgcatcaatggcttcagagaagaaactttcgaacccaatgagggagataagagtgcagaagctcgtcctcaatatctctgttggcgagagtggagatcgtctcaccagagcctccaaggtgttggaacaacctagtggccaaaccccagtgttttccaaagcaaggtacactgttcgttcctttgggattagaagaaatgagaag

SEQ ID NO: 198236 - DNA, 278 bp, Glycine max
tagaagacgacagaaggggagagaaagagagagaaagatgtcgaagcgtggtcgtggtggttcggcggggaacaagttccgcatgtcgctgggtcttccagtggcggcgacggtgaactgcgccgacaacacgggggcgaagaacctctacatcatttcggtggaagggatcaaaggccgtttgaaccgtcttccctcggcctgcgttggcgacatggtgatggccaccgtgaagaagggaaaacccgatctgaggaagaaggtcttgccagctgtca

SEQ ID NO: 198237 - DNA, 278 bp, Glycine max
gcggcatcccacccacatcatatggaacagaaaacatacctccagcaaccccaggtataggaacatcaggaatacccctaccaggaggataacgatagacacgtcccctaggaagcatctgctgtggcatcataggaactggctgctgggactgctgaactgcacctggacgccttccaccgggacgctgtccctgttgtccctgctgaaccattggcacgaaaaaattcggcacaggagctgcacctggcctcataccaggcataagttgtcgttga

SEQ ID NO: 198238 - DNA, 275 bp, Glycine max
acggctgcgagaagacgacagaagggagagggttggcttcacaccggtaatgttggctacgtagatgatgatgacgaaattttcattgttgacagggtgaaggaactcatcaaatataaaggcttccaggtgccccctgcagaacttgaagggcttcttgtaagccatccctccattgcagatgcagctgttgtcccacaaaaggatgttgctgctggtgaagttcctgttgccttcgttgtgagatcaaacggctttgatctaactgaagaggc

SEQ ID NO: 198239 - DNA, 279 bp, Glycine max
acggctcgagaagacgacagaaggggggaagctggaaaagttagaagtagtgaagaaaatgaaagtcattgttttcttcgttgctataataattttaggtgcagaatggcaatgcaatgggtcagagcatgagcatgagcatggccacagctaccaaattttccctttgcgaatgaaaaccggccccggtggccactacattccggaggtatcgtgcaaaagttggaggcttggtgtggaagcacacaacgtcattgactggagaaccattcctcaaga

SEQ ID NO: 198240 - DNA, 272 bp, Glycine max
tctcgagcgaatcggctcaggagaagacgacagaaaggaagaaattgctgaggaattggaaaacactaagaagctgatagaagaactcaaaaatagcttagaaaaggtagaaaaagatgagcttgaggcaaaaaaagaggttgaacatgtgattctcaaaattgaagagatggagcaagacattgctagtgaagccagtattgaagccaaggcaaaacttgaggctaaaaaatccatgcttactgaagcgcttttggagtttgaattcgttg

SEQ ID NO: 198241 - DNA, 274 bp, Glycine max
acggctgcgagaagacgacagaaggggacagcagcagagcaaaagaaagaaagatagaaagtgcaacttcctctgctttgctcccctgtttaagcctcatcataagcttagaatggcacacaaggaattttccattgccctagtgactctcattgttctctttgtcaacacgaacctccaaggtgccacggctgactatggtggtggttggcagagtgctcatgccactttctatggtgggggtgatgcttctggcacaatgggtggagcatgt

SEQ ID NO: 198242 - DNA, 252 bp, Glycine max
gcgagaagacgacagaagggggcacaagtgagtttgttgatcgagataactagaaacagtgtgatgaaaatgaaggtccttgttttcttcgttgctacaattttggtagcatggcaataccatgcgtacgatatgtcccctcttcgaatgaacactggctttgagggccgtaatccgggagttaaatgcgcaaattggatggcttctgttggagcatgacacatccttgggtttgataccattcctgaagag

SEQ ID NO: 198243 - DNA, 281 bp, Glycine max
acggctgcggaagacgacagaaggggagggagtgaacaccaaagaagaagtaggatggtatgctggcaagaaaatggcctatatctacaaggctaaggtgaaaaaggatggaagccattaccgctgcatatggggcaaggttacgaggcctcacggcaacagtggtgttgtccgtgcaaaattcaagtcaaaccttccacccagatcgatgggagctcgagtaagagtattcatgtatccaagtaatatatgagattcaggtgataagacgctcagaattc

SEQ ID NO: 198244 - DNA, 268 bp, Glycine max
tctcgagccgaatcggctcgagtacggctgcgagaagacgacagaaggggattgtagtatatatagagaagttgtgagcatagctttcttcatcacttcacagtaagcactatagaaaaaacgacattcattcatctatggctacccttattgctcccagcaaccactctccccaagaagacgctgaggctctcagaaaggcttttgaaggatgggggatgatgagaaaactgtcatagtaatattgggtcatagaactgattatcag

SEQ ID NO: 198245 - DNA, 272 bp, Glycine max
ctcgagccgctgcgagaagacgacagaagggggagaaagagagagagagagagagaaactgagagaaattcgcaaaccctaatttcggaaagatcggcgatggctgcctccaaggatcgcgagaacttcgtctacatcgccaagctcgccgaacaggccgagcgatacgaagagatggtggaatcaatgaagaacgttgcggatctcgacgttgaactgactgtggaggagcggaatttactttctgttgggtacaagaatgtgattggtgc

SEQ ID NO: 198246 - DNA, 274 bp, Glycine max
acggctgcgagagacgacagaaggggacggcaacagaagaataatcgagacacagatcatagtgatcattttttaatttctcagatttatccgacgtcgctgcagatccaccaaccgttatggctgccttcagcggtgatgaaacggcaccgtttttcggcttccttggcgccgcagctgccctcgtcttctcctgtatgggagctgcctatggcacagcgaagagtggcgtgggcgtggcttccatgggtgtaatgagacctgagctggtgat

SEQ ID NO: 198247 - DNA, 280 bp, Glycine max
acggctgcgagaagacgacagaagggagcaatggagacagagaaatggctgcagcattttatgctgctggttttgaaccatgagatattaccatgtcagaccttcttaatggaaagatctctttgctagacttccggggaattgtgtttgttggtggatttagctatgctgacgtgcttgattctgcaaaaggttggtctgctagcataagattcaacgagtccgttttacaacagtttcaggagttttacaagcgtccagacactttcagtcttggtgt

SEQ ID NO: 198248 - DNA, 277 bp, Glycine max
cggctcgagtacggctgcgagaagacgacagaagggggcacaagtttgttgagatagctagaagcaataagatgaaaatgaaagtgcttgttttgtttgttgctacagttttggtagcatatgaatgccatggctcagactaccagaagttccctctccaaatgaaaactgggtttggtgggcaatacagcaatgaggtggcatgtgccagttggaggcttggcgtggaagcaaacaacgtagtcaagtggcaaactgttcctgcagcttgcggaga

SEQ ID NO: 198249 - DNA, 276 bp, Glycine max
tctcgagccgattcggctcgagacggctgcgagaagacgacagaatcggcaaggtacaaggtgctggagtcattgtggccacccctactggaagcactgcctattctacagctgctggaggttccatggtccatccaaacgttccctgcatgctgtttaccccaatctgtccacattcactctcatttagaccagttatacttccagattctgctcaacttgaattaaagattccagaggatgcaagaagcaacacctgggtttcgtttgatggaa

SEQ ID NO: 198250 - DNA, 275 bp, Glycine max
tacggctgcgagaagacgacagaaggggggagttacttgaaacgacatcgtttcagggaagggagtgaagtgatagaggaaaccgtagaacagtggtggaaaaatgaaggcattgggatcgtggctgatagcggtaggcacgcttcgattggcctccgtgtggttcggtttcttcgacatttgggctcttcgactcgccgtcttctccaacactacaatgactgaagttcatgggcgcacatttggaacttggacactgttgacctgcacccttt

SEQ ID NO: 198251 - DNA, 272 bp, Glycine max
gctgcgagaagacgacagaagggtacatcctatacatgtatcataaatttttactgaatgtgacattggatcgtaatccttgaacatcaaaaattcaacattttcaatctagtaaacttgtaaacgaatttatatatattagataccagatgaatcaatgatttataaaaattttgataatcaaaatatacttatagattaattaataataagagaatagaaccaagatactttgatttcttatctttgttttcgcaaacatgattctaatt

SEQ ID NO: 198252 - DNA, 271 bp, Glycine max
tacggctgcgagaagacgacagaagggaaagagacccggaaagggtgggaaccgcttttggaaatccattgggcttggatttaagactcccagggaagccatcgaaggaacctacattgacaagaagtgccccttcactggcaatgtttccatccgtggccgtatcttggctggaacatgtcacagtgctaagatgaacaggactattattgttaggaggaattatctccattttatcaagcagtaccagaggtacgagacaaggcactcc

SEQ ID NO: 198253 - DNA, 271 bp, Glycine max
tacggctgcgagaagacgacagaagggggcacaagtgagtttgttgatcgagataactagaaacagtgtgatgaaaatgaaggtccttgttttcttcgttgctacaattttggtagcatgtcaatgccatgcgtacgatatgttccctctccgaatgaacactggctatggtgcccgtactccggaggtgaaatgcgcaagttggaggcttgctgtagaagcacacaacatctttggctttgagaccattcctgaagagtgcgttgaagca

SEQ ID NO: 198254 - DNA, 248 bp, Glycine max
gatttaattgtcatccaaattgagaatcccaattccaaatatggaagcaatgttcctttgcttttgatgaattcattcaacactcatgatgacactcaaaagattgttgaaaaataccaaaactcaaatattgagattcatacttttaaccagagccagtatcctcgattggttgttgaggactctttgccattgccttccaaagggcatactgacaaggatggatggtaccctcctggccatggtga

SEQ ID NO: 198255 - DNA, 234 bp, Glycine max
cgacgtctgctcgattattctgctcgagacggctgcgagaagacgacagaagggggtgcacaagtgagtttgttgatcgagataactagaaacagtgtgatgaaaatgaaggtccttgttttcttcgttgctacaattttggtagcatggcaatgccatgcgtacgatatgctccctctccgaatgaacactggctatggtgcccgtactccggaggtggaatgcgcaagtttg

SEQ ID NO: 198256 - DNA, 278 bp, Glycine max
tacggctgcgagaagacgacagaagggggcacaagtttgttgagatagctagaagcaataagatgaaaatgaaagtgcttgttttgtttgttgctacagttttggtagcatatgaatgccatggctcagactaccagaagttccctctccaaatgaaaactgggtttggtgggcaatacggcaatgaggtggcatgtgccagttggaggcttggcgtggaagcaaacaacgtagtcaagtggcaaactgttcctgcagcttgcggagagtacatagct

SEQ ID NO: 198257 - DNA, 249 bp, Glycine max
ggtggtaatgagtggtgaagatgggcaaagcaccttgttgtgagaaacatggggtcagaaggggagcttggacacccgaagaagaccaagctttggttgactacatccagaaacatggccatggaagttggcgttcactccccaaacatgcaggtctcctaagatgtggaaaaagttgtcggcttcggtggataaactatcttcgcccaggcatcaagcgtggcccatttactagtgaagaagaaagta

SEQ ID NO: 198258 - DNA, 276 bp, Glycine max
acggctgcgagaagacgacagaagggggcagtcaagattgtgcgttatggaagatcacgaaagccagagaaaagtcagaatcctgtgcctccatggattcaggaccagtggtgaaatcctcaagcaattagtcttaagatggcctgaacctgtcttgcaaaagctggagcttgtgttcctcgatggcccgtttcctgcacagggaagatctgatgttgaaggcatttttgaccctccttattttgaatggttccaagccaatgaggagttcactga

SEQ ID NO: 198259 - DNA, 270 bp, Glycine max
tacggctgcgagaagacgacagaagggggcacaagtgagtttgttgatcgagataactagaaacagtgtgatgaaaatgaaggtccttgttttcttcgttgctacaattttggtagcatggcaatgccatgcgtacgatatgttccctctccgaatgaacactggctatggtgcccgtactccggaggtgaaatgcgcaagttggaggcttgctgtggaagcacacaacatctttggctttgagaccattcctgaagagtgcgttgaagc

SEQ ID NO: 198260 - DNA, 268 bp, Glycine max
acggctgcgagaagacgacagaagggggcacaagtgagtttgttgatcgagataactagaaacagtgtgatgaaaatgaaggtccttgttttcttcgttgctacaattttggtagcatggcaatgccatgcgtacgatatgttccctctccgaatgaacactggctatggtgcccgtactccggaggtgaaatgcgcaagttggaggcttgctgtggaagcacacaacatctttggcttcgagaccattcctgaagagtgcgttgaag

SEQ ID NO: 198261 - DNA, 269 bp, Glycine max
acggctgcgagaagacgacagaaggggacaacagcatcgtcggcgacgtaaccctccaacaacaacacttcctcgtcagaaaatgtctctggtggcgaacgaggatttccagcacattctgcgtgtgctgaacaccaacgtggatgggaagcagaagataatgttcgcaatgacctccatcaagggtattggaaggagattcgccaacatcgcttgcaagaaggctgatgttgacatgaacaaaagggctggtgagttgactgctgctg

SEQ ID NO: 198262 - DNA, 273 bp, Glycine max
gcgccctctgggccgtttctccgaagaagtgcctgatcccggcgtggaactagcagtggcagacatgggagagagcatcaatgaaacagatccatcagggccatacttcctaggcctccctcttttcttcttcacaggctcaccagaagaaggtcctccacctccaccatcaggagaggaacctatgttaatgccatgactaaaactagcatgctgaggctgagactgagaatgagaataagaatgagactctactttaaatgcagaacctgg

SEQ ID NO: 198263 - DNA, 272 bp, Glycine max
ctcgagccgaaacgacagaaggggtcacaagtttgttgagatagctagaagcaataagatgaaaatgaaagtgcttgttttgtttgttgctacagttttggtagcatatgaatgccatggctcagactaccagaagttccctctccaaatgaaaactgggtttggtgggcaatacagcaatgaggtggcatgtgccagttggaggcttggcgtggaagcaaacaacgtagtcaagtggcaaactgttcctgcagcttgcggagagtacatag

SEQ ID NO: 198264 - DNA, 272 bp, Glycine max
acggctgcgagaagacgacagaagggggcaaaagttagtagtagtgaagaaaatgaaagtccttgttttctttgttgctatagttctagcagcatggcattgccatggctcagaccatgaccatgaccatggccacacctaccaaattttccctctgagaatgaaaactggccatggtggccactacattccggaggtatcatgccaaagttggaggcttggtgtggaagcacacaacgtcattgactggaaaaccgttcctcaagattgcg

SEQ ID NO: 198265 - DNA, 274 bp, Glycine max
acggctgcgagaagacgacagaagggcacttggctccatccagtagctgttaagcaagtacagatcgagggaaccaccgcatttgccgtttctgggactcccgctgattgtgcttctctagggatttccaaagctctctttcccacagtacctgatctggtggtcagtggcataaacaagggtagcaactgcggttatcacattgtttactctggcactgtagctggagctcgagaggccttcttcaatgatataccttctatctccatttcat

SEQ ID NO: 198266 - DNA, 264 bp, Glycine max
tacggctgcgagaagacgacagaaggggatccaatccaattgaattctccagagagaagaagaaacttaatcgatcatcacttcacttcactaatacatcatggcagacgagacccagaacaagtatgagagctctgaggttgaggtccaggatcgtggtgtttttgactttctcggtaagaaaaaggatgaagaagacaagcctcatcctcaggaggaggtcatcgccaccgagtttcaaaaagtcactgtctcagaccaagg

SEQ ID NO: 198267 - DNA, 266 bp, Glycine max
acggctgcgagaagacgacagaagggggtggaattgaaagagagataattagaggggttttctctttgagagaatcgtatcttacaacttttcgtgaccacttttagtgagggaagagaagctaagagagagactccaattagattcaagagagatggccatcagccatgaaacttgggctttcattttcggtcttctaggcaacgtgatctcctttatggtgttccttgctccattaccaactttttaccaaatctacaagaaaa

SEQ ID NO: 198268 - DNA, 272 bp, Glycine max
tctcgagccgaatcggctcgagtacggctgcgagaagacgacagaaacgggatgcatagcaatacccaattcctaattgtttaaacctaattctcatttcttcatcgttcgattcttctcctcctaaagatgcagatcttcgtgaaaactttgaccggtaagaccatcacccttgaggtggagtcctccgacaccatcgataacgtgaaagctaagattcaagacaaggaagggatcccacctgaccagcagagacttatctttgcgggtaa

SEQ ID NO: 198269 - DNA, 271 bp, Glycine max
acggctgcgagaacgacagaagggggcatcaattcaaaatatatcatcaattataagcatgggtttgtggaacacaacgaatgcagtgtcttaccgctttcacaagtttggtgatgaccaaaagaatctggtcttccaaggtgatgccacgtcttcttccaggggcatagaactcacaaagttagacggtggaggaaaaccagtgggtggcagtgtggggagagtgttatactcttctccagtgcacctttgggaaagctctacagtggtc

SEQ ID NO: 198270 - DNA, 273 bp, Glycine max
tacggctgcgagaagacgacagaagggggacactgaggtttggatctttgcctgtttgggtttgtggactgccaaataagcgtttgtatatattattctcacggagtttgtgtgtgaggcagcagcacacggcacacacaaagaacaaaagtcaaagacagagagaaacaatgtcttccccaagcaaacgccgagacatggacttgatgaagctgatgatgagtgattacaaggtggagacggtcaacgatggcatgcaagagttctttgtgg

SEQ ID NO: 198271 - DNA, 257 bp, Glycine max
agatggctgtgagaaaacgacagaagggggcagaagacgagtgtttcgcttagataatactaagtctttcggaatagtgatgcaatggcttcaagtcaggaggaggtgacccttttgggagctactggaagcccatttgtgtgcagggttcataatgccctaaagttgaagggagttcaataccaatatggtgaaggaaatttgaagaacaagaatgaaatggttctcaaatccaaccccagtccacaagaaaggtc

SEQ ID NO: 198272 - DNA, 274 bp, Glycine max
tctcgagccgaatcggctcgagacggctgcgagaagacgacagaagcgggagttcaaacaaatcgaagccatggccacctccaacttctctattgttctctccgtctccctagccttctttttggtgctacttaccaaggcacattcgaccgataccgtttctttcaccttcaacaagttcaacccagtccaaccaaacattatgctccaaaaagatgctagtatttcatcctctggggtgttacaactccccaaagttggcagcaacggcgtg

SEQ ID NO: 198273 - DNA, 272 bp, Glycine max
tgctgcgagaagacgacagagggggggcgatgcaattgatttgtccggcgacggaggagtcattaagaccattgtcagaaaaagcaaagccgatgctgttggtccaacagaaaattttcctcttgttgatgttcattatgaaggcacacttgctgatactggtgaagtttttgacactacacatgaagataacaccatcttctctttcgagattggaaagggcagtgttatcaaggcttgggaaattgctgtgaaaaccatgaaggttggag

SEQ ID NO: 198274 - DNA, 266 bp, Glycine max
tacggctgcgagaagacgacagaagggggatacaatacagagtgcgttgttgctccttcgccacaactccctgccaacatgggtatctccagagattctatgcacaagaggcgtgccactggtggcaagaagaaggcatggaggaagaagagaaagtatgagcttggtcgccagcctgctaacactaagctgtcaagcaacaagacagtcaggaggatccgggttagaggtggaaatgtgaagtggagggcactgagattggatac

SEQ ID NO: 198275 - DNA, 257 bp, Glycine max
tagacgacagaagggggagaaagagagagagagagagaaactgagagaaattcgcaaaccctaatttcggaaagatcggcgatggctgcctccaaggatcgcgagaacttcgtctacatcgccaagctcgccgaacaggccgagcgatacgaagagatggtggaatcaatgaagaacgttgcgaatctcgacgttgaactgactgtggaggagcggaatatacttttctgttggggacaaagaatgtgattggtgct

SEQ ID NO: 198276 - DNA, 235 bp, Glycine max
ggatagggatatggggaggggaagagtggagttgaagaggatagagaacaagataaacaggcaagtcacttttgcaaagaggagaaatgggcttctcaagaaagcctatgagctatctgttctctgtgatgctgaggttgccctcatcatcttctccaaccgaggcaagctttatgagttctgtagcagctctagcatgctcaaaacacttgaaaggtaccagaaatgcagctat

SEQ ID NO: 198277 - DNA, 276 bp, Glycine max
tccaaagtttgtatagtgtaggatttgttggtattcgtgataaaaacacctcatcctattcattttgccatgacgggcgaactccagataaaggttttgaaagtaatgagaaattattaattcatccatgttactggcttggtttgaatctaaatcgtaatgcacttgctccagaggaagcagaggagataaatgacgaatatgatattaatattatttcagataattcagccattagaaataaaacaataggtcaaataactactcatctagatc

SEQ ID NO: 198278 - DNA, 267 bp, Glycine max
acgacagaagggggcgtaggcaaagagagagagagaaaagcgtgaatcatgtcggacgaagagcatcacttcgattctcaggcggatgcgggagcgtccaagacgtatcctcagcaggctggtaccattcgcaagaatggctacatcgtcatcaaatccaggccttgcaaggttgtagaggtctctacgtcaaagacaggcaagcatggacatgcaaagtgtcactttgttgcaattgatatttttcatggggaaaagcttgaagat

SEQ ID NO: 198279 - DNA, 272 bp, Glycine max
  unsure (1)..(272): unsure at all n locations
tatagtgtaggatttgttggtattcgtgatacacacacctcatcctattcattttgccatgacgggcgaactccagataaaggttttgaaagtaatgagatattattaattcatccatgttactggcttggtctgaatctatatcgtaatgcacttgctccagaggaagcagaggagatacatgacgagtatgatattaatattatgtcagataattcagccantttagaatanaacagtaggtcaaataactactcatctagatcagatac

SEQ ID NO: 198280 - DNA, 273 bp, Glycine max
tacggctgcgagaagacgacagaatgggggcaaaagttagtagtagtgaagagaatgaaagtcctcgttttctttgttgctatagttctagcagcatggcattgccatggctcagaccatgaccatgaccatggccacacctaccaaattttccctctcgagaatgaaacttggcaaggtggccactaaaatccggggggtatcttcccaaagttggaggcttggttgggaagcccacaacgtcattgactggaaaaccgttcctcaagattg

SEQ ID NO: 198281 - DNA, 271 bp, Glycine max
tacggctgcgagaagacgacagaaggggctgtagctatgagtgcgacagaaggtctaatgagaggaatggaagtgattgacacaggagctgccctaagtgttccagtaggtggagcaactctaggacgaattttcaacgtgcttggagagctcattgataatttaggtcctgtagatactcgcacaacatctcccattcatagatctgcgcctgcctttatacaattagatacaaaattagccatttttgaaacaggaataaaagtagtag

SEQ ID NO: 198282 - DNA, 239 bp, Glycine max
ggcagttgtattgttgaacaagggtttctctgtctgcttcttcactttctctcgtttcaatcgaaaccaaaacaaaaacatgggcagaaaattcttcgtcggtggcaactggaaatgcaatgggaccactgaggaggtaaagaagattgttactactttgaatgaggctaaagtccctggagaagatgtcgtagaagttgttgtgagccctccttttgtgttcctccgttgtaaaaagt

SEQ ID NO: 198283 - DNA, 260 bp, Glycine max
tacggctgcgagaagacgacagaaggggacactaaacaagttaaaagaagagcatcactgaactaacaaagcaaccctatgtcgaaggtggtttgtgtcaccggagccagcggcgccatcggatcatgggtggtcctactcctcctccagcgtggttacaccgtccatgccaccgtccaagatatcaaggatgaaaatgagacgaaacatttggaggaaatggaaggagcaaagagtcatctccatttttttgaaatgga

SEQ ID NO: 198284 - DNA, 218 bp, Glycine max
cggctcgagaagcttgatttccccaccaagcctcttaccggatcacctcgcacagaaacatcaatcattaatggaacttataggggatttatggaagttatactgcagaacaatgatactaagatgtatacttatcacatgagtggatatgcattttttgtagtcgggatggattttggtgattggtctgagaatagcaggggtacatataacaagtg

SEQ ID NO: 198285 - DNA, 255 bp, Glycine max
tctcgagccgaatcggctcgagtacggctgcgagaagacgacagaaaggatgtgattgtatgggatacatcaagtattttgatgctcacttcacaaatttcactggtggggtggaaacaattgataattgtgtatgtttgcatgaagaggatcatggaatgctctggaaacatcaagactggagaactgggctagcagaagtccgaagatctagaagacttacagtttctttcatatgtactggtgccaactatg

SEQ ID NO: 198286 - DNA, 268 bp, Glycine max
tctcgagccgaatcgctcgagacggctgcgagaagacgacagaagggggatgcacaagtttgttgagatagctagaagcaataagatgaaaatgaaagtgcttgttttgtttgttgctacagttttggtagcatatgaatgccatggctcagactaccagaagttccctctccaaatgaaaactggggttggtgggcaatacagcaatgaggtggcatgtgccagttggaggcttggcgtggaagcaaacaacgtagtcaagtggcaa

SEQ ID NO: 198287 - DNA, 267 bp, Glycine max
tacggctgcgagaagacgacagaagggggaacgcacaaacacacaaaaaatttctagagcgagaaagtgagaggagagagaaagtagctgatcctccatggcctccaccaaggaacgcgaaaactttgtctacaccgccaagctcgccgaacaagccgaacgctatgaagaaatggtggaagcaatgaagaatgtggcgaactgacacgtggaattgacggtcgaggagcggaaccttctgtcggtagggtacaagaacgtggtggg

SEQ ID NO: 198288 - DNA, 258 bp, Glycine max
ggatgaatgctaagagagaaaagggagagtgctttgaaaatgggaaagtttagttcaagttacagtacttctgattttgttcactttggagttctacttccctttcttctgttatcacagttgttctttcaacttgcatggtgtggctccatagtaaagttccttcctggattagagggaccccttccttttgttcttgaaaccgggtatgtgggagtgggtgaatcagaggatgtgcaggcattctactacttcatt

SEQ ID NO: 198289 - DNA, 264 bp, Glycine max
acggctgcgagaagacgacagaagggggctgtgagtgagattacccatagatagagagcgcggcataacctaaacttacccttcttctctctgtgtgtgtgcgcatcaaacgcaaccagaagcagccatggccactgcaagaactgtgaaggacgtttctcctcatgagttcgtcaaagcttactcttctcacctcaagcgatctggcaagatggagctgccagagtggactgatattgtgaaaactgcaagatttaaggagtt

SEQ ID NO: 198290 - DNA, 259 bp, Glycine max
  unsure (1)..(259): unsure at all n locations
ctgcgagaagagacagaaggggaggataaagaaggagagactggactagctgagttagggtgagttgcaggcagtgtcatctctcctttgacgacaagatgagcatcccaattccccatcggcagttattcatagacggagactggaaagtcgccgtcctcaagaatcggattcgcatcatcaacgcttccacccaacacatcatcggggatantccagcagctactaaggaagacgttgatctcgctgtcgctgccgc

SEQ ID NO: 198291 - DNA, 265 bp, Glycine max
ttctcgagccgaatcggctcgagcggctcgagtacggctgcgagaagacgacagaagggggcacaagtttgttgagatagctagaagcaataagatgaaaatgaaagtgcttgttttgtttgttgctacagttttggtagcatatgaatgccatggctcagactaccagaagttccctctccaaatgaaaactgggtttggtgggcaatacagcaatgaggtggcatgtgccagttggaggcttggcgtggaagcaaacaacgta

SEQ ID NO: 198292 - DNA, 256 bp, Glycine max
acgctgcgagaagacgacagaaggggggaaggaagggagggaagaatagaatgggatctggaagtggaaaacacactggagagttcttcaggagaagggatgcatggaggaagcatccgatgctcaccaatcagctccgccacgccacccctggccttggcatcgccgtcgtcgccttcggtatctacctcgtcggcgaacaagtctacaataggctctatgctcccgatcctcattcgatttctcacgtgaaagc

SEQ ID NO: 198293 - DNA, 260 bp, Glycine max
  unsure (1)..(260): unsure at all n locations
tacggctgcgagaagacgacagaaggggaataacaataaaacccactatttaggtataaaagaaggagagttagtgcacctccgtagggtttggttattagggttttcgctcaccggtgtgcagtcgagcccccgaagaaaaagcgaaaatgccgtcgcacaagacattcagaatcaagaagaagttggcgaagaagatgaggcagaacaggcctatcccctacttgatncgcatgaggatcgagcacaccatcaggtac

SEQ ID NO: 198294 - DNA, 264 bp, Glycine max
tacggctgcgagaagacgacagaaggggaagctggaaaagttagaagtagtgaagaaaatgaaagtcattgttttcttcgttgctataataattttaggtgcagaatggcaatgcaatgggtcagagcatgagcatgagcatggccacagctaccaaattttccctttgcgaatgaaaaccggccccggtggccactacattccggaggtatcgtgcaaaagttggaggcttggtgtggaagcacacaacgtcattgactggag

SEQ ID NO: 198295 - DNA, 230 bp, Glycine max
attcctgtgtatacagctgcgaaagacggcacgagacgggtgtgtgaattcgatagcataaagtatggcttcgacggcagcgtaccttgctcggcgcgcggcgcagaaggagagggttcggatcctctaccgccgcgccctcaaagacactctcaactgggccgtacatcgccaactcttttacgacgacgtttaaaacctcggcgaaaggttcgaggagacagacacgt

SEQ ID NO: 198296 - DNA, 265 bp, Glycine max
tctcgagccgattcggctcgagacggctgcgagaagacgacagaagggcgagatagagagcgcggcataacctaaacctatctttcttctctctctgtgtgtgcgcttcaacggcaaccagaagcagccatggccactgcaaggactgtgaaggatgtttcacctcatgagttcgttaaggcgtactcctctcacctcaagcgatccggcaagattgagctgccagagtggactgatattgtgaagactgcaagatttaaggagt

SEQ ID NO: 198297 - DNA, 236 bp, Glycine max
gcgtagtcgctcgaatcggtcgagacacagaaggagggacgggaaagcagttgatgatgtagagttggtgatgtaaatagtacctgatgaagctcgagtatattcatatatcaagggcgagtatctagagttagtaaaaattgataagttagaaacacttcgtaagtgttatcatgatagacaagtagaaaggatccaatttgagacagggttccaaaaaatggttggaaattagt

SEQ ID NO: 198298 - DNA, 264 bp, Glycine max
tacggctgcgagaagacgacagaaggggacaacacaacgcaacacaacgcgcactctctcttttctctcttaacacaaaaaccctatcgttcttcgcggtttcgccgattctcgccatgccgaaagccaaatccgacgccaaagccgccgatagccggttgaagcgcaagggcgctggtgctggaaggaagcaatcgaagaaagctgctaaggatcctaacaagcgaaagagacctccaagcgctttcttcgttttcatgtccg

SEQ ID NO: 198299 - DNA, 217 bp, Glycine max
  unsure (1)..(217): unsure at all n locations
tacggctgcgagaagacgacagaagggagaacatgcctttaccaaaggtgcctactttattgggaagatgatatggagcaaaggctacaaggaactgctccaacttcttaaagatcatgaaaaggaattatctgctcttgaggttgatttatttggcagtggagaggactcagatgaagtttaaaaagctgcagaaaaggttggaactagncagtta

SEQ ID NO: 198300 - DNA, 248 bp, Glycine max
cgagaagacgacagaagggggcacaaaaatacaatacaaaacaaaacagagcaaagagagagtgtgtgaaaagtgaaacaaaaaacagaacaacaatggcgacacttaaggttcctcagcctcttccccccgttgcagatgattgtgagcagctccgaaaagccttctcaggttggggaactaacgaggagctgattgtatcgatcttggctcataggaatgctgctcagaggaagcttatcagagaa

SEQ ID NO: 198301 - DNA, 260 bp, Glycine max
cggctgcgagaagacgacagaagggggcacaagtgagtttgttgatcgagataactagaaacagtgtgatgaaaatgaaggtccttgttttcttcgttgctacaattttggtagcatggcaatgccatgcgtacgatatgttccctctccgaatgaacactggctatggtgcccgtactccggaggtgaaatgcgtaagttggaggcttgctgtggaagcacacaacatctttggctttgagaccattcctgaagagtgc

SEQ ID NO: 198302 - DNA, 263 bp, Glycine max
tacggctgcgagaagacgacagaaggggatatccaaagaaacaaaaatattattaagatgatcaacattattggagcacttgttctactctttgcatttctcttcctcagttgtgtgtatgcacaagacacaacaacccttgtgcctgcaatcataacttttggtgattctgctgtggatgtagggaacaatgactatcttcccacccttttcaaggctgattaccctccttatgggagggactttgttaaccaccaacctac

SEQ ID NO: 198303 - DNA, 278 bp, Glycine max
tacggctgcgagaagacgacagaagggagaaggcagagttggtttatgcgagaaagaaacaactcaacaaattaagggtgaaagctgaaaaggttgctgaagagaggctcggttcccaacttgatgttcttgctgctgttaagtactgagtaatctgtgtttttaaatttttgatgcctacttattaccaaattgaactacatttcaatcttgcttaaggagatcgtatttgttattggatcataaatttgatatctgataatcttgacagatgtttt

SEQ ID NO: 198304 - DNA, 214 bp, Glycine max
tacggctgcgagaagacgacagaaggggaacacgcggctgccgccggaggtgaaccgcgtgctgtacgttcggaaccttcccttcaacatcacgagcgaggagatgtacgacatcttcggcaagtacggcgccattcggcagatctcgcatgggcacaaacagggacattcgggaaagggctttcatcgtctacgaggacttctacgacgcaaa

SEQ ID NO: 198305 - DNA, 189 bp, Glycine max
  unsure (1)..(189): unsure at all n locations
gaggatcaaggttggtggcaaagctggtgctcttggtgacagtatcactgttacccgcgagaagaccaagatcattgtcacctctgacagtaacttttccaaacggtatttgaagtacttgacgaagaagtacttgaagaaacacaatgtgcgagactgngctcagagtgattncttcannnaaggatg

SEQ ID NO: 198306 - DNA, 278 bp, Glycine max
tcgattcgagcgaatcggctcgagacggctgcgagaagacgacagacgggggatgcaaaagtacagtagtagtgaagaaaatgaaagtccttgttttctttgttgctatagttctagcagcatggcattgccatggctcagaccatgaccatgaccatggccacacctaccaaattttccctctgagaatgaaaactggccatggtggccactacattccggaggtatcatgccaaagttggaggcttggtgtggaagcacacaacgtcattgactgg

SEQ ID NO: 198307 - DNA, 196 bp, Glycine max
tacggctgcgagagacagaagggaaagctgtgcagaaattacttgatgagcatcgcaaccaagctgatccttttaatcaaattgagcaaggatggtgtgatattcctggaactgtggatgaagttaaagcaaagctacaaatgaggcaagaaggagccatcaagagggatagagcaatggcatactctctctcaaa

SEQ ID NO: 198308 - DNA, 268 bp, Glycine max
atctcgagcgaatcggctcgagtacggctgcgagaagacgacaaaagggggcacaagtttacttgagatagctagaagcaataagatgaaaatgaaagtgcttgttttgtttgttgctacagttttggtagcatatgaatgccatggctcagactaccagaagttccctctccaaatgaaaactgggtttggtgggcaatacagcaatgaggtggcatgtgccagttggaggcttggcgtggaagcaaacaacgtagtcaagtggcaa

SEQ ID NO: 198309 - DNA, 232 bp, Glycine max
gcagcgagaagacgacagaaggggggacaatgaacctgaggagatagatgatccagaggcaacaaaaccagaagattgggacgatgaggaggatggtgaatgggaagccccaaagattgagaacccaaaatgtgaagcagcccccggttgtggtgagtggaagaggccaatgaagaggaatccagcttacaaaggaaaatggcatgccccactaattgaaaatcctgcttat

SEQ ID NO: 198310 - DNA, 188 bp, Glycine max
acggctgcgagaagacgacagaagggggttttagcgcagttcgttctagatttaaggaagatgggtaaggaaaaggttcacatcagtattgtggttattggccatgttgactctgggaagtccactaccactggacacctgatctacaagcttggaggcattgacaagcgtgttattgagagatttgg

SEQ ID NO: 198311 - DNA, 253 bp, Glycine max
ggtttggcgtttagtgatgtcataaaccaacattgcccccacagcacccctgtagtatgcactcgtaactgctctgtatctgtttcataaaccattgaaaatgaaatattaggttaaactgaaatttggcatttaatgtacttgtaagtcaaccaaccattcgaaccaccaagcaatgataagaaataatcttaattaatcttgtgaagaagcactaactagatataaattgcatgcaagaaaaaatagttct

SEQ ID NO: 198312 - DNA, 187 bp, Glycine max
acggctgcgagaagacgacagaagggacttcttgggttgtaattgctctcttattggtttcagccattctaattattcgaaatctgcaaaccattcccgctttcggtcagaatttctttgaatacgttcttgaattcattcgagacgtgagcaaaactcaaattggagaagaatatggtccgtgggt

SEQ ID NO: 198313 - DNA, 172 bp, Glycine max
gctgcgagagacgacagaaggggcacaagtgagatcgttgatcgagatcactagcaacagtgtgatgagaatgatggtccttgtattcttcgttgctacaattttggtagcatggcattgccatgcgtacgatatgttccctctccgaatgaacactggctatggtgcccgt

SEQ ID NO: 198314 - DNA, 242 bp, Glycine max
agacgacagaagggggagaaatctgattcgttcattgccattgccagggttggaaagacctcgttgatgaatcaatacgtgcacaagaagtttagtcagcaatataaggctaccattggggctgattttgtcaccaaagagcttcagattgatgacagacttgtcactctacaagtgggtttcgtttcctgtttcaacgatatgggacactgctgggcaagagagattcaagattctcgggg

SEQ ID NO: 198315 - DNA, 274 bp, Glycine max
tacggctgcgagaagacgacagaaggggtatagccctacctcaccatcatatagccctacgtcccctagttacaatccgcagtcagcgaagtatagtccttcgttagcatattctccaagcagtctgagattgtctccatcaagtccatatagtcccacatcaccaaattatagtccgacatcaccatcatattcaccaacatctccatcttattctccatcaagcccaacatacagtcccagcagcccatataattctggtgtgagcccagat

SEQ ID NO: 198316 - DNA, 269 bp, Glycine max
cggctcgagtacggctgcgagaagacgacagaagggggcagttcaattccaatatattccattctctctgtgtatttccctacctctcccttcaagatgcagatcttcgtcaagaccctcaccggcaagaccatcacccttgaggtggaaagctctgacaccatcgacaacgtcaaggccaagatccaggacaaggaaggaatccccccggaccagcaacgtctcattttcgccggaaagcaacttgaggacggccgtacccttgctga

SEQ ID NO: 198317 - DNA, 272 bp, Glycine max
acggctgcgagaagacgacagaagggggcacaagtgagtttgttgatcgagataactagaaacagtgtgatgaaaatgaaggtccttgttttcttcgttgctacaattttggtagcatggcaatgccatgcgtacgatatgttccctctccgaatgaacactggctatggtgcccgtactccggaggtgaaatgcgcaagttggaggcttgctgtggaagcacacaacatctttggctttgagaccattcctgaagattgctttgaagcaac

SEQ ID NO: 198318 - DNA, 276 bp, Glycine max
tacggctgcgagaagacgacagaagggggatacatggggccgatttgctgaaaggagtgcagcatatcagccatggatgtggaatgtgggaaaccacgaagtagagtttttgcctgaagtgggagaagttgaacctttcaaaaactatctttaccgatatactactccctattcggcttccaaaagcaccagccccctctggtatgcagtcaggcgtgcctctgctcatatcattgtgctatcaagctattctccatttgtgaagtacacgcctca

SEQ ID NO: 198319 - DNA, 270 bp, Glycine max
acggctgcgagaagacgacagaaggggacctgcagacactctataacgtccagggatggaacccttacgcggtttctttcaatgcggatgaggacacttttaggttggtatttaagaatcccggcatggaggatgaccccacttgtggccccatcattgacaacattgctattaagaagcttttcactcctgataaacccaaagacaacgcagtgatcaatggggattttgaagagggtccatggatgttcaggaacacttcactgggtg

SEQ ID NO: 198320 - DNA, 229 bp, Glycine max
tacggctgcgagaagaccacagaagggggcagcgcttgagaccaagccccactcaaccaccacaccactctctctgctcttcttctacctttcaagtttttaaagtattaagatggcagagacattcctatttacctcagagtcagtgaacgagggacaccctgacaagctctgcgaccaaatctccgatgctgtcctcgacgcttgccttgaacaggacccagacagc

SEQ ID NO: 198321 - DNA, 282 bp, Glycine max
acggctgcgagaagacgacagaagggggtcgtttaaagatgcagagtctgcaacagaaggcttccgaatggagcggtgtttccatagacgacgctttcggcatcgacgacaccaatctcttccagaaactcggcctccaaaccttcattaacctctccaccaatttctacaacagggtttacgatgacgaggaagaatggtttcgttcaatattcgcgaattctgagaaggagaatgccattcaaaaccaatacgagttcttcgtgcagcgaatgggtggtc

SEQ ID NO: 198322 - DNA, 170 bp, Glycine max
tacggctgcgagaagacgacagaaggggccatcttttattgaattgattccaaatacaaacatggcaatgaagaagttcttgtgggttgttctgtccctttctttggtccttggagtggccaatagctttgattttcacgacaaggatttggagtacgaggaaaccctgt

SEQ ID NO: 198323 - DNA, 260 bp, Glycine max
gctgcgagaagacgacagaagggtactattgtcgcttaagccaaactcctccttcatgagcacgtctacaagatcatccgccacttcttcaccctggctgtgtgtggcacttgacttagcctctctatgttcattgacgatgttttgcattatccggtcggcttgttgatgatacttctcaatcttaggcttcaaccctgagatgtgttgaagccattcagcagaagggtacaaatctcccaagtcaaaacctccagcag

SEQ ID NO: 198324 - DNA, 271 bp, Glycine max
acggctgcgagaagacgacagaagggggcacaagtgagtttgttgatcgagataactagaaacagtgtgatgaaaatgaaggtccttgttttcttcgttgctacaattttggtagcatggcaatgccatgcgtacgatatgttccctctccgaatgaacactggctatggtgcccgtactccggaggtgaaatgcgcaagttggaggcttgctgtggaagcacacaacatctttggctttgagaccattcctgaagagtgcgttgaagcaa

SEQ ID NO: 198325 - DNA, 260 bp, Glycine max
acggctgcgagaagacgacagaagggatcagtggtgccccccaggataacaacataatgctgtggaatgctgtcatatttggtcctgatgatactccatgggatggaggcacgttcaagttgacactccaatttactgaggactatccaaataaaccaccgactgtacgatttgtgtctcgcatgtttcatccaaatatttatgctgatggaagtatttgtttggatatattacaaaatcagtggagtcctatttacgat

SEQ ID NO: 198326 - DNA, 267 bp, Glycine max
acggctgcgagaagacgacagaaaggggatcacaaatctttcgctaacactcattaattgcaagaatggcacttcgttgcttggtgatgtccctttctgttctcttcactcttggtcttgcgagagaaagccatgccagagacgaagatttttggcatgctgtttggccaaacactcccattccaagttcattgcgagatcttctaaagcctggccctgcaagtgttgaaatcgaggatcaccctatgcaaattgaagaaacacagt

SEQ ID NO: 198327 - DNA, 161 bp, Glycine max
  unsure (1)..(161): unsure at all n locations
ggggggttgaagatacaagggagagagacttacatgtgttcctcattctccactgagctgtaaagaagctcttcaatgtcagagtggaattcngttaacctangctcagtttcagtgtatgggaagtatatacccatgtctgncaccggganaganantgt

SEQ ID NO: 198328 - DNA, 253 bp, Glycine max
acggctgcgagaagacgacagaagggggagagaagaagaaacttaatcgatcatcacttcacttcactaatacatcatggcagacgagacccagaacaagtatgagagctctgaggttgaggtccaggatcgtggtgtttttgactttctcggtaagaaaaaggatgaagaagacaagcctcatcctcaggaggaggtcatcgccaccgagtttcaaaaagtcactgtctcagacacaggagagaacaagcac

SEQ ID NO: 198329 - DNA, 274 bp, Glycine max
gctgcgagaagacgacagaaggggaggcgcggcgggatcagcacaagattgcaaaatgaagttcaacattgcaaatcccaccactgggtgccagaagaagctggaaatcgatgacgacctgaagcttcgagcattttgggacaagaggatctcccaggaggttcttggtgatgctctgggtgaggagtttaaaggatatgttttcaaaatcaccggtgggtgtgacaaacaaggattccctatgaagcagggagtgctgacccctggtcgtgtt

SEQ ID NO: 198330 - DNA, 263 bp, Glycine max
tacgagaagacgacagaaggggatcatacattgattgctagtgatgattttatcaagtctgacgtcatatttggaagcaaaaaaattgaggctccagtacttttccaggggattgggcattcactaaatcctaccaatagcctggtgttgaaagttctctctgcatctccttcagccttttctgctaacccaaaatctaaagtgacaagtcctccatcactcactggaacttcaatctcattagtttcaattatacaggcaag

SEQ ID NO: 198331 - DNA, 267 bp, Glycine max
acggctgcgaagacgacagaaggggacaacatatccattttatttacaacaacaatggcttctgtgcctcaaccaaaaatctcccttctaaccttattcttcttctcgtccttcaccatcattgcgcatgcaattgttcctcaaaacgaaaccttcaaatttgagaactcaggtgaacttggaccctacatcgttgagtacggtgcagattacagaatgataagcatcttcaactctccattccaagttggtttctacaacaccacc

SEQ ID NO: 198332 - DNA, 231 bp, Glycine max
tacggctgcgagaagacgacagaagactcgaattgtgccgcgccacattcaattggcggtgaggaacgacgaggagttgagcaagctactcggtgacgtcaccatcgctaacggtggcgtcatgcctaacattcacaatcttctccttcctaagaaggctggtggatcatccaaggctgctgctgcagacgatgactcttaaataggggttttttttccgtgaaaagttat

SEQ ID NO: 198333 - DNA, 253 bp, Glycine max
agacgacagaagggggcacaagtgagtttgttgatcgagataactagaaacagtgtgatgaaaatgaaggtccttgttttcttcgttgctacaattttggtagcatggcaatgccatgcgtacgatatgttccctctccgaatgaacactggctatggtgcccgtactccggaggtgaaatgcgcaagttggaggcttgctgtggaagcacacaacatctttggctttgagaccattcctgaagagtgcgttg

SEQ ID NO: 198334 - DNA, 199 bp, Glycine max
tacggctgcgagaagacgacagaagggtacggctgcgagaagacgacagaaggggatgtgttcaacatgatgcttcagatcctggaagatggaagactaacagacagtaagggcagaacagtggatttcaagaacacacttcttataatgacatcaaatgttggaagcagtgtgattgagaaaggagggcgcaaaattg

SEQ ID NO: 198335 - DNA, 197 bp, Glycine max
tctcgagccgaatcggctcgagtacggctgcgagaagacgacagaacggggttgaaaccagtgcattgcccagggcactgcctgatgtttaaacacagggttcgatcatatagagaacttcctcttcgctttgctgattttggggttttgcatcggaatgaggctagtggtgccctgagtggattaacacgtgttag

SEQ ID NO: 198336 - DNA, 194 bp, Glycine max
cgacagaagggggcgcattgaacgagaattagggtttgtagtgtagcaggaacaagcagcaatggcgccgaagtaacacgcaaagttaagcagaaaccccgaattgataaggggaattggaaagtactcgaagtcgcagatgtaccacaagaggggcatttgggctatcaaggccaaaaatggtggcgttttac

SEQ ID NO: 198337 - DNA, 208 bp, Glycine max
tacggctgcgagaagacgacagaaggggggaaaagttagaagtagtgaagaaaatgaaagtcattgttttcttcgttgctataataattttaagtggcagatggcaatggcatgggtcaaagcatgaacatgagcatggccaaaggtaacaaattttccctttgcgaatgaaaaccggccccggtggccactacattccggaggtatc

SEQ ID NO: 198338 - DNA, 222 bp, Glycine max
  unsure (1)..(222): unsure at all n locations
tttcgagccgattcggctcgagtacggctgcgagaagacgacaatttagggggcacaagtgaagttnntgttgatcgagataactgcagaaacagtgtgatgacaaatgaagagtcccttgtttttcttcggttgctacaaattttgggtagcatgggcaatgcaatgcggtacgatatgtttcctctccgaatgaacactggctatggtgcccgtacttcg

SEQ ID NO: 198339 - DNA, 197 bp, Glycine max
  unsure (1)..(197): unsure at all n locations
ggctgcgagaagacgacagaagggggggggcatcgtttgttatagttgaaccatctaagtttaaggtagttggagaaaagactactgcaggacaggagctagccactgccctgcaaatcagagcacttcagagggttactagattgagtcgttgcagcgtggagcttntgaagaaggagatgagcgaacgtgatgtg

SEQ ID NO: 198340 - DNA, 200 bp, Glycine max
acgctgcgagaagacgacagaagggggttgcgaaattctcccatctgcttctcactgatctccattcccattccatggcttccactgaatcatcccctttcaagaaaattcagattcaaagggatgacactacatttgacgcatatgtggttggaaaagaggatgctcctggaattgttgtgattcaggagtggtggggt

SEQ ID NO: 198341 - DNA, 211 bp, Glycine max
actcgagccgaatcggctcgagggctgcgagaagacgacagaaacggagaaaggatggaacttgaatttggggggagttaagctaagattttggaaagggagtgtgcatccataaaggccgtgttccttggaccgggatccagaagggcttatcagaagaaccccaatttggccaatttgattgttgaacccgaattttcaaaggaaaatg

SEQ ID NO: 198342 - DNA, 199 bp, Glycine max
acggctgcgagaaaacgacagaagggggaacaaaacaagtgtttcgaatagattatcctaagtactttgggaatagtgctgcaatggcttcaagtcaggaggaggtgacccttttgggagctactggaagcccatttgtgtgcagggttcatattgccctcaagttgaagggagttcaatacaaatatgtcgaagaaaa

SEQ ID NO: 198343 - DNA, 202 bp, Glycine max
tagaagacgacagaagggggagagaagaaatggccaaatcaatcaaattctttgagttgaacacaggggccaagattccttctcttgggttagggacttggcaagctgaacctggtgttgtagctgaagctctcaccacagccattcaggttggatacaggcatattgactgtgctagtgcgtataagaatcaagcagagat

SEQ ID NO: 198344 - DNA, 155 bp, Glycine max
  unsure (1)..(155): unsure at all n locations
gagagatatggggtatgggaagaatggagttgaacaggtagagaacaagataaacaggcaagttacgtttgcaaagaggagaaatgggcttctccagnaagcctatgagctatctgttctctgtgatgctgagggtgncctcatcatcttctcca

SEQ ID NO: 198345 - DNA, 197 bp, Glycine max
gctgcgagaagacgacagaagggggaagaagagagagtgatggagtgcgtattcggattggtgggtaatgggtttgcgatcgtggtggctgattcatcggcggtgcacaagcatcctcgtccacaagtccaacgaggacaagatcatgctcctcgattcccacaaactcattgccgctagcggcgaacccggaaaca

SEQ ID NO: 198346 - DNA, 206 bp, Glycine max
actcgagccgaatcggctcgagacggctgcgagaagagacagaaaccggattctattccacagcgaatcagaattccaagagcttcttgtatttgagtcttctagacaaggcaaggttgcaattcttgatgggcatatccagctgacagaaaacgatgaatttgcttaccaagagatgctcactcaccttgcactctgttccattc

SEQ ID NO: 198347 - DNA, 201 bp, Glycine max
tacggctgcgagaagacgacagaagggagaaaaaggaatcggagatggaacagttagctatggaatggatgatggtgacgacatttacatgcgctcttggactggaaccattaatgggccctataatactgtacctgaagggagaatttatcaattggaggtgttttgtgataaagactacccagaaaaggccccaagtgt

SEQ ID NO: 198348 - DNA, 200 bp, Glycine max
cggctcgagtacggctgcgagaagacgacagaaggggacaacaacaataacaatggctgcctcactacaagctgcagctatcttcatgcaacccaccaaggttggcatagcctctcgcaacctcacatctacacaatgcatttctaaggcttttggcttggaacctgctgcagctaaactcacttgctcccttcagcctg

SEQ ID NO: 198349 - DNA, 195 bp, Glycine max
cgagaagacgacagaaggggactacaaatcagttttctacttgaatcttcgttatccttctttttttctccttgaactcgaatattcactatggcagatgaggtggttctgctagatttctgggcaagtccatttgggatgagggtcaagattgcacttgctgaaatgggtatcaaatatgagtccaaagaagag

SEQ ID NO: 198350 - DNA, 197 bp, Glycine max
  unsure (1)..(197): unsure at all n locations
tccatagtgtgtatagtgtacgatntgttggtattcgtgataaaaacacctcatcctattcattgtgccatgacgggcgaactccagataaagggtttgaaagacatgagtaattattaattcatccatgtactggcttggattgaatctaaatcgtaatgcacttgctccagaggaagcagaggagataaatgacg

SEQ ID NO: 198351 - DNA, 269 bp, Glycine max
tacggctgcgagaagacgacagaaggggggagttcaacgagatggagcaaataaagcacagaatagttgaagtgaatggcataaaaatgcatgttgcagagaaaggagagggtccagtggtgttgttcctccacggcttccctgagctctggtactcatggcgccaccagattctctctctcagctccctcggctaccgcgccgtcgctcccgatctccgtggctacggtgacaccgaggcaccaccttcaatcagcagctacaactgc

SEQ ID NO: 198352 - DNA, 274 bp, Glycine max
ggaccacttcaaaacactcataacacaaagcacaaagcaaagctcatccttgagttaaaaaatggcagcagcttcttccatggctctctcatccccatccttggctggcaaggccgtgaagctgggcccatcagccccagaagtgggaagggtgagcatgaggaagaccgtcaccaagcaggtctcctcaggaagcccatggtacggcccagaccgagtcaagtacttgggcccattctctggcgagcccccgtcctacctaaccggtgagttc

SEQ ID NO: 198353 - DNA, 278 bp, Glycine max
gagaagacgacagaagggggcctattcccattttcttcctctaaaccctaaacaactctttctcttcttccttcgctcgttgttctccctcgcgtagatcgacaatggcggagacagagacgtttgctttccaggctgagatcaaccagctcctcagtctcatcatcaacaccttctactccaacaaggagattttccttcgtgaactcatcagcaacgcctccgatgctttggacaagattcgatttgagagtttgacagataagagcaagctcgat

SEQ ID NO: 198354 - DNA, 270 bp, Glycine max; identical to SEQ ID NO: 198259

SEQ ID NO: 198355 - DNA, 268 bp, Glycine max
cggtcgagctcgagcgaatgaggtggcatgtgccagttggaggcttggcgtggaagcaaacaacgtacgtcaagtggcaaactgttcctgcagcttgcggagagtacatagctgactacgttctaggagaccaatatagatcagattccaaaacagttaaccaacaagcttatttctatgctaaatccctcaaactcaccaacaaagatgtctttgtcttggacgttgacgacactactctctctaatctccagtattgtgctaacca

SEQ ID NO: 198356 - DNA, 224 bp, Glycine max
tacggctgcgagaagacgacagaagggatagatacaagaagctaaaggagatgagccttgaagaacgtaaaaacactactccacgcacggtgatgattggaggaaaggcatttgcaacatacacaaatgctataaggatagtcaggttggtgaatgatgtcggtgctgttgtcaacagtgatcctgaggtcaacggctacttgaaggttgtgtttgccccaaat

SEQ ID NO: 198357 - DNA, 272 bp, Glycine max
cggctcgagcggctcgagtacggctgcgagaagacgacagaaggggatccaccaactgggaagcaattcaacatccaaggctaccactcggtcttatacaacatactttgctgaagctttgattgcagaagccgaagctgacaaagacgttgttgcaatccatgctgctatgggaggtggaactggcatgaatctcttccatcgccgtttcccaacaagatgctttgatgtggggatagcagaacagcatgctgttacatttgctgcaggtc

SEQ ID NO: 198358 - DNA, 270 bp, Glycine max
ctgcgagaagacgacagaaggggggtgtcagaaagcaaatattgcctattcggcaatatggcggaaaatggttcaattgagctgaacaagtttgtgttgttttgtttgttgttgctaatacaagtggcagtttctgaaatcatttttgaagagcgtattgatgatggatggcgaagtaggtgggtgaaatcagactggaaaagcagtgagggcaaagcaggttcattcaagcacacagctggaaaatgggctggtgatccagatgacaaa

SEQ ID NO: 198359 - DNA, 219 bp, Glycine max
acggctgcgagaagacgacagaagggggcccttctagctttttcccagtccaagcagcctccaattcgtgccactctcttcaaaatggccgttaccttctcaaatctccacacagaatcaggtctcaagtccctcgacgacttcctctctgggagggtctacgtttctggggatcagttcacaaaggacgacatcaaagtgtatggtgctgttttggag

SEQ ID NO: 198360 - DNA, 260 bp, Glycine max
gaagacgacagaagggggcacagcactagatcatggtgtcgcggctgttgggtatggtacagctaatggtcatgattattggatcgtaaggaattcatggggtcctagctggggagaagatggctacatcaggttagaaagaaatcttgctaacagcagatcaggcaagtgtggaattgcaattgagccatcttatccccttaagaatggtccaaatccacctaatcctggaccaccacccccttcacctgtgaagccac

SEQ ID NO: 198361 - DNA, 268 bp, Glycine max
ctgcgagaagacgacagaaggggatagggtttttgtcgttgcgactaagagttgctgcttcttccgccactcagcacttcgctccctctgtgcttcaccaaccatggccgaaatcgaagctaccgttccagatccctctcaaatcgacgtcaaacttttcaaccgctggagcttcgacgacgttgaggttactgatatgtctctggctgattacattggagtgtccccgtcaaagcatgctacaatatgttcctcacactgctggtag

SEQ ID NO: 198362 - DNA, 277 bp, Glycine max
cggctcgagcggctcgagcggctcgagtacggctgcgagaagacgacagaaggggagatagatctgcttcacgttgttggcaagaaaccctagcaagcggaacaatggcagacgttgaggtcgatgtggcggctgcagcagcagcagggcagccgaagaagagaacgttcaagaagttcagtttcaggggcgtggatctcgatgcgcttctggacatgtccaccgatgaactcgtgaagatgttcagtgctcgcgcacgtagaaggttccagagagg

SEQ ID NO: 198363 - DNA, 270 bp, Glycine max
tacggctgcgagaagacgacagaaggggagtgagagggaggaagacatagacataaagaaggagaagtgaagtgatgaatgccccagatcgttacgagcgtttcgttgtccctgaaggcaccaaaaaggtttcttatgagagggacacaaagatcatcaatgccgcgtccttcaccatcgagagagaggagcacactatcggcaacatcctccgcatgcagcttcacagagaccccaatgtgttgtttgccggatacatgcttcctcacc

SEQ ID NO: 198364 - DNA, 268 bp, Glycine max
tctcgagcgaatcggctcacggctgcgagaagacgacagaaacgggagggcgaggaagccacatagagacacaatacagagtgagttgttgctccttcgccacaactctctgccaacatgggtatctccagagattctatgcacaagaggcgtgccactggtggcaagaagaaggtctggaggaaaaagagaaagtatgagcttggtcgccagcctgctaacactaagctgtcaagcaacaagacagtcaggaggatccgtgttagag

SEQ ID NO: 198365 - DNA, 265 bp, Glycine max
gggtggggaacgaatgaaggattgataatatcaatcctgggtcacagaaacgcggctcagcgtaagttgattcgtgaagcttatagtacaacccatggagaagatcttcttaaagatttagacaaagaactttcaagtgactttgggcgggctgtgatggtttggacattggatccttctgagcgtgatgcctttttagcaaatgaagccactaagatgttgacttcaaacaattgggtcattttggaaattgcttccactagat

SEQ ID NO: 198366 - DNA, 256 bp, Glycine max
ctgcgagaagacgacagaagggggagcaaaaccctaatccctatttttcttcctcagtagtgtcatttacgcttctcttctctgcagcaactatgcctaaccctaaggtcttcttcgacatgaccatcggcggtcaatctgctggccgcatcgtgatggagctctacgccgacgtcactccccgcaccgccgagaacttccgcgcgctttgcaccggcgagaagggcgtagggcggagggcaagcccctccactac

SEQ ID NO: 198367 - DNA, 242 bp, Glycine max
acggctgcgagaagacgacagaagggggagagagaattatcaaaggtgaaacgaagaagccctaactacgcacgcattcgtgagaaaactcaatattcgtcgctcatggcactctcttctcgtctcttttccaaatccaaattgatctatggcagtcaaatacttctacaaaaggagcatgctattccagttcgtcactttgctaaagagtctgcccctcctgcccttaagggagacgagat

SEQ ID NO: 198368 - DNA, 264 bp, Glycine max
tacggctgcgagaagacgacagaaggggacagcatatagtcacataggctattaagggtgagatatatagaaaaacaaaggagaaaagatagaaatggagaagtttccagttgttgacatggggaaccttaataatgaagagagatcagcaaccatggagataatcaaagatgcctgtgagaactggggtttctttgagttggtgaaccatgggatatccatagagttgatggacaccgtggagaggatgacaaaaaggcacta

SEQ ID NO: 198369 - DNA, 251 bp, Glycine max
cggctgcgagaagacgacagaagggggtagttccaccgagtagcaacaatgtcgaagcgaggtcgcggaggatcggcgggaaacaagttccgcatgtcgctgggtctgccggtggcggcgacggtgaactgcgccgacaacaccggcgcgaagaacctctacatcatatcagtgaaggggatcaagggtaggctgaaccggttgccgtcagcttgcgtcggagacatggttatggccacgtcaagaaggga

SEQ ID NO: 198370 - DNA, 227 bp, Glycine max
ctgcgagaagacgacagaagggggcacaagtgagtttgttgatcgagataactagaaacagtgtgatgaaaatgaaggtccttgttttcttcgttgctacaattttggtagcatggcaatgccatgcgtacgatatgttccctctccgaatgaacactggctatggtgcccgtactccggaggtgaaatgcgcaagttggaggcttgctgtggaagcacacaacatc

SEQ ID NO: 198371 - DNA, 233 bp, Glycine max
  unsure (1)..(233): unsure at all n locations
tgctgcgagaagacgacagaagggggccattgttgttgctattatcatccgcagctgcttttattcgcaccgcaaacagtgagccatggccgtcggaaagaacaagcgcatctccaaggggaagaagggtggcaagaagaaggcagctgatccctttgccatgaaggattggtatgacattaaggctccttctgttcttcaagtgaaaaatgttggcanaaacctcgtctctc

SEQ ID NO: 198372 - DNA, 261 bp, Glycine max
tgcgagaagacgacagaagggaactgttgttgagggaactatacagaagctatttgaagggcatcatatgaattatatcgaatgcatcaatgtggactataaatcaactagaaaggagtcattttatgaccttcagcttgatgtgaagggctgtcctgatgtttatgcttcctttgacaagtatgttgaagttgaacgtcttgaaggggataacaaatatcatgcggaacaatatggtttgcaggatgctaagaagggtgt

SEQ ID NO: 198373 - DNA, 258 bp, Glycine max
aagacgacagaaggggacgacatcaaagtgtatggtgctgttttggagaagccaggtgactcttttcccaatgctgccaagtggtacgaggttgtctcatctcagcttgctgcaagcttccacggcaatgctcaaggggtgagattcagtggcaaagcttctgctccagcggaggctgctcctgcgaaaccggatgcttctgctgctgaagatgatgatgaccttgatctctttggcgatgagactgaggaagacaaa

SEQ ID NO: 198374 - DNA, 255 bp, Glycine max
ctgcgagaagacgacagaagggggagagtacagaacgcggtaaccctagaatcccaaatccccaatcaatcgaccaagagcaggagcttcggtggcgatcttcatccgcctcggtgaaaaaaatgtctctggtggcgaacgaggatttccagcacattctgcgtgtgctgaacaccaacgtagatgggaagcagaagataatgttcgctctcacctctatcaaaggtattggcaggcgattcgctaacatttgct

SEQ ID NO: 198375 - DNA, 235 bp, Glycine max
  unsure (1)..(235): unsure at all n locations
gacggttatggcgtccacgttgggcacttcttcaattgcggttcttccttcgcgctgcatctcttctttttcttccaagccttccattcacacactctctctaacttcagggcagagctatgggcggaaattttatggaggaattggaattcatggnatcaagggaaggtctcagctctcagttgccaatgttgccactgaagttaactctgtagaacaggcccaaagtattgtt

SEQ ID NO: 198376 - DNA, 262 bp, Glycine max
cggctcgagtacggctgcgagaagacgacagaaggggaacgcatcagaaaaagaaaagccttcaatcatatagcattctaagaaatgaagagccctaccattttcattctctttctactttctgccttctacacctcactcctaccttcagccaccgctcaagtcgtggttgacatggaaggtaatgatcttcaaaatggtgggaaatattatgtgttgccagtaatagagtcatcatatggtggaataagagtagccgcaa

SEQ ID NO: 198377 - DNA, 252 bp, Glycine max
gcgagaagacgacagaaggggactcaccacttcaaaacactcataacacaaagcacaaagcaaagctcatccttgagttaaaaaatggcagcagcttcttccatggctctctcatccccatccttggctggcaaggccgtgaagctgggcccatcagccccagaagtgggaagggtgagcatgaggaagaccgtcaccaagcaggtctcctcaggaagcccatggtacggcccagaccgagtcaagtacttg

SEQ ID NO: 198378 - DNA, 267 bp, Glycine max
tacggctgcgagaagacgacagaaggggacacacagctattcctcttaagcttgctactgagtttccacactgcataccttaggtcttccgaattcgaagttaatttgcaagatggctaaggaaaaggctcagatcaacattgtggtggttggtcatgtggaccctgaggaggcaaccaccattaacgagctgaagaagcctgttgtggagaaagaagctccagggcatgccatatgagggcatgcacgtacggcctcggaggggaa

SEQ ID NO: 198379 - DNA, 256 bp, Glycine max
acggctgcgagaagacgacagaagaggaaatcacaagggtttggtgttgggggccaacaatacgacctgcgtctgtgtaattgtaggtgccaaacatatggttgccgagatgaatgtccgtgaattttccatctctaagaatgaccgtacttcaaattccaattccaaatttcttaccttgcccaccattttgactcttggccgtgtcgccgctgtacctcttcttgttgccaccttctacatggatggttggcga

SEQ ID NO: 198380 - DNA, 260 bp, Glycine max
acggctgcgagaagacgacagaagggagcattggaaagaattgacctatttgtatatacaatatgatgagtttgataatgctgcaactaccatcatgaaccattcacctgaagcatgggatcacatgcaattcaaagatgttgttgttaaagttgccaatgtggagttgtactacaaggctggttcacttctacttggaagagcatccagatcttatcaatgatgttctgaacgtccttgcacttcgtgtggaccatgca

SEQ ID NO: 198381 - DNA, 259 bp, Glycine max
ctgcgagaagacgacagaaggggaggaagtcgatgagatgattcgcgaggctgacgttgatggtgatggtcagatcaactatgaggagtttgtcaaagtcatgatggcaagtgaggaccaatcaaccataacaaaaaaaaattgaaaaacacctgaacagaaaaaagacagggcagataagttttgatgagaattatattttcattaggacaatcttcatttggggtcattagtttttgttggtcggctttgtttgctt

SEQ ID NO: 198382 - DNA, 258 bp, Glycine max
acggctgcgagaagacgacataaggggattctgattctgtccatccaaatcttaaaaatattcagtgaagatcaacctcaatggcatctcttggcgtgcgaccagttcttccccctccattaacttccatctccgacccacctcctcttttcgatggcaccaccaggttgtacatcagttattcttgcccctatgcacaacgtgtgtggatcgctaggaactacaaggggctacaagataagatcaatttggtcccta

SEQ ID NO: 198383 - DNA, 255 bp, Glycine max
acggctgcgagaagacgacagaagggggatggctaatctctcactcttgttcttcggtctcctcctattctccgctgccgtagccaccgtcgaacgaatcgacgatgaagacaaccttctgatccgtcaagtggtgccggacgcggaggaccaccacctgctcaacgcggagcaccacttctccgccttcaatacaaagttcgccaagacctacgccacgcaggaggagcacgaccaccgcttccgtatcttcaa

SEQ ID NO: 198384 - DNA, 256 bp, Glycine max
cggctgcgagaagacgacagaaggggacgcattttctgttctgttttgttctcattctgtgactctgtgcttagttaacgttaacagtgacttaagatggcggatttgcagatgtcacccacgatgttgtgtccctcctctcttctcctcaaagggactttcttcttcgaaacaacggcgatcaggttaaaattgacagcttgaagggtaagaaacttggtttgtatttttcggcatcctggtgtggtccatgtca

SEQ ID NO: 198385 - DNA, 231 bp, Glycine max
  unsure (1)..(231): unsure at all n locations
ggtgctgattatgttgttgagtcaactggcgtattcactgacaaggacaaggctgctgctcacttgaagggtggtgccaagaaggttgtcatctctgcccncnagcacagatgcacctatgtttgttgttggtgttaacgagaaggagtacaagccaggagcttgacattgtttcctaatgctagctgcactaccaattgccttgctcccctcgccaaggttatcaacgac

SEQ ID NO: 198386 - DNA, 251 bp, Glycine max
ctgcgagaagacgacagaagggggcacaagtgagtttgttgatcgagataactagaaacagtgtgatgaaaatgaaggtccttgttttcttcgttgctacaatttggtggcatggcaatgccatgcgtacgatatgttccctctccgaatgaacactggctatggtgcccgtactccggaggtgaaatgcgcaagttggaggcttgctgtggaagcacacaacatctttggctttgagaccattcctgaag

SEQ ID NO: 198387 - DNA, 252 bp, Glycine max
acggctgcgagaagacgacagaaggggacaacaaaaaatttctttagttcactatatccatggcaatgtcttaccaaattagaaattctggtgtcttctttttcctttgtgttcttctctttggtgtgtctgctctgggtcgaccagccacttttctgcaagactttcatgtcacgtggtctgactcccacatcaagcaacttgatcaaggcagggcaatccaactcagttttgaccaaagctctggatgtg

SEQ ID NO: 198388 - DNA, 253 bp, Glycine max
agaagacgacagaagggggcacaagtgagtttgttgatcgagataactagaaacagtgtgatgaaaatgaaggtccttgttttcttcgttgctacaattttggtagcatggcaatgccatgcgtacgatatgttccctctccgaatgaacactggctatggtgcccgtactccggaggtgaaatgcgcaagttggaggcttgctgtggaagcacacaacatctttggctttgagaccattcctgaagagtgcg

SEQ ID NO: 198389 - DNA, 254 bp, Glycine max
tacggctgcgagaagagacagaaggggaaggatatagttttgaagagctatgcatcaagaaagaagccattgagggagaagagaagttttgtgcaaaatccttgggaacagtaattggttttgccatttcaaagctgggaaagaacattcaagtactttcaagttcctttgtcaataagcaagaccaatacactgtggaaggagtgcagaatcttggagacaaagcagtgatgtgtcataggctaaatttcaga

SEQ ID NO: 198390 - DNA, 248 bp, Glycine max
tacggctgcgagaagacgacagaagggggcgtcgctccgcaccagtttcaccgcacgaatatcttgttgtttggagcgatccgagaaaaactctgtaaactgttggtttaccaggacctccttacaggtgatgagcttctctctgactccttccgttacaaggaaattgagaatggaatgctgtgggaagttgaggggaagtgggttgttaaaggagcagttgatgtagacattggtgcaaacccttc

SEQ ID NO: 198391 - DNA, 250 bp, Glycine max
gctgcgagaagacgacagaagggggcacaagtttgttgagatagctagaagcaataagatgaaaatgaaagtgcttgttttgtttgttgctacagttttggtagcatatgaatgccatggctcagactaccagaagttccctctccaaatgaaaactgggtttggtgggcaatacagcaatgaggtggcatgtgccagttggaggcttggcgtggaagcaaacaacgtagtcaagtggcaaactgttcct

SEQ ID NO: 198392 - DNA, 248 bp, Glycine max
acggctgcgagaagacgacagaagggggcacaagtgagtttgttgatcgagataactagaaacagtgtgatgaaaatgaaggtccttgttttcttcgttgtacaattttggtagcatggcaatgccatgcgtacgatatgttccctctccgaatgaacactggctatggtgcccgtactccggaggtgaaatgcgcaagttggaggcttgctgtggaagcacacaacatctttggctttgagaccatt

SEQ ID NO: 198393 - DNA, 245 bp, Glycine max
tacggctgcgaggacgacagaagggggcacaagtgagtttgttgatcgagataactagaaacagtgtgatgaaaatgaaggtccttgttttcttcgttgctacaattttggtagcatggcaatgccatgcgtacgatatgttccctctccgaatgaacactggctatggtgcccgtactccggaggtgaaatgcgcaagttggaggcttgctgtggaagcacacaacatctttggctttgagacc

SEQ ID NO: 198394 - DNA, 239 bp, Glycine max
tacggctgcgagagacgacagaaggggggatacgaaataactatagtggatgcattggatgggcgtgaagtgattgatattatacctccaggaccagaacttcttgtttcagaaggtgaatctatcaaacttgatcagccattaacaagtaatccaaatgtgggtggatttggtcagggggatgcggaaatagtacttcaagatccgttacgtgtccaaggtctcttgttcttcttcgc

SEQ ID NO: 198395 - DNA, 249 bp, Glycine max
cgacagaagggaatcatggacaaggttgctggccagctccatctccgttctggtgtttctggtattaggagttatgaaggagcctactgccaccccaaatgtaccaaagaccctcttttgggaattactcgaatgctgcattgcagtatcctgtgatgccctcatgcaaggctactatggatttgtctgctgctgcaacaactggcctcccccgtctttgttgctgctccagcagagaaaggccatttt

SEQ ID NO: 198396 - DNA, 247 bp, Glycine max
cggctcgagcggctcgagtacggctgcgagaagacgacagaaggggagctggtgttcaaggaggacgggcaggagtacgcgcaggtgctccggatgctggggaacgggcggtgcgaggcgatgtgcatcgacgggacgaagaggctctgccacatccgcgggaagatgcacaagaaggtgtggatcgccgccggagacatcatcctggttggactcagggactaccaggacgacaaggctgacgtca

SEQ ID NO: 198397 - DNA, 259 bp, Glycine max
acgctgcgagaagacgacagaagggggggaatctaggcgagttaatcagaatgcacttgagcgagaacgaagggatagaggggaagaccttcgtggtcaccggtggactgggattcgtaggatctggtctctgcttggagctcatacgtacgaggtgccgtagtaggtgcgagccttatgacctccgcctctcttgctccttggatcgcgtcctgctcaagggacaatgggtagtcctctggcatctcgaaggggatgt

SEQ ID NO: 198398 - DNA, 247 bp, Glycine max
tacggctgcgagaagacgacagaaggggacactaaacaagttaaaagaagagcatcactgaactaacaaagcaaccctatgtcgaaggtggtttgtgtcaccggagccagcggcgccatcggatcatgggtggtcctactcctcctccagcgtggttacaccgtccatgccaccgtccaagatatcaaggatgaaaatgagacgaaacatttggaggaaatggaaggagcaaagagtcatctccatt

SEQ ID NO: 198399 - DNA, 244 bp, Glycine max
cactcttggataatggtggagttccacagggcgtgagtcctgcatcacttttaaaagaagccatccaagtcatcagttgtggttatgaagacaaaactgaatggggaaaagaagttgggtggatatatggttctgtgacagaggatatcttgactggatttaaaatgcattgccatggttgacggtctgtgtattgcattcctaagcggcctgcattcaaggggtctgcgcctatcaacctttc

SEQ ID NO: 198400 - DNA, 247 bp, Glycine max
ctcgagacgacagaagggggcagacgccgtgactagacactcatctcactcgcgccatcttagggtttctccttttgtttcgcaacatggttgccgtaagaaaactaagaagacccatgagagcatcaacaacaggctcgctcttgtcatgaagagtggcaaattcaccctcggttacaagaccgttctcaaatctcttaggaactccaaaggaaaattgattatcattgctaacaactgcccccct

SEQ ID NO: 198401 - DNA, 272 bp, Glycine max
tatcgagccgaatcggctcgagtaggctgcgagaagacgacagaaagggacagcaaaacaattttcaaactcaattaccattccataacctaaatctcctctttgtttccgagtcagagagcaatggcacgtaccaagcaaaccgctcgcaagtccaccggcggaaaggcgccgaggaagcaattggcgactaaagccgctcgcaagtcagctccggccaccggggagtgaagaacccccaccgtttaggcccggaacgttggctctggggg

SEQ ID NO: 198402 - DNA, 160 bp, Glycine max
gcgacaagaccacagaaggggacagctattcctcttaagcttgctactgagtttccacactgcataccttaggtcttccgaattcgaagttaatttgcaagatggctaaggaaaaggctcagatcaacattgtggtggttggtcatgtggaccctgagga

SEQ ID NO: 198403 - DNA, 211 bp, Glycine max
cgtcctgcggcttctacatcaaaatctgggcatgaacttctcctttttgaggccctacgtgaaggtttggaagaagaaatggagagggatccttgtgtatgtgtcatgggcgaagatgtaggtcactatggaggatcctacaaggtgactaaaggtcttgccacaaagtttggggaccttagagttttggacacccctattgctgagaact

SEQ ID NO: 198404 - DNA, 240 bp, Glycine max
tacggctgcgagaagacgacagaagggggcacaagtttgttgagatagctagaagcaataagataaaaatgaaagtgcttgttttgtttgttgctacagttttggtagcatatgaatgccatggctcagactaccagaagttccctctccaaatgaaaactgggtttggtgggcaatacagcaatgaggtggcatgtgcaagttggaggcttggcgtggaagcaaacaacttagtcaggt

SEQ ID NO: 198405 - DNA, 242 bp, Glycine max
tacggctgcgaagacgacagaaggggggcagagacgaaagaaggttcaggttcggagatgtctctgaaggatcagggcaacgagtttttcaagtcaggaaagtatctcaaagctgctgcactctacactcaagccatcaagctagacccttctaaccctaccctctatagtaatcgtgctgcagcactactgcaattggataagcttaataaagctctagatgatgcagagatgacaatcaa

SEQ ID NO: 198406 - DNA, 232 bp, Glycine max
tacggctgcgagaagacgacagaaggggataattcacaagccacaaattagtactctcgttaatttttttgctaattgctaattgggcacaatggaaaagcttcatgctgtgtgcatcccatacccagcacaaggccacataaacccaatgctcaagctagcaaaactccttcatgttagaggcttccacatcacctttgttaacacagaatacaaccacaaacgccttctc

SEQ ID NO: 198407 - DNA, 262 bp, Glycine max
agacgacagaagggggcacaagtgagtttgttgatcgagataactagaaacagtgtgatgaaaatgaaggtccttgttttcttcgttgctacaattttggtagtatggcaatgccatgcgtacgatatgttccctctccgaatgaacactggctatggtgcacgtactcacggagtgaaatgcgcaagttggaggcttgctgtggaagcacacaacatctttggctttgagaccattcctgaagagtgcgttgaagcacaaa

SEQ ID NO: 198408 - DNA, 236 bp, Glycine max
gctgcgagaagacgacagaagggggcacaagtttgttgagatagctagaagcaataagatgaaaatgaaagtgcttgttttgtttgttgctacagttttggtagcatatgaatgccatggctcagactaccagaagttccctctccaaatgaaaactgggtttggtgggcaatacagcaatgaggtggcatgtgccatttggaggcttggcgtggaagcaaacaacgtagtcaagt

SEQ ID NO: 198409 - DNA, 171 bp, Glycine max
tacacgacagaaggggcagtaggttttgaggaccctcgtgtaacacttactgttggtgatggagttgcatttttgaaggatgttccagaaggaacttacgatgcagttatagtggattcatctgaccctattggtcctgctcaagagctgtttgaaaagctattttttgcg

SEQ ID NO: 198410 - DNA, 271 bp, Glycine max
tacggctgcgagaagacgacagaagggggttatcaagctcgtggatctctgccatcaaaatttgactgtgattacgcatatgtccttgggcacatctgctaccatatactggccgctggtctaaatggatacatggcaactttaactaacctgaagaatccagtaaacaagtggaaatgtggggctgctccaattgcatctatgatgactgtaaagcgctggtctccaaatccaggagctacatcaattggaaaacctgctattcatccag

SEQ ID NO: 198411 - DNA, 199 bp, Glycine max
tacggctgcgagaagacgacagaaggggatgaccttgatctctttggcgatgagactgaggaagacaaaaaggcagcagaggaaagggaggctgctaagaagtctaccaagaagaaagagagtggcaaatcttctgttctgcttgacgttaagccttgggatgatgaaacagacatgaagaagctggaagaggctgttc

SEQ ID NO: 198412 - DNA, 244 bp, Glycine max
ctcgagccgaagacgacagaagggatcagcggtgccccccaggataacaacataatgctatggaatgctgtcatatttggtcctgatgatactccatgggatggaggcacgttcaagttgactctccagtttactgaggattatccaaataaaccaccaactgtgcgatttgtgtctcgcatgtttcatccaaatatttatgctgatggaagtatttgttgggatatactacaaaatcgggggg

SEQ ID NO: 198413 - DNA, 257 bp, Glycine max
tacggctgcgagaagacgacagaaggggatgcacaagtttgttgagatagctagaagcaataagatgaaaatgaaagtgcttgttttgtttgttgctacagttttggtagcatatgaatgccatggctcagactaccagaagttccctctccaaatgaaaactgggtttggtgggcaatacagcaatgaggtggcatgtgccagttggaggcttggcgtggaaccaaacaacgtattcaagtggaaaactgtccctg

SEQ ID NO: 198414 - DNA, 269 bp, Glycine max
cggtcgaatcgagcgaatcggctcgacggctcgagtacggctgcgagaagccgacagaagggatcagcggtgccccccaggataacaacataatgctgtgaatgctgtcatatttggtcctgatgatactccatgggatggaggcacgttcaagttgactctccagtttactgaggattattcaaataaaccaccaactgtgcgatttgtgtctcacatgtttcatccaaatatttatgctgatggaagtatttgtttggatatactac

SEQ ID NO: 198415 - DNA, 192 bp, Glycine max
tatcgaccgaatcggctcgaggggaacaaaacaagtgtttcgaaacgattatcctaagtcattgggaatagtgctgcaataggttcaagtcaggaggaggtgacccttttgggagctactggaagcccatttgtgtgcagggttcatattgccctcaagttgaagggagttcaatacaaatatgtcgaagaa

SEQ ID NO: 198416 - DNA, 242 bp, Glycine max
cggctgcgagaagacgacagaagggggagagagagagagagagaggcacttggaatccaaaaatgagagaaatcatcagcattcacataggtcaggccgggatccaggttggcaactcctgctgggaactctactgcctggaacatggcatccagcccgatggcatgatgccaagtgactcctccttcggtgtagcccacgacgctttcaacaccttcttgagcgaaacgggatcgggaaac

SEQ ID NO: 198417 - DNA, 216 bp, Glycine max
tacggctgcgagaagacgacagaaggggatccgccttcttttttctctctccacccaacatcgaaacgaggtcgttttgtgttccgccgaaggaccgggggttgtagcagactagcagctatggatttggcatccaatctcggtggcaagattgacaaagccgaagttctctctgccgttcagaagtatgagaagtatcatgtttgctatggaggt

SEQ ID NO: 198418 - DNA, 261 bp, Glycine max
acggctgcgagaagacgacagaaggggatgagaacatgttcaggttcaactattccaaggaatttctaagttgggctttgcgggttcctggctattaccagagttggcacattggcgtgagagccaagacatcgaagaagttggttgctttcatcagtggcatccccgccaggatcagggttaatgaggaggttgtgaagatggctgagatcaatttcttgtgtgttcataagaagctcaggtcaaagagacttgcgcctg

SEQ ID NO: 198419 - DNA, 241 bp, Glycine max
tacggctgcgagaagacgacagaaggggaagcttagtgatgaccaagttaatctccttgaacaaaactttggaaatgaacgcaaacttgagtccgagagaaaggacaggctggcaatggagcttggtttggaccctcgacaagttgctgtgtggtttcaaaacagaagagctcgttggaagaacaaaaagttggaagaagagtactccaaccttaaaaaaatcatgaagccacttgctcga

SEQ ID NO: 198420 - DNA, 259 bp, Glycine max
tacggctgcgaggacgacagaagggcagaaatgaaatggaaagcaaaagatgctagttcaccagatccttattcaagatttatcaatgcattgtacaacttgcttgatggatctgccgaaaatgcaaagtttgaagatgaatgccgggcaattattgggaaccagtcatatgtgttattcacattggacaagttaatatacaaattggtcagacagcttcaaactgtcgcaaccgatgaggtagacaatgagcttctcc

SEQ ID NO: 198421 - DNA, 284 bp, Glycine max
  unsure (1)..(284): unsure at all n locations
tacggctgcgagaagacgacagaagggggaacaaaacaagtgtttcgaatagattatcctaagtctttgggaatagtgctgcaatggcttcaagtcaggaggaggtgacccttttgggagctactggaagcccatttgtgtgcagggttcatattgccctcaagttgaagggagttcaatacaaatatgtcgaagnaaatttgagggaccagagtgaactgcttcttcaaatcaaccccagttcacaaagaaggttcagtgtttattcaaatgagaagccatag

SEQ ID NO: 198422 - DNA, 272 bp, Glycine max
tacggctgcgagaagacgacagaagggtacggctgcgagaagacgacagaagggtacggctgcgagaagacgacagaagggttcagatggtatttcaggcttccagaagaaggtatttgacctcttgtacgagattgcagatattcccttcttgagcgagcacaaatctaagattatcgatctcattgagaaagctgagaaacagccaaatctcacaattggaaattcttgtagctgttgtggttgtcttcgtgtcatcctacttcagactc

SEQ ID NO: 198423 - DNA, 288 bp, Glycine max
  unsure (1)..(288): unsure at all n locations
acggctgcgagaagacgacagaagggagttctcagtgtagaatgtaaggaagtcgtttctcaatatggagagttgatatgggatttcttggtatcaggggtgaaaccagatgacatatgttcacaagttggtttatgttcttccaaaaggcatcaatctaagagtgctggaattgaaatggtgactgaaaaggaacaggaagagttggcagcgagagatactcctttgtgttcttcttgtcagatgcttgttctttggatccagaatcaactanaacaaaaggcaacg

SEQ ID NO: 198424 - DNA, 292 bp, Glycine max
cggctgcgagaagacgacagaaggggggagttcaacgagatggagcaaataaagcacagaacagttgaagtgaatggcataaaaatgcatgttgcagagaaaggagagggtccagtggtgttgttcctccacggcttccctgagctctggtactcatggcgccatcagattctctctctcagctcatcaggctaccgcgccgtcgctcccgatctccgtggctacggtgacaccgaagcaccaccttcaatcagcagctacaactgcttccacatagtgggtgatctcgttg

SEQ ID NO: 198425 - DNA, 276 bp, Glycine max
tacggctgcgagaagacgacagaaggggacaacacaacgcaacacaacgcgcactctctcttttctctcttaacacaaaaaccctatcgttcttcgcggtttcgccgattctcgccatgccgaaagccaaatccgacgccaaagccgccgatagccggttgaagcgcaagggcgctggtgctggaaggaagcaatcgaagaaagctgctaaggatcctaacaagccaaagagacctccaagcgctttcttcgttttcatgtccgagttcagagagc

SEQ ID NO: 198426 - DNA, 274 bp, Glycine max
tacggctgcgagaagacgacagaagggggcatcaattcaaaatgtatcatcaattataagcatgggtttgtggaacacaacgaatgcagtgtcttgccgctttcacaagtttggtgatgaccaaaagaatctggtcttccaaggtgatgccacgtcttcttccaggggcatagaactcacaaagttagacggtggaggaaaaccagtgggtggcagtgtggggagagtgttatactcttctccagttgacctttgggaaagctctacagtggtc

SEQ ID NO: 198427 - DNA, 287 bp, Glycine max
cgacagaagggggttgttgttttcagtgtagtggaagaatcactcccttatccatttccacaccacaccatagacacaaccaacgctctctcttcagcctccattctacgctctcccaaccgccagtctctgacccgaagagcgaaccataatggaagagtaaattaccggaaaccgaataaccgtttctccgtgaaagcctccgccaaagagattgcctttgaccagcattcccgctctgctatgcatgtcggcattgacaagctcgccgacgctgttgggctcac

SEQ ID NO: 198428 - DNA, 289 bp, Glycine max
ctgcgagaagacgacagaagggggagagagagaaactgagagaaattcgcaaaccctaatttcggaaagatcggcgatggctgcctccaaggatcgcgagaacttcgtctacatcgccaagctcgccgaacaggccgagcgatacgaagagatggtggaatcaatgaagaacgttgcgaatctcgacgttgaactgactgtggaggagcggaatttactttctgttgggtacaagaatgtgattggtgctcggagagcatcgtggaggatcctgtcttccattgagcaa

SEQ ID NO: 198429 - DNA, 231 bp, Glycine max
tacggcgagaagacgacagaagggggggcgaggtagccagagagtgatacaatacagagtgcgttgttgctccttcgccacaactccctgccaacatgggtatctccagagattctatgcacaagaggcgtgccactggtggcaagaagaaggcatggaggaagaagagaaagtatgagcttggtcgccagcctgctaacactaagctgtcaagcaacaagacagtcaaga

SEQ ID NO: 198430 - DNA, 221 bp, Glycine max
tgcgagaagacgacagaaggggaaaggaaaggggaacccaaaccgaaaccctaaccctaacggagagatggcggagacttggcatcgatattcgggacggagaaggacagggtgaactgtccgttctacttcaagatcggcgcgtgcaggcacggcgaccggtgctcccggcttcacaccaagccgacaattagcccaaccattggttctgtcgaacatgt

SEQ ID NO: 198431 - DNA, 297 bp, Glycine max
tgctgcgagaagacgacagaaaggaggagatagagtattacaaggagtatcaagccaaattaagaacccatcttggtgtagaaaaagccaataagatcataagcgaagcttgtacttgatgagtttaggaaccaacgatttcctcgaaaactattacgtgttcccaacgcgaagactccacttcaccgtgtcacaatatcaggattttctactgcgtattgcggagaatttcgttagggaattgtacgcacttggagttagggaattgtccataactggtcttgttcccgtaggatg

SEQ ID NO: 198432 - DNA, 281 bp, Glycine max
tacggctgcgagagacgacagaaggggagatccaaacgaaacgcaggagagacagacagagaagagaatggacgctattgattctgtgttcgatccgctcagggaattcgccaaggacagcgtcaggctcgtcaagcgatgccacaagcccgatcgcaaagaattctccaaggttgctgtgcgtaccgcgatcggtttcgttgtgatgggattcgtgggttttttcgttaaactcatcttcattccattaacaacatcatcgtcggatctggttaggatga

SEQ ID NO: 198433 - DNA, 284 bp, Glycine max
gacgacagaaggggatattcaaggaacatttagatggagggcgtccaggaggagataggatatataatgtctttgacaatcagcttcctgctgctttacggaagcttccacttgaccggcatctttctctccagaatgtaagaaaagtggtgtcagatgctgatggttatcagcctcacttgattgccccagagcaaggttacaggcgcttgattgagggagctctcggttactttagaggcccagctgaagcttcagtagatgctgttaactttgttttgaaa

SEQ ID NO: 198434 - DNA, 278 bp, Glycine max
  unsure (1)..(278): unsure at all n locations
tacggctgcgagaagacgacagaaggggggacagtgacttcggaattcccggtgcattttatattaagaacttcatgcaaaatgagttctacctcaagtctctaattctcgaagacattccaaaccacggaaccattcnattcgtatgcaactcctgggtttacaattcaaaaaactacaagactgatcaaatnttctttgccaacatacatatcttccaggcgagacacaactcccattntgaggtacagagaanaggatttgaagatgtaagaggg

SEQ ID NO: 198435 - DNA, 275 bp, Glycine max
tacggctgcgagaagacgacagaaggggatgatgaaaagatggatgtttctacttcaaggaggtatggttcagagagctggatgtcaatggggaggaatgagcctacatattcggatcttctttcaggctttggggccagtggggatccttctcatttatccttgaaggatcaaatgagccctgcttattctgctagaaagcaatcattggatcatgaaggcaaacttcacatgcctcatccatggcctgtaatgccctctagtctgtcactgag

SEQ ID NO: 198436 - DNA, 278 bp, Glycine max
tacggctgcgagaagacgacagaaggggggaactttgtgagctcgtttcagcgtcctgtgttgtgtatttttgaccggaatttcgagttgccggtggcgattcagcatgattttcgctaccggccgcttgttcatgatgtgcttgggttgaggctgaataggctgagtgtgcagggggagaacggtgggatgaggtcttatgagttggacagtgctgattcgttttggggtgcaaatgggtcgctggagtttcccggagttgcggtggagattgagac

SEQ ID NO: 198437 - DNA, 273 bp, Glycine max
  unsure (1)..(273): unsure at all n locations
ctcgagccgagaagacgacagaagggggaactcataatattcatcactagaagtgttggatgcatttctatttctaactaattattgtgcttattattattgttgagaaagaaaagaatggcaaagttaataaaattctttgagttgaacacaggggccaagattccttctgttgggttaggcacttggcaagctgagcctggtgttgtagccanagctgtcaccacagccattctggttggatacaggcatattgattgtgctcaagcgtat

SEQ ID NO: 198438 - DNA, 286 bp, Glycine max
  unsure (1)..(286): unsure at all n locations
acggctgcgagaagacgacagaagggggcactacaaatcagttttctacttgaatcttcgttatccttctttttttctccttgaactcgaatattcactatggcagatgaggtggttctgctagatttctggccaagtccatttgggatgagggtcaggattgcacttgctgaaaagggtatcaaatatgagtccanagaagaggacttgcagaacaagagccctttgctcctcaaaatgaacccggttcacaagataatcccggttcttcatccacatggcaaac

SEQ ID NO: 198439 - DNA, 234 bp, Glycine max
tctcgagccgaatcggctcgagtacggctgcgagaagacgacagatacggggagcaaaaccctacatccctatttttcttcctcagtagtgtcatttacgcttctcttctctgcagcaactatgcctaaccctaaggtcttcttcgacatgaccatcggcggtcaatctgctggccgcatcgtgatggagctctacgccgacgtcactccccgcaccgccgagaacttccgcgc

SEQ ID NO: 198440 - DNA, 267 bp, Glycine max
gccactttcctcccaacttacttggacaataatgccattaaggtcatccaaggtggaccagaagtggggaagctactcctgcagcaaagatgggacaagattttctccacaggaagcgcaagggtggggcggattgttatgtctgcagcagctgtgcatctgacgcctgtgactttggagttaggtggaaaatgtccagcactaattgactctctttcttcttcctggggacaaagaggtgctgtgaagcgaattttggtggcaaaa

SEQ ID NO: 198441 - DNA, 251 bp, Glycine max
tacggctgcgagagacgacagaaggggatgccaaatccttttcattcaagatgaagatgattcgcattcttttcatctttgctcttctatccttcacttcccatgcttctaatgtcaatgacttctgtgtggcagacctgaagggtccagatagccctactggctatcactgcaagccacctaaaacagtaacatcacatgactttgtgttccatttaggccctggaaacacttcaaacgtgttcaagtcc

SEQ ID NO: 198442 - DNA, 262 bp, Glycine max
tacggctgcgagaagacgacagaagggggagtcagtagtgagaatggagtttcaagggttaccggtaggttgcattgctagtatactctctcgtactacgccggcggacgcgtgtaggtattccgtcgtatcaaagagtttccgttcggccgctgagtcggacgctgtctggacactctatctcccttccgattaccattccatcatttcccagtctcctgcgcctctcaactatccttccacgaaggagctctatctcgct

SEQ ID NO: 198443 - DNA, 292 bp, Glycine max
gcgagaagacgacagaaaggaggagatagagtattacaaggagtatcaagccaaattaagaacccatctaggtgtagaacaagccaataagatcataagcgaaccttgtacttgatgagtttaggaaccaacgatttcctcgaaaactattacgtgttcccaacgcgaagactccacttcaccgtgtcacaatatccgggatttctactgcgtattgccgagaatttcgttaggggattgtacgcacttggagttaaggaaatgtccataactggtcttgtcccgtaggatg

SEQ ID NO: 198444 - DNA, 203 bp, Glycine max
agaagacgacagaaggggaggcgcggcgggatcagcacaagattgcaaaatgaagttcaacattgcaaatcccaccactgggtgcccgaagaagctggaaatcgatgacgacctgaagcttcgagcattttgggacaagaggatctcccaggaggttcttggtgatgctcggggtgaggagtctaaaggatatgttttcaaaa

SEQ ID NO: 198445 - DNA, 259 bp, Glycine max
ctcgagccgctcgagccgcttggatgagctttcccaagcctttcaatgtaaactggcctaccatccttgtcaactccatgatacccttgagggtaatgctgcaacacttcttccagctcttcaaattcagaatccttcaaatgtcagaacagacattagacttaaccaaccaaatcatgtatcaagtgcatcctagcatagaacacatgttctaaattttgaaacgtacaaacatctaaccaattgtactaatctgctt

SEQ ID NO: 198446 - DNA, 267 bp, Glycine max
acgacagaaggggacagaacgaagctgctatcgataacatatttcacttgagagcagtatctttatctacgcaagagaagaatagaaaatggatatcaggttgatggatttggactctccattgttcaacactctgcaccgaatcatggatctgacagaggacgcagagaagaacttgaacgctccgacgcggacatacgtgcgcgacgcgaaggcaatggctgcgactcctgcggacgtgaaggagtaccctaactactacgtgtt

SEQ ID NO: 198447 - DNA, 263 bp, Glycine max
acgacagaaggggacagaacgaagctgctatcgataacatatttcacttgagacagttatctttatctacgcaagagaagaatagaaaatggatatcaggttgatggatttggactctccattgttcaacactctgcaccgaatcatggatctgacagaggacgcagagaagaacttgaacgctccgacgcggacatacgtgcgcgacgcgaaggcaatggctgcgactcctgcggacgtgaaggagtaccctaactactacg

SEQ ID NO: 198448 - DNA, 262 bp, Glycine max
tacggctgcgagaagacgacagaaggggagggcgaggaagccacatagagacacaatacagagtgagttgttgctccttcgccacaactctctgccaacatgggtatctccagagattctatgcacaagaggcgtgccactggtggcaagaagaaggcctggaggaaaaagagaaagtatgagcttggtcgccagcctgctaacactaagctgtcaagcaacaagacagtcaggaggatccgtgttagaggtggaaatgtga

SEQ ID NO: 198449 - DNA, 272 bp, Glycine max
aatcgctcgattcgagcgaatcggctcgagacggctgcgagaagacaacagaacggggcacaagtttgatgagatagctagaagcaatcagatgaaaatgaaagtgcttgttttgtttgttgctacagttttggtagcatatgaatgccatggctcagactaccagaagttccctctccaaatgaaaactgggtttggtgggcaatacagcaatgaggtggcatgtgccagttggaggcttggcgtggaagcaaacaacgtagtcaagtggc

SEQ ID NO: 198450 - DNA, 262 bp, Glycine max
actgcgagaagacgacagaaggggagtgcagtatcgttgagaaataaggggaaaaaatggtgtcgctgaaactgcagaagcggctggccgcaagcgtgctcaagtgtggcagaggaaaggtgtggcttgaccccaatgaagtcaacgaaatctccatggccaattctcggcaaaacatcaggaagttggttaaggatgggtttatcatcaggaagccaaccaagattcactcacgctcgcgtgctcgtaggatgaaggaggc

SEQ ID NO: 198451 - DNA, 278 bp, Glycine max
aattcggtcgagacggctgcgagaagacgacagaagggggcacaagtgagtttgttgatcgagataactagaaacagtgtgatgaaaatgaaggtccttgttttcttcgttgctacaattttggtagcatggcaatgccatgcgtacgatatgctccctctccgaatgaacactggctatggtgcccgtactccggaggtgaaatgcgcaagttggaggcttgctgtggaagcacacaacatctttggctttgagaccattcctgaagagtgcgtaga

SEQ ID NO: 198452 - DNA, 264 bp, Glycine max
tacggctgcgagaagacgacagaagggggagtacattgatgacatttacaagttctacaaacttgttgagaacgagagccgcccccacgactacattggttcacagcctgagataaatgagaggatgagagctattctggttgattggctgatagatgttcacaccaagtttgaactttcacttgagaccctttacttgaccatcaatataattgaggggttttcagcagttaagcacagttccagggagggaactgcaattgg

SEQ ID NO: 198453 - DNA, 256 bp, Glycine max
acggctgcgagaagacgacagaagggggaaaaaggtgactgtataattgatggtggtaacgaatggtatgagaacactgaaagaagagagaaagaggtggctgaattgggtctgctctaccttgggatgggagtttctggtggtgaggaaggtgctcgtaatggtccctctttgatgcctggtggttcgtttgaggctttcaaatacatagaagatattcttctcaaggtggcagctcaagtacctgacagtggtc

SEQ ID NO: 198454 - DNA, 194 bp, Glycine max
acggctgcgagaagacgacagaagggggaggaaagtgagtgagagaaagagatcgcagacacagagcagaatggcttctacccaatgtttcttgcaccaccatgctcttaccacccctgccagtgccagatccccatcactacgcatcttggttagcaccaagcctaaccagcttgtttgcaaggcacagaaac

SEQ ID NO: 198455 - DNA, 264 bp, Glycine max
tacggctgcgagaagacgcagaagggggaacagattgtgtgatgcttagtggtgaaagtgctgctggggcatacccagaacttgctgtgaaaatcatggctcgtatctgcattgaagcagaatcatcccttgactatggtgccatcttcaaagagatgataaggtctacaccattgccaatgagtccattggagagccttgcatcatctgctgtccgcacagcaaacaaggccaaagcaaaactcattgcttgtatgacacggg

SEQ ID NO: 198456 - DNA, 245 bp, Glycine max
tacggctgcgagaagacgacagaagggggcacaagtgagtttgttgatcgagataactagaaacagtgtgatgaaaatgaaggtccttgttttcttcgttgctacaattttggtagcatggcaatgccatgcgtacgatatgttccctctccgaatgaacactggctatggtgcccgtactccggaggtgaaatgcgcaagttggaggcttgctgtggaagcacacaacatcttgggctttgaga

SEQ ID NO: 198457 - DNA, 260 bp, Glycine max
cggctgcgagaagacgacagaaggggggtggtgtgcgtgagagtgaagcgagaagcgagaagcgacatggatccagacgcgttggcaaaggcattcgtggagcactactactccaccttcgacaccaaccgcaacaatctcgccaatctctaccaggaaggttccatgctctctttcgagggtcagaagatccagggctcccacaacatcgtcgccaaactcacctcccttcccttccaacagtgccagcactccatcac

SEQ ID NO: 198458 - DNA, 259 bp, Glycine max
tctcgagccgaatcggctcgacggctcgagacggctgcgagaagacgacagaagggggctgatggcactgcttatcacaacgcatgcttcaagtgctctcattgcaaaggaaccttgaagctcagcaactattcctccatggaaggtgttctatactgtaagcctcattatgagcaactcttcaaggagacaggatctttcaagaagaacttccagtcacctgctaagcaagctgtcaaaacaactcctgagctgacaa

SEQ ID NO: 198459 - DNA, 265 bp, Glycine max
taagacgacagaagggggcagtgagaagaagagggggtcagagtgagaaagagaaagagagaattcgtaaaccctaatttcggaaagatcggcgatgactgcctccaaggatcgcgagaacttcgtctacatcgccaaactcgccgagcaggccgagcgttacgaagagatggtggaatcaatgaagaacgttgcgaatctcgacgttgaactgacggtggaggagcggaatttgctttctgttgggtacaagaatgtgattggt

SEQ ID NO: 198460 - DNA, 245 bp, Glycine max
tacggctgcgagaagacgacagaagggggttctagtgtgtgattgtttgtcgttgtaactcgttcttcttcttttgttgttctgtgtttgtgtttgttttttctctcacctgaaaatgtcttgctgcggtggtaactgtggttgcggaagcgtcctgcaagtgcggcaacggctgcggaggctgcaagatgtacccagacttgagctacactgagtcaaccaccaccgagaccttggtcatggga

SEQ ID NO: 198461 - DNA, 251 bp, Glycine max
agacgacagaagggggtaacgactcagtcaaacactctgtaactctttattttattttctttctttctttctccgatcgcatagctcgctcgcaaccaccatgccttcccgaagaagaactctcttgaaggtcatcattctcggtgacagtggggtggggaagacatctttgatgaaccaatatgtgaataagaagtttagtaatcagtacaaggcaaccattggagcggattttttaaccaaagaagtgc

SEQ ID NO: 198462 - DNA, 257 bp, Glycine max
atcgagccgaatcggctcgagtacggctgcgagaagacgacagaacgggactcaccacttcaaaacactcataacacaaagcacaaagcaaagctcatccttgagttaaaaaatggcagcagcttcttccatggctctctcatccccatccttggctggcaaggccgtgaagctgggcccatcagtcccagaagtgggaagggtgagcatgaggaggaccgtcaccaagcaggtctcctcaggaagcccatggtacg

SEQ ID NO: 198463 - DNA, 254 bp, Glycine max
acggctgcgagaagacgacagaagggggagttggggaaattgcttgctggtgtcaccattgctcatggtggtgttcttccgaacattaaccctgttttgttgcctaagaagactgagagggcttccaaggagcctaagtctccatccaaggctactaaatctcctaaaaagtcttaactgacttagtttattgtttctctatttagtgtgcacaaaatgtaaatctgtgtttaggttccttcttgtatcaccat

SEQ ID NO: 198464 - DNA, 222 bp, Glycine max
ctgcgagaagacgacagaaggggcacaagtgagtttgttgatcgagataactagaaacagtgtgatgaaaatgaaggtccttgttttcttcgttgctacaattttggtagcatggcaatgccatgcgtacgatatgttccctctccgaatgaacactggctatggtgcccgtactccggaggtgaaatgcgcaagttggaggcttgctgtggaagcacacaa

SEQ ID NO: 198465 - DNA, 242 bp, Glycine max
tacggctgcgagaagacgacagaagggaaaagtggtgtgctccacgaacgacaagacggtggcagtggaggtggtgcggctggcccctcacccaaagtacaagaggcgcgtgaggaagaagaagaagtaccaggcccacgatcccgataaccaattcaatgtcggcgacatcgtccagctccagaagaccaggcccatcagcaagaccaaggcctttctcgcactccccgttcccaagaggt

SEQ ID NO: 198466 - DNA, 262 bp, Glycine max
aaagtcctgggtaccgacggtttcggccgcagtgacagccgcaagaagctgcgtcacttcttcgaagtcgaccgtcatttcgtggtgttggcagccctggaagccttggctgaccgtggtgagatcgaacccaaggtggtggcggacgccatcgtcaagttcgggatcaacccggaaaaacgcaacccactggactgctgaggagacaccctgtgagcgaactcattcgcgtacctgacatcggcagcggtgaaggtgaagt

SEQ ID NO: 198467 - DNA, 256 bp, Glycine max
cggctcgagggacaaagagacaattcaacttaagagatcaatatggccaccaccactacccagcctccctctaatatctgttttttccttctgttgttgcttctagcacactttcatttgggcataagccaacttgagctgaattactactctaaaagctgcccaaaagctgaagagatcatcaaggaacaagtcacacaactatataacaagcatggaaacactgccgtttcgtgggtcagaaatctcttccacg

SEQ ID NO: 198468 - DNA, 254 bp, Glycine max
agacgacagaaggggattgaaagaaactgttgaatcgcgtcgattaaggttttgagatttctaggctttcatctcagacagtgaaaaaatgatagatataagtacacttaatgctgcacagattactgtgctgggatctgccttttgtgctatgctttccatgcatttcacgtcgcagttactgtctcagcatctcttttattggaagaatccgaaagagcaaaaggctattatcattatcatcctcatggctc

SEQ ID NO: 198469 - DNA, 254 bp, Glycine max
tacgctgcgagaaacgacagaaggggataattgctgcggtccctaaacaacgacaaactcttatgttttctgccactgttccagaagaggtccgtcaagtatgtcatattgctttgagaagggatcatgaatttatcaatacagttcaagagggaacggaggagacacatccaaaggtctgccagacgcatttagttgccccattggacaagcatttctctttactatatgttcttctgaaggaccacattgca

SEQ ID NO: 198470 - DNA, 256 bp, Glycine max
acggctgcgagaagacgacagaagggggtctcgtggaagtgtaagcaagcaaaaccctagcggcgcctgctttctttgttcgtgttttgcatcaggatggagtctcaggtgaagcacgcacttgttgtcaaagttatgggtcgtactggatccagaggacaagtgacccaggttagagtgatttttttggatgatcagaaccgtcacatcatgaggaatgtgaaaggacttgtgagagaaggagacattctcaccc

SEQ ID NO: 198471 - DNA, 166 bp, Glycine max
aagacgacagaaggggaaaggaacaaagaaacaaagaagtaaacacactgtttcatactttcgtttcgttcattcggcgtagaagcaaaagagagagatagagagagggaaaaaggttgctaccaacaacaaacaaaaacaatgttgcttgattccgcggtggcga

SEQ ID NO: 198472 - DNA, 252 bp, Glycine max
cggctgcgaaagacgacagaaggggatcaattcaaaatatatcatcaattataagcatgggtttgtggaacacaacgaatgcagtgtcttgccgctttcacaagtttggtgatgaccaaaagaatctggtcttccaaggtgatgccacgtcttcttccaggggcatagaactcacaaagttagacggtggaggaaaaccagtgggtggcagtgtggggagagtgttatactcttctccagtgcacctttggg

SEQ ID NO: 198473 - DNA, 250 bp, Glycine max
tacggctgcgagaagacgacagaaggggggagagctatacaagtgtcgtgctgctaggcgaacagcagagaatgctgcaccctagatggcgagagtccagtagccgaaagcatcactagcttacgctctgacccgagtagcatggggcacgtggaatcccgtgtgaatcagcaaggaccaccttgcaaggctaaatactcctgggtgaccgatagtgaagtagtaccgtgagggaagggtgaaaagaacc

SEQ ID NO: 198474 - DNA, 256 bp, Glycine max
tacggctgcgagacgacagaaggggataccaaaaacaaaacacaagccaagtgaaagtgagaaaaaataaaaatcaaagagcataatgtcagggatcattcacaagattggggagacccttcatgtgggagggcacaagaaggaggaggagcataagggtgagcaccatgctggagaatacaaaggggagcaccatggtgaacacagtagtgagtacaaaggagagcatcatggtgaacacaaagctggagagtac

SEQ ID NO: 198475 - DNA, 253 bp, Glycine max
  unsure (1)..(253): unsure at all n locations
tacggctgcgagaagacgacagaaggggggaaaccgagaagaagaagatggagatgtatcagatctggagcaggagaatagcgttgggagcgttcgcgnttgttctgcttttcctatcggcctcagcagacgacgtcgttgtgctctctgaagataacttcgagaaggaagttggtcaggacagaggagctctcgttgagttctatgctccttggtgtggacactgcaaaaagcttgctccagaatatgaaaa

SEQ ID NO: 198476 - DNA, 266 bp, Glycine max
gagaagacgaccgaagggggagcgaagaagatattagggtttttgagtgcggtgcggcgatcctagcactctcttctgcagctttcgccgacagcttcattcaccatggctgagcaaaccgagaaggcttttttgaaacaaccaaaagtgtttctcagctcgaagaaaactgggaagggaaagagacccggaaagggtgggaacgcttttggaaatccattgggcttggatttaagactcccagggaagccatcgaaggaacctac

SEQ ID NO: 198477 - DNA, 256 bp, Glycine max
tacggctctcgcgaatacgacgacagaacggggcattatcatttgagttcaaacaaatcaaagccatcgccagctccaacttctctattgttctctccgtctccctagccttctttttggtgctacttaccaaggcacactcgaccgataccgtttctttcaccttcaacaagttcaacccagtccaaccaaacattatgctccaaaaagatgctagtatttcatcctctggggggttacaatcaccaaagttggc

SEQ ID NO: 198478 - DNA, 207 bp, Glycine max
cggctgcgagaagacgacagaaggggcagaagataatgttcgcaatgacctccatcaagggtattggaaggagattcgccaacatcgcttgcaagaaggctgatgttgacatgaacaaaagggctggtgagttgactgctgctgagttggatagtgtgatgactgtggtggcgaccctagggcattcaagttcccgactggtttttg

SEQ ID NO: 198479 - DNA, 258 bp, Glycine max
tacggctgcgagacgacgacagaaggggtttttgaagttcttgccacaaatggagatactcatcttggaggtgaggactttgatcagagaataatggagtacttcattaaattgatcaagaaaaagcatggaaaggatattagcaaggacaacagagcacttggcaacctgaggagagaggctgagcgtgcaaagagggctctcagcagccaccaccaggtccgcgtggacattgaatcacttttgatggtgttgatt

SEQ ID NO: 198480 - DNA, 220 bp, Glycine max
tacggctgcgagaagacgacagaagggggcacaagtgagtttgttgatcgagataactagaaacagtgtgatgaaaatgaaggtccttgttttcttcgttgctacaattttggtatcatggcaatgccatgcgtacgataatgttccctctccgaatgaacactggctatggtgcccgtactccggaggtgaaatgcgcaattgggaggcttcttgggga

SEQ ID NO: 198481 - DNA, 261 bp, Glycine max
tacggctgcgagaagacgacagaagggctgctacagttgaaggtgttgaagcaacactttggagggtacctgagatgctttcggaactaatattggataagttgaaggcccctcctaaaccaaatgatgtaccagacataatgccagaacaacttgtggaggctgatggtttgatatttggttttccttctcgttttgggatgatgccgagccagctcaaggccttctttgatgcaactagtgagctatgggcatcccaag

SEQ ID NO: 198482 - DNA, 261 bp, Glycine max
agaagacgacagaagggggagtgagagaaagagatcgcagacacagagcagaatggcttctacccaatgtttcttgcaccaccatgctcttaccacccctgccagtgccagatccccatcactacgcatcttggttagcaccaagcctaaccagcttgtttgcaaggcacagaaacaacaaacaccacaagaggatattgatgtcagcccaatctctcgccgtttagctctaactgtgctcattggtggtgctgctggttg

SEQ ID NO: 198483 - DNA, 216 bp, Glycine max
ctgcgagaaggcgacagaagggggcacaagtgagtttgttgatcgagataactagaaacagtgtgatgaaaatgaaggtccttgttttcttcgttgctacaattttggtagcatggcaatgccatgcgtacgatatgttccctctccgaatgaacactggtcatggtgcccgtactccggaggtgaaatgcgcaagttggaaggttgctgtggaag

SEQ ID NO: 198484 - DNA, 216 bp, Glycine max
acggctgcgagaagacgacagaaggggaacgcagccaagaaaagaaaatcctcacccattttcttcgtagccaaacactctgaaattctcagttatgtcgtggcaagcgtatgtggatgatcacctactgtgtgaaatcgaaggtaaccacctcactcacgccgctatcatcggcaaagacgtttacgtttgggctcagaggcacaacttccctca

SEQ ID NO: 198485 - DNA, 248 bp, Glycine max
cgagaagacgacagaagggggtaggcaaagagagagagagaaaagcgtgaatcatgtcggacgaagagcatcacttcgattctcaggcggatgcgggagcgtccaagacgtatcctcagcaggctggtaccattcgcaagaatggctacatcgtcatcaaatccaggccttgcaaggttgtagaggtctctacgtcaaagacaggcaagcatggacatgcagagtgtcactttgttgcaattgatatt

SEQ ID NO: 198486 - DNA, 270 bp, Glycine max
ctgcgagaagacgacagaaggggaacacgcggctgccgccggaggtgaaccgcgtgctgtacgttcggaaccttcccttcaacatcacgagcgaggagatgtacgacatcttcggcaagtacggcgccattcggcagatccgcatcggcaccaacaaggacactcgcggaacggccttcatcgtctacgaggacatctacgacgccaaaaccgccgtcgaccacctctccggcttcaacgtcgccaaccgctacctcatcgttctctact

SEQ ID NO: 198487 - DNA, 190 bp, Glycine max
tacggctgcgagaagacgacagaagggtaatttgggaattattgctcccatcgccattggtttcattgtcggcgctaacattttgttgggtggggcttctctggagcggccatgaaccccgctgtgacatttgggcctgctgtcgtgagctggacctggaccaaccactggatctactgggccggcctct

SEQ ID NO: 198488 - DNA, 261 bp, Glycine max
tacggctgcgagaagacgacagaagggggaacaaaacaagtgtttcgaatagattatcctaagtctttgggaatagtgctgcaatggcttcaagtcaggaggaggtgacccttttgggagctactggaagcccatttgtgtgcagggttcatattgccctcaagttgaagggagttcaatacaaatatgtcgaagaaaatttgaggaacaagagtgaactggttctcaaatccaacccagttcacaagaaggttccagtgt

SEQ ID NO: 198489 - DNA, 221 bp, Glycine max
acggctgcgagaagacgacagaaggggggaaacctgttggtccgatagttgatggtgatgctgttgttacattcaacttccgagctgatcgtatgacaatgattgctaaagctcttgagtatgaaaattttgacaaatttgatagagttcgttacccaaaaatccgctatgctggaatgcttgaatatgatggtgaatggaaacttcccaagttcattacc

SEQ ID NO: 198490 - DNA, 255 bp, Glycine max
ggctgcgagaagacgacagaagggggtccccttcttccacatccacactcccctctcaggtttttgtggataagattgagctataatggctgccaggagaccgggtttgattgctttgtttgatgttgatggaactcttacagctcccaggaaggtggtcacaccggagatgttgacattcatgcaagaactgcggaaggttgtaactgttggagttgttgggggttctgaccttataaagatatcagaggcact

SEQ ID NO: 198491 - DNA, 156 bp, Glycine max
tacggctacgagcagacgacagatggggacacaagtaagtttgtagatcgagataactagagtcagtgtgattaaaatgaaggtacatgtattcttcgttgctacaattttggtagaatcgcaatgccatgcgtacgatatgtgccctctccgaat

SEQ ID NO: 198492 - DNA, 244 bp, Glycine max
acggctgcgagaagacgacagaaggggacatggttgatggacttatacgtctaatggaaggggaaaacactggtccaatcaacattgggaacccaggtgaatttacaatgattgaacttgccgagaatgtgaaagagcttatcaatccaaaagtgcagataaatatggttgagaacactcctgacgatcctcgtcagagaaaaccagacattacaaaagcaaaggaattgctgagatgggaacc

SEQ ID NO: 198493 - DNA, 227 bp, Glycine max
gctgcgagaagactacagaagggggagaagttattagggtttttgagtgcggcggtccaaacactcttctctgcagcttttgcctacaactcccttcaccatggctgaacaaaccgagaaagcttttctgaagcaaccaaaagtgtttctcagcacaaagaagactgggaagggaaagagacctggaaaaggtgggaaccgcttttggaagtccattgggcttggat

SEQ ID NO: 198494 - DNA, 250 bp, Glycine max
gggatttcatttcgtttgcaattgaatttcaatttccctaggggcttaatatctccccgcatttgtgcctagcctcattattatcatagtagatattcattccccttatctttctctcttctctctccccgcccaaaccctaactccctaccctattccgctttctctcatccatcatgaatggaggaaagtccaaggccgaatctaagagagccgatgccaaacttgctgtgaataagaagggcgccgc

SEQ ID NO: 198495 - DNA, 276 bp, Glycine max
gcgtacgtgagctcggctgcgagatgacgacagaagggggtagttgatttctgctcaccaaggcttatcacatcacaatttgtgcattgcctcgtgtcctttttcttctttgcttgccaaaaatcttacacacacaggtatctatcaaatgggttctcaccagcaagaaccatggctattggagaatgggaaaccgagggtgttgaccaaggaggataggcatggccgttctgcacacagcatgtcctccacgtctttgcgcaagaagtctagccg

SEQ ID NO: 198496 - DNA, 152 bp, Glycine max
ctgcgagaagacgacagaaggggattgttagggcttatcctcatatcaatgccatcaactttgacttgcctcatgtggttgccactgctcctaagttcgatgggatcacccatgttggaggtgacatgttcgtgtccattcctagtgctgat

SEQ ID NO: 198497 - DNA, 230 bp, Glycine max
actcgagccgctcgagacggctgcgagaagacgacagaaggggggactcccaagagttgctagaattcaagccaacattaggtgcaggaggcatcatcgatgtgcctggagctgccaacagcatcgagatcgaccatctcgctcgctttgctgtaagaggaacaatcccatagagaaggttcgattgctggcccaaaatgtgctgattcccagattgaattgaagagtga

SEQ ID NO: 198498 - DNA, 258 bp, Glycine max
cggctgcgagaagacgaccgaaggggacacacacttgcccatcatcaaagtttcgtcctttctctgctctttgcactctctgacacatttggtgccttgtagagcgtgttttggcaggaaggtggtatggcgaaggacgttgaggttgctgagcgtggctccttctctgggaaggactaccaggaccctccaccagtaccagtctttgatgctggaggagctcaaaaagtggtacttttacagggctctcattgctga

SEQ ID NO: 198499 - DNA, 265 bp, Glycine max
tacggctgcgagaagacgacagaagggggagaacaaaacaagtgtttcgaatagattatcctaagtctttgggaatagtgctgcaatggcttcaagtcaggaggaggtgacccttttgggagctactggaagcccatttgtgtgcagggttcatattgccctcaagttgaagggagttcaatacaaatatgtcgaggaaaatttgaggaacaagagtgaactgcttctcaaatccaacccatttcacaagaaggttccagtgttt

SEQ ID NO: 198500 - DNA, 263 bp, Glycine max
cgagaagacgacagaagggggcacaagtttgttgagatagctagaagcaataagatgaaaatgaaagtgcttgttttgtttgttgctacagttttggtagcatatgaatgccatggctcagactaccagaagttccctctccaaatgaaaactgggtttggtgggcaatacagcaatgaggtggcatgtgccagttggaggcttggcgtggaagcaaacaacgtagtcaagtggcaaactgttcctgcagcttgcggagagta

SEQ ID NO: 198501 - DNA, 266 bp, Glycine max
gtgggtaaacggtaacagcattggtaggtattggtcaagctaccttgcagatgagaatggttgctctccaaaatgtgattatcgtggtccatacacttctaacaagtgcttgtcaatgtgtgcacaaccttctcaaagatggtaatcaaatcaatttcttcaccaaattaattttagaattgtgttattttggtataaaaacccattagcattttatattttgttgtattacaataattaggtaccatgttccacgctcatttctt

SEQ ID NO: 198502 - DNA, 258 bp, Glycine max
tctcgagccgaatcggctcgagtacggctgcgaaagacgacagaaatggagagagaatcaaactaataccactttcttagtttcaaactcaacttttgagggtcttttctctattaaaaacacacaagagttttagtcttttagctaacagtgttcatatgatgaatgcttcaaagttcattaaatgtgttactgttggagatggagctgttgggaaaacctgcatgctcatttgctacaccagcaacaagttcccca

SEQ ID NO: 198503 - DNA, 245 bp, Glycine max
acggctgcgagaagacgacagaagggggttctagtgtgtgattgtttgttgttgtaactcgttcttcttcttttgttgttctgtgtttgtgtttgttttttctctcacctgaaaatgtcttgctgcggtggtaactgtggttgcggaagctcctgcaagtgcggcaacggctgcggttgctgcaagatgtacccagacttgagctacactgagtcaaccaccaccgagaccttggtcatgggagt

SEQ ID NO: 198504 - DNA, 266 bp, Glycine max
acggctgcgagaagacgacagaagggggaagtctaagaaagaaaacagagagcgaagaaggagaagagatcagaaaaatggcgtccaaagctccaaagaaggccaatctcctcgatcaccactccatcaagcacatcctcgacgagtcagtctccgaggtggtaacgagtcgtgggtttgtggaagacgtgagattgagcaatgtgaggctcctcattggggcaatcatcatcgtcattgctctcttcgcccaattctacaagaag

SEQ ID NO: 198505 - DNA, 296 bp, Glycine max
tctcgagcagctcgagcggctcgagcggctcgagacggctgcgagtagacgacagaagggacaggaagtatattaatgagataaacttctgtatgaaaagcatgatcccagtaagaaagaggcatggaagcctgtgacaaaagagtcaaacccatttcaacaatgtgcttgtgttgtctgtccactacaccatttggatggtgagtatgaggacagataagcctatgatgaatgcctatttgatcaagatattgagtaaaaggtctatactcaccccccaatcagtttgaatactt

SEQ ID NO: 198506 - DNA, 292 bp, Glycine max
gagaagacgaccgaaggaggagcgaagaagatattagggtttttgagtgcggtgcggcgatcctagcactctcttctgcagctttcgccgacagcttcattcaccatggctgagcaaaccttgaaggcttttttgaaacaaccaaaagtgtttctcagctcgaagaaaactgggaagggaaagagacccggaaagggtgggaaccgcttttggaaatccattgggcttggatttaagactcccagggaagccatcgaaggaacctacattgacaagaagtgccccttcactg

SEQ ID NO: 198507 - DNA, 261 bp, Glycine max
caccaatgggtgtttttgagtttgataagtttgccacaggaacagaggccatagccaagaaactggcagagctgagtgggaagggagtaacgaccatcattggaggaggtgactctgttgccgctgtggagaaggttggtcttgcagacaagaatgagccacatctccactggtggtggtgccagcttagagcttcttgaggggaagcaactccctggtgtccttgcccttgatgatgcttgagtaaacatcactagttcc

SEQ ID NO: 198508 - DNA, 284 bp, Glycine max
  unsure (1)..(284): unsure at all n locations
acgtgcgagaagacgacagaaggggcaggccggcattgacaagctcgccgacgctgttgggctcactcttgggcccagagggaggaatgttgtgttggatgagtttggaagtcctaaagtggtcaacgatggtgtcaccattgctcgcgcaatngagcttcccgatcctatggagaatgctggtgcagctcttatcagagaggttgctagcaagactaacgactctgcgggtgatgggactaccacatagtcggttcttgctcgcgagataattaagctggggc

SEQ ID NO: 198509 - DNA, 289 bp, Glycine max
tacggctgcgagaagacgacagaaggggcacaagtgagtttgttgatcgagataactagaaacagtgtgatgaaaatgaaggtccttgttttcttcgttgctacaattttggtagcatggcaatgccatgcgtacgatatgttccctctccgaatgaacactggctatggtgcccgtactccggaggtgaaatgcgcaagttggaggcttgctgtggaagcacacaacatctttggctttgagaccattcctgaagagtgcgttgatagcacaaaggaatacatccatg

SEQ ID NO: 198510 - DNA, 285 bp, Glycine max
ctgcgagaagacgacagaaggggaagcttcctaaggagggaggacccggcggagaaggggggaagaagaagaagaggaacaagaagagcgtggagacatacaagatatacatattcaaggtgctgaagcaggtccaccctgacattggtatctcaagcaaggccatgggaatcatgaacagcttcatcaacgacatcttcgagaagcttgctcaggaatcttccagacttgcccgctacaacaagaagcccaccatcacttcaagggaaatccagaccgcggtca

SEQ ID NO: 198511 - DNA, 290 bp, Glycine max
tacggctgcgagaagacgacagaaggggacaacactcatagtagagtaaccaaaaggagagtgcaataactcgttgtacattcctagtgtgtgggagggacatggctaagatgtgtgttttggttttggttcttgctctggctgtggccacaagtgccagaaacgttcccaaccccaaggatgctggtcttaaggaccagaagaacttcatcagctatggtggagttggtggttattccgggattgggaacaatggactgccttttggaggagctggtgccggaataggt

SEQ ID NO: 198512 - DNA, 260 bp, Glycine max
  unsure (1)..(260): unsure at all n locations
gataatacatacgagtattttatgtatgatggcctgaaacactcttgtgttgagggaaatcatattgttaatgtttcctcattctcaaaagcatttggantgatgggatggcgggttggatatatagcatatccctctgaagtaaaagactttgctgaacancttctcaaagttcaagacaacattcccatctgtgcttcaatattatcacagtatcttgccctgtattcattggaagtggggcctcaatgggttgtaga

SEQ ID NO: 198513 - DNA, 289 bp, Glycine max
gcgagaagacgacagaagggggttgccaattattggtaacctccacatgctagggaaactcccgcaccgcacccttcaaacctttgcaagaaaatatggacccataatgtccttgaagctagggcaagtccaagccatagtggtttcctcccctgaaaccgctgaactattcctcaagacccattacactgtttttgcaagcaggccaaagattcaagcctctgaatatctctctcatggcaccaagggcttggtgttttccgagtatagcgcctactggcgcaaagtg

SEQ ID NO: 198514 - DNA, 285 bp, Glycine max
agaagacgacagaagggggaggaagctttgagagagagagagggaggagggagagtgttgacgctccatcaagatgggtatttctagggattccatgcacaagaggcgtgccactggtggcaagaagaaggcatggagaaagaagagaaagtatgagcttgggcgtcaggccgcaaacaccaagttatcaagcaacaaaactatccggaggattcgtgttcgaggtggcaatgttaaatggagggcattgaggttggataccggcaattactcatggggtagtga

SEQ ID NO: 198515 - DNA, 286 bp, Glycine max
tacggctgcgagaagacgacagaagggggaagctggaaaagttagaagtagtgaagaaaatgaaagtcattgttttcttcgttgctataataattttaggtgcagaatggcaatgcaatgggtcagagcatgagcatgagcatggccacagctaccaaattttccctttgcgaatgaaaaccggccccggtggccactacattccggaggtatcgtgcaaaagttggaggcttggtgtggaagcacacaacgtcattgactggagaaccattcctcaagattgcga

SEQ ID NO: 198516 - DNA, 233 bp, Glycine max
aatagacgacagaaggggacaccaacaccaaaacaaacccattaagatggccttcctttgtaacccttccaatgcttgttccttgaagccctaatcctcttgcttcaagggcttgctacttaattccaaccaatttaagaagccaacaatgtacaagccttcaatgtacaagccaccagtgtacaaaccaccggtttattaagcaaaaccaccggtttacaagccggaaccac

SEQ ID NO: 198517 - DNA, 292 bp, Glycine max
ggtcaattaaggatcaaatgttggaacctcatgggtaaggataaggtaatggaattgatagataaattcatagacctaggtaggataggagaatggataaagggaatagagatgatgatagagtacatactgagaaacagaataattccgtacgggtacaactcttatttgaacgaagtgaaaaaaatgcgatctttgttgtctaatagaacaaacacgaataccttaattgagtcggtcaagatcaaatctgtttatcaaagtgcttctctgattgctcaagacatttctt

SEQ ID NO: 198518 - DNA, 288 bp, Glycine max
acggctgcgagaagacgacagaagggaactgttgttgagggaactatacagaagctatttgaagggcatcatatgaattatatcgaatgcatcaatgtggactataaatcaactagaaaggagtcattttatgaccttcagcttgatgtgaagggctgtcctgatgtttatgcttcctttgacaagtatgttgaagttgaacgtcttgaaggggataacaaatatcatgcggaacaatatggtttgcaggatgctaagaagggtgtcctgttcattgatttccctcct

SEQ ID NO: 198519 - DNA, 285 bp, Glycine max
tacggctgcgagaagacgacagaagggggcacaagtgagtttgttgatcgagataactagaaacagtgtgatgaaaatgaaggtccttgttttcttcgttgctacaattttggtagcatggcaatgccatgcgtacgatatgttccctctccgaatgaacactggctatggtgcccgtactccggaggtgaaatgcgcaagttggaggcttgctgtggaagcacacaacatctttggctttgagaccattcctgaagagtgcgttgaagcaacaaaggaatacat

SEQ ID NO: 198520 - DNA, 285 bp, Glycine max
ggggacccattcaacattttctctgtctatctctcgttgtagcgtacgcagcagttgaatttggaaaacaagatgtctcaccgcaagttcgagcacccgagacacggttcccttggctttctcccaaggaagcgagcttctcgtcatcgcggaaaggtgaaggctttcccaaaagacaatcctagtcaaccatgcaggttgactgcctttgtgggctacaaagctggaatgacccacattgttagagaggttgagaaacctggatcaaagcttcacaagaaagag

SEQ ID NO: 198521 - DNA, 284 bp, Glycine max
acggctgcgagaagacgacagaagggggatactaaattactgatacaggaacagcagagaaacaaagttagaagtaaagaagatcatggcttctctagcaaccttggctgctgttcaaccagctacgatcaatggccttgctggaagttccctctctggaactaagctctctttcaagccctctcgccacagtgtcaaatccaagaacttcaggagtggtgccgtggtagcaaatatggtgacaagagtgtgtactttgatttggaggatctgggcaacactac

SEQ ID NO: 198522 - DNA, 282 bp, Glycine max
gtggcactgtttggccgttgatgatcagggcagagcttatgcttggggtggaaatgaatacgggcagtgtggcgaagaacccgagcgcaaggatggcactggtagacctttaaggagagatatagagatccctcagcgctgtgctcctaagcttgttgttcggcaggttgctgcaggtggaactcactcagtggtacttacacgagaagggcatgtttggacatggggtcagccatggccgcctggtgacataaaacagatttcagtccctgttcgggttca

SEQ ID NO: 198523 - DNA, 278 bp, Glycine max
tactcgagccgaatcggctcgagacgacagaagggggcacaagtgaacttgttgatcgagataactagaaacagtgtgatgaaactgaaggtccttgttttcttcgttgctacaattttggtagcatggcaatgccatgcgtacgatatgttccctctccgaatgaacactggctatggtgcccgtactccggaggtgaaatgcgcaagttggaggcttgctgtggaagcacacaacatctttggctttgagaccattcctgaagagtgcgttgaagc

SEQ ID NO: 198524 - DNA, 288 bp, Glycine max
acggctgcgacgacagaagggggcgcacccagagaggaagcttagagagagagagagagagagagagagagaggagagagtattggcgcttcatcaagatgggtatttctagggattccatgcacaagaggcgtgccactggtggcaagaaaaaggcttggagaaagaagagaaagtatgagcttgggcgtcaggcagcaaacaccaagttatcaagcaacaagacaatcaggaggattcgtgttagaggtggcaatgttaaatggagggcattgaggctggatactg

SEQ ID NO: 198525 - DNA, 285 bp, Glycine max
tacggctgcgagaagacgacagaaggggacagacatcatttcaggaaccagaatcagagatttaaaggttggaacgaaaattaatcatcgatggcagcagagacgaaagaagtttcaggttcggagatgtctctaaaggatcagggcaacgagtttttcaagtcaggaaagtatctcaaagctgctgcactctacactcaagccatcaagcaagacccttctaaccctactctctatagtaattgtgctgcagcattactgcaattggataagctcaataaagct

SEQ ID NO: 198526 - DNA, 269 bp, Glycine max
tacggctgcgagaagacgacagaagggctgctacagttgaaggtgttgaagcaacactttggagggtacctgagatgctttcggaactaatattggataagttgaaggcccctcctaaaccaaatgatgtaccagacataatgccagaacaacttatggaggctgatggtttgatatttggttttccttctcgttttgggatgatgccgagccagctcaaggccttctttgatgcaactagtgagctatgggcatcccaagcaattgcc

SEQ ID NO: 198527 - DNA, 280 bp, Glycine max
acggctgcgagaagagacagaagggggtagcattcagtgaaacactagctagggtattgggagctctcgttgtttcggagttagggaccttacgcagccatggccactgctacgaatgccgccgccgccccaccacgccagctctcccagaaggaagctgacatccagatgatgttggccgccgacgtccacctcggcaccaagaactgcgacttccaaatggtatattacatcttcaagcgccgcaacgacgggatttacattattaaccttgggaaga

SEQ ID NO: 198528 - DNA, 282 bp, Glycine max
acggctgcgagaagacgacgaagggggagtgagtagtgagaatggagtttcaagggttaccggaaggttgcattgctagtatactctctcgcactacgccggcggacgtgtgtaggttttccgtcgtatcaaagattttccgttcggccgctgaatcggacgctgtgtggaaacgttttctcccttccgattaccattccatcatttcccagtctccttcgcctctcaactatccttccaagaaggagctctatctcgctctctcggatcgccctatcatca

SEQ ID NO: 198529 - DNA, 283 bp, Glycine max
tactcgagccgaatcggctcgagtacgggagaagacgacagaaggggcggggttggatattcctacacagtgacaagaggtttgctgggtttgataaggagaagaaggagcttgatgcagacgttcatcggaaatatgtttttggtggacatgttgctgcctatatgaagatcttggcggaagatgaaccagagaaataccagtcacacttcagtgaatacatcaagcgtgggatagaagctgatggtattgaggcactgtataaaaatgttcatgctgccat

SEQ ID NO: 198530 - DNA, 281 bp, Glycine max
tacggctgcgagaagacgacagaagggggcacaagtttgttgagatagctagaagcaataagatgataatgaaagtgcttgttttgtgtgttgctacagttttggtagcatatgaatgccatggctcagactaccagaagttccctctccagatgaaaactgggtttggtgggcaatacagcaatgaggtggcatgtgccagttggaggcttgagcgtggaagcaaacaacgtagtcaagtggcaaactgttcctgcagcttgcggagagtacatagctgc

SEQ ID NO: 198531 - DNA, 278 bp, Glycine max
tctcgagccgaatcggctcgagtacgggagaagacgacagaaggggcggggttggatattcctacacagtgacaagaggtttgctcggtttgataaggagaagaaggagcttgatgcagaggttcatcggaaatatgtttttggtggacatgttgctgcctatatgaagatcttggcggaagatgaaccagagaaataccagtcacacttcagtgaatacatcaagcgtgggatagaagctgatggtattgaggcactgtataaaaatgttcatgctg

SEQ ID NO: 198532 - DNA, 285 bp, Glycine max
acggctgcgagaagacgacagaagggtaagggaggcagaaaagctggttgcaaccaagattcatccgatgacaataatatcaggttttcgaatggcagcagagtgtgctcgtaatgctttgttggagaaggttgtggacaataaagcagattctgagaaattcaggtcagacttattgaacattgcaatgactactttgagctccaagattctctcacaggacaaggagcattttgcaaaattagctgtggatgctgtaatgagactaaagggaagcaccaattt

SEQ ID NO: 198533 - DNA, 282 bp, Glycine max
tacggctgcgagaagacgacagaaggggagaagaaacgagagcgagagagagaaagaaatggcgaccaacattgggatcatggatgcggcttacttcgtcggcagatctgagattctttcttggatcaactcaactctgcaactcaatctctccaaagtcgaagaggcttgttccggcgccgttcattgtcagcttctcgatgccgctcatccagggatcgtgcctatgcacaaggtcaatttcgacgccaagagcgagtacgagatgattcagaactacaa

SEQ ID NO: 198534 - DNA, 278 bp, Glycine max
tctcgagccgattcggctcgagtacggctgcgagaagacgacagataagagagggcgaattctatgaggcagagaaggaggaaaagagtgtgttgccccagcagaagaaagatgaccagaaaactgttgactctgcgttgataaaagccatcgagagtgttccagacttgaagacttatctgggtgccaggttttctctaaaggctggcgtgaaacctcatgagctagtcttctagagtaaaggggtgttactcttgttcttcatatcctggttgttt

SEQ ID NO: 198535 - DNA, 279 bp, Glycine max
tacggctgcgagaacgacgacagaagggattgagtatcttcacacgggttgtgttcctgcagtcatccatcgagacttaaaaagcagcaacattcttcttgacatacaaatgagagccaaggtttcagattttggactctcaaaacttgctgtggatggagcctcccatgtatatagcatagttcgtgggacagtaggatatttggatcctgagtactatatttccagcagcttactgacaagagtgatatttatagttttggcgtaattcttcttgaa

SEQ ID NO: 198536 - DNA, 268 bp, Glycine max
  unsure (1)..(268): unsure at all n locations
gaagacgacagaagggggcacaagtttgttgagatagctagaagcaataagatgaaaatgaaggtgcttgttttgtttgttgctacagttttggtagcatatgaatgccatggctcagactaccagaagttccctctccanatgaaaactgggtttggtgggcaatacagcaatgaggtggcatgtgccagttggaggcttggcgtggaagcaaacaacgtagtcaagtggcaaactgttcctgcagcttgcggagagtacatagctg

SEQ ID NO: 198537 - DNA, 249 bp, Glycine max
  unsure (1)..(249): unsure at all n locations
gactcgcagttgtattgttnaacaagggtttctctgtctgcttcttcactttctctcgtttcaatcgaaaccaaaacaaaaacatgggcagaaaattcttcgtcngtggcaactggaaatgcaatgggaccactgaggaggtaaagaagattgttactactttgaatgaggctaaagtcctggagaagatgtcgtagaagttgttgtgagccctcctttgtgttccttcctgttgtaaaagtttgctgc

SEQ ID NO: 198538 - DNA, 183 bp, Glycine max
cggctgcgagaagacgacagaagggggccattgttgttgctattatcatccgcagctgcttttattcgcaccgcaaacagtgagccatggccgtcggaaagaacaagcgcatctccaaggggaagaagggtggcaagaagaaggcagctgatccctttgccaagaaggattggtatgacatta

SEQ ID NO: 198539 - DNA, 159 bp, Glycine max
ggaccaatgggtgtttttgagtttgataagtttgccacaggaacagaggccatagccaagaaactggcagagctgagtgggaagggagtaacgaccatcattggaggaggtgactctgttgccgctgtggagaaggttggtcttgcagacaagatgagc

SEQ ID NO: 198540 - DNA, 210 bp, Glycine max
ttctcgagccgaatcggctcgacgagaagacgacagaaggggacaatgaaacattcgcaaaatcaaaatcccagtatcaaaattcttctctttttttcatatttcgcaaagacatggatttcagagtgatgggtttggagtctccactgttccacacgctgcaacacatgatggacatgtcagaggacggtgcaggagacaacaagacac

SEQ ID NO: 198541 - DNA, 226 bp, Glycine max
ggctgcgagaagacgacagaagggggaacctttgcattctattcattcaagattcagcaagtgcgttttggaagcagagaccgaaatacttcgagatggcccgtacaaagcaaactgctcgtaagtcaactggaggaaaagctcccaggaagcagcttgcaaccaaggctgcacgtaagtctgcaccaacaactggtggtgtgaagaagcctcatcgttatcgccc

SEQ ID NO: 198542 - DNA, 275 bp, Glycine max
acggctgcgagaagacgacagaaggggacggcaacagaagaataatcgagacacagatcatagtgatcattttttaatttctcagatttatccgacgtcgctgcagatccaccaaccgttatggctgccttcagcggtgatgaaacggcaccgtttttcggcttccttggcgccgcagctgccctcgtcttctcctgtatgggagctgcctatggcacagcgaagagtggcgtgggcgtagcttccatgggtgtaatgagacctgagctggtgat

SEQ ID NO: 198543 - DNA, 199 bp, Glycine max
acggtgcgagaagacgacagaaggggaagaagaagggagcgagcttcgtgatcgattgcgcgaaccggtggaggataagattatggacattgcttctctggagaagttccttcaggagaggattaaggtcggcggcaaggccggtgcactcggcgattccattaccgtcaccagggacaagagcaagatcaccgtcacc

SEQ ID NO: 198544 - DNA, 203 bp, Glycine max
acggctgcgagaagacgacagaaggggcaactagccagtgcttctgtccttccaatgatcctcaaatcagcacttgagcttgatctgttggaaatcatagccaaggctggccctggtgttcatctttcccccactgacatttcttctcagctcccaacacagaaccctgatgcacccgttatgttggaccgtatattgcgcct

SEQ ID NO: 198545 - DNA, 270 bp, Glycine max
agaccaaatggtcattgatgtttattcggagtttttcccggatatagctgttggttacgaggatccccgagtgcatgttcatatcagcgatggagttgcgtttatcaattctgttcctgagggcacttacgatgtcattatatcggatgcttttccagcaatggggcatagtgctgatgttcttgctgatgaatgcttcttagaatcagtagcaaaggctcttcgacccggaggagtgttctctgctccagcagacagcctgtggcataa

SEQ ID NO: 198546 - DNA, 270 bp, Glycine max
cggctgcgagaagacgacagaagggggccataagaaagagcaagtcgaaaagttcatctctccctctctctcacacatcccagccatgagcctcttcggtataggcagaaaccagagaacattccgcccgaaaaaaagtactccttctggaagtaagggagctcaacttagaaaacatattgatgccacgttgggtagtggaaatctgagggaagcagtaaagctacctcctggggaggatttaaatgagtggctagctgtcaacactgt

SEQ ID NO: 198547 - DNA, 270 bp, Glycine max
tacggagacgacagaaggggaaaattctaattaaaaaaaaaacaaaaataatttatattttcttaaagaacaaaatgtttgttatgcttaatatctttaatttggtctgtatttgtattcactccgtcctctattcaagtagttttttctcggcgaaattgcccgaagcctacgctttcttgaatccaattgtggatattatgccagtaatacccttactcttttttcttttagcttttgtttggcaagctgctgtaagttttcgatgat

SEQ ID NO: 198548 - DNA, 149 bp, Glycine max
acggctgcgagaacgacagaagggggacaaggtgcatctctttggagatggcacactcaaagctatttttctggatgaagatgatgttgcaacatatacaatcaaggcaatagatgatccacgaacccttaacaaaacattgtacctaa

SEQ ID NO: 198549 - DNA, 126 bp, Glycine max
ctagaagacgacagaaggggtaggtgcaagagtttgttgtgagctataagctagtttatcgtgaggagaatatgaagttgtttgttttctttgttgctgcagtagttttggtagcatggccatgcc

SEQ ID NO: 198550 - DNA, 265 bp, Glycine max
aagacgacagaagggggctcgctcgacaacaacagaaagcggcacgacaaaccctagcgattcgatggtgtgcgatgcgactcactgagttgaactagataaagatctgagtcgcggtgattggttcgacgcgctcatgggtgctgcgggctccaagctcgagaaggctctcggcgaccaattccctgaaggagagcgttactttggccttgagaatttcggcaatacttgttactgcaacagcggttttgcaggcactatactt

SEQ ID NO: 198551 - DNA, 230 bp, Glycine max
acgacagaagggggaacacaaacagcagcgtcttggtttgtgagagagacagaggcacagagagaaaatggtttcggggtcaggaatctgcgcgaagagggtagttgtggacgcgcggcaccacatgctggggaggctggcatcgatcgtggcgaaggaacttctgaatgggcagaaggtggtggtggtgcgctgcgaggagatttgcatctccggtgggctcgtcaggc

SEQ ID NO: 198552 - DNA, 228 bp, Glycine max
tatcgagcgaatcggctcgagacggctgcgagaagacgacaatagggggggagagaactagaggagaagggaggacagatgagtagttcatcaaggccggtgccgaggagagagagtccatggggagtcaccggagagaatcatcctgaacccaaagctcaccgctgcaatgaccgtgtcgaggacgttattcaggcttgctttgagggaaacccattcaagactgtt

SEQ ID NO: 198553 - DNA, 229 bp, Glycine max
tagaagacgacagaagggggcagttgagatttgagaattgactctgagaatcgagaaaatggccggtttaccagcgaggctccgtctccaacccaccgacgtcaaagccgccgccttgtggggcgttaccgccgccactggcgctctctacctcattcagccatggggatggttgacgaagacattcttggagaagccagaacctgagcaaaaatgagttggcttctga

SEQ ID NO: 198554 - DNA, 176 bp, Glycine max
cggctgcgagaagacgacagaagggccagcactcgacaaagatacactttgggaatttcaacctaagaaaattggtgaaggcgaccttttaactggtggagatttatatgacactgtttatgagaacagtctaatgcaacaccatattgcacttcctcctgataacatgggaaaga

SEQ ID NO: 198555 - DNA, 233 bp, Glycine max
tacggctgcgagaagacgacagaaggggacagcggcgtttgaaactgagaaaataatggggtgggagagcttcgtggtggtgcacaacatagcaaagaggcacaacgtgggaacacttgctcgcagtgccaccgcgttcggcgtatcagaactcatcctcgttggtcgaagagatttcaactttttcgggagccatgggtcctcctcccacctccgatttcgacacttccact

SEQ ID NO: 198556 - DNA, 235 bp, Glycine max
tacggctgcgagaagacgacagaaggggagtgggtgaagggacggcaaatggatggagttctgactataaacacatactgaaattgcaaagcatctttcacttccaccagttaagctccactgcagcatgcttgctgaagatgctatcaaagcgcgccgttaaagactatgaagctaagcgtgctaaggcaactgctagcggagaggcagcaacatttgagacgcctgccactgc

SEQ ID NO: 198557 - DNA, 236 bp, Glycine max
tacgctgcgagaagacgacagaagggggcacaagtgagtttgttgatcgagataactagaaacagtgtgatgaaaatgaaggtccttgttttcttcgttgctacaattttggtagcatggcaatgccatgcgtacgatatgttccctctccgaatggacactggctatggtgcccgtactccggaggtgaaatgcgcaagttggaggcttgctgtggaagcacacaacatctttgg

SEQ ID NO: 198558 - DNA, 217 bp, Glycine max
agacgacagaaggggaccaatattctctctgaagtggaataagaaaggagattatcttctgactggaagttgtgatcaaactgcaattgtgtgggatgtgaaggcagaagaatggaaacaacaatttgaatttcattcaggtccaacacttgatgttgattggcgcaacaatgtgtcttttgccacaagttccacagacaatatgatatatgtttgc

SEQ ID NO: 198559 - DNA, 229 bp, Glycine max
cggctgcgagaagacgacagaaggggggttcctagacaagatcaaggacaagatccacggcgaggagggtggcgccaccgccgagggcgagaagaagaagaagaagaaggagaagaagaagcatgaacatggccatgacagcagcagcagcagtgacagtgattagattatctcccactgctgcatcacctatatatcttataaggtgtatgggaccatagtagtgagg

SEQ ID NO: 198560 - DNA, 229 bp, Glycine max
tacggctgcgagaagacgacagaagggggaaatggaatgggtggagaatcaatttacggagagaagtttgctgatgagaacttcaagttaaagcatactggaccaggacttctatcgatggcaaatgctggtcctaataccaatggttcacaatttttcattacaactgtgacaactagctggttggacggaaggcatgttgtttttggtaaagttctttctggaatgg

SEQ ID NO: 198561 - DNA, 203 bp, Glycine max
tacggctgcgagaagacgacaggagggggatgcacaagtttgttgagatagctagaagcaataagatgaaaatgaaagtggctgttttgtttgttgctacagttttggtagcatatgaatgccatggctcagactaccagaagttccctctccaaatgaaaactgggtttggtgggcaatacagcaatgaggtggcatgtgcc

SEQ ID NO: 198562 - DNA, 228 bp, Glycine max
cgagaagacgacagaagggggggttgctgagaaaaaaagaggaagaaggggtccgggcagtgttattggatccagtgctgctggttgcatttgtgctttcctcacgatttttggtgttgggggagaggcattttctcggctttggagacttggatttgttgccagtttctgcactaagttgagtgacactgtctcaagtgagattgggaaggcatatggcaaaacaac

SEQ ID NO: 198563 - DNA, 229 bp, Glycine max
cggctcgagtacggctgcgagaagacgacagaaggggcacaagtgagtttgttgatcgagataactagaaacagtgtgatgaaaatgaaggtccttgttttcttcgttgctacaattttggtagcatggcaatgccatgcgtacgatatgttccctctccgaatgaacactggctatggtgcccgtactccggaggtgaaatgcgcaagttggaggcttgctgtggaag

SEQ ID NO: 198564 - DNA, 231 bp, Glycine max
tacggctgcagaagacgacagaaggggggataacttggagcgtgttcttgagtgcctagaccgggagaagtgtgaaacttttgaagattgtatcacttgggctcggctaaagtttgaggattattttgttaaccgggtgaagcagttgatctatacttttcctgaagatgctgcaactagtactggagctctgttctggtctgcaccaaaaagattccctcgtccactaca

SEQ ID NO: 198565 - DNA, 212 bp, Glycine max
gatccagatctggcagactagtatccgatcctctgtcctctcgaagctttcatcgttcaacatattctcaccatctcagtcatgggcctgctatcttgttttaggtctaccgtcctgagaaaatgttccaaaggaagctctggcatgtcaagattcctgtatacgaacaattttcaacgaaacttgattccgtctggtggcaatgaatcgta

SEQ ID NO: 198566 - DNA, 224 bp, Glycine max
acggctgcggacgacagaagggcaagaaagtacaagtgaagcagtgaatgcatactatgcagcagcattgctgggtctagcatatggtgactcaagtcttgttgacactggatcaacgctggtggcgttggagattcttgctgcacaaacctggtggcatgtgaaagcagaagacaacttgtatgaagaggaatttgcaaaagatagcagtatagtgggtgttc

SEQ ID NO: 198567 - DNA, 223 bp, Glycine max
caatttaccttgccgtatttatcacttactgcccgaagaaagctaggatgtcgacattgaggatgattgttttgttaaattttgggggattttgcacaattgtcctcttaacccacctactagcaaaaggagaagaagcccgtgtcaagcttctaggatggatttgcgtagtctttgacactagtgtttttgcagcacctttaagcattattagggtggtaat

SEQ ID NO: 198568 - DNA, 223 bp, Glycine max
acggctgcgagaagacgacagaagggggccattgttgttgctattatcatccgcagctgcttttattcgcaccgcaaacagtgagccatggccgtcggaaagaacaagcgcatctccaaggggaagaagggtggcaagaagaaggcagctgatccctttgccaagaaggattggtatgacattaaggctccttctgtttttcaagtgaaaaatgttggcaaaa

SEQ ID NO: 198569 - DNA, 230 bp, Glycine max
aggtgcgagaagacgacagaagggtgagatggaagaggtttgcagtgcttgcagcgatgtgcattctagctgttcgggcagtaatagttcaacttgcatttttccttcacacccagactcatgtatacaagaggccacctgtcttttcaagatcattgatttttgctactgcattcatgagcttcttctctgtagttatagcactgtttaaggatatacctgacattgaa

SEQ ID NO: 198570 - DNA, 231 bp, Glycine max
tacggcgagaagacgacagaagggggagcaaaaccctaatccctatttttcttcctcagtagtgtcatttacgcttctcttctctgcagcaactatgcctaaccctaaggtcttcttcgacatgaccatcggcggtcaatctgctggccgcatcgtgatggagctctacgccgacgtcactccccgcaccgccgagaacttccgcgcgctttgcaccggcgagaagggcgt

SEQ ID NO: 198571 - DNA, 217 bp, Glycine max
tacggctgcgagaagacgacagaagggggagagagaagtgttcacgtctttgagaaatgggtgcttcggcatcggtcacagaaaaatccatccatgaattcatggtcaaggatgctaagggcagagacgtgaacctcagcacctacaaagggaaggttcttcttgtagttaacgtcgcttcaaaatgtggatttacaaattccaattacacccagtt

SEQ ID NO: 198572 - DNA, 219 bp, Glycine max
cggctgcgagaagacgacagaaaggactgcttaaggacccttctctctctcattgaggaggcagggaaagctaataaactagtggatgatgctcgatcttcatacgtaaaagagaggcttcataccaatccagctttcatggagaggctgcatgcgaagtcaatgaggttgcgagaatctaatcaggttcctgcttgaggttttcagatctgatgtatg

SEQ ID NO: 198573 - DNA, 196 bp, Glycine max
  unsure (1)..(196): unsure at all n locations
tggaaaaggtggtgcttttactggagaaatcagcgcggaacaactaaaagatcttggatgcaagtgggttgttcttggacattctgagcgaagacatgttattggagaaaatgatgagtttatagggaagaaagctgcctatgctttgngccanggtcttggggtgttgcatgcattggagattgttagaaganng

SEQ ID NO: 198574 - DNA, 204 bp, Glycine max
tacggctgcgagaagacgacacaaggggataccaaaatcaaaacacaagccaagtgaaagtgagaaaaaataaaaatcaaagagcataatgtcagggatcattcacaagattggggagacccttcatgtgggagggcacaagaaggaggaggagcataagggtgagcaccatgctggagaatacaaaggggagcaccatggtga

SEQ ID NO: 198575 - DNA, 228 bp, Glycine max
tacggctgcgagaagacgacagaatgggactgttgttgatggaactatacagcagctatttgaaggcatcatatgaattatatcgaatgcatcaatgtggactataaatcaactagaaaggagtcattttatgaccttcagcttgatgtgaagggccgtcctgatgtttatgcttcctttgacaagtatgttgaagttgaacgtcttgaaggggataacaaatatcat

SEQ ID NO: 198576 - DNA, 228 bp, Glycine max
tacggctgcgagaagacgacagaagggggcacaagtgagtttgttgatcgagataactagaaacagtgtgatgaaaatgaaggtccttgttttcttcgttgctacaattttggtagcatggcaatgccatgcgtacgatatgttccctctccgaatgaacactggctatggtgcccgtacttcggaggtgaaatgcgcaagttggaggcttgctgtgaaagcacacaa

SEQ ID NO: 198577 - DNA, 148 bp, Glycine max
agacgacagaaggggggacgaaagagccaaaatcccagacccaagtgctgtgaagcccgatgactgggatgaggatgcacccatggaaatcttagatgaagaagcagagaaacctgaaggatggttggatgatgagccagaggaaatt

SEQ ID NO: 198578 - DNA, 135 bp, Glycine max
tacggctgcgagaagacgacagaaggggggagctagaggacatgcgtctcaagtacaccaattcgtgggtatgagaagattaatgtcggatccacaaggacaaatgattgatttacctattcaaagcaatttgcg

SEQ ID NO: 198579 - DNA, 210 bp, Glycine max
ggctgcgagaagacgacagaagggatcagtggtgccccccaggataacaacataatgctgtggaatgctgtcatatttggtcctgatgatactccatgggatggaggcacgttcaagttgacactccaatttactgaggactatccaaataaaccaccgactgtacgatttgtgtctcgcatgtttcatccaaatatttatgctgatgga

SEQ ID NO: 198580 - DNA, 222 bp, Glycine max
actcgaccgaatcggctcgagacggctgcgagaagacgacagactgggggtcatacaaagcgagccagagcactgggcacatgcattctttaatggggcaaggtacaatcttctttcatcaaattttggacagcaattctacagttgggtgtcagaggcacatgaattgccaattactcaaatgattgatgcattacgaggtaagatgatggaaacaattta

SEQ ID NO: 198581 - DNA, 227 bp, Glycine max
cgagaagacgacagaagggcaagtgaaagtgagataaaataaaaatcaaagagcataatgtcagggatcattcacaagattggggagacccttcatgtgggagggcacaagaaggaggaggagcataagggtgagcaccatgctggagaatacaaaggggagcaccatggtgaacacagtagtgagtacaaaggagagcatcatggtgaacacaaagctggagagta

SEQ ID NO: 198582 - DNA, 222 bp, Glycine max
taggctgcggaagacgacagaagggacatacatgttaattgcattttgcttttcagcatccatgtaagcattgctataatagcgttgaagagtcctaaaaaactcttgggactgtgttgcagctttccattgccccctcctctcagagaatatctacatggcaagtagcaacagaagttagagaggaccatatgttattataccaatgtacaaatcaattaa

SEQ ID NO: 198583 - DNA, 231 bp, Glycine max
  unsure (1)..(231): unsure at all n locations
acggctgcgagaagacgacagtagggttatatcggatgcttttccagcaatggaggcataagngctagatgattctctgctgatgagatacttcttagaatcagtagcaaaggctcttcgacccggaggagtgttctctgctccagcagacagcctgtggcataagaactttgtggttgcagacaccatagcaaattgcaagaagatattcaaaggctccgttaactatgc

SEQ ID NO: 198584 - DNA, 226 bp, Glycine max
acggctgcgagaagacgacagaaggggatcacaacacaagttgaaacacaacgaagaaaaaatgggttcctctttgtggacttgtctgattttgttatcacttgcttctgcttccttcgccgccaacccaagaacaccaattgatgtgccatttggcagaaactatgtgcctacttgggcctttgatcacatcaaatacctcaatggtggttctgagattcagctt

SEQ ID NO: 198585 - DNA, 219 bp, Glycine max
tacggctgcgagaagacgacagaagggggcacaagtgagtttgttgatcgagataactagaaacagtgtgatgaaaatgaaggtccttgttttcttcgttgctacaattttggtagcatggcaatgccatgcgtacgatatgttccctctccgaatgaacactggctatggtgcccgtcctccggaggtgaaatgcgcaagttggaggcttgctgtgga

SEQ ID NO: 198586 - DNA, 215 bp, Glycine max
acggctgcgagaagacgacagaagggggcacaagtgagtttgttgatcgagataactagaaacagtgtgatgaaaatgaaggtccttgttttcttcgttgctacaattttggtagcatggcaatgccatgcgtacgatatgttccctctccgaatgaacactggctatggtgcccgtactccggaggtgaaatgcgcaagttggaggcttgctgt

SEQ ID NO: 198587 - DNA, 222 bp, Glycine max
tacggctgcggaagacgacagaaggggatctcaatttcttttctctttgtcgcaaagagaagagatctgcctcctttttatcaaatctatctcttcttcaagaatagttgaaaatggggctgtctttcaccaagttgttcagccgactgtttgccatgaaagagatgcgtatactgatggtgggtctcgatgctgcgggtaagaccaccattctgtacaagc

SEQ ID NO: 198588 - DNA, 266 bp, Glycine max
tatcgagcgaatcggctcagacggctgcgagaagacgacagtaggggggctgagaatcggaagatactggactgctctggctgctggtaattgcaatggttgcagctatgccgggacattcagacctccaaagtgccaggttggttgtggccaaccaacccagagatggtaccatgtacctcgatcttggttgaagccagatcataacctgttagttgtttttgaggaacttgggggagaccttcaaaaattcattgtaaagagat

SEQ ID NO: 198589 - DNA, 272 bp, Glycine max
tacggctgcgagaagacgacagaagggggaagacaaatttacgacagttaatggctatgaacacaatgccgaggtaatatatggagacacagattcagtcatggtacaatttggtgtttctgctgtagaagaagctatgaacttggggagagaagctgctgaatatattagtggaactttcacaaaagtaatagttcattttgcgttttatttttttctttagtcattgtaagtttgagaccctgtataatagcccgtgaaagtgatgaaac

SEQ ID NO: 198590 - DNA, 274 bp, Glycine max
acggctgcgagaagacgacagaagggggcacaacatcttcagcttttccctcgttgaaatgaaaatgggttcttctttgtggactttgtgtctaattttggcttcactagccccttctgcattctgtgcctttccacggaggccagtggatgttccattcggcagaaactacgttcccacttgggcctgcgatcacatcaaatacttcaatggaggttctgagattcaacttcatcttgacaagtacactggtactggcttccagtccaaaggg

SEQ ID NO: 198591 - DNA, 282 bp, Glycine max
tacggctgcgagaagacgacagaagggggaatcacagtggtgccttatcgctgtggttttcatcgtcttccttctcttatatttcttctttttttttgtcttcgccgcacgccgaaacattggccggaaaaggagagggtcctgctatcggaatcgatctcggaaccacctactcttgtgtcggtgtgtggcaacatgaccgagttgaaatcatcgccaacgaccaagggaacattccgacgccgtcttactgtcggttcactgataccgagcgtctcatcg

SEQ ID NO: 198592 - DNA, 279 bp, Glycine max
tacggctgcgagaagacgacagaagggggtgtgagtgaagaagcagagggagtagcggcattaaaaatgcagatcttcgtgaaaactctgacagggaagactataaccctcgaggtcgagagcagcgacaccatcgacaatgtcaaggccaagattcaagacaaggaaggcattcctccggatcagcagcgtttgattttcgccggaaagcagcttgaagatggaaggaccctggccgattacaacatccagaaggaatcaacccttcatctcgtcctc

SEQ ID NO: 198593 - DNA, 279 bp, Glycine max
tcggctgcgagaagacgacagaaggggatcacaacacaagttgaaaacacaaaagaaaaaaaatgggttcttctctgtggacctgtctgattttgttatcacttgcttctgcttccttcgccgccaacccaagagcaccaattgatgtgccatttggcagaaactatgtgcctacctgggcctttgatcacatcaaatacctcaatggtggttctgagattcagcttcatcttgataaatacacaggtactggcttccaatcaaaagggtcctacttgt

SEQ ID NO: 198594 - DNA, 274 bp, Glycine max
tacggctgcgaaaagacgacagaagggggcatatccaaaggaacaaaaatattattaagatgatcaacattattggagcacttgttctactctttgcatttctcttcctcagttgtgtgtatgcacaagacacaacaacccttgtgcctgcaatcataacttttggtgattctgctgtggatgtagggaacaatgactatcttcccacccttttcaaggctgattaccctccttatgggatcaatttgttaaccaccaacctactgggaggttt

SEQ ID NO: 198595 - DNA, 250 bp, Glycine max
  unsure (1)..(250): unsure at all n locations
gaccgtttccatttctcaacaacttctgctacttcctactccaaccgcacttctgctccgcaattatcatgggcaaggtcaagatcggaatcaacggatttggaagaattggccgtttggtagccagagtggctctgcagagagacgatgttgaactcnnagccgttaacgaccctttcatcaccaccgattacatgacatacatgtttaaatacgacagtgttcatggacactggaagcatcacgatgt

SEQ ID NO: 198596 - DNA, 273 bp, Glycine max
tacggctgcgagaagcgacagaagggtgcgattgttaacatgggttctggagctgctattgttattccttcggatcctctttatgctgtttatgctgccaccaaagcgtacatcgatcagttttcgagatgtctctatgttgaatacaagaggagtggaattgacgttcagtgtcaggttccattctatgtggcaaccaagatggcatcaatcaggaaatcttcattctttgttccatcaacagatggctatgccaaagcaggtgtgaaatgg

SEQ ID NO: 198597 - DNA, 277 bp, Glycine max
tacggctgcgagaagacgacagaaggggaagatgagggagttgatgatgcagctgttaaggttgttgacattgttgacacattcagacttcaggagcaacccgcattcgataagaagcagtttgttaccttcatgaagaggtttatcaagaatttgactcccaagctcgatgcagagcaacaggatatgtttaagaagcacatcgagggagcaactaaatacctgctctctaagattaaagatttccaattttttgttggtgagagcatgggtgatg

SEQ ID NO: 198598 - DNA, 275 bp, Glycine max
tacggctgcgagaagacgacagaagggtaatttgggaattattgctcccatcgccattggtttcattgtcggcgctaacattttgttgggtggggccttctctggagcggccatgaaccccgctgtgacattcgggcctgctgtcgtgagctggacctggaccaaccactggatctactgggccgggcctctcatcggtggtggaatcgctggccttgtttacgaggttgtctttatcagccacacccacgagcagcttcccaccactgactact

SEQ ID NO: 198599 - DNA, 278 bp, Glycine max
tacagctgcgagaagacgacagaagggggcacaagtttgttgagatagctagaagcaataagatgaaaatgaaagtgcttgttttgtttgttgctacagttttggtagcatatgaatgccatggctcagactaccagaagttccctctccaaatgaaaactgggtttggtgggcaatacagcaatgaggtggcatgtgccagttggaggcttggcgtggaagcaaacaacgtagtcaagtggcaaactgttcctgcagcttgcggagagtacatagct

SEQ ID NO: 198600 - DNA, 225 bp, Glycine max
tacggctgcgagaagacgacagaaggggatttactatgttctgaccaacgtaaaagattaatggaaattgttggctccatctttcatggaaagctcaatattctagtgaacaatgctgctacaaatataacaaagaagataacagattacacagcagaggatatatcagccataatgggcaccaattttgagtccgtttaccatttgtgtcaagttgcacaccac

SEQ ID NO: 198601 - DNA, 281 bp, Glycine max
gctgcgagaagacgacagaaggggaagcctcagtctcaacacagaagcagaaggaggagaagcagaaagaggagacgaagcaatggcgccgaagaagccccgaaccacgtcgaggaaccctgatttggtcaggggaattggcaaatattcgaggtcgcagatgtaccacaagaggggcatctgggccatcaaggccaaaaacggcggtgttttgcccctccacgatcccaagcccaaacccgaggccccggcccagaagccgcccaagttctacccggccg

SEQ ID NO: 198602 - DNA, 275 bp, Glycine max
cgagaagacgacagaagggtggaagaattgttcctaggtttcaggagttatctccagaaaagttgggaaaggctggtatggttcgagaaaagtcctttggtacaacaaaagaccgaatgctgtacattgaacattgtgcaaactcaagggctgtaactatattcattcgtggaggtaacaaaatgatcattgaggagacaaagcgcaccttcatgatgccttgtgcgtggctaggaatcttatccggaacaactctattgtctatggtggtggtt

SEQ ID NO: 198603 - DNA, 275 bp, Glycine max
gcgagaagacgacagaaggggggaaaagttagaagtagtgaagaaaatgaaagtcattgttttcttcgttgctataataattttaggtgcagaatggcaatgcaatgggtcagagcatgagcatgagcatggccacagctaccaaattttccctttgcgaatgaaaaccggccccggtggccactacattccggaggtatcgtgcaaaagttggaggcttggtgtggaagcacacaacgtcattgactggagaaccattcctcaagattgcgagg

SEQ ID NO: 198604 - DNA, 272 bp, Glycine max
tacggctgcgagaagacgacagaagggggaagacaaatttacgacagttaatggctatgaacacaatgccgaggtaatatatggagacacagattcagtcatggtacaatttggtgtttctgctgtagaagaagctatgaacttggggagagaagctgctgaatatattagtggaactttcaatgtagtaatagttcattttgcgttttatttttttctttagtcattgtaagtttgagacccttgtataatagcccgtgaaagtgatgaaa

SEQ ID NO: 198605 - DNA, 274 bp, Glycine max
tctcgagcgaatcggctcagtacggctgcgagaagacgacactaggggtaactcttactttttctggaaccttccgaggcatggtctctgccccaaaccccaatttcgacgaagctgcttcgctcgccctcgataatcgcgttcctgccaccgtcataacgggttttcttggctctggaaagactactctccttaatcatattctcacatctcagcatggaaagcggatagcggtcattgaaaatgagtttggtgaggttgatattgatggctc

SEQ ID NO: 198606 - DNA, 273 bp, Glycine max
acggctgcgagaagacgacagaagggggaggacaactaccggtcctatttgcgcgaagacactgagaagaacaccaaatggagatatggtgcccctccaaattacgacgttgtcaacaagctatatgaagaaggcagaaccaaggtttggcctcagggttcacttgaagagcaggtgcagtctctagtgaagaattgggagatggaaatgttccacaaggtggacctgcaggatttcagatcaatagacccaaagaaatacactttcagcctg

SEQ ID NO: 198607 - DNA, 275 bp, Glycine max
tacggctgcgagaagacgacagaaggggggattccacatttaaggccaacagaatataagagatcaaggttacccaaaaaccgaaggactgtgaaccgtgcatatggtggtgtgttgtctggcagtgctgttagagagagaatcattcgagctttcttggttgaagagcaaaagattgtgaaaaaggtattgaagatccaaaagacaaaggaaaagcaagctttgaagggctgagttttgagaaaagtgataaagatctttttggagggatttta

SEQ ID NO: 198608 - DNA, 275 bp, Glycine max
ctgcgagaagacgacagaagggggagagaaaagtgaattggattgcatctctcgctttgtgttggaagaggggaatcgtagatctgatttctttctttcttttaataataattttgtgatcagaattattgagctgaagaaaagacaatgggattgtgggaagcttttctcaattggctacgcagccttttcttcaagcaggaaatggagttatctctaataggacttcagaatgctgggaagacttcccttgtaaatgtagttgctactggtgg

SEQ ID NO: 198609 - DNA, 274 bp, Glycine max
gctgcgagaagacgacagaaggggtggcaagctgttaccaaagctgtgaagaaaatcaagcgaagaaatgggccacatagaggagaggatttcaccttgtcacaagcaatggccaaggccgatttttgggtcatgttcttctctcttgtcatgggctgtggatcgggcttgacaatcataaattaccatgggtcagatttgtcaatcattgggagacaacaatgtcaatgtttatgtgtcggttatcagcatatccaacttccttggtcgtgtt

SEQ ID NO: 198610 - DNA, 271 bp, Glycine max
tacggctgcgagaagacgacagaagggggcacaagtgagtttgttgatcgagataactagaaacagtgtgatgaaaatgaaggtccttgttttcttcgttgctacaattttggtagcatggcaatgccatgcgtacgatatgttccctctccgaatgaacactggctatggtgcccgtactccggaggtgaaatgcgcaagttggaggcttgctgtggaagcacacaacatctttggctttgagaccattcctgaagagtgcgttgaagca

SEQ ID NO: 198611 - DNA, 250 bp, Glycine max
gacacaccatccgttctagtctcaacttctgctcttccaactcctacaacgcttttctctgcactcatgggcaaggtcaagatcggaatcaacggatttggaagaattggccgtttggttgccagagtcgctctgcaaagagacgatgttgaactcgttgccgttaacgaccctttcattaccgccgattacatgacatacatgtttaaatacgacagtgttcacggacactggaagcatcacgatgtca

SEQ ID NO: 198612 - DNA, 287 bp, Glycine max
attaaggttcttggtactccgactcgagaggaaatccgttgcatgaacccaaattatacagattttagattccctcagattaaagctcatccttggcacaaggttttccacaagcgaatgcctcctgaagcaattgaccttgcatcaaggcttctccaatattcacctagtctacgctgcactgcgctggatgcatgtgcacatcctttctttgatgagcttcgcgagccaaatgcccgtcttcctaatggccatccactgcccccacttttcaacttcaaacagga

SEQ ID NO: 198613 - DNA, 271 bp, Glycine max
acggctgccgagaagacgacagaaggggaaggcagatataggaattgctatgggttcagggacagctgttgctaagagtgcttcagacatggtgctggctgatgacaactttgcctcaattgttgcggctgtggcagagggaagagctatatacaataatacaaaacagtttattcgattcatgatttcttccaatattggtgaagtagtctgtatatttgtggctgcggtgcttggaataccggatactctggcccctgtccagttgctt

SEQ ID NO: 198614 - DNA, 270 bp, Glycine max
cggctcgagtacggctgcgagaagacgacagaaggggaaagaaaagagaaatggcaacagaaacaaaagtggcagtattaggtggcatcaccgaagtgcagggagctgccaacagcgtcgagatcaacaatctcgctcgctttgctgtagaggaacaaaacaaaagagagaattcagttctggagtttgtgagggtgattagtgcaaagcagcaagtggttgctggagtgaattactacataacattggaagcaaaagatggtgagatta

SEQ ID NO: 198615 - DNA, 270 bp, Glycine max
acggctgcgagaagacgacagaaggggaagcaaaaccctaatccctatttttcttcctcagtagtgtcatttacgcttctcttctctgcagcaactatgcctaaccctaaggtcttcttcgacatgaccatcggcggtcaatctgctggccgcatcgtgatggagctctacgccgacgtcactccccgcaccgccgagaacttccgcgcgctttgcaccggcgagaagggcgtagggcggacggcaagcccctccactacaagggctcgt

SEQ ID NO: 198616 - DNA, 260 bp, Glycine max
acggctgcgagaagacgacagaagggggctttccaaaatgcccactttttttcttccaacgctcctcctccttctcatagccttcgccacctctgtctccggccgccgtgacctcgtcggagactttctccggctgccctccgaaactgataacgacgacaacttcaagggcacccggtgggtagtcctcctcgccggttccaatggttactggaattacagacatcatgctgatgtttgtcacgcctatcaaatattga

SEQ ID NO: 198617 - DNA, 269 bp, Glycine max
tacggctgcgagaagacgacagaagggatcagtggtgccccccaggataacaacataatgctgtggaatgctgtcatatttggtcctgatgatactccatgggatggaggcacgttcaagttgacactccaatttactgaggactatccaaataaaccaccgactgtacgatttgtgtctcgcatgtttcatccaaatatttatgctgatggaagtatttgtttggatatattacaaaatcagtggagtcctatttatgatgtggctgc

SEQ ID NO: 198618 - DNA, 269 bp, Glycine max
tacggctgcgagaagacgacagaaggggattcccaaatttctcattctcccatttcctctcagaaccctcgatcactcccacgcgctcctatatcctctccttcaccgtcgctctctccaacgatcacaacaacatcgtcatcccatggcaaacgccgcatctggtatggcagtccatgatgactgcaagttaaggtttttggagctgaagacaaagaggacacaccgtttcatagtttttaagattgaggagcagcagaagcaggtca

SEQ ID NO: 198619 - DNA, 273 bp, Glycine max
acggctgcgagaagacgacagaaggggaatccaaaatgttggtgttgtattaatgggtgatggtttgatgatacaagagggaagttcagtaaaagcaacaggaagaattgctcagatacctgtaagtgaggcttatttgggtcgtgttataaatgccctggctaaaccaattgatggtcgaggagaaatttcagcttcggaatctcgattaatcgaatctcctgctcccggtattatttcgagacgttccgtatatgagcctctccaaacagg

SEQ ID NO: 198620 - DNA, 268 bp, Glycine max
tacggctgcgagaagacgacagaagggtgtgcaggaagatggaaattccgtactgtattgtgaagggaaaggcccgcttgggaacggttgtccacaagaaaactgcatccgttttgtgtttgaccactgttaagaatgaagataaattggagttcagcagagttttggaggctatcaaggctaacttcaacgacaaatatgacgagtacagaaagaagtggggtggtgggatcatgggatccaattcccaggcgaaaccagagcaaag

SEQ ID NO: 198621 - DNA, 191 bp, Glycine max
aacgggtgctatcagatgacagaagggggaagacaaatttacgacagttaaacgctatgaacacaatgccgtaggtaatatatggagacacagattcagtcatggtacaatttggtgtatctgctgtagaagaatctattaacttggggatataagccgctgaatatataaggggaactttcccaaaagta

SEQ ID NO: 198622 - DNA, 279 bp, Glycine max
cggctgcgagaagacgacagaaggggacaagcaacattgctaaccattctctgcacttttcagttacaaagcatttcattgttttacaatatacaacactacaatggctgcttcaacaatggctctctcttcatcatcattggctggccaagctatcaagcttgccccctccacccctcagcttggtgttggaagggttagcatgagaaaaacagcctccaagactgtttcctcaggaagcccatggtacggcccagatcgtgtcaagtacttgggccc

SEQ ID NO: 198623 - DNA, 232 bp, Glycine max
tacggctgcgagaagacgacagaagggaggaacagtaagtgacaggcgactgagccctggtggattgcctcgaaagaaatttttagttcatcgcgaccggattttggaatctgctgcacaaatgatggacctgcatgccagtaataaagtggttcttgaggtggaatatgatgaagaagtgggcactggtcttggaccaactttggaattttataccttggtgtgccaggag

SEQ ID NO: 198624 - DNA, 171 bp, Glycine max
aaatcatccgaaggttatcagtcactaccttatgtagttgcactgttcagttcaatgctctggatctattacgcacttgtgaaaaaggatgctagcctccttctgattactattaactcctttgggtgtgtgatagagacgatttgccttgcaatcttgctcgtataggcc

SEQ ID NO: 198625 - DNA, 231 bp, Glycine max
tacggctgcgagaagacgacagaagggggatttgagaggatcgtgagagggacggtagcagagattccgtgagttgcaaaaatgaaaacaattctttctgcagagaccatgaacatcccggacggcgtgagcgtcaaggttaatgccaaggtcatcgaagttgagggcccccgcggaaaattggtgcgagacttcaagcacttgaatctcgattttcagtcatcactgacg

SEQ ID NO: 198626 - DNA, 257 bp, Glycine max
tctcgagccgaatcggctcgacgacagaagggggaaacgaagaactcctaactactcaagcattcgtgagaaaactcactattcgtcgctcatggcactctcttctcgtctcttttccaaatccaaattgatctatggcagtcaaatacttctacaaaaggagcatgctattccagttcgtcactttgctaaagagtccgcccctcctgcccttaagggagacgagatgctgaagaacattttgtgggagtgaaaga

SEQ ID NO: 198627 - DNA, 251 bp, Glycine max
cccgatgaacatgtcaatgagttcaagtcaatagagaagttcaaaattttcaacacaaataatttgtgggtgaacttaaacgcagttaaaaggcttgttgaagctgatgctcttaagatggaaattattcccaatccaaaggaagttgacggaataaaagttcttcagctggaaactgcagctggtgctgcaataaggttcttgacagggctattgggattaatgttcctcgatcacgattccttcctgtg

SEQ ID NO: 198628 - DNA, 242 bp, Glycine max
cgagaagacgacaaaaggggtgaaaaagcagcagaagatctgaggcaaagaataattgaacataatattcttgttgtatcaaaatactatgcaagaattacattgaagagacttgcagagcttttgtgcctcagtatacaggatgctgagaagcatctctcagatatggttgtgtctaaggcgctggtggcaaagattgataggccaatggggatagtctgtttccaaacagcaaaggatag

SEQ ID NO: 198629 - DNA, 261 bp, Glycine max
tacgaactcggaatcggtcgattcgagcgaatcggctcacggctcgaggcggaagacgacagataggggaccaaaaacattacaagccaagtgaaagacggaagaaaagtcaaagacaatgtcagggatcattcacaagattgaggagacccttcatgtgggaggccacaagaaggaggaggagcacaagggtgagcagcaccatggtggagactacaaaggggagcatcatggtgaacacagtactgaatacaaaggaga

SEQ ID NO: 198630 - DNA, 278 bp, Glycine max
tatcgagccgaatacggctgcgagaagacgacagaaggggagcgatttttccctcaccaacgaagaaccaaaacaatggcggatcaactcaccgatgaacagatctccgagttcaaggaagccttcagcttgttcgataaggacggcgatggttgcatcacaaccaaggagcttggaactgttatgcgttcattggggcaaaacccaactgaggcagaactccaggacatgatcaatgaagtggatgctgatgggaatggtaccattgacttccctga

SEQ ID NO: 198631 - DNA, 245 bp, Glycine max
tacggctgcgagaagacgacagaagggggagagaggcagaagaagaagaagaaaagatggtgggaccagtgagacctcagtttgtgctctttggttcttccattgttcagctcagttactctctccaaggttggggcgctattcttgctcatttgtatgctcgcaaggcggatataattctgcgaggatactctggttggaattcaaggcgtgctgtgcaagttctggatgaaattttccctaag

SEQ ID NO: 198632 - DNA, 268 bp, Glycine max
acggctgcgagaagacgacagaagggggcactgcaaatcacttttctactttgagtcttcttgatccttctttttctccttgaactcaaacatggcagatgaggtggttctgctagatttctggccaagtccatttgggatgagggtcaggattgcacttgctgaaaagggtatcaaatatgagtacaaagagaggacttgaggaccagaagtcttcttctcctcaaattgaacccggttcacaagaagattccggttctcatccaca

SEQ ID NO: 198633 - DNA, 248 bp, Glycine max
gggagagagagatgggaaggtccccttgctgtgagaaagcacacacaaacaaaggtgcatggaccaaagaagaagatcatcgcctcatttcttacattagagctcacggtgaaggctgctggcgctctctccccaaagccgccggccttctccgttgcggcaagagctgtcgtctccgctggatcaactatctccgccctgacctcaagcgcggcaatttcaccctcgaagaagaccaactcatcatc

SEQ ID NO: 198634 - DNA, 175 bp, Glycine max
cggcttcgagaagacgacagaagggggctcgtgaagcacgggaaggtgtacaacgcgctcggcgagaaggagaagcgcttccagatcttcaaggacaacctgcgattcatcgacgaccacaactccgcggaggaccgaacctacaagctcggactgaaccggttcgctgatctca

SEQ ID NO: 198635 - DNA, 274 bp, Glycine max
gcgaggacgacagaagggagaggaaaaagagttgattgctaagcctgctgggtctgattctattgaagggtatggcacaaagcttcagaaagaggtgaatggcaagaaagggtgggtggatcatttgttccacattgtgtggcctccttcctccatcaactacagtttctggccaaaaaaccccccttcttagagggaagttaatgaggattattgcaaccacctagggggagtggaagacattttgtaaaaaattgtgggggtgggggggaaa

SEQ ID NO: 198636 - DNA, 278 bp, Glycine max
aggctgcgagaagacgacagaaggggggttaagtgaaaagtgaaaagtgaaaatggacttggaagcagtgaagaggtacttagagaaaggaggagaaacagcatcggcggtggatgggttgcctccgaggtttctggaaccgttaataatgaacgctcttaaggtcgatctcatcgaaactggtcgcgttgtctgctccatgaagatacctcggcgtttactacaagctgggaattcgtaacagggtggcgccatggctgctctggtcgacgtggtgg

SEQ ID NO: 198637 - DNA, 272 bp, Glycine max
acggctgcgagaagacgacagaaggggatgcacaaatctttggtgctccttcggtctcttatcctaattaagttagtgcaaagattatggcttccaaacctggcatactaaccaattggccctggaagcctctcgggagtttcaagtgggtgattttgacaccatggattgcacacagcacttactctcttcctagtgagtgagccaaaggagagggaccttacttatttcctcatctttcctcttatgatgggttggatgctgcatgacca

SEQ ID NO: 198638 - DNA, 266 bp, Glycine max
tacggctgcgagaagacgacagaaggggtttgatgccaagatagcagcagcagtagctgaggaaacaaatctgccttttgttacggcagaaaataagtttgaggccttggctgcccatgatgcttttgttgaaactagtggagcacttaacactattgcggcttctttgatgaagatgcgctaataccatacggttgttaggaagtggtccacgctgcggtcttggtgaactcattcttcctgaaaacgaaccaggaagtagtatc

SEQ ID NO: 198639 - DNA, 269 bp, Glycine max
gaagacgacagaaggggagagaaataatggagaagaaaagcataacaagcagagcacattgtttagtgctagcatttccaggtcaaggccatatcaatcccatgcttcaattctccaagctattggagcgtcaaggggtgagaataacacttgttactactcgtttctattccaagaatttgcaaaacgtgcctccttccattgctcttgaaaccatttctgatgggtttgatgaagtggggccccaaaggctgggagccccaaggcta

SEQ ID NO: 198640 - DNA, 271 bp, Glycine max
cggctgcgagaagacgacagaagggggcgaatagattgcaatattatgcaataatgtgaaaaaagttgaaatatgcatgcttttcatttttcaatcttcccttgttaaaaggagagactcactcacttccattgtcactgctcctttctcggatctctctcttcttcttcttcgttttctcttcgcgagtgagagatggcgcaaattctgcttcatgggactctccatgccaccatcttcgaggttgataggctcaatgctggtggtggtg

SEQ ID NO: 198641 - DNA, 250 bp, Glycine max
gcgcgagaagacgacagaagggtacgtattttatgatagtttaaaatcatttagtgataattttgaatggtcaaagtgacattttttatcatttagattaaaggatcaagttgaatgaatttaaaaaattaaaagatcaaattaaacctaaaaaatattaaaggacgaagttgaatataaaaatgcaaaagaaggagccatgatccgtccagtaaatttacgtttagccttacatttagcctcactagtg

SEQ ID NO: 198642 - DNA, 265 bp, Glycine max
acggctgcgagaagacgacagaaggggaattttacggcctctgtgatccagataaggataacctgtgcctctatggacatccaaatgaggcctgggaagtaactctgccagcggaggaagttccgccagagctcccggagccggctcttggaatcaattttgctagggatggcatgaaccgcagggactggctttctctggttgctgtccacagtgattcatggttggtttctgtggccttttaccttggggctcgtcttaaccg

SEQ ID NO: 198643 - DNA, 187 bp, Glycine max
gcagttaagaaagactcagaactccaagcttggtggaaggaagctgttgagaagggtcacggtgacttgaaagacaagccatggtggcctaagttgaacactcttcaagatctgattcacatttgctgcattattatatggactgcttcagcactccatgcagctgtgaatttcggacaataccctt

SEQ ID NO: 198644 - DNA, 271 bp, Glycine max
acggctgcgaagacgacagaaggggactcactcattcactctacaattgtgatcttcacaaatcaacaacgtctctctctgttactctgaaaattgacttcaagttagtataactggctgtcaagttgtaatggcattggtctctggaagaagttctgcactgaacccaaatgcacttatatcaaagcttcctgctctgcggaaggtggaggatttttcacctgaatggtgggatcttgtgaaatcttcaacatggtttcgtgattattgg

SEQ ID NO: 198645 - DNA, 271 bp, Glycine max
tacggctgcgagaagacgacagaagggagaaggcgagttctttgaggcagagaaagaggaaaagagtgtgttgccccagcagaagaaagatgaccagaaaactgtggacgctgcagtgttaaaagccattgagagtgtgccagacttgaggtcctatttgggtgccaggttttctctgaaggccggggtgaaaccacatgagctagtcttctagaggaaagaggggtgttactcttgtttttgatatcgtgtttgtttattgatgctggtt

SEQ ID NO: 198646 - DNA, 268 bp, Glycine max
acgtgcgagaagacgacagaaggggagggagaattaggtttttagggtttacaccgagcagccacacctcccgcagcagccatggttctcaaaactgaactatgccgattcagtggtgccaagatctacccaggaaagggagacagatttgttcgttgtgattcttaggttttcctgtttgcaaactcaaaatgtaagaggtatttccacaatcgcctgaagccttcaaagctcacctggactgcaatgtacagaaagcaacacaaaa

SEQ ID NO: 198647 - DNA, 268 bp, Glycine max
acggctgcgagaagacgacagaagggggatggacacgagtgttgttgctgctacagatggagaagggtagaaccgtggtggtgtccgctctgcagtttgcttgcaccgatgatatctcaacaaacgtcgccaccgccgagaggctagttagagctgcacataaacagggtgcgaacatcattctcattcaggaactctttgaaggctattacttctgtcaggaccaaggagaggatttcattcaaagagctaagccacataaggacca

SEQ ID NO: 198648 - DNA, 264 bp, Glycine max
tactcgagccgaatcggctcgagtacggctgcgagaagacgacagaacgggacactaaacaagttaaaagaagagcatcactgaaccaacaaagcaaccctatgtcgaaggtggtttgtgtcaccggagccagcggcgccatcggatcatgggtggtcctactcctcctccagcgtggttacaccgtccatgccaccgtccaagatatcaaggatgaaaatgagacgaaacatttggagcgaatggaaggagcaaagagtcatc

SEQ ID NO: 198649 - DNA, 211 bp, Glycine max
acggctgcgagaagacgacagaagggggaaaaactcattggccaccacttcaaagaataatgatgaagtagatggaaaaccgggtgcagcagcactctttgtgaaggtcagcatggatggtgctccctatctgaggaaggtagatctaagaaattgtacaatgtaccaggaactgtcttccgcccttgaaaaaatgatcagctgtatcact

SEQ ID NO: 198650 - DNA, 206 bp, Glycine max
gcgagaagacgacataaggggagagaacacatatacaagtttgacctggtaatcagtgatgtacacatgccagacatggatggatttaagctgcttgagctagtgggacttgagatggatcttcctgtcataatgttatctgcaaatggtgatacgaagatggtgatcaaggggatttctcatggggcctgtgattatctgctgaa

SEQ ID NO: 198651 - DNA, 218 bp, Glycine max
tacggctgcgagaagacgacagaagggatgcacaagtttgttgagatagctagaagcaataagatgaaaatgaaagtgcttgttttgtttgttgctacagttttggtagcatatgaatgccatggctcagactaccagaagttccctctccaaatgaaaactgggtttggtgggcaatacagcaatgaggtggcatgtgccagttggaggcttggcgt

SEQ ID NO: 198652 - DNA, 291 bp, Glycine max
acgcgagaagacgacagaaggggatcgaagcaaaaaatgaaaacccaaagtgcttctctcctctgtctttttctctctcttgctatccttttggctactgccactgctgcaagtgcaactccaagaagcgcagtgccaagccaccatgtttcaacattcaacagaagcctttttccttccacttttctctttggaattggttcttctgcttaccaggcagaaggagcagcaagtgtagatgggagaggaccaagcatatgggacacctacactagacagcatactgaaagg

SEQ ID NO: 198653 - DNA, 312 bp, Glycine max
cggctgcgagaagacgacagaagggccagcactcgacaaagatacactttgggaatttcaacctaagaaaattggtgaaggcgaccttttaactggtggagatttatatgctactgtttttgagagcagtctaatgcaacaccatattgcacttcctcctgataacatggggaagattacctacattgcaccacctggccaatattccataaaggatactgtattggcacttgagtctcaaggtgtcaaaaagagattcagcatgtttcagactatggccgtacgtacacaaaggcatgttgcatcaaaact

SEQ ID NO: 198654 - DNA, 290 bp, Glycine max
tacggctgcgagaagacgacagaagggtgaatatggagaacaaacagaggaggaactgcttcccggaggaaggaacctacgtgtcactaatgagaatgtcattacttttatccaccttgtagccaatcaccgcttgaattttcagatacgccaacaaagttcacatttcttgaggggatttcagcaacttatgcagaaggattggattgacatgtttaatgaacatgaacttcagcttctggtatcaggttcacttgacagcttggatattcatgatctgcggctgcata

SEQ ID NO: 198655 - DNA, 293 bp, Glycine max
acggctgcgagaagacgacagaaggggagagaaagagagagaaagatgtcgaagcgtggtcgtggtggttcggcggggaacaagttccgcatgtcgctgggtcttccagtggcggcgacggtgaactgcgccgacaacacgggggcgaagaacctctacatcatttcggtgaaagggatcaaaggccgtttgaaccgtcttccctcggcctgcgttggcgacatggtgatggccaccgtgaagaagggaaaacccgatctgaggaagaaggtcttgccagctgtcatcgttcg

SEQ ID NO: 198656 - DNA, 278 bp, Glycine max
ctttcgagaggccctataaggtgacactagacaagttacgacaagagcatcactgaactaacaaagctaccctatgtcggaggtggtttgtgtcaacggagccaacggagccatcggatcatgggtggtcctactcctcctccagcgtggttacaccgtccatgccaccgtccaagatatcaaggatgagaatgagacgaaacatttggaggacatggaaggagcaaagagtcatctccatttttttgaaatggatcttcttgacatcgactccattg

SEQ ID NO: 198657 - DNA, 277 bp, Glycine max
agaagacgacagaaggggacaatcgaacgggaaaaggcgtcttcataaacgccgcccaaaacttctcataccctttgattcattccattcgtttctagggttttcttttctttgccgagaaaatgagagagtgcatttcgatccacattggtaaggccggtatccaggttggaaacgcctgctgggaactctattgccttgtacacggcattcagcacgatggacagatgccgagtgacaagaccgttagcggaggagacgacgccttcaacacatt

SEQ ID NO: 198658 - DNA, 289 bp, Glycine max
tacggctgcgagaagacgacagaagggggcacaagtgagtttgttgatcgagataactagaaacagtgtgatgaaaatgaaggtccttgttttcttcgttgctacaattttggtagcatggcaatgccatgcgtacgatatgttccctctccgaatgaacactggctatggtgcccgtactccggaggtggaatgcgcaagttggaggcttgctgtggaagcacacaacatctttggctttgagaccattcctgaagagtgcgttgaagcaacaaaggaatacatccat

SEQ ID NO: 198659 - DNA, 243 bp, Glycine max
tacggctgcgagaagacgacagaaggggaacacgcggcttccgccggaggtgaaccgcgtgctgtacgttcggaaccttcccttcaacatcaccagcgaggagatgtacgacatctttggcaaatacggcgccattcggcagatccgcatcggcaccaacaaggacactcgcggaaccgctttcgtcgtctacgaggacatctacgacgccaaaaccggcgtcgcgcacctctccggcttcaa

SEQ ID NO: 198660 - DNA, 295 bp, Glycine max
acggctgcgagaagacgacagaaggggctctttattattttcagttactaatcctagttatttgatttatatactttttttatagtaaatacatgagatagaatattcaaaatggaatatttctattattttattcttcatccaatgactatacattcattatatttttttgtaaatagaggaaaaactcgatggaaaaatggtggtttaattctatgttgtttaataggaagttagaatacaggtgtgaattaagtaaatcaatggatagtcttggtcctattgaaaataccag

SEQ ID NO: 198661 - DNA, 281 bp, Glycine max
  unsure (1)..(281): unsure at all n locations
angaaggannctgtagtcatagaagaccgagangnccactggaagngnccgctgatnagaanctcanagtgatgcnngagnaggaagcctcctacgatgnnattnaaaatgctatgcaaggaggaatcagagggcaagttgaagggatttcttggttacactgnagntgnngtggtctccaccgactttgtgggcgatagcagatcaagnatttttgatgcaaaggctggaattacattgaataagaactttgtgaagcttgtttcttngtacgacaacga

SEQ ID NO: 198662 - DNA, 286 bp, Glycine max
ctcgagcgacgacagaaggggtgttccagtaggtggagcaactctaggacgaattatcaacgtgcttggagagcccattgataatttaggtcctgtagatactcgcacaacatctcccattcatagatctgcgcctgcctttatacaattagatacaaaattagccatttttgaaacaggaataaaagtagtagatcttttagctccttatcgtcgtggaggaaaaataggacttttcggtggagctggagtcggtaaaacggtactgattatggaattgatcaat

SEQ ID NO: 198663 - DNA, 286 bp, Glycine max
tacggctgcgagaagacgacagaaggggggaggaagaggaaaagaggattagagggtcgccacgtttagcaataaccaaaccctctctactcttttttcttctccttctcttcgctagggttttagcttcttcctcttcacttcgttctttttcgcctctacaatgagcaacgacaaggacacattcaacgtcgccgatctcacttctgctctcaacgaggacaatagagcagaccttgtcaatgctcttaagagcaagatacagagtttggctggacaacactcg

SEQ ID NO: 198664 - DNA, 286 bp, Glycine max
tacggctgcgagaaaacgacagaagggggcacaagtgagtttgttgatcgagataactagaaacagtgtgatgaaaatgaaggtccttgttttcttcgttgctacaattttggtagcatggcaatgccatgcgtacgatatgttccctctccgaatgaacactggctatggtgcccgtactccggaggtgaaatgcgcaagttggaggcttgctgtggaagcacacaacatctttggctttgagaccattcctgaagagtgcgttgaagcaacaaaggaatacatc

SEQ ID NO: 198665 - DNA, 293 bp, Glycine max
acggctgcgagaagacgacagaagggggccgaggaaaagaaagaaatagaaaaagaagaaaaaaacacagcgtcctagatttcctcttctctgcttcggaagaaagagaaaacaaacaaaacaatggcgttcgcttctttcctcggcagagtcctcttcgcttctgtcttcatactctctgcttaccaacaatttaatgaatatggagttgatgggggacctgctacaaaagcactcagacctaagtttgatgcctttacacatcgggtgcattctcaagtgggctttcaaat

SEQ ID NO: 198666 - DNA, 291 bp, Glycine max
cgacagaaggggacctcaaaaaacaaaaatcaataccttagagaaaacaaaagcacagaatcgaaagaagagttcttttttaagagagattgggatggcttcgacgaagaagatcacactgaagagttcggacggcgaggccttcgaggtggaggaggcggtggcggtggagtcccagacgatcaagcacatgatcgaggacaactgcgccgacagcggaattcctctccccaatgttaccagcaagattctggccaaggttatcgagtattgcaagaagcacgttgaggc

SEQ ID NO: 198667 - DNA, 287 bp, Glycine max
acggctgcgagaagacgacagaaggggagcctgcacttctcaatcgcaaattttctcccccaaatcgtagatctacggttaaattggtgtagtgtggtaagatgggaggaggatttagagtgcttcacttagttaggccatttctctcgtttcttcctgaagttcaaactgctgacaggaaagtgccatttagagagaaggtcatatacactgtgatctctcttttcattttcctggtttgtagtcagctccctctatatgggatacactcaacaacaggtgctgat

SEQ ID NO: 198668 - DNA, 287 bp, Glycine max
gaagacgacagaaggggaacccgaacttacgatgtcagtatcacgtatgataaatattatcaaacaccacgagtatggcttactgggtatgatgagtcgagaatgcttttgcaaccagaacttgttcttgaagatgttagtcaagatcatgcacacaaaacggtaacaattgaggaccatcctcacttgccagggaagcatgcatctattcatccatgtcgacatggagcagtgatgaagaaaatcattgatgtgttgatgtcacacggagttgagcctgaagtcga

SEQ ID NO: 198669 - DNA, 291 bp, Glycine max
tacggctgcgagaagacgacagaagggaagaaggaagctgaagtcatagaagagaagaaggaagtggaagtgacggaagagaagaaggaaattgaagtaacagaagagaagaaggaagctgaagtcatagaagagaagaaggaagtgggagtgacggaagagaagaaggaaattgaagtaacagaagagaagaaggaagcaaaaaaaaaaaaaaaaaaaaaaaaaaaaaagggggcccccaaatagggaccccttcacccgggaatttattccgggccgggaacctgaggg

SEQ ID NO: 198670 - DNA, 296 bp, Glycine max
taggctcgagacggctgcgagcagacgacagaaggggacactggaggagtgtgcacaagagcgtcgcagtcgcaaccctaatcagaagaagcgcagcttcaagcgagtgacagccaccagccatgggtcgtatgcacagccgcggtaagggtatatcctcttctgctttgccctacaaaaggacacctcctagctggctcaagatctcttcgcaagatgtcgaagaaaatatctgcaagtttgcgaagaaaggtttgaccccgtctcagattggtgtcattctcagagattctcac

SEQ ID NO: 198671 - DNA, 285 bp, Glycine max
tacggctgcgagaagacgacagaaggggacactaaacaagttaaaagaagagcatcactgaactaacaaagcaaccctatgtcgaaggtggtttgtgtcaccggagccagcggcgccatcggatcatgggtggtcctactcctcctccagcgtggttacaccgtccatgccaccgtccaagatatcaaggatgaaaatgagacgaaacatttggaggaaatggaaggagcaaagagtcatctccatttttttgaaatggatcttcttgacatcgactccattgcc

SEQ ID NO: 198672 - DNA, 290 bp, Glycine max
tacggctgcgagaagacgacagaagggggcacaagtgagtttgttgatcgagataactagaaacagtgtgatgaaaatgaaggtccttgttttcttcgttgctacaattttggtagcatggcaatgccatgcgtacgatatgttccctctccgaatgaacactggctatggtgcccgtactccggaggtggaatgcgcaagttggaggcttgctgtggaagcacacaacatctttggctttgagaccattcctgaagagtgcgttgaagcaacaaaggaatacatccatg

SEQ ID NO: 198673 - DNA, 286 bp, Glycine max
tacggctgcgagaagacgacagaaggggggacgctgctgctataaaaaagctcgaatactcggataaggagaaacatcttttaatggcgtcccaaatccgtgagtggtctggaatcaatacattcgcacctgctacccagactaagttgcttgaactcttgggaaatcttaaacaagagaatgtgaactccttgactatacttgtgatgggaattagaggtgttggaaaatcttcaactgtgaactccatcattggggaaagagtggtttcgattagtcctttcca

SEQ ID NO: 198674 - DNA, 286 bp, Glycine max
ctgcgagaagacgacagaagggggcacaagtttgttgagatagctagaagcaataagatgaaaatgaaagtgcttgttttgtttgttgctacagttttggtagcatatgaatgccatggctcagactaccagaagttccctctccaaatgaaaactgggtttggtgggcaatacagcaatgaggtggcatgtgccagttggaggcttggcgtggaagcaaacaacgtagtcaagtggcaaactgttcctgcagcttgcggagagtacatagctgactacgttctag

SEQ ID NO: 198675 - DNA, 287 bp, Glycine max
acggctgcgagaagacgacagaagggggcaccatgaggaatgttcctgtgggggcaggacggcgaaagaacaagaactctacctcgcattatcgccacatcactatctccgaggcccttcaagcagcaagaattgatgctcaaaatggaactcatcttccaactttgaaaggcaatggtagagtcctcagctttggattagatgcacatgcacctatttgtgattccatggcatctctcatgaatcttggagagaaaaaggctcttaatggcacaagaaatgggttt

SEQ ID NO: 198676 - DNA, 290 bp, Glycine max
acgcgagaagacgacagaaggggatcgaagcaaaaaatgaaaacccaaagtgcttctctcctctgtctttttctctctcttgctatccttttggctagtggcactgctgcaagtgcaactccaagaagcgcagtgccaagccaccatgtttcaacattcaacagaagcctttttcatcccacttttctccttggaattggttcttctgcttaccaggcagaatgagcagcaagtgtagatgggagagggccaagcatatgggacacctacactagacagcatactgaaag

SEQ ID NO: 198677 - DNA, 300 bp, Glycine max
ttattagtgagactagtacatgagactaacaacagtaaatcagttattagaaattatataggaatactgaaaatttctatttatgatattatgtgtgtggtttcacttgcaggagctcacacatttggcaaagcaaggtgtactagtttcagagatcgcatatacaatcaaaccaacattgatagaaaatctgcattggccaggcagaggaggtgtcctaggactaatggcacaggtgacaacaatctagcaaatctagacttcagaactccaaatcattttggacaacaactacttcaa

SEQ ID NO: 198678 - DNA, 286 bp, Glycine max
acggctgcgagaagacgacagaactgggaaaggaggaagaggaaaagaggattagagggtcgccacgtttagcaataaccaaaccctctctactcttttttcttctccttctcttcgctagggttttagcttcttcctcttcacttcgttctttttcgcctctacaatgagcaacgacaaggacacattcaacgtcgccgatctcagttctgctctcaacgaggacaatagagcagaccttgtcaatgctcttaagagccagatacagagtttggctgggcaacac

SEQ ID NO: 198679 - DNA, 278 bp, Glycine max
tacggctgcgagaagacgacagaagaggaccggaaagaccataaccttggaggtggagagttcagataccatagacaatgtgaaagctaagattcaggacaaggaaggtatcccaccagaccaacagaggcttatctttgccgggaaacagcttgaagatggaagaacccttgctgactataacatccagaaggaatctaccctgcacttggtgttgcggcttcgtggtggcatgcaaatctttgttaagactttgactggagaagcataactttgga

SEQ ID NO: 198680 - DNA, 266 bp, Glycine max
acggctgcgagaagacgacagaaggggatcccaagctcacacaccaaaccaaagcaagaatagtgttctaagagtgagcaacaacttcaaacaccattgtgagaaatggcttccaagggtgcacttctcttgtgtctcaacattctcttcttcactgtggtaagctccacatatgtcccatgcaacccaccccctaaaactcctaaatacacacctgccccaaagccaccttccccaaagcaaccaagttgccccaaagacaccat

SEQ ID NO: 198681 - DNA, 282 bp, Glycine max
cgcgagaagacgacagaagggcactctttgaagaaatggaagcaagcagcatcaagctagatactattgcctgtgcagctctaatgagatcttttaataaaggtggccaaccaggaagggttcttagtcttgcagaaagtatgagagaaaaagaaattcctttcagtgataccatattttttgaaatggtatctgcctgtagcatattacaagattggaggacagctgttgatatgatcaagtacatagagccctcacttcctgtaatttcatccggatgtt

SEQ ID NO: 198682 - DNA, 281 bp, Glycine max
acggctgcgagaagacgacagaagggggcacaagtgagtttgttgatcgagataactagaaacagtgtgatgaaaatgaaggtccttgttttcttcgttgctacaattttggtagcatggcaatgccatgcgtacgatatgttccctctccgaatgaacactggctatggtgcccgtactccggaggtgaaatgcgcaagttggaggcttgctgtggaagcacacaacatctttggctttgagaccattcctgaagagtgcgttgaagcaacaaaggaata

SEQ ID NO: 198683 - DNA, 269 bp, Glycine max
gctgcgagaagacgacagaagggtactatcagcttgagcgattggatatttcatcaaattcatttgtggggccttttcagccaggattgttgtcacttccttctattacttatctgaatatttctgggaacaaattaaccgggatgcttttcgagaatctttcttgcaattctgagcttgatgtagtggatttatcctcaaatcttttgactgggagcttacctagatgtttagtgtcaaattccagcgatagcactgtcctgtatgct

SEQ ID NO: 198684 - DNA, 248 bp, Glycine max
tctcgagccgattcggctcgagacggctgcgagaagacgacagataggatcagtggtgcccaccaggataacaacataatactgtggaatgctgtcatatttggtcctgatgatactccatgggatgtaggcacgttcaagttgacactccaatttactgaggactatccaaataaaccaccgactgtacgatttgtgtctcgcatgtttcatccaaatatttatgctgatggaagtatttgtttgga

SEQ ID NO: 198685 - DNA, 281 bp, Glycine max
acggctgcgagaagacgacagaagggggcacccaaaggtgcaaaaatattaagatgataaacattggagcacttgttgtactctttgcatttctcttcctcagttgtgcctatgcacaagacacaataacccttgtgcctgcaatcataacttttggtgactcagccgtggatgtagggaataatgactatcttcccacccttttcaaggctgattaccctccttatgggagggactttgctaaccaccaacctactgggaggttttgcaatggcaaatta

SEQ ID NO: 198686 - DNA, 280 bp, Glycine max
acggctgcgaggacgacagaaggggaagcacaccattattttattatgaatgagtggcaatagcagcaacaacaacaatattagtaaaagaatctctgtgttgtcatcacacttcgctagatccagccccatcatggcttcagagaagcaagcggctcttgccgtcactccctctgatgctgatgctcctaccatatttgacaagatcatcaataaggagattccttctactgtggtttatgaggatgacaaggtgcttgccttcagggacataactcct

SEQ ID NO: 198687 - DNA, 281 bp, Glycine max
aatcgagccgaatcggctcgagtgcgagaagacgacagaagggggatatactcagaagatgacgcaaaggccgtcatggtacagatactaaatgttgttgcattttgtcatctacagggtgtggtacaccgagatcttaagccggagaattttttgtatgctaaaaaggatgaaagttctgagttgaaagctatagactttgggttatcagattttgtcagaccagatgaaaggcttaatgatattgttggaagtgcatattatgtggcccctgaagctct

SEQ ID NO: 198688 - DNA, 279 bp, Glycine max
agaagacgacagaagggggcgcattgaacgaaaattagggtttgtagtgtagcaggaagaagcagcaatggcgccgaagataacacgtaaggttagcagaaaccctgaattgataaggggaatcggaaagtactcgaggtcgcagatgtaccacaagactggcatttgggctatcaaggccaaaaacggtggcgttttacctcgccacgaccctaaacccaagcctgaagctcctgctgaaaaaccacccaaattttaccctgctgatgatatcaagaa

SEQ ID NO: 198689 - DNA, 281 bp, Glycine max
taacaagtaatccaaatgtgggtggatttggtcagggggatgcggaaatagtacttcaagatccgttacgtgtccaaggtctcttgttcttcttcgcatctattattttagcacaaatctttttagttcttaagaagaaacaatttgagaaggttcaattgtccgaaatgaatttctagtcccgcatatttatcaacatattaaactcataaaaataactcaatttttttgttgataatttatgtaattctattcagtataatatcagtataatagaatac

SEQ ID NO: 198690 - DNA, 279 bp, Glycine max
acggctgcgagaagacgacagaaggggaaaaaaaaaagaaacaaattgagcaatgaatttgtaaatagggcaaaagtaatggataaggaattaatttctctggatatattagaaaaccgaattcgattgtctaatgatgaaactaaaacaaaatatttaactaaaatatatgatcctttcctgaacggacgctttcgtggacaaatcgaaaatgttttttcaacctcaatccaatatgaaaaaaatgaaaaaaaaaataccattttgataaataaaatt

SEQ ID NO: 198691 - DNA, 286 bp, Glycine max
ttctcgagccgaatcggctcgagcaaagctatggggcttagtgaccacagatatcgttgctctatctgggggtcacactattacagctgcgcacaaggagcgttctggattcgagggtccctggacctctaatcctcttattttcgacaactcatacttcaaggagttgttgagtggtgagaaagaaggcctccttcagctaccttctgacaaggcacttttgtctgaccctgtgttccgccctcttgttgagaaatatgcatcggacgaagatgccttcttcgct

SEQ ID NO: 198692 - DNA, 180 bp, Glycine max
tctcgagccgaatcggctcgagtagaagacgacagaagggggcgatagaagttattagggtatttgagtgcggcggtccaaacactcttctctgcagcttttgcctacaactcccttcaccatggttgaacaaaccgagaaagcttttctgaagcaaccaaaagtgtttctcagcacaaa

SEQ ID NO: 198693 - DNA, 279 bp, Glycine max
taccgctgctagaagacgacagaagggcgcatcagacgagttgtaaattaagagcatggctgcacaagctcttgtatcatcatcttctcttaccttctcagcggaggctgcaagacaaagtcttggaccaagatcactccaatctccatttggcttctccagaaaagcctcctttcttgttaaggcagctgctaccccccctgtcaagcaaggatcagacagacctttgtggtttgcatcaaagcaaagtctttcttacttggatggcagccttccggg

SEQ ID NO: 198694 - DNA, 278 bp, Glycine max
ccacagtttaggccacctccctgcaagggtgaagaggtgtgccagcaagcaagtgcaggacagctggcaatcctctacatctcactcctcctcggggcactcgggtcgggtgggatccgaccctgcatcgtggcgttcggggcggatcagttcgacgagtctgatccccaagcagacaacaaggacatggacctacttcaactggtactactttgtcatgggtgtagcaattcttgtggctgtgactgttttggtgtatattcaggacaatattggtt

SEQ ID NO: 198695 - DNA, 281 bp, Glycine max
actcgagccgattcggctcgagtacggctgcgggaagacgacagaacgggggatatcacggacacacgtcaaagacattttactgtggggaagtcagtggatgaactgaaaaatcttgtcaaggtaactgaagaatgcctggagaagggaatagctgcgtgcaaggacggtgctctctttaggaaaattggaaagagaatcagtgagcatgctgaaaagtatggctatggtgtagtggagcgttttgttggacatggtgtgggaacagtgtttcattctga

SEQ ID NO: 198696 - DNA, 249 bp, Glycine max
gatgctttgaagtctcccacaggagatgaagcatacaatgaaaatggtttagtgcctcgaacaatacgtttgctcaaggataagtacccagaccttgttatctatacagatgttgcattagatccttattcatcagatgggcatgatggcatagttagagaagatggagttattatgaatgatgagacagttcatcagctatgtaaacaagctgtagcccaggcccaagctggagcagatgttgtcagt

SEQ ID NO: 198697 - DNA, 277 bp, Glycine max
tacggctgcgagaagacgacagaaggggagagaaagagagagaaagatgtcgaagcgtggtcgtggtggttcggcggggaacaagttccgcatgtcgctgggtcttccagtggcggcgacggtgaactgcgccgacaacacgggggcgaagaacctctacatcatttcggtgaaagggatcaaaggccgtttgaaccgtcttccctcggcctgcgttggcgacatggtgatggccaccgtgaagaagggaaaacccgatctgaggaagaaggtcttg

SEQ ID NO: 198698 - DNA, 218 bp, Glycine max
acggctggagaagacgacagaagggggcctacgcagagagaaattgagtttctgagataaccacttttctctttgattcatcaatggcaaccgcgaggaccgtgaaggatgtttcgcctcacgatttcgtgaaggcttacgcctcccatctcaagcgttccggcaagatggagcttcctgagtggactgatattgtaaaaacagcaaaatttaaggaa

SEQ ID NO: 198699 - DNA, 274 bp, Glycine max
acggctgcgagaagacgacagaagggggttttgaccaaggagaccaggcatggccgttctgcacacagagtgtcctccacctctttgcgcaagaaatctagccgaactcttgtctcaaaggttccatgtgccactctcagaaactttctttcaaatttgcaagaggttattcttggcaccaagctttccattctcatccctgctattccagctgccatcgttgctgagtgctttggctttggaagaccttggatttttatattaagcttacttg

SEQ ID NO: 198700 - DNA, 274 bp, Glycine max
gctgcgagaagacgacagaagggggacggagcagaggacaagatgggtagtgtgagttatagcaatctgaagaacgccatgatagcattcttggtccctctaccctccatcctattctacctctcattccaatcggccattagtactccttcttcttggtcttctctgtggacatggtgctatcaccaccctctgctattggccaatgtccttttcttcttcaatgtcaatttcctcttctggctcatcggcctaatccaatccagccactgga

SEQ ID NO: 198701 - DNA, 275 bp, Glycine max
ccgtcggcaactacgacaatatagtagattgggagttcaagacaagtggttcaatcaagccctcgatatcactatcaggcattttggaagttaagccagtggacattactcacacagaccaaataaaggaagaccaacatggcacattggtctcagcaaacagcattggtgtttaccatgaccatttctacatattccatcttgattttgacattgatggtgtggaaaattcctttgtgaagaccagtctcaagactctacaagtcacagacaac

SEQ ID NO: 198702 - DNA, 249 bp, Glycine max
gcgagaagacgacagaagggattgacacttatgttttctggaatgttcatgagccatctcctggcaattacaattttgaagggaggtacgatctggtacggttcatcaagacagtgcaaagggtggggctctatgtccatcttcgcattggaccttatgtgtatgctgagtggaactttggaggatttccagtttggttgaactatgttcctggcatcagcttcagaacagataatggcccttttaagg

SEQ ID NO: 198703 - DNA, 271 bp, Glycine max
tacggctgcgagaagacgacagaaggggacactaaacaagttaaaagaagagcatcactgaactaacaaagcaaccctatgtcgaaggtggtttgtgtcaccggagccagcggcgccatcggatcatgggtggtcctactcctcctccagcgtggttacaccgtccatgccaccgtccaagatatcaaggatgaaaatgagacgatacatttggaggaaatggaaggagcaaagagtcatctccatttttttgaaatggatcttcttgaca

SEQ ID NO: 198704 - DNA, 269 bp, Glycine max
tacggctgcgagaagacgacagaagggggcacaagtgagtttgttgatcgagataactagaaacagtgtgatgaaaatgaaggtccttgttttcttcgttgctacaattttggtagcatggcaatgccatgcgtacgatatgttccctctccgaatgaacactggctatggtgcccgtactccggaggtgaaatgcgcaagttggaggcttgctgtggaagcacacaacatctttggctttgagaccattcctgaagagtgcgttgaag

SEQ ID NO: 198705 - DNA, 269 bp, Glycine max
tacggctgcgagaagacgacagaagggggcacaagtgagtttgttgatcgagataactagaaacagtgtgatgaaaatgaaggtccttgttttcttcgttgctacaattttggtagcatggcaatgccatgcgtacgatatgttccctctccgaatgaacactggctatggtgcacgtactccggaggtgaaatgcgcaagttggaggcttgctgtggaagcacacaacatctttggctttgagaccattcctgaagagtgcgttgaag

SEQ ID NO: 198706 - DNA, 270 bp, Glycine max
tacggctgcgagaagacgacagaagggcagaaattgtagtgaaagcgataattctagtactagtataataactagtacgaatgatacaaatgatagtgattccactataggagaaagttctaataatctcgatgaaagtcaaaaatataagcatttgtggcttgaatgcgaaaattgttatggattaaattataaaaaattttttaaatcaaaaatgaatatttgtgaatactgtggatatcatttgaaaatgggcagttcagatagaat

SEQ ID NO: 198707 - DNA, 272 bp, Glycine max
tcgccaggaaagcatggttggtctattaatgagtttggtgatctgactagaggtgcagcaagcactggtaaaatgttcaatccggtaaatgaggaaaacagtaaggagccactgggcgacctgggaacactagaagctaacgaaaagggtgaggccttctatagtggggtcaaagaaaagctgagggtggctgatcttattggacgatctgtggtggtatatgcaactgaagataaatcagaacatggtataactgctgcagtaattgccag

SEQ ID NO: 198708 - DNA, 260 bp, Glycine max
ggctcgagggggaagcaaaaaatgaaaacccaaagtgcttctctcctcagtctttttctctctcttgctatccttttggctagtggcactgctgcaagtgcaactccaagaagcgcagtgccaagccaccatgtttcaacattcaacagaagcctttttccttccacttttctctttggaattggttcttctgcttaccaggcagaaggagcagcaagtgtagatgggagaggaccaagcatatgggacacctacactag

SEQ ID NO: 198709 - DNA, 274 bp, Glycine max
gaccgtgaattctttgtagaagctgagatgcttagtcgcttgcaccatagaaatttagttaaattgataggtttatgcacagagaaacagactcgctgcttagtctacgagctcgtccctaatggcagcgtggaatcccacttacatggtgctgacaaggaaaccgaaccacttgattgggatgcatggatgaagattgcacttggtgcagctaggggattggcttatctgcatgaagattgtaatccatgtgtcatacatagggacttcaaat

SEQ ID NO: 198710 - DNA, 302 bp, Glycine max
cgcgtacggactctctctcgagccgaatcggttcgagtacggctgcgagaagacgacagatatgggtattttggactcatgggtgatggtcaacctataggacgatacggtgatatgtgggctggatggtgtgttaaggctatctgtgaccatttgggcttgggagtgaagactggccttccatacatctggcacagcaaagcaagcaatccttttgtgaatctcaaaaaggagtacaagggcattttctggcaagaagagatcgttccattcttccaaagtgccaccattccaaaagaatg

SEQ ID NO: 198711 - DNA, 285 bp, Glycine max
tacggctgcgagaagacgacagaaggggattgaaactaaactccaacaagttcctaccatagtctgaggaaagtgagtgagagaaagagatcgcagacacagagcagaatggcttctacccaatgtttcttgcaccaccatgctcttaccacccctgccagtgccagatccccatcactacgcatcttggttagcaccaagcctaaccagcttgtttgcaaggcactgaaacaacaaacaccacaagaggatattgatgtcagcccaatctctcgccgtttagct

SEQ ID NO: 198712 - DNA, 281 bp, Glycine max
tagaagacgacagaaggggtcatactaatgttcattgctataccatcgtttgctttgttatactcaatggatgatattgtagtggatccagccattactatcaaagctattggacatcaatggtattggacttatgagtattcagactataacaactctgatgaacaatcacttgcttttgatagttatatgattccagaagatgatctagaattagggcaattacgtttactagaagtggacaatagagtggtagtgccagctaaaactcatctgcgtgt

SEQ ID NO: 198713 - DNA, 289 bp, Glycine max
cggctcgatacggctgcgagaagacgacagaagggggagaacaaaacaagtgtttcgaatagattatcctaagtctttgggaatagtgctgcaatggcttcaagtcaggaggaggtgacccttttgggagctactggaagcccatttgtgtgcagggttcatattgccctcaagttgaagggagttcaatacaaatatgtcgaagaaaatttgaggaacaagagtgaactgcttctcaaatccaacccagttcacaagaaggttccagtgtttattcacaatgagaagc

SEQ ID NO: 198714 - DNA, 282 bp, Glycine max
acggctgcgagaagacgacagaaggggacttcaaaacactcataacacaaagcacaaagcaaagctcatccttgagttaaaaaatggcagcagcttcttccatggctctctcatccccatccttggctggcaaggccgtgaagctgggcccatcagccccagaagtgggaagggtgagcatgaggaagaccgtcaccaagcaggtctcctcaggaagcccatggtacggcccagaccgagtcaagtacttgggcccattctctggcgagcccccgtcctacc

SEQ ID NO: 198715 - DNA, 231 bp, Glycine max
acggctgcgagaagacgacagaagggcaataaagaatagtttgtaacttcggaaaaagagaatctagtttattttcttacatagaatcctcatatatgtgtgaataacacatacattttttctatagatacattcgaaatctttgattagtgctcgatccggatgatgaaaaattatcatatccggttctttcggaggatggatctataagaattcacctatcccaataac

SEQ ID NO: 198716 - DNA, 280 bp, Glycine max
acggctgcgagaagacgacagaaggacacacacttgcccatcatcaaagtttcttcctttctctgctctttgccttctctgacacatttggtgccttgtagagcgtgttttggcaggaaggtggtatggcgaaggacgttgaggttgctgagcgtggctccttctctgggaaggactaccaggaccctccaccagcaccactcattgatgctgaggagctcacaaagtggtccttttacagggctctcattgctgaattcattgccactttgctcttcct

SEQ ID NO: 198717 - DNA, 282 bp, Glycine max
taggctgcgagaagacgacagaaggggggcgtttgtaagagcatataaataacatagtcctccttcctttgttttttccacatcacgacatcacatcgcagagaagaacagagagagatccatccatcaattccaatggccgatcagctcaccgacgaacagatctccgagttcaaggaagccttcagcctcttcgacaaggacggggatggttgtattaccaccaaggaacttgggaccgtgatgcggtcacttggccagaacccacctgaggcagagctg

SEQ ID NO: 198718 - DNA, 277 bp, Glycine max
ggctgcgagaagacgacagaaggggaaaatcattctgtcaaaccacccatgttgcagaggggggtgctcaggaccaactgcatagactgcttggatcgcactaatgttgcacaatatgcatatgggttggctgctcttggccaccagctccatgctctgggagttattgaccacccaaaaattgatcttgatgaccctgtagcagatgatttgatggggttttttgtgcggatgggtgatacactcgcacatcagtatggtggttctactgctcaca

SEQ ID NO: 198719 - DNA, 277 bp, Glycine max
tacggctgcgagaagacgacagaagggggggcgaggtagccagagagtgatacaatacagagtgcgttgttactccttcgccacaactccctgccaacatgggtatctccagagattctatgcacaagaggcgtgccactggtggcaagaagaaggcatggaggaagaagagaaagtatgagcttggtcgccagcctgctaacactaagctgtcaagcaacaagacagtcaggaggatccgggttagaggtggaaatgtgaagtggagggcactgag

SEQ ID NO: 198720 - DNA, 278 bp, Glycine max
acggctgcgagaagacgacagaagggggcatcagaggagttgtaaattaagagcatggctgcacaagctcttgtatcatcatcttctcttaccttctcagcggaggctgcaagacaaagtcttggaccaagatcactccaatctccatttggcttctccagaaaagcctcctttcttgttaaggcagctgctaccccccctgtcaagcaaggatcagacagacctttgtggtttgcatcaaagcaaagtctttcttacttggatggcagccttccggg

SEQ ID NO: 198721 - DNA, 279 bp, Glycine max
tctcgagccgaatcggctcgagtacggctgcgagaagacgacagactggggaggaaaagatacaaagataaaaaaaaacagacgccctagatttgctcttctttgcttcggaagaaagagaaaaacaaataacaatggcgttcgcttctttcctcggcagagttctcttcgcttccgtcttcatactctctgcttaccaagaatttaacgaatttggagttgatgggggacctgcagcaaaagcactcagacctaagtttgatgcctttacacatcgag

SEQ ID NO: 198722 - DNA, 278 bp, Glycine max
tctcgagccgaatcggctcgagagacgacagaagggggcatcaatataaaatatatcatcaattataagcatgggtttgtgagtacacaacgaatgcagtgtcttgccgctttcacaagtttggtgatgaccaaaagaatctggtcttccaaggtgatgccacgtcttcttccaggggcatagaactctcaaagttagacggtggaggaaaaccagtgggtggcagtgtggggagagtgttatactcttctccagtgcacctttgggaaagctctaca

SEQ ID NO: 198723 - DNA, 279 bp, Glycine max
acggctgcgagaagacgacagaagggatcagtggtgccccccaggataacaacataatgctgtggaatgctgtcatatttggtcctgatgatactccatgggatggaggcacgttcaagttgacactccaatttcactgaggactatccacatataccaccgactgtacgatttgtgtctcgcatgtttcatccaaatatttatgctgatggaagtatttgtttggatatattacgaaatcagtggagtcctatttatgatgtggctgctatactcaca

SEQ ID NO: 198724 - DNA, 272 bp, Glycine max
tacggctgcgagaagacgacagaagggggcaccgcttgagcagacttaacaacagcacaaagcggggtactgtctgttccagctaccatctctctctctctttcttagtgcctccttgccagaagttaaaatggcccaagaaacttttcctattcacatctgaatcagtgaacgaggggcacctgacaagctctgtgaccagatctccgatgctgtgctcgatgcatgcttggagcaggaccctgacagcaaggttgcctgtgaaacctgca

SEQ ID NO: 198725 - DNA, 274 bp, Glycine max
tacggctgcgagaagacgacagaaggggcacaagtttgttgagatagctagaagcaataagatgataatgatagtgcttgttttgtttgttgctacagttttggtagcatatgaatgccatggctcagactaccagaagttccctctccaaatgaaaactgggtttggtgggcaatacagctatgatgtggcatgtgccagttggaggcttcgcgtggaaggaaacaacgtagtcaagtggctaactgttcctgcagcttacggagagtacata

SEQ ID NO: 198726 - DNA, 275 bp, Glycine max
tctcgagccgaatcggctcgagtacggctgcgagaagacgacagaagggggtaccgatcaaataacaaccatatctatctattgagaaacatgaagaaggtttcacccttggcattttccattctctttttggccttcaccatagaaccctttattggcattgctgcagcagcaccagaagcagtgcttgacacctcaggccagaagctgagaacaggtgtcaggtactacattctgccagtgttcagaggcaaaggtggaggcctaacagtttc

SEQ ID NO: 198727 - DNA, 274 bp, Glycine max
cgcgagaagacgacagaagggcactctttgaagaaatggaagcaagcagcatcaagctagatactattgcctgtgcagctctaatgagatcttttaataaaggtggccaaccaggaagggttcttagtcttgcagaaagtatgagagaaaaagaaattcctttcagtgataccatattttttgaaatggtatctgcctgtagcatattacaagattggaggacagctgttgatatgatcaagtacatagagccctcacttcctgtaatttcatc

SEQ ID NO: 198728 - DNA, 272 bp, Glycine max
tacggctgcgagaagacgacagaagggggcatcaattcaaaatatatcatcaattataagcatgggtttgtggaacacaacgaatgcagtgtcttgccgctttcacaagtttggtgatgaccaaaagaatctggtcttccaaggtgatgccacgtcttcttccaggggcatagaactcacaaagttagacggtggaggaaaaccagtgggtggcagtgtggggagagtgttatactcttctccagtgcacctttgggacagctctacagtgg

SEQ ID NO: 198729 - DNA, 258 bp, Glycine max
tacggctgcgagaagacgacagaagggggatgttgcaagggggatggcttatgttcatggccttctattgatccacagggacttgaaatctgataatcttttgatttttggtgacaagtcaattaaaattgctgactttggagttagtcgtattggtgtgcaaactgaaggaatgacacccgagactggaacatactgtcggatggctccggagatgatccagcataggccttacacacaagaagttgatgtgtatag

SEQ ID NO: 198730 - DNA, 273 bp, Glycine max
acggctgcgagaagacgacagaaggggatcacaaatctttcgctaacactcattaattgcaagaatggcacttcgttgcttggtgatgtccctttctgttctcttcactcttggtcttgcgagagaaagccatgccagagacgaagatttttggcatgctgtttggccaaacactcccattccaagttcattgcgagatcttctaaagcctggccctgcaagtgttgaaatcgatgatcaccctatgcaaattgaagaaacacagtacccgaa

SEQ ID NO: 198731 - DNA, 270 bp, Glycine max
tacggctgcgagaagacgacagaagggggtgtgcgtcggagctgtctgtgcaaatttgcgttgttcttcgcggcacacctcactcactgaacggtaagtatggcggacaaggctgttacaatccgaacccgaaagttcatgaccaacaggcttctttccaggaagcagtttgtcgttgatgtccttcatccagggagggcaaatgtttccaaggctgaacttaaggagaagctggctaggatgtatgatatgaaagaccctaatactgta

SEQ ID NO: 198732 - DNA, 274 bp, Glycine max
agaagacgacagaagggaggcgaactgatttcgttatcagaacaagaattggtggattgtgatactggatataaccaaggatgcaatggaggacttatggactatgcatttgagttcataatcaacaatggcggcattgattctgatgaggattacccataccgtggtgttgatggtagatgcgacacatataggaaaaatgctaaagtcgtttctattgatgactacgaagatgttcctgcctatgatgagttagccttgaaaaaggccgttg

SEQ ID NO: 198733 - DNA, 278 bp, Glycine max
tacggctgcgagaagacgacagaagggggcatcaattcaaaatatatcatcaattataagcatgggtttgtggaacacaacgaatgcagtgtcttgccgctttcacaagtttggtgatgaccaaaagaatctggtcttccaaggtgatgccacgtcttcttccaggggcatagaactcacaaagttagacggtggaggaaaaccagtgggtggcagtgtggggagagtgttatactcttctccagtgcacctttgggaaagctctacagtggtcgcaa

SEQ ID NO: 198734 - DNA, 285 bp, Glycine max
tacggctgcgagaagacgccagaagggggcacaacctcaaacatgattcctatacacaatactcagacttagggagtaatggtgcaatggcttcaagtcacgatgaggtgacccttttcggagctactggaagcccatttgtgtgcagggttcatattgccctcaagttgaagggacttcaatagcaaatatgtcgaagaaaatttgaggaacaagagtgaactgcttctcaaatccaacccagttcacaagaaggttccagtgtttattcacaatgagaagccc

SEQ ID NO: 198735 - DNA, 275 bp, Glycine max
tctcgagccgaatcggctcgagtacggctgcgagaagacgacagaactgggcacaagtgagtactgttgatcgagataactagacaacagtgtgatgaaaatgaaggtccttgttttcttcgttgctacaattttggtagcatggcaatgccatgcgtacgatatgttccctctccgaatgaacactggctatggtgcccgtactccggaggtgaaatgcgaataatggaggcttgctgtggaagcacacaacatctttggctttgagaccattc

SEQ ID NO: 198736 - DNA, 270 bp, Glycine max
tacggctgacagaaggggggactaaagataactaaactcccagatatttgttcacttcactttctcagtgcagttgttgcctaatgcaatggaggaagaagccaaggtggttttgttgggtgcacggttcagtatgtttgagatgagagttaagatagctttggcagagaaaggaatcaaatatgagtacatggaacaagatctcaccaacaagagtactttgcttcaagaaatgaacccaattcacaagaagattccagttctcataca

SEQ ID NO: 198737 - DNA, 271 bp, Glycine max
gcgagagacgacagaagggggatcagctgatactaaattactgatacaggaacagcagagaaacaaagttagaagtaaagaagatcatggcttctctagcaaccttggctgctgttcaaccagctacgatcaatggccttgctggaagttccctctctggaactaagctctctttcaagccctctcgccacagtgtcaaatccaagaacttcaggagtggtgccgtggtagcaaagtatggtgacaagagtgtgtactttgatttggagga

SEQ ID NO: 198738 - DNA, 271 bp, Glycine max
tacggctgcgagaagacgacagaagggggcatcaattcaaaatatatcatcaattataagcatgggtttgtggaacacaacgaatgcagtgtcttgccgctttcacaagtttggtgatgaccaaaagaatctggtcttccaaggtgatgccacgtcttcttccaggggcatagaactcacatagttagacggtggaggaaaaccagtgggtggcagtgtggggagagtgttatactcttctccagtgcacctttgggaaagctctacagtg

SEQ ID NO: 198739 - DNA, 273 bp, Glycine max
cgagaagacgacagaagggggattgcacaacaatacagtcacagaaacagagaaaaaacaaagaaaatggatgcagaaacggagtctccggcgccgggaacatcgccggcggtgatccacccggcagtggcaccaatctcctaccttctgggcacatggagaggccaaggagaaggaggcttccccactatcaattccttctcctatggcgaagagcttcacttctcacattcccccaacaagcccgtgatagggtacactcagaagacatgg

SEQ ID NO: 198740 - DNA, 271 bp, Glycine max
gctgcgagaagacgacagaagggtactatcagcttgagcgattggatatttcatcaaattcatttgtggggccttttcagccaggattgttgtcacttccttctattacttatctgaatatttctgggaacaaattaaccgggatgcttttcgagaatctttcttgcaattctgagcttgatgtagtggatttatcctcaaatcttttgactgggagcttacctagatgtttagtgtcaaattccagcgatagcactgtcctgtatgctag

SEQ ID NO: 198741 - DNA, 268 bp, Glycine max
  unsure (1)..(268): unsure at all n locations
tacggctgcgagaagacgacagaagggggcacaagtgagtttgttgatcgagataactagaaacagtgtgatganaatgaaggtccttgttttcttcgttgctacaattttggtagcatggcaatgccatgcgtacgatatgttccctctccgaatgaacactggctatggtgcccgtactttcggagtgaaatgcgcaagttggaggcttgctgtggaagcacacaacatctttggctttgagaccattcctgaagagtgcgttgaa

SEQ ID NO: 198742 - DNA, 271 bp, Glycine max
acggctgcgagaagacgacagaaggggaagaagcccaaatcggagaggttcccgctgaacacgtgggaattcgccgtcgccgtcgccgtcttcttggtgttctccaccggcctcttctgcatttacctcaccatgccctcggccgcttacaccaacctcaaactcccccgcaccctttccgatcttcgcctcctcaaggaacatctttcgacgtatgcgagtaaccaccctgcgcagttcattcttgggtactgctccactacatcttcat

SEQ ID NO: 198743 - DNA, 264 bp, Glycine max
acgacagaaggggatgttaatgactgttgtagttgtgctacatatttggtggacagtggaaaggtggataaggagcggctgtgtattatggggggctctgctggtgggtataccaccttggctgtccttgctttcagagatacttttcaggctggggcttctttgtatggtatagctgacttgaacttgttgagagcagaaactccataaatttgaatcccattacgttgaaaacctagttggagatgataaggatatgtatga

SEQ ID NO: 198744 - DNA, 267 bp, Glycine max
gcgagaagacgacagaagggggaaggaggaagaggttctgatcttctttgttttgttttgtctggttccctttcttccttcaaccaattttgagatccgaaaccggcatcagatccgattcgaaatgtacggattcgaagctctcaccttcaacatccacggcggcttcctcgaggccatcgtccgcggccaccgcgccggcctcctcaccaccgccgattacaacaacctctgccaatgcgaaaccctcgacgacatcaagatgca

SEQ ID NO: 198745 - DNA, 243 bp, Glycine max
gaagcggatggagtcgaaccgcgagtccgcacggcgatcgcggatgaagaagcagaagctgctcgaagacctatccgacgtagcgagtcgccttcaaggcgagaacgtgcgcttagcgcagagcataaaggcgaaggaggaagcgtacgttgagatcgaagccgcgaacgacatcctcagagcacagaccatggaactcgccgaccggttaaggtttctgaactccattctcgagatcgccga

SEQ ID NO: 198746 - DNA, 268 bp, Glycine max
aacggctgcgagaagacgacagaagggggaatagtgaagagaatggctcccaagggtttaacctttctggctgtgttaatatgcgtttcagcactgtcactgagtccttctgttgcgggggaagggcaaaataatggccttgttatgaacttctacaaggaatcatgccctcaggctgaagacatcatcacagaacaagtcaagcttctctacaagcgccacaagaacactgctttctcctggctcaggaacatcttccatgactgtg

SEQ ID NO: 198747 - DNA, 265 bp, Glycine max
cggctgcgagaagacgacagaagggaactgttgttgagggaactatacagaagctatttgaagggcatcatatgaattatatcgaatgcatcaatgtggactataaatcaactagaaaggagtcattttatgaccttcagcttgatgtgaagggctgtcctgatgtttatgcttcctttgacaagtatgttgaagttgaacgtcttgaaggggataacaaatatcatgcggaacaatatggtttgcaggatgctaagaagggtgt

SEQ ID NO: 198748 - DNA, 267 bp, Glycine max
tacggctgcgagaagacgacagaagggggcacaaatgagtttgttgatcgagataactagaaacagtgtgatgaaaatgaaggtccttgttttcttcgttgctacaattttggtagcatggcaatgccatgcgtacgatatgttccctctccgaatgaacactggctatggtgcccgtactccggaggtgaaatgcgcaagttggaggcttgctgtggaagcacacaacatctttggctttgagaccattcctgaagagtgcgttga

SEQ ID NO: 198749 - DNA, 268 bp, Glycine max
tacggtgcgagaagacgacagaagggaaggtcaataaaatgaggcttgctgaatacatcgaaacaatgagtggtgtgaaggtcagtttggatgctatgtttgatgttcaggtgaagcgtatacatgaatacaaaagacaattgcttaatatacttggaataatccatagatatgattgtatcaagaatatggacaagaatgacaggaggaaagttgtaccccgtgtttgcataattggtgggaaaacagctcctggttatgaaattgc

SEQ ID NO: 198750 - DNA, 305 bp, Glycine max
  unsure (1)..(305): unsure at all n locations
tacggctgcgagaagacgacagaaggggaagaagcagagtgagtgcagagagatggcttgcagacagttgtgggcttcaagagctgcttcctacctcaggatctccgtgtttcacagaagcttctctaacgttttgaatgatctgaagtatgctgattctcatgagtgggtgaaggttgatggaaattctgcaactgttggcataactgatcatgcncaagatcatttgggtgaggttgtgtatgttgatttgctgaagtgggagcaccgtgacacaaggagaggttttgtgcactgaagtgtga

SEQ ID NO: 198751 - DNA, 312 bp, Glycine max
  unsure (1)..(312): unsure at all n locations
tacggctgcgagaagacgacagatggcggagacagaatggaggatcattctgcttcgatacttcaatccggttggtagccacgagagtggacagattggggaagatccaaggggaatccccaataacctcatgccttacattcaccaagtcgccgttggcagattgcctcagctcaatgtttatggccatgactatcccactanagatggcacccgatccgggactatatccatgtaatggacttggcagatggccacattgctgctctccgaaagctttntgcaacagaccacatcggttgtagtgcctac

SEQ ID NO: 198752 - DNA, 314 bp, Glycine max
  unsure (1)..(314): unsure at all n locations
acggcgcgagaagacgacagaagggggagtgagagaaagagatcacatagcagaatggcttctactcaatgtttcttgcaccaccatgctcttaccacccctgccagatccccatcacaacgcatcatggttagcaccaagcctaaccagcttgtttgcaaggcacagaagcaagaggatattgatgtcagcccaatctctcgccggttagctctaaccgtgctcattggtgctgctgctgttggctccaaagtccaacctgctgatgcagctttatgggaagctgccaatgntgtntggaaagcaaagacaga

SEQ ID NO: 198753 - DNA, 164 bp, Glycine max
cggctcgagcggctcgagaagacgacagaaggggggactgaggctgccattattccaattgggatatggggcatcgttgcttgcagggcgctttcgcagaggaatgatgacccaaaactgctcccaggccgtgggataaggatcgtgatggctttagtatgggc

SEQ ID NO: 198754 - DNA, 303 bp, Glycine max
  unsure (1)..(303): unsure at all n locations
tagaagacgacagatcagggtcttgctaatggtaaaaaagggagctttgaatgtgggggctgttcttattttaccggaaggttttgaattggcaccccccgatcgtatttcgcctgagattaaagagaagataggcaatctgtcttttcaaaactatcgtcctacaaaaaaaaatattcctgtggtaggccctgttcctggtcaaaaatataaagaaataacctttcctattctttccccggattccactactaagagagatgttcatttcttanaatatcctatatacgtaggtgggaacag

SEQ ID NO: 198755 - DNA, 313 bp, Glycine max
tacggctgcgagaagacgacagaagggggaagtgaagcagtgagtgagggaataatgttgcggattgctcccaaattcttcaccacggttcctcttcggaccatttcacccttcgcatgtcgcttctcagtccgttccatcgctgactcttctcctttcaacaaaatccgcattcaaagggatgatactgcatttgatgcatatgtcgttggaaaaaacgacgctcctggaatcgttgtgcttcaggagtggtggggtgtggactttgaaattacacatcatgctgtgatgatttctcaacttggtcgtggat

SEQ ID NO: 198756 - DNA, 316 bp, Glycine max
tacggtgcgagaagacgacagaagggggcacaagtttgttgagatagctagaagcaataagatgaaaatgaaagtgcttgttttgtttgttgctaacagttttggtagcatatgaatgcccatggctcagactaccagaagttccctctccaaatgaaaactgggtttggtgggcaatacagcaatgaggtggcatgtgccagttggaggcttggcgtggaagcaaacaacgtagtcaagtggcaaactgttcctgcagcttgcggagagtacatagctgactacgttctaggagaccaatatagatcagatccaa

SEQ ID NO: 198757 - DNA, 259 bp, Glycine max
tacgagacgacagaagggaactgttgttgagggaactatacagaagctatttgaagggcatcatatgaattatatcgaatgcatcaatgtggactataaatcaactagaaaggagtcatcttatgaccttcagcttgatgtgaagggctgtgctgatgtgtacgcttcctttgacaagtattctgaagttgcacgtcttgcaagggataacatatatcatgcggaacaatatggcttgcaggatgctaagaaaggtgtt

SEQ ID NO: 198758 - DNA, 276 bp, Glycine max
acggctgcgagaagacgacagaagggcaataaagaatagtttgtaacttcggaaaaagagaatctagtttattttcttacatagaatcctcatatatgtgtgaataacacatacattttttctatagatacattcgaaatctttgattagtgctcgatccggatgatgaaaaattatcatatccggttctttcggaggatggatctataagaattcacctatcccaataaccaaaaaacctgacttgaatgatcctgtattaagagctaaattggc

SEQ ID NO: 198759 - DNA, 243 bp, Glycine max
ctgcgagaagacgacagaagggaagacgaaactgtgctatggatagattatttttttgtgaaatagattaattaatctattttatctaacatatatcccttttgtagtaattattagaatttgtagtaattattataagtattagaagcagcaattcttatttatgtcagattattacttgataacctaaacaatatatctatatatagaatatagatagatatatatataatagaacgtaaa

SEQ ID NO: 198760 - DNA, 279 bp, Glycine max
  unsure (1)..(279): unsure at all n locations
gacacgcagttgtattgtagaactgaacaagggtttctctttctctttctctgtctgcttcttcactttctctcgtttcaatcgaaaaaaatcatgggcagaaaattcttcgtcggtggcaactggaaatgcaatgggaccactgaggaggtgaagaagattgttactactttaaatgaagctaaagtccctggagaagatgttgtagaagttgttgtgagcctccttttgtgttcctccnttgtaaaaagtttctgcgccctgattccatgtctcggc

SEQ ID NO: 198761 - DNA, 306 bp, Glycine max
tacggctgcgagatgacagaagggatatcatgcttatatttctttctcattagacatatatactagcatttgggtgtcaaaatatatatatattttctgatggagaataactcgaacttacttgcagagaggaattatctcgtcctcaatgtcacgagtccatagggaccactccatttgaacagcagtgatgggatgaacagcatgtgctctccttattgtatctggactagcttcagataatccgatatacctcacttttccatcttccatcagtttcttcagttgcacatctatataacatat

SEQ ID NO: 198762 - DNA, 293 bp, Glycine max
  unsure (1)..(293): unsure at all n locations
acggctgcgagaagacgacagaaggggggtctgggttgtcggtccttctctcggaatcttcaataaattcaacgggcaattggaatcacattgaataatggtggggattcaccaacctatgccgaagtggttgaagtggctctagaaagttaacggcggcttcctgcatgntgtgtatccgtgtggtgatcttgatcgcaccattaagtttatactgaaatgtttgggatgaagctttgaggaaagagatttccagagagaatatgccatgctttcttgattggccctgacat

SEQ ID NO: 198763 - DNA, 249 bp, Glycine max
acggctgcgagaagacgacagaaggggagggtttggttattagggttttcgctgaccggtgcgcagtcgagcctccagaagacgaatcgaaaatgccgtcgcacaagacattcagaatcacagagaagttggcgaggaagatgatgcagagcaagtccattccctactggatccgcatgatgtccgatagcaccatcaggtacaacgcgaacgtcgtgactggcgcgcaacaagcttgagagtctgagg

SEQ ID NO: 198764 - DNA, 293 bp, Glycine max
aacgacagatgggggagttcaacgagatggagcacataaagcacagaatagttgaagtgaatggcataaaaatgcatgttgcagagaaaggagagggtccagtggtgttgttcctccacggcttctctgagctctggtactcatggcgccaccagattctctctctcagctccctcggctaccgcggtcgtcgctccgatctccggtggtacggtgacatcgaagcaccatcttcaatcagcagctacaactgccttcacatagtgggtgatctcggtgcggttattgatctc

SEQ ID NO: 198765 - DNA, 293 bp, Glycine max
gtacggctgcgagaagacgacagaagggggaagctggaaaagttagaagtagtgaagaaaatgagagtcattgtgttcttcgttgctataataattttaggtgcagaatggcaatgcaatgggtcagagcatgagcatgagcatggccacagctaccaaattttccctttgcgaatgaaaaccggcgccggtggccactacattccggaggtatcgggcaagagttggaggcttggtgttgaaacacacaacgtcatgtgctggaggaacatgcctcaagattgcgagggata

SEQ ID NO: 198766 - DNA, 294 bp, Glycine max
  unsure (1)..(294): unsure at all n locations
tctcgagccgaatcggctcgaggaagacgacagaagggggaacctatgcattctattcattacagattcagcaagtgcgtactggaggcagagaccgaaatacttcgagatggcccgtacaaagcaaactgctcgtaagtcaactggaggaaaagctcccaggaagcagcttgcaaccaaggctgcacgtaagtctgcaccaacaactggtggtgtgaagaagctcatcngtatcgcccctggactgtgccttcgtgagttaagaataccagagagcatgagctctaaatcaga

SEQ ID NO: 198767 - DNA, 271 bp, Glycine max
tcgagaagacgacagaagggggaggctactgaaatcattacttatactagttttctacgattattcatagtgaggcaatagtagcagcaattcacactggtctttgcttctcgttactcatttctcacctaactttctattcttctcagtctcagatcagaaccttagccatggcagcgttccagaagatcaaggtcgccaaccccatcgtcgagatggacggagatgaaatgactaagggtatctggaagtcaatcaaggaccagctcat

SEQ ID NO: 198768 - DNA, 259 bp, Glycine max
ggcggctgagcgacggcgagggacaggcagttgtattgtagaacttaacaagggtttctcttgctctttctctggctgcttcttcactttctctcggttcagatcgaaaaaatcatgggcagaaaattcttcgtcggtggcaactggaaatgcaatgggaccactgaggaggtgaagaagattgttactagcttgaaatgaagctaaagtcgctggagaagagttgtagaagttgttgtgagcctccttttgggtgcct

SEQ ID NO: 198769 - DNA, 240 bp, Glycine max
ctgcgagaagacgacagaagggaagacgaaactgtgctatggatacattatttttttgtgaaatagattaattaatctattttatctaacatatatcccttttgtagtaattattagaatttgtagtaattattataagtattagaagcagcaattcttatttatttcagattaatacttgataacctaaacaatatatctatatatagaatatagatagatatatatataatagaacgt

SEQ ID NO: 198770 - DNA, 267 bp, Glycine max
tacggctgcgagaagacgacagaagggggaagctggaaaagttagaagtagtgaagaaaatgaaagtcattgttttcttcgttgctataataattttaggtgccgaatggcaatgcaatgggtcagagcatgagcatgagcatggccacagctaccaaattttccctttgcgaatgaaaaccggtgccggtggactatacattccggaggtatccgtgaaaagttggaggctcgtgtggaagcacacacgtcattgacgggagacca

SEQ ID NO: 198771 - DNA, 258 bp, Glycine max
tacgtgcgagaagacgacagaaggggaaacaaagcaagctaaacataagacgcagtgatggagaggatgaagagggtgcttctgctgcttctggccttcactgttcttctcatgttgccagaagcttctgctacaaagtttactgttggaaacaaccagttttgggacgcccatattaactacactgaatgggctataggcaacatttctacttggtgactgctctatttgtgtacgataggaccaacgagcgtgtgg

SEQ ID NO: 198772 - DNA, 268 bp, Glycine max
tacagaaggggagtgacagatgccttaaatgcaaccaaggcagctgtagaggagggcatagtaccaggtggtggtgttgctcttctctatgcatcaagtgagttggataagcttcaaactgctaactttgatcaaaagataggggtccagatcatccaaaatgctttgaagactcctgtgcacacaattgcttcaaatgccggagttgagggtgctgttgttgttggtaaactattggaacagaatgatcctgatcttggatatgatg

SEQ ID NO: 198773 - DNA, 289 bp, Glycine max
gcgagaagacgacagaagggggcgcacccagagaggaagcttagagagagagagagagagatagagagagaagagagagtattggcgcttcatcaagatgggtatttctagggattccatgcacaagaggcgtgccactggtggcaagaaaaaggcttggagaaagaagagaaagtatgagcttgggcgtcaggcagcaaacaccaagttatcaagcaacaagacaatcaggaggattcgtgttagaggtggcaatgttaaatggagggcattgaggctggatactggc

SEQ ID NO: 198774 - DNA, 289 bp, Glycine max
tatggaaaggaattacttgctgaatctgatgaaaactctgaggcattagctcttatcattgatgggaagtctctcacttatgcactagaagatgatgtaaaggacttatttcttacacttgctgctggctgtgcatctgtcgtatgctgtcgttcatctcccaagcagaaagcacttgttactagattggtaaaggttaaaactggcagtacaactctagcaattggtgatggagcaaatgatgttggaatgcttcaagaagcagacattgggatcggtatcagtggtg

SEQ ID NO: 198775 - DNA, 290 bp, Glycine max
atacggctgcgagaagacgacagaagggatcagcggtgccccccaggataacaacataatgctgtggaatgctgtcatatttggtcctgatgatactccatgggatggaggcacgttcaagttgactctccagtttactgaggattatccagataaaccaccaactgtgcgatttgtgtctcgcatgtttcatccaaatatttatgctgatggaagtatttgtttggatatactacaaaatcagtggagtcctatatatgatgtggctgctatactcacatctatccagt

SEQ ID NO: 198776 - DNA, 289 bp, Glycine max
tgtcgagcgaatcggctcgagacggctgcgagaagacgacaattgggggcacaagtgtatttgttgatcgagataactagaaacagtgcgatgaaaatgaaggtccttgttttcttcgttgctacaattttggtagcatggcaatgccatgcgtacgatatgttccctctccgaatgaacactggctatggtgcccgtactccggaggtgaaatgcgcaagttggaggcttgctgtggaagcacacaacatctttggctttgagaccattcctgaagagtgcgttgaag

SEQ ID NO: 198777 - DNA, 283 bp, Glycine max
ttacggctgcgagaagacgacagatgggggaatatgacaggtgggataatgtcaggcaaaggtactcttacttggataaatggggactcatacgaaggaaactggttaaatggcatgatgcatgggtttggagtttatacttggagtgatggaggatgctatgttgggacttgaccatttggtctaaaagatggcaaaggaaccttttacccgataggtagccgtcttccttgggtgcaagaaatttacctcagtgccttgagaaaaagagggttgctgccag

SEQ ID NO: 198778 - DNA, 285 bp, Glycine max
tacggctgcgagaagacgacagaagggtacggctgcgagaagacgacagctgggtacggctgcgataagacgacagaagggggaacaagagtgacgatcgaagagaatggctcccaagggtttaatctttttggctgtgttaatgcttctcagcactgtcactgagtcgttgtcttgcggaggataatggacttgttatgaacttctacaaggaatcatgccctcaggctgaagacatcatcacgtaacaagtcaagcttctctacaagcgccacaagaacactg

SEQ ID NO: 198779 - DNA, 104 bp, Glycine max
acggctgcgagaagacgacagaagggggcacaggtgagtttgttgatcgagataactagaaacagtgtgatgaaaatgaaggtccttgttttcttcgttgctac

SEQ ID NO: 198780 - DNA, 285 bp, Glycine max
tgtaacaccaccaccaataatatgaccatcaggactagaaagggaaacactcatgccacctgttctattgtgagggtcaccttcttcagcaaccaagtatgaaccagacaagcataatatttgaaatcggccctcataagtgacaccgatgctagtagaagcaggctggcgcagagtgactgaagaaattgtcccagttcctgttaagatgcacacagcccttggtctctgccgtgcaaatgacaataactttgctacaatgtcctcgtcaactccaacggtgat

SEQ ID NO: 198781 - DNA, 291 bp, Glycine max
tgcgagaagacgacagaagggggccattgttgttgctattatcatccgcagctgcttttattcgcaccgcaaacagtgagccatggccgtcggaaagaacaagcgcatctccaaggggaagaagggtggcaagaagaaggcagctgatccctttgccaagaaggattggtatgacattaaggctccttctgtttttcaagtgaaaaatgttggcaaaaccctcgtctctcgtactcagggtaccaagattgcttctgaaggactcaagcatagagtgtttgaggtctcctt

SEQ ID NO: 198782 - DNA, 280 bp, Glycine max
tacggctgcgagaagacgacagaaggggtgactggggccctttagttgatgttgttggttattgtttcttgagccttgcatcaaagtatcaaccccaggaagattttgtccaatggattcaaaaaggaccacctcctttatattttgggtttgggagcatgcctcttgaagatcctaaaggaacaacagatgttatattggaggcactaaaagatacagaacaacggggaattattgaccggggttggggcaatctagggaacttggcagaactttctga

SEQ ID NO: 198783 - DNA, 288 bp, Glycine max
tacggctgcgagaagacgacagaagggaataaagagaataatcatattaaatattaaatagaaaaaatggcccgatcatttatcaaaggccagtcttcggtagaagagaaggttcctttggaacacttatttctatttcagtataccgggtctctttctttcacttcaaaaaatttatagaatttcgattttgaaatgaaagaaaagtgtggggatagatataaatgacaaaaagatattggaacataatcttggaagagatgatggaagcaggagttcattttggcc

SEQ ID NO: 198784 - DNA, 280 bp, Glycine max
tttatgaggctgtatatttccatccacagtgatcacgaaggtggcaatgttagttcacacacagcccacctagttgctagtccgctatcagatccttatcttgcatttgcagctgctttgaatgggttagctgggcccctgcatggtttggccaatcaggaggttctacgatggatcagatcaatagttgcagagtttggaactcctaacataagtacagaacaattggctgactacattaataaaactttgagtaggggccaggttgtgcctggatatg

SEQ ID NO: 198785 - DNA, 289 bp, Glycine max
tgagaagacgacagaaggggtttcaaatcaatgaaaatattttttatgttcaaaatttggatgcgaaaaaaggaagaatttgaaatttctagttatacagaggaaagggcaaaagaaagttcgaaaaaagaggaggaaaaaaaaaggaaaatgaggaaagaaaacgtatagaaatagcagaagcctgggatagcattatatttgctcaagtaataaggggtattttattaataacccaatccattcttagaaaatatattctattaccttcattgataataactaaaaa

SEQ ID NO: 198786 - DNA, 288 bp, Glycine max
tacggctgcgaagacgacagaagggggcagttcaattccaatatattccattctctctgtgtatttccctacctctcccttcaagatgcagatcttcgtcaagaccctcaccggcaagaccatcacccttgatgtggaaagctctgacaccatcgacaacgtcaaggccaagatccaggacaaggaaggaatccccccggaccagcaacgtctcattttcgccggaaagcagcttgagctaggccgtacccttgctgactacaacattcagaaggagagtactcttca

SEQ ID NO: 198787 - DNA, 256 bp, Glycine max
  unsure (1)..(256): unsure at all n locations
ggccgctttgtgctgctgttgcaaaacttagggttgggcctttttttgaggttttcagcgcttctttctcacaatggttcttcagaatgatattgatttgctgaatcctcaagctgagttggatnagagaaagcacaaactcaagcgtcttgttcagtcaccaaactctttcttcatggatgttangtgccgggatgcttcaacataacaatgtgtttagccatctcaaactgttgtggtgtgcggaaactgccag

SEQ ID NO: 198788 - DNA, 302 bp, Glycine max
gtagtaactcggaatcggctcgattcgagcgaatcggctcgagtacggctgcgagaagacgacaattggggggaaaagttaaatgtagtgaagaaaatgaacgtcattgttttcttcgttgctataataattttaggtgcagaatggcaatgcaatgggtcagagcatgagcatgagcatggccacagctaccaaattttccctttgcgaatgaaaaccggccccggtggccactacattccggaggtatcgtgcaaaagttggaggcttggtgtggaagcacacaacgtcattgactggag

SEQ ID NO: 198789 - DNA, 290 bp, Glycine max
tactgcgagaagacgacagaagggggattgtagaattgaagaagatgacttggggggggtatcactatgcaatcgacgccgggaagctcaggatacttggatttgtatccagagcggaagatgtcctttttcaaaaatccttacattctcggactggctgctgtcgccggcatcggtggtctcctcttcggctacgacactggtgtgatatcaggggctcttttatacattaaggatgattttgaggaggttagaaacagcaatcttctccaggaaacaatagtcagcat

SEQ ID NO: 198790 - DNA, 294 bp, Glycine max
tccaaagtttgtatagtgtaggatttgttggtattcgtgataaaaacacctcatcctattcattttgccatgacgggcgaactccagataaaggttttgaaagtaatgagaaattattaattcatccatgttactggcttggtttgaatctaaatcgtaatgcacttgctccagaggaagcagaggagataaatgacgaatatgatattaatattatttcagataattcagccattagaaataaaacaataggtcaaataactactcatctagatcagataccgataggaaatg

SEQ ID NO: 198791 - DNA, 284 bp, Glycine max
tctgctcgagctcgaccgaatcggctcgagtacggctgcgagaagacgacagaaggggtaaaattagattatgaccctaatcgaaatgcatacatatgtctcatacactatggggatggtgagaaaaaatatattttacaccccagaggggctataattggagataccattgtttctggtacagaagttcctataaaaatgggaaatgccctacctttgaccgatatgcccttaggcacggcaatacataacatagaaatcacactcggaaagggtgacaatta

SEQ ID NO: 198792 - DNA, 284 bp, Glycine max
tacggctgcgagaagacgacagaagggggatccaatcaagaatacaataacatagcatagagtgagaagtgagaagagaaaaatggcaatctccatacccagtagacaacttttcatagatggagagtggaaagttccctcttctcaacaaatcggtttcggatcatcaacccgctaatgatagacatcatagggcatattccagcggctactaaggaggatgatgaccttgcggtggttgctgctaaaagagccttttcccataacataggcaaagattggtc

SEQ ID NO: 198793 - DNA, 286 bp, Glycine max
aagacgacagaaggggagcaaccataattttcattttattatttttttgacaagcagctctagaaaaatctgcaaagaataaaacaagaggaggaaatgcaacttacttgttgatataaacttcacagagagaaagttgttgtaaagccttgttgctgccatggccacccacgcggctcttgcttctacaaggatcccttcaaacacaaggttcccatccaaggcctctcactctttcccaacccaatgcgccttaaagagacttgaggtgacagaattctctggg

SEQ ID NO: 198794 - DNA, 285 bp, Glycine max
ttcgaccgaatcggctcgagcggctcgagcggctgcgagaagacgacagaaggggatacatagaagaagcacaaagataagcattagcactaggagcagcaacaactagtctcagctgaaatggcctcttcagtgatggcatctgtggccctcaaacctgcccctttcactgttgagaagtcctcagtgagaggccttccctctctctcaaggaactcttcttcattcagagttgtggccagtggcaagaagatcaagactgacaaaccttatggaattaatggt

SEQ ID NO: 198795 - DNA, 285 bp, Glycine max
atcttcacataatccagattctggaagagtgatccaccatgcccggtgaattgagtcattttgtgctcgtaatggcatacgtttatccctaatgcagggtttgtctgggattgtaaaaacagtgccatcaacaacattcccaactccatttcaatcacctctgtttacaggaagcttcccttcgagtccccgcatgtttagtcctgatcttggtcagaggattggacgaattgatctggtcccacctttaagtttagatggtcaattagggaaaacaattgcatc

SEQ ID NO: 198796 - DNA, 283 bp, Glycine max
tacggctgcgagaagacgacagatgggagggtcccaatattctgttagatgacacccttccaactgaagttaacaaggatctaatgaatgccgtgaaggattccattgttcagggatttcagtggggtgcacgataagggcctctctgtgatgagcccatcagaaatgttaaattcaagattgttgatgcaaagattgctacagagtcacttcatcgggggtctggtcagatcattccaacagctagacgagtggcctattcagctttcctcatggctactcc

SEQ ID NO: 198797 - DNA, 283 bp, Glycine max
tacggctgcgagaagacgacagaaggggatgctcaaggatgttggagtagaaattgaacctcatggtgacttgaatactgaagcggaaaggaaattgggtcagctagtctcagagacatatggcacagagttctatatccttcaccggtaccctttggctgtaaggccattctatacaatgccttgctacgacaatcctgcatacagcaactcgtttgatgtctttattcgaggtgaggagataatttcaggagctcagcgtgttcatgtgccagaatttttg

SEQ ID NO: 198798 - DNA, 280 bp, Glycine max
tctgcgcgagatacgacagaaggggattctaagtcattgctttgactgaggaactccttgcaactgcagagcagaatgaaatccctgctcctcctaacgctgctgctgcctctccaaccttgtccatacataatgacaatcaagtgctggatagcagctcctgatcatcaggagaaacttcctgttggcaccaaagttcaggcagtttggagtgaagatggggagtggtatgatgcaacagttgaggcttatacaccaaatggttattatgtaagctatg

SEQ ID NO: 198799 - DNA, 279 bp, Glycine max
ttcgagccgaatcggctcgagtacggctgcgagaagacgacagatggggagccaaagaaaagaaaatcctcaattttctaagcagccaaacactctctctctgtctctcgaaaattctcagtttgcagagaaatctgaatcatgtcgtggcaaggtatgtcgacgatcacctccgtgtgacatcgaaggtaaccacttcattcaggctgctatcatcggccaagacggcagcgtttgggctcagagtaccgacttccctcagttcaaacctgaggagat

SEQ ID NO: 198800 - DNA, 283 bp, Glycine max
tacggctgcgagaagacgacagaagggggcacaagtttgttgagatagctagaagcaataagacgaaaatgaaagtgcttgttttgtttgttgctacagttttggtagcatatgaatgccatggctcagactaccagaagttccctctccaaatgaaaactgggtttggtgggcaatacagcaatgaggtggcatgtgccagttggaggcttggcgtggaagcaaacaacgtagtcaagtggcaaactgttcctgcagcttgcggagagtacatagctgacta

SEQ ID NO: 198801 - DNA, 279 bp, Glycine max
acggctgcgagaagacgacagaaggggattgaaagaagtttctctaccaatattcatccttcacggggaagctgacactgtgactgatccatcagtgagcaaagccttgtatgagaatgcaagctgttcagacaagaagcttcagctttacaaggatgcctatcatgcacttcttgagggtgagcctgatgaaataataactcaagtttttggtgacatcatatcttggctagatgagcacagcttgacacacaatcaatcttcctcttaataccgatt

SEQ ID NO: 198802 - DNA, 279 bp, Glycine max
ctgcgcgagatacgacagaaggggattctaagtcattgctttgactgaggaactccttgcaactgcagagcagaatgaacatccctgctcctcctaacgctgctgctgcctctgcaaccttgtccatacataatgacaatcaagtgctggatagcagctctgatcatcaagagaaacttcctgttggcaccaaagttcaggcagtttggagtgaagatggggagtggtatgatgcaacagttgaggcttatacaccaaatggttattatgtaagctatg

SEQ ID NO: 198803 - DNA, 253 bp, Glycine max
  unsure (1)..(253): unsure at all n locations
ggctcactctctagggtttttatttctctcttctctctgcatcgcttcaggttcttctgaaaagatgtctcgcgtgtatgttggtaacttggattcacgagtcacgagagagactcgaagacgaattccggttttcggagtaattcggntgtttgggttgcangtagaccacctggtnatgcttnattgactttgatgaccgcagagatgcacaggatgctatccgtgaattggatggcaagaatggttggag

SEQ ID NO: 198804 - DNA, 162 bp, Glycine max
tacggctgcgagaagacgacagaagggggcacaagtgagttttgttgatcgagataactagaaacagtgtgatgaaaatgaaggtccttgtttcttcgttgctaacaatttgtgtagcatggcaatgccatgcgtacgatatgatccctctccgaatgaaca

SEQ ID NO: 198805 - DNA, 281 bp, Glycine max
tacggctgcgagaagacgacagaagggcacatgctgaggaaaagaaggggttcctcgacaagattaaggagaagctaccagggcacaagaagacagaggaggccacagctactactcctcctccaccaccacctgttgcatcattggagcatggtgaaggtgctcatcatgaaggagaggtcaaggagaagaaaggtgtattagaaaagataaaagagaagcttcctggttatcactccaagacagaggaggaaaaggaaaaggaaaaggagagtggtgct

SEQ ID NO: 198806 - DNA, 252 bp, Glycine max
tacggctgcgagaagacgacagaaggggaagaagaagggagcgagcttcgtgatcgattgcgcgaagcggtggaggataagattatggacattgcttctctggagaagttccttcaggagaggattaatgtcggcggcaaggccggtgcactcggcgattccattaccgtcaccagggacaagagcaagatcaccgtcacctccgacagcaacttctctaaacggtatctgaaatatttgaccaagaagtac

SEQ ID NO: 198807 - DNA, 260 bp, Glycine max
gaatcggctcgagtacggctgcgagaagacgacaacagggtcacttatgaagagagactcaagaaaggattcttcaaatggaggactctctgatgcaccagatgtttctgatgttcgtagcagcatgattggagaaattgagaaccgttcatcgcatttgcttgctataaaggcagatattgaaactcagggagaattcgtgaattcattgataagagaggtgaacgatgcagtttatcagaacatagaagatgtagtgg

SEQ ID NO: 198808 - DNA, 259 bp, Glycine max
tacggctgcgagaagacgacagaaggggcagaattggtgtctttatgctcagagtttcttaacggtggcacagacacaacagcaacagcggttgagtggggcatagcacagctcatagcgaaccctaacgttcagacaaagctgtacgaggaaataaagagaacggtgggagagaagaaggtggatgaaaaggacgttgagaaaatgccatacctacacgctgtggtgaaggagcttctaagaaagcaccctcaaacac

SEQ ID NO: 198809 - DNA, 284 bp, Glycine max
acggctgcgagaagacgacagaaggggggtggggtgtgcagaagagcgtcgcagttgtaaccctaatcagaagaagcgcacttcaagcgagtgacagccaccagccatgggtcgtatgcacagccgcggtaagggtatatcctcttctgctttgccctacaaaaggacacctcctagctggctcaagatctcttcgcaagatgtcgaagaaaatatctgcaagtttgcgaagaaaggtttgaccccgtctcagattggtgtcattctcagagattctcacggta

SEQ ID NO: 198810 - DNA, 262 bp, Glycine max
cggctgcgagaagacgacagaaggggatattatcttgcttttgtacaaaatttgaaatagaaataatctgtgctgtggtagtggaagcatcgagaacatcgcagcgatggcgagagtgggtagaatgaagttgggttcacaaggcatggaggtgtctttgcagggacttgggtgcatgggcatgtctgcgttctatggtcctcccaagcctgaccccgatacgattgctctcatccaccacgctgttcaaactggtgtcact

SEQ ID NO: 198811 - DNA, 269 bp, Glycine max
cggctcgagacggctgcgagaagacgacagaagggggcgcattgaacgaaaattagggtttgtagtgtagcaggaagaagcagcaatggcgccgaagataacacgtaaggttagcagaaaccctgaattgataaggggaatcggaaagtactcgaggtcgcagatgtaccacaagaggggcatttgggctatcaaggccaaaaacggtggcgttttacctcgccacgaccctaaacccaagcctgaagctcctgctgaaaaaccaccca

SEQ ID NO: 198812 - DNA, 281 bp, Glycine max
acggctgcgagaagacgacagaagggggatgcacaagtttgttgagatagctagaagcaataagatgaaaatgaaagtgcttgttttgtttgttgctacagttttggtagcatatgaatgccatggctcagactaccagaagttccctctccaaatgaaaactgggtttggtgggcaatacagcatcgaggtggcatgtgccagttggaggcttggcgtggaagcaaacaacgtagtcaagtggcaaactgttcctgcagcttgcggagagtacatagctg

SEQ ID NO: 198813 - DNA, 279 bp, Glycine max
tacggctgcgagaagacgacagaagggggcacaagtttgttgagatagctagaagcaataagatgaaaatgaaagtgcttgttttgtttgttgctacagttttggtagcatatgaatgccatggctcagactaccagaagttccctctccaaatgaaaactgggtttggtgggcaatacagcaatgaggtggcatgtgccagttggaggcttggcgtggaagcaaacaacgtagtcaagtggcaaactgttcctgcagcttgcggagagtacatagctg

SEQ ID NO: 198814 - DNA, 278 bp, Glycine max
tacggctgcgagaagacgacagaaggggggtggcgttttaacagaagcaattagaagaaaaccattcacactgttattgttggatgaaatagaaaaagctcatccagatatattcaacattcttcttcaaattttagaagatggtcaacttactgattctcagggtcggagagtttcatttaaaaatgcattggtggtgatgacttcaatgtggggtctagtgccattgctaagggtcgacacaactccataggtttcttgattccagatgataaaac

SEQ ID NO: 198815 - DNA, 243 bp, Glycine max
gctgcgagaagacgacagaagggattgaaactgtttgtagaaatgaggaaaaaaaatttgagtcctactgatcatactttatgtaccattttaaatgcttgcagcagccctgcagtgctccttcaaggaagacaaatgcactctcttgtcattaaaatgggttcagaaaggaatgtgtttgttcccagtgctttgattgacatgtattcagagggtggcatatggccgaggcacatgtgtgtt

SEQ ID NO: 198816 - DNA, 288 bp, Glycine max
tacggctgcgagaagacgacagaagggggcattgctttacccgatacgttgaatatcatcgatgcgtactgccaagggagaaggtgcaccagaatgtgacaagtttgccaaatattatcgttctctttgccctggtgaatggattgacagatggaacgagcaaagggagaatggaacattcccaggcccgctgtaggtggtgtgcataactgaaatggctgcacaattcgtttttcagtattatatttcaaattgctagagataaactcccatacatttgggggatgt

SEQ ID NO: 198817 - DNA, 283 bp, Glycine max
cgagaagacgacagaagggggaacctttgcattctattcattcaagattcagcaagtgcgttttggaagcagagaccgaaatacttcgagatggcccgtacaaagcaaactgctcgtaagtcaactggaggaaaagcccccaggaagcagcttgcaaccaaggctgcacgtaagtctgcaccaacaactggtggtgtgaagaagcctcatcgttatcgccctggaactgttgctcttcgtgagattaggacatactagaagagcactgagctcctaatcagga

SEQ ID NO: 198818 - DNA, 278 bp, Glycine max
ttacggctgcgagaagacgacagaagggggatatgtggctcctgaatatgcaaatactggtcttctaaatgaaaaaagtgatgtttatagctttggtgttgtgctattggaagcaattactggaagagatccagttgactatggacgtccagcacaggaagttaatatggttgattggctgaagacgatggttggaaccaggagatcagaagaagtggtggacccaaacattgaggtgaagccatctaccagagctttgaaacgggtgctcttaactg

SEQ ID NO: 198819 - DNA, 242 bp, Glycine max
acggctgcgagaagacgacagaaggggacgacacaacacaacacaagctttattctttttcttcgcttcttctgtacagcacccaagattgaagatgatagaccttgcgcgcgtgcagaaggagcttgtggaatgcagcaaggacgcggagggatcgggcatcaaagtcagccccaaaaacgacaaccttgttctcttgatcggcacaattccgggccccgtcggaactccatatgaagggg

SEQ ID NO: 198820 - DNA, 280 bp, Glycine max
tggctgcgagaagacgacagaaggggattatatttgagttcaaacaaatcaaagccatggccacctccaacttctctattgttctctccgtctccctagccttctttttggtgctacttaccaaggcacactcgaccgataccgtttctttcaccttcaacaagttcaacccagtccaaccaaacattatgctccaaaaagatgctagtatttcatcctctggggtgttacaactcaccaaagttggcagcaacggcgtgcccacctcgggatctctcgg

SEQ ID NO: 198821 - DNA, 273 bp, Glycine max
  unsure (1)..(273): unsure at all n locations
tacggctgcgagaagacgacagaaggggatcgcatttcatagcactcaccctcattaccaacacgaaagcatagccaaaaccttttttcgaagtctctgattttcctaatggctccggcaaaggcagagaagaagccggcggagaagaagccagcgatagagaaggcaccggcggagaagaagccgaagcgnnagaagaagatctcgaaggaaggagggagcgagaagaagaagaagcgcacgaagaagagcgtggagaccttacagatctac

SEQ ID NO: 198822 - DNA, 276 bp, Glycine max
  unsure (1)..(276): unsure at all n locations
tgaagacgacagaaggggcccccattactcacttttcatccttcgatcatgcacttagttgcttccaattaagatggttctgctagagaagctctgggatgatgttgtggctggccctcaacctgagcgtggccttggcaagctcagaaaactcaccaccctcaaaactattgatgaaggcganagtagcaagctgcagaagacgttgtcgatgccgtcgacaccaacaaccccgatgactccgacgactccaacgacaccgggatcggcccgtaa

SEQ ID NO: 198823 - DNA, 280 bp, Glycine max
acggctgcgagaagacgacagaaggggggcggtaaaaggaaaaaagtaaagaagaaagtgacagtggatgaacagaagaagaagaagaaaagggttttgtgtgtgtcgaagtggatagttccttccttcaattaatctccgatccgaaaccgaatggggattctgtacgcgctggttggtcgtggatcggtggtgctggcggagttcagcggcaccaccaccaacgccagcgcaatcgcgcgtcagatccttgaaaaaatcccggcaacaagacacgcag

SEQ ID NO: 198824 - DNA, 277 bp, Glycine max
acggctgcgagaagacgacagaagggggagagagaatgggaaggaagaaggggtatgttgagttcgaggagtcgccgccggacgatttcgatccggcgcatccgtacaaggacccggtggcgatgctggagatgagggagcacatcgtgagggagaagtggatccaaatcgagaaggccaagatcattagggagaagctccgatggtgctaccgcatcgaaggcgtcaaccacctccagaagtgccgccacctcgtcaaccagtatctcgagtccac

SEQ ID NO: 198825 - DNA, 192 bp, Glycine max
taagtgacaaggggacaagatcccactgggaaggactttagtggcaagactctgatcaaacaagacttcaaaacgtccatactgagacaagccaattttagaggtgcaaagttaataggtgctagcttctttgatgctgatttaacaggtgctgatctttcggatgctgatcttagaaatgcagatttttcc

SEQ ID NO: 198826 - DNA, 259 bp, Glycine max
  unsure (1)..(259): unsure at all n locations
agggtaaagagtatgtgtttgttgccaattcggataacttgggagctatagttgacttgaaaatcttgaatcatttgatccagaacaagaatgaatactgtatggaggtgactcccaaaacattggctgatgtaaagggtggcactttgatttcttacgaaggaagggttcagctcctggaaaattgcnnaagtccccgatgaacatgtcatgagttcaagtcatagagaagttcaaaattttcaacacaaatatttgt

SEQ ID NO: 198827 - DNA, 278 bp, Glycine max
ggtaattctagttaataaagacagatttatcgttaacaaacatttcttctttgaacagtttgcccaacaactctaaaaaggatatgcagacaacatggaatttcaagatggccatcccgaaagataaataaagtgaatcgttcgttaaagaagatacagactgtgcttgattctgtccagggagtggaaggagggctaaagtttgatccttataccggggggtttatagccggaggatcaatcatgcaggaaacggaagcacataaatatcttgtgtt

SEQ ID NO: 198828 - DNA, 277 bp, Glycine max
acggctgcgagaagacgacagaagggggaagaaaaagaaaacagaggcttaggcaactaagaaagaaagatgaagctgaaggtatatgcggaccgcatgtcccagccatcccgtgcggttctcatattttgcaaagtgaatggaatagattttgaggagatcaaagtcgatttatccaaacgtcagcagttatctcccgaattccgagcggttaaccctttaaggaaagtccctgctattgttgatggaaggttcaagctatttgagagtcatgcta

SEQ ID NO: 198829 - DNA, 276 bp, Glycine max
acggctgcgagaagacgacagaagggggcgtacacagcctcaacaaccctaacgcgtgcagagcagagagagacgcagccatggggcgaagacccgcgaggtgttataggcaaattaagaacaaaccataccccaagtcacggttttgccgtggtgttcctgatcccaagatcaggatttacgatgttggtatgaagaagaagggtgttgatgagtttcctttctgtgtccatctggttagttgggagaaggaaaacgtttctagtgaggccctgg

SEQ ID NO: 198830 - DNA, 277 bp, Glycine max
ggctgcgagaagacaacagaagggaagctcagtgaggtgcaagttaatttacttgaacaaaactttggaaatgaacgcaaacttgagtccgaaagaaaggataggctggcaatggagcctggtttggaccctcgacaagttgctgtgtggtttcaaaacagaagagcccgttggaagaacaaaaagttggaagaagagtactccagccttaaaaaaaatcatgaagccaccttgcttgagcaatgttgcctggagagtgaggtgttgaagctcaaag

SEQ ID NO: 198831 - DNA, 255 bp, Glycine max
gttgaaaagttggttacacaacttccagaaggtggtgttttgcttctagagaatgtgaggttctacaaggaggaagggaagaatgatcctgaatttgcaaagaagttggcttctctagctgatctctatgtgaatgatgcatttggcactgcccacagagctcatgcttctacagaaggagttgccaatacttgaagccctctgttgcaggattcctaatgcagaaggagcttgattatctagttggggctgtgt

SEQ ID NO: 198832 - DNA, 268 bp, Glycine max
  unsure (1)..(268): unsure at all n locations
ggtgggacaaagagagaaaaccgaatagaaaagaaggtagctagctagggttttggcgcgaagaagaatggggaagaagaagctggagataaagcgaatcgagaacaaaagcaatcggcagataacattctccaagaggcgcaaaggattgatgaagaaagcccgcgagttatccattctctgcgatgcgaagttgggcgctgcttcatcttctccagcaccggcaagctctacgantttgcaacggtgacatttngccgangtcntg

SEQ ID NO: 198833 - DNA, 267 bp, Glycine max
tacggctgcaagaagacgacagaaggggcacaagtgagtttgttgatcgagataactagaaacagtgtgatgaaaatgaaggtccttgttttcttcgttgctacaattttggtagcatggcaatgccatgcgtacgatatgttccctctccgaatgaacactggctatggtgcccgtactccggaggtgaaatgcgcaagttggaggctgctgtggaagcacacacatctttggctttgagaccatactgaagagtgcgttgaagca

SEQ ID NO: 198834 - DNA, 207 bp, Glycine max
acggctgcgagaagacgacagaagggggctttagattcttttcccctagattcagccacagttggaaaaaaaaaagttgttcgagatggcacgtacgaagcaaactgctcgtaagtccacaggaggaaaggcacctaggaagcagctcgcaaccaaggctgcacgtaagtctgcaccaactactggtggtgtgaagaagccacatcg

SEQ ID NO: 198835 - DNA, 278 bp, Glycine max
tacggctgcgagaagacgacagaagggggaggtccgtttgatatccaaaaactgctcggcaacagtcggacaagtgggaaatgttggagtaaaccagaaaaatttaggtagagccggatctaaatgttggctaggtaagcgtcctgtagtaagaggagtagttatgaaccccgtagaccatccgcatgggggtggtgaagggagggccccaattggtagaaaaaaacccgcaactccttggggttttcctgcacttggaagaagaagtagaaaaagga

SEQ ID NO: 198836 - DNA, 271 bp, Glycine max
  unsure (1)..(271): unsure at all n locations
tctcgagccgaatcggctcgagtacggctgcgagaacgacagaagtgggcacaagtgagttagttgatcgagataactagaaacagtgtgatgaaaatgaaggtccttgttttcttcgttgctacaattttggtagcatggcaatgccatgcgtacgatatgttccctctccgaatgaacactggctatggtgcccgtactccggaggtgaaatgcgcaagttggaggcttgctgtggaagcacacaacatctttggcttngagaccattc

SEQ ID NO: 198837 - DNA, 273 bp, Glycine max
acggctgcgagaagacgacagaagggggatccaaagacgcatcttttgcttcactcgtcatcactacgcagatcgcagcaaaccagactaaactccgacgatgcctcccgtcgctcctcgatccggtgatgccatattcgccaacgtcgaacgcgtcaatgcggagctgtttactttgacgtatggcgcaattgtgcgtcaattgctcacggatctggaagaggctgaggaggttaacaagcagcttgatcaaatgggttacaatattggaat

SEQ ID NO: 198838 - DNA, 269 bp, Glycine max
tacggctgcgagaagacgacagaagggggggaaccctaattctgcgaggtgagtgaaaatggcggtacccttgctctccaagaagatcgtgaagaagcgcgtcaagaagtttatacgccctcagagtgatcgcaagatctccgtcaagccaagctggcgcagacccaagggtattgattctcgtgtcaggagaaagttcaaaggatgcactttgatgcccaacattggttatggctcagacaagaaaacgcgccattatctaccaaatg

SEQ ID NO: 198839 - DNA, 273 bp, Glycine max
tacggctgcgagaagacgacagaagggggcatcaattcaaaatatatcatcaattataagcatgggtttgtggaacacaacgaatgcagtgtcttgccgctttcacaagtttggtgatgaccaaaagaatctggtcttccaaggtgatgccacgtcttcttccaggggcatagaactcacaaagttagacggtggaggaaaaccagtgggtggcagtgtggggagagtgttatactcttctccagtgcacctttgggaaagctctacagtggt

SEQ ID NO: 198840 - DNA, 280 bp, Glycine max
tacggctgcgagaagacgacagaagggggggaaccctaattctgcgaggtgagtgaaaatggcggtacccttgctctccaagaagatcgtgaagaagcgcgtcaagaagtttatacgccctcagagtgatcgcaagatctccgtcaagccaagctggcgcagacccaagggtattgattctcgtgtcaggagaaagttcaaaggatgcactttgatgcccaacattggttatggctcagacaagaaaacccgccattatctaccaaatggtttcaagaaa

SEQ ID NO: 198841 - DNA, 254 bp, Glycine max
acggctgcgagaagacgacagaagggggatgcgaacgtaaccaggctctggttttgcggttagggtagctctttctactcaaaacaaaacaaaacatcaatttctgtttcagttcgcggagatcaatatttgtcgctgaggtcgatcgtcgttaaaaggcaatgtttttgtgggattggttttatgggattctagcgtcgcttggcatgtggcagaaggaggccaagatcttattcttgggcctcgataacgct

SEQ ID NO: 198842 - DNA, 277 bp, Glycine max
acggctgcgagaagacgacagaaggggatcgaagcaaaaaatgaaaacccaaagtgcttctctcctctgtctttttctctctcttgctatccttttggctagtggcactgctgcaagtgcaactccaagaagcgcagtgccaagccaccatgtttcaacattcaacagaagcctttttccttccacttttctctttggaattggttcttctgcttaccaggcagaaggagcagcaagtgtagatgggagaggaccaagcatatgggacacctacact

SEQ ID NO: 198843 - DNA, 279 bp, Glycine max
tctcgagccgaatcggctcgagtacggctgcgagaagacgacagaacgggaaaaaatgaggaacgttgaagtattatctcaagctagaagaagagagacaacaaaaattgcatgaggaggaggaagctcggaaacgtgaagatgctgaaaggaaaaggaaggaagaagaggaacgcttgcggaaattggaggagatagctgaaaagcaggggcagagagagagggaacttgaagaaaaagagaaacaaaggagagaagcattgttgggtagagctgctg

SEQ ID NO: 198844 - DNA, 265 bp, Glycine max
tacggctgcgagaagacgacagaaggggatatcaataagattcgtgacattctgccgcacaggtttccatttcttctagtggatagagtgattgagcacaatcctggagtttctgcagtggccataaagaatgtgacaataaatgacaacttttttcctgggcattttccagaaagaccaatcatgcctggtgttctcatggtttaggcaatcgcacaagttggtggcttggttatgttgcagcctgaagttggaggttctcgtg

SEQ ID NO: 198845 - DNA, 240 bp, Glycine max
gctgcgagaagacgacagaagggggggggcgcttgttctagctgacagaggaatttgtcttattgatgagtttgacaagatgaatgaccaggatagggtgagcatccatgaagccatggagcagcagagtataagcatatcaaaagctggaattgttacatctcttcaggcacgctgttctgttattgctgcggcaaatcctgttggtggaagatatgattcctcaaaaacattctctca

SEQ ID NO: 198846 - DNA, 272 bp, Glycine max
cggctgcgagaagacgacagaagggggagttgagaggatcgtgagaggggcagtagccgagattccgtgagttgcaaaaatgaagacgattctttccaccgagaccatgaacatcccggacggcgtgagcatcaaagttcatgccaaggtcatcgaagttgagggcccccgcggaaaaatggtgcgagacttcaagcatttgaatctcgattttcagctcattactgacgaaaacggtaaaagaaagctgaaaatcgacgcgtggtttggtt

SEQ ID NO: 198847 - DNA, 239 bp, Glycine max
acggctgcgagaagacgacagaaggggagggtacaatacaaacacaaagtcagaaacacaaatctgtgtatagtggagtagtagggtttttgcgtttgagagagaagaagcatgagcaggagtttgggaattccggtgaagctgctccacgaggcttcggggcacgtggtgacggtggagctcaagagcggagaactctacagaggaagcatgatcgagtgcgaggacaactggaactg

SEQ ID NO: 198848 - DNA, 272 bp, Glycine max
  unsure (1)..(272): unsure at all n locations
acggctgcgagaagacgacagaaggggacaccaacaccaaaacaaacccactaagatggcttcctttgtatccttcctagtgctgcttcttgcagcccttatcctcatgcctcaagggcttgctacttactacaaaccaattaagaagccaccagtgtacaagcctccagtgtacaagccaccagtgtacaatacaccggtttataagccanaaccaccggtttacaagccgaaaccaccggtttacaagccacatataagaagcaccatac

SEQ ID NO: 198849 - DNA, 251 bp, Glycine max
tactcgagccgaatcggctcgagggctgcgagaagacgacagaaggggatcaccagaaattgtacgaagatggtagaacgttgtacgagtccgattgtgttgctctgtctcttctcattttctgcacttactctagctttttcgccatgccccctcactgggttaccgctggtgagaaatatcagtgagattcctcaggataactacggtagggctggtctctctcacatgactgttgtaggtccattgtt

SEQ ID NO: 198850 - DNA, 249 bp, Glycine max
  unsure (1)..(249): unsure at all n locations
acggctgcgagaagacgacagaagggggagagaagttattagggtttttgagtgcggcggtccaaacactcttctctgcagcttttgcctacaactcccttcaccatggctgaacaaaccgaggaagcttttctgaagcaaccanaagtgtttctcagcacaaagaagactgggaagggaaagagacctggaaaaggtggggaccgcttttggaagtccattgggcttggatttaagactcccagggaa

SEQ ID NO: 198851 - DNA, 262 bp, Glycine max
cggctgcgagaagacgacagaagggcgaaatcagagatttaaattgtggcttagttactttgagatatatggtggaaaactttttgatcttcttagtgatagaaagaaactctgcatgagagaagatggacggcagcaagtgtgtattgtaggactgcaagaatttgaagtttctgatgtacaatatgtcaaagaattcattgaaaaggggaatgcagcaagaagtacagggtcaaccggtgcaaatgaggagtcctccaga

SEQ ID NO: 198852 - DNA, 263 bp, Glycine max
acggctgcgagaagacgacagaagggaaaaacaagtacgtgcaaacgtatagtgaaggagctgcattcttatgagaaggaagttgagagagaagctgccaaaacagctgatatgaaggaaaaaggagccgatccctatgatctcaagcaacaggaaaatgtcttggctgagtctaggatgatgattcctgactgccgcaagcgccttgaggccgctttggcagacttgaaaggattattggctgagttggaggagtcggatga

SEQ ID NO: 198853 - DNA, 242 bp, Glycine max
gagaaaaggaaggatttgcccttcaatgatcatcagaaagcatggcaacaattgcgaaggggacgatatgttgaattcaatttggtatatgataggggtacaacatttggactgaaaactggagggagaatagagagtatacttgtttctctcccactgactgctcggtgggaatacgatcataaaccggaagaaggaagcgaagaatggaaactcttggacgcatgcatcaaccccaagga

SEQ ID NO: 198854 - DNA, 274 bp, Glycine max
tacggctgcgagaagacgacagaagggggattttcttgtgggtagggggtttctcctctctttctctgcagtttgatggatcgggatggccgatccaacgccggatcttgctactactccgttctcgggattcgtagggatgcctccttctctgatattcgcactgcctaccgcaaactcgctatgaggtggcacccggacaagtgggctctgaatcccgcaaccgtcggcgaagcaagcgccggtttcagcaaatccaagaagcctactcagt

SEQ ID NO: 198855 - DNA, 261 bp, Glycine max
cggctgcgagaagacgacagaagggcgaaatcagagatttaaattgtggcttagttactttgagatatatggtggaaaactttttgatcttcttagtgatagaaagaaactctgcatgagagaagatggacggcagcaagtgtgtattgtaggactgcaagaatttgaagtttctgatgtacaaattgtcaaagaattcattgaaaaggggaatgcagcaagaagtacagggtcaaccggtgcaaatgaggagtcctccag

SEQ ID NO: 198856 - DNA, 260 bp, Glycine max
tacggctgcgagaagacgacagaagggaaagagacccggaaagggtgggaaccgcttttggaaatccattgggcttggatttaagactcccagggaagccatcgaaggaacctacattgacaagaagtgccccttcactggcaatgtttccatccgtggccgtatcttggctggaacatgtcacagtgctaagatgaacaggactattattgttaggaggaattatctccattttatcaagaagtaccagaggtacgaga

SEQ ID NO: 198857 - DNA, 271 bp, Glycine max
acggcgagaagacgacagaaggggacgacaacagaagaataatcaaatttctcagatctatccgacgtcgtcgcagatccaccaaccgttatggctgccttcagcggtgatgaaacggctccgtttttcggcttcctcggagccgcagctgccctcgtcttctcctgtatgggagctgcctatggcacagcaaagagtggtgtgggcgtggcttccatgggtgtgatgagacctgagctggtgatgaagtctattgtccctgttgtcatgg

SEQ ID NO: 198858 - DNA, 268 bp, Glycine max
acggctgcgagaagacgacagaaggggacggcactcgttttcgttctcgttctggtttatagatctttgcgaaggaggtttacagcgctcaaccaaagatgcagaacgaggaaggacagatcactgagctttacattcctaggaagtgctccgccacaaacagattgattaccgctaaggaccatgcttcggttcagatcaacattgggcatgtggatgagaatggcgtctacaatggccatttctccacttttgccctctgcggatt

SEQ ID NO: 198859 - DNA, 265 bp, Glycine max; identical to SEQ ID NO: 198108

SEQ ID NO: 198860 - DNA, 276 bp, Glycine max
  unsure (1)..(276): unsure at all n locations
aagacgacagaagggggggttaaagaaaaagaagaataaaaattagggcgaacgtggtcataggtgtgaagtgaaagagagattctgcgtgcaggaagagcgaacanagtgagtgtggcaatggcggaggagcaaggtgaattcaggatttacaattccatgactcagcagaaagagatcttcaaaaccaaagtccccggcaaggtttccatgtacgtttgcggagtcactgcctacgacttcagccatctcggtcacgctcgcgctgcggtttct

SEQ ID NO: 198861 - DNA, 272 bp, Glycine max; identical to SEQ ID NO: 198084

SEQ ID NO: 198862 - DNA, 260 bp, Glycine max
accggctgcgagaagacgacagaaggggatctacgatcatacaaacctttattctaagttctgatggctctgcgatcattctcttacgatgtgttcctcagcttccgaggggaagatactcgttatggtttcactggctatctctacaatgtccttcgggaaaggggaattcacaccttcattgatgacgacgagccccaggaaggggacgaaatcacgacaacacttgaggcggctattgagaagtccaagattttcat

SEQ ID NO: 198863 - DNA, 262 bp, Glycine max
tacggctgcgagaagcgacagaaggggataccaaaaacaaaacaagccaagtgaaagagagaagaaaagtcaaagacaatgtcagggatcattcacaagattgaggagacccttcatgtggaggccacaagaaggaggaggagcacaagggtgagcagcaccatggtggagcatacaaaggggagcatcatggtgaacacagtactgaatacaaaggagagcatcatgttggtgagcacaagccggagcaccatggaggaga

SEQ ID NO: 198864 - DNA, 272 bp, Glycine max
tacggctgcgagaagacgacagaaggggatgcacaagtttgttgagatagctagaagcaataagatgaaaatgaaagtgcttgttttgtttgttgctacagttttggtagcatatgaatgccatggctcagactaccagaagttccctctccaaatgaaaactgggtttggtgggcaatacagcaatgaggtggcatgtgccagttggaggcttggcgtggaagcaaacaacgtagtcaagtggcaaactgttcctgcagcttgcggagagt

SEQ ID NO: 198865 - DNA, 262 bp, Glycine max
tacggctgcgagaagacgacagaagggggcacaagtgagtttgttgatcgagataactagaaaccgtgtgatgaaaatgaaggtccttgttttcttcgttgctacaattttggtagcatggcaatgccatgcgtacgatatgttccctctccgaatgaacactggctatggtgcccgtactccggaggtgaaatgcgcaagttggaggcttgctgtggaagcacacaacatctttggctttgagaccattcctgaagagtgc

SEQ ID NO: 198866 - DNA, 259 bp, Glycine max
tacggctgcgagaagacgacagaagggggtagctttgttgctcttataaattctattctggttgacgcttctctcaccatccccatttcgcgttggtgcaaagcatccttcgtttcaatttctctctctcagcgctttctgcaatcgaacctttcatctccaaagggatccacaggccgaaggagaaatggggctgacattcacaaagcttttcagtcggcttttcgcgaagaaggaaatgcgaattctgatggttggt

SEQ ID NO: 198867 - DNA, 255 bp, Glycine max
tacggctgcgagaagacgacagaagggggcacaagtgagtttgttgatcgagataactagaaacagtgtgatgaaaatgaaggtccttgttttcttcgttgctacaattttggtagcatggcaatgccatgcgtacgatatgttccctctccgaatgaacactggctatggtgcccgtactccggaggtgaaatgcgcaagttggaggcttgctgtggaagcacacaacatctttggctttgagaccattcctga

SEQ ID NO: 198868 - DNA, 255 bp, Glycine max
tacggctgcgagaagacgacagaagggggatgcacaagtttgttgagatagctagaagcaataagatgaaaatgaaagtgcttgttttgtttgttgctacagttttggtagcatatgaatgccatggctcagactaccagaagttccctctccaaatgaaaactgggtttggtgggcaatacagcaatgaggtggcatgtgccagttggaggcttggcgtggaagcaaacaacgtagtcaagtggcaaactgttc

SEQ ID NO: 198869 - DNA, 253 bp, Glycine max
acggctgcgagaagacgacagaagggctagaatatttcttgaagcatttagacttttttttacaaaaagggaaaaggagattggcaatctaagctttgataaagatgatcagttggctgtagaatttgttactgcagctgcaaacataagggctgcttcatttggcatccctctccaaaacctttttgaagctaaaggtattgctggtaatattgtgcatgctgttgcgactacaaatgctgtgattgctggg

SEQ ID NO: 198870 - DNA, 252 bp, Glycine max
cggctgcgagaagacgacagaagggggttgtcaagcctgccgagaaaaccctagttcgcttgcagtcacacaagaggccaatcctattcatagctcgagatgggtgaagaagtgaaggtagttgttccagaatcagtgttgaagaagcgcaagatggaggaggaatgggcgttggctaagaagcaagaactcgatgctgccaagaagaagagagccgagaaccgcaaactcatctacaacagagctaagcag

SEQ ID NO: 198871 - DNA, 258 bp, Glycine max
tacggctgcgagaagacgacagaaggggattgctctgcagttgtgagagttagaacactacacatcagttctcctattttggctgctaaaagtcctttcttctacaagcttttctcaaatggaatgagggagtcagagcagaggcatgtcaccctaagaattaatgcttctgaggaagctgctcttatggagcttctgaattttatgtatagtaataccttgagcattacttcaccacctgctttattggatgtgttg

SEQ ID NO: 198872 - DNA, 233 bp, Glycine max
tacggctgcgagaagacgacagaagggggagatgagtaactctacagagagaaagccacatgcactgttgacaccattaccacttcaaggccatatcaacccattgttgagattagcaaagctgcttcatctgagaggctttcacataacctttgtccacactgaatacaacattaaacgcttgctcaactcaaggggtcctaaagcccttgatggccttcaggactttcatt

SEQ ID NO: 198873 - DNA, 265 bp, Glycine max; identical to SEQ ID NO: 198108

SEQ ID NO: 198874 - DNA, 261 bp, Glycine max; identical to SEQ ID NO: 196788

SEQ ID NO: 198875 - DNA, 252 bp, Glycine max
acggctgcgagaagacgacagaaggggaacgcagccaagaaaagaaaatcctcacccattttcttcgtagccaaacactctgaaattctcagttatgtcgtggcaagcgtatgtggatgatcacctactgtgtgaaatcgaaggtaaccacctcactcacgccgctatcatcggccaagacggaagcgtttgggctcagagcaccaacttccctcagttcaaacctgaggaaataactgccatcaataatga

SEQ ID NO: 198876 - DNA, 251 bp, Glycine max
tacggctgcgagaagacgacagaagggggcacaagtgagtttgttgatcgagataactagaaaccgtgtgatgaaaatgaaggtccttgttttcttcgttgctacaattttggtagcatggcaatgccatgcgtacgatatgttccctctccgaatgaacactggctatggtgcccgtactccggaggtgaaatgcgcaagttggaggcttgctgtggaagcacacaacatctttggctttgagaccattc

SEQ ID NO: 198877 - DNA, 255 bp, Glycine max
cggctgcgagaacgacagaaggggacaacacagaacaaaaacaaagaaaaaaaaacccttagccaacacaaccatcatggccacctctgctattcagcaatcagcattcactggtcaaactgctctgaagcagctcaatgagttcgtccgcaagaccggtggcgccggcaaaagtcgcactaacatgcgccgcaccgtcaagagtgctcctcagagcatttggtatggccctgaccgtcccaagtacttgggtcc

SEQ ID NO: 198878 - DNA, 240 bp, Glycine max
ctgcgagaagacgacagaagggggaaggagccgtagcagcagcggaagctctagcttgggcagcgaatcacaatggcgagaggattgaagaagcatttgaagaggcttaatgccccaaagcattggatgcttgacaaactgggtggtgcatttgctcctaagccctcatctggaccacacaaatccagggaatgcctgccactcatactcattttgcgaaaccggctgaagtatgctctg

SEQ ID NO: 198879 - DNA, 265 bp, Glycine max; identical to SEQ ID NO: 198108

SEQ ID NO: 198880 - DNA, 269 bp, Glycine max
aagtgacaaggggacaagatcccactgggaaggactttagtggcaagactctgatcaaacaagacttcaaaacgtccatactgagacaagccaattttaaaggtgcaaagttaataggtgctagcttctttgatgctgatttaacaggtgctgacctttcggatgctgatcttagaaatgcagatttttccctggcaaatgtgacaaaggcaaatttaagcaatgctaacttggaaggtgcacttgcaacaggaaacacttcttttagg

SEQ ID NO: 198881 - DNA, 276 bp, Glycine max
tctcgagccgattcggctcgagtacggctgcgagaagacgacaaaagggggcacaagtttgttgagatagctagaagcaataagatgaaaatgaaagtgcttgttttgtttgttgctacagttttggtagcatatgaatgccatggctcagactaccagaagttccctctccaaatgaaaactgggtttggtgggcaatacagcaatgaggtggcatgtgccagttggaggcttggcgtggaagcaaacaacgtagtcaagtggcaaactgttcct

SEQ ID NO: 198882 - DNA, 277 bp, Glycine max
acggctgcgagaagagacagaagggaggagggagcgagaagaagaagaagcgcacgaagaagagcgtggagacctacaagatctacatcttcaaggtcctcaagcaggttcaccccgacattggtatttccagcaaggccatgggcatcatgaacagcttcatcaacgacatcttcgagaagctcgcccaggaagcgtcgcgtttggctcgctacaacaagaagcccaccatcacctcgagggagatccagaccgccgtgcgtctcgtgctccctgg

SEQ ID NO: 198883 - DNA, 276 bp, Glycine max
tacggctgcgagaagacgacagaaggggatgggaagactgccttctttcccaatcaagggagaggctgttacaaatttggatttcattcggaagaggaagatctctggtgacttcaacatgataatggatcagaaaatttacacatgcgaacaacctcagtgcccttacagtgaaattcaccatggttttgctgacagaaattctagggacaaccatcgattgagttgtccttatagaggcagtgcttcaacagattatggaggttcaaattttca

SEQ ID NO: 198884 - DNA, 267 bp, Glycine max
tacggctgcgagaagacgacagaagggggagaaagagagagagagagagagaaactgagagaaattcgcaaaccctaatttcggaaagatcggcgatggctgcctccaaggatcgcgagaacttcgtctacatcgccaagctcgccgaacaggccgagcgatacgaagagatggtggaatccatgaagaacggttgcgaatctcgacgttgaactgactgtggaggagcggaatttactttctgttgggtacaagatgtgattggtg

SEQ ID NO: 198885 - DNA, 271 bp, Glycine max
gctgcgagaagacgacagaaggggcacaagtgagtttgttgatcgagataactagaaacagtgtgatgaaaatgaaggtccttgttttcttcgttgctacaattttggtagcatggcaatgccatgcgtacgatatgttccctctccgaatgaacactggctatggtgcccgtactccggaggtgaaatgcgcaagttggaggcttgctgtggaagcacacaacatctttggctttgagaccattcctgaagagtgcgttgaagcaacaaa

SEQ ID NO: 198886 - DNA, 280 bp, Glycine max
tgccgagaagacgacagaagggttggcggagtaggtgaacgtactcgtgagggaaatgatctttatatggaaatgaaagaatctggagtaattaatgaacaaaatattgcagaatcaaaagtagctctagtatatggtcaaatgaatgaaccgcccggagctcgtatgagagttggtttaactgccctgactatggcggaatattttcgagatgtcaatgaacaagatgtacttctatttatcgacaatatctttcgcttcgtccaagcaggatctgaag

SEQ ID NO: 198887 - DNA, 270 bp, Glycine max
acggctgcgagaagacgacagaagggggaaacttgtgagcctgttacaattattgagacccctccaatggttattgttggtgttgtgggttatgtgaaaactccacgtggtctccgaacattgaacactgtctgggctcagcatttgagtgaggaattgaaacaaaggttctacaagaactggtgcaagtccaagaagaaggccttcaccaagtactctaagcagtatgaaactgaggagggatagaaaaacattgaggcgcagctggag

SEQ ID NO: 198888 - DNA, 274 bp, Glycine max
tctcgagccgaatcggctcgagtacggctgcgagaagacgacagatatggggcacaagtgagtttgttgatcgagataactagaaacagtgtgatgaaaatgaaggtccttgttttcttcgttgctacaattttggtagcatggcaatgccatgcgtacgatatgttccctctccgaatgaacactggctatggtgcccgtactccggaggtgaaatgcgcaagttggaggcttgctgtagaagcacacaacatctttggctttgagaccattc

SEQ ID NO: 198889 - DNA, 279 bp, Glycine max
cggctgcgagaagacgacagaagggaagggttagggttttacactgcggcagctacttcggctccatcttcttcgatctctcaaactctatcggcgcagaaccaatcctatatcactatggggaagacacatggaatgggagctgcccgcaagctgaagtctcaccgtaggagacaaaggtgggctgacaagtcatacaaaaagtctcatcttggaaatgaatggaagaagccttttgctggttcatcccatgcaaagggtattgttcttgaaaagata

SEQ ID NO: 198890 - DNA, 257 bp, Glycine max
acgctgcgagaagacgacagaagggtacgatgatgttcttcaacctggttgccattttgtgccatggtgtcttggctgcggtgtggctggtgtcctttctacgcgtgtcatgcagctaagtcttcgttgtgaaactaagacaaaggacaatgtgtttgttaatgtggttgcctcaatccaatatcgagcattggcagaaaagggatcagatgcttaataacaactcaccaataccagagcacagatacaccctatgt

SEQ ID NO: 198891 - DNA, 274 bp, Glycine max
acggctgcgagaagacgacagaagggggcacaagtgagtttgttgatcgagataactagaaacagtgtgatgaaaatgaaggtccttgttttcttcgatgctacaattttggtagcatggcaatgccatgcgtacgatatgttccctctccgaatgaacactggctatggtgcccgtactccggaggtgaaatgcgcaagttgggggcttgctgtggaagcacacaacatctttggctttgagaccattcctgaagagtgcgttgaagcaaaaa

SEQ ID NO: 198892 - DNA, 268 bp, Glycine max
tacggctgcgagaagacgacagaagggggtgagttcattaacatatacaaattctctgtgttgtgttgtgtacttgtgttaattgtgttgttgttgtaggaaatttaagtgaagagagaatgatgatgaagtctgctatgtgtgcattggtgcttgtggcactggttgtggttgaagtggggcccatggctgaggctgcggtgacttgcaacccaacacagttgactccttgtcttccggcaattaattcaggttctgcaccttcgag

SEQ ID NO: 198893 - DNA, 268 bp, Glycine max
acggctgcgagaagacgacagaaggggaacacgcggctgccgccggaggtgaaccgcgtgctgtacgttcggaaccttcccttcaacatcacgagcgaggagatgtacgacatcttcggcaagtacggcgccattcggcagatccgcatcggcaccaacaaggacactcgcggaacggccttcatcgtctacgaggacatctacgacgccaaaaccgccgtcgaccacctctccggcttcaacgtcgccaaccgctacctcatcgttc

SEQ ID NO: 198894 - DNA, 270 bp, Glycine max
acggctgcgagaagacgacagaaggggacgtacgcaactgaaaaggaaaaccctaagagatgaagagaactcctatcttgttccctctcttctttcttctttgtgccttcacctcatatctaccttcagccaccgctgatgatgatcatgtgtacgacactgacggcgataagcttcaatacggtgtcaattatttcgtgttgccagtgataagaggaaatggcggtggaatacaagtagcaaaagcaggaaacgaaacttgccctctga

SEQ ID NO: 198895 - DNA, 266 bp, Glycine max
tacggctgcgagaagacgacagaagggggcacaagtgagtttgttgatcgagataactagaaacagtgtgatgaaaatgaaggtccttgttttcttcgttgctacaattttggtagcatggcaatgccatgcgtacgatatgttccctctccgaatgaacactggctatggtgcccgtactccggaggtgaaatgcgcaagttggaggcttgctgtggaagcacacaacatctttggctttgagaccattcctgaagagtgcgttg

SEQ ID NO: 198896 - DNA, 268 bp, Glycine max
actcgagccgaatcggctcgagtacggctgcgagaagacgacagcatgggggtttactgaataatgaaacaaactccaaatattgagacatttttctctgttgttcagatagaatagcagaccacagtaatggggatgttgccattgattcataccaccgctacaaggaagatgtggccatgatgaaggatattggattcaatgcctacaggttctccatctcttggccaaggatactacctcgtggaaacctgcagggaggagttaa

SEQ ID NO: 198897 - DNA, 239 bp, Glycine max
cgagaagacgacagaaggggacacacaaacacaacaacatatggaggtgctaagggtgcaaaccatagcttccaaatccaaagatgctgccatcccagccatgtttgttagggcagagacagagcaaccaggcatcacaaccgttcaaggggtgaaccttgaggtgccaattattgattttagtgacccagatgaagggaaagtggtgcatgagattttggaggcaagtagggactggg

SEQ ID NO: 198898 - DNA, 275 bp, Glycine max
gctgcgagaagacgacagaagggggcagcagttgaggaggaggcactgtggcagaagtcttaggagtgtaaaacagagacgcaaaatgaagacgattctatcgtccgagaccatgaatattcccgacggcgtgagcatcaaggttcacgctaaggttatcgaggttgagggccctcgtggaaaactcgtgcgagacttccaccatctgaacttggacttccaacttattaccgacgatggcggtaaaaggaagctcaagattgattcttggtttg

SEQ ID NO: 198899 - DNA, 262 bp, Glycine max
tacggctgcgagaagacgacagaagggggttactggcagattgaaatgggagattttttcgttggaggtgtttcaacaggtgtttgtgagggtggctgtgctgctattgtggattcaggaacatctttgcttgctggtccaactcctgttgtggctgaaatcaaccatgccattggagctgaaggagttctcaagtgtagaatgtaaggaagtcgtttctcaatatggagagttgatatgggatctcttggtatcaggggtg

SEQ ID NO: 198900 - DNA, 268 bp, Glycine max
cgagaagacgacagaagggaaagagacccggaaagggtgggaaccgcttttggaaatccattgggcttggatttaagactcccagggaagccatcgaaggaacctacattgacaagaagtgccccttcactggtaatgtttccatccgtggccgtatcttggctggaacatgtcacagtgctaagatgaacaggactattattgttaggaggaattatctccattttatcaagaagtaccagaggtacgagaaaaggcactccaacat

SEQ ID NO: 198901 - DNA, 265 bp, Glycine max
tacggctgcgagaagacgacagaagggggcacaagtgagtttgttgatcgagataactagaaacagtgtgatgaaaatgaaggtccttgttttcttcgttgctacaattttggtagcatggcaatgccatgcgtacgatatgttccctctccgaatgaacactggctatggtgcccgtacttaggaggtgaaatgcgcaagttggaggcttgctgtggaagcacacaacatctttggctttgagaccattcctgaagagtgcgtt

SEQ ID NO: 198902 - DNA, 265 bp, Glycine max
tacggctgcgagaagacgacagaagggggcacaagtgagtttgttgatcgagataactagaaacagtgtgatgaaaatgaaggtccttgttttcttcgttgctacaattttggtagcatggcaatgccatgcgtacgatatgttccctctccgaatgaacactggctatggtgcccgtactccggaggtgaaatgcgcaagttggaggcttgctgtggaagcacacaacatctttggctttgagaccactcctgaagagtgcgtt

SEQ ID NO: 198903 - DNA, 262 bp, Glycine max
tgttcgcacgcataagggtgccgatgaccgcagcttcaggtgtgtttaccaagaggaagatgagcaaaaactcaagggactaaagatcagcaaagacttgattgagatttgtggtgatgctctaaaaaccaacatcaccacactaggacccttggtgctacccttttctgagcagcttctcttctttgccacccttgtgtggaggcacttatttggcagcaaaaatggtgggaattcaccctcaatgaagaagccttacatt

SEQ ID NO: 198904 - DNA, 264 bp, Glycine max
ctaatccaacacactactttttgccaaaatctcaaagtgctgcagattacaaggcagcaagtagagctctggacttcttctttggttggtattctgatccggttttctatggtgactatccggagagtatgaaatcttcagtaggttctaggctcccaaaattcacaaaagctgaatctgaaggtctaaaaaattccatagattttcttggtgtgaattactacaccacttattatgcggaacatgctgaacctgtcagtgccg

SEQ ID NO: 198905 - DNA, 252 bp, Glycine max
tacggctgcgagaagacgacagaagggggcacaagtttgttgagatagctagaagcaataagatgaaaatgaaagtgcttgttttgtttgttgctacagttttggtagcatatgaatgccatggctcagactaccagaagttccctctccaaatgaaaactgggtttggtgggcaatacagcaatgaggtggcatgtgccagttggaggcttggcgtggaagcaaacaacgtagtcaagtggaaaactgttc

SEQ ID NO: 198906 - DNA, 264 bp, Glycine max
cggctgcgagaagacgacagaagggcatacaaaaggaatcaacacttcacttggtcttgaggctaaggggaggtaccatgattaaagtgaagactttaactgggaaagaaattgaaattgacattgaaccaactgatacaatcgaccggatcaaggaacgtgtagaagaaaaagagcgaattccacctgtgcagcagaggactcatatatgccggtaagcagcttgctgatgacaaaacagctagagagtacaacattgagggt

SEQ ID NO: 198907 - DNA, 262 bp, Glycine max
acggctgcgagaagacgacagaaggggggtgttgctcatgtacacaggtacctgttgcttggctagtgggtaaaacaattggactctacttctcagcggaatggtgcgtcccatgcgccaagttcactccaaaactgatttctgtttacgagaagataaagcacgagctagccggaaagggagaggaagacttcgaagttgtgctaatatccagcgaccgcgaccaagcatcctttgactcctactacagcaccatgccttg

SEQ ID NO: 198908 - DNA, 263 bp, Glycine max
  unsure (1)..(263): unsure at all n locations
acggctgcgagaagacgacagaagngggtggcaagagagattatgaaccacaggtcccttcggcatcccaatataattcgttacaaggaggtggttttgactcccacacatttagcaatagtgatggagtatgcagcagggggagagctctttgagaggatatgcagtgctggcaggttcagtgaagtcgaggctagatatttctttcagcagctgatctccggtgtccatttctgtcataccatgcaaatatgccacagagt

SEQ ID NO: 198909 - DNA, 261 bp, Glycine max
tgcgagaagacgacagaaggggatgcacaagtttgttgagataactagaagcaataagatgaaaatgaaagtgcttgttttgtttgttgctacagttttggtagcatatgaatgccatggctcagactaccagaagttccctctccaaatgaaaactgggtttggtgggcaatacagcaatgaggtggcatgtgccagttggaggcttggcgtggaagcaaacaacgtagtcaagtggcaaactgttcctgcagcttgcgg

SEQ ID NO: 198910 - DNA, 259 bp, Glycine max
tacggctgcgagaagacgacagaaggggaatacagagtgagttgttgctccttcgccacaactctctgccaacatgggtatctccagagattctatgcacaagaggcgtgccactggtggcaagaagaaggcctggaggaaaaagagaaagtatgagcttgagtcgccagcctgctaacactaagctgtcaagcaacaagacggtcaggaggatccgtgttagaggtggaaatgtgaaatggagggcattgagattgga

SEQ ID NO: 198911 - DNA, 246 bp, Glycine max
acggctgcgagaagacgacagaaggggggcttcacaaatctggaagacccataacccattcctctctctctctctctgttcctgtcgctgtgtgtcatttcgttttttccccacttccatccatcttcgtttttcttcttcttcttctcccttcgattttcatttttcttttcttttttttttctctttacttattactattattattcatcttcgtttctttgccttaagcttccttcgattttt

SEQ ID NO: 198912 - DNA, 276 bp, Glycine max
tacggctgcgagaagacgacagaaggggacaactcagaaaggaaagctttgaggtttcttccgcattttagagtggtgagaggatggtgggtgttatttcgttggtaacagggatggctggtcctagtgggtttggatcagcttccactgcagaacaggttactgatggaattgatgccagcaacctcactgcaattatcacaggaggagcaagtggtataggcttggagacagcaagagtgttggttcttcgaaaggtccatgtgatcattgcag

SEQ ID NO: 198913 - DNA, 266 bp, Glycine max
acggctgcgagaagacgacagaagggggaagaaggttggttgattggtctcattgattccgaagagaaaagaaaagatgtttgagccacaacagctatacactcgcgcgaagaccgaggaattcgacctcgaatcaggagaaaccctctacccagggctgagcgtcggcgagaaccagctccgatggggtttcatccgcaaggtctacggcatcctctccgcgcagatcgtcctcaccaccctcgtctccgtcaccaccgttttct

SEQ ID NO: 198914 - DNA, 264 bp, Glycine max
tacggctgcgagaagacgacagaaggggatcaattcaaaatatatcatcaattataagcatgggtttgtggaacacaacgaatgcagtgtcttgccgctttcacaagtttggtgatgaccaaaagaatctggtcttccaaggtgatgccacgtcttcttccaggggcatagaactcacaaagttagacggtggaggaaaaccagtgggtggcagtgtggggagagtgttatactcttctccagtacacctttgggaaagctcta

SEQ ID NO: 198915 - DNA, 265 bp, Glycine max
gcgagaagacgacagaaggggagaattagggctttttcagttttcctcttctgaatccaccgccactgcagcgtggacggaatcggagtgcagccatatcagcagcagcagaagtccttgaagtgctgctctagtttgaggcacaatgagattggagaaatgctggttttgctcttcaaccatataccctggacatggaatccagtttgttcgtaatgatgcaaagatttttcggttttgtagatctaaatgccacaagaacttt

SEQ ID NO: 198916 - DNA, 246 bp, Glycine max
  unsure (1)..(246): unsure at all n locations
gacacaccgtttgtnctattcttaactcaacttctgctacccactctcttcttccaagtccaaccacgcttttctctacagtcatggacaaggtcaagatcggaatcaacggatttggaagaattggccgtttggttgccagantcgctctgcaaagagacgatgtggagctcgttgccgttaacgaccctttcattaccaccgattacatgacatacatgtntaantacgacagtgttcacggnc

SEQ ID NO: 198917 - DNA, 261 bp, Glycine max
tacggctgcgagaagacgacagaaggggatttgaagccagagaatgtgctgataagagaggacgggcacattatgctttcggattttgatctctgcctcaaatgcgacgtcgttccgaagctgctgagaagcataaccagttcagaaagcagtgtcaagacccgaaggagttcagcaccatcttgtgttgcagcccccatgcactcatgtttctctgcctcaagcaagagaaagaaagtggtcacaacagctatcataggg

SEQ ID NO: 198918 - DNA, 262 bp, Glycine max
tacggctgcgagaagacgacagaagggatcagcggtgccccccaggataacaacataatgctgtggaatgctgtcatatttggtcctgatgatactccatgggatggaggcacgttcaagttgactctccagtttactgaggattatccaaataaaccaccaactgtgcgatttgtgtctcgcatgtttcatccaaatatttatgctgatggaagtatttgtttggatatactacaaaatcagtggagtcctatatatgatg

SEQ ID NO: 198919 - DNA, 263 bp, Glycine max
acggctgcgagaagacgacagaaggggctaccactgttgttgtgaagaggttgaaggaggtggctgttggaaagaaggattttgagcagcttatggaggttgttgggaatcttaaacatgagaatgtggttgagctgaaggggtattactattccaaagatgagaaactcatggtctatgattactacactcaggggagtctctcggctttcttgcatggtaaaagaggagaggatagggtgcctctagattgggatactcgg

SEQ ID NO: 198920 - DNA, 257 bp, Glycine max
acggctgcgagaagacacagaaggggatctaaaagtctttggatttgggttcggatctgttccaaatttccaatatatttcagagagaggcagaaaaggaagaagtaaaggagatggtgggaccagtgaggcctcagtttgtgctctttggctcttccattgttcagctcagtttttctctccaaggttggggtgctattcttgctcacttgtatgctcgcaaggccgatataattctgcgaggatactctggttgg

SEQ ID NO: 198921 - DNA, 260 bp, Glycine max
acggctgcgagaagacgacagaaggggacagagagagagagagagtctttcggagttcgtttgcgtgtgttgtgtgatcagtcaccgatggcagcaccacctgcgagggcacgtgccgattacgattacctcatcaagcttcttcttattggcgatagcggtgtcggaaagagttgtctgcttttgcgattttctgatggttccttcacaaccagttttatcaccagccttggcattgattttaagataagaaccattga

SEQ ID NO: 198922 - DNA, 262 bp, Glycine max
acggctgcgagaaacgacagaagggggcacaagtttgttgagatagctagaagcaataagatgaaaatgaaagtgcttgttttgtttgttgctacagttttggtagcatatgaatgccatggctcagactaccagaagttccctctccaaatgaaaactgggtttggtgggcaatacagcaatgaggtggcatgtgccagttggaggcttggcgtggaagctaacaacgtagtcaagtggcaaactgttcctgcagcttgcg

SEQ ID NO: 198923 - DNA, 270 bp, Glycine max
cgtgcgagaagacgacagaagggctccgcaatctctcttcgaagatgtttcccagtggtgccaactgtgctagccagcatcttcaccagttgcagagatctcttcagtgtcagaacttgggatggagtaacattttcactctttagcaaccactcttcagcatgtgtgaagtctatgatctttggaaggaggccccttgtgtttccaatctttccacagttgtcaaggtcacgtgcaagttttttcagtatgaggagtcccaagtggtta

SEQ ID NO: 198924 - DNA, 273 bp, Glycine max
atacggctgcggagaagacgacagaaggggggagctgagctgagaaaacccccaaccccaacctcaaccttaacctctcctcactttcttttcaaccagaactatgattaagctttttaaagtaaaggaaaaacagagagaactggcagaaaatgcgagtggcggaccacccgttaagaagcaaagtgccggcgagttgcgtcttcacaaagatataagcgagctgaatctaccaaaatcacgtaccatgcaattccccaatggcaaagatga

SEQ ID NO: 198925 - DNA, 266 bp, Glycine max
tctcgagccgaatcggctcgatacggctgcgagaacgacaacagggaggtaagaacacggaagaggggaaagaacgaggcggacgacgagaagcgagagctggtgttcaaggaggacgggcaggagtacgcgcaggtgctccggatgctgggtaacgggcggtgcgaggcgatgtgcatcgacgggacgaagaggctctgccacatccgcgggaagatgcacaagaaggtgtggatcgccgccggagacatcatcctggttggact

SEQ ID NO: 198926 - DNA, 264 bp, Glycine max
  unsure (1)..(264): unsure at all n locations
cggctgcgagaagacgacagaaggggatagagtgataggtaaaagaagaaaggtagaagatcgaagagagaaagagagtgaagagagaagaagatggcgtcgagcggacgcntgccgttttggagggcagcggggatgacatacatcacatactcaaacatatgcgcgaatctggtcaggaattgcctcaaggaaccctacaaggctgaagccatctctcgtgagaaggtccattttgctctctccaaatgggtcgacgccaag

SEQ ID NO: 198927 - DNA, 264 bp, Glycine max
cgagaagacgacagaagggaaagagacccggaaagggtgggaaccgcttttggaaatccattgggcttggatttaagactcccagggaagccatcgaaggaacctacattgacaagaagtgccccttcactggtaatgtttccatccgtggccgtatcttggctggaacatgtcacagtgctaagatgaacaggactattattgttaggaggaattatctccattttatcaagaagtaccagaggtacgagaaaaggcactcca

SEQ ID NO: 198928 - DNA, 262 bp, Glycine max
tacggctgcgagaagacgacagaagggggcacaagtgagtttgttgatcgagataactagaaacagtgtgatgaaaatgaaggtccttgttttcttcgttgctacaattttggtagcatggcaatgccatgcgtacgatatgttccctctccgaatgaacactggctatggtgcccgtactccggaggtgaaatgcgcaagttggaggcttgctgtggaagcactacacatctttggctttgagaccattcctgaagagtgc

SEQ ID NO: 198929 - DNA, 262 bp, Glycine max
cgagaagacgacagaagggggaagttatagagagagaggagtttggagagaagagtgaagaaggcaaatcgcgaagactagatctgatctgagagaatggctcctcggtctagcagcaaggacgcccaagaccttttccgcgctctttggtctgcttatgctgcaacccccactaatctcaagatcattgatctctatgtcatctatgccgtattcaccgctttcatccaggttgtttacatggctttggttggatcatttc

SEQ ID NO: 198930 - DNA, 263 bp, Glycine max
acggctgcgagaagacgacagaaggggatgaggtgagagctagaaactgaggacttagctagtagttagagatgcctgagttttgcgtgacaggtggtactgggttcatcgcatcttacctggtcaaggccttactagagaagggtcacacagtgaggaccaccgtgagaaacccaggggatgtggagaaggttggttttctgactgaactaagtggagccaaagagagactgaagattttgaaagcagatctattagtggaa

SEQ ID NO: 198931 - DNA, 257 bp, Glycine max
cggctgcgagaagacgacagaaggggacccgcgaatcagacatggacctagatttgcggaaaagtggccatggcattggcagcaatgcatcactgcaatccaatcttgtgctgtattcttactgtcatagctcttgctcatggcgtattcgatttgctttatccctcaaagggatcccatatgagtacaaagcagtggatctttcaagaggagagcagtacagtccagacttcgagagcttgaatcctctgcactat

SEQ ID NO: 198932 - DNA, 271 bp, Glycine max
taaagacgacagaaggggggtgtagcgcagagaaagaactagaactagggtttcatctttgccatcagtaaacgacaatgatttacgacgttaactctcctcttttccgatccttccacagccagaagggaggctcctctggtaagaggaaatcggacgaacagaagccaaaagagcagaaacccaaagccagcgagaacaaacctataatgactgagtgataacagctgagctgcattcagttgtagaatgaaaataggtggtaggtatt

SEQ ID NO: 198933 - DNA, 264 bp, Glycine max
tacggctgcgagaagacgacagaaggggatcaattcaaaatatatcatcaattataagcatgggtttgtggaacacaacgaatgcagtgtcttgccgctttcacaagtttggtgatgaccaaaagaatctggtcttccaaggtgatgccacgtcttcttccaggggcatagaactcacaaagttagacggtggaggaaaaccagtgggtggcagtgtggggagagtgttatactcttctccagtgcacctttgggaaagctcta

SEQ ID NO: 198934 - DNA, 262 bp, Glycine max
tacggctgcgagaagacgacagaaggggacactaaacaagttaaaagaagagcatcactgaactaacaaagcaaccctatgtcgaaggtggtttgtgtcaccggagccagcggcgccatcggatcatgggtggtcctactcctcctccagcgtggttacaccgtccatgccaccgtccaatatatcaaggatgaaaatgagacgaaacatttggaggaaatggaaggagcaaagagtcatctccatttttttgaaatggatc

SEQ ID NO: 198935 - DNA, 264 bp, Glycine max
tacggctgcgagaagacgacagaagggcctctaagaaagaaagcacttggctgcaagtgggtgtacaaaataaagcataaagttgatggaagtgtagaagggttcaaagcatggttagtaattcttggcaatcatcaaaatgaggggatcgattacacatagacttttgcaccagttgtaaaaatggtaacagtacgcatagtgttagccgcaacagccacacaagcttgagaattacatcagattgatgtgcataatgcattt

SEQ ID NO: 198936 - DNA, 258 bp, Glycine max
acggctgcgagaagacgacagaagggtgggaagaagattaacgaaggatggaatctgggtctagcgaaggagaagaggtgcagcaacgcgtgccgttgagggagagagtggagtggtcagatgttactccggttcctcaaaacgacggccctaaccctgtcgttccgatccagtacactgaagagttttccgaagttatggattactttcgcgccgtttacctcaccgatgaacgctcccctcgcgccctcgctctca

SEQ ID NO: 198937 - DNA, 261 bp, Glycine max
ttcgagcgattcggctcgagtacggctgcgagaagacgacacaaggggaggaaaataaatgcaactaccacaaagacttacgctacaagaaccatatttttcttgaaaagtgatggaaccttgacgccattggccattgagttaagtaagccgcatcctcagggtgaaggatatggtcctgttagcgaagtctacgtgccttcgagcgagggagttgaagcttacatttggttactggcaaaggcttatgttgttgtgaat

SEQ ID NO: 198938 - DNA, 264 bp, Glycine max
tacggctgcgagaagacgacagaagggggaatcacagtggtgccttatcgctgtggttatcatcttcttcttcctctttcttagatctcttctttctctacgccgcacgccgaaaccatggccggaaaaggagagggtcctgctatcggaatcgatctcggaaccacctactcttgcgtcggtgtgtggcaacatgaccgcgttgaaatcatcgccaacgaccaagggaacagaaccacgccgtcttacgtcggattcactgac

SEQ ID NO: 198939 - DNA, 268 bp, Glycine max
tacggctgcgagaagacgacagaaggggaggcatcattcatacactgaacgaacgctcagctcagtcaggtgccggcgttcctctttcacgttctcatggaaaacgacgacgtcgacatgcacgctgccgacaccagcgaagaattggatgacatgaagaagcgcttgaaggagatggaagatgaagctgctgctttgcgagagatgcaggccaaggtcgagaaggaaatgggatctgcgcaagatcctgcaaatgcttctgcaagtc

SEQ ID NO: 198940 - DNA, 246 bp, Glycine max
gacacaccgtttgttctattcttaactcaacttctgctacccactctcttcttccaagtccaaccacgcttttctctacagtcatgggcaaggtcaagatcggaatcaacggatttggaagaattggccgtttggttgccagagtcgctctgcaaagagacgatgtggagctcgttgccgttaacgaccctttcattaccaccgattacatgacatacatgtttaaatacgacagtgttcacggac

SEQ ID NO: 198941 - DNA, 273 bp, Glycine max
tgagaagacgacagaagggggcagacgccgtgactagacactcatctcactcgcgccatcttagggtttctccttttgtttcgcaacatggttgccgctaagaaaactaagaagacccatgagagcatcaacaacaggctcgctcttgtcatgaagagtggcaaattcaccctcggttacaagaccgttctcaaatctcttaggaactccaaaggaaaattgattatcattgctaacaactgcccccctttgagaaagtcagagattgaatac

SEQ ID NO: 198942 - DNA, 266 bp, Glycine max
acggctgcgagaagacgacaaaaggggattgagtacaacttcacattttagaagaataccccctcttttgctgcatcagaggagttgtaaattaagagcatggctgcacaagctcttgtatcatcatcttctcttaccttctcagcggaggctgcaagacaaagtcttggaccaagatcactccaatctccatttggcttctccagaaaagcctcctttcttgttaaggcagctgctaccccccctgtcaagcaaggatcagacag

SEQ ID NO: 198943 - DNA, 261 bp, Glycine max
cggctcgagtgcgagaagacgacagaagggggcacagagcaatactgcaatagagaaagaggcagatagaaaaaagagctgagttttgagttcaaaagatgactaacttcccagtgatcaacttggagaagctcaatggtgaggagagaaacgacaccatggagaaaatagaggatgcttctgaaaactggggattctttgagctggtgaatcatggcataccccatgacttattggacactgtggagaggttgaccaaag

SEQ ID NO: 198944 - DNA, 269 bp, Glycine max
acggctgcgagaagacgacagaaggggcacaagtgagtttgttgatcgagataactagaaacagtgtgatgaaaatgaaggtccttgtttgcttcgttgctacaattttggtagcatggcaatgccatgcgtacgatatgttccctctccgaatgaacactggctatggtgcccgtactccggaggtgaaatgcgcaagttggatgcttgctgtggaagcacacaacatctttggctttgagaccattcctgaagagtgcgttgaagca

SEQ ID NO: 198945 - DNA, 269 bp, Glycine max
tcgattcgagcgaatcggttcacggctcgagacggctgcgagatgacgacagaaggggatcggacgagggtttcgtttcgggtttgacgttgttcacaatcactttctgcgcttcactcactcccttcgtgcggttttctttctttgtcgaactcgtgcgaaaatgcgtgagattcttcacatacagggagggcaatgcggaaaccagatcggagcgaagttctgggaggtggtgtgcgcggacacgggatcgattccacggggaggta

SEQ ID NO: 198946 - DNA, 261 bp, Glycine max
gctgcgagaagacgacagaagggggtcggaaaaagaagaagagaaaaaagatgagcgacggaggaaaacgacaaggtggaagagcgttgccgccgccgccaagaggccctccgcctcctcccccctctcgccctcgcctcgaacccgtcgatcgcgaaaagacatgtccgttactgctgcgagtgttcactaagattgggagtcaccattccatggaagactttgccgtcagaggcaaagagcccaaagacgaggttcaga

SEQ ID NO: 198947 - DNA, 260 bp, Glycine max
gaagacgacagaagggtacggctgcgagaagacgacagaagggtacggctgcgagaagacgacagaagggggcacaagtttgttgagatagctagaagcaataagatgaaaatgaaagtgcttgttttgtttgttgctacagttttggtagcatatgaatgccatggctcagactaccagaagttccctctccaaatgaaaactgggtttggtgggcaatacagcaatgaggtggcatgtgccagttggaggcttggcgt

SEQ ID NO: 198948 - DNA, 262 bp, Glycine max
acggctgcgagaagacgacagaagggggcacaagtgagtttgttgatcgagataactagaaacagtgtgatgaaaatgaaggtccttgttttcttcgttgctacaattttggtagcatggcaatgccatgcgtacgatatgttccctctccgaatgaacactggctatggtgcccgtactccggaggtgaaatgcgcaagttggaggcttgctgtggaagcacacaacatctttggctttgagaccattcctgaagagtgcg

SEQ ID NO: 198949 - DNA, 276 bp, Glycine max
cggctgcgagaagacgacagaaggggacactaaacaagttaaaagaagagcatcactgaactaacaaagcaaccctatgtcgaaggtggtttgtgtcaccggagccagcggcgccatcggatcatgggtggtcctactcctcctccagcgtggttacaccgtccatgccaccgtccaagatatcaaggatgaaaatgagacgaaacatttggaggaaatggagggagcaaagagttctctcgcattttttgaaatggatcttcttgacatcgactc

SEQ ID NO: 198950 - DNA, 275 bp, Glycine max
agaagacgacagaaggggacaacacagaacaaaaacaaagaaaaaaaaaacccttagccaacacaaccatcatggccacctctgctattcagcaatcagcattcactggtcaaactgctctgaagcagctcaatgagttcgtccgcaagaccgtgtggcgccggcaaaggtcgcactaacatgcgccgcaccgtcaagagtgctcctcagagcatttggtaactcaacattacccttcccactccactagttcaacttagtagttactgctttta

SEQ ID NO: 198951 - DNA, 272 bp, Glycine max
tctcgagccgaatcggctcgagtacggctgaagacgacagaaggaggtctcactcactgtatctccggcctcgcttcttctctcagattcagataccaattcggtttcttctgaaccaaacttggtttgagaaattcggccgttaattttccatggccaacaatccatcacagcttctcccatcagagttgattgaccggtgtataggttcaaaaatttgggtgataatgaagggtgacaaggagcttgttggtactcttagaggctttgat

SEQ ID NO: 198952 - DNA, 268 bp, Glycine max
acggccgcgagaagacgacagaagggggcgcacccagagaggaggaagctttgagagagagagagggaggagggagagtgttgacgctccatcaagatggttatttctagggattccatgcacaagaggcgtgccactggtggcaagaagaaggcatggagaaagaagagaaagtatgagcttgggcgtcaggccgcaaacaccaagttatcaagcaacaaaactatccggaggattcgtgttcgaggtggcaatgttaaatggaggg

SEQ ID NO: 198953 - DNA, 246 bp, Glycine max
acggctgcgagaagacgacagaaggggatgttgatgtgagtttggaaggtactatcatactgtgtaggcaggtagatcaaccaggcatgataggaaaggttgggagcgttttgggtgaagagaacgtgaatgtcagcttcatgagtgtgggaaagatcgctccacgacagcaagctgttatagcaattggagtggacgaacaactagcagagatctttgaagaggttggagacatcctgctgtgga

SEQ ID NO: 198954 - DNA, 273 bp, Glycine max
tacggctgcgagaagacgacagaaggggacactaaacaagttaaaagaagagcatcactgaactaacaaagcaaccctatgtcgaaggtggtttgtgtcaccggagccagcggcgccatcggatcatgggtggtcctactcctcccccagcgtggttacaccgtccatgccaccgtccaagatatcaaggatgaaaatgagacgaaacatttggaggaaatggaaggagcaaagagtcatctccatttttttgaaatggatcttcttgacatc

SEQ ID NO: 198955 - DNA, 273 bp, Glycine max; identical to SEQ ID NO: 197674

SEQ ID NO: 198956 - DNA, 280 bp, Glycine max
tacggctgcggacgacagaagggggagcgaagaagatattagggtttttgagtgcggtgcggcgatcctagcactctcttctgcagctttcgccgacagcttcattcaccatggctgagcaaaccgagaaggcttttttgaaacaaccaaaagtgtttctcagctcgaagaaaactgggaagggaatgagacccggaaagggtgggaaccgcttttggaaatccattgggcttggatttaagactcccagggaagccatcgaaggaacctacattgacaa

SEQ ID NO: 198957 - DNA, 242 bp, Glycine max
gacacaccgtttgttctattcttaactccaacttctgctacccactctcttcttccaagtccaaccacgcttttctctacagtcatgggcaaggtcaagatcggaatcaacggatttggaagaattggccgtttggttgccagagtcgctctgcaaagagacgatgtggagctcgttgccgttaacgaccctttcattaccaccgattacatgacatacatgtttaaatacgacagtgttca

SEQ ID NO: 198958 - DNA, 274 bp, Glycine max
acggctgcgagagagacagaaggggtgttcaaagcgaatgtgatgcatgtccataacaccaacaaaatggataagccttacaagctgaaactaaacaagtttgctgacatgaccaaccatgaattcaggagtacctatgctggctcaaaggttaatcaccatagaatgttcagagacatgccacgactgaaagggaccttcatgtatgagaaggttggtagtgttcctgcttcagtggattggaggaagaaaggtgctgtaactgatgtaaaag

SEQ ID NO: 198959 - DNA, 271 bp, Glycine max
acggctgcgagaagacgacagaaggggatgaaggttatgctatagactggagtcctcttgttcctggaaggcttgcatctggggattgcaataattgcatttatctgtgggagcctacatctgctggaacatggaacgttgataatgctccatttactggacatactgctagtgttgaagatctgcaatggagccctacagaacctgacgtttttgcttcttgttccgtggatggaaacattgcaatatgggatacccgtttggggaagtc

SEQ ID NO: 198960 - DNA, 269 bp, Glycine max
tacggctgcgagaagacgacagaaggggggtggagagcaagagctataactgtgagaagtgattggaaattgttggaacccaccctatcaacaaggagaagctgttttcgttcgtcgccactaacactaatcgtttcttcaatgccttacgagaaggaactcgccgctgcaaagaaagcagtcactctcgctgctcgtctctgccagaaagttcagaaggctcttctgcaatccgatgtgcactcaaagtcagacaaaagtcctgtcac

SEQ ID NO: 198961 - DNA, 269 bp, Glycine max
cgagaagacgacagaagggatcagtggtgccccccaggataacaacatactgctgtggaatgctgtcatatttggtcctgatgatactccatgggatggaggcacgttcaagttgacactccaatttactgaggactatccaaataaaccaccgactgtacgatttttgtctcgcatgtttcatccaaatatttatgctgatggaagtatttgtttggatatattacaaaatcagtggagtcctatttatgatgtggctgctatactca

SEQ ID NO: 198962 - DNA, 271 bp, Glycine max
tgcgagaagacgacagaaggggtgtgagtgaagaagcagagggagtagccgcattaaaaatgcagatcttcgtgaaaactctgacagggaagactataaccctcgaggtcgagagcagcgacaccatcgacaatgtcaaggccaagattcaagacaaggaaggcattcctccggatcagcagcgtttgattttcgccgggaagcagcttgaagatggaaggaccctggccgattacaacatccagaaggaatcaacccttcatctcgtcct

SEQ ID NO: 198963 - DNA, 271 bp, Glycine max
ccttctagatgtcattgtgccccatcaggagcatgtgttgccgatgattcccagtaatggatccttcaaggatgtgataactgagggtgatggtagaacgaggtactgattgcctagaccaaatgttccttgatgcttgttttgtacaatatatataagataatgctgtcctagttgcaggatttggcctgtggtgagcatcatagtctgtagtagttttggtagcaagacatttcattttccttttatttaacttactacatgcagtagc

SEQ ID NO: 198964 - DNA, 273 bp, Glycine max
acggctgcgagaagacgacagaagggagcaccagttgtctgcattgaagatgcctccaaacgctgttttgagttttcaagtggcttagctgcttggacacctctacttttattggttcctttggttcttggacttgataaagtcaatccaaggtatattccattattgcgctcaacttataaatttccccaaagccttggcatcatgggtggcaaaccaggtgcttcaacatacattattggtgctcagaatgaaaaagcattctaccttgat

SEQ ID NO: 198965 - DNA, 274 bp, Glycine max
tacggctgcgagaagacgacagaagggggaatgaggaatttagctggggtcatgggaccatggcacctagatgctggtaacatggatgaaaactttgcttcatcacttttggaagagtttaaaagcaataaaaccaagtgttttgagctttctgaaatttctggtcatgttgttgaattcagtgctgtacaatatgggagccggtttattcaacaaaagcttgaaactgcaactactgaagaaaaaaacatggtttatcaagaaatcatgcctc

SEQ ID NO: 198966 - DNA, 276 bp, Glycine max
tacggctgcgagaagacgacagaagggggcacaagtgagtttgttgatcgagataactagaaacagtgtgatgaaaatgaaggtccttgttttcttcgttgctacaattttggtagcatggcaatgccatgcgtacgatatgttccctctccgaatgaacactggctaaggtgcccgtactccggaggtgaaatgcgcaagttggaggcttgctgtggaagcacacaacatctttggctttgagaccattcctgaagagtgcgtcgaagcaacaaa

SEQ ID NO: 198967 - DNA, 276 bp, Glycine max
agaagacgacagaaggggggggtcagagtgagaaagagaaagagagaattcgtcaaccctaatttcggaaagatcggcgatgactgcctccaaggatcgcgagaacttcgtctacatcgccaaactcgccgagcaggccgagcgttacgaagagatggtggaatcaatgaagaacgttgcgaatctcgacgttgaactgacggtggaggagcggaatttgctttctgttgggtacaagaatgtgattggtgctcgcagacgtcctggaggatcctg

SEQ ID NO: 198968 - DNA, 273 bp, Glycine max
tacggctgcgagaagacgacagaagggcacattagatagggatgcttcctctcttatatatattgcagtcttccaattgattctttatccatatcagttgagtacaacaacttgttgctaatttgtactctgcttttacattggacagtgctactaatccttgctttttgctaatccaagtgactaggttttcaccaatgagtggcagcttccactagtgctttttctttcaagtttgtcaccaacatagtcaacatcacagtaactaatcaa

SEQ ID NO: 198969 - DNA, 272 bp, Glycine max
tgcgagaagacgacagaaggggataccaaaaacaaaacacaagccaagtgaaagtgagaaaaaataaaaatcaaagagcataatgtcagggatcattcacaagattggggagacccttcatgtgggagggcacaagaaggaggaggagcataagggtgagcaccatgctggagaatacaaaggggagcaccatggtgaacacagtagtgagtacaaaggagagcatcatggtgaacacaatgtcggagagtaccatggtgagtctaagccag

SEQ ID NO: 198970 - DNA, 268 bp, Glycine max
cggctcgagcggctcgagcggctcgagcggctcgagtacggctgcgcgaagacgacagaagggggagatacagaaaagaaaaaggaaaccctagctggataggtcaaacatcatcatgtcggacgaagagcaccatttcgagtccaaggcagacgccggtgcctccaaaacctaccctcagcaagccggtaccattcgcaagaacggctacattgtcatcaaaggacgcccctgcaaggttgtggaagtttcgacttccaaaactgga

SEQ ID NO: 198971 - DNA, 264 bp, Glycine max
gctgcgagaagacgacagaaggggacttattaattgtgttaagaaatttaagtgaggagctagagaatgatgatgaagtccgctatgtgtgcagtggtggttgtagcacttcttcttctggcggaggtggggcccatggctgaggctgtgacatgcaccccaacagagttgagtccgtgtcttccagcaatcacttccggtgctaaaccttccaatgcttgttgcacgaagctgaagcagcaaaaaccatgcttatgtggctac

SEQ ID NO: 198972 - DNA, 268 bp, Glycine max
gagattggcaagaaaaagagggaacaacaacagaagggagaacatgcctttaccaaaggtgcctactttattgggaagatgatatggagcaaaggctacaaggaactgctccaacttcttaaagatcatgaaaaggaattatctgctcttgaggttgatttatttggcagtggagaggactcagatgaagttcaaaaagctgcagaaaagttggaactagcagttagagtccacccagctcgtgatcatgctgatgctctatttcatg

SEQ ID NO: 198973 - DNA, 270 bp, Glycine max
tacggctgcgagaagacgacagaagggggaatgaggaatttagctggcgtcatgggaccatggcacctagatgctggtaacatggatgaaaactttgcttcatcacttttggaagagtttaaaagcaataaaaccaagtgttttgagctttctgaaatttctggtcatgttgttgaattcagtgctgatcaatatgggagccggtttattcaacaaaagcttgaaactgcaactactgaagaaaaaaacatggtttatcaagaaatcatg

SEQ ID NO: 198974 - DNA, 272 bp, Glycine max
cgctcgagacggctgcgagaagacgacagaaggggatcacaacatcatagtaagcactatagtcaaaaaaggacattcattcatctatggctacccttattgctcccagcaaccactctccccaagaagatgctgaagctctcagaaaggcttttgaaggatggggaactgatgagaacactgtcatagtaattttgggtcatagaactgtgtatcagaggcagcaaatcagaagagtttatgaggaaatttaccaggaggatcttgtgaag

SEQ ID NO: 198975 - DNA, 266 bp, Glycine max
acggctgcgagaagacgacagaaggggggtaaagctaaaaagggaccaaagtttgctgttatgaagaagattgttacttccaaagcaatcaaaagctacaaagaagaggttttgaacccagaaaagaagaatcttatgaaggaaaagttacccagaaatgttccaactcattcttcagcacttttctttcaatacaatactgcactgggacccccttatcgtgttttggtggacaccaacttcatcaatttctcaatccagaataa

SEQ ID NO: 198976 - DNA, 265 bp, Glycine max
acggctgcgagaagacgacagaagggagagggcgagttctttgagcgcagaaaaggaggaaaagagtgtgttgccccagcagaagaaagatgaccagaaaactgttgactctgcattgataaaagccatcgggagtgttccagatttgaagacatatctgggtgctaggttttctttaaaggctggcgtgaaacctcatgagctagttttctagaggaaagaatggtgtttttcttgtttgcatatcctgttatttttattgatt

SEQ ID NO: 198977 - DNA, 265 bp, Glycine max
acggctgcgagaagacgacagaaggggatcaacaagaatactcatcataatatagtggctagcatagagctagtaataatattaatattgttaagctagctctaagccatggctaatgaacgtgatctgttctcggcggagattgtgaaccgtggaattgaatcgtcaggaccaaacgctgggtcgttgacgttttcggtgagggtgagaaggcgcttaccggattttcttcaatcggtgaaccttaagtacgtgaaattgggtt

SEQ ID NO: 198978 - DNA, 267 bp, Glycine max
acggctgcgagaagacgacagaaggggataataaactttttttctctctttctctttgttcttctaccttattttctttccctagtcaaggagattcatctctgcagcaggttgttttagaaaagaaaaaatgctgaagatttgctgcattggggctggatatgtggggggtccaacaatggcagtcattgcactgaaatgcccctcaattgaagtggctgttgttgacatctctaaatccaggattgcagcatggaacagtgacca

SEQ ID NO: 198979 - DNA, 271 bp, Glycine max
tacggctgcgagaagacgacagaagggcagagcaagaagttgttcatcttagatcaccatgactatctcattccatatttgaggaaaataaatgcaactaccacaaagacttacgctacaagaaccatatttttcttgaaaagtgatggaaccttgacgccattggccattgagttaagtaagccgcatcctcagggtgaaggatatggtcctgttagcgaagtctacgtgccttcgagcgagggagttgaagcttacatttggttactgg

SEQ ID NO: 198980 - DNA, 271 bp, Glycine max
tacggctgcgagaagacgacagaagggggttctagtgtgtgattgtttgttgttgtaactcgttcttcttcttttgttgttctgtgtttgtgtttgttttttctctcacctgaaaatgtcttgctgcggtggtaactgtggttgcggaagctcctgcaagtgcggcaacggctgcggaggctgcaagatgtacccagacttgagctacactgagtcaaccaccaccgagaccttggtcatgggagtggcacctgttaaggctcaatttgag

SEQ ID NO: 198981 - DNA, 269 bp, Glycine max
tacggctgcgagaagacgacagaagggcatggagaaccagagagcaatgatatggttgagtacttcggtgagcaattgtcaggctttgccttcactgttaatgggtgggtgcaatcctatggttcccgttgtgtgaagccaccaatcatctatggtgatgtgagccgcccaaagccaatgactgtcttctggtcatctctggctcagagctttaccaagcgcccaatgaagggaatgcttaccggtcctgttaccattctcaactggtc

SEQ ID NO: 198982 - DNA, 264 bp, Glycine max
acggctgcgagaagacgacagaaggggggtgcaagagctacagattctgcaagagttatgaagttcactaaggtgctttcagagacaatggttaaattagagaaattgcgtgaataaatttggagtggtgttccagattatatgcgtcctacagtgtggagacttctcttgggatatgcaccacctaattcagatagaagggagggagttttgaaaaggaagcgccttgagtatctagactgtgtttctcagtattatgatatt

SEQ ID NO: 198983 - DNA, 262 bp, Glycine max
tacggctgcgagaagacgacagaagggggagacatcgaagaacagcactctggttgccgtgccaccatcttctccaaagttatcatattcgaagagaaaaaaggagtgactgtccaggttgggcaattagggacggaaaaggagaaacacgaaaatgtttttccacatagtactggagcgaaatatgcagcttcatccacgctactttggtcgtaaccttcgcgataatctcgtttccaagcttatgaaagacgtggaaggc

SEQ ID NO: 198984 - DNA, 261 bp, Glycine max
cggctgcgagaagacgacagaagggggcatcaattcaaaatatatcatcaattataagcatgggtttgtggaacacaacgaatgcagtgtcttgccgctttcacaagtttggtgatgaccaaaagaatctggtcttccaaggtgatgccacgtcttcttcctggggcatagaactcacaaagttagacggtggaggaaaaccagtgggtggcagtgtggggagagtgttatactcttctccagtgcacctttgggaaagct

SEQ ID NO: 198985 - DNA, 261 bp, Glycine max
tacggctgcgagaagacgacagaagggggcacaagtgagtttcttgatcgagataactagaaacagtgtgatgaaaatgaaggtccttgttttcttcgttgctacaattttggtagcatggcaatgccatgcgtacgatatgttccctctccgaatgaacactggctatggtgcccgtactccggaggtgaaatgcgcaagttggaggcttgctgtggaagcacacaacatctttggctttgagaccattcctgaagagtg

SEQ ID NO: 198986 - DNA, 263 bp, Glycine max
tacggctgcgagaagacgacagaagggcgaggaaaggttcaacaaagagactcacgttcttttctttttagctacatatggtgatggtgagccaactgataatgccgcgagattttataaatggtttacagaggggggtgagaaaggagaagggtggcttcagaatcttcactatggtgtgtttggccttggaaacaggcagtatgagcattttaacaaggtggcgaaggtagtggatgacatgctcgttgagcaagggggga

SEQ ID NO: 198987 - DNA, 264 bp, Glycine max
acggctgcgaagacgacagaagggggagaagacaacagatttccttgaatttggaaagaaatctttatctggaaaagtggaacccttgctcctatctttatatttaaagctcacaccgaacgagtttaatggctttgaagaagtgcagagactgtatgatcaagaaggtggcataaagctgcctatatcgaccactatgggtactgaaaatgtccttaagtttccaacacctcatgtaatccaagctagcacatttgcatggac

SEQ ID NO: 198988 - DNA, 277 bp, Glycine max
tccaaagtttgtatagtgtaggatttgttggtattcgtgataaaaacacctcctcctattcattttgccatgacgggcgaactccagataaaggttttgaaagtaatgagaaattattaattcatccatgttactggcttggtttgaatctaaatcgtaatgcacttgctccagaggaagcagaggagataaatgacgaatatgatattaatattatttcagataattcagccattagaaataaaacaataggtcaaataactactcatctagatca

SEQ ID NO: 198989 - DNA, 261 bp, Glycine max
tgcgagaagacgacagaaggggagcgacagatcggagcagaccctgtatggagtggcgaatggcgctgtggtctcaaattttatgcatagtcactctgctgttatgcagcgattgtgcagcatcttttgccaaggagcagcaaaaggaccgggttggtaggctcccaggtcaaggctccaacatcagcttcgcacactatgctgggtacatcaccgtcaatgagaaagctgggagaacactcttctactggttcattgagg

SEQ ID NO: 198990 - DNA, 263 bp, Glycine max
gaagacgacagaagggggcatcaattcaaaatatatcatcacattataagcatgggtttgtggaacacaacgaatgcagtgtcttgccgctttcacaagtttggtgatgaccaaaagaatctggtcttccaaggtgatgccacgtcttcttccaggggcatagaactcacaaagttagacggtggaggaaaaccagtgggtggcagtgtggggagagtgttatactcttctccagtgcacctttgggaaagctctacagtggt

SEQ ID NO: 198991 - DNA, 262 bp, Glycine max
tctcgagccgaatcggctcgaggcgagaagacgacagaaggggatgacgctgcagaaacaaagagcagttgagccagaacctccactttatgcaaataagatggaggctaaagatgcattcaaagcactcttggagtctgtaaatgttggatctgactggacttgggatcggtccatgcgtttaataattaatgataaaaggtatggtgccttaaaaacacttgttgaaaggaagcaagctttcaatgagtacttaaatcag

SEQ ID NO: 198992 - DNA, 263 bp, Glycine max
ttcttggcgggacttgtgccattcctggtgcttttggttgtcgtaaaacagtcattagtcaggctctttctaagtattccaattctgatgctgttgtatatgtcggctgtggggaacgtggaaacgaaatggcagaggttctaatggactttccccaacttacaatgacattacctgatggtcgtgaagaatctgtcatgaagcgcacaacactagtggctaacacttcaaacatgccagtggctgctcgtgaagcttcaatt

SEQ ID NO: 198993 - DNA, 266 bp, Glycine max
gcgagaagacgacagaagggggagaagaagaagaagaagaagcatggagaagtatcagatctggagcaggagaatagcgttggcagcgtttgcgtttgctctgctgttccaatcggcctcagcagacgacgtcgttgtgctctctgaagataacttcgagaaggaagttggtcaggacagaggagctctcgttgagttctatgctccttggtgtggacactgcaaaaagcttgctccagaatatgaaaagcttggtagcagcttca

SEQ ID NO: 198994 - DNA, 267 bp, Glycine max
acggctgcgagaagacgacagaagggggcacaagtgagtttgttgatcgagataactagaaacagtgtgatgaaaatgaaggtccttgttttcttcgttgctacaattttggtagcatggcaatgccatgcgtacgatatgttccctctccgaatgaacactggctatggtgcccgtactccggaggtgaaatgcgcaagttggaggcttgctgtggaagcacacaacatctttggctttgagaccattcctgaagagtgcgttgaa

SEQ ID NO: 198995 - DNA, 269 bp, Glycine max
cgacagaagggggagttgtggtgcttttgaaagatgaggccgattctgatgaaaggtcatgagaggccattgacgttcctgaaatacaacagggacggcgatctcctcttctcctgcgccaaggaccacaaccctaccgtctggtttgccgacaacggcgaacgcttgggcacttatcgcggccacaacggcgccgtttggacctgcgacgtctcaagagattcggctcgactcatcacgggaagtgccgatcagaccgccaagctatg

SEQ ID NO: 198996 - DNA, 266 bp, Glycine max
cgagaagacgacagaagggaggaaggggaagctggccatgacggtggaggtattcgaggtggcgccggaggtcgcggtggtcgagttctccaagtccgccggagacacgcttgaataccttaatttctgtgaggaccaagtcagaccttcgctcagggatattgtgtggagttggcaaggggacgctaattgccaccagtaactattcaattcaatttagattatggcagcatgtaataaatatcgggagtttggggatgttgatg

SEQ ID NO: 198997 - DNA, 280 bp, Glycine max
ttgcgagaagacgacagaagggggtggtagtgtggcagcgacacgtatcaacttcaataatcgcatcgcagaagcagtttccggtgcatctcatcgtctccgaaaatgaacgacgcagatgtctcgaagcaaatccagcagatggtgcggttcatccgccaggaagctgaggaaaaggccaacgagatctctgtctccgccgaagaggaattcaatatcgagaagctgcagttggtcgaagccgacaagaagaagatcaggcaagaatacgaacgcaaag

SEQ ID NO: 198998 - DNA, 272 bp, Glycine max
ttcgagccgaatcggctcgaggggggatgcagactggttgatagctgttgttgagcaatccggcacccttactcataccagcaatatattccacacaattcctcaggtagaacttgcaaagcgtcttgtggcttcttcttttgctgatcgtgtattctttgcaaattctggaactgaggcaaatgaagcagctatcaaatttgcaagatagtatcagaggcacacaacttctaacgggaaagttccagcaacagagttcatagcttttagta

SEQ ID NO: 198999 - DNA, 276 bp, Glycine max
gcgagaagacgacagaagggagaaagaatggcacgcatcaaagaggatccatctctgaaacatattttggaggagatagagactggcggtcctgctgctatgatgaggtactggaataatgaggaggttttgcagaagttgggacaagccatgggtcttgccaattcgggagatgcaggtgcctctgctgaaaattctggggcagatgagaccgaagatttgggaaatgaagatgaatcaattgttcatcatactgctagtgttggtgatgtggag

SEQ ID NO: 199000 - DNA, 229 bp, Glycine max
cggctgcgagaagacgacagaaggggacaacacagagcaaaaacaaagaaaaaaaaaaacccttagccaacacaaccatcatggccacctctgctattcagcaatcagcattcactggtcaaactgctctgaagcagctcaatgatttcgtccgcaagaccggtggcgccggcaaaggtcgcactaacatgcgccgcaccgtcaagagtgctcctcagagcttttggta

SEQ ID NO: 199001 - DNA, 277 bp, Glycine max
gcgagaagacgacagaagggggcatcaattcaaaatatatcatcaattataagcatgggtttgtggaacacaacgaatgcagtgtcttgccgctttcacaagtttggtgatgaccaaaagaatctggtcttccaaggtgatgccacgtcttcttccaggggcatagaactcacaaagttagacggtggaggaaaaccagtgggtggcagtgtggggagagtgttatactcttctccagtgcacctttgggaaagctctacagtggtcgcaagctttg

SEQ ID NO: 199002 - DNA, 278 bp, Glycine max
tacggctgcgagaagacgacagaagggggaagttttgtggtgtggtttagtgtcaaatggcggcgagtagaagcacttttcctctgatgaaatacttgagagtgcgcgtcgacgctcttccccgcaacactcccttaaccctcgctcccaactttttgattcgccgcttctgtgaagaggttaggggttgttttctcgacaagtctgaggtcacagatcgcgtcatttcctgcgtcaaaaacttccagaaagttgatccttcaaaggttaaccctaat

SEQ ID NO: 199003 - DNA, 272 bp, Glycine max
cggctgcgagaagacgacagaaggggactcactgttgttctcaagggattcgattctctctgcactcacttctagggttttctctgcgctataagcaatcatggcggatgaaacaccaaatgagatgaaggaggaggttccagaaattgttccttttgatcctaccaagaagaagaagaagaagaaaattacaattgtagatcctgctgatgaacctgtggagaaattggctgagacgacagaaaacctctcagtttccgagggggttgaga

SEQ ID NO: 199004 - DNA, 261 bp, Glycine max
acggctgcgagacgacagaagggggagcgaagaagatattagggtttttgagtgcggtgcggcgatcctagcactctcttctgcagctttcgccgacagcttcattcaccatggctgagcaaaccgagaaggcttttttgaaacaaccaaaaatgtttctcagctcgaagaaaactgggaagggaaagagacccggaaagggtgggaaccgcttttggaaatccatggggcttggattaaagactcccagggaagccatcg

SEQ ID NO: 199005 - DNA, 271 bp, Glycine max
cggctgcgagaagacgacagaaggggatgaggtttatacacaagttactttgcttcctcaagctgagttggaagggatgtatttagagggcaaagaacttgaggaattgggagcagaagaggagggggatgatagatcaccaactaaatcaacccctcacatgttctgcaaaacactaactgcctctgataccagcacacatgggggcttttctgttcctcgccgagctgctgaagactgttttcctcctttggattataagcagcagagg

SEQ ID NO: 199006 - DNA, 274 bp, Glycine max
gaagacgacagaaggggagagaaataatggagaagaaaagcataacaagcagagcacattgtttagtgctagcatttccaggtcaaggccatatcaatcccatgcttcaattctccaagctattggagcgtcaaggggtgagaataacacttgttactactcgtttctattccaagaatttgcaaaacgtgcctccttccattgctcttgaaaccatttctgatgggtttgatgaagttgggccccaagaggctgggagccccaaggcctatat

SEQ ID NO: 199007 - DNA, 276 bp, Glycine max
tctcgagccgattcggctcgagacggctgcgagaagacgacagaacggggcacaagtgagtatgttgatcgagataactagacaacagtgtgatgaaaatgaaggtccttgttttcttcgttgctacaattttggtagcatggcaatgccatgcgtacgatatgttccctctccgaatgaacactggctatggtgcccgtactccggaggtgaaatgcgcaagttggaggcttgctgtggaagcacacaacatctttggctttgagaccattcctg

SEQ ID NO: 199008 - DNA, 267 bp, Glycine max
tacggctgcgagaagacgacagaaggggacaccgtgcaggcccaatgaggatttgaacatttacgtttttgctctgtttaatgagaacatgaagcccggcccagcttccgaaaggaactatgggctttttaagcccgatgggacccctgcttacccccttggcttccctctggcttctgtgccagtcgtcgccggtaataacaataccggcgtcgcaagcacgccgccgcagccaacgtcaccgacttcttccaccggctatttgtc

SEQ ID NO: 199009 - DNA, 273 bp, Glycine max
tacggctgcgagaagacgacagaaggggatgcacaagtttgttgagatggctagaagcaataagatgaaaatgaaagtgcttgttttgtttgttgctacagttttggtagcatatgaatgccatggctcagactaccagaagttccctctccaaatgaaaactgggtttggtgggcaatacagcaatgaggtggcatgtgccagttggaggcttggcgtggaagcaaacaacgtagtcaagtggcaaactgttcctgcagcttgcggagagta

SEQ ID NO: 199010 - DNA, 269 bp, Glycine max
tacggctgcgagaagacgacagaagggagaacatgcctttaccaaaggtgcctactttattgggaagatgatatggagcaaaggctacaaggaactgctccaacttcttaaagatcatgaaaaggaattatctgctcttgaggttgatttatttggcagtggagaggactcagatgaacgtcaaaaagctgcagaaaagttggaactagcagttagagtccacccagctcgtgatcatgctgatgctctatttcatgattacaaattgt

SEQ ID NO: 199011 - DNA, 272 bp, Glycine max
acggctgcgagaaaacgacagaagggggagcaaaagccactataaatgtgtgggaacccaagattcagcagactaatgagttcagcttgtctcagctttggatattaggaggctcatttggtcaagatcttaacagcatcgaagctggctggcaggttagcccggatttatacggtgataacaacacacggctattcacctactggacgagtgatgcatatcaagctactggctgctacaatcttctttgctcgggatttattcaggtcaac

SEQ ID NO: 199012 - DNA, 269 bp, Glycine max
tcgagaagacgacagaaggggagagatcaaagaacagaagatggcacaaacgctggcaatgcccgtggcaccttcgctcgctatcatctccaattctcgcctctccaagacactctccgttcccgttctcaacaacccaaagtttcaagggttaagcatcaagtgcgttcgtgttggaggtgtggagattccgaacaacaagcgaatcgagtactcgctgcagtacattcatggagttggcaggaccagagcaaaacagattctgtgtg

SEQ ID NO: 199013 - DNA, 267 bp, Glycine max
tacggctgcgagaagacgacagaaggggctagatagagagtttcgttcgtcaccatgacttttaagcgcaggaatggaggtcgcaacaaacacggccgtggccacgtcaagttcattcgatgctccaactgcggcaaatgctgtcctaagggcaaggctatcaagaggtttctggtgaggaacattgttgaacaggctgcagtcagagatgttcaggaggcttgtgtctatgaacaatacacgcttccgaagctttatgtgaagatg

SEQ ID NO: 199014 - DNA, 268 bp, Glycine max
tacggctgcgagaagacgacagaagggagcaaagataagggaagcattgcaaagtgggaaaatttactgcggaaggctattaaattacaagaaggatgggacacctttctggaaccttctcactatttcacccatcaaggatgaagatggcaaagtgctcaaatttattggaatgcaagtggaggttagcaagcatacggaggggtccaaggagaagatgccacgtcccaatggattgcccgaatccttgattcgatatgatgcacgg

SEQ ID NO: 199015 - DNA, 279 bp, Glycine max
gcttgcctttagcggagcaggtatacccaaaatgcccccggccgacttcgtcactgagctcataatgagccgaaaactgcttagcaaagccaaagctcttgtcgaggccgagctcacactcgctggcctccggtatggaggcttcgttcggcttgacggaaccgtggcggcgggcgagcagcgcgcgaatgtgcttggccggagagggcggagggaaggggcgcttgaagatccgcaagggtgttgagctgacgctgctagggtttgagtttgaggaag

SEQ ID NO: 199016 - DNA, 272 bp, Glycine max
acggctgcgagaagacgacagaaggggcttcttctttttcttcattagtctagtgacgaaccatcttaattttctcgcaattcctctgttctcgaagggcgtaggagaagagggtttcgttccgtttcaatggggagcgaagagcagaacggcgaattctacctgcgttactacgtcggtcacaagggcaagtttggtcacgagttcctggagttcgagttccgcccagacggcaagctccgctacgccaacaactccaactacaaaaacga

SEQ ID NO: 199017 - DNA, 263 bp, Glycine max
cagagacgacagaagggaaagagacccggaaagggtgggaaccgcttttggaaatccattgggcttggatttaagactcccagggaagccatcgaaggaacctacattgacaagaagtgccccttcactggcaatgtttccatccgtggccgtatcttggctggaacatgtcacagtgctaagatgaacaggactattattgttaggaggaattatctccattttatcaggatgtaccaggggtacgagaaagggcactccaa

SEQ ID NO: 199018 - DNA, 265 bp, Glycine max
ctgcgagaagacgacagagggacttgactgattcaactgtcttaaggaacatgggtataggtataggtcattctcttcttgcctacaaaagcacacttcaaggaatagggaagcttcaggttaatgaagctcgcttgagtgaagacttgaaccagtgctgggaggtgcttgctgaaccaattcagactgttatgcgaagatatggtgttcctgagccttatgagaagttaaaagaactacccagaggaagagcagttaccaaaga

SEQ ID NO: 199019 - DNA, 265 bp, Glycine max
tacggctgcgagaagacgacagaagggggcacaagtttgttgagatagctagaagcaataagatgaaaatgaaagtgcttgttttgtttgttgctacagttttggtagcatatgaatgccatggctcagactaccagaagttccctctccaaatgaaaactgggtttggtgggcaatacaacaatgaggtggcatgtgccagttggaggcttggcgtggaagcaaacaacgtagtcaagtggcaaactgttcctgcagcttgcgg

SEQ ID NO: 199020 - DNA, 265 bp, Glycine max
acggctgcaagacgacagaagggggttgtgatcgtgtgcatggccgtggtgggtgcaccgatgatggcgcaagccatgacatgcaatgatgtgacggtgaacatggcacagtgcctatcctacctgatgcagggaggaacaccttcaacactttgctgcagcggagtcaagaacattcttggctctgctgtcaccaccgttgacaaacaaactgtgtgcaactgtctcaaggcggatgctgctaggtacaacatcaatgaccagt

SEQ ID NO: 199021 - DNA, 275 bp, Glycine max
tacggctgcgagaagacgacagaagggggagcgaagagtgaagagaatggctcccaagggtttaacctttctggctgtgttaatatgcgtttcagcactgtcactgagtccttctgttgcgggggaagggcaaaataatggccttgttatgaacttctacaaggaatcatgccctcaggctgaagacatcatcacagaacaagtcaagcttctctacaagcgccactagaacactgctttctcctggctcaggaacatcttccatgactgtgctg

SEQ ID NO: 199022 - DNA, 281 bp, Glycine max
tgcgagaagacgacagaaggggagcgacagatcggagcagaccctgtatggagtggcgaatggcgctgtggtctcaaattttatgcatagtcactctgctgttatgcagcgattgtgcagcatcttttgccaaggagcagcaaaaggaccgggttggtaggctcccaggtcaaggcttcaacatcagcttcgcacactatgctgggtacatcaccgtcaatgagaaagctgggagaacactcttctactggttcattgaggcatttgaagatcctcattct

SEQ ID NO: 199023 - DNA, 280 bp, Glycine max
aactacttcttcgggagttgaagactgtcaaagctgatctggcttttgcaaaggatcgatgtgctcagctagaggaagaaaataaaatcctccgtgagaatcgggaaaggggagatagccatgatgatgatgatttgatacgacttcaacttgaatctcttctagctgaaaaagctcgcctggcacacgagaactcggtttatgcccgtgagagtcgctttctaagggaggttgtcgagtatcaccaacttacaatgcaggatgttgtctaccttgacga

SEQ ID NO: 199024 - DNA, 266 bp, Glycine max
acggctgcgagaaaacgacagaagggggagcaaaagccactataaatgtgtgggaacccaagattcagcagactaatgagttcagcttgtctcagctttggatattaggaggctcatttggtcaagatcttaacagcatcgaagctggctggcaggttagcccggatttatacggtgataacaacacacggctattcacctaactggacgagtgatgcatatcaagctactggctgctacaatcttctttgctcgggatttattca

SEQ ID NO: 199025 - DNA, 266 bp, Glycine max
acggctgcgagaagacgacagcagggggcacaagtgagtttgttgatcgagataactagaaacagtgtgatgaaaatgaaggtccttgttttcttcgttgctacaattttggtagcatggcaatgccatgcgtacgatatgttccctctccgaatgaacactggctatggtgcccgtactccggaggtgaaatgcgcaagttggaggcttgctgtggaagcacacaacatctttggctttgagaccattcctgaagagtgcgttga

SEQ ID NO: 199026 - DNA, 245 bp, Glycine max
gagaacaaattggagcctgagaggaagacccagttggctaagaagctgggattgcagcccaggcaggtggctgtgtggtttcagaaccgcagggctcgatggaagaccaagcaacttgaaagggattatgatgttctcaagccttcatacgataccctactttcatcctatgattcaattatgaaggagaatgagaaactcaaatctgaggtggtatccttaaatgaaaagcttcaagttcaagc

SEQ ID NO: 199027 - DNA, 217 bp, Glycine max
acggctgcaagaagacgacagaaggggatcttcctaattgtgatatacttccaaggatttcgtgtggttttgcctgtgagatcaaagaatgcccgtggacagcaggggtcttatccaatcaagttattttatacctccaacatgcccattattcttcagtctgccgcttgtttccaatctctacttcatatctcagcttctacacagaaagtacagt

SEQ ID NO: 199028 - DNA, 221 bp, Glycine max
cggctcgagcggctcgaggctgcgagaagacgacagaagggagggacaaaatgtaatatgtgtttatgtagctattggtcaaaaagcatcttctgtggctcaagtggtgaataccttacaagaaagaggagcaatggaatacactattgtagtagctgaaacagcggattctccagctacattactatacctcgccccttatacaggagcagctctggctg

SEQ ID NO: 199029 - DNA, 216 bp, Glycine max
acggcgagaagacgacagaagggaacatgatgaaagactcggagagaaagagctatggatcgctgttgaatactttttatgagcttgagggagattatgaggagcattacaagaaggccattggaactaaaagttggagtgttggaccagtttccttttgggtgaaccaagatgctttggataaggccttcagagggcatgccaaagaagagcaag

SEQ ID NO: 199030 - DNA, 217 bp, Glycine max
acgacagaaggggaacaacgacttaaggcattctctcttctattctattctaaactcgaaacaatcttagagaaagaagcagaagaaaatgccgatttctagaattgccattggaaattcttcggagttgaaccaatctgatgcacttaaggctgcactagctgagttcatctcaatgctcatctttgtttttgccggggaaggctctggaatggct

SEQ ID NO: 199031 - DNA, 218 bp, Glycine max
tacggctgcgaagacgacagaagggggggagagaatagagaagagagatggatccagacgcgttggcaaaggcattcgtggagcactactacagcaccttcgacaccaacaggaacggcttagcgaatctctaccaggagggttccatgctcactttcgaagggcagaagatccaaggcgcttccaacatcgttgccaagctcacctccctccctttt

SEQ ID NO: 199032 - DNA, 215 bp, Glycine max
tacggctgcgagaagacgacagaagggaatgatatttatttttatagttacatttttttgaagggcagaaattgtagtgaaagcgataattctagtactagtataataactagtacgaatgatacaaatgatagtgattccactataggagaaagttctaataatctcgatgaaagtcaaaaatataagcatttgcggcttgaatgcgaaaattg

SEQ ID NO: 199033 - DNA, 214 bp, Glycine max
tccagctttagagaagccctggatcttgtgaaggaggccattagcagagctggttatgatgagaaaataaagatagctcttgatgttgctgctacagatttttgcataggtaaaagatatgatctggactttcaatctcctcaaaagtctggacagaattttaagtcagcagaggatatgatagacatgtacaaggaactatgctctgaatacc

SEQ ID NO: 199034 - DNA, 215 bp, Glycine max
cggctgcgagaagacgacagaagggggcacaagtgagtttgttgatcgagataactagaaacagtgtgatgaaaatgaaggtccttgttttcttcgttgctacaattttggtagcatggcaatgccatgcgtacgatatgttccctctccgaatgaacactggctatggtgcccgtactccggaggtgaaatgcgcaagttggaggcttgctgtg

SEQ ID NO: 199035 - DNA, 199 bp, Glycine max
tcgagctgacgacagaagggggcacaagtgagtttgttgatcgtgataactagacacagtgtgctggaaatgaaggtccttggtgtcttcgttgctacaattttggtagcatggcaatgccatgcgtacgatatgttccctctccgaatgaacactggctatggtgcccgtactccggaggtgaaatccgcaatttgga

SEQ ID NO: 199036 - DNA, 214 bp, Glycine max
tacggctgcgagaagacgacagaaggggacagacaaacaaacaatttaccagctatacttgttccttttgaaggttagaagtgctacaatacaaacaatggcagctactcaggaagatgtgaagcttttgggtattgtgggaagcccatttgtgtgcagggtccagattgcccttaagttgaagggagttgaatacaaatttttggaagaaaat

SEQ ID NO: 199037 - DNA, 174 bp, Glycine max
cggctgcgagaaacgacagaagggggcacaagtgagtttgttgatcgagataactagtaacagtgtgatgaaaatgaaggtccttgttttcttcgtagctacaattttggtagcatggcaatgccatgcgtacgatatgtcccctctccgaatgaacactggccagggtgcccg

SEQ ID NO: 199038 - DNA, 213 bp, Glycine max
ttgcgagaagacgacagaagggggtggtagtgtggcagcgacacgtatcaacttcaataatcgcatcgcagaagcagtttccggtgcatctcatcgtctccgaaaatgaacgacgcagatgtctcgaagcaaatccagcagatggtgcggttcatccgccaggaagctgaggaaaaggccaacgagatctctgtctccgccgaagaggaattc

SEQ ID NO: 199039 - DNA, 189 bp, Glycine max
  unsure (1)..(189): unsure at all n locations
ggaaaatggcatgtaataatggcctgcagggattacctcaaagctgcaaganctgcaaaatccgctggcatggctaaggaaaactacaccatcatgcacttggaccttgcctcgctcgacagtgtccgccaatttgttgataacttcagaagatcggaaatgccgttagatgtgctggtttgcatgctg

SEQ ID NO: 199040 - DNA, 212 bp, Glycine max
ggctgcgagaagacgacagaagggggggggcagtatgggatccgcagtaggtgagaaaatcacccgtttggtagaatatgctactaatcaacttttacctcttattctggtatgtgcgtccggaggagcgcgtatgcaagaaggaagtttgagcttgatccaaatggctaaaatctcttctggtttatatgattatcaaaaaaataaaaagt

SEQ ID NO: 199041 - DNA, 214 bp, Glycine max
gcgagaagacgacagaaggggagaatcacgggttttgagcaaaatgggtgttgtggagggtctcttggcattgggtttgattctgaatgtgtgtgttgtgtgcaatggaggcacaagcagccccttcgtcaggaaagttgagaaggctgtagatatgccacttgacagcaatgtctttgcaatccctcctggttataatgccccccagcaggtt

SEQ ID NO: 199042 - DNA, 212 bp, Glycine max
ggatatatgattttattatttctccattttatgcccattggtgttccaagagtaccctttcgaagccctggggaagaagatgcatcttgggttgatatatacaatcgactttatcgagaaagattactttttttaggtcaagaggttgatagtgaaatatcgaatcaactaattagtcttaagctccatcttagtatagaagaagagaataa

SEQ ID NO: 199043 - DNA, 210 bp, Glycine max
tctcgagcgaatcggctcagacggctgcgagaagacgaacttagggggcagtcaaagaaaagaaaatcctcaattttctgagcagccaaacactctgtctctgtctctcgaaaattctcagtttgcagagaaaatctgaatcatgtcgtggcaagcgtatgtcgacgatcaccttctgtgtgacatcgaaggtaaccagctcactcacgc

SEQ ID NO: 199044 - DNA, 211 bp, Glycine max
gctgcgagaagacgacagaagggggtgagttcattaacatatacaaattctctgtgttgtgttgtgtacttgtgttaattgtgttgttgttgtaggaaatttaagtgaagagagaatgatgatgaagtctgctatgtgtgcattggtgcttgtggcactggttgtggttgaagtggggcccatggctgaggctgcggtgacttgtaaccca

SEQ ID NO: 199045 - DNA, 213 bp, Glycine max
tctcgagcgaatcggctcagtgaaattgttcctcatcaattgttcgagaaacttccatttcttagatatgtgatatacacaccgacatatcaccacctacaccactctgataaggacactaatttctgcctcttcatgcctctctttgattcacttggcaataccctcaacaaaaattcatggcaatcacacaaactactaagttcaggttca

SEQ ID NO: 199046 - DNA, 206 bp, Glycine max
ggctgcgagaagacgacagaaggggatccaacccaattgaattctccagagagaagaagaaacttaatcgatcatcacttcacttcactaatacatcatggcagacgagacccagaacaagtatgagagctctgaggttgaggtccaggatcgtggtgtttttgactttctcggtaagaaaaaggatgaagaagacaagcctcatc

SEQ ID NO: 199047 - DNA, 214 bp, Glycine max
tacggctgcgagaagacgacagaagggggaaatcgagaagaagaagaagaagaagatggagaagtatcagatctggagcaggagaatagcgttggcagcgtttgcgtttgctctgctgttccaatcggcctcagcagacgacgtcgttgtgctctctgaagataacttcgagaagggagttggtccggacagaggggctctcgttgagttctat

SEQ ID NO: 199048 - DNA, 165 bp, Glycine max
acgctgcgagaagacgacagaaggggggatcagcagggagaattaggtttttagggtttacaccgagcagccacacctcccgcagcagccatggttctcaaaactgaactatgccgattcagtggtgccaagatctacccaggaaagggcatcagatttgttcgt

SEQ ID NO: 199049 - DNA, 191 bp, Glycine max
acggctgcgagaagacgacagaagggctggacagagagctgtatacactactggtcaaggggcttctgccgtaggtcttacagctgccgttcataaggatccagtcacaagggactggactcttgacgggggagcacttgttctagctgacaaaggaatttgtcttattgatgagtttgacaagatgaatg

SEQ ID NO: 199050 - DNA, 210 bp, Glycine max
acggctgcgagaagacgacagaagggctggccgtttaaactattaagaagataatttctgattatgctatcttatgcaatgacaattaacaagtcacagggacaatcactatccatggttggattttatttgccgaaacccatattcactcatggccaattatatgttggcgtgtcatgggtcaactcagcaaaaggattaaaaattttg

SEQ ID NO: 199051 - DNA, 258 bp, Glycine max
acggctgcgagaagacgacagaagggggcacaagtgagtttgttgatcgagataactagaaacagtgtgatgaaaatgaaggtccttgttttcttcgttgctacaattttggtagcatggcaatgccatgcgtacgatatgttccctctccgaatgaacactggctatggtgcccgtactccggaggtgaaatgcgcaagttggaggcttgctgtggaagcacacaaacatctttggctttgaaaccattcctgaaga

SEQ ID NO: 199052 - DNA, 212 bp, Glycine max
cggctgcgagaagacggcagacaggattgctattgattcgatgatccccataagacgtaggcaacgagaattaagtattggtgatatactaacgggaataacagcagtagccacagagactattctcaatcaacagggacctaatgcaatatgcgtttacgtagctgatgctgctgaagcatcttcggtggctcaattggtgaatacctttc

SEQ ID NO: 199053 - DNA, 255 bp, Glycine max
tacggagaagacgacagaagggatcagtggtgccccccaggataacaacataatgctgtggaatgctgtcatatttggtcctgatgatactccatgggatggaggcacgttcaagttgacactccaatttactgaggactatccaaataaaccaccgactgtacgatttgtgtctcgcatgtttcatccaaatatttatgctgatggaagtatttgtttggatatattacaaaatcagtggagtcctatttatga

SEQ ID NO: 199054 - DNA, 255 bp, Glycine max
cgagaagacgacaaaagggggcacaacatcttcagcctttccctcgttgaaatgaaaatgggttcttctttgtggactttgtgtctaattttggcttcactagcctcttctgcattctgtgcctttccacggaggccagtggatgttccattcggcagaaactacgttcccacttgggcttttgatcacatcaaatacttcaatgtcggttctgagattcaacttcatcttgacaagtacactggtactggcttc

SEQ ID NO: 199055 - DNA, 259 bp, Glycine max
tacggctgcgagaagacgacagaagggggaagcacaagagaagagaagagaagagaggagacggggggagaaggggttgcagagagagagacagagagatgtcatcatctctcagacctggacgggcaaatagagcagttgaagaggtgtgagcctcttaaggagtctgaagtgaaggcgctttgcctcaaagccatggaaatccttgtcgaagagagcaacgttcaaagggtcgacgcccctgtaaccatatgtggtg

SEQ ID NO: 199056 - DNA, 258 bp, Glycine max
tctccaccgctcgagccgctcgagccgctcgagtacggctgcgagaagacgacagaaggggcagttctacaatagcttgaaggacttaattgagttattaccaatgctaccacatccctagccgcaatggctattaagtcagcacaggaaaccgtgcgagggcaagctttctcaagcttggccttggcttcatcaataacatagaaagcatggacagagagattaggaggaccatctttctcagccaggtttttgggt

SEQ ID NO: 199057 - DNA, 256 bp, Glycine max
gcgagaagacgacagaagggtgggtcactcattattttggtcattggaagcctggtaaattttggcaatgtcgcccatgcagcaatctcaacagtatgcgttgtggtttatttctgctgctttgacgatgggttatgaaccaattccaaacatcctttgctcagagattttccccactagggtgcgtggcctctgcattgctatctgtgcattagtgttctggattggagacatcatcatcacatactcgctgcct

SEQ ID NO: 199058 - DNA, 255 bp, Glycine max
gcgagaagacgacagaagggatcagtggtgccccccaggataacaacataatgctgtggaatgctgtcatatttggtcctgatgatactccatgggatggaggcacgttcaagttgacactccaatttactgaggactatccaaataaaccaccgactgtacgatttgtgtctcgcatgtttcatccaaatatttatgctgatggaagtatttgtttggatatattacaaaatcagtggagtcctatttatgatg

SEQ ID NO: 199059 - DNA, 256 bp, Glycine max
ctgcgagaagacgacacaagggggcgagattctcccatctgcttctcactgatctccattcccattccatggcttccactgaatcatcccctttcaagtgaattcagattcagagggatgacactacatttgacgcatatgtggttggaaaatatgatgctcctggaattgttgtgattcaggagtggtggggtgtggaccacgagattatgatccatgccgtgaagacttctcagcttggcagcgggtctaaaga

SEQ ID NO: 199060 - DNA, 245 bp, Glycine max
acggctgcgagaagacgacagaagggggctggactctttcagattctctatctcatggtcaagaatattcccaaagggcaagggagcagttaacccccttggggttaaattctacaacaatgtcatcgatgagatcctagcaaatggtttaaaaccttttgtcactctttttcattgggactttccacaagctcttgaagatgagtatggaggattccgtagtcctaaagtagtggcggattttc

SEQ ID NO: 199061 - DNA, 248 bp, Glycine max
tacggctgcgagaagacgacagaaggggctgaagcgaaagttgaagttgatctaccaaggtgaggccttcaatgggaaactcaccaagacagcaaggtctcatggcaagaagttccaagtttctatcaaacaagaaacttcaagattactgggaaacctgggctgggcctatatgcaaaagatgaactacacgatggctgaggtggtgtatcggaaagcccaaataattgatccggattgtaacaagg

SEQ ID NO: 199062 - DNA, 233 bp, Glycine max
ggctgcgagaagacgacagaaggggggttcagattcttggaatggctgctgtgactattgtttttgcagcccagggtttcatgtcaccagcttccaggggtatgctgcttaccgggatgataattttatatcttttcctgggaattgctgctggatatgtcagtgtacgtctatggaggaccattaagggaacctcggaagggtggagatccatttcctggttatctgcatgc

SEQ ID NO: 199063 - DNA, 250 bp, Glycine max
tgcgagaagacgacagaaggggctgtacccaggtggcagttacttcgacccgctgggcctggcctcagatccagagaagaaagccacccttcaattggcggagatcaagcacgcccgtctcgccatggtgggcttcttgggctttgcagtccaagctgccgccactggcaagggcccgctcaactactgggccacccacttgagtgacccactccacacaaccatcattgacaccttctcatcctcctct

SEQ ID NO: 199064 - DNA, 252 bp, Glycine max
tacggctgcgagaagacgacagaaggggaagagacccggaaagggtgggaaccgcttttggaaatccattgggcttggatttaagactcccagggaagccatcgaaggaacctacattgacaagaagtgccccttcactggcaatgtttccatccgtggccgtatcttggctggaacatgtcacagtgctaagatgaacaggactattattgttaggaggaattatctccattttatcaagaagtaccagag

SEQ ID NO: 199065 - DNA, 259 bp, Glycine max
actcgagccgctcgagccgctcgagccgctcgagtacggctgctacgaagcgtcagcattatcgtttcaatccatcgccaaggggagttccacagatcaatgttgggtttgatgttgatgttgatggcattgtggaaatcactgctagagaaaggagaaaggggctgaagaagaagatcacgatcagcaacaagcatgggaggttgagtcctgaagagatgaggagaatggtgagagatgcagtgaggtataaggcaga

SEQ ID NO: 199066 - DNA, 234 bp, Glycine max
tacggctgcgagaagacgacagaaggggagagaaagagagagaaagatgtcgaagcgtggtcgtggtggttcggcggggaacaagttccgcatgtcgctgggtcttccagtggcggcgacggtgaactgcgccgacaacacgggggcgaagaacctctacatcatttcggtgaaagggatcaaaggccgtttgaagcgtcttccctcggcctgcgttggcgacatggtgatggc

SEQ ID NO: 199067 - DNA, 219 bp, Glycine max
ggacaccaacaccaaaacaaacccactaagatggcttcctttgtatccttcctagtgctgcttcttgcagcccttatcctcatgcctcaagggcttgctacttactacagaccaattaagaagccaccagtgtacaagcctccagtgtacaagccaccagtgtacaaaccaccggtttataagctaaaaccaccggtttacaagccgaaaccaccggtt

SEQ ID NO: 199068 - DNA, 252 bp, Glycine max
gcgagaagacgacagaaaggggtcaggaaagatagtaatttgtgatagaggccttagtcctagagtgcagaagggtaatgtggtgagaagtgcaggaggggtgggaatgattctcacaaacacggaagccaatggagaagaactggttgtagattctcacctccttccagcagttgcaataggagagaaagaaggaaaagagctcaaaagttatgtcctatcaagtaaaagttctactgcaactctagcttt

SEQ ID NO: 199069 - DNA, 253 bp, Glycine max
tctcgagccgattcggctcgagacggctgcgagaagacgacagaaagggggtgggcgaggtatccagatagtgatacaatagagagtgcgttgttgctccttcgccacaactccctgccaacatgggtatctccagagattctatgcacaagaggcgtgccactggtggcaagaagaaggcatggaggaagaagagatagtatgagcttggtcgccagcctgctaacactaagctgtcaagcaacaagacagt

SEQ ID NO: 199070 - DNA, 251 bp, Glycine max
acggctgcgagaagacgacagaagaggacacagaacaaaaacaaagaaaaaaaaaaacccttagccaacacaaccatcatgggcacctctgctattcagcaatcagcattcactggtcaaactgctctgaagcagctcaatgagttcgtccgcaagaccggtggcgccggcaaaggtcgcactaacatgcgccgcaccgtcaagagtgctcctcagagcatttggtatggccctgaccgtcccaagtactt

SEQ ID NO: 199071 - DNA, 249 bp, Glycine max
tctcgagccgattcggctcgagacggctgcgagaagacgacagatagtgggtgggcgatgtagccagagagtgatacaatacagagtgcgttgttgctccttcgccacaactccctgccaacatgggtatctccagagattctatgcacaagaggcgtgccactggtggcaagaagaaggcatggaggaagaagagcaagtatgagcttggtcgccagcctgctaacactaagctgtcaagcaacaaga

SEQ ID NO: 199072 - DNA, 245 bp, Glycine max
acggctgcgagaagacgacagatagggggagcgaagaagatattagggtttttgagtgcggtgcggcgatcctagcactctcttctgcagctttcgccgacagcctcattcaccatggctgagcaaaccgagaaggcttttttgaaacaaccaaaagtgtttctcagctcgaagaaaactgggaagggatagagacccggaaagggtgggaaccgcttttggacatccattgggcttggatttaa

SEQ ID NO: 199073 - DNA, 242 bp, Glycine max
acggctgcgagaagacgacagaagaggacacagaacaaaaacaaagaacaaaaaaaacccttagccaacacaaccatcatggccacctctgctattcagcaatcagcattcactggtcaaactgctctgaagcagctcaatgagttcgtccgcaaaaccggtggcgccggcaaaggtcgcactaacatgcgccgcaccgtcaagagtgctcctcagagcatttggtatggccctgaccgtcc

SEQ ID NO: 199074 - DNA, 250 bp, Glycine max
ggacaccaacaccaaaacaaacccactaagatggcttcctttgtatccttcctagtgctgcttcttgcagcccttatcctcatgcctcaagggcttgctacttactacaaaccaattaagaagccaccagtgtacaagcctccagtgtacaagccaccagtgtacaaaccaccggtttataagccaaaaccaccggtttacaagccgaaaccaccggtttacaagccaccatataagaagcccccataca

SEQ ID NO: 199075 - DNA, 250 bp, Glycine max
tcggctgcgagaagacgacagaaggggaaggtcaaaaacttgcatgcatgctctgtctgttcttattcgttgcaaatgggacaatgaaattcattccagggcgtcatcattgtataatctcatagatattcacagcaaagctgttgcatctatagtgaacaaggcagaaccattagaagcaaccttaattcatgtaccgatttggaaggattccctcgtttgtgttggtgttaaaaggcagaatcagtgt

SEQ ID NO: 199076 - DNA, 248 bp, Glycine max
ctgcgagaagacgacagaaggggatatccaaaggaacaaaaatattattaagatgatcaacattattggagcacttgttctactctttgcatttctcttcctcagttgtgtgtatgcacaagacacaacaacccttgtgcctgcaatcataacttttggtgattctgctgtggatgtagggaacaatgactatcttcccacccttctcaaggctgattaccctccttatgggagggactttgttaacc

SEQ ID NO: 199077 - DNA, 248 bp, Glycine max
cggctcgagaagacgacagaagggggagagaggcagaagaagaagaagaaaagatggtgggaccggtgagacctcagtttgtgctctttggttcttccattgttcggctcagttactctctccaaggttggggcgctattcttgctcatttgtatgctcgcaaggcggatataattctgcgaggatactctggttggaattcaaggcgtgctgtgcaagttctggatgaaattttccctaagaacgcc

SEQ ID NO: 199078 - DNA, 245 bp, Glycine max
tacggctgcgagaagacgacagaagggggctgcagcaagggctcaacgcacgcaggaggaggagattgatcgagagaagagaagatgactacacgcttcaagaagaacaggaagaagagaggccacgtgagtgccggccatggccgcatcgggaagcaccggaagcaccctggaggacgcggtaatgccggaggcatggaccaccaccggatcctctttgacaagtatcagcctgggttcttcgg

SEQ ID NO: 199079 - DNA, 254 bp, Glycine max
tccatatcttccactgtggtcctatgattccaccctccagactcatacagcgccgaaattctccatacaccagcagttccgttgaagccaaagaaggcataagtgcaagaccccacttcttgattccacagctgatatggttaatccagtgacatctcttgcatcctggtcatcaaacattcattggcattcacaaacttccaacgtgcctgtacaagagcaagttcagggttgttgacaaggaatgggacagt

SEQ ID NO: 199080 - DNA, 254 bp, Glycine max
tacggctgcgagaagacgacagaaggggggatatattgatagaatattgggacaaccatcattgatccgagagtcatccagagggaaatacccatggtctggcatgttttctcgcaccatgagctccctatcacgacatactaatccaggatctgctttgaaaaatggaaatggttttggtgatgtgattttgcatccttctcttcaaaaaagaattcagcagttgtcttctgctacggcaaatacaaaagcac

SEQ ID NO: 199081 - DNA, 264 bp, Glycine max
tacggctgcgagaagacgacagaaggggataccaaaaacaaaacacaagccaagtgaaagtgagataaaataaaaatcaaagagcataatgtcagggatcattcacaagattggggagacccttcatgtgggagggcacaagaaggaggaggagctcaagggtgagcaccatgctggagaatacaaaggggagcaccatggtgaacacagtagtgagtacaaaggagagcatcatggtgaacacaaagctggagagtaccatgg

SEQ ID NO: 199082 - DNA, 255 bp, Glycine max
tacggctgcgagaagacgacagaagggatcctcctccatacactgaacaaaatatgaagccaaattattggattccgcatttctcactgaggacattggttgttggcctgttaaaagttcagcaagaactacaaaactttagacatcacttttttctgtaaattgactagtgtaaaaatattcgggatccaagtatccaaaggtaccttgaacgactgtggtgagatgagtatcttcaatggaaatcattcgggt

SEQ ID NO: 199083 - DNA, 252 bp, Glycine max
ctcgagcgaatcggatcacggctcgagggctgcgagaagacgacagaagggggacgttcaaagcgaagaaagattcgaaacgatgaaagaaagcgttgtgaagaatggcggaagagggacaagtgatcggtgtccacagcgtagaggagtggaaggaacatctcaagaagggagaagagtccaagaaattgattgtggtggattttactgcttcttggtgcggtccatgccgtttcattgccccaattcttg

SEQ ID NO: 199084 - DNA, 226 bp, Glycine max
ctgcgagaagacgacagaagggggttctcatggacctcgaaccgggcaccatggacagcgtccggtccgggccgtacgggcagatcttcaggcccgacaactttgtgttcgggcagtccggggcaggaaacaactgggccaaggggcactacactcgagggtgctgaactcattgattctgctctcgatgtggtgcgcaaggacgctgagaactgcgcttgcttgc

SEQ ID NO: 199085 - DNA, 262 bp, Glycine max
tacggctgcgagaagacgacagaagggggcagttcaaagcgaagaaagattcgaaacgaagaaagaaagcgttgtgaagaatggcggaagagggacaagtgatcggtgtccacagcgtagaggagtggaaggaacatctcaagaagggagaagagtccaagaaattgattgtggtggattttactgcttcttggtgcggtccatgccgtttcattgccccaattcttgcagagtttgctaaaaagttgccgaatgtcacctt

SEQ ID NO: 199086 - DNA, 254 bp, Glycine max
agaagacgacagaagggggaaaccgagaagaagaagatggagatgtatcagatctggagcaggagaatagcgttgggagcgttcgcgtttgttctgcttttcctatcggcctcagcagacgacgtcgttgtgctctctgaagataacttcgagaaggaagttggtcaggacagaggagctctcgttgagttctatgctccttggtgtggacactgcaaaaagcttgctccagaatatgaaaagcttggtagcag

SEQ ID NO: 199087 - DNA, 250 bp, Glycine max
acggctgcgagaagacgacagaagagggagcaaaaccctaatccctatttttcttcctcagtagtgtcatttacgcttctcttctctgcagcaactatgcctaaccctaaggtcttcttcgacgtgaccatcggcggtcaatctgctggccgcatcgtgatggagctctacgccgacgtcactccccgcaccgccgagaacttccgcgcgctttgcaccggcgagaagggcgtagggcggagcggcaagc

SEQ ID NO: 199088 - DNA, 247 bp, Glycine max
gctgcgagaagacgacagaaggggatatccaaaggaacaaaaatattattaagatgatcaacattattggagcacttgttctactctttgcatttctcttcctcagttgtgtgtatgcacaagacacaacaacccttgtgcctgcaatcataacttttggtgattctgctgtggatgtagggaacaatgactatcttcccacccttttcaaggctgattaccctccttatgggaggggctttgttaa

SEQ ID NO: 199089 - DNA, 261 bp, Glycine max
tctcgagccgaatcggctcgagtacggctgcgagaagacgacaactgggtgcgacattcaccattgactgcgccaagacagtggaggacaagatcatggacatcgcgtctctcgagaagttccttcaagagaggattaaggttggtggcaaggccggtgctctcgccgacaccatcaccgtcacacgtgagaagaccaaaatcatagttacttcagacagcaacttctccaaacggtatctcaagtacttgactaagaagt

SEQ ID NO: 199090 - DNA, 253 bp, Glycine max
  unsure (1)..(253): unsure at all n locations
aagacgacagaagggggctgcagcaagggctcaacgcacgcaggaggaggagattgatcgagagaagagaagatgactacacgcttcaagaagaacaggaagaagagaggccacgtgagtgccggccatggccgcatcgggaagcaccggaagcaccctggaggacgcggtaatgccggaggantgcaccaccaccggatcctctttgacaagtaccaccctgggttcttcggcaaggtcggaatgcgctatt

SEQ ID NO: 199091 - DNA, 242 bp, Glycine max
tacggctgcgagaagacgacagaagggggcacaagtttgttgagatagctagaagcaataagatgaaaatgaaagtgcttgttttgtttgttgctacagttttggtagcatatgaatgccatggctcagactaccagaagttccctctccaaatgaaaactgggtttggtgggcaatacagcacagaggtggcatgtgccagttggaggcttggcgtggaagcaaacaacgtagtcaagtgg

SEQ ID NO: 199092 - DNA, 251 bp, Glycine max
tagggttccaaaaggcggccagaagggggcacaagtttgttgagatagctagaagcaataagatgaaaatgaaagtgcttgttttgtttgttgctacagttttggtagcatatgaatgccatggctcagactaccagaagttccctctccaaatgaaaactgggtttggtgggcaatacagcaatgaggtggcatgtgccagttggaggcttaccccctccctcggaaacgtattcccccctaaaactgtt

SEQ ID NO: 199093 - DNA, 259 bp, Glycine max
tacggctgcgagaagacgacagaagggatattagaaatctcaagtgggttgcttgagtactggacgtaggcacgggaagtggccgaactagtataaaattgtgtttgcattctctcttcccttatcttatttattttgttgcaatcaattgtgtcttgcatgtttaaagaacattgttaaattgattgttgttgcttcttctgcattgtaagcctatccctcttaagattattgaggccacaaggtctaactctttggg

SEQ ID NO: 199094 - DNA, 262 bp, Glycine max
gcgagaagacgacagaagggtaacaataatattactagtttcattgatagttgcattgagagtttcaatttaggtgatattgacaaatacaatgatatttatttttatagttacatttttttgaagggcagaaattgtagtgaaagcgataattctagtactagtataataactagtacgaatgatacaaatgatagtgattccactataggagaaagttctaataatctcgatgaaagtcaaaaatataagcatttgtggc

SEQ ID NO: 199095 - DNA, 254 bp, Glycine max
agcaagagagagaaagtgctgctgacaaggcaaaattcaacaatgtttttgtgaagaatctatcagaatcaaccaccgatgatgagttgaagaacacttttggtgaatttggaactattactagtgctgtagtaatgagggatggggatgggaaatcaaagtgttttggatttgtgaattttgagaatgctgatgatgctgctagggctgttgaggctctcaatggcaaaaattttgatgacaaagaatggtat

SEQ ID NO: 199096 - DNA, 248 bp, Glycine max
acggctgcgagaagacgacagaaggggaggaacagcagagaaacaaagttagaagtaaagaagatcatggcttctctagcaaccttggctgctgttcaaccagctacgatcaatggccttgctggaagttccctctctggaactaagctctctttcaagccctctcgccacagtgtcaaatccaagaacttcaggagtggtgccgtggtagcaaagtatggtgacaagagtgtgtactttgatttgga

SEQ ID NO: 199097 - DNA, 243 bp, Glycine max
acggcgacgacagaagggggggcctccaaattcatcacgctttcgttaaattcactgccatctgcatttacctccaatacgacgccctttccttcctctccgttaagtggaaaaccaagtctgctcaccagttaacggaatccgaccaattcttctcagatatcgttacaggtccattcgagaaatttatgcaggtgacaatgatcaaacccttgacggggcagcaatactcagagaaagtgg

SEQ ID NO: 199098 - DNA, 255 bp, Glycine max
tacggatgcgaaagacgacagaagggactccagataacagctggagatccgtggtgctccagcggaggggttgcacctgatggtacctttgtgagtgctggtggttttgacaccggagcaagaagcgttagatatatgggtcctaattgccaaaattgtgaatggagggaatacgacaacatattcggagcagacagatggtatgcaactcaacaaatccttccaaacggagaattcattttggtaggagggcgt

SEQ ID NO: 199099 - DNA, 232 bp, Glycine max
  unsure (1)..(232): unsure at all n locations
gatccatagctaagatagatctcgagatgggtcgtggcaagattgagataaagttgattgagaaccccaccaacaggcaagtcacctactccaagcgaaggaatggtatcttcaagaaagctcatgaactcagtgttctctgtgatgccaaggtttcactcatcatgttctctaaaaacaacaagatgcatgaatacattagccctggcctcacgacaaaaaagatcntgat

SEQ ID NO: 199100 - DNA, 256 bp, Glycine max
gctgcgagaagacgacagaaggggcaacccatgaatgacacctttgtattggatctcaattctagtaatcctgagtggcaacacgtccaggtaagctctcctcctcctggtcgttggggccacacgctttcttgtgttaatggttctcatttggttgtatttggaggctgtggaaggcagggcttgctcaatgatgtgtttgtcctggacctggatgcaaagcctccaacttggcgtgaaatttctggattggcac

SEQ ID NO: 199101 - DNA, 254 bp, Glycine max
tacggctgcgagaagacgacagaagggggcacaccaacaccaaaacaaacccactaagatggcttcctttgtatccttcctagtgctgcttcttgcagcccttatcctcatgcctcaagggcttgctacttactacaaaccaattaggaagccaccagtgtacaagcctccagtgtacaagccaccagtgtacaaaccaccggtttataagccaaaatcaccggtttacaagccgaaaccaccggtttacaagc

SEQ ID NO: 199102 - DNA, 254 bp, Glycine max
acggctgcgagaagacgacagaaggggctacgtggatgctggaggctacttcttcagttgaagaaaacagactgggagtggactttgcagaaatctaccgaaaatcaagtttatatcaatataacctagagttggttgaaaggttgagcaagcctagtggtaattcaaaagaattgcattttccaacaaagtattgccggtcatcttttgagcagttcctaacttgtctaagtcggaaaaatctttgttactgg

SEQ ID NO: 199103 - DNA, 252 bp, Glycine max
acggcgcgaagacgacagaaggggatagtattatcattcattctcatctttctctcttctctctccacccaaaccctaactcccgaccctgttcccctctcgtatccgtcatgaaaggaggaaagtccaagaccgaatctaagagagccgatcccaaacttgctgtgaataagaagggagccgccaccaaggctaggaaacccgccggcaaggggaaggcagcgaaagaccctaacaagccaaagaggcctc

SEQ ID NO: 199104 - DNA, 256 bp, Glycine max
tacggctgcgagaagacgacagaagggggtccaaaggcttttgtaagtgagtatgctgtgactggaaaagatgctgggacaggaagcctcttggcagccctagctgaagctgggttccttattggactggaaaagaacagtgatgttatccaaatggccagctatgctccactttttgttaatgccaatgataggaggtggaacccagatgcaattgtattcaactcctttcagctctatggaactcctagctatt

SEQ ID NO: 199105 - DNA, 250 bp, Glycine max
tacggctgcgagaagacgacagaaggggtgtcgagctgagaataccagttgctccagtagccggcactaaacaacatggcggacaaggcagtcaccatccgaaccaggaagtttatgacaaacaggcttctctccagaaagcagttcgtcgttgatgtccttcatccagggagggctaatgtttccaaggctgaactgaaggagaagctgggaagaatgtatgacgtgatagacaccaacactgtatttg

SEQ ID NO: 199106 - DNA, 241 bp, Glycine max
tagcgagaagacgacagaagggattggatttttggttatactatgctacatacttctgtggaggtacacttggtctagtctatagcaataatctgggacagattgcacaatctgtgggccagagttcaaatacttctacacttgtcatgctctatgcatccttttctttttttggtcgcttgctttcagttggaccggactacattcggaataagatctactttgcaaggactggtgggct

SEQ ID NO: 199107 - DNA, 275 bp, Glycine max
acggctgcgagaagacgacagaaggggataccaaaaacaaaacacaagccaagtgaaagtgagaaaaaataaaaatcaaagagcataatgtcagggatcattcacaagattggggagacccttcatgtgggagggcacaagaaggaggaggagcataagggtgagcaccatgctggagaatacaaaggggagcaccatggtgaacacagtagtgagtacaaaggagagcatcatggtgaacacaaagctggagagtaccatggtgagcacaagcc

SEQ ID NO: 199108 - DNA, 189 bp, Glycine max
acggctgcgagaagacgacagaagggggaacctttgcattctattcattcaagattcagcaagtgcgttttggaagcagagaccgaaatacttcgagatggcccgtacaaagcaaactgctacgtaagtcaactggaggaaaagctcccaggaagcagcttgcaaccaaggctgcacgtaagtctgcac

SEQ ID NO: 199109 - DNA, 266 bp, Glycine max
tacggctgcgagaagacgacagaagggggcaccagagaggaggaagctttgagagagagagagggaggagggagagtgttgacgctccatcaagatgggtatttctagggattccatgcacacgaggcgtgcctctggtggcaagaagaaggcatggagaaagaggagaaagtatgagcttgggcgtcaggccgcaaacaccaagttatcaagcaacaaaacgatccggaggattcgtgttcgaggtggcaatgttaaatggaggg

SEQ ID NO: 199110 - DNA, 236 bp, Glycine max
gaagttgttgtgagccctccttttgtgttccttcctgttgtaaaaagtttgctgcgccctgatttccatgtttcggcacaaaactgttgggttcgcaaaggtggtgcttataccggtgaggttagtgctgaaatgctgttaatttgggaattccttgggttattattggtcactctgaacggaggcagcttttaaatgaatcaaacgagtttgtgggagataaagttgcctatgca

SEQ ID NO: 199111 - DNA, 267 bp, Glycine max
aagacgacagaagggggagagagagagagaaatggagaagacaggagtgttatcggcgaaggaggcattcgagaagcttgaaaaggtgggagaagggacatatgggaaggtgtacagagcaagagagaaggcaactgggaagatcgtggctctgaagaagactcgtctccacgaggacgaagaaggtgtccctcccaccactctccgtgaggtttccattctgcgaatgctctctcgcgatccccatgtcgttaggttaatggatgt

SEQ ID NO: 199112 - DNA, 247 bp, Glycine max
ggataaggtcagatgtttcgaatgttgttcacggtgatgaatttgagtacaatgatcctgtggatggttccatctcatcacatcagggaatccgatatttgtttgaggatggatcacgattgattttccgcctatctggaactggatcagaaggtgcaacaattcgactatacattgagcaatatgagaaggatccatcaaagattgggagactttcaaatgaagcccttgctcctcttgtggaagt

SEQ ID NO: 199113 - DNA, 267 bp, Glycine max
tatcgctgcgagaagacgacagaaggggacctcacagcagagcaaaagaaagaaagaaactgcaacttcctctgttttgctcccctgtttaggccttttcataagcttagaatgacacacaaggaattttccattgctctagtgactctcattgctgttctctttgtcaacatgaacatccaaggtgccactgctgactatggtagttggcagagtgctcatgccactttttatggcgggggtgatgcttctggcacaatgggtgga

SEQ ID NO: 199114 - DNA, 263 bp, Glycine max
acggctgcgagaagacgacagaagggggaaaaccgagaagaagaagatggagatgtatcagatctggagcaggagaatagcgttgggagcgttcgcgtttgttctgcttttcctatcggcctcagcagacgacgtcgttgtgctctctgaagataacttcgagaaggaagttggtcaggacagataagctctcgttgagttctatgctccttggtgtggacactgcaaaaagcttgctccagaatatgaaaagcttggtagca

SEQ ID NO: 199115 - DNA, 265 bp, Glycine max
acggctgcgagaaacgacagaagggcaaagagatagaagcaaataaagcattggagatttcaaggcttgtgttatgcattgtgggaatcatcatgggagtagttagtaatgagtactcaaatggatctgttcaaggctgcaatagtttagaggagaagctcgatgatcttcgtggcctacttggcaaggctgatggtgatcctttgagaattgtgagtgttggtgctggtgcttggggcagtgtttttgctgctttgctgcaaga

SEQ ID NO: 199116 - DNA, 272 bp, Glycine max; identical to SEQ ID NO: 198084

SEQ ID NO: 199117 - DNA, 271 bp, Glycine max
tacggctgcgagaagacgacagaagggtgataatggtcgtattggtggaaagatgaaaaagacattgagggaggttattgagaaatataatttgaatgcaagaatcactccaaatcagaatatcatcttgactgatgttcgtgctgcatggaagcgtccaattacaaccactcttgctcaagctggtttgctgcaacctagatttgtagatcccctcaacataacagcaatggcatgccctgctttcccattatgtcctctggcaattact

SEQ ID NO: 199118 - DNA, 264 bp, Glycine max
taggctgcgagaagacgacagaagggttcatcaatgaagtctgcacggtgctcagcgatcccgtccaacgcatgatttatgatgaaattcatggctactctttaacttcaatcaatcctttcttggatgattcaagcccaagggatcatgcctttgttgatgaattcagctgcataggctgcaaaaattgtgccaatgtagcccctggtgtgtttgcaattgaggaagactttggaagagccagagcatacaaccaatgtgggg

SEQ ID NO: 199119 - DNA, 262 bp, Glycine max
tacggctgcgagaagacgacagaagggggcacaagtgagtttgttgatcgagataactagaaacagtgtgatgaaaatgaaggtccttgttttcttcgttgctacaattttggtagcatggcaatgccatgcgtacgatatgttccctctccgaatgaacactggctatggtgcccgtactccggaggtgaaatgcgcaagttggaggcttgctgtggaagcacacaacatctttggctttgagaccattcctgaagagtgc

SEQ ID NO: 199120 - DNA, 266 bp, Glycine max
gagacgacagaagggggacacaccgtttcatagtttttaagattgaggagcagcagaagcaggtcattgtggagaagcttggtgagcctgcccagggctatgaagatttcactgccagccttcctgctgacgagtgccgttatgctgtttatgattttgagtatctgactgaagggaatgtccctaaaagcagaatttttttcattgcgtggtcccctgacacatctagggtgggggcgcatgttgttttagccacccccaaagaa

SEQ ID NO: 199121 - DNA, 191 bp, Glycine max
gacgacagaagggggatgcaaaagttagtagtagtgaagaaaatgaaagtccttgttttctttgatgctatagttctagcagcatggcattgccatggctcagaccatgaccatgaccatggccacacctaccaaattttccctctgggaatgataactggccatggtggccactacatttcggcggtatc

SEQ ID NO: 199122 - DNA, 271 bp, Glycine max
acagaaggggaagagagttggaaaacaaagtatagagtgaaagaatgggtgagaaaagcaagattttgatcataggaggcaccggctacatcggcaaacatatagtggaagcaagcgcaaaggctggaaatcccacttttgctttggtgagggaatccacactctctgacccctccaaggcacaactcatccacaattttgaggctttgggcgttaatttggtccgcggggatctgtacgatcatgagaagttggtgaaagctatcaagca

SEQ ID NO: 199123 - DNA, 267 bp, Glycine max
tacggctgcgagaagacgacagaaggggagagaaagagagagaaagatgtcgaagcgtggtcgtggtggttcggcggggaacaagttccgcatgtcgctgggtcttccagtggcggcgacggtgaactgcgccgacaacacgggggcgaagaacctctacatcatttcggtgaaaggtatcttaggccgtatgaaccgtcttccctcggcctgcgttagcgacatggtgatggccaccgtgaagaacgcaaaacccgatctgaggaa

SEQ ID NO: 199124 - DNA, 271 bp, Glycine max
acggctgcgagaagacgacagaagggtacctataacactgtgagcaggttcagaaccatggagaattgctgctagacccaggtcaccaattttcacttgtccaagatggccattaacaaaaatgttaccacatttgaggtcctatgaattactagatgatcatgttcatgtagataaacaagaccctgtaagatttggcaagtccaactctttattgcttgtaggcctatgtgcttgtatttcttcctgtatttgcacaagtcacaaactt

SEQ ID NO: 199125 - DNA, 269 bp, Glycine max
tcggctgcgagaagacgacagaaggggaaggtcaaaaacttgcatgcatgctctgtctgttcttattcgttgcaaatgggacaatgaaattcattccagggcgtcatcattgtataatctcatagatattcacagcaaagctgttgcatctatagtgaacaaggcagaaccattagaagcaaccttaattcatgtaccgatttggaaggattccctcgtttgtgttggtgttaaaaggcagaatcagtgtgaaagtagtagctgctttg

SEQ ID NO: 199126 - DNA, 266 bp, Glycine max
tactcgagccgattcggctcgagtacggctgcgagaagacgacagattggggaagctggaaacgttagaagtagtgaagaaactgaaagtcattgttttcttcgttgctataataattttaggtgcagaatggcaatgcaatgggtcagagcatgagcttgagcagggcaacagctaccaaatttcccctggggaaatgaaaacggcccccggtggcaaatacatccgggaggtatcgtgcaaaagttggaggcttggtgtggaag

SEQ ID NO: 199127 - DNA, 180 bp, Glycine max
atttcttcagtcactctgcgccagcctgcttctactagcatcggtgtcacttatgagggccgatttcaaatattatgcttgtctggttcatacttggttgctgaagaaggtggacctcacaatagaacaggtggcatgagtgtttccctttctagtcctgatggtcatataattggtggt

SEQ ID NO: 199128 - DNA, 245 bp, Glycine max
gctgcgagaagacgacagaaggggatgaccgcagatccgatccttcctcccatcccctttttcccttcagaggttttgctactgaatccctgatccacccaatagaaaacagcattattcctgagattcctgcaactgttactgctgttaagaaccctactcctaagattgtctatgatgagcacaaccatgaaagatttcccccaggtgatccaagcaagagggaatttgcctacttcgtcctt

SEQ ID NO: 199129 - DNA, 261 bp, Glycine max
tacggctgcgagaagacgacagaaggggggaaaggaaggatgttgcagatcttgatatggtgcataaaatagcacaaactgcacactgtattgcacaggggaaagttggcagtgggtttgatgtcagttcagctgtgtatggcagtcagcgctatgtgcggttttcaccagaagtgatttcttccactaaggtaggagatatagcagtgcctttgccagatagtatcactgaaattataaaaggaaattgggaccaggaca

SEQ ID NO: 199130 - DNA, 245 bp, Glycine max
gagcggctcgaggagaatcgggaaaggggagatagccatgatgatgctgatttggtacgacttcaacttgaatctcttctagctgaaaaagctcgcctggcacacgagaactcggtttatgcccgtgagaatcgctttctaagggaggttgtcgagtatcaccaacttacaatgcaggatgttgtctaccttgacgagagcaatgaggaagtcactgaagttaaccctcttaaccttccccaagt

SEQ ID NO: 199131 - DNA, 264 bp, Glycine max
tcggctgcgagaagacgacagaaggggaaggtcaaaaacttgcatgcatgctctgtctgttcttattcgttgcaaatgggacaatgaaattcattccagggcgtcatcattgtataatctcatagatattcacagcaaagctgttgcatctatagtgaacaaggcagaaccattagaagcaaccttaattcatgtaccgatttggaaggattccctcgtttgtgttggtgttaaaaggcagaatcagtgtgaaagtagtagctg

SEQ ID NO: 199132 - DNA, 267 bp, Glycine max
tacggctgcgagaagacgacagaaggggtcagaacaatactgcaatagagaaagaggcagatagaaaaaaagagcgacttttgagttcaaaagatgactaacttcccattgatcaacttggagaagctcagtggtgaggaaagaaacgataccatggaaaaaattaaagatgcttgtgaaaactggggattctttgagctggtgaatcatggcattcctcatgacatattggacactgtggagaggttgaccaaagagcactacagg

SEQ ID NO: 199133 - DNA, 283 bp, Glycine max
acggctgcgagaagacgacagaaggggaagaagaagggagcgagcttcgtgatcgattgcgcgaaccggtggaggataagattatggacattgcttctctggagaagttccttcaggagaggattaaggtcggcggcaaggccggtgcactcggcgattccattaccgtcaccagggacaagagcaagatcaccgtcacctccgacagcaacttctctaaacggtatctgaaatatttgaccaagaagtacttgaaaaagcacaatgtgagggattggcttcg

SEQ ID NO: 199134 - DNA, 279 bp, Glycine max
gcagaagacgacagaagggggtaccaaagctgaatagccattcgtattgtcgcagagaaagaaaaccctagctcaccgtttcaagatgcaaatcttcgttaagaccctcactggtaagaccatcactcccgaagtcgagagttcagataccatagacaatgtaaaggccaaaattcaagacaaggaagggatcccaccagatcagcaacggctcatttttgctggcaagcagcttgaggatggacgtacccttgctgattataacatccaaaaggagtc

SEQ ID NO: 199135 - DNA, 279 bp, Glycine max
atatgggcaagaaggaccggagggagaagaaggagaagaaaagggaaaagaaagagaggaaaagagagaagaaggagaagaaagagagaaggaaagcggagaaagaaaggaaacttaaagaaggagcaagtgcctcccctggcactgatgatggcaaaaagtttaagctcatcaacgaactaaaggaaaccaaagtagatggaaaattgcaaaagggtgaagacagtgagaatgaacaacatgagaggagtggaattacagaggaacttgacctacctg

SEQ ID NO: 199136 - DNA, 273 bp, Glycine max
ctgcgagaagacgacagaagggggcatcaattcaaaatatatcatcaattataagcatgggtttgtggaacacaacgaatgcagtgtcttgccgctttcacaagtttggtgatgaccaaaagaatctggtcttccaaggtgatgccacgtcttcttccaggggcatagaactcacaaagttagacggtggaggaaaaccagtgggtggcagtgtggggagagtgttatactcttctccagtgcacctttgggaaagctctacagtggtcgcaa

SEQ ID NO: 199137 - DNA, 271 bp, Glycine max
tacggcagacgacagaaggggaagaaaggcggtggcagtttgttctctgcctcggcttttgatgctattgatgacgatgcggatggtgaggtggtggatgataagaatgacgatgttgatgatgatgagcctgttattgctttcactgggaagaagaagtcttccaaaggaggtaagaagggtggttcagtgttttcagctgctgttcttggtgagattgatgatggagaggagaataaggatgatggtggtggtgatgatgatgatgacg

SEQ ID NO: 199138 - DNA, 271 bp, Glycine max
  unsure (1)..(271): unsure at all n locations
cggctcgagctcgagccgaatcggctcgagacggctgcgagaagacgacagaacgggagggacactnatattaagaacttggctttgcttccttcaaagtgagggtccattgaatatgtctccgtcgttggatcttcctcccaagggtggcttcagttttgatctatgccgaagaaacgcaatgcttcaaaacaagggcctcaaagccccaacctttctcaaaactggcaccactattgtcggtttagttttccaggatggtgtcattctt

SEQ ID NO: 199139 - DNA, 273 bp, Glycine max
tacggctgcgagaagacgacagaagggggatgcaaaagttagtagtagtgaagaaaatgaaagtccttgttttctttgttgctatagttctagcagcatggcattgccatggctcagaccatgaccatgaccatggccacacctaccaaattttccctcggagaatgaaaactggccatggtggccactacattccggaggtatcatgccaaagttggaggcttggtgtggaagcacacaacgtcattgactggaaaaccgttcctcaagatt

SEQ ID NO: 199140 - DNA, 261 bp, Glycine max
  unsure (1)..(261): unsure at all n locations
gacacaccgtttgttctattcttaactcaacttctgctacccactctcttcttccaagtccaaccacgcttttctctacagtcatgggcaaggtcaagatcggaatcaacggatttggaagaattggccgtttggttgccagagtcgctctgcaaagagacgatgtggagctcgttgccgttaacgaccctttcattaccaccgattacatgacatacatgtttaaatacgacagtgttcacggacactggnngcatcacg

SEQ ID NO: 199141 - DNA, 280 bp, Glycine max
gctgcgagaagacgacagaaggggagtgagaagaagagggggtcagagtgagaaagagaaagagagaatccgtaaaccctaatttcggaaagatcggcgatgactgcctccaaggatcgcgagaactctctctacatcgccaaactcgccgagcaggccgagcgttacgaagagatggtggaatcaatgaagaacgttgcgaatctcgacgttgaactgacggtggaggagcggaatttgctttctgttgggtacaagaatgtgattggtgctcgcaggg

SEQ ID NO: 199142 - DNA, 276 bp, Glycine max
tacggctgcgagaagacgacagaaggggatcaattcaaaatatatcatcaattataagcatgggtttgtggaacacaacgaatgcagtgtcttgccgctttcacaagtttggtgatgaccataagaatctggtcttccaaggtgatgccacgtcttcttccaggggcatagaactcacaaagttagacggtggaggaaaaccagtgggtggcagtgtggggagagtgttatactcttctccagtgcacctttgggaaagctctacagtggtcgcaa

SEQ ID NO: 199143 - DNA, 274 bp, Glycine max
agaagacgacagaaggggacccatttcctcactctttcactcttcttgtatgatggagaagatccagcacagtgaggtggaagtgaagggactgaagcttcacgtggcagagattggaagtggctccaaaacagtggtattcttgcatggattcccagagatctggtacacatggaggcaccactcgatttctgtggcaaacgctggttatagggctattgcctttgatttcagaggctatggactttctcagcaaccagcagagcctgaaaag

SEQ ID NO: 199144 - DNA, 273 bp, Glycine max
aagacgacagaagggatctgtgtttggtgttactaagtctccaacaagcaaagtacatggttgatttggaaatccaggtccccaccccattcgacccgtttgccgaggcgagagaatcggatgcccccggagcaaaggagtatgtgcatattcgaattcagcagaggaatgggaagaagagtctgaccacagtgcaagggctgaagaaggagttcagctacgagaagatcctcaaggacctcaagaaggagttctgctgcaacggaaccgtgg

SEQ ID NO: 199145 - DNA, 271 bp, Glycine max
tacggctgcgagaagacgacagaaggggatcacaaatctttcgctaacactcattaattgcaagaatggcacttcgttgcttggtgatgtccctttctgttctcttcactcttggtcttgcgagagaaagccatgccagagacgaagatttttggcatgctgtttggccaaacactcccattccaagttcattgcgagatcttctaaagcctggccctgcaagtgttgaaatcgatgatcaccctatgcaaattgaagaaacacagtaccc

SEQ ID NO: 199146 - DNA, 271 bp, Glycine max
tacggctgcgagaagacgacagaagggatctatcagcatgatccatgggacttgcctggtttggcaaaggttggggaaagagagtggtacttcttcgtgccaagggacaaaaagcacggaagcggaggaaggccaaaccgcacaactgaaaaagggttctggaaagccaccggttcagaccggaaaatagtgaccttatctgatccaaagcgcataattgggttaaggaagacactggttttctatcagggaagagctcctaggggatgca

SEQ ID NO: 199147 - DNA, 209 bp, Glycine max
ggacacaccgtttgtactattcttaactcaacttctgctacccactctcttcttccaagtccaaccacgcttttctctacagtcatgggcaaggtcaagatcggaatcaacggatttggaagaattggccgtttggttgccagagtcgctctgcaaagagacgatgtggagctcgttgccgttaatgaccctttcattaccaccgatta

SEQ ID NO: 199148 - DNA, 276 bp, Glycine max
acggctgcgagaagacgacagaagggggaaggatcagcagggagaattaggtttttagggtttacaccgagcagccacacctcccgcagcagccatggttctcaaaactgaactatgccgattcagtggtgccaagatctacccaggaaagggcatcagatttgttcgtggtgattctcaggttttcctgtttgcaaactcaaaatgtaagaggtatttccacaatcgcctgaagccttcaaagctcacctggactgcaatgtacagaaagcaaca

SEQ ID NO: 199149 - DNA, 272 bp, Glycine max
acggctgcgagaagacgacagaagggggtggtcgtcgaagcgcgagcaagcatcccaaaaccctagctcgcgttctgctttcgtcttttacatcaggatggagtctcaggtgaagcacgcacttgttgtcaaagttatgggtcgtactggatccagaggacaagtaaccacaggttagagtgaaatttttggatgatcagaaccgtcacatcatgaggaatgtgaaaggacctgtgcgagaaggagacattctcaccctactcgagtctgaa

SEQ ID NO: 199150 - DNA, 273 bp, Glycine max
  unsure (1)..(273): unsure at all n locations
cggctcgagcaaatgcaactttgcagattactcttgagctagtttcttggaagactgtgtctgaagtaactgatgacaagaaggtcattaagaagatcctcaaggaaggggaaggatatgagcatccaaatgagggagccattgtgaaattgaaagtaattggtaaactgcaagatggtactctgttnttgaaaaagggtcatgatgatgaaggagggctgtttgaattcaaaactgatgaggagcaagtaattgatgggcttgacagagctg

SEQ ID NO: 199151 - DNA, 271 bp, Glycine max
  unsure (1)..(271): unsure at all n locations
cggctcgagctcgagccgaatcggctcgagtacggctgcgagaagacgacagaacgggataagaatgaaaatcanaagatnaaagagaaacaaatggcagcactgggtggctttaccgacatcaccggagcacagaacagcatcgatatcgaaaatctcgctcgctttgctgttgatgaacacaacaaaaaagagaatgcagttctggagtttgtgagggtgattagtgcaaagaaacaagtggtttctggcaccttgtactatatcactt

SEQ ID NO: 199152 - DNA, 269 bp, Glycine max
gacgacagaaggggataccaaaaacaaaacaagccaagtgaaagagagaagaaaagtcaaggacaatgtcagggatcattcacaagattgaggagacccttcatgtgggaggccacaagaaggaggaggagcacaagggtgagcagcaccatggtggagaatacaaaggggagcatcatggtgaacacagtactgaatacaaaggagagcatcatgttggtgagcacaagccggagcaccatggaggagaagagcacaaagaggggttc

SEQ ID NO: 199153 - DNA, 268 bp, Glycine max
tacggctgcgagaagacgacagaaaggggcacaagtgagtttgttgatcgagataactagaaacagtgtgatgaaaatgaaggtccttgttttcttcgttgctacaattttggtagcatggcaatgccatgcgtacgatatgttccctctccgaatgaacactggctatggtgcccgtactccggaggtgaaatgcgcaagttggaggcttgctgtggaagcacacaacatctttggctttgagaccattcctgaagagtgcgttgaa

SEQ ID NO: 199154 - DNA, 275 bp, Glycine max
gctgcgagaagacgacagaaggggatggaaggttctgtcaacgaacgtcttgattttgggaagatgggatatgggtgcaatcattaccggagaagatgcaggattcgtgctccctgctgcaacacgatctactcatgccgtcactgtcataacgacgctgcgagcttgttgaagaatccctttgatcgccacgagctcgttcgccaagatgttaaacaagttgtttgttcagtttgtgacactgagcaacctgttgctcaagtttgcacaaactg

SEQ ID NO: 199155 - DNA, 274 bp, Glycine max
ggctgcgagaagacgacagaagggggaagggaaaaatggtgtcgctgaaactgcagaagcgcccctccgcaagcgtgctcaagtgcggcagaggaaaggtttggcttgaccccaatgaagtcaacgaaatctccatggccaattctcggcaaaacatcaggaagttggttaaggatgggtttatcatcaggaagccaaccaagattcactcccgctcacgtgctcgtaggatgaaggaggcaaagaggaagggccgccactccggttatggtaa

SEQ ID NO: 199156 - DNA, 271 bp, Glycine max
tacggctgcgagaagacgacagaaggggggagtaattcaattctcactcactagtcactatggaaatgcatagtagtataattttttgcatgttcttccttccgtggctctccatggttggtgctaaggttccggcaatgatcgcgttcggggactcgtcggttgatgctgggaacaacaattacatagcaacggttgctcggagcaatttccagccatatgggcgtgactttgtgggtgggaagccaactgggagattcagcaatggccg

SEQ ID NO: 199157 - DNA, 268 bp, Glycine max
  unsure (1)..(268): unsure at all n locations
tacggctgcgagaagacgacagaagggggagcagattcagagtgcaaagtgtgagagaaagacaatgccgaagtctcaatttcgaaccccatttctggtttctcttccccttttgttattcatcttcaacctcaccccttcgcacgcactctatggagcatcctcacccgttcttcaactcactccctctaacttcaagttcaaggttctgatttcatatggtgntgttcttgttgaattctgtgctccatggtgtggacactgtcag

SEQ ID NO: 199158 - DNA, 270 bp, Glycine max
acaccaccccaaatgccttcactctagctttgcgtgtagggctccaacgctcggagcagctatttcgttgggtttgggaggccaatagggccaacccagttggagaaaatgccactttttcacttggcactgatgggaaccttgtgttggcagatgctgatggcagaattgcatggcaaactaacactgccaacaagggtgttgtggccttcaggcttctttcaaatggtaacatggtccttcttgatgcacaaggcgggttcgtttggc

SEQ ID NO: 199159 - DNA, 276 bp, Glycine max
  unsure (1)..(276): unsure at all n locations
gcaagacgacagaaggggattgctctgaattttctgcatcatattgcacacagagatcgtgatcgnaaatggcgacgttgaaggttcctgcacaacttccttctccattggaagacagtgagcaattgtgaaaagcttttcaagggtggggaacgaatgaaggattgataatatcaatcctgggtcacagaaacgcggctcagcgtaagttgattcgtgaagcttatagtacaacccatggagaagatcttcttaaagatttagacaaagaacttt

SEQ ID NO: 199160 - DNA, 275 bp, Glycine max
acggctgcgagaagacgacagaaggggggaagaggaaaagaggattagagggtcgccacgtttagcaataaccaaaccccctctactcttttttcttctccttctcttcgctagggttttagcttcttcctcttcacttcgttctttttcgcctctacaatgagcaacgacaaggacacattcaacgtcgccgatctcacttctgctctcaacgaggacaatagagcagaccttgtcaatgctcttaagagcaagatacagagtttggctggaca

SEQ ID NO: 199161 - DNA, 274 bp, Glycine max
tacggctgcgagaagacgacagaaggggaaaaaaaaaaagaaaaaaaagactctaaagaaatataactaatattctttagaataatcaaaaagaatattaaattcaaataaattttagatagaaaaaagacttaaaaaggaggatttgaaatgcgagatctaaaaacatatctttccgtggcaccagtagtaagtactctatggttcggggctttggcgggtctcttgatagagatcaatcgtttttttccagatgcattgatattcccttttt

SEQ ID NO: 199162 - DNA, 270 bp, Glycine max
cgagaagacgacagaagggggaagttttgtggtgtggtttagtgtcaaatggcggcgagtagaagcacttttcctctgatgaaatacttgagagtgcgcgtcgacgctcttccccgcaacactcccttaaccctcgctcccaactttttgattcgccgcttctgtgaagaggttaggggttgttttctcgacaagtctgaggtcacagatcgcgtcatttcctgcgtcaaaaacttccagaaagttgatccttcaaaggttaaccctaat

SEQ ID NO: 199163 - DNA, 267 bp, Glycine max
tacggctgcgagaagacgacagaagggggcacaagtgagtttgttgatcgagataactagaaacagtgtgatgaaaatgaaggtccttgttttcttcgttgctacaattttggtagcatggcaatgccatgcgtacgatatgttccctctccgaatgaacactggctatggtgcccgtactccggaggtgaaatgcgcaagttggaggcttgctgtggaagtttacaacatctttggctttgagaccattcctgaagagtgcgttga

SEQ ID NO: 199164 - DNA, 269 bp, Glycine max
agacgacagaagggggacaacaagaagctcactctctctatctcttctctctgtgtgtgtgttatgtgtgaatacacatgaaaatgcagaagttcaaattgcttctagtgctattcttcgctacttgccactcctctttgtccatcacagatggtttgttgccaaatggagacttcgaggttggtccaaaaccatcagagttgaaaggttcaatagtgactacccccaatggcattccacattggacaatctcaggaatggttgaatac

SEQ ID NO: 199165 - DNA, 273 bp, Glycine max
tacggctgcgagaagacgacagaagggggtggcactcaaacattgtttgttgtaggaagaggaatcttgagaaatggcaggggacagcaagagcaagattctgttcatcggagggactggttacatcggaaaattcatcgtggaagccagcgccaaagctggccacccaactttccttttggtgagggagtccactctctccaaccccgcaaaatcacccctcatcgacaatttcaaaggcctcggtgtcaatcttgttttaggagatctata

SEQ ID NO: 199166 - DNA, 272 bp, Glycine max
ataacctttacaaagatgccatggagacagcctcccaatccggggagcgtgaacttgctgaggagttgcttgtttatttcattgatcagggaaagaaggaatgctttgcctcatgtctatttgtttgctatgatctcatacgggcagacattgttcttgaactagcttggatgcacaatatgattgactttgccttcccatatctattgcagtttattcgtgagtacactggcaaagtcgatgaactagtgaaggacaaaattgaagcacaa

SEQ ID NO: 199167 - DNA, 270 bp, Glycine max
cgagaagacgacagaagggggatgcaaaagttagtagtagtgaagaaaatgaaagtccttgttttctttgttgctatagttctagcagcatggcattgccatggctcagaccatgaccatgaccatggccacacctaccaaattttccctctgagaatgaaaactggccatggtggccactacattccggaggtatcatgccaaagttggaggcttggtgtggaagcacacaacgtcattgactggaaaaccgttcctcaagattgcgag

SEQ ID NO: 199168 - DNA, 267 bp, Glycine max
acggctgcgagaagacgacagaagggggcctgcaagtgtgagtgatatttgagcttaaaccctagccgctcttctcttcattcttcactttggaaacaatcataatggcgttctgtaattaggttggaaatgtcttgaggcagggtgctgctcgcagcacacatgcccctgttgcgtccatgcttaattacatccgctgcatgtcttcaagcaagcttttcattggaggcctttcatatggagttgatgaccagtctcttaaggatg

SEQ ID NO: 199169 - DNA, 268 bp, Glycine max
tacggctgcgagaagacgacagaagggatcagtggtgccccccaggataacaacataatgctgtggaatgctgtcatatttggtcctgatgatactccatgggatggaggcacgttcaagttgacactccaatttactgaggactatccaaataaaccaccgactgtacgatttgtgtctcgcatgtttcatccaaatatttatgctgatggaagtatttgtttggatatattacaaaatcagtggagtcctatttatgatgtggctg

SEQ ID NO: 199170 - DNA, 267 bp, Glycine max
tacggctgcgagaagacgacagaagggggatcaactaggacagaaatcaagcattgggtcgaactcttctttgatgtcaaagtaatagctatgaatagtcatcgactcccggtaaagggtagaagagtacgacctattatgggacatacaatgcattacagacgtatgattattacgcttcaaccgggttattctattccacctcttagaaagacttaaacttaaatcaaaatacttaatagcatggcgatacatctatacaaaact

SEQ ID NO: 199171 - DNA, 263 bp, Glycine max
tacggctgcgagaagacgacagaagggggcacaagtgagtttgttgatcgagatagctagaaacagtgtgatgaaaatgaaggtccttgttttcttcgttgctacaattttggtagcatggcaatgccatgcgtacgatatgttccctctccgaatgaacactggctatggtgcccgtactccggaggtgaaatgcgcaagttggaggcttgctgtggaagcacacaacatctttggctttgagaccattcctgaagagtgcg

SEQ ID NO: 199172 - DNA, 266 bp, Glycine max
tacggctgcgagaagacgacagaaggggcacaagtgagtttgttgatcgagataactagaaacagtgtgatgaaaatgaaggtccttgttttcttcgttgctacaattttggtagcatggcaatgccatgcgtacgatatgttccctctccgaatgaacactggctatggtgcccgtactccggaggtgaaatgcgcaagttggaggcttgctgtggaagcacacaacatctttggctttgagaccattcctgaagagtgcgttga

SEQ ID NO: 199173 - DNA, 266 bp, Glycine max
ctcgagccgcggctgcgagaagacgacagaagggtacataatgaaatctaatgaagaagggaccttctcaaatggagatctcgtaccatttggaaccgttcaaatcgaaccacattctactgttttaaattacggacaaggattatttgagggcatgaaggcctacagaagagcagatggtgaggtgcagatatttcgaccagaacaaaatgctatgcgcatgcagatgggagcagagaggttgctaatggtggcaccttctgttg

SEQ ID NO: 199174 - DNA, 270 bp, Glycine max
gctgcgagaagacgacagaagggggggtggagttatataatgaaacatcgtttaataaatgggttgaccttggcgaggcaccggcactgccagagagtctcaaattgtacaagaaactgttgtctcttggcatcaagattgtattcataacaggaagaccaccggatcaaaaggctgtaactgctaccaacttaaagcttgctggatatcacacatgggaaaagttaattaccaagaatacatctgaataccatggtaagacagcagtta

SEQ ID NO: 199175 - DNA, 272 bp, Glycine max
agaagacgacagaagggggagctggtgttcaaggaggacgggcaggagtacgcgcaggtgctccggatgctggggaacgggcggtgcgaggcgatgtgcatcgacgggacgaagaggctctggcacatccgcgggaagatgcacaagaaggtgtggatcgccgccggagacatcatcctggttggactcagggactaccaggacgacaaggctgacgtcatcctcaagtacatgcccgacgaggccaggctcctcaaggcctacggcgagct

SEQ ID NO: 199176 - DNA, 288 bp, Glycine max
tacggctgcgagaagacgacagaaggggaacacaaaacacaacaaaaatttacaagcaactatggcttcaagcaatggccgaaaagcaactgagatcttccaaggacaagctatcttatacagatgcatgtttgccttcctagattccatgtgtctcaaatcgattattgagcttggcataccagacataatccacaagcatggccaacccattactctttctgagttggtgtcaattctgaatgttccaccagctagagttggtcacgtgcaaagtctcatgcgcta

SEQ ID NO: 199177 - DNA, 268 bp, Glycine max
tacggctgcgagaagacgacagaaggggtcatgagacaccaacaactagttgaattggcctggggcctagcaaatagcaagaaaaagttcatgtgggtgattaggcctgatttagttgagggtgaggcctcaattttgccaccagaaattgtagaagaaaccaaagacagaggccttgtggtgggttggtgtcctcaagagcaagttttgaagcacccagcagtggctgggtttttgactcactgtggttggaattccacgcttgaaa

SEQ ID NO: 199178 - DNA, 272 bp, Glycine max
tacggctgcgagaagacgacagaagggatgtatgatcctgttatcattgcttctgggcagacttatgaaagggtttgtatagagaaatggttcagtgatgggcacaacaactgcccaaagacccagcagaaactttcacatctttgtttgactcctaattatcgtgttaagggccttgtttctagttggtgtgaacaaaatggagttcctattcctgaaggccctcctgaatctcttgatcttaactactggggattggtattatcagagtc

SEQ ID NO: 199179 - DNA, 277 bp, Glycine max
gcgagaagacgacagaagggagagatggaaaccttagggaagatcaagcacagaaatcttgtccctttgttggggtactgcaaagtaggggaagagaggctccttgtgtatgagtacatggagtatggaagcctagaagagatgcttcatgggagaatcaagacgcgtgatcgacgaattttgacatgggaagaaaggaagaagattgcaagaggtgctgctaaaggactttgtttcctgcaccacaattgcatccctcacatcatacacagagaca

SEQ ID NO: 199180 - DNA, 270 bp, Glycine max
tacggctgcgagaagacgacagaagggaagataccaaataactaacctttaagaaggcttcaaaatcaatgtcattggtaaaatcagtgcctgattcacccaagatacccctaatctcatcctcactgtacatatctctgaatgcgtttagcttcaccatcaaaggcggcaaatctccaaatgtaactttaccattctgattctttaaagagacaaactacaacaccagatagaagggccatataaggtaaaaaaaaagagcatgaaaga

SEQ ID NO: 199181 - DNA, 274 bp, Glycine max
actcgagccgcggctgcgagaagacgacagaagggggaagagtatgcaaagaaagggagctacagaattgaccacactccaacattaaagtttcttgacaaggcatgtgtgaaaacagattcgaacactagtccatggacgctatgcactgttactcaagtagaggagaccaaacaaatgataagaatgattccgatcttggttgctacatttgtgcctagtacaatgatggctcagataaatatacattttgtgaagcaaggtactactcttg

SEQ ID NO: 199182 - DNA, 268 bp, Glycine max; identical to SEQ ID NO: 197973

SEQ ID NO: 199183 - DNA, 246 bp, Glycine max
agggtaaagagtatgtgtttgttgccaattccggataacttgggagctatagttgacttgaaaatcttgaatcatttgatccagaacaagaatgaatactgtatggaggtgactcccaaaacattggctgatgtaaagggtggcactttgatttcttacgaaggaagggttcagctcctggaaattgcacaagtccccgatgaacatgtcaatgagttcaagtcaatagagaagttcaaaattttc

SEQ ID NO: 199184 - DNA, 274 bp, Glycine max
tacggctgcgagaagacgacagaaggggcagaattggtgtctttatgctcagagtttcttaacggtggcacagacacaacagcaacagcggttgagtggggcatagcacagctcatagcgaaccctaacgttcagacaaagctgtacgaggaaataaagagaacggtgggagagaagaaggtggatgaaaaggacgttgagaaaatgccatacctacacgctgtggtgaaggagcttctaagaaagcaccctccaacacactttgtgctaacac

SEQ ID NO: 199185 - DNA, 278 bp, Glycine max
tacggctgcgagaagacgacagaaggggggcatcaattcaaaatatatcatcaattataagcatgggtttgtggaacacaacgaatgcagtgtcttgccgctttcacaagtttggtgatgaccaaaagaatctggtcttccaaggtgatgccacgtcttcttccaggggcatagaactcacaaagttagacggtggaggaaaaccagtgggtggcagtgtggggagagtgttatactcttctccagtgcacctttgggaaagctctacagtggtcgca

SEQ ID NO: 199186 - DNA, 286 bp, Glycine max
  unsure (1)..(286): unsure at all n locations
gcgagaagacgacagaagggggaagaaggttggttgattggtcccattgattccgaagagaaaagaaaagatgtttgagccacaacagctatacactcgcgcgaagaccgaggaattcgacctcgaatcaggagaaaccctctacccagggctgagcgtcggcgagaaccagctccgatggggtttcatccgcaaggtctacggcatcctctccgcgcagatcgtcctcaccacctncgtctcgacaaccaccgttttctatactccaatcaatgacctcctcaag

SEQ ID NO: 199187 - DNA, 267 bp, Glycine max
ctgcgagaagacgacagaagggggtgagtgaaaatggcggtacccttgctctccaagaagatcgtgaagaagcgcgtcaagaagtttatacgcccccagagtgatcgcaagatctccgtcaagccaagctggcgcagacccaagggtattgattctcgtgtcaggagaaagttcaaaggatgcactttgatgcccaacattggttatggctcagacaagaaaacccgccattatctaccaaatggtttcaagaaatttgtcgtgcac

SEQ ID NO: 199188 - DNA, 274 bp, Glycine max
acggctgcgagacgacagaaggggaccctaaagagagagagagggagtcagagaaaccctaggtaagaagaaaagatgccggctggtcatggtttgagatcccgcaccagagattccttctctcgtcctttcaggaagaagggaaccatcgccctcaccacatacctgagaacctaccacgtcggcgactatgttgacgtcaaggttaacggtgccgttcacaagggaatgccccacaaattctaccatggccgcaccggacgcgtctggaatg

SEQ ID NO: 199189 - DNA, 278 bp, Glycine max
gctgcgagaagacgacagaagggggcacaagtgagtttgttgatcgagataactagaaacagtgtgatgaaaatgaaggtccttgttttcttcgttgctacaattttggtagcatggcaatgccatgcgtacgatatgttccctctccgaatgaacactggctatggtgcccgtactccggaggtgaaatgcgcaagttggaggcttgctgtggaagcacacaacatctttggctttgagaccattcctgaagagtgcgttgaagcaacaaaggaata

SEQ ID NO: 199190 - DNA, 232 bp, Glycine max
  unsure (1)..(232): unsure at all n locations
ggacacaccgtangttctattcttaactcaacttctgctacccactctcttcttccaagtccaaccacgcttttctctacagtcatgggcaaggtcaagatcggaatcaacggatttggaagaattggccgtttggttgccagagtcgctctgcaaagagacgatgtggagctcgttgccgttaacgaccctttcattaccaccgattacatgacatacatgtttaaatacg

SEQ ID NO: 199191 - DNA, 277 bp, Glycine max
ccaaaaaccgtgaactggaagtcatccactccagatgggccatgttgggagccttggactgtgttttccctgaactcttgtctcgcaacggagtcaagtttggtgaggccgtgtggttcaaggccgggtctcagatattcagtgagggcgggcttgactacttgggcaacccaagcctgatccatgcacaaagcattcttgccatctgggccacccaagttatcttgatgggtgcagttgagggttaccgtattgctggtgggcctcttggtgaggt

SEQ ID NO: 199192 - DNA, 283 bp, Glycine max
acggctgcgagaagacgacagaagggggaagaaaaagaaaacagaggcttaggcaactaagaaagaaagatgaagctgaaggtatatgcggaccgcatgtcccagccatcccgtgcggttctcatattttgcaaagtgaatggaatagattttgaggagatcaaagtcgatttatccaaacgtcagcagttatctcccgaattccgagcggttaaccctttaaggaaagtccctgctattgttgatggaaggttcaagctatttgagagtcatgctattctca

SEQ ID NO: 199193 - DNA, 268 bp, Glycine max
agaagacgacagaaggggggatcgatggaggaaattaccttgccagagaaagttgatgtgatcatctctgaatggatgggttattttcttctgcgtgaatctatgtttgattcagttataaatgctcgtgaccgctggctcaaaccaacaggagtgatgtatcctagtcatgctcgcatgtggatggctgctatccggactgggatagtagatcacaaattgggcgattacgagtcgactatggatgattggcaccactttgttgatg

SEQ ID NO: 199194 - DNA, 273 bp, Glycine max
gaagttcggcaccagcgaaacgctcttcgttatcttttctcagactccgcggcgtagatccgaggagttcgggaaatcctaactcatcatctcaactcaagtcatggctggacttgcacctgagggatcacagttcgatgctcgtcaatatgattctaaaatgactgacttactttcatctgatggacaggacttcttcacatcctatgacgaggtttatgatagttttgacgctatgggtttgcaggaaaatcttctcaggggaatttacgc

SEQ ID NO: 199195 - DNA, 267 bp, Glycine max
tacggctgcgagaagacgacagaaggggatcacttattaattgtgttaagaaatttaagtgaggagctagagaatgatgatgaagtctgctatgtgtgcagtggtggttgcagcacttcttcttctggcggaggtggggcccatggctgaggctgtgacatgcaccccaacagagttgagtccgtgtcttccagcaatcacttccggtgctaaaccttccaatgcttgttgcacgaagttgaagcagcaaaaaccatgcttatgtgg

SEQ ID NO: 199196 - DNA, 268 bp, Glycine max
acggctgcgagaagacgacagaagggggagagcaattgcatcaacaacaaattgaaaggatgtcgatcttcgagtacaacggaagcgccgtggtggctatggtcggcaagaactgcttcgccattgccagcgaccgatagctcggcgttcagctccaaaccatagccacggatttccaacgcatttccaagattcacgacaagctcttcatcgctctctctggcctcgccaccgatgctcaaacattgtatcagcgtcttgttttccg

SEQ ID NO: 199197 - DNA, 279 bp, Glycine max
acggctgcgagaagacgacagaaggggtgatttgtggtggtatcctctatattgctaaccttggtgattcccgtgctgtgcttggccgggtggtcagagcaactggggaggttttggcgatccagctttcgtcagagcataatgtggccatagaatctgtgagacaagagatgcattctttgcatccggatgactcaaaaattgtggttctaaagcacaatgtatggcgggtgaagggtctgatacagatttctagatccattggcgatgtatacctaa

SEQ ID NO: 199198 - DNA, 277 bp, Glycine max
acggctgcgagaagcgacagaagggggaaacagcacaactcaattcttcagtcagatatggatgatgcagttgacagacttacagttggacctaaacgtgttggaatagaattaggttaccaagggcaatgtcgtagagctactactgaattgggacttgcattaacttctcatctgcttcggcgatatgagcatgcaaaagttgaatgctgtgatcgcatctcaatagtacctcgtggtcagacattgtctcaattggtatttcatcgacttgatg

SEQ ID NO: 199199 - DNA, 275 bp, Glycine max
ctgcgagaagacgacagaagggggagaataggcctttcaatgaccaaaggtacttcttggatgatgagaagctcaaggatttggggtggtctgagggcactacttgggaagagggtctaaggaaaaccattgattggtatgtcaagaatcctgattggtggggtgacgtttctggtgctttgcttcctcatccaagaatgctcactatgccaggagttgagaagtactatgatggctctgataatgtgaccggaaccgcttccaatggtgatgtt

SEQ ID NO: 199200 - DNA, 277 bp, Glycine max
tagtcaagtggcaaactgttcctgcagcttgcggagagtacatagctgactacgttctaggagaccaatatagatcagattccaaaacagttaaccaacaagcttatttctatgctaaatccctcaaactcaccaacaaagatgtctttgtcttggacgttgacgacactactctctctaatctccagtattttgctaaccatggatttggtgtggaaccacacaatacgacggcgtttaagaactgggttcttgatggcgaggcattcgcactgcc

SEQ ID NO: 199201 - DNA, 276 bp, Glycine max
tacggctgcgagaagacgacagaagggggcacaagtgagtttgttgatcgagataactagaaacagtgtgatgaaaatgaaggtccttgttttcttcgttgctacaattttggtagcatggcaatgccatgcgtacgatatgttccctctccgaatgaacactggctatggtgcccgtactccggaggtgaaatgcgcaagttggaggcttgctgtggaagcacacaacatctttggctttgagaccattcctgaagagtgcgttgaagcaacaaa

SEQ ID NO: 199202 - DNA, 280 bp, Glycine max
ggctgcgagaagacgacagaagggcaacgtgaagcagattgcaaagtttgtcgttgggctgggcgacaaagtttcacccaccgacattgaggaagggatgcgtgttggggttgatagaaacaaatatcagattcaaattccactgcctccaaaaattgacccaagtgataccatgatgacagttgaagagaagcctgatgtgacatataatgatgttggtggttgtaaggagcagattgaaaagatgcgagaagttgttgagcttcccatgctccaccct

SEQ ID NO: 199203 - DNA, 275 bp, Glycine max
tacggctgcgagaagacgacagaaggggaagaagaagggagcgagcttcgtgatcgattgcgcgaagcggtggaggataagattatggacattgcttctctggagaagttccttctggagtaggattaaggtcggcggcaaggccggtgcactcggcgattccattaccgtcaccagggacaagagcaagatcaccgtcacctccgacagcaacttctctaaacggtatctgaaatatttgaccaagaagtacttgaaaaagcacaatgtgaggg

SEQ ID NO: 199204 - DNA, 270 bp, Glycine max
gagaagacaacagaagggggatgcaaaagttagtagtagtgaagaaaatgaaagtccttgttttctttgttgctatagttctagcagcatggcattgccatggctcagaccatgaccatgaccatggccacacctaccaaattttccctctgagaatgaaaactggccatggtggccactacattccggaggtatcatgccaaagttggaggctttgtgtggaagcacacaacgtcattgactggaaaaccgttcctcaagattgcgagg

SEQ ID NO: 199205 - DNA, 274 bp, Glycine max
acggctgcgagaagacgacagaaggggctggtgcacgttttgccaaatggcgtgctgtgctgaagattggtcccaacgagccatctgagctgtctatccatgagaacgcctatggcttggctagatacgctgtcatatgccaggagaatggcctggttcccattgttgagcctgagatccttgttgatggacctcatgacattcacaagtgtgccgccgtcaccgagcgtgtccttgcagcatgctacaaggctttgaatgatcaccatgtcct

SEQ ID NO: 199206 - DNA, 269 bp, Glycine max
tacggctgcgagaagacgacagaagggggtggtagtggggtaacgatacgtaataagttctatcattgaggaagtttcctgtgcatcgtctccgaaaatgaacgacgcagatgtctcaaagcaaatccagcagatggtgcagttcatccgccaggaagctgaggaaaaggccaacgagatctctgtctccgccgaagaggaattcaatatcgagaagctgcagttggtcgaagccgacaagaagaagatcatgcaagaatacggtcgcg

SEQ ID NO: 199207 - DNA, 281 bp, Glycine max
cgacagaagggaactgttgttgagggaactatacagaagctatttgaagggcatcatatgaattatatcgaatgcatcaatgtggactataaatcaactagaaaggagtcattttatgaccttcagcttgatgtgaagggctgtcctgatgtttatgcttcctttgacaagtatgttgaagttgaacgtcttgaaggggataacaaatatcatgcggaacaatatggtttgcaggatgctaagaagggtgtcctgttcattgatttccctcctgttcttca

SEQ ID NO: 199208 - DNA, 281 bp, Glycine max
acggctgcgagaagacgacagaaggggggaggatggcaaacacaaacagcgacaccaaagaagaaagcaaaaaaatggatgaaagagagacaatacctctcctcacctcatacaagatgggaaattttaatctatcccacaggattgtgttggcaccgttaacacgatcaaggtcttacaacttcgttcctcagccgcatgctgctctgtattattctcaaagaactactaagggtggcttcttgatcggggaagctgctggtgtatctgatacggcaaag

SEQ ID NO: 199209 - DNA, 277 bp, Glycine max
acggctgcgagaagacgacagaaggggacgcagctgaataaagaaaaaagcctttcatagtgagatagccctagaaatgtttcgtgaatctttgtttgctctctttctactttctgccttctcctcctcactcctacctttaaccactgctcaagattacgttctcgacacggacggtcacgcggttgaaaatcacggtacatactatttgttgccagcgaaatcaggaagcggcggtggtggaatagaggtagccgcaactggcaaagaaagttgc

SEQ ID NO: 199210 - DNA, 276 bp, Glycine max
gctgcgagaagacgacagaaggggaccgacaaactggaaaaacagctattgctatcgataccatattaaaccaaaagcaaatgaactcaagggccacctcagagagtgagacattgtattgtgtctatgtagcgataggacagaaacgctcaactgtggcacaattagttcaaattctttcagaagcgaatgctttagaatattccattcttgtagcagccaccgcttcggatcctgcacctctgcaatttctggccccatattctgggtgtgcca

SEQ ID NO: 199211 - DNA, 277 bp, Glycine max
tacggctgcgagaagacgacagaagggggagtaacatgcaatgcatcatcacatctgagggagaggagagcattttcatttttcaacttgagagaagaagagaaggggaaaaggaaaaaaaggcaaaatgggtaaggatctgagcgatgagcaagtgtcttcaatgaaggaagctttctctttattcgacacagacggtgacggtcggatcgcgccgtcggagctggggatcctgatgaggtctctgggagggaacccgactcaggcccaactcaaa

SEQ ID NO: 199212 - DNA, 276 bp, Glycine max
gaagacgacagaagggggcactgcaaatcacttttctactttgagtcttcttgatccttctttttctccttgaactcaaacatggcagatgaggtggttctgctagatttctggccaagtccatttgggatgagggtcaggattgcacttgctgaaaagggtatcaaatatgagtacaaagaagaggacttgaggaacaagagtcctcttctcctccaaatgaacccggttcacaagaagattctggttctcatccacaatggcaaacccatttgt

SEQ ID NO: 199213 - DNA, 277 bp, Glycine max
tacggctgcgagaagacgacagaagggggccgcaaacagagatgacgacccgattcaagaagaaccgcaagaagcgcggccacgtgagcgccggtcatggccgtatcggaaagcaccgtaagcaccccggcggccggggaaacaccggtggcatgcatcaccacaggatcctgtttgaccagtaccatccgggcttcttcggtaaggtgggaatgaggtacttccataagcttcgcaataaattctactcccccatcgtcaacgtcgaaaagctatg

SEQ ID NO: 199214 - DNA, 272 bp, Glycine max
tacggctgcgagaagacgacagaagggggaggaagccacatagagacacaatacagagtgagttgttgctccttcgccacaactctctgccaacatgggtatctccagagattctatgcacaagagacgtgccactggtggcaagaagaaggcctggaggaaaaagagaaagtatgagcttggtcgccagcctgctaacactaagctgtcaagcaacaagacagtcaggaggatccgtgttagaggtggaaatgtgaaatggagggcattga

SEQ ID NO: 199215 - DNA, 276 bp, Glycine max
tactcgacgaatcggctcgagacggctgcgagaagacgacagacgggggaggaagccacatagagacacaatacagagtgagttgttgctccttcgccacaactctctgccaacatgggtatctccagagattctatgcacaagaggcgtgccactggtggcaagaagaaggcctggaggaaaaagagaaagtatgagcttggtcgccagcctgctaacactaagctgtcaagcaacaagacagtcagatcaatccgtgttagaggtggaaatgtg

SEQ ID NO: 199216 - DNA, 280 bp, Glycine max
acggctgcgagaagacgacagaagggggcgaaagcaaagttagttgagagagagaggagctgaggagaatcaatcgagagaaatatgtctggtatcgctcgtggacgccttgctgaggaacgaaagtcatggcgcaaaaaccatccacacggtttcgttgccaagcccgagactctacctgatggcaccgtaaatttgatggtctggcattgcactattcctggcaagaccgggactgattgggagggtggatatttcccactgacaatgcacttcagtg

SEQ ID NO: 199217 - DNA, 273 bp, Glycine max
cggctgcgagaagacgacagaagggggcatcaattcaaaatatatcatcaattataagcatgggtttgtggaacacaacgaatgcagtgtcttgccgctttcacaagtttggtgatgaccaaaagaatctggtcttccaaggtgatgccacgtcttcttccaggggcatagaactcacaaagttagacggtggaggaaaaccagtgggtggcagtgtggggagagtgttatactcttctccagtgcacctttgggaaagctctacagtggtcg

SEQ ID NO: 199218 - DNA, 277 bp, Glycine max
tctcgagccgaatcggctcgagtacggctagaagatgacagaagacggatgcaaaagttagtagtagtgaagaaaatgaaagtccttgttttctttgttgctatagttctagcagcatggcattgccatggctcagaccatgaccatgaccatggccacacctaccaaattttccctctgagaatgaaaactggccatggtggccactacattccggaggtatcatgccaaagttggaggcttggtgtggaagcacacaacgtcattgactggaaaa

SEQ ID NO: 199219 - DNA, 275 bp, Glycine max
ggctcgagaagacgacagaagggggccctaatcgtgagaagaaaggaaaggcaaaagggaaagatggtgtgcataaggaaggcgacggtgaaggaccttctggcgatgcaggcgtgcaacctgttctgcctccctgagaactaccagatgaagtactacctctatcacatcctctcctggccccagctcctctacgtcgccgaagactacaacggccgcatcgtcggctacgtcctcgccaagatggaggaagagaccactgactgccacggcca

SEQ ID NO: 199220 - DNA, 272 bp, Glycine max
gggtgtggcactcaaacattgtttgttgtaggaagaggaatcttgagaaatggcaggggacagcaagagcaagattctgttcatcggagggactggttacatcggaaaattcatcgtggaagccagcgccaaagctggccacccaactctccttttggtgagggagtccactctctccaaccccgcaaaatcacccctcatcgacaatttcaaaggcctcggtgtcaatcttgttttaggagatctatacgatcaccaaagtttggtgagtg

SEQ ID NO: 199221 - DNA, 274 bp, Glycine max
acggctgcgagaagacgacagaaggggatggctgcaaatgtggaccaaactgctcctgcaacccctgcacttgcaagtgaggtgttgggagagcaagcttcaagcagagatagcccttaattaggaataatgataaactattaatgtgtagctaaaaacttatgtattatgtctgtgatggttttcgtgcactctggtgttttgtgttaaacaaacatccttagaataaagtggtcatgtcttgcccttcagcaagttcaagtgttttggactt

SEQ ID NO: 199222 - DNA, 276 bp, Glycine max
tctcgagccgctcgagtacggctgcgagaagacgacagaaggggaggttttagcctaggaaacgtgttcaactactctgagccgcatcacttcccggaatcgtgcatccctacgttcaatatgccgctggtggcaaacgaggatttccagcacatacttcgtgttttgaacacgaacgtagatgggaagcagaagataatgttcgctcttacctcaatcaaaggtattgggaggcgatttgctaacatttgctgcaagaaggctgatgttgacatg

SEQ ID NO: 199223 - DNA, 282 bp, Glycine max
tacggctgcgagaagacgacagaagggggatcaagagtttggtaatattgatcagtacaacatctatgctcctccatgcaacaactctgatggtagtagtagctctgccacccgccgcaccatgcgtttacctcaccgaccccatgtggattttaggcattggtctggttatgatccatgtacggaaaagtatgcagagatttactacaacaggcctgatgttcagaaagcacttcatgccaacaaaaccggtattccttataggtggactgcttgcagcga

SEQ ID NO: 199224 - DNA, 273 bp, Glycine max
tacggctgcgagaagacgacagaagggatcataactatagttaacaataaaatactaggaaaagcccacatacggcgaagatatttggttgctgtcggaaaaagtagaagtcccactcctattaacataggaactggaaatggaataaaaggtatgatccatgaatattgatgtgtatattccatacaataaacaaaaaaattatgattctaatgaattttgtttcttattcgtcggtttttattttatcttttttgtaaagaaggggttcgg

SEQ ID NO: 199225 - DNA, 275 bp, Glycine max
tacggctgcgagaagacgacagaaggggttcaaaacaatcaatatgtaaaatcagaacaagtaattgccgagattcgcgcaggaacatacacttttaatttaaaagaaaaagttcgaaaacatgtctattctgacttagaaggagaaatgcattggagtaccgatgtgtaccatgcatcagaatttagatatagtaatgcccatatcttaccaaaaacaagtcatttatggattttatcaggaaaatcatacaggtccggttcagtctcttcttc

SEQ ID NO: 199226 - DNA, 279 bp, Glycine max
acgacagaagggggagagagagagagaaacaaagcagcacccatttggatcctctcttctcttctttgatctccgttaccctttttgttttctcaacagagagagagagagagaatctttcgaagttcgtttgcgtgtgttgtgtggtcagtcaccgatggcagcaccacctgcgagggcacgtgccgattacgattacctcatcaagcttcttcttattggcgatacggtgtgggaaagagttgtctgcttttgcgattttctgatggttccttcaca

SEQ ID NO: 199227 - DNA, 267 bp, Glycine max
ggctgcgagaagacgacagaagggggcacaagtttgttgagatagctagaagcaataagatgaaaatgaaagtgcttgttttgtttgttgctacagttttggtagcatatgaatgccatggctcagactaccagaagttccctctccaaatgaaaactgggtttggtgggcaatacagcaatgaggtggcatgtgccagttggaggcttggcgtggaagcaaacaacgtagtcaagtggcaaactgttcctgcagcttgcggagagt

SEQ ID NO: 199228 - DNA, 263 bp, Glycine max
tacggctgcgagaagacgacagaagggaaagagacccggaaagggtgggaaccgcttttggaaatccattgggcttggatttaagactcccagggaagccatcgaaggaacctacattgacaagaagtgccccttcactggcaatgtttccatccgtggccgtatcttggctggaacatgtcacagtgctaagatgaacaggactattattgttaggaggaattatctccattttatcaagaagtaccagaggtacgagaaaa

SEQ ID NO: 199229 - DNA, 273 bp, Glycine max
ctgcgagaagacgacagaaggggacagcagcagagcaaaagaaagaaagaaagaaagtgcaacttcctctgttttgctcccctgtttaagccttatcataagcttagaatggcacacaaggaattttccattgccctagtgactctcattgttctctttgtcaacacgaacctccaaggtgccacggctgactatggtggtggttggcagagtgctcatgccactttctatggtgcgggtgatgcttctggcacaatgggtggagcatgtggg

SEQ ID NO: 199230 - DNA, 274 bp, Glycine max
tacggctgcgagaagacgacagaaggggggtccagtgaagaaggctatggaagatgctggattacagaagagtcagattgatgagattgttcttgttggtggaagcacaaggattccaaaggtacaacagcttttgaaggactactttgatggaaaggagccaaacaagggggtcaaccctgatgaagcagttgcctatggtgctgcagtgcaaggaagcattttgagtggagagggtggtgaagaaaccaaagatatccttctcctggatgtg

SEQ ID NO: 199231 - DNA, 251 bp, Glycine max
  unsure (1)..(251): unsure at all n locations
gattgggaacttgaacctggtgtcacatgtggtgactacttgtttggtatgctacagggaacaaggtcggctttgtatgccaataaccgagagtccatcacagttactgtacaagaagggacaccaagaacagttggtgctcttattgggctctatgaacgagcagtaggaatttatgcctcccctgtcaacataaatgcttatctnaacctgcgtgtggaagntgacganatnagcagcagngaagtact

SEQ ID NO: 199232 - DNA, 277 bp, Glycine max
tacggctgcgagaagacgacagaagggaagataccaaataactaacctttaagaaggcttcaaaatcaatgtcattggtaaaatcagtgtctgattcacccaagatacccctaatctcatcctcactgtacatatctctgaatgcgtttagcttcaccatcaaaggcggcaaatctccaaatgtaactttaccattctgattctttaaagagacaaactacaacaccagatagaagggccatataaggtaaaaaaaaagagcatgaaagacaacaaa

SEQ ID NO: 199233 - DNA, 279 bp, Glycine max
gcgagaagacgacagaagggggactcattctttcttgcaaaatagcaactgatgcttctggtctgtctaagggctatggttttgttcaatttgacaatgaagaggctgcacataatgctattgacaagttaaatggcatgctgatcaatgataagcaggtctatgtaggccatttcctgcgaaagcaagatagagagaatgctctcagcaagacaaaatttaataatgtctatgtgaaaaacttatcagagtcaaccacggatgaagagttgatgataa

SEQ ID NO: 199234 - DNA, 267 bp, Glycine max
acggctgcgagaagacgacagaaggggaaggaggaggaggttctggtcttctttcttttttgtctggttccctttcttccttcaaccaatttcgagatccgaaaccggcatcagatccgatccgaaatgtacggattcgaagctctcaccttcaacatccacggcggcttcctagaggccatcgtccgcggccaccgcgccggcctcctcaccaccgccgattacaacaacctctgccaatgcgaaaccctcgacgacatcaagatg

SEQ ID NO: 199235 - DNA, 265 bp, Glycine max
acggctgcgagaagacgacagaagggggttctagtgtgtgattgtttgttgttgtaactcgttcttcttcttttgttgttctgtgtttgtgtttgttttttctctcacctgaaaatgtcttgctgcggtggtaactgtggttgcggaagctcctgcaagtgcggcaacggctgcggaggctgcaagatgtacccagacttgagctacactgagtcaaccaccaccgagaccttggtcatgggagtggcacctgttaaggctcaat

SEQ ID NO: 199236 - DNA, 269 bp, Glycine max
tacggctgcgagaagacgacagaagggggccgcaaacagagatgacgacccgattcaagaagaaccgcaagaagcgcggccacgtgagcgccggtcatggccgtatcggaaagcaccgtaagcaccccggcggccggggaaacaccggtggcatgcatcaccacaggatcctgtttgacaagtaccatccgggcttcttcggtaaggtgggaatgaggtacttccataagcttcgcaataaattctactcccccatcgtcaacgtcgaa

SEQ ID NO: 199237 - DNA, 244 bp, Glycine max
gacacaccgtttgttctattcttaactcaacttctgctacccactctcttcttccaagtccaaccacgcttttctctacagtcatgggcaaggtcaagatcggaatcaacggatttggaagaattggccgtttggttgccagagtcgctctgcaaagagacgatgtggagctcgttgccgttaacgaccctttcattaccaccgattacatgacatacatgtttaaatacgacagtgttcacgg

SEQ ID NO: 199238 - DNA, 263 bp, Glycine max
ctgcgagaagacgacagaaggggaagaaaacacaatacgaatttcattgcagagtgttattttgagtatcagcatcaatggctccaattgcagtgggaaacgtgattccagacggcattttggcttacttggatgaagaaaacaaaccccaaactgtctccattcactctctcgccaccggcaagaaagtcatcatctttggggttcccggtgccttcactcctacttgcagcttgaagcacgttcctggcttcattgagaga

SEQ ID NO: 199239 - DNA, 270 bp, Glycine max
cgataagacgacagaagggggatcaagagtttggtaatattgatcagtacaacatctatgctcctccatgcaacaactctgatggtagtagtagctctgccacccgccgcaccatgcgtttacctcaccgaccccatgtggattttaggcattggtctggttatgatccatgtacggaaaagtatgcagagatttactacaacaggcctgatgttcagaaagcacttcatgccaacaaaaccggtattccttataggtggactgcttgca

SEQ ID NO: 199240 - DNA, 275 bp, Glycine max
aaaatttctcaacaggagtacaaagccaccatgaaggctctaggcatgggggactcggttcatgaagtgccaaatattttcagggtggttgatttggatggagatggattcatcaacttcaaggaatttatggaagctcagaacaagggtggtggggttaggacgatggatatacatagtgcatttaggacgtttgataggaatggcgacggtagaataagtgctgaagaagttaaagaaacgctaggaaggctgggagaaaggtgcagcattga

SEQ ID NO: 199241 - DNA, 277 bp, Glycine max
agacaagacgacagaagggatatcatcatatataatagataattaaaaaatcatttaatatgaatttataatattaacacattagaaaaccgatacataaaactaattaaaaaagtaatatttttgaatcacatatcacattttaatataaataaaaaataatacataaaataaaataaaatgataagttcaattatttataaaaacaatatggagtatcacaaaattataaaatgaaccccttttaattcagagtcattgcacttccagatggatt

SEQ ID NO: 199242 - DNA, 272 bp, Glycine max
tgcgagaagacgacagaagggggaagttattagggtttttgagtgcggcggtccaaacactcttctctgcagcttttgcctacaactcccttcaccatggctgaacaaaccgagaaagcttttctgaagcaaccaaaagtgtttctcagcacaaagaagactgggaagggaaagagacctggaaaaggtgggaaccgcttttggaagtccattgggcttggatttaagactcccagggaagccatcgaaggaacctatattgacaagaagtg

SEQ ID NO: 199243 - DNA, 264 bp, Glycine max
tacggctgcgagaagacgacagaagggggttatggcagggtgtacagagaacggcttttgcgccagtggggaatagttgatgttaatgactgttgtagttgtgctacatatttggtggacagtggaaaggtggataaggagcggctatgtattatggggggctctgctggtgggtataccaccttggctgtccttgctttcagagatacttttcaggctggggcttctttgtatggtatagctgacttgaacttgttgagagca

SEQ ID NO: 199244 - DNA, 266 bp, Glycine max
tacggctgcgagaagacgacagaagggggaggtgaggtgaactcgtgtggggtgtggtagtgtggcagcgacacgtatcaacttcaataatcgcatcgcagaagcagtttccggtgcatctcatcgtctccgaaaatgaacgacgcagatgtctcgaagcaaatccagcagatggtgcggttcatccgccaggaagctgaggaaaaggccaacgagatctctgtctccgccgaagaggaattcaatatcgagaagctgcagttggt

SEQ ID NO: 199245 - DNA, 248 bp, Glycine max
gaagcggatggagtcgaaccgcgagtccgcacggcgatcgcggatgaagaagcagaagctgctcgaagacctatccgacgtagcgagtcgccttcaaggcgagaacgtgcgcttagcgcagagcataaaggcgaaggaggaagcgtacgttgagatcgaagccgcgaacgacatcctcagagcacagaccatggaatcgccgaccggttaaggtttctgaactccattctccgagatcgccgatgagg

SEQ ID NO: 199246 - DNA, 269 bp, Glycine max
gtgcgagaagacgacagaaggggacaacaaaaaaattcttcagttcactatatctatggcaatgttttaccaatttaggaatgctggtgtcttttttttcctttgtgttcttctcttatctggtgtgtgtgttttgggtcgaccagccacttttctacaagactttcatgtcacgtggtctgactcccacatcaggcaatttgatcaaggcagggcaatccaactcagacttgaccaaagccttccctgtgggtttgcttccaaggtga

SEQ ID NO: 199247 - DNA, 269 bp, Glycine max
aagacgacagaagggggcgcattgaacgaaaattagggtttgtagtgtagcaggaagaagcagcaatggcgccgaagataacacgtaaggttagcagaaaccctgaattgataaggggaatcggaaagtactcgaggtcgcagatgtaccacaagaggggcatttgggctatcaaggccaaaaacggtggcgttttacctcgccacgaccctaaacccaagcctgaagctcctgctgaaaaaccacccaaattttaccctgctgatgat

SEQ ID NO: 199248 - DNA, 265 bp, Glycine max
ctgccagaagacggccggaaggggagataacacaatacgaattacattgcagagtgttatgtagagcatcagcatcaatggctccaattgcagtcggacaggtgcttgcagacggcattttggcttattcagatgaagagtacaaacctcagactgtcaccaatcactctctcgccaccggcaagatagtcatcatctcaggggttaccggtgccctcactccgacttgcagcttgaagcacgttcctggcttcattgagcgagc

SEQ ID NO: 199249 - DNA, 247 bp, Glycine max
gctgcgagaagacgacagaaggggagcctcagcagaagcagaacgaggagaagcagaaggagcaaaagcaatggcgccgaagaagccgagaaccacgacaaggaaccctgatttggttagggggattggcaagtattcgaggtcgcagatgtaccacaagaggggcatctgggccatcaaggccaaaaacggtggcgttttgccccgccacgatcccaagcccaagcccgaggccccggcccagaag

SEQ ID NO: 199250 - DNA, 259 bp, Glycine max
acggctgcgagaagacgacagaaggggacaacactcatagtagagtaaccaaaaggagagtgcaataactcgttgtacattcctagtgtgtgggagagacatggctaagatgtgtgttttggtgttggttcttgctctggctgtggccacaagtgccagaaacgttcccaaccccaaggatgctggtcttaaggaccagaagaacttcatcagctatggtggagttggtggttattccgggattgggaacaatggactg

SEQ ID NO: 199251 - DNA, 264 bp, Glycine max
acggctgcgagaagacgacagaagggttcatcgatgcgattgtggaaggagaaaggctgattgtggatgtggattttagatctgagtttgagatagcgcgatcgacgggaacgtacaaggcgatgctgcaatcgctgccgttcatcttcgtcggaaactcggagaggctgacgcagatcttggcgattgtttccgatgcggcgaacagagtctaaagaagaaagggatgcacgttccgccgtggaggaagcgcgattacatgct

SEQ ID NO: 199252 - DNA, 265 bp, Glycine max
tacggctgcgagaagacgacagaagggggagcgtgtgaacaaccttgatctttcaaagggccccattgaaacaaggtcaagggataaatttgggttccaggaagagaacaaatttgattctcttaacttaagcatgttgaacctggactctaaatttactgagaatgtgagcaaaagctcgcttcgaaatggtgtttatggtatgaatgcagtgtatcagaaaaacaatgcaaacttggtgagtaatgtgatcagtaacaagtac

SEQ ID NO: 199253 - DNA, 269 bp, Glycine max
tgcgagaagacgacagaagggatgttggcatgggagtgtgtgctgagctatgtgcagataaccatgcattaacaagagacgaccaggataactatgcaattcagagttttgaacgtggaattgctgcccaagaaagtggtgccttttcatgggaaattgctccagttgaagtctctggtggaagaggaagaccatcaacagttgttgataaggatgaaggcctaggaaagtttgatgctgccaagttacgcaaacttcggccaagtttc

SEQ ID NO: 199254 - DNA, 242 bp, Glycine max
  unsure (1)..(242): unsure at all n locations
ggcatttaagaaactcaagagatagaaagaaaataaagagaaggagaagagaagaagagaaaggttgtgagagatntggggaggggtaagattgagatcaaaaggattgagaactcaagcaacaggcaagttacctactcaaagaggaagaatgggatcctcaagaaggcaaaggaaattagtgttctatgtgatgctcaagtttcccttatcatctttggtgtctccgggaagatgcatga

SEQ ID NO: 199255 - DNA, 263 bp, Glycine max
tacggctgcgagaagacgacagaagggcaggctggattgttaaagcatagaggtacatatgaaatattgtctcccgaagatattggccatgaaaagtccaatggagttaatatggtactagggaagctaagtggacgccaagctttgaaaagtcgactcaaagagcttggctatgaacttagggatgaagaagttgaaagtgtgtttaggaacttcaaagcaatagctgagaaaaagaagagagttaccgacgttgatctcaa

SEQ ID NO: 199256 - DNA, 257 bp, Glycine max
tacggctgcgagaagacgacagaagggggcacaagtgagtttgttgatcgagataactagaaacagtgtgatgaaaatgaaggtccttgttttcttcgttgctacaattttggtagcatggcaatgccatgcgtacgatatgttccctctccgaatgaacactggctatggtgcccgtactccggaggtgaaatgcgcaagttggaggcttgctgtggaagcacacaacatctttggctttgagaccattcctgaag

SEQ ID NO: 199257 - DNA, 259 bp, Glycine max
gggtgacccctctccaccttgctgccgaaggtggtcacattggagtgatggatgtactacttgagcgtggtgctgacattgatgccagaactaagggtgcctgtggctggacaccgctccacattgcagccaaggaaaggaggagggatgctgtgaaattcttgttagagaatggagccttcatgccacctgatatcagtgatagcagatttaacccaccgcttcattactgtcccgggctggaatgggcctacgagga

SEQ ID NO: 199258 - DNA, 261 bp, Glycine max
gctgcgagaagacgacagaagggggcacaagtttgttgagatagctagaagcaataagatgaaaatgaaagtgcttgttttgtttgttgctacagttttggtagcatatgaatgccatggctcagactaccagaagttccctctccaaatgaaaactgggtttggtgggcaatacagcaatgaggtggcatgtgccagttggaggcttggcgtggaagcaaacaacgtagtcaagtggcaaactgttcctgcagcttgcgg

SEQ ID NO: 199259 - DNA, 260 bp, Glycine max
acggctgcgagaagacgacagaagggggcacaagtgagtttgttgatcgagataactagaaacagtgtgatgaaaatgaaggtccttgttttcttcgttgctacaattttggtagcatggcaatgccatgcgtacgatatgttccctctccgaatgaacactggctatggtgcccgtactccggaggtgaaatgcgcaagttggaggcttgctgtggaagcacacaacatctttggctttgagaccattcctgaagagtg

SEQ ID NO: 199260 - DNA, 264 bp, Glycine max
tacgcgagaagacgacagaaggggtagattggactggcctgagggtgcaacctcaagggagagtatcaaagctgtaatgaagcttcctaggcttcagaaccttgtaatgcagcatgtagatcattcagctggcgatctcatacatctcttgcaggggttacttagatatgacccctctgaaagacttacagccaaggaagctcttagacattccttctttatgagagatcaatttagaagataattcactttctaagctgctgc

SEQ ID NO: 199261 - DNA, 280 bp, Glycine max
acggctgcgagaagacgacagaaggggggaaagatatcagaaacaagtgagagagtgggaactagccatgaccaagaacaatgccccttctaatggatgcctggacaaggttacaactttggagaagccggccatgtttgctttctgtttgaaacctaggggtctggaatcactgaacaagggattgaaacatcgatcccaaaagaagatttcagtctctgggaatgcaaacagtaatctagatcaggatggcttccacactttcagaagaagacagaat

SEQ ID NO: 199262 - DNA, 276 bp, Glycine max
acggctgcgagaagacgacagaaaggatctgtactgttgacatactcaaatattaagctaggagttttagagtgctgatctctgacaatatcaagaagcttgacaatatttgggccaccacaaaggttctgaagtatttttatctctcttttaatctgcaaaatgatgttgaagatctcagaaggtacgacaaaaatctcacaagaactgaatgcagtagtacaagaaacaccatataaccaaaaacaaaatcaaattaacacaagacttcaacca

SEQ ID NO: 199263 - DNA, 274 bp, Glycine max
acggctgcgagaagacgacagaaggggatcccaagctcacacaccaaaccaaagcaagaatagtgttctaagagtgagcaacaacttcaaacaccattgtgagaaatggcttccaagggtgcacttctcttgtgtctcaacattctcttcttcactgtggtaagctccacatatgtcccatgcaacccgccccctaaaactcctaaacacacacctgtcccaaagctaccttccccaaagcaactaagttgccccaaagacaccattaagtttg

SEQ ID NO: 199264 - DNA, 273 bp, Glycine max
acggctgcgagaagacgacagaagggggccgagaaaaccctagttcgcttgcagtcacacaagaggccaatcctattcatagctcgagatgggtgaagaagtgaaggtagttgttccagaatcagtgttgaagaagcgcaagagggaggaggaatgggcgttggccaagaagcaagaactcgatgctgccaagaagaagagagccgagagccgcaaactcatctacaacagagctaagcagtacgctaaggagtacgatcaccaggagaagga

SEQ ID NO: 199265 - DNA, 272 bp, Glycine max
cggctgcgagaagacgacagaaggggaggataaagaaggagagactggactagctgagttagggtgagttgcaggcagtgtcatctctcctttgacgacaagatgagcatcccaattccccatcggcagttattcatagacggagactggaaagtccccgtcctcaagaatcggattcccatcatcaaaccttccacccaacacatcatcccggatatcccagcagctactaaggaagacgttgatctcgctgtcgctgccgccaaagctgc

SEQ ID NO: 199266 - DNA, 280 bp, Glycine max
tacggctgcggaagacgacagaagggggcacaagtgagtttgttgatcgagataactagaaacagtgtgatgaaaatgaaggtccttgttttcttcgttgctacaattttggtagcatggcaatgccatgcgtacgatatgttccctctccgaatgaacactggctatggtgcccgtactccggaggtgaaatgcgcaagttggaggcttgctgtggaagcacacaacatctttggctttgagaccattcctgaagagtgcgttgaagcaacaaaggaat

SEQ ID NO: 199267 - DNA, 280 bp, Glycine max
acggctgacgacagaagggggaattatattgcagcgaatcacacacactctgaacaacgcccaccatgcaggccagtgataggtttaacatcaattcccagcttgagcatctccaagccaaatatgttggaactggccatgccgatttgaacagatttgagtgggcagtgaacattcaacgagatagctatgcatcatatattggacactaccctttactgggattctttgctattgctgaaaatgaatctattggaagagaacgctacagctttatgca

SEQ ID NO: 199268 - DNA, 272 bp, Glycine max
tacggctgcgagaagacgacagaagggagttcaattccaatatattccattctctctgtgtatttccctacctctcccttcaagatgcagatcttcgtcaagaccctcaccggcaagaccatcacccttgaggtggaaagctctgacaccatcgacaacgtcaaggccaagatccaggacaaggaaggaatccccccggaccagcaacgtctcattttcgccggaaagcaacttgaggacggccgtacccttgctgactacaacattcagaa

SEQ ID NO: 199269 - DNA, 268 bp, Glycine max
  unsure (1)..(268): unsure at all n locations
acggctgcgagaagacgacagaagggggcgcacccagagaggaggaagctttgagagagagagagggaggagggagagtgttgacgctccatcaagatgggtatttctagggattccatgcacaagaggcgtgccactggtggcaagaagaaggcatggagaaagaagagaaagtatgagcttgggcgtcaggccgcaaacaccaagttatcaagcaacaaaactatctttaagantcgtgttcgaggtggcaatgttaaatggaggg

SEQ ID NO: 199270 - DNA, 267 bp, Glycine max
tacggctgcgagaagacgacagaagggagaatatgaaaaagaaaaaaaagattctaaagaaatataactaatattctttagaataatcaaaaagaatattaaattcaaataaattttagatagaaaaaagacttaaaaaggaggatttgaaatgcgagatctaaaaacatatctttccgtggcaccagtagtaagtactctatggttcggggctttggcgggtctcttgatagagatcaatcgtttttttccagatgcattgatatt

SEQ ID NO: 199271 - DNA, 259 bp, Glycine max
tacggctgcgagaagacgacagaagggagagacacccggacagggtgggaaccgcttttggagatccattgggcttggatttaagactcccagggaagccatcgaaggaacctacattgacaagaagtgccccttcactggcaatgtttccatgattggccgtatcttggctggaacatgtcacagtgctaagatgaacaggactattattgttaggcggaattatctccattttatcaagaagtaccagaggtacgag

SEQ ID NO: 199272 - DNA, 271 bp, Glycine max
ctgcgagaagacgacagaagggtggagatcggtgactgaggaatacagcgacaaagtaatgggtctagcttgcaagctcatggaggtgttgtccgaagcaatggggttagagaaagagggtttaagcaaagcatgtgttgacatggaccagaaggtggtggttaattactaccccaaatgccctcaacctgacctcactcttggcctgaagcgccacacggatccgggcactatcaccttgctgcttcaggaccaagtgggtggacttcaa

SEQ ID NO: 199273 - DNA, 273 bp, Glycine max
tacggctgcgagagacgacagaagggaccgaatttaagtttcctcagataaaagcacacccatggcataaggtttttcacaagaagatgccttcagaagcagtggatctagtgtcaaggatgcttcagtattcaccgaatctacgatgcactgctttggaagcatgtgcacaccctttctttgatgatctgcgagaaccaaatgcatgcttgccaaatgggcgaccattgcctccattgttcaacttcactgctcaagaactggcggatgcac

SEQ ID NO: 199274 - DNA, 282 bp, Glycine max
tactcgacgaatcggctcagaccgagaagacgacagaacgggaggaaaagcatcaaagatgaaacccaacttttcatttttgtttaagcttttgatactgcaatatctagcagttctatccatttctcaggaatttgatttcttctactttgttcagcagtggccaggagcatactgtgacacaaagcagagctgctgttatcccaagactgggaaaccttcagcagatttcagcattcatggactttggcctaactacaatgatggatcatggccctcaaa

SEQ ID NO: 199275 - DNA, 279 bp, Glycine max
tacggctgcgaagacgacagaaggggctgccaagaattacagggaaaaaggttctgattatgctaagaacgaaattcagcgcctacagcgcattcttgacaagtccattagccctgcgaaggccgacgagttaactctaaagaaaaatatcttgtcgacatatgctgcttgacttattggtgaattgttaaccaactctcatggaagctcgtgatccaccgcagctgccgatgattgtttgactttgatatcgaaattgctgggagatattcaacgtgg

SEQ ID NO: 199276 - DNA, 256 bp, Glycine max
tgggccggtaccacatgcacctgtttatcatgccatgatattatgcataaggaacaaccttaagatttaggcagggagcatataatcataaagtcgtgtggctacctcatccatgaggagcagtccccattctctgtttcttatttcttcaatgatcttttcagattcttcagaccgcttaccaccaaaagcaaccatattatatgttgtcgcaacaactccagcattaccacggaatctctctttgctatcagac

SEQ ID NO: 199277 - DNA, 274 bp, Glycine max
caagacgacagaagggggcaccagagaggaggaagctttgagagagagagagggaggagggagagtgttgacgctccatcaagatgggtatttctagggattccatgcacaagaggcgtgccactggtggcaagaagaaggcatggagaaagaagagaaagtatgagcttgggcgtcaggccgcaaacaccaagttatcaagcaacaaaactatccggaggattcgtgttcgaggtggcaatgttaaatggagggcattgaggttggataccgg

SEQ ID NO: 199278 - DNA, 281 bp, Glycine max
tccaaagtttgtatagtgtaggatttgttggtattcgtgataaaaacacctcatcctattcattttgccatgacgggcgaactccagataaaggttttgaaagtaatgagaaattattaattcatccatgttactggcttggtttgaatctaaatcgtaatgcacttgctccagaggaagcagaggagataaatgacgaatatgatattaatattatttcagataattcagccattagaaataaaacaataggtcaaataactactcatctagatcagata

SEQ ID NO: 199279 - DNA, 270 bp, Glycine max
cggaagacgacagaagggggggaacatcgcagcaatcgggcaagatagttcagtgctacgaacctgcaactatgaaatatttgggatatgttcctgcattgacgcatgaggaggtcaaagatcgagtgtcaaaagtaaggaaggcacaaaaaatgtgggcaaagtccagcttcaagcaaagacgcttatttttgcgtatacttttaaagtatataattaaacatcaagcgcttatatgcgaaatatcttcacgtgatactggaaagacaa

SEQ ID NO: 199280 - DNA, 275 bp, Glycine max
actcgagcgaatcggctcagtacggctgcgagaagacatcagaagggggatgttgcagcttctgaattctacaaggaagacaaaacatacgatttgaacttcaaggaagataacaatgatggctcccagaggatctctggagatgctttgaaagatctgtacaagtcatttgtgtcagagtacccaattgtttcaattgaggatccatttgaccaggatgactgggagcactatgctaagctaactgctgaggttggagccaatgtacaaattgt

SEQ ID NO: 199281 - DNA, 274 bp, Glycine max
cgagaagacgacagaaggggaagcctcgcgagattccaaaccctgaatactttgaactcgaaaaacctgattttgagcccattgctgctcttggcattgagatttggacaatgcaggatggcatcctatttgacaatattctgatagctagcgatgataaagttgcagaatcctatcgggagaccacatggaagcccaagtttaccattgagaaagaaaaacagaaggctgaagatgaggctgcaactggttcagatggtattgcaggcttcca

SEQ ID NO: 199282 - DNA, 274 bp, Glycine max
cggcgcgagaagacgacagaaggggctacaaaaatccattctcaattgagaaagcgaaacgcatagaatcgaaagaggggaaaagaaaaagaaaagttagggttagggattttgagagatggcatcgactaagaagatcaccctgaagagttcggacggtgaggccttcgaggtggaggaggcggtggcgctggagtcgcagacgatcaagcacatgatcgaggacgactgcgccgacagtggaatccctctccccaatgtcaccagcaagatt

SEQ ID NO: 199283 - DNA, 272 bp, Glycine max
acggctgcgagaagacgacagaaggggactgcagaggtgtattttctcacttctcagcactcagcagcgatatcagttgaagaaacagaaacaaacaaaagaggcagaagatgttgtgggtggacaaatatcgtcccaaaaccctcgaccaggttatggtccacaccgacatcgctcgcaatctcaagaaattggtaacggaacaggattgcccccatttactcttctatggcccatctggctccggcaagaaaaccctaatcatggctctt

SEQ ID NO: 199284 - DNA, 270 bp, Glycine max
gctgcgagaagacgacagaagggagcaaccatcatgataagagttctgttgacaagagtggcaacatattgcctggcactgttgttgactccaaaatctgccatcccaccgaatttgacttttatctctgcagccatgctggaatacagggtacaagccgtcctgctcactaccatgtgttgtgggatgaaaacaattttactgctgatgccttgcaaacactcaccaacaatctttgctacacatatgctcggtgcacccggtctgttt

SEQ ID NO: 199285 - DNA, 268 bp, Glycine max; identical to SEQ ID NO: 198139

SEQ ID NO: 199286 - DNA, 267 bp, Glycine max
tacggctgcgagaagacgacagaaggggatgacagtttgtttgttctgtatgggggctactcttgctttgcttggaaaagggtcatttgcgattgcattgtctattctgtttgtttgcgggaatgtagcattcttctcagttggattaggccctgtgtgctgggttttgacttctgaaatcttccctttgcgtgtgcgtgctcaagcatctgcacttggagcttttattaatagggtctgcagcggccttgtggccatgtcttttct

SEQ ID NO: 199287 - DNA, 267 bp, Glycine max
tacgggaagacgacagaagggggcacaagtgagtttgttgatcgagataactagaaacagtgtgatgaaaatgaaggtccttgttttcttcgttgctacaattttggtagcatggcaatgccatgcgtacgatatgttccctctccgtttgaacactggctatggtgcccgtactccggaggttgtatgcgcaagttggaggcttgccgtggaagcacacaacatctttggctttgagaccattcctgaagagtgcgttgatgcaac

SEQ ID NO: 199288 - DNA, 269 bp, Glycine max
tacggctgcgagaagacgacagaaggggggaccgagttgttgaagctagagatgagttgcatagaatgttgaatgaggatgagttgagagatgccgtgcttctagtttttgccaacaagcaagatcttcctaatgctatgaatgctgcagagataactgataagcttggtcttcattccctccgtcagcgccactggtatatccagagcacatgtgccacatctggtgaagggctctatgaaggacttgactggctctcaaacaacatt

SEQ ID NO: 199289 - DNA, 271 bp, Glycine max
cgacagaagggggggatcagcagggagaattaggtttttagggtttacaccgagcagccacacctcccgcagcagccatggttctcaaaactgaactatgccgattcagtggtgccaagatctacccaggaaagggcatcagatttgttcgtggtgattctcaggttttcctgttcgcaaactcaaaatgtaagaggtatttccacaatcgcctgaagccttcaaagctcacctggactgcaatgtacagaaagcaacacaaaaaggacat

SEQ ID NO: 199290 - DNA, 285 bp, Glycine max
acagctcgagcggctcgaggtgctcgagtacggctgcgagaagacgacagaaggggacacaccatgaaggaaagtggtttcgagaataatgacacaaagcaagctgctgctgatgtgttgtttctatattcaaaatttgcaatggcatgcattggatgtaaggctcgtccatgtgatttgaggtttcatttgatgaaggagatttcaggtatgccctcttctctaaatagggagtcaccacagaatgcagcatctcctgatgcaatgggtgagtcatccagcaca

SEQ ID NO: 199291 - DNA, 272 bp, Glycine max
tacggctgcgagaagacgacagaagggggcacaagtgagtttgttgatcgagataactagaaacagtgtgatgaaaatggaggtccttgttttcttcgttgctacaattttggtagcatggcaatgccatgcgtacgatatgttccctctccgaatgaacactggctatggtgcccgtactccggaggtgaaatgcgcaagttggaggcttgctgtggaagcacacaacatctttggctttgagaccattcctgaagagtgcgttgaagcaa

SEQ ID NO: 199292 - DNA, 273 bp, Glycine max
ctgcgagaagacgacagaagggggcacaagtgagtttgttgatcgagataactagaaacagtgtgatgaaaatgaaggtccttgttttcttcgttgctacaattttggcagcatggcaatgccatgcgtacgatatgttccctctccgaatgaacactggctatggtgcccgtactccggaggtgaaatgcgcaagttggaggcttgctgtggaagcacacaacatctttggctttgagaccattcctgaagagtgcgttgaagcaacaaagg

SEQ ID NO: 199293 - DNA, 199 bp, Glycine max
tgttccatgtggatgtgggttgtccttgtggccattgctggtgcccttttagtcctaagatctatcctcaagaatgtaaattggtggctctatgaatccaaattgggtgtgaagcagtactctttgccaccaggtgacatgggatggcccttcattggcaacatgtggtccttctcagtgctttcaagtccaaggaccc

SEQ ID NO: 199294 - DNA, 272 bp, Glycine max
cgagaagacgacagaagggggagagtcagattcgctcgccttgcttcgccacacaacagcaactgcagcaatggctcccaaacgaggtggaaaggctccggctcttgccgctaagaagaagcctgagaaggtttcgaatccgttgttcgagaagcgtccaaagcagttcggaatcggaggggcgttgcctccgaagagagacttgactcggttcgtgaagtggccaaagaatgttcaaattcagaggaagaagaggattctgaagcagaggt

SEQ ID NO: 199295 - DNA, 270 bp, Glycine max
tacggctgcgagaagacgacagaagggggtctcgtggaagtgtaagcaagcaaaaccctagcggcgcctgctttctttgttcgtgttttgcatcaggatggagtctcaggtgaagcacgcacttgttgtcaaagttatgggtcgtactggatccagaggacaagtgacccaggttagagtgaagtttttggatgatcagaaccgtcacatcatgaggaatgtgaaaggacctgtgagagaaggagacattctcaccctactcgagtctga

SEQ ID NO: 199296 - DNA, 280 bp, Glycine max
tacggagaagacgacagaagggatcagtggtgccccccaggataacaacataatgctgtggaatgctgtcatatttggtcctgatgatactccatgggatggaggcacgttcaagttgacactccaatttactgaggactatccaaataaaccaccgactgtacgatttgtgtctcgcatgtttcatccaaatatttatgctgatggaagtatttgtttggatatattacaaaatcagtggagtcctatttatgatgtggctgctatactcacatctatc

SEQ ID NO: 199297 - DNA, 274 bp, Glycine max
acggctgcgagaagacgacagaagggtaagaagggagacaaggttggatcttctgaagctgcattgcttgccaagctagggataaggcccttctcgtatgggcttgtggttctttctgtttatgataatggttcagtgttcagtcctgaggttcttgatcttactgaggatgaccttattgagaagtttgctgctggtgtctcaatggttacttcactttcattagctatctcatacccaacacttgctgctgcaccacacatgtttgtcaatg

SEQ ID NO: 199298 - DNA, 264 bp, Glycine max
  unsure (1)..(264): unsure at all n locations
agaagagggaagcctcgcgagattccaaaccctgaatactttgaactcgaaaaacctgattttgagcccattgctgctcttggcattgagatttggacaatgcaggatggcatcctatttgacaatattctgatagctagcgatgataaagttgcagaatcctatcgggagaccacatggaagcccaagtttaccattgagactactnaacagaaggctgaagatgaggctgcaactggttcagatggtattgcaggcttccag

SEQ ID NO: 199299 - DNA, 269 bp, Glycine max
cggctgcgagaagacgacagaagggtgaagagaggctggccaagggtcaaagaattatcaatgaaagagagcaaagggctaatgagaatgacagactatgcagacagaaagggaaggaccttgaagaggcacagaagaagattgatgaaactaatataacactgagaaataaagaagatgatgttaacaataggattgtgaatattactctaaaagagaaggaatatgattctctgagaacaaacttggatctcaaagagaaggagtta

SEQ ID NO: 199300 - DNA, 267 bp, Glycine max
tacgctgcgagaagacgacagaagggggcctcatcgatagtttcaagtctcgttttgacaatggtgagggttagtgtgttgaatgatgctctgaagagcatgtacaacgccgagaagcgcgggaagcgcaggtcatgattaggccatcctccaaggtcatcataaaattcctattggtcatgcagaagcacgggtacattggtgagttcgagtatgttgatgaccacagggctgggaaaatcgtggttgaattgaatgggcggctga

SEQ ID NO: 199301 - DNA, 269 bp, Glycine max
actgcgagaagacgacagaagggggaaaaagggagtgcctgataacccataaccgaccgcaccaccgttttcctttgctttgcgttctacaatgtcgaaaacctcagagattattacatgcaaagctgctatttgctggggaataggacaacctgtgactgtggaagagatacaagtagaccctcccaaagccaccgaagttcgagttaagatgctttgtgccagtatatgctccacagacatctctagcacaaaaggattcccacata

SEQ ID NO: 199302 - DNA, 281 bp, Glycine max
gcgagaagacgacagaagggctacgaaggttatgccctcccacatgcaatcctgcgtttggaccttgcagggcgtgatctcactgatgccctcatgaaaatcttgactgagcgtggttacactttcaccacatctgcggaacgggaaattgtgagggacatgaaggagaaactggcctacattgctctggattatgagcaggagttggaaactgccaagaccagttcagctgttgaaaagagctatgagctacctgatgggcaggtgatcacgattggcgc

SEQ ID NO: 199303 - DNA, 275 bp, Glycine max
tacggctgcgagaagacgacagaagggagataatggcgaaacggtttcagcctcacaaaagttccgacggtttatgatttatgtacatgccaaaggaatgattgtggatgatgaatatgtaattcttgggtctgccaatataaatcaacgatctttggctggatccagagatactgagatataaatgggtgcatatcaaccccatcatacatggagtcaaaaaaagggacatccacatggtcaggtatatgggtatagaatgtctttgtgggcag

SEQ ID NO: 199304 - DNA, 276 bp, Glycine max
acggctgcgagaagacgacagaaaggagaaaaaggaataggagatggcacagttagttatggaatggatgatggtgatgacatttacatgcgctcttggactggaaccattattggtccctataatactgtacatgaaggaagaatttatcaattgaagctgttttgtgataaagactaccctgaaaagcccccgagcgtccggtttcattcacggatcaatatgacttgtgttaatcatgaaactggagtggttgaatcaaagaaatttggtctt

SEQ ID NO: 199305 - DNA, 272 bp, Glycine max
tacggctgcgagaagacgacagaaggggagagaaagagagagaaagatgtcgaagcgtggtcgtggtggttcggcggggaacaagttccgcatgtcgctgggtcttccagtggcggcgacggtgaactgcgccgacaacacgggggcgaagaacctctacatcatttcggtgaaagggatcaaaggccgtttgaaccgtcttccctcggcctgcgttggcgacatggtgatggccaccgtgaagaagggaaaacccgatctgaggaagaagg

SEQ ID NO: 199306 - DNA, 274 bp, Glycine max
tacggctgcgagaagacgacagaaggggggggaagaaggaaagaaagatgagcgtgaagttgaattgcgtgggtggtggcgagactcacaacgtcttcgtttacggtagtctgttagccgatgaggttgtccataccctattgaagcacgtccctccaaccgcacccgccatccttcacgactatcacaggtttaagatcaaaggtcgcgtttatcccgctattctccccgtccaaaacaacaaagttaatggcagggtgcttcttggtatctc

SEQ ID NO: 199307 - DNA, 274 bp, Glycine max
tacggctgcgagaagacgacagaagggggcatatccaaaggaacaaaaatattattaagatgatcaacattattggagcacttgttctactctttgcatttctcttcctcagttgtgtgtatgcacaagacacaacaacccttgtgcctgcaatcataacttttggtgattctgctgtggatgtagggaacaatgactatcttcccacccttttcaaggctgattaccctccttatgggagggactttgttaaccaccaacctactgggaggtt

SEQ ID NO: 199308 - DNA, 272 bp, Glycine max
acggctgcgagaagacgacagaagggggtaacgactcagtcaaacactctgtaactctttattttattttctttctttctttctccgatcgcatagctcgctcgcaaccaccatgccttcccgaagaagaactctcttgaaggtcatcattctcggtgacagtggggtggggaagacatctttgatgaaccaatatgtgaataagaagtttagtaatcagtacaaggcaaccattggagcggattttttaaccaaagaagtgcaattcgaag

SEQ ID NO: 199309 - DNA, 275 bp, Glycine max
acggctgcgagaagacgacagaagggaactgttgttgagggaactatacagaagctatttgaagggcatcatatgaattatatcgaatgcatcaatgtggactataaatcaactagaaaggagtcattttatgaccttcagcttgatgtgaaggactgtcctgatgtttatgcttcctttgacaagtatgttgaagttgaacgtcttgaaggggataacaaatatcatgcggaacaatatggtttgcaggatgctaagaagggtgtcctgttcat

SEQ ID NO: 199310 - DNA, 276 bp, Glycine max
acggctgcgagaagacgacagaagggactattagctagtgtatatcaccttacgagactagagtatggtatagatcaacccgaagaggtctgcataaaaatatttgtcgcaagaaaaaatcccagaattccttccattttctgggtttggaaaagtgcggattttcaagaaaaggaatcttatgatatgttgggaatctcttatgataatcatccgcgtctgagacgtattttaatgcccgaaagttggataggatggcctttgcgtaaagattat

SEQ ID NO: 199311 - DNA, 271 bp, Glycine max
acggctcgagaagacgacagaagggggtgcacaagtgagtttgttgatcgggataactagaaacagtgtgatgaaaatgaaggtccttgttttcttcgttgctacaattttggtagcatggcaatgccatgcgtacgatatgttccctctccgaatgaacactggctatggtgcccgtactcacaaggtgaaatgcgcaagttggaggcttgctgtggaagcacacaacatctttggctttgagaccatttatgaagagtgcgttgaagca

SEQ ID NO: 199312 - DNA, 274 bp, Glycine max
cacaaaaggcacctccacctattgaagctccagccttatctttagatgagctgaaggagaagacagacaactttggttcaaaggcattaataggtgaaggatcgtatggaagggtgtattatgcaaccttaaacaatggaaaagcagtggctgtgaaaaagcttgatgtttcatctgaacctgaatcaaataatgagtttttgacccaggtttccatggtctcaagattgaagaatggcaattttgttgagttgcatggttactgtgttgaagg

SEQ ID NO: 199313 - DNA, 273 bp, Glycine max
tacggctgcgagaagacgacagaaggggactcaaattttttctagagcgagaaagtgagaggggagagaaagtagcagatcctccatggcctccaccaaggaacgtgaaaacttcgtctacgtcgccaagctcgccgaataagccgaacgctatgaagaaatggtggaagcaatgaagaatgtggcgaactaaacgtggaattgacggtagaggagcggaaccttctgtcggttgggtacaagaacgtggtgggtgctcgtagggcttcgtgg

SEQ ID NO: 199314 - DNA, 275 bp, Glycine max
acggctgcgagaagacgacagaagggggctgacaagccaatcctttgtgtaggtgctcaaccctagtaagccgcaatggtgaagtactcaagggagcctgacaatccaactaagtcttgcaaggctagaggcgccgaccttagggttcattttaagaacacaagggcaactgcctttgcaatcaggaagttgcccttggtcaaagctaaaaggtacttggaagatgttcttgcccacaagcaggcaattccattcagacgtttttgtcgaggtgt

SEQ ID NO: 199315 - DNA, 254 bp, Glycine max
tcgatcacttggggtgttaagaaatttaagtgaggagctagagaatgatgatgaagtctgatatgtgtgcagtggtggttgtagcagttcttcttctggcggaggtggggctcatggctgaggctgtgatatgcactccaacagagttgagatatagtcttccagcaatcacttccggtgctaaaccttccaatgcttgttgcacgaagctgaagcagcaagaaccatgcttatgtggctacctcaaaaacggt

SEQ ID NO: 199316 - DNA, 270 bp, Glycine max
tacggctgcgagaagacaacagaagggggcgtgagtcgagggtgttcaccacagtttacactcacgagagtacccattttctcttctcaatttctcaagtgtgccgagaaaatcatggtggacgcagcagaacgtagatacttggaggatgatgattcatctctcatgaaaactatcaagggcgcaacaactggtttagtggctggaactatctggggtactgtagttgccacctggtatgatgtcccccgtgtcgagagaaatgttgct

SEQ ID NO: 199317 - DNA, 271 bp, Glycine max
acggctgcgaagacgacagaagggtccttttattggaactttgtttctatttatttttgtttctaattggtcgggggctcttttaccttggaaaatcatacaattacctcacggggagttagctgcacccacaaatgatataaatactaccgttgctttagctttacttacatcaattgcatatttctatgcgggtctttcaaaaaaaggattagcttattttaataaatacatccaaccaaccccaatccttttaccgattaacatctta

SEQ ID NO: 199318 - DNA, 273 bp, Glycine max
tacggctgcgagaagacgacagaagggggggtgccattgttgctgtcatcatccgcagctgctgttattcgcaccgcaaacaaacagtgagccatggccgtcggaaagaacaagcgcatctccaaagggaaaaagggtggcaagaagaaggcagctgatccctttgccaagaaggattggtatgacattaaggccccttctctttttcaagtgaaaaatgtttgcaaaacccacctacctcgtacgcagggtatcaagattgcttctgaagga

SEQ ID NO: 199319 - DNA, 269 bp, Glycine max
acggctgcgaaaagacgacagaagggggcatcaattcaaaatatatcatcaattataagcatgggtttgtggaacacaacgaatgcagtgtcttgccgctttcacaagtttggtgatgaccaaaagaatctggtcttccaaggtgatgccacgtcttcttccaggggcatagaactcaagaagttagacggtggaggaaaaccagtgggtggcagtgtggggagagtgttatactcttctccagtgcacctttgggaaagctctacagt

SEQ ID NO: 199320 - DNA, 275 bp, Glycine max
acggctgcgagaagacgacagaaaggagaaaaaggaataggagatggcacagttagttatggaatggatgatggtgatgacatttacatgcgctcttggactggaaccattattggtccctataatactgtacatgaaggaagaatttatcaattgaagctgttttgtgataaagactaccctgaaaagcccccgagcgtccggtttcattcacggatcaatatgacttgtgttaatcatgaaactggagtggttgaatcaaagaaatttggtct

SEQ ID NO: 199321 - DNA, 270 bp, Glycine max
acggctgcgagaagacgacagaagggggaacggaaaagcactggcgcactaccctgaggcttctcttctcttctcttctctgtcgtgagtcaccatggtgagggttagtgtgctgaacgatactctgaagagcatgtacaatgctgagaaaaggggaaagcgccaagtcatgattaggccatcctccaaagtcattatcaaattccttttggtgatgcaaaagcacggatacatcggagagtttgagtatgttgatgaccacagggctgg

SEQ ID NO: 199322 - DNA, 268 bp, Glycine max
tctcgagcgaatcggctcagacggctgagaagacgacagaagggaccctgaaataatgaattgagttcgtataggcattttggatgatgctattgaaatagcctttcttgctatattttctggtaccccacccatttcataaagtattttcatgggtttaacgacagctacccaatattcgggagaaccttttcctgaacccatacgtgtttcagtaggtcttactgtaaccggtttgtctggaaatatgcgtacccatatttgtcca

SEQ ID NO: 199323 - DNA, 271 bp, Glycine max
cggagaagacgacagaagggggtgcaattgaaagagagatttgatagcctcaactcaagtaagggttttctctttgagaaaatcgtatcttacaccttttggtgaccactttgagtgagagaagagaaattaagagagatactcaaattagattcaagagagatggccatcaaccatgaaacttgggctttcattttcggtcttctaggcaacgtgatctcctttatggtgttcctcgctccattaccaactttttaccaaatctacaaga

SEQ ID NO: 199324 - DNA, 273 bp, Glycine max
tacggctgcgagaagacgacagaaggggactcgcagttgtattgttgaacaagggtttctctgtctgcttcttcactttctctcgtttcaatcgaaaccaaaacaaaaacatgggcagaaaattcttcgtcggtggcaactggaaatgcaatgggaccactgaggaggtaaagaagattgttactactttgaatgaggctaaagtccctggagaagatgtcgtagaagttgttgtgagccccccctttgtggtccctcctcgtggtaaaaagt

SEQ ID NO: 199325 - DNA, 271 bp, Glycine max
ctgcgagaagacgacagaagggatcgactcaacgaacacttccaagagttgggaaacgcgttagatcctgatagaccaaagaatgacaaggcaactatcctcactgagaccgtccaaatgctaaaggacttaaccgctgaagttaataggcttaaaacagagcataaaacactttctgaagagtcacgcgaactaatgcaagaaaagaatgaactcagagaagagaagacatctcttaaatctgatatagaaaatcttaatgtgcagtatc

SEQ ID NO: 199326 - DNA, 243 bp, Glycine max
tacggctgcgagaagacgacagaagggggaagagatagaagcttacttggagagctaagttgggttaaaaagaggcgattccaggtggagagatcgtatgctgcaagcgcaccgtatcgattaccgatgacgtcagcgttaacaacgaggactcgatctctgggtgggtcaatggcgatgcccaatgacgcatttccggccaagtgtgcatctctgaccaccgtgacttccacacaacatacg

SEQ ID NO: 199327 - DNA, 270 bp, Glycine max
aagacgacagaaggggaaaataaatcttttgaattgattgttgtaagactttgtaattgaggtgctgcaatggcttcaagtcaggaagaggtgactcttttgggagtaattggaagcccatttgcttgcagggtgaagattgcccttaagttgaagggagttgaatacaaatatgtggaagaaaatttggccaacaagagtgatttgcttctcaaatccaacccagttcacaagaaagttccagtttttattcacaatgagaagcccata

SEQ ID NO: 199328 - DNA, 273 bp, Glycine max
acggctgcgagaagacaacagaagggcaatggagatggattcaaactatcgattccctcaaagtggaacccaagcaaagaggttgagtacacaggtcaggttgttagatatgaggataactttgattcaaccaccaacgtggttgtcaccatcactccgactgataagaagtctatcactgactatggttcacccgaagagttcctctctaaggtggattatttactaggaaaacaggccttcttcggcgaaacacaagccgagggtggtttt

SEQ ID NO: 199329 - DNA, 271 bp, Glycine max
tactcgagccgctcgagtacggctgcgagaagacgacagaaggacgaaaaagcttgaagctattgttacatcatcccacaactgtgatgttccacatgtgaatcgcactgactatcagcttattgatatctctgaagacggctttgtgagtctgttgactgataatggaaataccaaggatgatctgaagcttcctactgatgaggcattgcttgctcagattaaagatggattttctgaaggaaaagatcttgtggtttctgttatgtct

SEQ ID NO: 199330 - DNA, 271 bp, Glycine max
cggctgcgagaagacgacagaaggggaccacagagagagaggttttgatgcaacgctgtcactgagaaaggatctctatctacgaaggagcggaataaaacccttctctctgtgattaagagaatggcttcagatcggaaacttcacacttttgaggaggtggcaaagcacaaccagaccaaggattgctggctcatcatttctggcaaggtgtatgatgtcacccctttcatggaggatcatcccggaggtgatgaggttttgttatctg

SEQ ID NO: 199331 - DNA, 271 bp, Glycine max
tacggctgcgagaagacgacagaagggtgaagagaggctggccaagggtcaaagaattatcaatgaaagagagcaaagggctaatgagaatgacagactatgcagacagaaagagaaggaccttgaagaggcacagaagaagattgatgaaactaatataacactgagaaataaagaagtggatgttaacaataggattgtgaatattactctaaaagagaaggaatatgattctctgagaacaaacttggatctcaaagagaaggagtta

SEQ ID NO: 199332 - DNA, 269 bp, Glycine max
acggctgcgagaagacgacagaagggggctgcgaaacagaaatcgaatcagagacggtggtctggtgtgtgtgggcgcagtgtagagacgaaggtgtggcctgagtattggaatgaaaatggaattgagaaatgtggtgaaggacaagaaattctggatggcatctttccttattgcctgggccgctgctcttcagggtcacatgatgtggttacagcgccaggattccttcaaacataaattcggtaaccccgacgaccatcctcata

SEQ ID NO: 199333 - DNA, 268 bp, Glycine max
acggctgcgagaagacgacagaagggggatttcatttcgtttgcaattgaatttcaatttccctaggggcttaatatctcccctcacttgtgcctagccttatgtcatagtattatcattcattctcatctttctctcttctctctccacccaaaccctaactcccgaccctgttcgtctctcgtatccgtcatgaaaggaggaaagtccaagaccgaatctaagagagccgatcccaaacttgctgtgaataagaagggagccgcca

SEQ ID NO: 199334 - DNA, 269 bp, Glycine max
cgagaagacgacagaagggggagagaagttattagggtttttgagtgcggcggtccaaacactcttctctgcagcttttgcctacaactcccttcaccatggctgaacaaaccgagaaagcttttctgaagcaaccaaaagtgtttctcagcacaaagaagactgggaagggaaagagacctggaaaaggtgggaaccgcttttggaagtccattgggcttggatttaagactcccagggaagccatcgaaggaacctatattgacaag

SEQ ID NO: 199335 - DNA, 270 bp, Glycine max
aagacgacagaagggggaggcaacaaaggagttgtaaattaagagcatggctgcacaagctcttgtaccatcatcatctcttaccttctcagccgaggctacaagacaaagtcttggaccaagattactccaatctccatttggcttctcaagaaaagcctcctttcttgttaaggcagctgctactccccctgtcaagcaaggatcagacagacctttgtggtttgcatcaaagcaaagtctttcctacttggatggcagccttccggg

SEQ ID NO: 199336 - DNA, 273 bp, Glycine max
ctgcgagaagacgacagaagggggttttgttctgtttcgcgtgaacttaaacaatgaagactgcaaagggcaagggagcagcgaggccctcaaaagaatcaccgaagcctgttgatgaccgaaaggttggaaagcggaaggcttctggtaagcctgagaaaagcagagcaccaaagaaggagaagaaggccaagaaagaccccaacaagcctaaaagaccaccgagtgctttcttcgtgttccttgaggagttcaggaagacctttaaggctg

SEQ ID NO: 199337 - DNA, 251 bp, Glycine max
aagaagctggagtagacgacagaagggaagcaggcggtggagccggagcttgaggatgaggacgtggaggggtatgttccggaggcgatgttcgacgaggcggacactggaaggaagaggaagaaggggaaggagggtgggagtgggaagaaggagaagaggatgaagggggagaagagttttgggagcagcggtgggaagagtgggtccaaatttgggagtggaaagaaagggtttggtgggaaaggaag

SEQ ID NO: 199338 - DNA, 284 bp, Glycine max
cggctgcgagaaacgacagaagggggcccaaattttttcatagcactttcagaggaacaatggcgggtagggtttcgacgtgcttcttcttcgtgtttgctctttctctccttcttccttttcagatctccgctgaggaatcatcggagaaagagttcgtactcacattggatcactctaactttcatgacactgtcagcaagcacgatttcatcgtcgtcgagttctacgctccatggtgtggccactgtaagaagcttgctcccgagtatgagaaagctgct

SEQ ID NO: 199339 - DNA, 271 bp, Glycine max
acggctgcgagaagacgacagaagggggagaaggctcattgaacaagcaaaattaagcacaaaagcccaaccctctctctcgctgctggtctcccccatttggcattcgcagatcgaatacgagtaatttcactgaatcttattgaagatgtttctcacaagaactgagtacgaccgaggagtcaacaccttttctcctgaaggccgtttatttcaggttgaatatgcaatcgaagccgtcaagctgggatcaactgcgattggattgaag

SEQ ID NO: 199340 - DNA, 267 bp, Glycine max
tctcgagcgctcgagtacggctgcgagaagacgacagaaggacgaaaaagcttgaagctattgttacatcatcccacaactgtgatgttccacatgtgaatcgcactgactatcagcttattgatatctctgaagacggctttgtgagtctgttgactgataatggaaataccaagttacatctgaagcttcctactgatgaggcattgcttgctcagattaaagatggattttctgaaggaaaagatcttgtggtttctgttatgt

SEQ ID NO: 199341 - DNA, 268 bp, Glycine max
tacggctgcgagaagacgacagaagggcattctggaatgtgatcaatataacaaagctgattttccagaagaatatactgatgccaaattttttgtcatcaagtcttacagcgaggatgatatccataagagtattaagtataatgtgtgggctagtacacaaaatggcaacaagaagcttgatgctgcatatcaggaggcacagcagaaacctggcggcacccctgtttttctctttttctcagttaataccagtgggcaatttgtg

SEQ ID NO: 199342 - DNA, 271 bp, Glycine max
ctgcgagaagacgacagaagggggaaaaagggagtgcctgataacccataaccgaccgcaccaccgttttcctttgctttgcgttctacaatgtcgaaaacctcagagattattacatgcaaagctgctatttgctggggaataggaaaacctgtgactgtggaagagatacaagtagaccctcccaaagccaccgaagttcgagttaagatgctttgtgccagtatatgctccacagacatctctagcacaaaaggattcccacatacca

SEQ ID NO: 199343 - DNA, 269 bp, Glycine max
tacggctgcgagaagacgacagaaggggagagtggtggagtgtgcaaaagagcgtcgtagtcgcaaccctaatcagaagaagcgcagcttcaagcgagtgacagccaccagccatgggtcgtatgcacagccgcggtaagggtatatcctcttctgctttgccctacaaaaggacacctcctagctggctcaagatctcttcgcaagatgtcgaagaaaatatctgcaagtttgcgaagaaaggtttgaccccgtctcagattggtgtc

SEQ ID NO: 199344 - DNA, 272 bp, Glycine max
cggctgcgagaagacacagaagggagggttcaaaagaattcaagatgagcatgataagcacgaagaaagtattatgtaattacaagataaacttggcgtgactagtaaagaaaataagctatgaaagtaagcaagaaattaaaatgcaagaaatgtaaactaggcggatcctaggagtgtttagatgactgcatttaaggttcccaacagaacactcattatccttagggaaaattgcctaaaattatttgacacaaatggaagtttggaaa

SEQ ID NO: 199345 - DNA, 268 bp, Glycine max
ctgcgagaagacgacagaagggtccgacctgaaagttttcttggtgaaggtgggtttggttgtgttttcaaggggtggattgaagaaaatggaactgctccagtgaaacctggcacaggacttacggttgctgtaaaaaccctaaaccatgatgggctccagggtcataaagaatggctggctgaagtgaattttcttggtgacctagttcatccaaaccttgttaaacttgtaggttactgcattgaagaggatcaaaggtcgctag

SEQ ID NO: 199346 - DNA, 270 bp, Glycine max
acggctgcgagaagacgacagaagggggcacaagtgagtttgttgatcgagataactagaaacagtgtgatgaaaatgaaggtccttgttttcttcgttgctacaattttggtagcatggcaatgccatgcgtacgatatgttccctctccgaatgaacactggctatggtgcccgtactccggaggtgaaatgcgcaagttggaggcttgctgtggaagcacacaacatctttggctttgagaccattcctgaagagtgcgttgaagca

SEQ ID NO: 199347 - DNA, 271 bp, Glycine max
acggctgcgagaagacgacagaagggatcagtggtgccccccaggataacaacataatgctgtggaatgctgtcatatttggtcctgatgatactccatgggatggaggcacgttcaagttgacactccaatttactgaggactatccaaataaaccaccgactgtacgatttgtgtctcgcatgtttcatccaaatatttatgctgatgggaagtatttgtttggatatattacaaaatcagtggagtcctatttatggtgtggctgcta

SEQ ID NO: 199348 - DNA, 272 bp, Glycine max
cggctcgagcggatcgagcggctcgagtacggctgcgagaagacgacagaaggggacacaccatgaaggaaagtggtttcgagaataatgacacaaagcaagctgctgctgatgtgttgtttctatattcaaaatttgcaatggcatgtagaggatgtaaggctcgtccatgtgatttgaggtttcatttgatgaaggagatttcaggtatgccctcttctctaaatagggagtcagcacagaatgcagaatctcctgatgcaatgggtgag

SEQ ID NO: 199349 - DNA, 260 bp, Glycine max
tgaagacgacagaagggggatgcacaagtttgttgagatagctagaagcaataagatgaaaatgaaagtgcttgttttgtttgttgctacagttttggtagcatatgaatgccatggctcagactaccagaagttccctctccaaatgaaaactgggtttggtgggcaatacagcaatgaggtggcatgtgccagttggaggcttggcgtggaagcaaacaacgtagtcaagtggcaaactgttcctgcagcttgcggag

SEQ ID NO: 199350 - DNA, 252 bp, Glycine max
acgcgagaagacgacagaagggggacaaagttgtgtttcaatggacaataataatattctgggtcttctcaagcttcgaattaaaagaggcattaatcttgccattcgcgatgctcgtgccagcgatccttatgtcgttgtcaacatgggcgatcagaagctgaagactcgtgtcataaaaaaaaactgcaatcctgactggaatgaagaattgaccctctctgtaaaggacattaaaaccccaatacatct

SEQ ID NO: 199351 - DNA, 263 bp, Glycine max
tcagataggaagggctgtttcacaaaatgtacttctaagtaattgctccatagatcctatttctatctatatgaagaagaaatcatgtgacgggggggattcttatttgtacaaatggtacttcgaacttggaacgagtatgaagaaattaacgatacttctttaccttttgagttgttctgccggatcggtcgctcaagacctttggtctctacccggacctgatgaaaaaaatgggatcacatttatggactcgttgagaa

SEQ ID NO: 199352 - DNA, 239 bp, Glycine max
agaggagcacttgtgcttcagaacacttcagcgcttcactgctgctacacttgagcatggaatgcaccctcctgtggcaccaaaaccagagtggcgtgccctcatggatgagatggctgtcattgctacagaggagtatcgctccattgttttccaggaaccccgtttcgttgagtacttccgatgtgctacacctgagctggagtatggaagaatgaacattggcagtcgtccgtcaa

SEQ ID NO: 199353 - DNA, 262 bp, Glycine max
tacggctgcgagaagacgacagaagggatcagtggtgccccccaggataacaacataatgctgtggaatgctgtcatatttggtcctgatgatactccatgggatggaggcacgttcaagttgacactccaatttactgaggactatccaaataaaccaccgactgtacgatttgtgtctcgcatgtttcatccaaatatttatgctgatggaagtatttgtttggatatattacaaaatcagtggagtcctatttatgatg

SEQ ID NO: 199354 - DNA, 259 bp, Glycine max
acggctgcgagaagacgacagaaggggtaacaaaatggatgctactacacccaagtattccaaggccaggtatgatgaaattgtgaaggaagtctcttcctacttgaagaaagtaagatacaaccctgacaagattccttttgttcctatctctggttttgagggagacaacatgattgagagatccacaaaccttgactggtacaagggtccaactctgcttgatgcacttgaccagattagtgagcccaagaggccc

SEQ ID NO: 199355 - DNA, 260 bp, Glycine max
cggctcgaggggggcgaggaagccacatagagacacaatacagagtgagttgttgctccttcgccacaactctctgccaacatgggtatctccagagattctatgcacaagaggcgtgccactggtggcaagaagaaggcctggaggaaaaagagaaagtatgagcttggtcgccagcctgctaacactaagctgtcaagcaacaagacagtcaggaggatccgtgttagaggtggaaatgtgaaatggagggcattgag

SEQ ID NO: 199356 - DNA, 264 bp, Glycine max
tctcgagcgaatcggctcagtacggctgcgagaagacgaacataaggggggaggagacaagagaaagaaggaaggagacatttataaaaagctctttcccttcccctaaatccctcacactcattccatttttacctttctctctcgctcgcaaacgcaaataataaaaaacaaggttttagccatggcatcgaagcggatcttgaaggaactcaaggatctccaaaaggatcctcctacctcatgcagcgccggtcctgttgc

SEQ ID NO: 199357 - DNA, 255 bp, Glycine max
acgacagaagggatatttgatcttggttctgcacagcttgcagaggttttctctaaggatggaatgtcctttatggctagttgtcaaaatctcgttcctcgaccttgggtcattgatgatcttgacactttcaaattgaaatggagcaagaataatggaagaaggttatcatatttgttgataactctggtgcagatatcattttgggtattatgccatttgcaagagaactacttcggcgtgggagtcaggttg

SEQ ID NO: 199358 - DNA, 261 bp, Glycine max
acgctgcgagaagacgacagaaggggccagctgggctacatcctttaaattcaacattttcgcacccaacaaatcaaactcagctgacgggcttgccttcttcttggcacccgtcgggtctcatccccaatccgacgatggatttcttggtcttttcaacagtcccttaaaggacaagtctctccaaaccgtcgcgattgagttcgatactttctcgaacaaaaaatgggatcctgattaccgacacatcggcattgacgt

SEQ ID NO: 199359 - DNA, 257 bp, Glycine max
tacggctgcgagaagacgacagaaggggatcatggatttggggtggagctatataatgcaacagcgtttaatgaatgggttgaccttggcgaggcaccggcactgccagagagtctcaaactgtacaataaactgtagtctcttggcatcaaaattgtattcataacaggaagaccactgtatcaacaggctgtaactgctaccaatttaaagcttgcgggatactacaatggggaaagttaattaccaagggtaca

SEQ ID NO: 199360 - DNA, 265 bp, Glycine max
tgaagacgacagaagggggtagtggttgggtttgaggatgagtttcagggaagagagtggcgatgcgaggggtcttcagaaaccgttcctccacacggggagttggtacaagatgggttccaggcagtccagcatcatgggatcctccactcatgtcatccgcgacggcgccgtctccgtcctcttctgcgtcctcatcgtcgcattgggtcccatccaattcggcttcacgtgtgggtattcttctccaacccaaggggctata

SEQ ID NO: 199361 - DNA, 259 bp, Glycine max
tacggctgcgagaagacgacagaagggaaagagacccggaaagggtgggaaccgcttttggaaatccattgggcttggatttaagactcccagggaagccatcgaaggaacctacattgacaagaagtgccccttcactggcaatgtttccatccgtggccgtatcttggctggaacatgtcacagtgctaagatgaacaggactattattgttaggaggaattatctccattttatcaagaagtaccagaggtacgag

SEQ ID NO: 199362 - DNA, 256 bp, Glycine max
gttcccttccatcctggaagagaggacaaacctgagccaccaccagagggtcgcttgcccgatgccactaagggttctgaccatttgagagatgtgtttggcaaagctatggggcttagtgaccgagatatcgttgctctgtctgggggtcacactattggagctgcgcacaaggagcgttctggattcgagggtccctggacctctaatcctcttattttcgacaactcatacttcaaggagttgttgagtggtg

SEQ ID NO: 199363 - DNA, 258 bp, Glycine max
cgagaagacgacagaaggggaacacaaacagcagcgtcttggtttgtgagagagacagaggcacagagagaaaatggtttcggggtcaggaatctgcgcgaagagggtagttgtggacgcgcggcaccacatgctggggaggctggcatcgatcgtggcgaaggaacttctgaatgggcagaaggtggtggtggtgcgctgcgaggagatttgcatctccggtgggctcgtccttcctaagatgaagtacttgcgttt

SEQ ID NO: 199364 - DNA, 260 bp, Glycine max
tacggctgcggacgacagatagggaccacactcatcacaaccactcttaatttctctctgccttgctcatttacacacctctccaacctttcactttcagctttatttgaatccctctctctcctttccaaatggccagcgttgaggttgcacatcaaacaccaacaacagttccagaaaatgaaacaaccgaggtaatcaagacccaggaaacaaccccggaaccagtaccagccactgaggctcctgcaacagaacaa

SEQ ID NO: 199365 - DNA, 221 bp, Glycine max
tctcgagcgaatcggctcgagtacggctgcgagaagacgacataaggggaaaatcgagaagaagaagaagaagaagatggagaagtatcagatctggagcaggagaatagcgttggcagcgtttgcgtttgctctgctgttccaatcggcctcagcagacgacgtcgttgtgctctctgaagataacttcgagaaggaagttggtcaagacagaggagctc

SEQ ID NO: 199366 - DNA, 259 bp, Glycine max
tacggctgcgagaagacgacagaagggcagactcttacttttgcttgggtgaactttttcttttctggatttgtagcagccaagataccctttccattgacacagaggtttaggtcaatgctacagaacggaatagaccttagcacagtagatgttagctatgtcagcagtcgctcttggtacttcctcaatctgtttggattaagaggattctttagtctcatcttgggtgaagaaaatgctgtagatgatacacaac

SEQ ID NO: 199367 - DNA, 261 bp, Glycine max
cggctgcgagaagacgacagaagggggtttcatatatgagccaaaaaatttaagccaaatagggacatttaaatatgatatgaaagagggttggggtctggcaactgatggaaaagtcttgtttggaagtgatggcagttcaacattgtatcaatttgagcctcaaccatttaaagttgtatcaaaacaagttgtttactacaagggtcatcaagtgcacaatctcaatgaattggaatacataaatggtgaagtttgggc

SEQ ID NO: 199368 - DNA, 236 bp, Glycine max
agaggagcacttgtgcttccagaacacttcagcgcttcactgctgctacacttgagcatggaatgcaccctcctgtggcaccaaaaccagagtggcgtgccctcatggatgagatggctgtcattgctacagaggagtatcgctccattgttttccaggaaccccgtttcgttgagtacttccgatgtgctacacctgagctggagtatggaagaatgaacattggcagtcgtccg

SEQ ID NO: 199369 - DNA, 180 bp, Glycine max
acggctgcgagaagacgacagaagggtaatttgggaattattgctcccatcgccattggtttcattgtcggcgctaacattttgttgggtggggccttctctggagcggccatgaaccccgctgtgacatttgggcctgctgtcgtgagctggacctggaccaaccagtggatctactgg

SEQ ID NO: 199370 - DNA, 258 bp, Glycine max
acggctgcgagaagacgacagaagggggaagaagaagaagaagaagatggcattgggtgttcctgctcttcccctgacatacgtggctcacgttctggcacttgttgccagcatcttggtcgtgccctgggtcctcaattttaggggtggcttggcttgggattctgataacaaggccctcatcttcaatcttcatccagttcttattgtcattggcttactagtccttgggggtgaagctattataagctacaaagc

SEQ ID NO: 199371 - DNA, 260 bp, Glycine max
tacggctgcgagaagacgacagaaggggttcccagcatcaataagacggacagagcggcgatgcttgatgaaattgttgactatgtgaagttcctaaggctccaggttaaggtcctgagcatgagtagactgggaggagctggtgcagttgctcagcttgttgctgatgttcccctttctgcagtggagggggatcaggacatagaaggtgtatccaatgagcaagcctgggacaagtggtccaatgatggcacagaaca

SEQ ID NO: 199372 - DNA, 263 bp, Glycine max
acggctgcgagaagacgacagaagggggagaagagagatggatccagacgcgttggcaaaggcattcgtggagcactactacagcaccttcgacaccaaccggaacggtttagcgaatctgtatcaggagggttccatgctgaccttcgaagggcagaagatccagggcgcttccagcatcgtcgctaagctcacttccctccctttccagcagtgccaccactccatctccaccgtcgactgccagccctccggtgtcaacg

SEQ ID NO: 199373 - DNA, 259 bp, Glycine max
acggctgcgagaagacgacagaagggggcatcaattcaaaatatatcatcaattataagcatgggtttgtggaacacaacgaatgcagtgtcttgccgctttcacaagtttggtgatgaccaaaagaatctggtcttccaaggtgatgccacgtcttcttccaggggcatagaactcacaaagttagacggtggaggaaaaccagtgggtggcagtgtggggagagtgttatactcttctccagtgcacctttgggaaa

SEQ ID NO: 199374 - DNA, 258 bp, Glycine max
tctcgagcgaatcggctcgagcggctcgagacggagaagaagtcagaaggggtagaccaattgcgtatttttattttgatccttatagtcgtcctgctgaaaaaaggcaaggtgcatggatgaatgaagtctttgctcgtagtcgtgtattatcgcgtgatggcacctcagcaagattgcctgttgctcacatggtgtgcaatcaaactcctccagtaggaaacaagccaagtctaatgacattccgtgaggttgaga

SEQ ID NO: 199375 - DNA, 256 bp, Glycine max
acggctgcgagaagacgacagaagggctgtctttgagaataaggcagacacacttcttgttggtcttcatggcttgtgtgagacaactgcaacaatctgctgtgggtgctttcgcgtcacacccaaatatggcagacacgttgcaacacctgtcagggattctgcacatttctgtttgtctttagctgaatctcccattgcatgactaaccaataccaatgttattgctaacactagcaagtgtggtagacaagca

SEQ ID NO: 199376 - DNA, 249 bp, Glycine max
aagacgacagaagggggtggtatccgcgcatattctcatttcaatttgcatttgcatttcatttggcgttttgtttctttctggaagcttcacttcggcatccatggcgtcgttcgaagaagctcctcccggaaactccaagaacggcgagaagatcttcaagaccaagtgcgctcagtgccacaccgtggacaaaggtgccggtcacaaacaaggacccaatctgaatggtttgtttggaaggcatct

SEQ ID NO: 199377 - DNA, 261 bp, Glycine max
cgaagacgacagaaggggaagcttagtgaggtgcaagttaatttacttgaacaaaactttggaaatgaacgcaaacttgagtccgaaagaaaggataggctggcaatggagcttggtttggaccctcgacaagttgctgtgtggtttcaaaacagaagagcccgttggaagaacaaaaagttggaagaagagtactccggccttaaaaaaaatcatgaagccaccttgcttgagaaatgttgcctggagagtgaggtgttg

SEQ ID NO: 199378 - DNA, 260 bp, Glycine max
acggctgcgagaagacgacagaagggggcacaagtgagtttgttgatcgagataactagaaacagtgtgatgaaattgaaggtccttgttttcttcgttgctacaattttggtagcatggcaatgccatgcgtacgatatgttccctctccgaatgaacactggctatggtgcccgtactccggaggtgaaatgcgcaagttggaggcttgctgtggaagcacacaacatctttggctttgagaccattcctgaagagtg

SEQ ID NO: 199379 - DNA, 256 bp, Glycine max
aagcagcctgagctaggtggagggaccgtagagcttggtcctcatactgctgtccaccgttggaccggtgatccaagacaacctaacaaagaggacatggggaggttctattctgctggaagagaccccgctttctattctcaccatgccaacgtggatcgtatgtggaatatatggaaaacaataccaagtggaaaaagaagggatttcaaaaaccgtgattggctggaaacctcctttttcttctacgatgaga

SEQ ID NO: 199380 - DNA, 216 bp, Glycine max
tctcgagcgaatcggctcagtacggctgcgagaagacgacataaggggaaaatcgacgaagaagaagaagaagaagatggagaagtatcagatctggagcaggagaatagcgttggcagcgtttgcgtttgctctgctgttccaatcggcctcagcagacgacgtcgttgtgctctctgaagataacttcgagaaggaagttggtcaggacagagg

SEQ ID NO: 199381 - DNA, 258 bp, Glycine max
agaagacgacagaagggggtcacaactcagaaaggaaagctttgaggtttcttccgcattttagagtggtgagaggatggtgggtgttatttcgttggtaacagggatggctggtcctagtgggtttggatcagcttccactgcagaacaggttactgatggaattgatgccagcaacctcactgcaattatcacaggaggagcaagtggtataggcttggagacagcaagagtgttggctcttcgaaaggtccatgt

SEQ ID NO: 199382 - DNA, 260 bp, Glycine max
gtacttgcattcacaggaaatgatgatggaagaaaatttttgcttgatggagaggtgactattgacacaattacggcgtttgggaatgatttccttgaagacaaactaaaacctttcctcaagtcagatccagttcctgaaagcaatgatggtgatgtgaaaatagttgttggtaataactttgatgaaattgtcttggatgagtcaaaggatgttctgcttgagatttatgctccctggtgtggccactgccaagctct

SEQ ID NO: 199383 - DNA, 254 bp, Glycine max
cggctcgagcggctcgagtacggctgcgagaagacgacagaaggggggaaaaagtgggagaagttcaacagtgaaaaggttgcttcactggcatatgcacggatacaaggaaaggctgcgcttgtgatgcatttccagaattcaggcttaatgaatgaggacaaacggtgccggccaattctctttcattcagagggccaagatactggtgaccaggaacatttgctatccagcaatttgaatatttgcattcg

SEQ ID NO: 199384 - DNA, 254 bp, Glycine max
agaagacgacagaagggggcacaagtgagtttgttgatcgagataactagaaacagtgtgatgaaaatgaaggtccttgttttcttcgttgctacaattttggtagcatggcaatgccatgcgtacgatatgttccctctccgaatgaacactggctatggtgcccgtactccggaggtgaaatgcgcaagttggaggcttgctgtggaagcacacaacatctttggctttgagaccattcctgaagagtgcgt

SEQ ID NO: 199385 - DNA, 256 bp, Glycine max
tacggctgcgagaagacgacagaagggaaagagacccggaaagggtgggaaccgcttttggaaatccattgggcttggatttaagactcccagggaagccatcgaaggaacctacattgacaagaagtgccccttcactggcaatgtttccatccgtggccgtatcttggctggaacatgtcacagtgctaagatgaacaggactattattgttaggaggaattatctccattttatcaagaagtaccagaggtac

SEQ ID NO: 199386 - DNA, 251 bp, Glycine max
tacggctgcgagaagacgacagaagggataggcgatgtgaaaaatggatgcggaatgacattgtagactcaaaagaatccaagacaacatcatggttcaagcggtttataggacgtaagcagaagccagaagtgacctggccatttccttttgcagagggtagaatgtttgtccttactttacgtactggtgttgatggataccatattaatgttggggggcgccatatgacttcatttccatatcgaaca

SEQ ID NO: 199387 - DNA, 257 bp, Glycine max
gctgcgagaagacgacagaaggggggagaagaattaagcactcggttgcagagcagagcaaacttctttcactctttcgcttctgaatcttcaacaatggtgctcgaggcgacgatgatctgtatcgacaattctgaatggatgcgtaacggagattactctccttcacgatttcaagctcaagcagacgctgtcaatctcatatgcggtgctatcacgcagtctaatccggaaaatacagtgggagttctcacaat

SEQ ID NO: 199388 - DNA, 257 bp, Glycine max
tacagacgacagaaggggatgtgaaatttggcaggtaatggatatgttgttgttattatgtgttctcttggttgcattgccaaacctggctgtagtagagagtcgcagggctcctgttctggactactttgagtattgtgctatgagctgcagagcttacagtgcctcattggaagaatttggaggggttggtgatggaacaactttgaacacaaaagcttttcaggcagccatagatcatctgagtcagtatgcat

SEQ ID NO: 199389 - DNA, 278 bp, Glycine max
aagacgacagaagggggcacaagtgagtttgttgatcgagataactagaaacagtgtgatgaaaatgaaggtccttgttttcttcgttgctacaattttggtagcatggcaatgccatgcgtacgatatgttccctctccgaatgaacactggctatggtgcccgtactccggaggtgaaatgcgcaagttggaggcttgctgtggaagcacacaacatctttggctttgagaccattcctgaagagtgcgttgaagcaacaaaggattacatccatg

SEQ ID NO: 199390 - DNA, 273 bp, Glycine max
cggctgcgagaagacgacagaagggggcacaagtgagtttgttgatcgagataactagaaacagtgtgatgaaaatgaaggtccttgttttcttcgttgctacaattttggtagcatggcaatgccatgcgtacgatatgttccctctccgaatgaacactggctatggtgcccgtactccggaggtgaaatgcgcaagttggaggcttgctgtggaagcacacaacatctttggctttgagaccattcctgaagagtgcgttgaagcaacaa

SEQ ID NO: 199391 - DNA, 269 bp, Glycine max; identical to SEQ ID NO: 198617

SEQ ID NO: 199392 - DNA, 272 bp, Glycine max
tacggctgcgagaagacgacagaagggggggagagaatagagaagagagatggatccagacgcgttggcaaaggcattcgtggagcactactacagcaccttcgacaccaacaggaacggcttagcgaatctctaccaggagggttccatgctcactttcgaagggcagaagatccaaggcgcttccaacatcgttgccaagctcacctccctcccttttcagcagtgccaccactcaatctccaccgtcgactgccagccctccggcgtca

SEQ ID NO: 199393 - DNA, 269 bp, Glycine max
ctgcgagaagacgacagaaggggggtgaaaattagggtttgaggtatttatttaattggcaaaagacggtgtttgggtttcacagacagacacacactcggttctgccttcacaaaaaattatcgagatcccctttttctcctaagaaaagccatggctaagggtcccggtctctactctgacatcggcaagaaagccagggatctgctgttcaaggactaccacagtgaccagaagttcaccatcaccacctactcacccactggagt

SEQ ID NO: 199394 - DNA, 268 bp, Glycine max
tctcgagcgaatcggctcacggctcgagacggctgcgagaagacgacagaaggggaactttttagggtttacaccgacggagacacaccttcagcagcagcagccatggttctcaaaaccgaactatgccgattcagcggtgccaagatctacccagggaaaggcatcagatttgttcgtggtgattctcaggttttcctgtttgctaactcgaaatgtaagaggtatttccacaacaggttgaagccatcaaagctcacctggactg

SEQ ID NO: 199395 - DNA, 272 bp, Glycine max
aagacgacagaaggggtagcacaaaccatccaatctctactccctgtgccagaacccaagatgcacgaatcagtaagaaaagaactcgaagaattggagaaagagaaagcaacaattgacaacaaagcaaacacaatggttcgacgtgagctttgggccgggttgggcttcctagtggtgcaaacagcagcattcatgaggctaacattttgggaactttcttgggacgtgatggaaccaatttgcttctacgtgacctcaatgtacttcat

SEQ ID NO: 199396 - DNA, 279 bp, Glycine max
tctcgagccgaatcggctcgagacggcgacagaaggggggggaacatttgtcaaataaattcatctaaccccaaacaaaaccctagcacacttttatcgcttagtggcagcagcagtggcggcaagcaactccatccgcaatgggaatcgatttgaaggcaggaggtaagtccaagaagaccaagcgaaccgcccccaaatccgatgatatctacctcaagcttctcgtcaagctgtaccgttttcttgttcggaggactgggagtaacttcaatgctg

SEQ ID NO: 199397 - DNA, 252 bp, Glycine max
  unsure (1)..(252): unsure at all n locations
gtccttttgaagaaggagatgctgggaagtcttctgaaagacgcagttatggtggaccacgagttccttaccgtggtggtcgtcgtggaggtttcagcaatggtgaaactggtgaaggtgaagacggacgacctcgaagagcatttgatcgtcgcagtgggactggacgaggaaatgaattcaaacgtgaaggttcaggacgaggnaactggggaaccaaactgntgaacttgctcaggtaatgatgaggtt

SEQ ID NO: 199398 - DNA, 270 bp, Glycine max
tacggctgcgagaagacgacagaaggggggttttcgcttgagctctgcgagatcttgagtcgccgatttgaaaagatgagtaagcttcagagtgatgctttgcgtgaagccatctcaggaatcatggccgattccaaggagaagaatcgcaaatttgtggagaccatcgaactccaaatcggtttgaagaactacgatccacagaaggacaagcgtttcagtggctccgtcaagttgccccacatccctcgccccaagatgaaaatttgc

SEQ ID NO: 199399 - DNA, 265 bp, Glycine max; identical to SEQ ID NO: 197413

SEQ ID NO: 199400 - DNA, 267 bp, Glycine max
acggctgcgagaagacgacagaagggacgtacgcaactgaaaaggaaaaccctaagagatgaagagaactcctatcttgttccctctcttctttcttctttgtgccttcacctcatatctaccttcagccaccgctgatgatgatcatgtgtacgacactgacggcgataagcttcaatacggtgtcaattatttcgtgttgccagtgataagaggaaatggcggtggaatacaagtagcaaaagcaggaaacgaaacttgccctct

SEQ ID NO: 199401 - DNA, 264 bp, Glycine max
tacggctgcgagaagacgacagaagggaaagagacccggaaagggtgggaaccgcttttggaaatccattgggcttggatttaagactcccagggaagccatcgaaggaacctacattgacaagaagtgccccttcactggcaatgtttccatccgtggccgtatcttggctggaacatgtcacagtgctaagatgaacaggactattattgttaggaggaattatctccattttatcaagaagtaccagaggtacgagaaaag

SEQ ID NO: 199402 - DNA, 266 bp, Glycine max
tacggctgcgagaagacgacagaagggggagcaagggaaagcaaaaggagaaggtgaacaatatggtgctgtttgatcagggcacctatgacaagctcctttctgaagctcccaaatacaggctcatcactccttccattctctctgatcgtttgaggattaatggatcacttgcaaggaaggctataagagaattgatggcaagaggttctatcaggatggtgtctgcccatgcaagtcagcaaatttataccagggcaacaaac

SEQ ID NO: 199403 - DNA, 274 bp, Glycine max
tacggctgcgagaagacgacagaagggtatgatgatttcgctgccagtcttcctgccgacgagtgtcgatatgctgtttatgattttgattttgtcactgaagagaattgccaaaagagcagaattttcttcattgcttggtcccctgatacatctagggttaggagcaagatgatttatgccagctccaaagatagattcaagagggagcttgatgggattcagattgagctgcaagcaactgatcctactgagatgggtcttgatgtgttca

SEQ ID NO: 199404 - DNA, 279 bp, Glycine max
cggctcgagcggctcgagtacggctgcgagaagacgacagaagggggcggcacaaagcattcactgtgtcggaaaaagaagaagagaaaaaagatgagcgacggaggaaaacgacaaggtggaagagcgttgccgccgccaccaagaggccctccgcctcctcccccctctcgccctcgcctcgaacccgtcgatcgcgaaaagacatgtccgttactgctgcgagtgttcactaagattgggagtcaccattccatggaagactttgccgtcagaggc

SEQ ID NO: 199405 - DNA, 148 bp, Glycine max
acggctgcgataagactacagaaggggaggaatcacgattgcaacggcacatgtggagtatgacactgcacgacgacatcatgctcatgtggactgccccggacacgcggattatgtaaaaaatatgattcccggagctgcccagatg

SEQ ID NO: 199406 - DNA, 269 bp, Glycine max
tgcgagaagacgacagaagggggaaacgaagaagccctaactacgcacgcattcgtgagaaaactcaatattcgtcgctcatggcactctcttctcgtctcttttccaaatccaaattgatctatggcagtcaaatacttctacaaaaggagcatgctattccagttcgtcactttgctaaagagtctgcccctcctgcccttaagggagacgagatgctgaagaacatttttgtggaggtgaagaacaaatttgagaccgccatagga

SEQ ID NO: 199407 - DNA, 262 bp, Glycine max
acggctgcgagaagacgacagaagggggagctggtgttcaaggaggacgggcaggagtacgcgcaggtgctccggatgctggggaacgggcggtgcgaggcgatgtgcatcgacgggacgaagaggctctgccacatccgcgggaagatgcacaagaaggtgtggatcgccgccggagacatcatcctggttggactcagggactaccaggacgacaaggctgacgtcatcctcaagtacatgcccgacgaggccaggctcc

SEQ ID NO: 199408 - DNA, 246 bp, Glycine max
gaggtgtagaaatattatggggaggggaagagtggaactcaaaaggatagagaacaagataaacaggcaggtaacgtttgcaaagaggagaaatgggcttctcaagaaagcctatgagctttctgttctctgtgatgctgaggttgccctcatcatcttctctacccgcggcaagctttatgaattctgtagcaccaacagcatgctcaaaacacttgaaaggtaccaaaagtgcagctatggtgc

SEQ ID NO: 199409 - DNA, 264 bp, Glycine max
tacggctgcgaagaacgacagaagagatataatctcaaatccaatgaatctggttcctcagaatctttctggcctctctgcaacagcccaatcgacaagagtgagattactgattggagtaatattgatagccacagaagtagtgatattttttataatacctgctgttcaagttgtcggtttcagatacttccaagtgattccatggcaatgggacaattttatatggatttgcctcagtcggtggttggccgagcaaagcaa

SEQ ID NO: 199410 - DNA, 259 bp, Glycine max
tacggctgcgagaagacgacagaaggggacaagtgagtttgttgatcgagataactagaaacagtgtgatgaaaatgaaggtccttgttttcttcgttgctacaattttggtagcatggcaatgccatgcgtacgatatgttccctctccgaatgaacactggctatggtgcccgtactccggaggtgaaatgcgcaagttggaggcttgctgtggaagcacacaacatctttggctttgagaccattcctgaagagtg

SEQ ID NO: 199411 - DNA, 270 bp, Glycine max
tacggctgcgagaagacgacagaaggggactattactggcaagaaagagaccctcattgaccttacaattatagaaattttatcaaggcacgcatctgatgagttctaccttgggcagagagatggcggtgactactggacttctgatgccgggccattagaggcctttaagaggtttggaaagaatcttgaagagattgaaaagaagcttatagagaagaacaataatgagacattgagaaaccgctatgggccggctaaaatgcctta

SEQ ID NO: 199412 - DNA, 262 bp, Glycine max
tcggctcgagacggctgcgagaagacgacagaagggggaatcacagtggtgccttatcgctgtggttatcatcttcttcttcctctttcttagatctcttctttctctacgccgcacgccgaaaccatggccggaaaaggagagggtcctgctatcggaatcgatctcggaaccacctactcttgcgtcggtgtgtggcaacatgaccgcgttgaaatcatcgccaacgaccaagggaacagaaccacgccgtcttacgtcg

SEQ ID NO: 199413 - DNA, 258 bp, Glycine max
acggctgcgagaagacgacagaagggcagcgcagatagtattgataaatcagatgaattgctcaatcttgctttcgcattattgccacctgaatttttgtattcattgcaaacatcaggtatacctaatcataaattaaaacttaaggtcagatctccaatcatgctaatacgaaatctcgaccagactgatggcctgtgcaatggaactaggctcattatcaccaaactcggatctaatgtgattgaggctgaagta

SEQ ID NO: 199414 - DNA, 260 bp, Glycine max
taagacgacagaagggggattactaccaagtgaaaaagcaattaactaagcatatatagcgtgtaagacagtgagaaaaaaagtgttgtgtagagagaaatggctaggtggtgcatcttggtggttcttgcccttgtcgtggttgcaagtgccagaaacatgcccaatgacgcaggtttggaggaccagaagaacttcctcgggtatgggttctctggagttggcaataatgggcttccctttggaggagtgggttctgg

SEQ ID NO: 199415 - DNA, 269 bp, Glycine max
cggctgcgagaagacgacagaaggggggagtggaggagcgtgaggtgagtgtctgtctgagaaaaaaataaaaggcaaagaaacaagaaaacaaaggaaagaaaagatgttacagttcccggcgtatatgactcagtacccattgtcgacgaggactattccgacgtcgtttctgctacactctcagtggcctcagccccaaaacgaagaactccttctcgccatggaagagtccgatttcgaagaaaaatgcaacgagatcaggaaga

SEQ ID NO: 199416 - DNA, 258 bp, Glycine max
acggctgcgagaagagacagaagggggcccttctagctttttcccagtccaagcagcctccaattcgtgccactctcttcaaaatggccgttaccttctcaaatctccacacagaatcaggtctcaagtccctcgacgacttcctctctgggaaggtctacgtttctggggatcagttcacaaaggacgacatcaaagtgtatggtgctgttttggagaagccaggtgactcttttcccaatgctgccaagtggtacg

SEQ ID NO: 199417 - DNA, 263 bp, Glycine max
actcgagccgaatcggctcgagtgcgagaagacgacagaaggggggagaagaatttgcatagcgcaagcaaagcgggggagaaagagaggcagcaaacaaaaacaatggcgacgtcgctctctgtttcgccatctctctctctcaacactctcttcatcgccaaagcgcttccactatctcgcccctcctttctctctctccctctccccaaatccctactctctctctccacgcgccgccgcaccttcatcgtccgcgccga

SEQ ID NO: 199418 - DNA, 259 bp, Glycine max
tacggctgcgagaagacgacagaaggggggagatagctgtgagtagtgagagggaggaagacatagacataaagaaggagaagtgaagtgatgaatgccccagatcgttacgagcgtttcgtcgtccctgaaggcaccaaaaaggtttcttatgagagggacacaaagatcatcaatgccgcgtccttcaccatcgagagagaggagcacactatcggcaacatcctccgcatgcagcttcacagagaccccaatgtgt

SEQ ID NO: 199419 - DNA, 257 bp, Glycine max
cggctgcgagaaaacgacagaagggggcacaagtgagtttgttgatcgagataactagaaacagtgtgatgaaaatgaaggtccttgttttcttcgttgctacaattttggtagcatggcaatgccatgcgtacgatatgttccctctccgaatgaacactggctatggtgcccgtactccggaggtgaaatgcgcaagttggaggcttgctgtggaagcacacaacatctttggctttgagaccattcctgaagag

SEQ ID NO: 199420 - DNA, 260 bp, Glycine max
acggctgcgaagacgacagaaggggaatactttctcgtattttcccctcttcttcccctctctcgtgttatccgctttagttttctcgggaaaatcatggtgaaaggtccaggtctctactccgacatcggcaagagagctcgcgatcttctgttcaaggattatcagaatgaccacaagttcaccatcaccacttacacttccactggagtggaaatcacttcaactggagtcaggaaaggtgaaatatatttggccga

SEQ ID NO: 199421 - DNA, 268 bp, Glycine max
tactgcgagaagacgacagaaggggatgcacccaaaggtgcaaaaatattaagatgataaacattggagcacttgttgtactctttgcatttctcttcctcagttgtgcctatgcacaagacacaacaacccttgtgcctgcaatcataacttttggtgactcagccgtggatgtagggaataatgactatcttcccacccttttcaaggctgattaccctccttatgggagggactttgctaaccaccaacctactgggaggttttg

SEQ ID NO: 199422 - DNA, 260 bp, Glycine max
gctgcgagaagagacagaaggggggaagaggagtgaagcagcagagggaggagcggcattaaaaatgcagatcttcgtgaaaaccctaacggggaagaccataaccctcgaggtcgaaagcagcgacaccattgacaatgtcaaggctaagattcaagacaaggaaggcatccctccggatcagcagcgtttgattttcgccggaaagcaacttgaagatggaaggaccttggccgattacaacatccagaaggaatcaa

SEQ ID NO: 199423 - DNA, 258 bp, Glycine max
tacagaagacgacagaaggggacaacaaaaaaattcttcagttcactatatctatggcaatgttttaccaatttaggaatgttggtgtcttttttttcctttgtgttcttctcttatctggtgtgtgtgttttgggtcgaccagccacttttctacaagactttcatgtcacgtggtctgactcccacatcaggcaatttgatcaaggcagggcaatccaactcagacttgaccaaagctctggtaatataacaacat

SEQ ID NO: 199424 - DNA, 259 bp, Glycine max
tctcgagccgaatcggctcgagtacggctgcgagaagacgacagaaggggttgataccacgttctctagaacagatattcgagataagtcagtccctgaaggatcaggggtggacgttcaaaatgcaggcttcagtattggaaatatataacgagaccctcagggatttgttatcatcaaatcggtcaagtggtattgactcaacacgaatagaaaacggtgttcctgtttctggaaagcagccatacactattatgca

SEQ ID NO: 199425 - DNA, 269 bp, Glycine max
cggctgcgagaagacgacagaagggggtctcgtggaagtgtaagcaagcaaaaccctagcggcgcctgctttctttgttcgtgttttgcatcaggatggagtctcaggtgaagcacgcacttgttgtcaaagttatgggtcgtactggatccagaggacaagtgacccaggttagagtgaagtttttggatgatcagaaccgtcacatcatgaggaatgtgaaaggacctgtgagagaaggagacattctcaccctactcgagtctgaa

SEQ ID NO: 199426 - DNA, 259 bp, Glycine max
acggctgcgagaagagacagaagggggcccttctagctttttcccagtccaagcagcctccaattcgtgccactctcttcaaaatggccgttaccttctcaaatctccacacagaatcaggtctcaagtccctcgacgacttcctctctgggaaggtctacgtttctggggatcagttcacaaaggacgacatcaaagtgtatggtgctgttttggagaagccaggtgactcttttcccaatgctgccaagtggtacga

SEQ ID NO: 199427 - DNA, 254 bp, Glycine max
cgagaagacgacagaagggggcagccaagaaaagaaaatcctcacccattttcttcgtagccaaacactctgaaattctcagttatgtcgtggcaagcgtatgtggatgatcacctaccgtgtgaaatcgaaggtaaccacctcactcacgccgctatcatcggccaagacggaagcgtttgggctcagagcaccaacttccctcagttcaaacctgaggaaatagtccccatcaataatgactttaatgagcc

SEQ ID NO: 199428 - DNA, 259 bp, Glycine max
ggctgcgagaagacgacagaagggggacaacaagaagctcactctctctatctcttctctctgtgtgtgtgttatgtgtgaatacacatgaaaatgcagaagttcaaattgcttctagtgctattcttcgctacttgccactcctctttgtccatcacagatggtttgttgccaaatggagactataagtttggtccaaaaccatcagagttgaaaggttcaatagtgactacccccaatggcattccacattggacaa

SEQ ID NO: 199429 - DNA, 258 bp, Glycine max
gagaagacgacagaaggggacgccgcaagacacggtttctgaagtgaaaaaaaatatagaaactgttcggggtgcagatgtctatcctgctgcacagcaaatgctaattcatcaagggaaagttcttagggatgctactaccttggaggagaataaagtagccgaaaatactttcattgtaattatgctatcaaagagtaagagcacatctggtgaaggatctactacttcaactgcattatcaaccaaggctccaca

SEQ ID NO: 199430 - DNA, 253 bp, Glycine max
ggctgcgagaagacgacagaagggcatcgttttcttcgttgctataataattttaggtgcagaatggcaatgcaatgggtcagagcatgagcatgagcatggccacagctaccaaattttccctttgcgaatgaaaaccggccccggtggccactacattccggaggtatcgtgcaaaagttggaggcttggtgtggaagcacacaacgtcattgactggagaaccattcctcaagattgcgagggatatata

SEQ ID NO: 199431 - DNA, 254 bp, Glycine max
acggctgcgagaagacgacagaaggggaagcacttagtgtgagtgtgaggaggcagactattgaaggtgctagaagaaatcttaataggatgcgtcaggaaattgacaagttcaaggccactgatgcaggtagactccgtgctgaatacaacaggcttgtcgaaggtttggcactaagaggagacctgcctgctactgatgcctggcttgcaaatccggccttgcctgatgatatactaaaggaggctgtacct

SEQ ID NO: 199432 - DNA, 254 bp, Glycine max
cgacagaagggggcacaagtgagtttgttgatcgagataactagaaacagtgtgatgaaaatgaaggtccttgttttcttcgttgctacaattttggtagcatggcaatgccatgcgtacgatatgttccctctccgaatgaacactggctatggtgcccgtactccggaggtgaaatgcgcaagttggaggcttgctgtggaagcacacaacatctttggctttgagatcattcctgaagagtgcgttgaagc

SEQ ID NO: 199433 - DNA, 258 bp, Glycine max
tacggctgcgagaagacgacagaagggggcgcaacaaagatgaatgaagcggaggagcaactttgcgaggcggccagaaaaggtgacacggagaaagtgaggtctctcatagactccggcgctgacgtcagccacttcgacggcgagggcctcaatcctctgatgcacgccgcaaagcacggccatgcacccgtcctcaccctcctcctctccgccggcgctccctggaacgctctttccccctccaacctctccgcc

SEQ ID NO: 199434 - DNA, 256 bp, Glycine max
tacggctgcgagaagacgacagaagggggggaagtggtaaccgacacagcagaaatgatatgatgggttgtggcggtgcattctcagtgtggctgccagtgtttgtgtcttgttttacagcaatagcattggctgggactgggtgcgataaggcaccggtggtgttcgtgttcggcgattcgaactcggacacgggtggactcgcttccggtctgggtttccctatcaatcttcccaatggccgcaatttctttca

SEQ ID NO: 199435 - DNA, 260 bp, Glycine max
acggctgcgagaagacgacagaaggaggcactgcaaatcacttttctactttgagtcttcttgatccttctttttctccttgaactcaaacatggcagatgaggtggttctgctagatttctggccaagtccatttgggatgagggtcaggattgcacttgctgaaaagggtatcaaatatgagtacaaagaagaggacttgaggaacaagagtcctcttctcctccaaatgaacccggttcacaagaagattccggttc

SEQ ID NO: 199436 - DNA, 257 bp, Glycine max
gctgcgagaagacgacagaagggctgcacctaaaagtctagttgaaaggtattatttgtaccttgtgatgagcaaactcaatgtgagaaggatcagagacattctccatgagagtatcgtaaccatagaacagatcacgctgaatgttgaccgtggcaaactccggtttgtcaaagtcatcagacaacctaaacaaacacaaatttaccatccaggtcaataagacacaaaacaaaacactccttagccaacataaa

SEQ ID NO: 199437 - DNA, 257 bp, Glycine max
cggctcgagcggctcgagacggctgcgagaagacgacagaagggggccgaaaaccctaacaacacaggcgcagagcgtgatccattgacgaagatggtgcagcgtctcacctaccgcaagaggcacagctatgccaccaaatccaaccaacacagggtcgtcaaaacccctggtgggaagctcgtttatcagaccaccaagaagagggccagcgggcccaagtgccccgtcactggcaagaggattcaggggattcc

SEQ ID NO: 199438 - DNA, 256 bp, Glycine max
aagatacagaatgcctttgaaaaccgggttgatgccctgaggactttgcgcgaactcaagcttcttcgccaccttcaccatgagaatgtgattgctttgaaggacatcatgatgcctgttcacaggaatagtttcaaggatgtctatctggtttatgaactcatggacacggatttgcatcagattattaagtcttctcaagctttgtctaatgatcactgccagtatttcctctttcagttgctccggggcttga

SEQ ID NO: 199439 - DNA, 257 bp, Glycine max
gattacttgacagggaatccacttcctaatgacattctcttatatgctgttcctgtttgtggtccttatagtgcagttcagtcttacaaatatcgggtgaagataattcctggaccggcgaagaaagggaaagctgcaaaaactgctatgaacctattcagccacatgtcagaagcaacaacccgggagaaggagttgatgaaagcctgtacagatccagagctagttgctgcaattgttggtaatgtgaaaatatc

SEQ ID NO: 199440 - DNA, 254 bp, Glycine max
gggaagagggtcagagtgagaaagagagagagagagagagaaactgagagaaattcgcaaaccctaatttcggaaagatcggcgatggctgcctccaaggatcgcgagaacttcgtctacatcgccaagctcgccgaacaggccgagcgatacgaagagatggtggaatcaatgaagaacgttgcgaatctcgacgttgaactgactgtggaggagcggaatttactttctgttgggtacaagaatgtgattgg

SEQ ID NO: 199441 - DNA, 259 bp, Glycine max
acggctgcgagaagacgacagaaggggactctactactccaggtgatggccttgccttcttcattgcaccatttgacactaaaatccctccaaactctggtgggagcaaccttggactcttcccatcagacaatgttgttgctgtcgagtttgacacctaccctaatcgtgataagggggatccagattatagacacattggtatcgatgtcaactctatggtctccaaggcaactgctaggtgggagtggcaaaatgg

SEQ ID NO: 199442 - DNA, 254 bp, Glycine max
tgcgagaagacgacagaagggggagcaagagtgaagagcgaagagaatggctcccaagggtttaatctttttggctgtgttatgcttctcagcactgtcactgagtcgttgtcttgcggaggataatggacttgttatgaacttctacaaggaatcatgccctcaggctgaagacatcatcaaagaacaagtcaagcttctctacaagcgccacaagaacactgctttctcctggctcagaaacatcttccatg

SEQ ID NO: 199443 - DNA, 256 bp, Glycine max
acggctgcgagaagacgacagaagggaaagagacccggaaagggtgggaaccgcttttggaaatccattgggcttggatttaagactcccagggaagccatcgaaggaacctacattgacaagaagtgccccttcactggcaatgtttccacccgtggccgtatcttggctggaacatgtcacagtgctaagatgaacaggactattattgttaggaggaattatctccattttatcaagaagtaccagaggtacg

SEQ ID NO: 199444 - DNA, 254 bp, Glycine max
tactcgagccgattcggctcgagacggctgcgagaagacgacagaaacgcatgccaaagttggacgcttggtgtggaagcacacaacgtcattgactggaaaaccgttcctcaagattgcgagggatatattgggaactacatgcttggcgaacaatatagatcagactccaaaatagttaaccaacaagcttatttctatgctaaaaccctcaatatcactgccaaaaccgcatgggtgttcgacatagatga

SEQ ID NO: 199445 - DNA, 251 bp, Glycine max
acgggaagacgacagaagggggaagagtgaagagaatggctcccaagggtttaacctttctggctgtgttaatatgcgtttcagcactgtcactgagtccttctgttgcgggggaagggcaaaataatggccttgttatgaacttctacaaggaatcatgccctcaggctgaagacatcatcacagaacaagtcaagcttctctacaagcgccacaagaacactgctttctcctggctcaggaacatcttc

SEQ ID NO: 199446 - DNA, 250 bp, Glycine max
cggctcgagctcgagccggctcgagacggctgcgagaagacgacagaagggggatcattctctcaccgtagcatccatctgatcttaaattgatggcacttccaccctgccacatgtttgcacagttctatgtagctaatggggagctatcatgtcaaatgtatcagcgatctgccgacatgggcctgggtgtcccatttaatattgcatcttatgcactcctgacatgcatgatcgctcatgtttgtga

SEQ ID NO: 199447 - DNA, 253 bp, Glycine max
tagcgagaagacgacagaagggatcagtggtgccccccaggataacaacataatgctgtggaatgctgtcatatttggtcctgatgatactccatgggatggaggcacgttcaagttgacactccaatttactgaggactatccaaataaaccaccgactgtacgatttgtgtctcgcatgtttcatccaaatatttatgctgatggaagtatttgtttggatatattacaaaatcagtggagtcctatttat

SEQ ID NO: 199448 - DNA, 254 bp, Glycine max
acggctgcgagaagacgacagaagggggcacaagtttgttgagatagctagaagcaataagatgaaaatgaaagtgcttgttttgtttgttgctacagttttggtagcatatgaatgccatggctcagactaccagaagttccctctccaaatgaaaactgggtttggtgggcaatacagcaatgaggtggcatgtgccagttggaggcttggcgtggaagcttacaacgtagtcaagtggcaaactgttcctg

SEQ ID NO: 199449 - DNA, 250 bp, Glycine max
acggctgcgagaagacgacagaagggaacgttggagtggaacaaaaatatgatagaagacaagcagatgtgaactcacttatgctgttgttgggattgttgtgctacttgcttccaatgctgttcaaatacagtggtgcctcagctgctctcactgtagacccttcactacacttgtcaagagcttctagcattgtgatgttgattgcatatgttgtctacattgtctttcaactgtggacacacaggga

SEQ ID NO: 199450 - DNA, 251 bp, Glycine max
tacggctgcgagaagacgacagaagggggcacaagtgagtttgttgatcgagataactagaaacagtgtgatgaaaatgaaggtccttgttttcttcgttgctacaattttggtagcatggcaatgccatgcgtacgatatgttccctctctgaatgaacactggctatggtgcccgtactccggaggtgaaatgcgcaagttggaggcttgctgtggaagcacacaacatctttggctttgagaccattc

SEQ ID NO: 199451 - DNA, 251 bp, Glycine max
agacgacagaagggggagagaaaaaatggccaaatcaatcaaattctttgagttgaacacaggggccaagattccttctcttgggttagggacttggcaagctgaacctggtgttgtagctgaagctctcaccacagccattcaggttggatacaggcatattgactgtgctagtgcgtataagaatcaagcagagattggttctgctcttaagaagctttttgatgatggtgtggtgaagcgtgaggact

SEQ ID NO: 199452 - DNA, 254 bp, Glycine max
acactattgcaaggatagttaataaaaatcatttcatgagactcaagaatcttctcactgagccaagggtcaaagaatcggtggtttatggtggttcaatggatgaaaatgacttatttattgaaccgacaatattgctggatccgccacttgattcagcaatcatggctgaagaaatctttggccctgtacttccaattatcaccgtggagaagattgaagagagtgttgagttcataagctcaaggcctaaa

SEQ ID NO: 199453 - DNA, 252 bp, Glycine max
attgcatctttgtttggtgggtgtctctgaaactatgatcttgtgaaaacccagaaaggaaaccttcgatacgcgttggtagatagagattgctgttgggattttcagagaaccgttgattgacaaatgaacggtggtgatgaggtcgtggcagctccggcgggtccaccgcagccgctggagtggaagttctcgcaggttttcggggaacgtacggcgggggacgaagttcaggaagtggatataatttct

SEQ ID NO: 199454 - DNA, 252 bp, Glycine max
tctcgagccgattcggctcgagacggctgcgagaagacgacagaagacgggaaaagttagaagtagtgaagaaaatgaaagtcattgttttcttcgttgctataataattttaggtgcagaatggcaatgcaatgggtcagagcatgagcatgagcatggccacagctaccaaattttccctttgcgaatgaaaaccggccccggtggccactacattccggaggtatcgtgcaaaagttggaggcttggtg

SEQ ID NO: 199455 - DNA, 258 bp, Glycine max
tacggctgcgagaagacgacagaaggggaaggtgttaacatcttggctgtcagttatggtgccccaggggcttgctcttatccccgacaactgaagcttcctggaaagtggtctttcaagtcacacacagttctaaaaagcagtgaacaggtaccaagagctccaatatttactgaagaggcacttggcgggctggagggagacggtgaggctgtacagccaatagaaaggtccttttgggctaaatactggatgtac

SEQ ID NO: 199456 - DNA, 274 bp, Glycine max
acggctgcgagaagacgacagaagggaaagctgtgcagaaattacttgatgagcatcgcaaccaagctgatccttttaatcaaattgagcaaggatggtgtgatattcctggaactgtggatgaggttaaagcaaagctacaaatgaggcaagaaggagccatcaagagggatagagcaatggcatactctctctccacacagtcaagactgtgtgctagtccaaacccaaaagccactaaagccatgactcctctcaagaataacaacttaag

SEQ ID NO: 199457 - DNA, 265 bp, Glycine max
acggctgcgagaagacgacagaagggggcacaagtgagtttgttgatcgagataactagaaacagtgtgatgaaaatgaaggtccttgttttcttcgttgctacaattttggtagcatggcaatgccatgcgtacgatatgttccctctccgaatgaacactggctatggtgcccgtactccggaggtgaaatgcgcaagttggaggcttgctgtggaagcacacaacatctttggctttgagaccattcctgaagagtgcgttg

SEQ ID NO: 199458 - DNA, 258 bp, Glycine max
ctgcgagaagacgacagaagggaattcgtgtgccaggaataggacacagggtaaagaataaggacaacaaagataagagagtagagctactacaaaagtttgcacgcacacatttcccttgcgtgaagtacatggaatatgctattcaagttgaagactacaccctctcaaaggcaaatattttaattcaaacggtgggtggggaattggtatctctttcctgggatcttttggttggcagtggactgtccagcaaac

SEQ ID NO: 199459 - DNA, 265 bp, Glycine max
gaagacgacagaagggggagacaatgcctagtgaattagctatgaacaatgatgagctacatgtggttatgttcccattccttgcatttggccacattagtccatttgttcagctctccaacaagttgttctctcatggtgttcatgtcactttcttgtcagctgcatccaacattcccagaatcagatcaactcttaatctcaatccagccatcaatgttatctcactaaagttcccaaatggtataaccaacactgctgaatt

SEQ ID NO: 199460 - DNA, 230 bp, Glycine max
tacggctgcgagaagacgacaaaagggaccctcatttcttggaaatgtaagaagcaggatcgtgtttctaaatcttctactgaggctgaatatcgttcaatgtcttctgcttgttctgaaattgtgtggttacgtagtattttggaggagcttggattttcacagcctaactctacccctctttatgctaataatgcaagtgctattcagattgctgcaaatcccagttt

SEQ ID NO: 199461 - DNA, 273 bp, Glycine max
acggctgcgaagacgacagaagggggcaagaaaaaatgaccaagatcttctttgtattgctgctatgtctaatcatagcatcttcttctgggtttgtgaattgctctgatgttgagaaggaggaaaagattggaatatttgagctcaagaaaggtgacctttctttgagggtcaccaactggggtgcttcaattttgtccctggtgattcctgataagaatggaaagttgggtgatgttgttcttggatatgattctgttaaggattacagta

SEQ ID NO: 199462 - DNA, 278 bp, Glycine max
tacggctgcgagaagacgacagaagggaaagagacccggaaagggcgggaaccgcttttggaaatccattgggcttggatttaagactcccagggaagccatcgaaggaacctacattgacaagaagtgccccttcactggcaatgtttccatccgtggccgtatcttggctggaacatgtcacagtgctaagatgaacaggactattattgttaggaggaattatctccattttatcaagaagtaccagaggtacgagaaaaggcactccaacattc

SEQ ID NO: 199463 - DNA, 264 bp, Glycine max
tacggctgcgagaagacgacagaaggggagggtttttgtcgttgcgactaagagttgctgcttcttccgccactcagcacttcgctccctctgtgcttcaccaaccatggccgaaatcgaagctaccgttccagatccctctcaaatcgacgtcaaacttttcaaccgctggagcttcgacgacgttgaggttactgatatgtctctggctgattacattggagtgtccccgtcaaagcatgctacatatgttcctcacactgc

SEQ ID NO: 199464 - DNA, 263 bp, Glycine max
acggctgcgagaagacgacagaagggggaggcaagaagttgtattttggcatccccgtggcttcaagaagagaatctcaatggaggcccaggagctgaagcgcgtgttccagatgttcgaccgcaacggcgacgggagaataacgaagaaggagctgaacgactcgctggagaacctgggcatcttcatctctgacaaggacctgagccaaatgatccagaggatcgacgtcaacggcgacggttgcgtggacatggacgagt

SEQ ID NO: 199465 - DNA, 271 bp, Glycine max
gctcgagcggctcgagtacggctgcgagaagacgacagaagggggatcctttgtattctattcttcaagattcaggtactgcgtttcggaagcagacacagatggctcgtacgaagcaaaccgctcgcaagtccacaggaggaaaggctcctaggaagcagcttgcaaccaaggctgcacgtaagtctgcaccaactactggtggtgtgaagaagccccaccgttatcgtcctggtaccgttgctcttcgtgagattaggaaataccagaa

SEQ ID NO: 199466 - DNA, 268 bp, Glycine max
tacggctgcgagaagacgacagaagggggcacaagtttgttgagatagctagaagcaataagatgaaaatgaaagtgcttgttttgtttgttgctacagttttggtagcatatgaatgccatggctcagactaccagaagttccctctccaaatgaaaactgggtttggtgggcaatacagcaatgaggtggcatgtgccagttggaggcttggcgtggaagcaaacaacgtagtcaagtggcaaactgttcctgcagcttgcggaga

SEQ ID NO: 199467 - DNA, 274 bp, Glycine max
tacggctgcgagaagcacagaaggggattcatattttccttgcgtttccctttcattttccctcactttctcgctcgccaaacgcccctctctctcctccaatggccgaccagctcaccgacgaccagatcgccgagttcaaggaggccttcagcctcttcgacaaggacggcgatggttgttttactactaaggaacttgggactgtgatgcggtcactagggcaaaacccaactgaggcagaactgcaggatatgattaatgaggttgatgc

SEQ ID NO: 199468 - DNA, 277 bp, Glycine max
acggctgcgagaagacgacagaaggggataccaaaaacaaaacacaagccaagtgaaagtgagaaaaaataaaaatcaaagagcataatgtcagggatcattcacaagattggggagacccttcatgtgggagggcacaagaaggaggaggagcataagggtgagcaccatgctggagaatacaaaggggagcaccatggtgaacacagtagtgagtacaaaggagagcatcatggtgaacacaaagctggagagtaccatggtgagcacaagccag

SEQ ID NO: 199469 - DNA, 276 bp, Glycine max
acggctgcgagaagacgacagaagggtctgaacatacagggaattggaggtagcattttattgatgttaagtcatggactggtttcttcagccctttttctatgtgttggtgttctatatgaccgacataagactcgacttgttagatattacggagggttagtgagcaccatgccgaatttctctaccattttcttctttttcactttggccaatatgagtttacctggtactagcagctttatcggggaatttcttatcttagtaggagctttc

SEQ ID NO: 199470 - DNA, 264 bp, Glycine max
tacggctgcgagaagacgacagaagggggggaaccctaattctgcgaggtgagtgaaaatggcggtacccttgctctccaagaagatcgtgaagaagcgcgtcaagaagtttatacgcccccagagtgatcgcaagatctccgtcaagccaagctggcgcagacccaagggtattgattctcgtgtcaggagacagttcaaaggatgcactttgatgcccaacattggttatggctcagacaagaaaacccgccattatctacc

SEQ ID NO: 199471 - DNA, 263 bp, Glycine max
acggctgcgagaagacgacagaaggggagaccctgtactcatgggaccccaagtcaacatatattcatgaacctccatacttcaagggcatgaccatggatcctcctggagctcatggtgtgaaagatgcctattgtctgctgaattttggtgacagtataacgaccgatcacatttctcctgctggtaacattaacaaggatagtcctgctgcaaaataccttctggagcgaggtgtggaacaaaaggacttcaactcttat

SEQ ID NO: 199472 - DNA, 262 bp, Glycine max
gctgcgagaagacgacagaaggggttcgggtgtgagagcgagaatcagaagatgaagaaggaagacacagtgaagctgatcagtgccgaaggttttgaatttgtggtcgacaaagaagctgcaatggtttcacagaccatacataacatgcttacttctccagggagtttcgctgagaggcagcacggcgaagttacctttcctgagatcagcaccaccattctcgagaagatttgccagtacttttaatggcatctccaat

SEQ ID NO: 199473 - DNA, 262 bp, Glycine max
gacgacagaagggatcagcggtgccccccaggataacaacataatgctgtggaatgctgtcatatttggtcctgatgatgctccatgggatggaggcacgttcaagttgactctccagtttactgaggattatccaaataaaccaccaactgtgcgatttgtgtctcgcatgtttcatccaaatatttatgctgatggaagtatttgtttggatatactacaaaatcagtggagtcctatatatgatgtggctgctatactc

SEQ ID NO: 199474 - DNA, 257 bp, Glycine max
tccaaagtttgtatagtgtaggatttgttggtattcgtgataaaaacacctcatcctattcattttgccatgacgggcgaactccagataaaggttttgaaagtaatgagaaattattaattcatccatgttactggcttggtttgaatctaaatcgtaatgcacttgctccagaggaagcagaggagataaatgacgattatgatattaatattatttcagataattcagccattagaaataaaacaatgggtcaa

SEQ ID NO: 199475 - DNA, 256 bp, Glycine max
acggctgcgagaagacgacagaaggggagaccctgtactcatgggaccccaagtcaacatatattcatgaacctccatacttcaagggcatgaccatggatcctcctggagctcatggtgtgaaagatgcctattgtctgctgaattttggtgacagtataacgaccgatcacatttctcctgctggtaacattaacaaggatagtcctgctgcacaataccttctggagcgaggtgtggaacaaagggattcaac

SEQ ID NO: 199476 - DNA, 255 bp, Glycine max
acggctgcgagaagacgacagaaggggatatccaaaggaacaaaaatattattaagatgatcaacattattggagcacttgttctactctttgcatttctcttcctcagttgtgtgtatgcacaagacacaacaacccttgtgcctgcaatcataacttttggtgattctgctgtggatgtagggaacaatgactatcttcccacccttttcaaggctgattaccctccttatgggagggactttgttaaccacc

SEQ ID NO: 199477 - DNA, 264 bp, Glycine max
ggctgcgagaagacgacagaagggggaaagggtgtggacgaaataatctgtatcagcgtgaatgatccctttgtgatgaactcatgggccaaaacgttcccagagaacaagcatgttaagttccttgctgatggtgcagccaaatacaccaatgccctcggtcttgagcttgacctcaccgacaagggtctcggcgtccgctcaaagaggtttgctttgctggtggaagacctcaaggtgaaggttgcaaatgttgaaagtgga

SEQ ID NO: 199478 - DNA, 263 bp, Glycine max
aagacgacagaagggaaagagacccggaaagggtgggaaccgcttttggaaatccattgggcttggatttaagactcccagggaagccatcgaaggaacctacattgacaagaagtgccccttcactggcaatgtttccatccgtggccgtatcttggctggaacatgtcacagtgctaagatgagcaggactattattgttaggaggaattatctccattttatcaagaagtaccagaggtacgagaaaaggcactccaaca

SEQ ID NO: 199479 - DNA, 268 bp, Glycine max
tctcgagccgattcggctcgagacggctgaagacgacagaaggggaaccagggtagctatgaacagaccattagggtcttgaccacaaggagcaggacccaacttgttgcaactttcaaccgctacagagagatccatggcacttccatctctaagaaattggtggatgaaggatctgatgagtttcagagggcattgtacactgccattcgtgccatcaatgatcctattaagtactatgaaaaggtggtgcgcaatgcaatcaaaa

SEQ ID NO: 199480 - DNA, 274 bp, Glycine max
acggctgcgagaagacgacagaagggggtggcagaagtcctaggagtgtaaaacagagacgcaaaatgaagacgatcttgtcgtctgagaccatgaatattcccgacggcgtgagcatcaaggttcacgctaaggttatcgaggttgagggccctcgtggaaaactcgtgcgagacttccaccatctgaacttggacttccaacttattaccgacgatggcggtaaaaggaagctcaagattgattcttggtttggttctcgtaaaacctccgc

SEQ ID NO: 199481 - DNA, 254 bp, Glycine max
tagacgagagaagggggttctggtttggcgttctttgtctcgcaatcttcactattttcaccgagcatttgcattccacattgaatatggctggggctacacaatctaatgctgagttattggagtggcctaagaaagataagcgccgcttcctgcatgttgtgtgtcgtgttggtgatcttgatcgcaccattaagttttatactgaatgttttgggatgaagcttttgaggaaaagagatattccagaagag

SEQ ID NO: 199482 - DNA, 261 bp, Glycine max
gacgacagaaggggattcatcgctaaagagtacaagaaaataaagtttatcaataacaacatggacatgaagttgaatattccagcaattaatgttttattcttattgctagctatttctagtacaactcaatcggttgacattaatataaaaaaatttggcggaggtgcagatataacacaggctttgacaaaagcttgggaagaggcatgcgcacaacaagtgcaagcaaaattgtgattcctggtgggtcatacaaga

SEQ ID NO: 199483 - DNA, 232 bp, Glycine max
cggctgcgagaagacgacagaagggggaaccatttaagtcagaaagagtttggggtgtgcttgagcttgatgtaggagcttctctctcgcgattgttctgaccctttgctggtttcccagcttgggtacatgcagttgcagattggggacttggagggtgcgaaagtttcgttcttgaaggtggaggagttggggaagagtaatgggtcgttgagcgaggttgagtttagga

SEQ ID NO: 199484 - DNA, 261 bp, Glycine max
acggctgcgagaagacgacagaaggggggtcgcaactgcactttcacttttgctttgagatggcaaagtcgaagaatcacacagcacacaatcagtcctacaaggcccacaaaaacggcatcaagaaacccaagaggcatcgccacacttccaccaaagggatggatcccaagtttctgaggaatcagaggtacgcgaggaagcacaacaagaagagtggtgaaacagccaccgaggaagagtgaaatggcactttctaac

SEQ ID NO: 199485 - DNA, 264 bp, Glycine max
cgagaagacgacagaagggggagagaagttattagggtttttgagtgcggcggtccaaacactcttctctgcagcttttgcctacaactcccttcaccatggctgaacaaaccgagaaagcttttctgaagcaaccaaaagtgtttctcagcacaaagaagactgggaagggaaagagacctggaaaaggtgggaaccgcttttggaagtccattgggcttggatttaagactcccagggaagccatcgaaggaacctatattg

SEQ ID NO: 199486 - DNA, 270 bp, Glycine max
acggctgctagaagacgacagaagggggtatgtgattgttgtgactcgttcttcttcgtcgttatcttcttcttttgttgtttgtgtgtttgttttttctctcacctgaaaatgtcttgctgcggtggtaactgtggttgcggaagcgcctgcaagtgcggcaacggctgcggaggctgcaagatgtacccagacttgagctacaccgagtcaaccaccaccgagaccttggtcatgggagtggcagcttataaggctcaattcgagagt

SEQ ID NO: 199487 - DNA, 266 bp, Glycine max
ctcgagccgcggcgaagacgacagaaggggaagcccgaagattgggatgatgaggaagagggtgagtggacaccccctaccattgccaaccctgattacaagggcccatggaaggcaaagaaaatcaagaaccccaactataaaggaaaatggaaggcaccattgattgataacccagatttcaaggatgaccccgacctatatgttttccccaacttgaagtacgtgggcattgaattgtggcaggtgaaatctggtactttgtt

SEQ ID NO: 199488 - DNA, 259 bp, Glycine max
tacggctgcgagaagacgacagaagggaagccaaatggaagattcttcagctataatccagcaacaaagaagacaaccctgcttgcccaagacctctactttgccaatggggttgcagtttcagcagatcgacaatttgtggtcttctgtgaatctgtcttgatgagatgcaataaatatttcgtcctgggccctataacaggcaccatagagaagttctgtgacctgcctggcatgcctgataacattcattatgatg

SEQ ID NO: 199489 - DNA, 260 bp, Glycine max
tctcgagccgaatcggctcgagcggctgcggaagacgacagaaggggcattaccgttcagaacgaagacagttccaaagatgagtacagagtttggaatcctttccgttcgaagttggccgctgccatccttggtggtgttgacaacatatggattaaacctggtgccagagtcctttacctaggagctgcttccggcaccactgtttctcacgtatcagatgttgttggcccaactggagttgtctatgcagtagagtt

SEQ ID NO: 199490 - DNA, 258 bp, Glycine max
cggctcgagcacaagtgagtttgttgatcgagataactagaaacagtgtgatgaaaatgaaggtccttgttttcttcgttgctacaattttcgtagcatggcaatgccatgcgtacgatatgttccctctccgaatgaacactggctatggtgcccgtactccggaggtgaaatgcgcaagttggaggcttgctgtggaagcacacaacatctttggctttgagaccattcctgaagagtgcgttgaagcaacaaagg

SEQ ID NO: 199491 - DNA, 205 bp, Glycine max
tgcgagaagacgacagaaggggactgcaaatcacttttctactttgagtcttcttgatccttctttttctccttgaactcaaacatggcagatgaggtggttctgttagatttctggccaagtccatttgggatgagggtcaggattgcacttgctgaaaagggtatcaaatatgagtacacagaagaggccttgaggaacaaga

SEQ ID NO: 199492 - DNA, 264 bp, Glycine max
tacggctgcgagaagacgacagaagggaactgttgttgagggaactatacagaagctatttgaagggcatcatatgaattatatcgaatgcatcaatgtggactataaatcaactagaaaggagtcattttatgaccttcagcttgatgtgaagggctgtcctgatgtttatgcttacatagacaagtatgttgaagttgaacatcttgaaggggataacaaatatcatgcggaacaatatggtttgcaggatgctaagaaggg

SEQ ID NO: 199493 - DNA, 268 bp, Glycine max
tctcgagccgaatcggctcgagacggctgcgagaagacgacagaaggcggaacggaaaagcacacggcgcagtaccctgaggcatctcttctcttctcttctctgtcgtgagtcaccatggtgagggttagtgtgctgaacgatgctctgaagagcatgtacaatgctgagaaaaggggaaagcgccaagtcatgattaggccatcctccaaagtcattatcaaattccttttggtgatgcaaaagcacggatacatcggagagtttg

SEQ ID NO: 199494 - DNA, 273 bp, Glycine max
tacggctgcgagaagacgacagaaggggggtggagtgtgcagaagagcgtcgcagtcgcaaccctaatcagaagaagcgcagttcaagcgagtgacagccaccagccatgggtcgtatgcacagccgcggtaagggtatatcctcttctggtttgccctacaaaaggacacctcctagctggctcaagatctcttcgcaagatgtcgaagaaaatatctgcaagtttgcgaagaaaggtttgaccccgtctcagattggtgtcattctcagag

SEQ ID NO: 199495 - DNA, 246 bp, Glycine max
tacggctgcgagaagacgacagaaggggactgcaaatcacttttctactttgagtcttcttgatccttctttttctccttgaactcaaacatggcagatgaggtggttctgctagatatatggccaagtccatttgggatgagggtcaggattgcacttgctgaaaagggtatcaaatatgagtacaaagaagaggacttgaggaacaagagtcctcttctcctccaaatgaacccggctcacaag

SEQ ID NO: 199496 - DNA, 255 bp, Glycine max
tacggctgcgagaagacgacagaagggggaacaagaaagaaaagaaaagaagaggaaaaggagagtggagaggaagaaaaggattgaagttgttgctgtgagaaagagaaagagtgaaatcggagtttgggaaggaattgcaatcaatggatgtgataaagacgcagcaaatctcatctcgaccaatcgagaaggtggtggttcaccctctcgtgcttctcagcatcgtcgacaactacaacagagtcgcaaaag

SEQ ID NO: 199497 - DNA, 265 bp, Glycine max
cctcgagccgaatcggctcgagtacgagacgacagaagggggataacagaaaagagaaatggacacagaaacaaaagtggcagtcttaggtggcatcaccgaagtgcagggagctgccaacagcgtcgagatcaacaatctcgctcgctttgctgtagaggaacaaaacaaaagagagaattcagttctggagtttgtgagggtgattagtgcaaagcagcaagtggttgctggagtgaattactacataacattggaagcaaaa

SEQ ID NO: 199498 - DNA, 251 bp, Glycine max
gcgagaagacgacagaagggggcattatatttgagttcaaacaaatcaaagccatggccacctccaacttctctattgttctctccgtctccctagccttctttttggtgctacttaccaaggcacactcgaccgataccgtttctttcaccttcaacaagttcaacccagtccaaccaaacattatgctccaaaaagatgctagtatttcatcctctggggtgttacaactcaccaaagttggcagcaac

SEQ ID NO: 199499 - DNA, 266 bp, Glycine max
acggctgcgagaagacgacagaagggggagcaagggaaagcaaaaggagaaggtgaataacatggtgctgtttgatcagggcacctatgataagctcctttctgaagctcccaaattcaagctcatcactccttccattctttctgatcgtttgaggattaatggatcacttgcaaggaaggctataagagaattgatggctaggggttcaatcaggatggtgtctgcccatgcaagccagcaaatttacaccagggcaacaaaca

SEQ ID NO: 199500 - DNA, 274 bp, Glycine max
cgagaagacgacagaaggggagagaaagaggcagatagaaaaaagagctgagttttgagttcaaaagatgactaacttcccagtgatcaacttggagaagctcaatggtgaggagagaaacgacaccatggagaaaataaaggatgcttgtgaaaactggggattctttgagctggtgaatcatggcataccccatgacttattggacactgtggagaggttgaccaaagagcactacaggaaatgcatggaagagaggttcaaggaatttatg

SEQ ID NO: 199501 - DNA, 270 bp, Glycine max
tacggctgcgagaagacgacagaagggggcatcaattcaaaatatatcatcaattataagcatgggtttgtggaacacaacgaatgcagtgtcttgccgctttcacaagtttggtgatgaccaaaagaatctggtcttccaaggtgatgccacgtcttcttccaggggcatagaactcacaaagttagacggtggaggaaaaccagtgggtggcagtgtggggagagtgttatactcttctccagtgcacctttgggaaagctctacagt

SEQ ID NO: 199502 - DNA, 270 bp, Glycine max
tacggctgcgagaagacgacaggggacccaaacaaaaaaacaaacgcacgcttctcattctctctctactcgttcagaagatgtttctcacaaggactgagtatgaccgaggagtcaacaccttttctcccgaaggccgtttgtttcaggttgagtatgcaatcgaagccatcaagctggcatcaactgcgattgggttgaagaccaaagaaggagttgtccttgcagttgaaaagcgcatcacatcgccgctcctggagcctagtagtg

SEQ ID NO: 199503 - DNA, 264 bp, Glycine max
acggcagaagacgacagaagggggcatcaattcaaaatatatcatcaattataagcatgggtttgtggaacacaacgaatgcagtgtcttgccgctttcacaagtttggtgatgaccaaaagaatctggtcttccaaggtgatgccacgtcttcttccaggggcatagaactcacaaagttagacggtggaggaaaaccagtgggtggcagtgtggggagagtgttatactcttctccagtgcacctttgggaaagctctacag

SEQ ID NO: 199504 - DNA, 263 bp, Glycine max
cggccgagaagacgacagaaggggaattcaaaatatatcatcaattataagcatgggtttgtggaacacaacgaatgcagtgtcttgccgctttcacaagtttggtgatgaccaaaagaatctggtcttccaaggtgatgccacgtcttcttccaggggcatagaactcacaaagttagacggtggaggaaaaccagtgggtggcagtgtggggagagtgttatactcttctccagtgcacctttgggaaagctctacagtgg

SEQ ID NO: 199505 - DNA, 276 bp, Glycine max
cgggatcctgctcgagtacggctgcgagaagacgacagaaaggggatgcacaagtttgttgagatagctagaagcaataagatgaaaatgaaagtgcttgttttgtttgttgctacagttttggtagcatatgaatgccatggctcagactaccagaagttccctctcctcatgaaaactgggtttggtgggcaatacagcaatgaggtggcatgtgccagttggaggcttggcgtggaagcaaacaacgtaatcaagtggcaaactgttcctgca

SEQ ID NO: 199506 - DNA, 268 bp, Glycine max
ttcgattgcgtgaccaccattttcagtgaccaagtaagagcctgacagacacactatctcgaagcgcccctcgtatgtgacagtgccgcctgaagttgatggctgacgaagtgtgacagtagagacagcaccattggctgacaaaatgcatacaactctaggtccctgctgagaaaatgccatgatttttgttgcaatgtcttctccacttgcaatgttgatgatatgaggagtgaatcccatcccagctgaaccagacatcaattca

SEQ ID NO: 199507 - DNA, 266 bp, Glycine max
acggctgcgagaagacgacagaaggggaggaatcacgattgcaacggcacatgtggagtatgagactgcaaaacgacattatgctcatgtggactgccccggacacgcggattatgttaaaaatatgattaccggagctgcccagatggatacctgtatacttgttgtatctgcaactagtggaccgatgcctcaaaccaaggagcacattcttcttgctcgccaagttggtgtgccatctctggtgtgttttctgaataaagttg

SEQ ID NO: 199508 - DNA, 255 bp, Glycine max
gacgacagaaggggacagaagaaagaagaaaaagaagcgaaactaaagtcagcattcgaaaaagatgagtagcatcggtacaggttacgatctatcggtcaccactttctcccctgatggccgcgttttccagatcgagtatgccgctaaagccgtcgacaacagcgggactgttattgggatcaagtgcaaagatggggttgtgttgggcgttgagaagcttattccgtcgaaaatgatgcttccgggttccaa

SEQ ID NO: 199509 - DNA, 260 bp, Glycine max
cgagaagacgacagaaggggacagcacagcactctttgcaacacaacaaaaaaagacaacacagagagaagcgtcttaataaacgctcttctctgaaaaacctgatttcttctcttcttctcttctctttcgtttcgatcttcgatctctgaaaatgagagagtgcatttcaatccacatcggtcaggccggtattcaggtcggaaacgcctgctgggagctctactgcctcgaacacggcattcagcctgatgggcaga

SEQ ID NO: 199510 - DNA, 268 bp, Glycine max
tctcgagccgattcggctcgagtactgcgagaagacgacagaagggggaagaagattaacgaaggatggaatctgggtctagcgaaggagaagaggtgcagcaacgcgtgccgttgagggagagagtggagtggtcagatgttactccggttcctcaaaacgacggccctaaccctgtcgttccgatccagtacactgaagagttttccgaagttatggattactttcgcgccgtttacctcaccgatgaacgctcccctcgcgccct

SEQ ID NO: 199511 - DNA, 266 bp, Glycine max
cggctcgagctcgagccgaatcggctcgagacggctgcgagaagacgacagaagacgagggaccattattactagaacttggctttgcttccttcaaagtgagggtccattgaatatgtctccgtcgttggatcttcctcccaagggtggcttcagttttgatctatgccgaagaaacgcaatgcttcaaaacaagggcctcaaagccccaacctttctcaaaactggcaccactattgtcggtttagttttccaggatggtgtca

SEQ ID NO: 199512 - DNA, 255 bp, Glycine max
tacggctgcgagaagacgacagaaggggggaacaatgggtgttgctctgactgtgtgcacaattcctggtcaagttgcatcagatcgtttgggaccaggaaagatggaacttggtcttggaattcatggagaacctggggcagctgtggctgatattcagcccgtaaatgtggtggtatctcatgttctgcagcaaattttgtccacggaaacaaactatgttccgataactcgaggagaaagagtggtccttat

SEQ ID NO: 199513 - DNA, 260 bp, Glycine max
tacggctgcgagaagacgacagaagggggatgcacaagtttgttgagatagctagaagcaataagatgaaaatgaaagtgcttgttttgtttgttgctacagttttggtagcatatgaatgccatggctcagactaccagaagttccctctacaactgaaaactgggtttggtgggcaatacagcaatgaggtggcatgtgccagttggaggcttggcgtggaagcaaacaacgtagtcaagtggcaaactgttcctgca

SEQ ID NO: 199514 - DNA, 268 bp, Glycine max
tacggctgcgagaagacgacagaaggggaaataaaattcaagtatcgaagaagaagatggctttaggtgttcctgctcttccgttgacatacgtggctcacgttctggcagttgttgccagcgtcttggtcgtggtctgggtcgtcaatttcaggggtggcttggcttgggattctgataacaagtccctcatcttcaacattcatccagttcttattgttattggcttactagttcatgggggtgaagctattataagttacaaagc

SEQ ID NO: 199515 - DNA, 280 bp, Glycine max
agagacgacagaaggggaggaatggcaagtgagatatttcttgcccttctgatcacaacctttgtggttgcagcctctgctggtaacttcaaccaagactttgagataacatggggtgatggtcgtgccaaaatcctcaatagtggggaacttctcaccttgtccctagacaagacctctggctctggatttcgttctaggaatgagtacttgtttggaaaaattgacatgcaactaaaactcgtgcctggtaactctgcaggcacagtcacagcttatt

SEQ ID NO: 199516 - DNA, 260 bp, Glycine max
acggcgcgagaagacgacagaagggggaattgccgagtttagctgcagaaggtagagagagagagagatggagagcatagagcacagaacggtggaagtgaacggcataaagatgcatgttgcagagaaaggagaaggagcagtggtgttgttcttgcacggcttcccagaactctggtactcatggcgccaccagattctagctctgagctccctcggttaccgtgcggtggcacctgatctccgtggctacggtgaca

SEQ ID NO: 199517 - DNA, 254 bp, Glycine max
gcgagaagacgacagaagggggcatcaattcaaaatatgtcatcaattataagcatgggtttgtggaacacaacgaatgcagtgtcttgccgctttcacaagtttggtgatgaccaaaagaatctggtcttccaaggtgatgccacgtcttcttccaggggcatagaactcacaaagtctgacggtggaggaaaaccagtgggtggcagtgtggggagagtgttatactcttctccagtgcacctttgggaaag

SEQ ID NO: 199518 - DNA, 260 bp, Glycine max
acggctgagaagacgacagaaggggcctctcagagtggatatatagtgtgtcttgataaccttcaaagctacatttgtaaaacactgataagtctgatccagaacgcaaaatgctacagcttggtggttttttgcaccagcagtgttcctgaatgtgatacttgagctataaatccgtccccaactacagctgcaaaattttatttatagttaagtctctttaagtgtaataaaagtttcttgtcaaatacgcaagatag

SEQ ID NO: 199519 - DNA, 262 bp, Glycine max
agacgacagaaggggattcaagagaagcgcaaaaatagtgtgccacaaacaaaaacaaaaacaatatgaagttcactataatcacaatatttttttctttatttctagtcgactttggttttgcacaacaaggggatcttgacatatcaagatttggaggaaaaccgaattcagatataagccaggctttcttaagtgcctggactcaagcatgtgcatcaacaactgctgtcaaaattgtgattccagctggcacatatca

SEQ ID NO: 199520 - DNA, 269 bp, Glycine max
tacagacgacagaaggggagagaaagatgtcgaagcgtggtcgtggtggttcggcggggaacaagttccgcatgtcgctgggtcttccagtggcggcgacggtgaactgcgccgacaacacgggggcgaagaacctctacatcatttcggtgaaagggatcaaaggccgtttgaaccgtcttccctcggcctgcgttggcgacatggtgatggccaccgtgaagaagggaaaacccgatctgaggaagaaggtcttgccagctgtcatc

SEQ ID NO: 199521 - DNA, 276 bp, Glycine max
tacggctgcgagaaacgacagaaggggacccttggcattttccattctctttttggccttcaccatagaaccctttattggcattgctgcagcagcaccagaagcagtgcttgacacctcagcccagaagctgagaacaggtgtcaagtactacattctgccagtgttcagaggcaaaggtggaggcctaacagtttcaagcagtggcaacaacacatgccccctctttgtggtgcaagagaagcttgaagtctcaaagggcaccccagttacctt

SEQ ID NO: 199522 - DNA, 267 bp, Glycine max
acggctgcgagaagacgacagaagggggaatcagaagaagcgagcgaagatgtcgggtcgtggaaagggaggcaagggtttgggaaagggaggagccaagaggcacaggaaggtgcttcgtgacaacatccagggtatcaccaaacccgcaattcggcgtttggctcgcagaggtggtgttaagagaatcagtggtctcatctacgaggagacacgtggcgtcctcaagatcttcctcgagaacgttattcgcgacgctgttaccta

SEQ ID NO: 199523 - DNA, 261 bp, Glycine max; identical to SEQ ID NO: 197460

SEQ ID NO: 199524 - DNA, 256 bp, Glycine max
tacggctgcgagaagacgacagaaggggattttgaaccagttcaaactgaacggccaggagagttaactgcttactacaaaattgcacgtcattacaagtgggctctagatcaactgttctacaagcataacttcagccgtgtaatcatccttgaagatgacatggaaatagcacctgatttctttgattattttgaagctgcagcgagtctccttgagaaggataaatccattatggctgtttcctcatggaatg

SEQ ID NO: 199525 - DNA, 258 bp, Glycine max
  unsure (1)..(258): unsure at all n locations
tacggctgcgagaagacgacagaagggggttcaaagcacgccgtgtttcgctgtctctcccatcctttcgcattctcaatacccttttgatttgtgaaaggaaagcaaacatggttgatcaggtccaacaccctacaatcatggacaaagttcctggtcagggccatctgcgnggtggacatagagctggtattagaggtgctgagggagcctaccgcgacccagctatgtgncagagagcctcttttgggaattact

SEQ ID NO: 199526 - DNA, 275 bp, Glycine max
tctcgagccgaatcggctcgagacggctgcgagaagacgacagaaggagatagcgtttttcatacgtgcattattcaatggccaacacagcagctctatccggaaccatggtgagcacctccttcatgaggaagcaacctatgacgaccaagagcctaaagacattccccaacgctctttttggtctgaaaggtggacgaggtggtcgtgtaacttgcatggcctcgtacaaggtgaagctcataaccccagaaggagaagtggagtttgaatgc

SEQ ID NO: 199527 - DNA, 277 bp, Glycine max
gagaagacgacagaagggggatgcacaagtttgttgagatagctagaagcaataagatgaaaatgaaagtgcttgttttgtttgttgctacagttttggtagcatatgaatgccatggctcagactaccagaagttccctctccaaatgaaaactgggtttggtgggcaatacagcaatgaggtggcatgtgccagttggaggcttggcgtggaagcaaacaacgtagtcaagtggcaaactgttcctgcagcttgcggagagtacatagctgacta

SEQ ID NO: 199528 - DNA, 279 bp, Glycine max
tacggctgcgagaagacgacagaaggggattcccaaatttctcattctcccatttcctctcagaaccctcgatcactcccacgcgctcctatatcctctccttcaccgtcgctctctccaacgatcacaacaacatcgtcatcccatggcaaacgccgcatctggtatggcagtccatgatgactgcaagttaaggtttttggagctgaagacaaagaggacacaccgtttcatagtttttaagattgaggagcagcagaagcaggtcattgtggagaa

SEQ ID NO: 199529 - DNA, 277 bp, Glycine max
tacggctgcgagaagacgacagaagggggagtgactgtccaggttgggcaattagggacgggaaaggagaaacacgaaaatgtttttccacatagtactggagcgaaatatgcagcttcatccacgctactttggtcgtaaccttcgcgataatctcgtttccaagcttatgaaagacgtggaaggcacttgcagtggccgacatggatttgtggtggcagttacagggatagagaacatagggaaagggctaattcgtgatggaacagggtttgtg

SEQ ID NO: 199530 - DNA, 280 bp, Glycine max
acggctgcgagaagacgacagaaggggaggagaagaaaacagaacagcattgcaacacatgggtgcttctggcaacaattttctccaagtggtcgccaagaacttcgatgttcttgctctgcccttggtcacccttgtttaccctttatatgcttcaatcaaggccatagagaccaggtctattactgatgatcagcaatggctgacttattgggttctctattcattgatcacactcttcgagctcacatttgccaaagttcttgaagtgcttgccata

SEQ ID NO: 199531 - DNA, 281 bp, Glycine max
acggctgcgaaagacgacagaaggggcacaccaacaccaaaacaaacccactaagatggtttcctttgtatccttcctagtgctgcttcttgcagcccttatcctcatgcctcaagggcttgctacttactacaaaccaattaagaagccaccagtgtacaagcctccagtgtacaagccaccagtgtacaaaccaccggtttataagccaaaaccaccggtttacaagccgaaaccaccggtttacaagccaccatataagaagccaccatacaagaaac

SEQ ID NO: 199532 - DNA, 181 bp, Glycine max
cggaattctccaaagcttgtatagtgtaggatttgttggtattcgtgataaaaacacctcatcctattcattttgccatgacgggcgaactccagataaaggttttgaaagtaatgagaaattattaattcatccatgttactggcttggtttgaatctaaatcgtaatgcacttgctcca

SEQ ID NO: 199533 - DNA, 272 bp, Glycine max
cgacagaaggggggagaagatggccaagagatgaagtgttagcactgataaacctaaggtgcacaagtctaagcagcaatgaagagaaagaaggaaacaagggtcctctgtgggagacaatctcgcaagggatgtcatcgctgggatacaagagaagtgcaaataggtgcaaggagaagtgggagaacataaccaattacttcagaaaaaccaaggataatgttaataagagaaggtcccttaactctaggacatgtccttatttccatcaa

SEQ ID NO: 199534 - DNA, 273 bp, Glycine max
cggctcgagtacggctgcgagaagacgacagaaggggttggggatggaactacctcagttgttgtattggctggtgaacttttaagggaggcagaaaagctggttgcagccaagattcatcctatgacaataatatcaggtttccgaatggcagcagagtgtgctcgtaatgctttgttggagaaggttgtggacaacaaagcagattctgagaaattcaggtcagacttattgaacattgcaatgactactttgagctccaagattctctca

SEQ ID NO: 199535 - DNA, 250 bp, Glycine max
acggctgcgagaagacgacagaaggggtacagtgtttggaatccttttcgatccgagttggctgctgtgatcctaggcggagttgacaacatatggtttggacctggagtcagagtcctgtacctaggctctgcttctggaaccactgtatcgcatgtcacggacgttgtggggcctgctggagttgtctatgctgtacagttgtcccatagcagtggacgtgacctggccagtatggcatagcagcgaa

SEQ ID NO: 199536 - DNA, 256 bp, Glycine max
ggggttttgggtcctagaacaacatatgtgcttgctctaaaagacttccctggcacccatgaatttcttctgcttgatgaaggaaaatggcagcatgtcaaagagaccacagaaattggtgaaggaaaactgttctccccaggaaatttgagagccacatctgacaaccccgattatgctaagttgatcgattactatgtcaatgaaaagtacacattgagatacactggaggaatggtgccagacgtcaaccaga

SEQ ID NO: 199537 - DNA, 279 bp, Glycine max
tacggctgcgagaagacgacagaaggggggctttagaagcagcctatgcacaagcatttgggaagagtatctctctttctgagcagcagctagtggattgtgctggccgtttcaacaactttggctgtaatggtgggttgccatcacaagcctttgagtacatcaaatacaatggaggacttgagacagaggaagcatacccctacactggaaaagatggtgtatgcaaattctcagctgaaaatgttgccgttcaagtcattgactcggtcaatatca

SEQ ID NO: 199538 - DNA, 263 bp, Glycine max; identical to SEQ ID NO: 199228

SEQ ID NO: 199539 - DNA, 183 bp, Glycine max
acggctgcgagaagacgacagaaggggatggcaatggaaccatcgacttcccagagttcctcaacctgatggctcgcaagatgaaagacaccgactccgaggaggagcttaaggaggctttccgtgtgttcgacaagggtcagaatggtttcatctctgcagctgagctccgccatgtcatga

SEQ ID NO: 199540 - DNA, 206 bp, Glycine max
gaagacgacagaagggggggatggaactggagagcgcaaggaatgggataggatctatgattatgatgtctacaatgacttgggcaacccggatagcggtgataaatatgcacgccccgttcttggtggttcagccttaccttaccctcgcagaggaagaaccggaagaggaaaaactagaaaagatcccaacagtgagaagccga

SEQ ID NO: 199541 - DNA, 270 bp, Glycine max
acggctgcgagaagacgacagaaggggagagtggtggggtgtgcagaagagcgtcgcagttgtaaccctaatcagaagaagcgcacttcaagcgagtgacagccaccagccatgggtcgtatgcacagccgcggtaagggtatatcctcttctgctttgccctacaaaaggacacctcctagctggctcaagatctcttcgcaagatgtcgaagaaaatatctgcaagtttgcgaagaaaggtttgaccccgtctcagattggtgtcatt

SEQ ID NO: 199542 - DNA, 250 bp, Glycine max
ggattggcattaggttgatctgaaatacgcaattgacatggcgagcgcgatggtagaggacgcgaacttcgaagatgaccaactagccaatatgaccaccgacgacatcgtcagagcttctcgtcttctcgacaacgagattcgcatcctcaaggaagagttgcagaggaccaatttggaattggaatcgtacaaggacaagatcaaggagaatcaggagaagattaagctcaataagcagttgccctac

SEQ ID NO: 199543 - DNA, 308 bp, Glycine max
acgtacgctcggacggcaagctccgctcgagcacggctgcgagaagacgacagaaggggaacacgcggcttccgccggaggtgaaccgcgtgctgtacgttcggaaccttcccttcaacatcaccagcgaggagatgtacgacatctttggcaaatacggcgccattcgccagatccgcatcggcaccaacaaggacactcgcggaaccgctttcgtcgtctacgaggacatctacgacgccaaaaccgccgtcgacaacctctccggcttcaacgtcgccaaccgctacctcatcgttctctattat

SEQ ID NO: 199544 - DNA, 271 bp, Glycine max
acggctgcagaagacgacagaagggggatccaatcaagaatacaataacatagcatagagtgagaagtgagaagagaaaaatggcaatctccatacccagtagacaacttttcatagatggagagtggaaagtccctcttctcaacaatcggtttcatatcatcaaccccgctactgaagacatcatagggcatattccagccgctactaaggaagatgttgaccttgcggtggatgctgctaaaagagccttttcccataacaaaggcaa

SEQ ID NO: 199545 - DNA, 272 bp, Glycine max
cggctgcgagaagacgacagaagggggcacaagtgagtttgttgatcgagataactagaaacagtgtgatgaaaatgaaggtccttgttttcttcgttgctacaattttggtagcatggcaatgccatgcgtacgatatgttccctctccgaatgaacactggctatggtgcccgtactccggaggtgaaatgcgcaagttggaggcttgctgtggaagcacacaacatctttggctttgagaccattcctgaagagtgcgttgaagcaaca

SEQ ID NO: 199546 - DNA, 281 bp, Glycine max
tacggctgcgagaagacgacagaagggggttttgattagggtttgtcattagcacttcttcttttcacactgccgctgcaacaatggcttcagagaagaaactttcgaacccaatgagggagataaaagtgcagaagctcgttctcaatatctctgttggcgagagtggagatcgtctcaccagagccgccaaggtgttggaacaacttagtggccaaaccccagtgttttccaaagcaaggtacactgttcgttcctttgggattagaagaaatgagaag

SEQ ID NO: 199547 - DNA, 286 bp, Glycine max
acggctgcgagaagacgacagaagggtacatggaattctgtgatgattctgaggcaactttcagaagagccttggacttgctgcagaagcaagcaatggtgaaggaaggagaagaagtagcacttgtacaaagtggtaggcaacccatatggaggttccaatccacgcacaatatccaggttaggaaagtgtaaaccagaagaatggagagtggccacgaataatgtttcaagacacagtacgtttagcttcacaagagcatcatcttagtgttgcctcttagttg

SEQ ID NO: 199548 - DNA, 267 bp, Glycine max
acggctgcgagaagacgacagaaggggctgcgttgtgcgtcggagctgtgtctggggaaatttgcgttgtttttcgcggtacagctcacacacactgaacggtaagtatggcggacaaggctgttacaatccgaacccgaaagttcatgaccaacaggcttctttccaggaagcagtttgtcgttgatgttcttcatccagggagggcaaatgtttccaaggctgaacttaaggagaagctagctaggatgtatgatgtgaaagacc

SEQ ID NO: 199549 - DNA, 284 bp, Glycine max
ccacgctcttcgatcttatcctggctgcgaactacttgaacatcaagagcctgctggaccttacatgccaagctgtagccgacatgatcaaggggaagactcccgaggaaattcgcaagacctttaacattaagaatgacttcacccctgaggaagaagaggaagttcgtcgggaaaatcaatgggcatttgaatgattttgttgagctcataaaatatgaatcaaagatctgccatgtggatttatgctatgcttgtttgtttatcaaagatcttccttgtag

SEQ ID NO: 199550 - DNA, 270 bp, Glycine max
cggacgacagaaggggatcgcaccattaagttttatactgaatgttttgggatgaagcttttgaggaaaagagatattccagaggagaaatatgccaatgcttttcttggatttggccctgaacaatcccattttgttgtggaattaacatacaattatggggtgacctcatatgatattggaactggatttggacattttgctatcgcaactccagatgtttacaaattggttgaagacatccgggctaagggtggaaatgtcaccagg

SEQ ID NO: 199551 - DNA, 270 bp, Glycine max
tacggctgcgagaagacgacagaaggggacggacgagggtttcgtttcgggtttgacgttgttcacaatcactttctgcgcttcactcactcccttcgtgcggttttctttctttgtcgaactcgtgcgaaaatgcgtgagattcttcacatacagggagggcaatgcggaaaccagatcggagcgaagttctgggaggtggtgtgcgcggacacgggatcgattccacggggaggtaccagggggacaacgagttgcaactcgagcgag

SEQ ID NO: 199552 - DNA, 248 bp, Glycine max
ggctgcgagaagacgacagaagggggcagcgcttgagaccaagccccactcaaccaccacaccactctctctgctcttcttctacctttcaagtttataaagtattaagatggcagagacattcctatttacctcagagtcagtgaacgagggacaccctgacaagctctgcgacaaaatctccgatgctgtcctcgacgcttgccttgaacaggacccagacagcaaggttgcctgcgaaacatgca

SEQ ID NO: 199553 - DNA, 267 bp, Glycine max
tacgcgagaagacgacagaaggggaacacgcggctgccgccggaggtgaaccgcgtgctgtacgttcggaaccttcccttcaacatcacgagcgaggagatgtacgacatcttcggcaagtacggcgccattcggcagatccgcatcggcaccaacaaggacactcgcggaacggccttcatcgtctacgaggacatctacgacgccaaaaccgccgtcgaccacctctccggcttcaacgtcgccaaccgctacctcatcgttctc

SEQ ID NO: 199554 - DNA, 264 bp, Glycine max
acggctgcgagaagacgacagaagggtccatctttattacagaaccgtacatgagattttcacctcatacggctcctcgcgaatgaagcaattcaaatagatatctatctatatatatagataatctatttaatctaatcgataaaataatatgcactaatattcatatgtttaatgaataattgaatagcgggattttttgagatttcatagaatctattccaaatttttatattttgttttgatatagaatggaatatgtat

SEQ ID NO: 199555 - DNA, 266 bp, Glycine max
acggctgcgagaagacgacagaagggggtgcagcatcgtagaggaataagggaaaaatggtgtcgctgaaactgcagaagcgcctctccgcaagcgtgctcaagtgcggcagaggaaaggtttggcttgaccccaatgaagtcaacgaaatctccatggccaattctcggcaaaacatcaggaagttggttaaggatgggtttatcatcaggaagccaaccaagattcactcccgctcacgtgctcgtaggatgaaggaggcaaag

SEQ ID NO: 199556 - DNA, 264 bp, Glycine max
tacgctgcgagaagacgacagaaggggaagtgtgagtgatatttgagcttaaaccctagccgctcttctcttcattcttcactttggaaacaatcataatggcgttctgtaataaggttggaaatgtcttgaggcagggtgctgctcgcagcacacatgcccctgttgcgtccatgcttaattacatccgctgcatgtcttcaagcaagcttttcattggaggcctttcatatggagttgatgaccagtctcttaaggatgcat

SEQ ID NO: 199557 - DNA, 269 bp, Glycine max
tacggctgcgagaagacgacagaaggggatcatcgaatccaccccagcgttgttgcattgtagaaggcgatggccgcgcgagctctgttgaccagaaaaaccctagccaccgtgctccgcaacgacgcgaacccataatcggagttggcataacagcagcggctactcattcacgcgggttgcacgtgtacacgctacccgatctggattacgactatggcgcactggagccagccatcagcggcgacatcatgcagctgcaccaccag

SEQ ID NO: 199558 - DNA, 268 bp, Glycine max
agaagagacagaaggggactactaccaagtgaaaaagcaactaagcatagtgtataagaaagggagaaaaacaagtgctgtgtagagagaaaaatggctaggtggtgcatgatcttggtggttcttgctcttgccgtggttgcaagtgccagaaacatgtacaatgacgctggtttggaggaccagaagaacttccttgggtatgggttttcgggagttggcaacaatggccttccctttggtggagtgggttctgggtttgatggta

SEQ ID NO: 199559 - DNA, 257 bp, Glycine max
tacggctgcgagaagacgacagaagggaaagagacccggaaagggtgggaaccgcttttggaaatccattgggcttggatttaagactcccagggaagccatcgaaggaacctacattgacaagaagtgccccttcactggcaatgtttccatccgtggccgtatcttggctggaacatgtcacagtgctaagatgaacaggactattattgtgaggaggaattatctccattttatcaagaagtaccagaggtacg

SEQ ID NO: 199560 - DNA, 278 bp, Glycine max
  unsure (1)..(278): unsure at all n locations
tacggctgcgagaagacgacagaagggggagtgtgaagcacatatatctgcagcactgcagtctttggttggccaaagcccggatttggttgtttttctgtctctagttgagagatgttggcaggatctttgtgaccaaatgttgatgatccgtggtatagccttgtttctggataggacatatgtgnagcaaactgcaaatgtccggtcattatgggacatgggcttacaacttttccgcaaacatctttcattgtctccggaagtagaacacaaaa

SEQ ID NO: 199561 - DNA, 279 bp, Glycine max
acggctgcgagaagacgacagaaggggatgtcatagtattatcattcattctcatctttctctcttctctctccacccaaaccctaactcccgaccctgttcccctctcgtatccgtcatgaaaggaggaaagtccaagaccgaatctaagagagccgatcccaaacttgctgtgaataagaagggagccgccaccaaggctaggaaacccgccggcaaggggaaggcagcgaaagaccctaacaagccaaagaggcctccaagtgctttcttcgtttt

SEQ ID NO: 199562 - DNA, 272 bp, Glycine max
tacggctgcgagaagacgacagaagggggagaaccaaacacgacgctgcgccttgtgtagttgcccaacgccgcgccaccagatagttacacttttttcttcaactcaagagaagagcttccatggagaatgcagacatccctgagaatgccaacgagcattgcccaggtcctcagtctgaatctgctggaaaatctgatgcatgtgaagggtgcccgaatcaacaaatttgtgccactgcccccaaaggacctgaccctgatctggttgcc

SEQ ID NO: 199563 - DNA, 275 bp, Glycine max
gattgtattcttatcagaaagaccactgagtctaggggatgtaacagccaagaacttaaaggaggttggattcaacacatgggagaagttaattctcagggatccatctgagtactctggtaagttatcatttgaatacaaatcagctgagagagagaagctggagaaggagggatacagaatcattggaaacgttggagaccaatggagtgacctcctgggaagcaacaaagggactaggacttttaagctgcctaatcccttgtactatgatt

SEQ ID NO: 199564 - DNA, 280 bp, Glycine max
acggcgcgaagacgacagaaggggatagtattatcattcattctcatctttctctcttctctctccacccaaaccctaactcccgaccctgttcccctctcgtatccgtcatgaaaggaggaaagtccaagaccgaatctaagagagccgatcccaaacttgctgtgaataagaagggagccgccaccaaggctaggaaacccgccggcaaggggaaggcagcgaaagaccctaacaagccaaagaggcctccaagtgctttcttcgttttcatggagga

SEQ ID NO: 199565 - DNA, 278 bp, Glycine max
tacggctgcgagaagacgacagaaggggaagcttagtgatgaccaagttaatctccttgaacaaaactttggaaatgaacacaaacttgagtccgagagaaaggacaggctggcaatggagcttggtttggaccctcgacaagttgctgtgtggtttcaaaacagaagagctcgttggaagaacaaaaagttggaagaagagtactccaaccttaaaaaaaatcatgaagccaacttgctcgagaaatgtcgcctagagactgaggtgttgaagctca

SEQ ID NO: 199566 - DNA, 274 bp, Glycine max
cgagaagacgacagaagggcaagcagaagcctatttggatgaggaaacctgaagagattacgaaagaagaatatgctgctttctacaagagtcttaccaatgattgggaagagcatttggctgttaagcacttttctgttgagggtcagctggagtttaaggctgtcctctttatccccaagagggcaccttttgatctctttgacaccaggaagaagcctaacaacatcaaactgtatgtccgccgtgtcttcatcatggacaactgtgagga

SEQ ID NO: 199567 - DNA, 278 bp, Glycine max
tacggctgcgagaagacgacagaagggtgtcatcaaaaggatcaaattgggatgagattgactttgaattcttggggaatctgagcggtgacccatacattcttcacaccaatgtgttcagtcagggcaaaggcagcagagagcaacagttctatctgtggttcgacccaactgcagatttccatacctattccattctttggaatcctcagcgcataatgtaagcacttgtcaatggcctaagtaccctcaagcattcctcaaaaatgttttatatt

SEQ ID NO: 199568 - DNA, 273 bp, Glycine max
tacggctgcgagaagacgacagaagggggaagatatattattgtgattgtgaacaaaaaagtgtagtgggaaatggcaggtgcgggtgcaggaggagggtatggggacgcgaaccagaggatagactacgtgttcaaggtggtgctgataggggactcggcggtggggaagtcgcagatactagctcggtttgcgaggaacgagttcagcttggactccaagtccaccatcggtgttgaatttcagacgaggactttggttatcgatcacaag

SEQ ID NO: 199569 - DNA, 275 bp, Glycine max
tacggctgcgagaagacgacagaagggggcacaagtgagtttgttgatcgagataactagaaacagtgtgatgaaaatgaaggtccttgttttcttcgttgctacaattttggtagcatggcaatgccatgcgtacgatatgttccctctccgaatgaacactggctatggtgcccgtactccggaggtgaaatgcgcaagttggaggcttgctgtggaagcacacaacatctttggctttgagaccattcctgaagagtgcgccgaagcaacaa

SEQ ID NO: 199570 - DNA, 272 bp, Glycine max
tacggctgcgagaagacgacagaagggggggagagaatagagaagagagatggatccagacgcgttggcaaaggcattcgtggagcactactacagcaccttcgacaccaacaggaacggcttagcgaatctctaccaggagggttccatgctcactttcgaagggcagaagatccaaggcgcttccaacatcgttgccaagctcacctccctcccttttcagcagtgccaccactcaatctccaccgtcgactgccagctctccggcgtca

SEQ ID NO: 199571 - DNA, 268 bp, Glycine max
tacggctgcgagaagacgacagaaggggaagcttagtgatgaccaagttaatctccttgaacaaaactttggaaatgaacacaaacttgagtccgagagaaaggacaggctggcaatggagcttggtttggaccctcgacaagttgctgtgtggtttcaaaacagaagagctcgttggaagaacaaaaagttggaagaagagtactccaaccttaaaaaaatcatgaagccaccttgctcgagaaatgtcgcctagagactgaggtgt

SEQ ID NO: 199572 - DNA, 275 bp, Glycine max
tacggctgcgagaagacgacagaagggggcacaagtttgttgagatagctagaagcaataagatgaaaatgaaagtgcttgttttgtttgttgctacagttttggtagcatatgaatgccatggctcagactaccagaagttccctctccaaatgaaaactgggtttggtgggcaatacagcaatgaggtggcatgtgccagttggaggcttggcgtggaagcaaacaacgtagtcaagtggcaaactgttcctgcagcttgcggagagtacata

SEQ ID NO: 199573 - DNA, 274 bp, Glycine max
  unsure (1)..(274): unsure at all n locations
tacggctgcgagaagacgacagaagggtattcttgtggtaggccctgttcctggtcaaaaatataaagaaataacctttcctattctttccccggatcccactactaagagagatgttcatttcttaaaatatcctatatacgtaggtgggaacaggggaaggggtcagatttatcttgacgggagcaagagtaataataatgtgtataatgctacagcagcgggtatggtanaaaaaatcatacgaaaagaaaaagggggatacgaaataact

SEQ ID NO: 199574 - DNA, 274 bp, Glycine max
tacggctgcgagaagacgacagaagggggcacaagtgagtttgttgatcgagataactagaaacagtgtgatgaaaatgaaggtccttgttttcttcgttgctacaattttggtagcatggcaatgccatgcgtacgatatgttccctctccgaatgaacactggctatggtgcccgtactccggaggtgaaatgcgcaagttggaggcttgctgtggaagcacacaacatctttggctttgagaccattcctgaagagtgcgttgaagcaaca

SEQ ID NO: 199575 - DNA, 278 bp, Glycine max
tagcgagaagacgacagaagggattggatttttggttatactatgctacatacttctgtggaggtacacttggtctagtctatagcaataatctgggacagattgcacaatctgtgggccagagttcaaatacttctacacttgtcatgctctatgcatccttttctttttttggtcgcttgctttcagttggaccggactacattcggaataagatctactttgcaaggactggttggctatcaattgcacttataccaaccccagttgcgttcttc

SEQ ID NO: 199576 - DNA, 279 bp, Glycine max
tgcgagaagacgacagaagggggaacaagcaaaattaagcacaaaagcccaaccctctctctcgctgttggtctctcctatttggcattcgcagatcgattacgaagtaatttcactgaatcttattgaagatgtttctcacaaggactgagtatgaccgaggagtcaacaccttttttcctgaaggccgtttatttcaggttgaatatgcaatcgaagccatcaagctgggatcaactgcaattgggttgaagacgaaagagggtgttgtccttgcag

SEQ ID NO: 199577 - DNA, 265 bp, Glycine max
tatgctgcgagaagacgacagaaggggctcataagtcaatttgctgatcgcaacactaaaattcttactccaaaaaactgtcaatctgttgaaatgtatttcaattcgcagaaaatggcaaaaaccatagggaagctggctgaaaaaacaccagaagttggtgaaactgtcagtggtttgcttgtacaaaaaggcttcacatatcagattatggcagctgatgatctccatgtcttctcacaactatcaacagcaaacattactc

SEQ ID NO: 199578 - DNA, 277 bp, Glycine max
ggaagcaaaaaatgaaaacccaaagtgcttctctcctctgtctttttctctctctcgctatccttttggctagttgcactgctgcaagtgcaactccaagaagcgcagtgccaagccaccatgtttcaacattcaacagaagcctttttccttccacttttctctttggaattggttcttttcgcttaccaggcagaaggagcagcaagtgtagatgggagaggaccaagcatatgggacacctacactagacagcatactgaaaagatttgggatc

SEQ ID NO: 199579 - DNA, 262 bp, Glycine max
tacggctgcgagaagacgacagaagggtacggctgcgagaagacgacagaagggtagcaagagtggtgaccctgtaactgctgatgatctaggtgttggaggtgctttaacagttttaatgaaggatgccattcaccctacccttatgcagactctggaaggaactcctgttcttgttcatgcaggtccatttgcagatattgctcatgggaattcttctattgtggctgataagattgcactaaagttagttggaccaggt

SEQ ID NO: 199580 - DNA, 282 bp, Glycine max
cggctcgagacggctgcgagaagacgacagaagggggcacaagtgagtttgttgatcgagataactagaaacagtgtgatgaaaatgaaggtccttgttttcttcgttgctacaattttggtagcatggcaatgccatgcgtacgatatgttccctctccgaatgaacactggctatggtgcccgtactccggaggtgaaatgcgcaagttggaggcttgctgtggaagcacacaacatcttgggctttgagaccattcctgaagagtgcgttgaagcaaca

SEQ ID NO: 199581 - DNA, 274 bp, Glycine max
tacggctgcgagaagacaacagaaggggctgagcaaaaccctaatccctatttttcttcctcagtagtgtcatttacgcttctcttctctgcagcaactatgcctaaccctaaggtcttcttcgacatgaccatcggcggtcaatctgctggccgcatcgtgatggagctctacgccgacgtcactccccgcaccgccgagaacttccgcgcgctttgcaccggcgagaagggcgtagggcggacggcaagcccctccactacaagggctcgtc

SEQ ID NO: 199582 - DNA, 273 bp, Glycine max
agaagacgacagaaggggatgcatagcaattcccaattcctaattgtttaaacctaattctcatttcttcatcgttcgattcttctcctcctaaagatgcagatcttcgtgaaaactttgaccggtaagaccatcacccttgaggtggagtcctccgacaccatcgataacgtgaaagctaagattcaagacaaggaagggatcccacctgaccagcagagacttatctttgcgggtaaacagcttgaggatggtcgaacccttgccgactac

SEQ ID NO: 199583 - DNA, 275 bp, Glycine max
tacggctgcgagaagcgacagaaggggacactaaacaagttaaaagaagagcatcactgaactaacaaagcaaccatatgtcgaaggtggtttgtgtcaccggagccagcggcgccatcggatcatgggtggtcctactcctcctccagcgtggttacaccgtccatgccaccgtccaagatatcaaggatgaaaatgagacgaaacatttggaggaaatggaaggagcaaagagtcatctccatttttttgaaatggatcttcttgacatcgac

SEQ ID NO: 199584 - DNA, 268 bp, Glycine max
acggctgcgagaagacgacagaagggtaatttgggaattattgctcccatcgccattggtttcattgtcggcgctaacattttgttgggtggggccttctctggagcggccatgaaccccgctgtgacatttgggcctgctgtcgtgagctggacctggaccaaccactggatctactgggccgggcctctcatcggtggtggaatcgctggccttgtttacgaggttgtctttatcagccacacccacgagtagcttcccaccactg

SEQ ID NO: 199585 - DNA, 272 bp, Glycine max
ctgcgagaagacgacagaagggggcacaagtttgttgagatagctagaagcaataagatgaaaatgaaagtgcttgttttgtttgttgctacagttttggtagcatatgagtgccatggcccagactaccagaagttccctctccaaatgaaaactgggtttggtgggcaatacagcaatgaggtggcatgtgccagttggaggcttggcgtggaagcaaacaacgtagtcaagtggcaaactgttcctgcagcttgcggagagtacatagc

SEQ ID NO: 199586 - DNA, 274 bp, Glycine max
tagaggacagaaaagactatagaagtgggcacaagtgagtttgttgatcgagataactagaaacagtgtgatgacaatgaaggtccttgttttcttcgttgctacaattttggtagcatggcaatgccatgcgtacgatatgttccctctccgaatgaacactggctatggtgcccgtactccggaggtgaaatgcgcaagttggaggcttgctgtggaagcacacaacatctttggctttgagaccattcctgaagagtgcgttgacagcaca

SEQ ID NO: 199587 - DNA, 277 bp, Glycine max
tacggctgcgagaagacgacagaagggggttttcattgggtgctgatcggaacaaacagggaatagaagagaggagaagatgggtttcataatggaatttgcggagaacttggtattaaagttgatggaagatccgaaggaaagggatcggaggttcagggagcacgtttatagagtgaaggacaggtgcgagaagacgaaggagatgtggagctaccctatgcgaccctatgggttttggacattcgaacgccacaattcccagcttgcttgggat

SEQ ID NO: 199588 - DNA, 274 bp, Glycine max
acggctgcgagaagacgacagaagggggcacaagtgagtttgttgatcgagataactagaaacagtgtgatgaaaatgaaggtccttgttttcttcgttgctacaattttggtagcatggcaatgccatgcgtacgatatgttccctctccgaatgaacactggctatggtgcccgtactccggaggtgaaatgcgcaagttggaggcttgctgtggaagcacacaacatctttggctatgagaccattcctgaagagtgcgttgaagcaacaa

SEQ ID NO: 199589 - DNA, 270 bp, Glycine max
cgagaagacgacagaagggggaaaccgagaagaagaagatggagatgtatcagatctggagcaggagaatagcgttgggagcgttcgcgtttgttctgcttttcctatcggcctcagcagacgacgtcgttgtgctctctgaagataacttcgagaaggaagttggtcaggacagaggagctctcgttgagttctatgctccttggtgtggacactgcaaaaagcttgctccagaatatgaaaagcttggtagcagcttcaagaaagcca

SEQ ID NO: 199590 - DNA, 266 bp, Glycine max
aagacgacagaaggggagagctgagctgcgaaaacccccaactccaacctctgttcatcgtctaccgcgctttcttttcaaccagaactatgattaagctttttaaagtaaaggaaaagcagagagaacttgcagaaaatgcaagtggcggaccacctgttaagaagcaaagtgctggagagttgcgtcttcacaaagatataagtgagctgaatctaccaaaatcatgtaccatgcaattccccaatggcaaagatgatctgatg

SEQ ID NO: 199591 - DNA, 285 bp, Glycine max
tacggctgcgagaagacgacagaagggggaagataaagaaaagagaaatggcaacagaaacaaaagtggcagtattaggtggcatcaccgaagtgcagggagctgccaacagcgtcgagatcaacaatctcgctcgctttgctgtagaggaacaaaacaaaagagagaattcagttctggagtttgtgagggtgattagtgcaaagcagcaagtggttgctggagtgaattactacataacattggaagcaaaagatggtgagattaaaaatgagtataaagcga

SEQ ID NO: 199592 - DNA, 255 bp, Glycine max
acggctgcgacaagacgacagaaggtggccattgttgttgctattatcatccgcagctgcttttattcgcaccgcaaacagtgagccatggccgtcggaaagaacaagcgcatctccaaggggaagaagggtggcaagaagaaggcagttgatccctttgccaagaaggattggtatgacattaacgctccttctgtttttcaagtgaaaaatgttggcaaaaccctcgtctctcgtactcagggtaccaagatt

SEQ ID NO: 199593 - DNA, 284 bp, Glycine max
gctgcgagaagacgacagaagggggaagttagaatacaggtgtgaattaagtaaatcaatggatagtcttggtcctattgaaaataccagtctaagggaagaccctaaaattttaaccgatatagaaaaaaaaattcacagggatttggattatttagaaatggaaggttttttttctagcgatctgaatactgtttctaagaatgatgatgatcattacatgtatgagactcaatttagttttaacaataatattactagtttcattgatagttgcattgaga

SEQ ID NO: 199594 - DNA, 280 bp, Glycine max
aagacgacagaaggggaattaacatatatatagcaagcatggcagtcacactctacgaccttagctcttcctctgggttgaacaaacttgatgagtaccttctcacacgcagttacatcaccgggcactcatcctacaaaggatgatcttactgtttatgcagctttgccaactgctccatcagatgaatatggaaatgtttccaggtggtacaagcacattgatgctttgttgagaatctctggtgttactggcgacggatctggtgttattgttgagg

SEQ ID NO: 199595 - DNA, 258 bp, Glycine max
aatcggctcgagtacggctgcggagaagacggcagatccggggattttgttaacctatcggctgcgtccgcggctgatgctgtgtttggagacttggtattttcaggtgctcgtgctcattactggcttgcttgataaccctcaactctctcttgattctatctcagtttgcatggcaataacagggttgacgatgcatattggaattggatttaatgcagctgcaagcgtgagggtgggtaacgagttgggagctga

SEQ ID NO: 199596 - DNA, 270 bp, Glycine max
aagacgacagaaggggatcacaattcacaaagagacaattcaacttaagagatcaatatggccaccaccactaaccagcctccctctaatatctgttttttccttctgttgttgcttctagcacactttcatttgggcataagccaacttgagctgaattactactctaaaagctgcccaaaagctgaagagatcatcaaggaacaagtcacacaactatataacaagcattgaaacactgccgtttcgtgggtcagaaatctcttccac

SEQ ID NO: 199597 - DNA, 267 bp, Glycine max
tacggctgcgaaaagacgacagaagggcatcatcatcaccgttgattgaagaagatgccgatcagagacatcgccatcggaaggcctgaagaggctactcaccccgacacgttgaaggcggggttggctgagttcatctccaccttgattttcgtgttcgccggttcaggttccggcatcgcctacaacaagctcaccgacaacggcgccggcactcccggcggcctcatctccgcttccatcgcccatgctttcgccctcttcgtc

SEQ ID NO: 199598 - DNA, 284 bp, Glycine max
tacgcgacagaagggggatctatgattatgatggctacaatgacttgggcgatccagataagggtgaaaagtatgcacgccccgttcttggaggttctgccttaccttaccctcgcagaggaagaaccggaagaggaaaaactagaaaagatcccaacagtgagaagcccagtgattttgtttaccttccgagagatgaagcatttggccacttgaagtcatcagattttctcgtttatggaatcaaatcagtggctcaagacgtcttgcccgtgttgactgat

SEQ ID NO: 199599 - DNA, 279 bp, Glycine max
agaagacgacagaagggggctggcaattaactcacgagggctgcacatcgacaatgggtggggagcggaacaaggtcttctctttggccgaggtctctcagcacaacaatgccaaagactgttggcttgtcattcatggcaaggtttataatgtgacaaagttcttggaggaccaccctggaggggatgaggtcctgttgtcttccacagggaaagatgcaaccaatgattttgaggatattggtcacagcaccagcgccgtagccatgatggatgagt

SEQ ID NO: 199600 - DNA, 278 bp, Glycine max
  unsure (1)..(278): unsure at all n locations
tacggctgcgagaagacgacagaagggtcctacatctatatataaacactggtttatcaagaatacgcaagataagcattttgaattgttgattcattgccagagatggcttagaatcaatagttncttatctaatggatttttccgttctaatactctatctgagagttatcaatatttatcaaatctgttcctatctaacgaagcgctattggatcaaatgacaaagacattgttgagaaaaagatggcttttcccagatgagatggttgttgcta

SEQ ID NO: 199601 - DNA, 277 bp, Glycine max
tacggctgcgagaagacgacagaagggggcattgctttgaatttggaatccaaaaatgttggtgttgtattaatgggtgatggtttgatgatacaagagggaagttcagtaaaagcaacaggaagaattgctcagatacctgtaagtgaggcttatttgggtcgtgttataaatgccctggctaaaccaattgatggtcgaggagaaatttcagcttcggaatctcgattaatcgaatctcctgctcccggtattatttcgagacgttccgtatatg

SEQ ID NO: 199602 - DNA, 278 bp, Glycine max
cggctgcgagaagacgacagaaggggcacaagtgagtttgttgatcgagataactagaaacagtgtgatgaaaatgaaggtccttgttttcttcgttgctacaattttggtagcatggcaatgccatgcgtacgatatgttccctctccgaatgaacactggctatggtgcccgtactccggaggtgaaatgcgcaagttggaggcttgctgtggaagcacacaacatctttggctttgagaccattcctgaagagtgcgttgaagcaacaaaggaat

SEQ ID NO: 199603 - DNA, 277 bp, Glycine max
tacggctgcgagaagacgacagaagggggtgcacagcttgaacacaccgcgtttcggagagagacgtcgcaatggggaggaggcctgcaaggtgttatcggcagataaaaaacaagccataccccaaatcacgcttttgccgtggtgttcctgatcctaagatcagaatttatgatgttggtatgaagaagaaaggtgttgatgagtttcccttctgtgctcatctggttagctgggaaaaagaaaatgtttcaagtgaagcattggaagctgctag

SEQ ID NO: 199604 - DNA, 283 bp, Glycine max
tctcgagccggctcgagtacggctgcgagaagacgacagaagggatagaagccatctcactatatcttaaccaaagaagtagtttggcatcaaatgatttctccaaattctgcaactgtggtggaaaacgtgatagtattcgacagaatgccaattattctgcaaaatatgttgaagtgatcaatactcaacagaaacaacttgagggtatgaagtacttttttgaagagacaaaattggaggtcagacaaattcaatcagaatggggaagaagcattgagta

SEQ ID NO: 199605 - DNA, 251 bp, Glycine max
  unsure (1)..(251): unsure at all n locations
gggagaaggctgatttgatcaaggtcagtgatgcgganttgagttcctcacaggaagtgacaagattgatgatgaatctgctttgtcattgtggcaccccaatttgaagttgctccttgtcactcttggggaacatggttccagatactacaccaagagtttcaaaggatcggtagatgctttccatgtcaatacagttgatacaactggtgccggtgattcctttgttggtgctttattggccaagattg

SEQ ID NO: 199606 - DNA, 279 bp, Glycine max
tctcgagccgaatcggctcgagtacggggcgagaagacgacagatacggggcatcaattcaaactatatcatcaattataagcatgggtttgtggaacacaacgaatgcagtgtcttgccgctttcacaagtttggtgatgaccaaaagaatctggtcttccaaggtgatgccacgtcttcttccaggggcatagaactcacaaagttagacggtggaggaaaaccagtgggtggcagtgtggggagagtgttatactcttctccagtgcacctttggg

SEQ ID NO: 199607 - DNA, 281 bp, Glycine max
ttgcgagaagacgacagaagggggagttctactaagaaaccatattccacgtatccttaaaaagcacttcaggggagagccatattacgttgatcttcttgatttgtttaatgaggttgagttccagactgcttcaggacagatgatagatctgatcaccacactggaaggagaaaaagacctgtctagatacacattaacactgcatcgacgtattgttcagtactagactgcatattattccttttaccttccggttgcatgtgcattgctcatggcgg

SEQ ID NO: 199608 - DNA, 252 bp, Glycine max
gatgcataagagcaagcacaaggtctgattcgtgtttccttacatcaacttgtggtctaaaaatgggaaggatgccatgctgtgagaaggtagggttgaacaaaggaccatggaaaaccgaagaagatgagaagctcgtggcttatgttgaaaggcatggccctggaaactggcgttcagtgcctgccaaagcgggtcttcaaagatgtggcagagttgtagactgaggtggatcaactacctaaaccctat

SEQ ID NO: 199609 - DNA, 275 bp, Glycine max
tacggctgcgagaagacgacagaaggggatgggatttagagagagagagaacttcaactgagggtgagagtgacacaaatctagggagcactactctaaaagttctattagattcttcaaaacatgaccatgcatcgcgagtcttgggcttttgtcttcggcgttatgggcaacatcatctcctttggagtgatccttgctccattgccaaccttttaccaaatctacaagaagaaatccactgaagggttccagtcacttccttatgttgttgc

SEQ ID NO: 199610 - DNA, 258 bp, Glycine max
tgcgagaagacgacagaagggggcagagagaagaaggacagagtgagaaagagagagagggagacagaaactgagagaaattcgcaaaccctaatttcggaaagatcggcgatggctgcctccaaggatcgcgagatattcgtctacatcgccaagctcgccgaacaggccgagcgatacgaagagatggtggaatcaatgaagaacgttgcgaatctcgacgttgaactgactgtggaggagcggaatttactttct

SEQ ID NO: 199611 - DNA, 267 bp, Glycine max
tctcgagccgaatcggctcgagtacggctgcggagaagacgacagaacgggggattttgttaacgtatccgctgcgtccgccgtgatgctgtgtttggagacttggtattttcaagtgctcgtgctcattactggcttgcttgataaccctcaactctctcttgattctatctcagtttgcatggcaataacagggttgacgatgcatattggaattggatttaatgcagctgcaagcgtgagggtgggtaacgagttgggagctga

SEQ ID NO: 199612 - DNA, 273 bp, Glycine max
tacggctgcgagaagacgacagaagggggcacaagtgagtttgttgatcgagataactagaaacagtgtgatgaaaatgaaggtccttgttttcttcgttgctacaattttggtagcatggcaatgccatgcgtacgatatgttccctctccgaatgaacactggctatggtgcccgtactccggatgtgaaatgcgcaagttggaggcttgctgtggaagcacacaacatctttggctttgagaccattcctgaagagtgcgttgaagcaac

SEQ ID NO: 199613 - DNA, 286 bp, Glycine max
gtacggctgctagaagacgacagaagggggtgcacagcttgaacacaccgcgtttcggagagagacgtcgcaatggggaggaggcctgcaaggtgttatcggcagataaaaaacaagccataccccaaatcacgcttttgccgtggtgttcctgatcctaagatcagaatttatgatgttggtatgaagaagaaaggtgttgatgagtttcccttctgtgctcatctggttagctgggaaaaagaaaatgtttcaagtgaagcattggaagctgctagaattgcat

SEQ ID NO: 199614 - DNA, 279 bp, Glycine max
ctgcgagaagacgacagaaggggaacggaaactggtgacagtatagagcgagagagagagagaaacaaagcagcacccatttggatcctctcttctcttctttgatctccgttaccctttttgttttctcaacatagagagagagagagaatctttcgaagttcgtttgcgtgtgttgtgtggtcagtcaccgatggcagcaccacctgcgagggcacgtgccgattacgattacctcatcaagcttcttcttattggcgatacggtgtgggaaagagt

SEQ ID NO: 199615 - DNA, 267 bp, Glycine max
acggctgcgagaagacgacagaaggggatccctcccttgttctgcactgcggccgataacaattttctgtttagtgtgatttttttgttctttgtttacagctctgcgagatcttgagtcgccgatttgaaaagatgagtaagcttcagagtgatgctttgcgtgaagccatctcagtgatcatggccgattccaaggagaagaatcgcaaatttgtgtgagaccatcgaactccaaatcggtttgaagaactacgatccacagaag

SEQ ID NO: 199616 - DNA, 272 bp, Glycine max
acggctgcgagaagacgacagaaggggcacgtgtaaaagctaaacatgagaagtttagggagtagggaagcggaaagacctaaatttccctgcgaatctcagagaaatcatggaatttctggtcggggaggtggaggaacacaccgtactcgtcattgttgtctaggttgggcttgcgcttggtgagggacgagctggaggacgagggggcggcgcgtgcagatgtcgttgccgcgggggaggaagtcgcggccaacaaaggcttcgaggac

SEQ ID NO: 199617 - DNA, 274 bp, Glycine max
acggctgcgagaagacgacagaagggaaagagacctggaaaaggtgggaaccgcttttggaagtccattgggcttggatttaagactcccagggaagccatcgaaggaacctatattgacaagaagtgccccttcactggcaatgtttccatccgtggccgtatcttggctggaacatgtcacagtgctaagatgaacaggactattattgttagaaggaattatctccatgttatcaagaagtaccagaggtacgagaagaggcactcaaata

SEQ ID NO: 199618 - DNA, 278 bp, Glycine max
cgacagaagggggagaatagttatactttaatatttcttttcccatatgatgagtgtggtgatgggtgggtgagtccgaattgtgaaagtaagcaaagatggctttcacggaatcgtctctcctccttccttcggtttcaggaaccaacaagaacaagaacaaggttccagaagacaaatggtatttagcctacattgtgtattttaccctgggtctcggttaccctctcccatggaacgctttcatcaccgccgttgattacttctcctttctctac

SEQ ID NO: 199619 - DNA, 256 bp, Glycine max
  unsure (1)..(256): unsure at all n locations
gatgcataagagcaagcacaaggtctgattcgtgtttccttacatcaacttgtggtctaaaaatgggaaggatgccatgctgtgagaaggtanggttgaacaaaggaccatggaaaaccgaagaagatgagaagctcgtggcttatgttgaaaggcatggccctggaaactggcgttcagtgcctgccanagcgggtcttcaaagatgtggcaagagttgtagactgaggtggatcanctacctanaccctaatat

SEQ ID NO: 199620 - DNA, 292 bp, Glycine max
acgacagaaggggacataataataagctttggggtgtggtgtatcaaacgtgttcttgacctctcattaatggagagccggccagagctgtgggggaagtacacttatgtactcaatcgcctccagggcatcattgatctggctttctccaagcctcgtagtcccatgaccccatgcttttgccttcaagttcccatgacttaccagcagaagtcaggctcacctccttccaatgggatgctgccccctgcatcaaaaccaggccgtggaaaatgcacaactgcgtcagtgg

SEQ ID NO: 199621 - DNA, 290 bp, Glycine max
acgctgcgagaagacgacagaagggtttcttttcttccttccctatgactgagaataggcctcaggagaaaaaaagaagattgtaggggtgttctacaaagggaatgagtatgcttcgaatcccaattttgtgggatgtgttgaaagagcattgggtatacgtgagtggttggaatcacagggtcaccagtacatagtcactgatgacaaagaaggacccgattcaggttatatatatatcttgctaacttaattcaactttatataacatcatctatcttgagagtagc

SEQ ID NO: 199622 - DNA, 279 bp, Glycine max
acggctgaagacgacagaggcgaaagcaggacctttaagcttcctaatcccatgtactacattgagtagcaccttcacctctctcaacaatctagctagagtttgctcctatctatatgtaataaggtatgctgatatgcactattcaaataggagcattagctatgtttgttaatgtcactttatgttatgtgtgtaagtcacctaagacactccacgtacctacttgttgtctcttacgcggctttaataaatcttctgcccttgttccatatttac

SEQ ID NO: 199623 - DNA, 296 bp, Glycine max
gaagacgacagaagggggagactaagaggtaacagcctctcgccagaaaggaggcagagaccgagagagcaactgcacgcactgtaactctctcaccgtttcttccgctttgatggaacagtacgagaaggttgagaagataggcgagggaacatacggcgtcgtttacaagggtcgcgaccgctccaccaacgagaccatcgccttgaagaagattcgcttggagcaggaggatgagggggttcccagcaccgccattcgcgagatttctctcttgaaagaaatgcagcacagga

SEQ ID NO: 199624 - DNA, 269 bp, Glycine max
tctcgagccgaatcggctcgagacggctgcgagaagacgacagaacggggaagttttgtagtgtggtttagtgtcaaatggcggcgagtagaagcacttttcctctgatgaaatacttgagagtgcgcgtcgacgctcttccccgcaacactcccttaaccctcgctcccaactttttgattcgacgcttctgtgaagaggttaggggttgttttctcgaaaagtctgaggtcaaagatcgcgtcatttcctgcgtcaaaaacttccag

SEQ ID NO: 199625 - DNA, 279 bp, Glycine max
gaagacgacagaaggggacttccagatttcaaagaaggcgtcttcataaacgcctttcttctccgtttccgtttcctcgttcgaattcgctttttgatctgcgaaaatgagagagtgcatctcgatccacattggtcaggctggtatccaggtcggaaatgcttgctgggagctctactgcctcgagcacggcatcgggcccgatgggcaaatgccaagtgacaagacagttggcggtggtgatgatgctttcaatactttcttcagcgagactggtgc

SEQ ID NO: 199626 - DNA, 285 bp, Glycine max
tacggctgcgagaagacgacagaagggggcatcggatttgatagatgaagctaaaaatgctggtcaacaaggtcttgcggggattttggtgtggatgagattcatggctactaggcagctcatatggaacaaaaattacaatgtgaagccacgtgagataagcaaagcacaggataggcttatcagattgctccaggatgtttatgcaagttacccacagtatagggagattgtgaggatgatcttgtcgactggtggtcgtggaaggtgaaggagatgtcggac

SEQ ID NO: 199627 - DNA, 290 bp, Glycine max
tacggctgcgagaagacgacagaaggggaaagaggaagaaccagtatcgcggaatccgccagcgtccatggggaaagtgggctgctgagattcgcgacccaagaaagggggttcgtgtttggcttggaactttcagcactgctgaagaagctgcaagagcttacgatgctgaagcaaggaggatccgtggcaagaaagccaaggtgaatttccctgatgagccttcaggcgctgcttcctcaaaacgtctcaaggcgaatccagaggctcagccaatgaagaaaaatctg

SEQ ID NO: 199628 - DNA, 264 bp, Glycine max
  unsure (1)..(264): unsure at all n locations
gacacaccgtttgttctattcttaactcaacttctgctanccactctcttcttccaagtccaaccacgcttttctctacagtcatgggcaaggtcaagatcggaatcaacggatttggaagaattggccgtttggttgccagagtngctctgcaaagagacgatgtggagctcgttgccgttaacgacccttcattaccaccgatacatgacatacatgtttaaatacgacagtgttcacgacatggaagcatcacgatgtcac

SEQ ID NO: 199629 - DNA, 198 bp, Glycine max
acggctggagaagacgacagaagggggcacaagtgagtttgttgatcgagataactagaaacagtgtgatgaaaatgaaggtccttgttttcttcgttgctacaattttggtagcgtggcaatgccatgcgtacgatatgttccctctccgaatgaacactggctatggtgcccgtactccggaggtgaaatgcgcaa

SEQ ID NO: 199630 - DNA, 224 bp, Glycine max
tacggctgcgagaagacgcagaaggggaccatccccatttcgcgttggtgcaaagcatcctccgtttcaatttctctctctcagcgctttctgcaatcgaacctttcatctccaaagggatccacaggccgaaggagaaatggggctgacattcacaaagcttttcagtcggcttttcgcgaagaaggaaatgcgaattctgatggttggtcttgatgctgctg

SEQ ID NO: 199631 - DNA, 288 bp, Glycine max
ttgaatggattcattggccacaggcttccattccgttctcagaggatgagcttgcctacattgaagatcttgacccttatcgggattgtgagatgctgagaatggaactgccgatgatccgagaggcgtgtctcagagtcttggtgctgtgcactattttcctcaaggaggctgcggcttatgggccttgcctcgctggaattggtgagatgatgactagggatttccgcagggtgaggaggaccccagtgaacttaaagttgtttgttgggaggcaaggaagatagt

SEQ ID NO: 199632 - DNA, 274 bp, Glycine max
acggctgcgagaagacgacagaagggggcatcaattcaaaatatatcatcaattataagcatgggtttgtggaacacaacgaatgcagtgtcttgccgctttcacaagtttggtgatgaccaaaagaatctggtcttccaaggtgatgccacgtcttcttccaggggcatagaactcacaaagttagacggtggaggaaaaccagtgggtggcagtgtggggagagtgttatactcttctccagtgcacctttggggaaagctctacagtggtc

SEQ ID NO: 199633 - DNA, 219 bp, Glycine max
cggctgcgagaagacgacagaagggggcacaagtgagtttgttgatcgagataactagaaacagtgtgatgaaaatgaaggtccttgttttcttcgttgctacaattttggtagcatggcaatgccatgcgtacgatatgttccttcttcgaatggacactgggctatgtggcccgtactccggaggtgaaatgcgcaagttgaaggcttcttttggag

SEQ ID NO: 199634 - DNA, 218 bp, Glycine max
ctgcgagaagacgacagaagggggagttctactaagaaaccatattccacgtatccttaaaaagcacttcaggggaaagccatattacgttgatcttcttgatttgtttaatgaggttgagttccagactgcttcaggacagatgatagatctgatcaccacactggaaggagaaaaagacctgtctaaatacacattaacactgcatcgacgtattg

SEQ ID NO: 199635 - DNA, 266 bp, Glycine max
cggctcgaggggcactgcaaatcacttttctactttgagtcttcttgatccttctttttctccttgaactcaaacatggcagatgaggtggttctgctagatttctggccaagtccatttgggatgagggtcaggattgcacttgctgaaaagggtatcaaatatgagtacaaagaagaggacttgaggaacaagagtcctcttctcctccaaatgaacccggttcacaagaagattccggttctcatccacaatggaaaacccat

SEQ ID NO: 199636 - DNA, 282 bp, Glycine max
tacggctgcgagaagacgacagaaggggaggccaaggaggagttcctcttggctcttgagtctgctgaggctggagggaaccaatgggcttacttgctaccccagatttatgtcaacctcggcatcgcactcgagggtgaagggctggttttgagtgcctgtgagtattatagggaggctgcgattctttgtcccacacattttagagctttgaagctcttaggtagtgctctttttggtgttggggagtatagggccgcggtgaaggcattggaggaggca

SEQ ID NO: 199637 - DNA, 289 bp, Glycine max
tacggctgcgagaagacgacagaagggggtattgtagattgtagatccatccactccctcgcacaggcatcaggtgagtttgttgtgatttgaatggagggaattggaggtggcggtggcagtggcggtggttcaccttctgcacctgtgaagcaatacttgcaggaattctcgaagctttttcagtactatctggataaatccactccccatgccctctacagatggattgggactttcgtgattgcatccatctacgttctgcgtgttgtttatttgcaggggtttt

SEQ ID NO: 199638 - DNA, 264 bp, Glycine max
acggctgcgagaagacgacagaaggggatagcagagaaccttcagaaaccctaatttctcaaaatcttcagaggacacacagcacaaccaacacctccacagcctctcctacctcccggagccatggccgccgccgactcctccgccgctccatcgcaccagttgtcgtagagggagacggacatccagatgatgctcgccgccgacgttaacctcggcaccaaaaactgcgactttcagatggaacgctacgtcttcaagcgc

SEQ ID NO: 199639 - DNA, 170 bp, Glycine max
tagctgcgagaagacgacagaagggggacgcagcaatctttcccgtgaaaagggaccatggaggcaaattcaggtgccagcgaccgaatttcgagaatcgccggccacctccgcccccagagagaggatgatgtttgtttgaagcgtagattatgccgtgcaaaaggtgg

SEQ ID NO: 199640 - DNA, 290 bp, Glycine max
cggaattcggatcgagacggctgcgagaagacgacagaaagggttgaccaatatggatgataaatatgatgtctatagaggtgagaggggtggtttggcaggactgcagaacttggggaatacctgcttcatgaacagttctattcaatgtttagtccacactccaccactttctgaatatttcttacaagattacagtgatgaaatcaacatggacaatcctttaggaatgcgctgtgagttagcacttgcaatgggtgacttgttgaggaactgtggtcttcagggcg

SEQ ID NO: 199641 - DNA, 290 bp, Glycine max
tacggctgcggaagacgacagaagggggagctttagattcttttcccctagattcagccacagttggaaaaaaaaaaaaagttgttcgagatggcacgtacgaagcaaactgctcgtaagtccacaggaggaaaggcacctaggaagcagctcgcaaccaaggctgcacgtaagtctgcaccaactactggtggtgtgaagaagccacatcgttctcgtcctggtaccgttgctcttcgtgagattaggaaataccagaagagtaccgagcttttgatcaggaagctccc

SEQ ID NO: 199642 - DNA, 286 bp, Glycine max
acggctgcgagaagacgacagaagggagtgaataatacaaaagaaaataatagaagaaaaatttttgaataataattaaaaaattccttcatatttttagagataggagacaaaatttacatggatatagtaagtcttgcttgggctgctttaatggtagttttttcattttctctttccctcgtagtatggggaagaagtggactatagggatactcaaaattgagttaagggatcaaagtacccattttgttttctacttgggtttttcaatttcttaacttta

SEQ ID NO: 199643 - DNA, 285 bp, Glycine max
aactttgtggtgacacgaactcctacacaagtagcaagccatgcccaaaaatacttcattcgtttgaactcaatgaacaaagatagaaggcgatccagcatacatgatatcaccagtgttaacaatggagatatttcagcacctcaagggccaataaccggtcaaacaaacggttctgctggaaattctactgccaaagcagccaaagcggccaccccggcctcaactggggtgccaggtgttggaatttatgcagctccaaccattggacaacctataggagga

SEQ ID NO: 199644 - DNA, 120 bp, Glycine max
acggctgcgagaagacgacagaagggggcacttcaattgcaatcaaattagttcattctctttgcgcagttccctacctctcctttcaaggttcgtagatttcttctgtttttttttctt

SEQ ID NO: 199645 - DNA, 231 bp, Glycine max
tacggctgcgagaagacgacagaagggagaaaaaatggcccgatcatttatcaaaggccaatcttcggtagaagagaaggttcctttggaacacttatttctatttcagtataccgggtctctttctttcatttcaaaaaatttatagaatttcgattttgaaatgaaagaaaagtgtggggataaatataaatgacaaaaagatattggaacataatcttggaagatatt

SEQ ID NO: 199646 - DNA, 260 bp, Glycine max
tcggctgcgagaagacgacagaaggggaaggtcaaaaacttgcatgcatgctctgtctgttcttattcgttgcaaatgggacaatgaaattcattccagggcgtcatcattgtataatcttatagatattcacagcaaagctgttgcatctatagtgaacaaggcagaaccattagaagcaaccttaattcatgtaccgatttggaaggattcctcgtttgtgttggtgttaaaaggcagaatcagtgtgaaagtagtag

SEQ ID NO: 199647 - DNA, 285 bp, Glycine max
tacggctgcgagaagacgacagaaggggaatcaattacatactggatccaagctaaaggaatgttatggtaaaacttcgtttgaaacgatgtggtaaaaagcaacgtgcgacttgaaagacatgattagattagctgtggattcttacatccgccattttttctagtatatagaaatgaacatgctcttgactcgacatcgtttgttctgttccactagaacttattgttttggggacgggaaagcagttgatgatgtaagttgatgatgtaaatagtacatgat

SEQ ID NO: 199648 - DNA, 285 bp, Glycine max
acggctgcgaagacgacagaagggggcatcaattcaaaatatatcatcaattataagcatgggtttgtggaacacaacgaatgcagtgtcttgccgctttcacaagtttggtgatgaccaaaagaacctggtcttccaaggtgatgccacgtcttcttccaggggcatagaactcacaaagttagacggtggaggaaaaccagtgggtggcagtgtggggagagtgttatactcttctccagtgcacctttgggaaagctctacagtggtcgcaagctttgaaac

SEQ ID NO: 199649 - DNA, 256 bp, Glycine max
agagaagacgacagaagggagaaaaaggaataggagatggcacagttagttatggaatggatgatggtgatgacatttacatgcgctcttggactggaaccattattggtccctataatactgtacatgaaggaagaatttatcaattgaagctgttttgtgataaagactaccctgaaaagcccccgagcgtccggtttcattcacggatcaatatgacttgtgttaatcatgaaactggagtggttgaaccaag

SEQ ID NO: 199650 - DNA, 285 bp, Glycine max
tctcgagccgattcgtctcgacggctcgagcggctcgagcggctcgagacggctgcgagaagacgacagaagggatagggattatggactactactcgggactagaaatgaagcaaatggagaatgacatttttgtttctcaagagagctatggaaaggtgttaaagaaatttcaaaagtttgattacaactttctgaacacaccgatggaaggtaacttgatattgtcaaggcttgatggtggaaataaagaagatcctaattcgttaaagagtcttgcaggta

SEQ ID NO: 199651 - DNA, 223 bp, Glycine max
acggctgcgagaagacgacagaagggggcacaagtgagtttgttgatcgagataactagaaacagtgtgatgaaaatgaaggtccttgttttcttcgttgctacaattttggtagcatggcaatgccatgcgtacgatatgttccctctccgaatgaacactggctatggtgcccgtactccggaggtgaaatgcgcaagttgaggctctgtgtgggagcaca

SEQ ID NO: 199652 - DNA, 192 bp, Glycine max
ctgcgagaagacggcagaagggggcacaagtgagtttgttgatcgagataactagtgacagtgttatgaaaatgaaggtccttgatctcttcggtgctacaattttggtagcatggcaatgccatgcgtacgatcatgttccctctccgaatgaacactggctatggtgcccgtactccggaggtgaaatgc

SEQ ID NO: 199653 - DNA, 277 bp, Glycine max
aagacccaactgaggaatggtactacaagactttctttgatgctggtgaatttgcattcggtaaatctatggtttctttggtgcctttggaagattgtccaccacacgcacagttcctagatgcatattttgctgcaactgatggtagcccacaacacttggagaatgcaatttgtgtgtatgaacaatacggtggtatcagttggcgtcacactgaaacaggccttgatgagatatttacagaagtcagaacagatgtgagtctaattgttagatc

SEQ ID NO: 199654 - DNA, 287 bp, Glycine max
gacgacagaagggtgctgccagattttcagtctcacgacaatctgaagcaaaatcaatcacatataggagaatgacatgtactaatgctaaggaaaatgttctacagctgcaagccaaagtgacgaacaagtgcttctttgatgtagaaattgggggtgaacctgctggcagagttgttttcggcctatttggagaagatgttcctaaaacagttgaaaatttccgggctttatgtacaggagagaaaggatatggctacaaagggtcctacttccatcgtataata

SEQ ID NO: 199655 - DNA, 273 bp, Glycine max
tacggctgcgagaagacgacagaagggggacaacagttttatagtggcacgagatgcaattggggtcacttccttgtacattggttggggtctagatggctctgtctggatttcatcagaattgaaggggttgaatgatgattgcgaacattttgagtcttttccacctggtcacttgtactctagcaaagagagagcgtttcgcagatggtacaatcctccatggttctctgaggctattccctcagcaccttatgatcctcttgctttgag

SEQ ID NO: 199656 - DNA, 281 bp, Glycine max
gacgacagaagggggcagccaaagaaaagaaaatcctcaattttctgagtagccaaacactctctctctgtctctcgaaaattctcagtttgcagagaaaatctgaatcatgtcgtggcgagcgtatgtcgacgatcaccttctgtgtgacatcgaaggtaaccacctcactcacgctgctatcatcggccaagacggcagcgtttgggctcagagtaccgacttccctcagttcaaacctgaggagataactgccatcatgaatgactttaatgagcctg

SEQ ID NO: 199657 - DNA, 279 bp, Glycine max
acggctgcgagaagacgacagaaggggctttaaggtgtatggctacatcagcatggttcaagcactgagctttttgcaagacttcaaacttggacattatatgaagattccaccaaggacaatgttcatggcacaggtggtaggaacaatcttatcagtatttatatacacaataacagcatggtggttgatgagaaccatccctcacctttgtgatactaccatgttggatcctgatagcccttggacttgcccaatgggacatgtgttctttgatgc

SEQ ID NO: 199658 - DNA, 277 bp, Glycine max
acgacagaagggggagttgaacaatgacttgttccggaagaccatgggtccagtgaagaaggctatggaagatgctggattacagaagagtcagattgatgagattgttcttgttggtggaagcacaaggattccgaaggtacaacagcttttgaaggactactttgatggaaaggagccaaacaagggggtcaaccctgatgaagcagttgcctatggtgctgcagtgcaaggaagcattttgagtggagagggtggtgaagaaaccaaagatatc

SEQ ID NO: 199659 - DNA, 280 bp, Glycine max
  unsure (1)..(280): unsure at all n locations
ggctcgaactcgagccgaatcggctcgagtacggctgcgagaagacgacagaacgggggcgcattgaacagaaaattagggtttgtagtgtagcaggaagaagcagcaatggcgccgaagataacacgtaaggttagcagaaaccctgaattgataaggggaatcggaaagtactcgaggtcgcagatgtaccacaagaggggcatttgggctatcaaggccanaaacggtggcgttttacctcgccacgaccctaaactcaagcctgaagctcctgctg

SEQ ID NO: 199660 - DNA, 265 bp, Glycine max
acggctgcgagaagacgacagaagggcaaggacaagccagttcattgttagtgtgaacaagtatttagaggctatcaaccaaaaatgtaatgttggtatgagattcaagatgaggtttgaaggggatgaatcccctgaaaatgacaaaagattttcgggcacaatacttggagtagatgatatttcccctcactgggtgaattcaaattggcgatctcttaaggttcaatgggatgaacctgcatcttttccaagacctgataga

SEQ ID NO: 199661 - DNA, 240 bp, Glycine max
gggcagcagaagaacaagtagttgagaactaagaaggagaagcaaatggcttcctcaatgatctcttccccagctgttaccactgtcaaccgtgccggtgccggcatggttgctccattcactggcctcaagtccatggctggcttccccaccagaaagaccaacaatgacattacctccattgctagcaacagtggaagagtgcaatgcatgcaggtgtggccaccagttggcaagaag

SEQ ID NO: 199662 - DNA, 274 bp, Glycine max
tacggctgcgagaagacgacagaaggggagagaaagagagagaaagatgtcgaagcgtggtcgtggtggttcggcggggaacaagttccgcatgtcgctgggtcttccagtggcggcgacggtgaactgcgccgacaacacgggggcgaagaacctctacatcatttcggtgaaagggatcaaaggccgtttgaaccgtcttccctcggcctgcgttggcgacatggtgatggccaccgtgaagaagggaaaacccgatctgaggaagaaggtc

SEQ ID NO: 199663 - DNA, 270 bp, Glycine max
tacggctgcgagaagcgacagaaggggacactaaacaagttaaaagaagagcatcactgaactaacaaagcaaccatatgtcgaaggtggtttgtgtcaccggagccagcggcgccatcggatcatgggtggtcctactcctcctccagcgtggttacaccgtccatgccaccgtccaagatatcaaggatgaaaatgagacgaaacatttggaggaaatggaaggagcaaagagtcatctccatttttttgaaatggatcttcttgaca

SEQ ID NO: 199664 - DNA, 259 bp, Glycine max
agtatggatcaacatgtaaatatcatcatccaaaggacaggcgaggtgctgctcctgtgtcattcaatactttaggccttcccatgcgtcaggaagaaaaatcatgtccctattacatgagaactgggtcttgtaagtttggtgttgcatgcaagtttcatcatccacagcatgcttcccttggagcatacccattggctggatctcctactcctacctcaacaattattcctacatcaggtttaccatatgctggagg

SEQ ID NO: 199665 - DNA, 263 bp, Glycine max
ctgctgcgagaagacgacagaagggggttctggtttgtcgttctttctctcgcaatcttcactacattcaccgagcatttgcattcacattgaatatggctgagactacacaatctaatgctgagttgttggagtggcctaagaaagataagcgccgcttcctgcatgttgtgtatcgtgttggtgatcttgatcgcaccattaagttttatactgaatgttttgggatgaagcttttgaggaaaagagatattccagaggag

SEQ ID NO: 199666 - DNA, 263 bp, Glycine max
tacggctgcgagaagacgacagaaggggggccttatccagtttagggtttcggttctctaccctatctttcacgtatcgaaaccttaaatttacgatcaggtctgagcaatctggttggtagaacctttggtcttagtgagtcaagttttatgtctgaattagacgatcaaattcctactgccttcgatccttttgctgatgcaaatgctgatgactcgggtgctgggtcaaaggagtatgtgcatattcgtgtacagcagcg

SEQ ID NO: 199667 - DNA, 270 bp, Glycine max
  unsure (1)..(270): unsure at all n locations
cggctgcgagaagacgacagaagggaaaagaaaaagaaaagttagggttagggattttgagagatggcatcgactaagaagatcaccctgaagagttcggacggtgaggccttcgaggtggaggaggcggtggcgctggagtcgcagacgatcaagcacatgatcgaggacgactgcgccgacagtggaatccctctccccaatgtcaccagcaagattctggcgaanggtatcgagtactgcaagaagcacgttgaggcgaacagtgct

SEQ ID NO: 199668 - DNA, 261 bp, Glycine max
acggctgcgagaagacgacagaagggggaagaagaagatggagaagtatcagatctggagcaggagaatagcgttggcagcgtttgcgtttgctctgctgttccaatcggcctcagcagacgacgtcgttgtgctctctgaagataacttcgagaaggaagttggtcaggacagaggagctctcgttgagttctatgctccttggtgtggacactgcaaaaagcttgctccagaatatgaaaagcttggtagcagcttcaa

SEQ ID NO: 199669 - DNA, 262 bp, Glycine max
acggctgcgagaagacgacagaagggggggtgccatcgttgctgtcatcatccgcagctgctgttattcgcaccgcaaacaaacagtgagccatggccgtcggaaagaacaagcgcatctccaaagggaaaaagggtggcaagaagaaggcagctgatccctttgccaagaaggattggtatgacattaaggccccttctctttttcaagtgaaaaatgttggcaaaaccctcgtctctcgtacgcagggtaccaagattgc

SEQ ID NO: 199670 - DNA, 264 bp, Glycine max
agacgacagaaggggatagcaaatattcagagaattccaactgataaaaagaatattcagagaattccaaagacagagatgactgtcattaaggaagagcaacaaccaaaccaaatagctggccacaaagaacttggtcacaaaagtctccttcagagcgatgcactctatcagtatatacttgaaaccagtgtgtacccaagagagcatgagagcttgaaggagctacgagagttgacggaaaaacacccttggaacctgatg

SEQ ID NO: 199671 - DNA, 261 bp, Glycine max
gctgcgagaagacgacagaagggggcacaagtgagtttgttgatcgagataactagaaacagtgtgatgaaaatgaaggtccttgttttcttcgttgctacaattttggtagcatggcaatgccatgcgtacgatatgttccctctccgaatgaacactggctatggtgcccgtactccggaggtgaaatgcgcaagttggaggcttgctgtggaagcacacaacatctttggctttgagaccattcctgaagagtgcgtt

SEQ ID NO: 199672 - DNA, 269 bp, Glycine max
tacctgcgagaagacgacagaagggggcgtgttgttgttgttcaggatcttccttttgccgatcaaaggttgaatggtaaaattcccaagatgttaagccatcgcctttttcctcaagcaaaatactcaatttgggtagactccaagtcccaattccggagagacccactaggtgtgttggaagcactcctttggcgcacaaattcattacttgctatatcagaacatggagctcgcagtagtgtctatgatgaggctaaggctgttgt

SEQ ID NO: 199673 - DNA, 264 bp, Glycine max
cttgccgaaggacttggacagggatactactcatagatatggtcctaatacttttaagctgcataggttgccggttccgaggcccgggcaggtgcttgggttggttgggactaatgggattgggaagtccaccgctcttaaagttttggccgggaaactgaagccgaacttgggtcgattcactaatccccctgattggcgggaaattttgacctattttcgaggatctgaactgcagaattattttactcggattctagagga

SEQ ID NO: 199674 - DNA, 255 bp, Glycine max
tacggctgcgaaagacgacagaagggggaaaatcacttacttatgctttagaggataatatgaagaacatgtttctagagcttacgagtcattgtgcgtctgttatctgctgtcgctcatcgccaaagcagaaggctctggttactagactggtcaaatctggaactggtaaaacaacattagctattggtgatggagctaatgatgttggaatgcttcaagaagcagatgtagggattggaatcagtggtgtcg

SEQ ID NO: 199675 - DNA, 260 bp, Glycine max
tacggctgcgagacgacagaagggggagagtgagtgagatagagagagacgcttcgcaaatctcaatcgaatctcagaaaaatgagagaaatcatcagcattcacataggtcaggccgggatccaggtcggaaactcctgctgggaactctactgcctggaacatggcatccagcccgatggcatgatgccaagtgactcctccttcggtgtagcccacgacgccttcaacaccttcttcagcgaaaccggatctggcaa

SEQ ID NO: 199676 - DNA, 266 bp, Glycine max
gagaggaccaagcatatgggacacctacactagacagcatactgaaaagatttgggatcatagcaccggtgacatgggagctgatttttatcatcgatacaagggtgacataaaaatagcgaaagaaattgggctggactctttcagattctatatctcatggtcaagaatattcccaaagggcaagggagcagttaacccctttggggttaaattctacaacaatgtcatcgatgagatcctagcaaatggtttaaaaccttttg

SEQ ID NO: 199677 - DNA, 263 bp, Glycine max
cggctgcgagaagacgacagaagggggccacactttatcatcctcagacgaatggccaagcagaaatctctaacagggagcttaagcgaatcttggagaagacagttgcatcatccagaaaggattgggccttgaagctcaatgatactctctgggcctataggacaacgttcaagacccccatcggcttatcaccgtttcagccagtgtatgggaagtcaatgcatttaccagtggagctggagcataaagcatattgggct

SEQ ID NO: 199678 - DNA, 259 bp, Glycine max
gaagacgacagaaggagttgatgttaaagaggaggatttcaaggctgcaagagaggaaggtttggctctcctcaaggtagtggatgcctatcttgtggcaaaccctgaggcctatgctgaaggaactataaatagcgatgagtttactagcactgtccagccaggaaggttgttcaaggctttggtccttgatgctccaaacctcattcccaagctgatgcccgaggccattaagaatattcaactggttgaagggaat

SEQ ID NO: 199679 - DNA, 256 bp, Glycine max
gctgcgagaagacgacagaaggggagagaaagagagagaaagatgtcgaagcgtggtcgtggtggttcggcggggaacaagttccgcatgtcgctgggtcttccagtggcggcgacggtgaactgcgccgacaacacgggggcgaagaacctccacatcatttcggtgaaagggatcaaaggccgtttgaaccgtcttccctcggcctgcgttggcgacatggtgatggccaccgtgaagaagggaaaacccgatc

SEQ ID NO: 199680 - DNA, 175 bp, Glycine max
tacggctgcgagaagacgacagaagggggggatcaaatggtaaagttcttttgttggtaaattggaggattagaaacatgactattgctttccaattacctgtttttgcattaattgctatttcatttattttattgattagtgtacctgttgtatttgcttctcctgaaggttg

SEQ ID NO: 199681 - DNA, 254 bp, Glycine max
taggcagacgacagaagggtggagagagcagaacaaactacatcctatccaatagtctttatcttgtggtggcaggtagtgacgacattgccaacacctattttgttgctcacgccagaatattacagtatgacattccttcttacaccgaccttatggtcaactcagcctctaattttgtaaaggaactgtataatctgggagctcgtagagtttcagtactgggtgcaccaccgattggatgcgtgccatca

SEQ ID NO: 199682 - DNA, 264 bp, Glycine max
gagcagcaagtgtagatgggagaggaccaagcatatgggacacctacactagacagcatactgaaaagatttgggatcatagcaccggtgacatgggagctgatttttatcatcgatacaagggtgacataaaaatagcgaaagaaattgggctggactctttcagattctctatctcatgttcaagaatattcccaaagggcaagggagcagttaacccccttggggttaaattctacaacaatgtcatcgatgagatcctag

SEQ ID NO: 199683 - DNA, 265 bp, Glycine max
acggctgcgagaagacgacagaaggggatatccaaaggaacaaaaatattattaagatgatcaacattattggagcacttgttctactctttgcatttctcttcctcagttgtgtgtatgcacaagacacaacaacccttgtgcctgcaatcataacttttggtgattctgctgtggatgtagggaacaatgactatcttcccacccttttcaaggctgattaccctccttatgggagggactttgttaaccaccaacctactgg

SEQ ID NO: 199684 - DNA, 261 bp, Glycine max
acggcgagaagacgacagaaggggactacacacaacatttacatttctctctccagtatggcttctactcacaatgagttttatgcacttatgctagtggtggtggttggctccatggtggcttcctgtggtgctaacttcaaccaagactttgatctaacatggggtgatcaccgtgctaagatattcaatggtggtcagcttctatctctttctctggacaaagtctctggctccggcttccaatccaagaaagagtac

SEQ ID NO: 199685 - DNA, 260 bp, Glycine max
acggctgcgagaagacgacagaagggggagtttggagagaagagtgaagaaggcaaatcgcgaagactagatctgatctgagagaatggctcctcggtctagcagcaaggacgcccaagaccttttccgcgctctttggtctgcttatgctgcaacccccactaatctcaagatcattgatctctatgtcatctatgccgtattcaccgctttcatccaggttgtttacatggctttggttggatcatttccatttaact

SEQ ID NO: 199686 - DNA, 257 bp, Glycine max
cgagaagacgacagaaggggacaccaacaccaaaacaaacccactaagatggcttcctttgtatccttcctagtgctgcttcttgcagcccttatcctcatgcctcaagggcttgctacttactacaaaccaattaagaagccaccagtgtacaagcctccagtgtacaagccaccagtgtacaaaccaccggtttataagccaaaaccaccggtttacaagccgaaaccaccggtttacaagccaccatataagaa

SEQ ID NO: 199687 - DNA, 253 bp, Glycine max
tacggctgcgagaagacgacagaaggggactccgcagctgcagcactcaaaaccctagagaggacgagagagcgtgcaactttcggcaaccacagaccatgacattcaagcgcaggaatggaggtcgcaacaaacacggccgcggccatgtcaaattcatccgatgctccaactgcggaaaatgctgccccaaggacaaggccatcaagaggtttttggttaggaacattgttgaacaggctgcagtcagaga

SEQ ID NO: 199688 - DNA, 256 bp, Glycine max
cggctgcgagaagacgacagaagggggagtcgaacaagaaagaaaagaaaagaagaggaaaaggagagtggagaggaagaaaaggattgaagttgttgctgtgagaaagagaaagagtgaaatcggagtttgggaaggaattgcaatcaatggatgtgataaagacgcagcaaatctcatctcgaccaatcgagaaggtggtggttcaccctctcgtgcttctcagcatcgtcgacaactacaacagagtcgccaa

SEQ ID NO: 199689 - DNA, 263 bp, Glycine max
acggctgcgagaagacgacagaagggaactgttgttgagggaactatacagaagctatttgaagggcatcatatgaattatatcgaatgcatcaatgtggactataaatcaactagaaaggagtcattttatgaccttcagcttgatgtgaagggctgtcctgatgtttatgcttcctttgacaagtatgttgaagttgaacgtcttgaaggggataacaaatatcatgcggaacaatatggtttgcaggatgctaagaaggg

SEQ ID NO: 199690 - DNA, 295 bp, Glycine max
ttcggctcgagtacggctgcgagaagacgacagaagggcggctatctgagccatacaagggaattggtgattgttttgctcgaacaatgaaggatgagggtgtgattgctctttggagaggaaatactgctaatgttatcagatatttccctactcaggctctgaactttgcctttaaggattactttaagaggcttttcaactttaaaaaggataaagatggctactggaagtggtttgctgggaatttggcatctggtggggctgctggggcttcttccctcttatttgtcta

SEQ ID NO: 199691 - DNA, 286 bp, Glycine max
tacggctgcgagaagacgacagaaggggagtgacagacacactcgtgaatcgtgatttagcatttaccacaccaaaatcaatctgcggagtcagaaagccatggatccctacaagaatcggccatcaagcgccttcaattctcccttctggactacaaattccggtgctcccatctggaacaataactcatcgctgactgttggatctagaggtccaattctgctggaggattaccatctggtggagaagcttgcaaactttgacagggaacggatccccgaacgt

SEQ ID NO: 199692 - DNA, 288 bp, Glycine max
caaccaggttcccaaggaaagtactcaaactaaggtgaagagacgaggtggcccaggaggtctcaccaaaatctgtggtgtttcgcctgaacttcaggtcattgttggccagccagcattgtcgaggactgagattgtgaagcaactgtgggcttacataaggaagaacaatctccaagatcccagcaacaaaaggaaaataatttgcaatgatgaactgcgtgtggtgtttgagacggattgtactgatatgttcaagatgaataagttgctatctaagcacattat

SEQ ID NO: 199693 - DNA, 286 bp, Glycine max
gaagacgacagaagggggtggtgtagactgtcgagcagtgaataccagttgctcctatagccggcgctcaacaacatggcggacaaggcagtcaccatccgaaccagaaagttcatgacgaacaggcttctctccagaaagcaattcatcgttgatgtccttcatccagggaaggctaatgattccaaggctgaactgaaggaggaattaggcagaatgtatgacgagaaagacactaacactgtatttgtcttcaagtttcgaactcattttggtggtggcaagt

SEQ ID NO: 199694 - DNA, 285 bp, Glycine max
gacacacagggagttatttgaagaagaagatgacggtaaagatggcgaggatggttcagaagaacaagctgtgattggattatggagtggcattgcttggttggttggaatgactgtattcattgctgtgttgtctgaatatgtggtggatacaattgaggatgcatcagattcatggggtttgtctgtgagcttcctaagcataatcttgctgccgatagttggcaatgcagctgaacatgcaggagcaattatatttgccttcaagaacaagctggacatctc

SEQ ID NO: 199695 - DNA, 286 bp, Glycine max
acggctgcgagaagacgacagaagggggatcacaacacaagtattcaaaatatctctatatattccctccatttctgagaatggcgaaggctgcggagaagaagccagcggctgagaagtctccggcggagaagaagcctaaggcagagaaaaagattccgaaggaaggcggtggcgagaagaagaagaagaggtcgaagaagagcgtggagacctacaagatctatatcttcaaggtgctgaagcaggtacaccctgacatcggtatttctagcaaggccatggg

SEQ ID NO: 199696 - DNA, 283 bp, Glycine max
acggctgcgagaagacgacagaagggggagaacaaaacaagtgtttcgaatagattatcctaagtctttgggaatagtgctgcaatggcttcaagtcaggaggaggtgacccttttgggagctactggaagcccatttgtgtgcagggttcatattgccctcaagttgaagggagttcaatacaaatatgtcgaagaaaatttgaggaacaagagtgaactgcttctcaaatccaacccagttcacaagaaggttccagtgtttattcacaatgagaggccca

SEQ ID NO: 199697 - DNA, 284 bp, Glycine max
tctcgagccgaatcggctcgagtacggctgcgagaagacgacagatgggggcacaagtttgtcgagatagctagaagcaataagatgaaaatgaaagtgcttgttttgtttgttgctacagttttggtagcatatgaatgccatggctcagactaccagaagttccctctccaaatgaaaactgggtttggtgggcaatacagcaatgaggtggcatgtgccagttggaggcttggcgtggaagcaagcaacgtagtcaagtggcaaactgttcctgcagcttg

SEQ ID NO: 199698 - DNA, 283 bp, Glycine max
cggctcgagacggctgcgagaagacgacagaaggggaggcgcggcgggatcatcacgagattgcaaaatgaagttcaacattgcaaatcccaccactgggtgccagaagaagctggaaatcgatgacgacctgaagcttcgggcattttgggacaagaggatctcccaggaggtccttggtgacgccctgggtgaggagtttaaaggatatgttttcaaaatcactggtgggtgtgacaaacaaggattcccaatgaagcagggagtgttgacccctggtcgt

SEQ ID NO: 199699 - DNA, 280 bp, Glycine max
ctcgagccgtgtcccaaagaaggttgtagctcaccttttaaagcctcgtggctggaaaccgcccgttcgccgacagtttttcctagactgcaatgaaattgcagatctttgtgatagtgcagaacgcatattttcaagtgaaccgagtgtcttacagcttagggctccaattaaaatatttggtgatttgcatgggcaatttggagatctcatgcgcctctttgaagagtatggtgcaccatcaactgctggtgacatagcatatatcgactatctattc

SEQ ID NO: 199700 - DNA, 284 bp, Glycine max
tacggctgcgagaagacgacagaagggggcatcaattcaaaatatatcatcaattataagcatgggtttgtggaacacaacgaatgcagtgtcttgccgctttcacaagtttggtgatgaccaaaagaatctggtcttccaaggtgatgccacgtcttcttccaggggcatagaactcacaaagttagacggtggaggaaaaccagtgggtggcagtgtggggagagtgttatactcttctccagtgcacctttgggaaagctctacagtggtcgcaagctttg

SEQ ID NO: 199701 - DNA, 262 bp, Glycine max
gacacacagggagttatttgaagaagaagatgacggtaaagatggcgaggatggttcagaagaacaagctgtgattggattatggagtggcattgcttggttggttggaatgactgtattcattgctgtgttgtctgaatatgtggtggatacaattgaggatgcatcagattcatggggtttgtctgtgagcttcctaagcataatcttgctgccgatagttggcaatgcagctgaacatgcaggagcaattatatttgcc

SEQ ID NO: 199702 - DNA, 281 bp, Glycine max
tcacgctgcgagaagacgacagaaagtgacaacaaaaccattttccaactccatttaccattccataacctagatctcctctttgtctccgagtcagagagcaatggcacgtaccaagcaaaccgctcgcaagtcccacggcggaaaggcgccgagacagcaattggcgactaaagccgctcgcaagtcagctccggccaccggcggagtgaagaagccccaccgcttcaggcccggaacggtggctctgagggagatcagaaagtaccagaagagcactg

SEQ ID NO: 199703 - DNA, 279 bp, Glycine max
tacggctgcgagaagacgacagaaggggatcgaagcaaaaaatgaaaacccaaagtgcttctctcctctgtctttttctctctcttgctatccttttggctagtggcactgctgcatccgcaactccaagaagcgcagtgccaagccaccatgtttcaacattcaacagaagcctttttccttccacttttctctttggaattggttcttctgcttaccaggcagaaggagcaacaagtgtagatgggagaggaccaagcatatgggacacctacacta

SEQ ID NO: 199704 - DNA, 279 bp, Glycine max
acggctgcgagagacgacagaaggggaagacgaagatttcaactatcgcttcaattccatcagcttcaaagggaaggaagggtggattgtcggaaaacctgcgattctgttgtacacttccgatgccggagacagttgggagaggatacctctcagtgctgaacttccaggggatatggtgtacataaaggcaaccggtgagaagagtgcggagatggtgaccgacgaaggtgccatatatgttactgcaaacagaggttacaactggagggctgctgt

SEQ ID NO: 199705 - DNA, 279 bp, Glycine max
cgagaagacgacagaagggggaagagaatggctcccaagggtttaacctttctggctgtgttaatatgcgtttcagcactgtcactgagtccttctgttgcgggggaagggcaaaataatggccttgttatgaacttctacaaggaatcatgccctcaggctgaagacatcatcacagaacaagtcaagcttctctacaagcgccacaagaacactgctttctcctggctcaggaacatcttccatgactgtgctgttcagagttgtgatgcttcactg

SEQ ID NO: 199706 - DNA, 275 bp, Glycine max
gacgacagaagggagaaatcggtggctgaattgggtctgctctacctcgggatgggagtttctggtggtgaggaaggtgctcgtaatggtccctctttgatgcctggtggttcgtttgaggctttcaaatacatagaagatattcttctcaaggtggcagctcaagtccctgacagtggtccttgcgtgacttatattggtaaaggtggctctggtaattttgtgaaaatgatccacaatggcatcgaatatggtgacatgcagctgattgcaga

SEQ ID NO: 199707 - DNA, 279 bp, Glycine max
tacggctgcgagaagacgacagaagggggcatcaattcaaaatatatcatcaattataagcatgggtttgtggaacacaacgaatgcagtgtcttgccgctttcacaagtttggtgatgaccaaaagaatctggtcttccaaggtgatgccacgtcttcttccaggggcatagaactcacaaagttagacggtggaggaaaaccagtgggtggcagtgtggggagagtgttatactcttctccagtgcacctttgggaaagctctacagtggtcgcaag

SEQ ID NO: 199708 - DNA, 278 bp, Glycine max
tacgggctgcgagaagacgacagaagggcatgtgaagaactcatatttaatcatctgaaacagctttatcccactcacaagttcattggggaagagaccacagctgcctatggcactacagaacttacggatgaacccacatggatagttgatcccctggatggaactactaactttgtgcatgggttcccctttgtttgtgtctccattggtctcacaattggaaaaactcctacaattggtgttgtatacaatccaataattaatgagctttttac

SEQ ID NO: 199709 - DNA, 281 bp, Glycine max
tacggctgcgagaagacgacagaagggggaagaaaactaaggaaggaaggaaggaaggaagagtgagcgtgaaagatgccttcggcgaggctttcagggtcaccaaggctcgacgttgctattgacatgggcaatccatttctcaatctcactgttgatggtttccttaagatcggagctgtcgcagccacgcgatcagctgctgaagatacttatcatattatccgaaacgggaatatctcaagtcatgatttcgagaaaacgttgaagaagatgtgtaa

SEQ ID NO: 199710 - DNA, 282 bp, Glycine max
tacggctgcgagaagacgacagaaggggatgttttttatttacattcacgtcttttggaaagagccgctaaattaagttctcagttaggcgaaggaagtatgactgctttaccaatagttgaaactcaatcgggagatgtttcagcttatattcctactaatgtaatttccattacagatggccaaatattcttatctgccgatctattcaatgctggaatcagacccgctattaatgtaggtatttccgtttccagagttggatcggcggctcaaattaaa

SEQ ID NO: 199711 - DNA, 278 bp, Glycine max
tacggctgcgagaagacgacagaaggggatcgaagcaaaaaatgaaaacccaaagtgcttctctcctctgtctttttctctctcttgctatccttttggctagtggcactgctgcaagtgcaactccaagaagcgcagtgccaagccaccatgtttcaacattcaacagaagcctttttccttccacttttctctttggaattggttcttctgcttaccaggcagaaggagcagcaagtgtagatgggagaggaccaagcatatgggacacctacact

SEQ ID NO: 199712 - DNA, 276 bp, Glycine max
tacggctgcgagaagacgacagaaggggtcactgatggcaccatacttacctcagggtgggactggagctggtggtagtccatactcagaaggtggtgctctctatgcccttggtcttattcatgctaaccatggagagggcatcaaacaatttcttcgtgatagcctgcgcagtacaactgttgaggttattcaacatggtgcatgtttaggtcttggtttggcatccttaggaactgctgatgaagatatttatgaagaaataaaaaatgttct

SEQ ID NO: 199713 - DNA, 278 bp, Glycine max
tacggctgcgagaagacgacagaaggggattgagagagagagagaaatggagaagacaggagtgttatcggcgaaggaggcattcgagaagcttgaaaaggtgggagaagggacatatgggaaggtgtacagagcaagagagaaggcaactgggaagatcgtggctctgaagaagactcgtctccacgaggacgaagaaggtgtccctcccaccactctccgtgaggtttccattctgcgaatgctctctcgcgatccccatgtcgttaggttaatgg

SEQ ID NO: 199714 - DNA, 275 bp, Glycine max
tacggctgcgagacgacgacagaagggggacgaattcggagacgaaagaaggagtggcgataaagaagattgggaatgcctttgacaacaggatcgacgccaagaggacgctcagggaaatcaagcttctctgtcacatggaacatgataacataattaaaattaaggacataattcggccagcggagagggagaacttcaatgacgtgtatatcgtgtacgagttgatggacaccgatctccatcagattatacagtctaatcaggctctcacc

SEQ ID NO: 199715 - DNA, 281 bp, Glycine max
tactcgagccgaatcggctcgagtacggctgcgagaagacgacagatacggacagcaaaacaatcttcaaactcaattaccattacctaacctaaatctcctctttgtttccgagtcagagagcaatggcacgtaccaagcaaaccgctcgcaagtccaccggcggaaaggcgccgaggaagcaattggcgactaaagccgctcgcaagtcagctccggccaccggcggagtgaagaagccccaccgcttcaggcccggaacggtggctctgagggagatc

SEQ ID NO: 199716 - DNA, 133 bp, Glycine max
cctctcaagtggcgactaaagccgctcgcaagtcagctccggccaccggcggagtgaagaagccccgccgcttcaggcccggaacggtggctctgaggagatccagaaagtaccagaagagcactgaacttct

SEQ ID NO: 199717 - DNA, 251 bp, Glycine max
aagacgacagaaggggggaaaccatggcgaaatatcgggccgagctaaagaaattggcagagaaagtgatggaggtgatggatgagaatcttggcttaaccaaagggtacatcaagaaggcactgaatggtggagatggagacaatgccttctttggcaccaaggtgagccactaccctccatgtccccatccagggcttgtgaagggtctgcgagctcacaccgacgcaggaggcgtcatcctactcctc

SEQ ID NO: 199718 - DNA, 248 bp, Glycine max
tagacgacagaagggggatcaggaggcacaccaccaactacattgacaagttgttcgatgtgttcgatcccatgattgatgaacgcatgaggaggaggggagagaagggttatgccactagccatgacatgttggatatcttgctggatatttctgaccagagtagcgagaagattcataggaagcagatcaagcatttgttccttgacctattcgttgcggggacggatacaacagcctacggctta

SEQ ID NO: 199719 - DNA, 245 bp, Glycine max
aagacgacagaagggggaagcccaaagtgcaacgtactttgcaaaaaccctaaaccctctctttctctctccgcgactctgtactcatcaatggcgacgcaatcgttagacgaagaaacaactaagaaagtcatacgacaggtcgagttttatttcggcgacagcaaccttctcaccgatggtttcatgaggaagctcatcactgaaagcgaagatggcatgattagtttggcgctgatttgctc

SEQ ID NO: 199720 - DNA, 247 bp, Glycine max
aaagtacaattcagcaagcctccctttcaacaaccatggggtgttggtacatggttaaaggaaattaaagacactactaaagaaggatatagttttgaagagctatgcatcaagaaagaagccattgagggagaagagaagttttgtgcaaaatccttgggaacagtacttggttttgccatttcaaagctgggaaagaacattcaagtactttcaagttcctttgtcaataagcaagaccaataca

SEQ ID NO: 199721 - DNA, 248 bp, Glycine max
  unsure (1)..(248): unsure at all n locations
acgacagaaggggaactaaaggagagtgcaattacgtangtgtgtgggagacaaagagagatggctaagtggtgtatgttggtgttggttcttgctctagctctggctgtggccacaagtgccagagatgcacccgaagatgttggtctcaaggaccagaagaacttcatcagctatgctggagttggtggctattcaggaattggaagcaatggactaccttttggaggtgccggaataggtggtgg

SEQ ID NO: 199722 - DNA, 249 bp, Glycine max
tgcgagaagacgacagaagggggcacaagtttgttgagatagctagaagcaataagatgaaaatgaaagtgcttgttttgtttgttgctacagttttggtagcatatgaatgccatggctcagactaccagaagttccctctccaaatgaaaactgggtttggtgggcaatacagcaatgaggtggcatgtgccagttggaggcttggcgtggaagcaaacaacgtagtcaagtggcaaactgttcctg

SEQ ID NO: 199723 - DNA, 247 bp, Glycine max
atctcgagcgaatcggctcagtacggctgcgagaagacgacaacagggggcacaaacaaccaaaaaatttctagagcgagaaagtgagaggagagagaaagtagctgatcctccatggcctccaccaaggaacgcgaaaactttgtctacaccgccaagctcgccgaacaagccgaacgctatgaagaaatggtggaagcaatgaagaatgtggcgaagtgaacgtggaattgacggtcgaggagcg

SEQ ID NO: 199724 - DNA, 248 bp, Glycine max
tctcgagcgaatcggctcgaggacgacagaaggggctatttaaagaagcaaatcctcgatgaggaaagtgcacaagtgagtttgttgatcgagataactagaaacagtgtgatgaaaatgaaggtccttgttttcttcgttgctacaattttggtagcatggcaatgccatgcgtacgatatgttccctctccgaatgaacactggctatggtgcccgtactccggaggtgaaatgcgcaagttggag

SEQ ID NO: 199725 - DNA, 250 bp, Glycine max
tctcgagcgaatcggctcgagtacggctgcgagaagacgacagatgggggcacaagtttgttgagatagctagaagcaataagatgaaaatgaaagtgcttgttttgtttgttgctacagttttggtagcatatgaatgccatggctcagactaccagaagttccctctccaaatgaaaactgggtttggtgggcaatacagcaatgaggtggcatgtgccagttggaggcttggcgtggaagcaagcaa

SEQ ID NO: 199726 - DNA, 247 bp, Glycine max
gctgcgagaagacgacagaagggaatgtattatttaaagttggcaattatcagcgagcaggaaagaaatatgaaaaggctgctgattttgttgatgaagacggatcctttgggtttgatgagcaaaagcaagctcagacactgaaagtgtcatgctagttgaatagtgcagcttgtagccttaaacttgatgactttcctggagcaatcaagctatgttcacaggtgcttgatgttgaattttacaa

SEQ ID NO: 199727 - DNA, 245 bp, Glycine max
tacggctgcgagaagacgacagaaggggttttttttcacgagattgcttcagatccgtacttaagattacgtaatggattttgattctgatttatctgtgattgttgactcgacagatgcagatcttcgtcaagaccctcaccggcaagaccatcacccttgaggtggaaagctctgacaccatcgacaacgtcaaggccaagatccaggacaaggaaggaatccccccggaccagcaacgtctc

SEQ ID NO: 199728 - DNA, 242 bp, Glycine max
tgtatgtgggacccttccttcgcaagcaagagagagaaagtactgctgacaaggcaaagttcaacaatgttttttttaagaatctgtcagattcaaccactgatgatgaattgaagaatgtttttggtgagtttggaactattactagtgctgtcgtaatgggggatggagatgggaaatcaaagtgttttggatttgtgaattttgagaatgctgatgatgctgctagggctgttgaggct

SEQ ID NO: 199729 - DNA, 244 bp, Glycine max
tacggctgcgagaagacgacagaagggagagatgagtccttttatgtcggctaataaaattaagaagcccatcttgcttattcacggggaagaggacaataatccaggaacattaaccatgcagtcagacaggtttttcaacgctctaaagggtcatggtgctctttgtcggctggtgattttgcctcacgagagtcatggttacactgctaaagaaagcatcatgcatgtcctttgggaaaca

SEQ ID NO: 199730 - DNA, 244 bp, Glycine max
agtgttagcaagagaaacagtgtttagtgtaagtgagattgaagcactgtatgaactattcaagaagatcagcagtggagtaatggacaaaggattaattactaaggatgaatttcagttggccttattcaagacaaccaagaaagagagcttatttacagatagggtgtttgacttgtttgacacaaagcatagtggaatacttgatttcaaagagtttgcacttgctctctctgtctttcat

SEQ ID NO: 199731 - DNA, 240 bp, Glycine max
cggctgcgagaagacgacagaagggggtgatttgagaggatcgtgagagggacggtagcagagattccgtgagttgcaaaaatgaaaacaattctttctgcagagaccatgaacatcccggacggcgtgagcgtcaaggttaatgccaaggtcatcgaagttgagggcccccgcggaaaattggtgcgagacttcaagcacttgaatctcgattttcagctcatcactgacgaaaacggt

SEQ ID NO: 199732 - DNA, 243 bp, Glycine max
acggctgcgagaagacgacagaagggggatgcacaagtttgttgagatagctagaagcaataagatgaaaatgaaagtgcttgttttgtttgttgctacagttttggtagcatatgaatgccatggctcagactaccagaagttccctctccaaatgaaaactgggtttggtgggcaatacagcaatgaggtggcatgtgccagttggaggcttggcgtggaagcaaacaacgtagtcaagtg

SEQ ID NO: 199733 - DNA, 243 bp, Glycine max
tacggctgcgagaagacgacagaagggcaaggcagagagtgaggcaggggatgcaagtcctgttgtgactgaagctgacatacagcatattgtctcatcttggactggtattcctgttgagaaagtctcaacagatgaatcagatcgcctcctcaagatggaagagactttacataagcgggtcattggtcaggatgaagcagttaaagccattagtcgggccatccgtcgagctcgggttgg

SEQ ID NO: 199734 - DNA, 245 bp, Glycine max
tacggctgcgagaagacgacagaaggggggagcagaattttgatataagggtcaccccagatgagaattttgatggaactgggaaaattggagttcagctagcccctaatgtgaagatagctaaggttaggccaaaaaatttggtgcaggctgtggagtttactgggcaagagttttggggtctggcctctaatgttttagatgggttaaagcagacttttttgaacttctcccagtcagctagt

SEQ ID NO: 199735 - DNA, 238 bp, Glycine max
cggctgcgagaagacgacagaaggggacatacatcatcaaaaaacacacacgacacactcccatacacacacgttgtctcgcacacattccttcattccgcagcagcaaacatctttaccttaaacgacaacaatggccgatgccgaggatattcaacccctcgtttgcgataatggaaccggaatggttaaggctggttttgccagagatgatgcgccgagggcggtgttccccagc

SEQ ID NO: 199736 - DNA, 242 bp, Glycine max
tctcgaccgaatcggctcgagacggctgcgagaagacgacagaagggggagtgagcgtaactgaggttttgccacttcgaaaccaaattttcttccttcgttggcatctgtgatctcttctcctcacaatgagcagatcagggcaaccaccggatttgaagaagtacatggacaagaagcttcagatcaagctgaatgcaaatcgcatggttgttggtactctccgtggcttcgaccagttt

SEQ ID NO: 199737 - DNA, 245 bp, Glycine max
tacggctgcgagaagacgacagaagggggaagagtgaagagaatggctcccaagggtttaacctttctggctgtgttaatatgcgtttcagcactgtcactgagtccttctgttgcgggggaagggcaaaataatggccttgttatgaacttctacaaggaatcatgccctcaggctgaagacatcatcacagaacaagtcaagcttctctacaagcgccacaagaacactgctttctcctggct

SEQ ID NO: 199738 - DNA, 246 bp, Glycine max
tacggctgcgagaagacgacagaaggggaagaagggaccgagaagaaaatatcagcaacaactgggtttattacgggacagctcataatgttcatatcgatctattatgcgcctttgcatttagcattgggtagaccccatataataactgtcatagctctaccctatcttttatttcagttcttcggcaataatcacaaaaactttttgaattatggatacaagaatccaaattcaatacgtaat

SEQ ID NO: 199739 - DNA, 248 bp, Glycine max
acggctgcgagaagacgacagaaggggatcactttcttttcttcaccgttcgctcttcctctcccagacaaacacatggctttgcccaatcagcaaaccgtcgattaccccagcttcaagctcgtcatcgtcggtgacggtggcacttgaaagacaaccttcgtgaaaaggcatctcactggtgaattcgagaagaaatatgaaccgaccattggtgtggaggttcatccgttggattttttcactaa

SEQ ID NO: 199740 - DNA, 240 bp, Glycine max
cgagaagacgacagaagggggatgcaaaagttagtagtagtgaggaaaatgaaagtccttgttttctttgttgctatagttctagcagcatggcattgccatggctcagaccatgaccatgaccatggccacacctaccaaattttccctctgagaatgaaaactggccatggtggccactacattccggaggtatcatgccaaagttggaggcttggtgtggaagcacacaacgtcatt

SEQ ID NO: 199741 - DNA, 240 bp, Glycine max
cgagaagacgacagaagggggatgcaaaagttagtagtagtgaggaaaatgaaagtccttgttttctttgttgctatagttctagcagcatggcattgccatggctcagaccatgaccatgaccatggccacacctaccaaattttccctctgagaatgaaaactggccatggtggccactacattccggaggtatcatgccaaagttggacgcttggtgtggaagcacacaacgtcatt

SEQ ID NO: 199742 - DNA, 239 bp, Glycine max
gctgcgagaagacgacagaagggggcacttcaattgcaatcaaattagttcattctctttgcgcagttccctacctctcctttcaagatgcagatcttcgtcaagaccctcaccggaaagaccataacccttgaggtggaaagttctgcaacattgacaacgtcaaggccaagatccaggacaaggaaggaattcccccggatcagcaacgtctcatcttcgccggaaagcagctcgag

SEQ ID NO: 199743 - DNA, 239 bp, Glycine max
tacggctgcgagaagacgacagaagggggagagaaagagatcgcagacacagagcagaatggcttctacccaatgtttcttgcaccaccatgctcttaccacccctgccagtgccagatccccatcactacgcatcttggttagcaccaagcctaaccagcttgtttgcaaggcacagaaacaacaaacaccacaagaggatattgatgtcagcccaatctctcgccgtttagctctaa

SEQ ID NO: 199744 - DNA, 238 bp, Glycine max
acggcgcgagaagacgacagaaggggaatttgttaacaatggtaccctttttgattttatacacaccgaaagaaaggtaaataatgaaacttggaaaacgcgtgtaaggatagcagcagaggcagctggagctctaacatatctgcactcagaagcctcaatagccattatccacagagatgtgaagactgctaacatcctcttagataacacttacactgcaaaagtgtctgatttt

SEQ ID NO: 199745 - DNA, 241 bp, Glycine max
tacggctgcgagaagacgacagaagggggagaaacaaatcttgattgaacctatatttgcccaatggatacaatctgctcatggtaaaacttcctatgggttcgatatacttttatcttcaacgaacagtccggcgttcaatgcaggacgaagcatatggttgcctggttggttaaacgctgttaatgagaatagtaattctctattcttaacaatagggcctggagacttcttggttcat

SEQ ID NO: 199746 - DNA, 245 bp, Glycine max
actcgaccgaatcggctcgagagaaggggcagatattgaggaggctactccaccctcggtttactaactctcccttgttgtcacccatcgtagcaaaaaaagatgatgctggctctactggcagtcagtccttaagagcacttgcattaattggagctggtttgtcaggtcctttcagtttttcaacaatggcagcagctgatgaagctgaacatggcctggcatgtccaagctatccatggcct

SEQ ID NO: 199747 - DNA, 282 bp, Glycine max
gctgcgagaagacgacagaagggggagaaaaacgagccaattcatcattttctctcttctctgcctcttcttgttcaaatcttaggagctgaggagaatcaatcgagagaaatatgtctggtatcgctcgtggacgccttgctgaggaacgaaagtcatggcgcaaaaaccatccacacggtttcgctgccaagcccgagactctacctgatggcaccgtaaatttgatggtctggcattgcactattcctggcaagaccgggactgattgggagggtggat

SEQ ID NO: 199748 - DNA, 280 bp, Glycine max; identical to SEQ ID NO: 196377

SEQ ID NO: 199749 - DNA, 269 bp, Glycine max
gaagacgacagaagggggtggtgtagactgtcgagcagtgaataccagttgctcctatagccggcgctcaacaacatggcggacaaggcagtcaccatccgaaccagaaagttcatgacgaacaggcttctctccagaaagcaattcatcgttgatgtccttcatccagggagggctaatgattccaaggctgaactgaaggagaaattgggcagaatgtatgacgtgaaagacactaacactgtatttgtcttcaagtttcgaactca

SEQ ID NO: 199750 - DNA, 272 bp, Glycine max
tacggcggacgacagaagggggccgaggaaaagaaagaaagaaagaaaaaaaacagcgccctagatttgctcttctttgcttcggaagaaagagaaaaacaaataacaatggcgttcgcttctttcctcggcagagttctcttcgcttccgtcttcatactctctgcttaccaagaatttaacgaatttggagttgatgggggacctgcagcaaaagcactcagacctaagtttgatgcctttacacatcgagtgcattctcaagttggctt

SEQ ID NO: 199751 - DNA, 271 bp, Glycine max
cggctcgagcggctgcgagaagacgacagaaggggggatgatgcagccattaaggccacctatgaaagaagaaatgaaatagaattgctacctagtgttgccagttatttcttagagcgggctgttgagatactgaggactgagtatgaaccctcggatttagatatcctctatgctgaaggagttacttcatccaatgggatggcttctgtagagttttcatttcctcaaccagctcccgaggaaactgttgacactgctgatctacata

SEQ ID NO: 199752 - DNA, 250 bp, Glycine max
tacgctgcgagaagacgacagacggggacaacaaacaacaacaactactcctttttccatttcgtattctcttctctttcattgacgatctccacgaagttctttcacctcaaacacacccttaattacatcgcattctcttcctctttctcttaccgtttgaattagattgcacctactcctctctctttcactcttctttttctggatcttcaacttctccctgattttgctgatttgggggattgag

SEQ ID NO: 199753 - DNA, 270 bp, Glycine max
tacggctgcgagaagacgacagaagggggcacaagtgagtttgttgatcgagataactagaaacagtgtgatgacaatgaaggtccttgttttcttcgttgctacaattttggtagcatggcaatgccatgcgtacgatatgttccctctccgaatgagcactggctatggtgcccgtactccggaggtgaaatgcgcaagttggaggcttgctgtggaagcacacaacatctttggctttgataccattcctggagagtgcgttgaagc

SEQ ID NO: 199754 - DNA, 282 bp, Glycine max
taccggccaaacgacgacagaaggggaagcgcggcgggatcagcacaagattgcaaaatgaagttcaacattgcaaatcccaccactgggtgccagaagaagctggaaatcgatgacgacctgaagcttcgagcattttgggacaagaggatctcccaggaggttcttggtgatgctctgggtgaggagtttaaaggatatgttttcaaaatcaccggtgggtgtgacaaacaaggattccctatgaagcagggagtgctgacccctggtcgtgttcgactt

SEQ ID NO: 199755 - DNA, 274 bp, Glycine max
agacgacagaagggggatctaaccctaaacaaaaccttagcatactttattctcgcttggttgcagcttcagcagcagcggcaagcaactccatccgcaatgggaatcgatttgaaggcaggaggtaagtccaagaagaccaaacgtacagcccccaaatccaatgatatttacctcaagctccccgtcaagctgtaccgttttcttgttcggaggactggtagtaacttcaatgccgtcatcctcaaacgccttttcatgagcaaggtcaaca

SEQ ID NO: 199756 - DNA, 272 bp, Glycine max
tacggctgcgagaagacgacagaaggggacattgtatttgcactacgaccatttcaggaagaaagaagtgcaatggacatcggaacctatggctatcctacaccagcagtgaaaaagattgagtcttactatgatgtgccagagggagtggatattcggggaagatatgatgcagagtttgcaaaaatcctcacaaaagatgctttgaaattcgttgctgacttgcaacgtgagttcaggaaccatatcaagtatgcattagagtgcagaag

SEQ ID NO: 199757 - DNA, 268 bp, Glycine max
acggctgcgagaagacgacagaagggggagtggagggcaacttataggccagaggaaatccgttgggctgaaatagcacatgagggcgagacaggcaaagtctccagagctaactttcatgatcgacatgggagggctgtgcttattatgaggccagggatgcagaatacagcatcggctgaagataatatcaggcatttagtctatctgttggaaaatgctatcctgaatctttctgaaggtcaagaacaaatgtcatggttgatag

SEQ ID NO: 199758 - DNA, 271 bp, Glycine max
tacggctgcgagaagacgacagaagggggactgggttttcactgatcaagcattgcctaatgatcttgtcaagagaggagttgcggttaaggatccatctgctccccatggagttcggcttttgattgaggactatccttatgcttctgatgggctagagatatgggatgccatcaagtcctgggtgcatgaatatgtctcattctactacaagtcagatgcagcaattcaacaagatcccgagctccaagcttggtggaaagaacttgtc

SEQ ID NO: 199759 - DNA, 271 bp, Glycine max
acggctgcgagaagacgacagaagggggaagaggcattgagtggagtgaggggtcatgcacaagatttgttacatgttagagatttgttagagttagagtcatggagagcagcacaaaagacattgagacagagctcagcaattctgaagaaggatatttatatcataatccaaagcaagcctggaattgagagggcacaattaaggaagctctattctactctcttcaacaatgtaactagactagattatgcagcaagggataaagatg

SEQ ID NO: 199760 - DNA, 270 bp, Glycine max
agtttcctgacatggtccatgctctcaaacccaaccccaagtcccacatccaggagaattggaggatcctcgatttcttctcccaccatcccgaaagccttcacatgttctccttcttattcgatgacgttggtatccctcaagattacaggcatatggatggttttggtgttaacacttacacccttatcaacaaggctggcaaagccgtctatgtcaaatttcattggaaaaccacctgtggcgaaaagtgtctcttggacgacgagg

SEQ ID NO: 199761 - DNA, 268 bp, Glycine max
acggctgcgagaagacgacagaaggggagagtggtggggtgtgcagaagagcgtcgcagttgtaaccctaatcagaagaagcgcacttcaagcgagtgacagccaccagccatgggtcgtatgcacagccgcggtaagggtatatcctcttctgctttgccctacaaaaggacacctcctagctggctcaagatctcttcgcaagatgtcgaagaaaatatctgcaagtttgcgaagaaaggtttgaccccgtctcagattggtgtca

SEQ ID NO: 199762 - DNA, 270 bp, Glycine max
tacggctgcgagaagacgacagaagggggagagaagttattagggtttttgagtgcggcggtccaaacactcttctctgcagcttttgcctacaactcccttcaccatggctgaacaaaccgagaaagcctttctgaagcaaccaaaagtgtttctcagcacaaagaagactgggaagggaaagagacctggaaaaggtgggaaccgcttttggaagtccattgggcttggatttaagactcccagggaagccatcgaaggaacctatat

SEQ ID NO: 199763 - DNA, 270 bp, Glycine max
gggatcgaagcaaaaaatgaaaacccaaagtgcttctctcctctgtctttttctctctcttgctatccttttggctagtggcactgctgcaagtgcaactccaagaagcgcagtgccaagccaccatgtttcaacattcaacagaagcctttttccttccacttttctctttggaattggttcttctgcttaccaggcagaaggagcagcaagtgtagatgggagaggaccaagcatatgggacacctacactagacagcatactgaaaa

SEQ ID NO: 199764 - DNA, 269 bp, Glycine max
tacggctgcgagaagacgacagaagggggctgccgctctctgagaaaaacagatagtgtgggagagagaagagcggaagagaaaatgacgaccaggttcaagaagaacaggaagaagagaggtcacgtcagcgccggacacggccgtatcggaaagcaccgcaagcatcccggaggtcgcggtaacgccggtggcatgcatcaccaccgtatcctcttcgacaagtaccatcctggtttcttcgggaaggtaggcatgcgctacttcca

SEQ ID NO: 199765 - DNA, 269 bp, Glycine max
gctgcgagaagacgacagaagggggtagcgcagagaaagaactagaactagggtttcatctttgccatcagtaaacgacaatgatttacgacgttaactctcctcttttccgatccttcctcagccagaagggaggctcctctgataagaggaaatcggacgaacagaagccaaaagagcagaaacccaaagccagcgagaacaaacctataatgactgagtgataacagctgagctgcattcagttgtagaatgaaaataggtggtag

SEQ ID NO: 199766 - DNA, 267 bp, Glycine max
cgagaagacgacagaagggggagaggatcgtgagagggacggtagcagagattccgtgagttgcaaaaatgaaaacaattctttctgcagagaccatgaacatcccggacggcgtgagcgtcaaggttaatgccaaggtcatcgaagttgagggcccccgcggaaaattggtgcgagacttcaagcacttgaatctcgattttcagctcatcactgacgaaaacggtaaaaggaagctgaaggtggaggcctggttcggttctcgga

SEQ ID NO: 199767 - DNA, 244 bp, Glycine max
ggagagtgtaaggttttgcatttcatttgacgaagagtgagagagtcttatctgtcgtctctgatctctgatcgcatcttcattccgaaaatggctgtttcggctatcactggagcgaggctaactctagggatgtctctttcctcttccacgcgatcacgaaccgtcgcaatggccgtatctatcgaccccaagaccgataacaaactcactcttaccaagtccgaggaagctttcgctgcgg

SEQ ID NO: 199768 - DNA, 263 bp, Glycine max
agacgacagaagggggatccttttgtctataaactgaactgaattgagtctcaacaacccagttgagtaactaagatggcgcaagtgaggaacaagcaagtgcttctaaaggactatgttaccggttttcccaaagaatccgacatgaatattgtcgaaagtaccataacattgaagcttccacaaggttccaatgatgtcttgctcaaaaatttgtacttgtcttgtgatccgtatatgaggaatctcatgaacaagcccga

SEQ ID NO: 199769 - DNA, 269 bp, Glycine max
tctcgagccgaatcggctcgagacggctgcgagacgacagaagggacatttctgatgatgaagacgaggaagagaagaaggatgaggggggtaaagttgaagatgtggatgaagataaggagaaggaggagaagaaaaagaagaccattaaggaggtatctcatgagtggtcattggtgaacaagcagaagcctatttggatgaggaaacctgaagagatcacaaaagaagaatatgctgctttctacaagagtcttaccaatgattgg

SEQ ID NO: 199770 - DNA, 270 bp, Glycine max
tacggctgcgagaagacgacagaagggggaagagtgaagagaatggctcccaagggtttaacctttctggctgtgttaatatgcgtttcagcactgtcactgagtccttctgttgcgggggaagggcaaaataatggccttgttatgaacttctacaaggaatcatgccctcaggctgaagacatcatcacagaacaagtcaagcttctctacaagcgccacaagaacactgctttctcctggctcaggaacatcttccatgactgtgct

SEQ ID NO: 199771 - DNA, 269 bp, Glycine max
acgacagaaggggacagcacagcactctttgcaacacaacaaaaaaagacaacacagagagaagcgtcttaataaacgctcttctctgaaaaacctgatttcttctcttcttctcttctctttcgtttcgatcttcgatctctgaaaatgagagagtgcatttcaatccacatcggtcaggccggtattcaggtcggaaacgcctgctgggagctctactgcctcttacacggcattcagcctgatgggcagatgccaagtgataagac

SEQ ID NO: 199772 - DNA, 267 bp, Glycine max
ctgcgagaagacgacagaagggggagcaagagtgaagagcgaagagaatggctcccaagggtttaatctttttggctgtgttatgcttctcagcactgtcactgagtcgttgtcttgcggaggataatggacttgttatgaacttctacaaggaatcatgccctcaggctgaagacatcatcaaagaacaagtcaagcttctctacaagcgccacaagaacactgctttctcctggctcagaaacatcttccatgactgtgctgttc

SEQ ID NO: 199773 - DNA, 266 bp, Glycine max
ctgcgagaagacgacagaagggggtaggcaaagagagagagagaaaagcgtgaatcatgtcggacgaagagcatcacttcgattctcaggcggatgcgggagcgtccaagacgtatcctcagcaggctggtaccattcgcaagaatggctacatcgtcatcaaatccaggccttgcaaggttgtagaggtctctacgtcaaagacaggcaagcatggacatgcaaagtgtcactttgttgcaattgatatttttaatgggaaaaag

SEQ ID NO: 199774 - DNA, 266 bp, Glycine max
gctgcgagaagacgacagaaggggatccaatccaattgaattctccagagagaagaagaaacttaatcgatcatcacttcacttcactaatacatcatggcagacgagacccagaacaagtatgagagctctgaggttgaggtccaggatcgtggtgtttttgactttctcggtaagaaaaaggatgaagaagacgagcctcatcctcaggaggaggtcatcgccaccgagtttcaaaaagtcactgtctcagaccaaggagagaa

SEQ ID NO: 199775 - DNA, 266 bp, Glycine max
ctcgagccgaatcggctccgagaagacgacagaagggggcgctagttctgagtattctgatcgctccctgagagagctcgtcgcggcggttgcagaagaagattgcaagatgaagttcaacatcgcgaatcccaccactggatgccagaagaagctcgagatcgacgacgatctgaaactgcgagcattttgggacaagaggatctcacaggaggtcatcggagatgcactcggtgaggaatttaagggctatgtcttcaaaatta

SEQ ID NO: 199776 - DNA, 265 bp, Glycine max
agacacggctgttgggtattctttcttttgtacacagtacagtatggaaagtattatttggaaaggttgctgattcactggagaaaggaactgaacatgaagatgaatacatgatcagtgaaaaggagctcctcgtaaacaaattcatttctatcccaaaggacatgggaacgtttaactgtggagcatttgttgctggaatagtacggggcgttttggatggtgctgggtttccagctgttgtaacagctcattttgtgcccgt

SEQ ID NO: 199777 - DNA, 267 bp, Glycine max
tacggctgcgagaagacgacataggggatccaacaaccgttcacaaatctttttctaagtgtagtagaggtgaggaaccgcgccaaccctctcttctactactgcttcaatcctgttatagcgtttctagtttcattcttaatcgttgggaaaaatgttcatcgagaattttaaggtagagagtcctaatgtgaagtacaccgagactgagattcagtccgtgtacaactacgaaaccaccgtacttgttcacgagaacaggaatgg

SEQ ID NO: 199778 - DNA, 270 bp, Glycine max
gacgacagaagggggtacacagcctcaacaaccctaacgcgtgcagagcagagagagacgcagccatggggcgaagacccgcgaggtgttataggcaaattaagaacaaaccataccccaagtcacggttttgccgtggtgttcctgatcccaagatcaggatttacgatgttggtatgaagaagaagggtgttgatgagtttcctttctgtgtccatctggttagttgggagaaggaaaacgtttctagtgaggccctggaagctgctc

SEQ ID NO: 199779 - DNA, 267 bp, Glycine max
tacggctgcgagaagacgacagaagggggagagaaagagatcgcagacacagagcagaatggcttctacccaatgtttcttgcaccaccatgctcttaccacccctgccagtgccagatccccatcactacgcatcttggttagcaccaagcctaaccagcttgtttgcaaggcacagaaacaacaaacaccacaagaggatattgatgtcagcccaatctctcgccgtttagctctaactgtgctcattggtgctgctgctgttgg

SEQ ID NO: 199780 - DNA, 151 bp, Glycine max
gctgcgagaagacgacagaagggtgtaataagatgcgttcaaataggggcactagcttcactttatgttgtttcagctgtgtgtcaacaagtcatgtaagagacttcactatgttgttttctctttcgtggctttaataaattatgcgccc

SEQ ID NO: 199781 - DNA, 262 bp, Glycine max
tctcgagccgaatcggctcgagacggctgcgagaagacgacagaaggggcagccggagaacgcggtttatgatttcgaggacaagatcaactttgcggtgttcccttcgctgcagggtgggccccacaaccaccagatcggggctcttgccgtggcgctgaagcaggccgcgtcgcccgggtttaaggcctacgccaagcaggttaaggccaacgccgttgcgcttgggaattacttgatggggaaagggtacagtcttgtc

SEQ ID NO: 199782 - DNA, 264 bp, Glycine max
tacggctgcgagaagacgacagaagggggtagactcaaagcttgttgatcttagagaaagtggcatcaagaacaagtccttcttagatggacatgtgtcatcaatggaagatattgtgaccaatgcaaaaaggaaatggcaggccttttgcgtgcaagcagaaaaggatgcaaaagacactgctgatgattctgccgcaaagcattgtcgtatggagaaactcatacagcggggtgttcatactgctcaatcggctttcgaaca

SEQ ID NO: 199783 - DNA, 262 bp, Glycine max
tacggctgcgagaagacgacagaagggaacagacaccgacacagatctgtcttccgaagcaggaactaaatatggctgacttgttggaatggtcaaagcaagataagaaacgaatgcttcatgtcgtctaccgtgttggtgaccttgatcgcaccatcaaattttacacagaatgtttaggaatgaagcttttgaggcaaagagatatcccagaggagaaatatgctaatgcttttcttggatttggccctgaagaatccca

SEQ ID NO: 199784 - DNA, 263 bp, Glycine max
tacggctgcgagaagacgacagaagggagagtggtggagtgtgcaaaagagcgtcgtagtcgcaaccctaatcagaagaagcgcacttcaagcgagtgacagccaccagccatgggtcgtatgcacagccgcggtaagggtatatcctcttctgctttgccctacaaaaggacacctcctagctggctcaagatctcttcgcaagatgtcgaagaaaatatctgcaagtttgcgaagaaaggtttgaccccgtctcagattgg

SEQ ID NO: 199785 - DNA, 263 bp, Glycine max
tacggctgcgagaagacgacagaaggggacgtcaaacttttcaaccgctggagcttcgacgacgttgaggttactgatatgtctctggctgattacattggagtgtccccgtcaaagcatgctacatatgttcctcacactgctggtaggtactcagtgaagaggttcaggaaggcgcagtgccccattgttgagagactcaccaactctctcatgatgcacggaaggaacaatggaaagaagctcatggctgtcaggattat

SEQ ID NO: 199786 - DNA, 264 bp, Glycine max
ttcagtcaactccttaaatttccatccggtacatcacacttttgcaactgctggatctgatggtgcttttaatttctgggataaagacagtaaacagagactcaaggctatgcaaaggtgtagtcagcccataccttgcagtacatttaataatgatggttccatatttgcttatgcggtttgttatgattggagcaaaggtgcagaaaatcgcaatccagctacagcaaagaactacatatatttgcacttaccacaggagtc

SEQ ID NO: 199787 - DNA, 267 bp, Glycine max
acggctgcgagaagacgacagaagggctacctgtagtggtcctcacatgtatgggtgaggaacgtgaccagaagccacagctgagttgtagtatggtggcatggtgactcttggcccataatatgcctgaagatatagtagacatcttatattataatacagtcactattcactacactagagaccagacacacttgaaaacttgctgggtgaaccaatttgaaagggataaaattaatagttttataccatcgaatcaatgttttt

SEQ ID NO: 199788 - DNA, 291 bp, Glycine max
agaggtattggcagcttcaatatccccccagcaagtttagccacatttgtgactctatccatgcttgtatgtgtggtgctctatgaccgtttctttgtcaagatcatgcaaaggtttaccaagaaccctagggggataacccttctccaaaggattggaattggcctcataatccacatagtgattatggtagttgcatctcttactgaaaggtatagacttagagtggccaaagaacatgggttagtagaaaatggagggcaagttcctttgagcattttcatcttgctt

SEQ ID NO: 199789 - DNA, 281 bp, Glycine max
tacggctgcgagaagacgacagaagggggcacaagtgagtttgttgatcgagataactagaaacagtgtgatgaaaatgaaggtccttgttttcttcgttgctacaattttggtagcatggcaatgccatgcgtacgatatgttccctctccgaatgaacactggctatggtgcccgtactccggaggtgaaatgcgcaagttggaggcttgctgtggaagcacacaacatctttggctttgagaccattcctgaagagtgcgttgaagcaacaaaggaat

SEQ ID NO: 199790 - DNA, 279 bp, Glycine max
acacactactttttgccaaaatctcaaagtgctgcagattacaaggcagcaagtagagctctggacttcttctttggttggtattctgatccggttttctatggtgactatccggagagtatgaaatcttcagtaggttctaggctcccaaaattcacaaaagctgaatctgaaggtctaaaaaattccatagattttcttggtgtgaattactacaccacttattatgcggaacatgctgaacctgtcagtgccaaccgaaccttctacacagacata

SEQ ID NO: 199791 - DNA, 279 bp, Glycine max
acggctgcgagaagacgacagaagggggaagatacggaggctgctgctatcgaatactcggataaggaggaacatcttttcaatggcgtcccaaattacccgtgagtggtctggaatcaatacattcgcacctgctacccagactaagttgcttgaactcttgggaaaacttaaacaagagaatgtgaactccttaactatacctgtgatgggaaaaggtggtgttggaaaatcttcaactgtgaactccatcattggggatagagtggtttcgattaa

SEQ ID NO: 199792 - DNA, 279 bp, Glycine max
tacggctgcgagaagacgacagaagggggaagaaggcaaatcgcgaagactagatctgatctgagagaatggctcctcggtctagcagcaaggacgcccaagaccttttccgcgctctttggtctgcttatgctgcaacccccactaatctcaagatcattgatctctatgtcatctatgccgtattcaccgctttcatccaggttgtttacatggctttggttggatcatttccattcaactccttcctatcaggagtactttcttgtgtaggaactg

SEQ ID NO: 199793 - DNA, 274 bp, Glycine max
acggctggaagacgacagaagggggagaatctggagttgtggttgctatgctgagaggttatgcacttgcatgttttgcggtacttggtgggacttttgcctggggtatcgactctttgtcaccagcatcaaaacgacgaccaaaggtccttgagattcatttagaatttcttgcaaatgcactagatagaaaaatatctcttcgctgtgattgtgctacttggcgtgcatatgtgtctggggttatgagcttgatggtgagttgcacgccact

SEQ ID NO: 199794 - DNA, 280 bp, Glycine max
tactcgagccgaatcggctcgagttcaacacagatccattaagcagattctttgggtgtggattcagagtgctcttgatcaagggaagtggtctctcgagctcaaattctctgttgggaagattcctccatgaactgaagtcacttgcttcaggtgggattgtgaagttcaaatctcgtccagtgagttcaatccactttctccgctcatccttatcaagactcataagattgggcgatggaacaacctcgatgccatgcacacattgaggatttgaaag

SEQ ID NO: 199795 - DNA, 277 bp, Glycine max
acggctgcgagacgacagaaggggaacacactcatcaaaaaacccttctttctttcaggttcattacttgatcagtgtcaaaagggtagttgcaaattgcaatggctaagcatgatgttgagggtggttccttctcagcaaaggactaccatgatcctcctccagcacctttgattgatgctgaggaactcacacagtggtccttctacagggctttgattgctgaattcattgccacattacttttcctttacatcacagtgctcactgtgattgg

SEQ ID NO: 199796 - DNA, 278 bp, Glycine max
cgagaagacgacagaaggggacagcagagcaaaagaaagaaagaaactgcaacttcctctgttttgctcccctgtttaggccttttcataagcttagaatgacacacaaggaattttccattgctctagtgactctcattgctgttctctttgtcaacatgaacatccaaggtgccactgctgactttggtagttggcagagtgctcatgccactttttatggcgggggtgatgcttctggcacaatgggtggagcatgtgggtatggaaatttgtat

SEQ ID NO: 199797 - DNA, 276 bp, Glycine max
cggctgcgagaagacgacagaaggggatgacaatggaggggatgatggacaagggggtgttggatgatgtgataagaaggcttctggaagggaaaggagggaaacaggtgcaactctctgagtcggagatccgtcaactctgcgtcaacgccagacaaatcttcctctctcagccaattcttctcgacctccgtgctcccatccgcatctgcggtgatatacatggtcagtactaggacttgctgaggctttttgaatatggtggctaccctcctg

SEQ ID NO: 199798 - DNA, 275 bp, Glycine max
cggctcgagttgcgagaagacgacagaagggacatttggacatttggccccagagtactacttgcatggtgttgtggatgagaagacagatgtgtttgcctttggtgtgttcatgctagaagtaatctctggcagaaaaccagtggatgggtctcaccaaagcttacatagctgggctaaaccaattttgaacaagggtgagatagaagagttggtggatccaaggcttgaaggggcttatgatgtgacacagttaaagagatttgccttcgctg

SEQ ID NO: 199799 - DNA, 276 bp, Glycine max
tacggctgcggaagacgacagaagggggaacaagcaaaattaagcacaaaagcccaaccctctctctcgctgttggtctctcctatttggcattcgcagatcgattacgaagtaatttcactgaatcttattgaagatgtttctcacaaggactgagtatgaccgaggagtcaacaccttttctcctgaaggccgtttatttcaggttgaatatgcaatcgaagccatcaagctgggatcaactgcaattgggttgaagacgaaagagggtgttgt

SEQ ID NO: 199800 - DNA, 259 bp, Glycine max
ggaacctgatcgatctctttaccagttgccacactacaccgagattccccctaaacccgtttgcgttgttgtttgcgaagaaatggcgactaagaggagcgtgggaacgttgaaggagggtgatttgaaagggaagagggtgttcgtgagggtcgatctgaacgtgcctttggatgacaaccttaacatcaccgatgacactagagtccgtgctgctgttcccaccatcaagtacttaactggtcatggagccaaagtg

SEQ ID NO: 199801 - DNA, 276 bp, Glycine max
aatcctttaactggaaagtaatgctcacaccagagaaatgagggtatagcttgcatagcctctccgtcagagaaatgagtgtatatttgggaaaataggatacttcatcgcaaagaagatgagattctctaatgaaataaatcctccacccctaaaatctgttgaagggtcagaaccttgccatcccatttccttccaaaggtctgatttaagtgaaggaagctccctgtccgggtaagccaatttccacaattgtttaagtgcgtcttggtgctc

SEQ ID NO: 199802 - DNA, 272 bp, Glycine max
tacggctgcgagaagacgacagaagggaaagagacccggaaagggtgggaaccgcttttggaaatccattgggcttggatttaagactcccagggaagccatcgaaggaacctacattgacaagaagtgccccttcactggcaatgtttccatccgtggccgtatcttggctggaacatgtcacagtgctaagatgaacaggactattattgttaggaggaattatctccattttatcaagaagtaccagaggtacgagataaggcactcca

SEQ ID NO: 199803 - DNA, 274 bp, Glycine max
agaagacgacagaagggtgctagagaaacgattgctggtgtaaatccaaacgtcattaagattcttgaggagttcccaccacgtagcaagctagatacacaagcctacggtgatcatacctgtataataacaaaacaacatttggaacctaacttgggtgggctcactgttgagcaggctatccagagcaagaagctgttcatcttagatcaccatgactatctcactccatatttgaggaaaataaatgcaactaccacaaagacttatgcta

SEQ ID NO: 199804 - DNA, 275 bp, Glycine max
ctcgagccgcacaatctgcagatgaggccatgccggttccaaaacatgttcctcttcgtcaggctcacccatgtcttccaaatttccatcatgattggaagaaggcagagcacgaaacaaattggtcgccaccatcttcgtcatctcctgcatcgctaactcgttgaacttcgaattcacagacgaaacataatcaacaagctcaagtagagtttgccgcttaacgtccttctctttgagatgcttgacaggatcattgaaatcaaacacaacac

SEQ ID NO: 199805 - DNA, 273 bp, Glycine max
gctgcgagaagacgacagaagggggaggattcacaaatgataatcatctctactgaccaaatctgaagaaaattgctttctctttggttcctagctcgcactctctctacgcacgcctcaacatcccttctctgctccattcattatgtctccgtcgttggatcttccccccaagggtggcttcagttttgatctatgccgaagaaacgcaatgcttcaaaacaagggcctcaaagccccaacctttctcaaaactggcaccactattgtcgg

SEQ ID NO: 199806 - DNA, 152 bp, Glycine max
ctatccctccagtgaaggtaatccaagggataagttagtgcaatggggtcatggggcgactggcatggccatcacgttgtccaaagcagcagaggtatttcctaatgacagagaataagagatgctgcaataaagcaggtgaagttgtatgg

SEQ ID NO: 199807 - DNA, 274 bp, Glycine max
tacggctgcgagaagacgacagaaggggataagcaaaactaatatatcactgaattagaaaaaaaaaatggggaagaagaagagaagtagggtttccgaagacgaggaaatcgaatctgacaccaaccctttcgatcaaaacgaacacactctctaccaggttcttggtgtggagaaaacagcatctcaacaggaaataaagaaggcatactacaagttggcattgaggctgcatcctgataagaaccccggcgatgaggaagctaaagcaaag

SEQ ID NO: 199808 - DNA, 296 bp, Glycine max
taccactgttcgattttgggacttgaccactcagacaccattgtacacttgcacaggtcacaagaactgggtcctttgtattgcatggtcaccagatggaaagtatcttgtaagtgggagcaagactggagaacttatttgttgggacccacaaactggaaagtcattatggcaagtccacttaatgtggccactaagaaatgagattgactcggtaatctccttggggaaccctgtcgcgacctgaatggctagccatgccggtcgctattcgtaagtgtccaggcacaagatgg

SEQ ID NO: 199809 - DNA, 271 bp, Glycine max
gcgagaagacgacagaagggggggttaaattttacttgacaaaataattctaaacccccctgtttttgagtactttgcatctgatcgtagttcagaaggaggagttctgatgaaaccagcagacctaatgcgggcagtggttcctgttttcctccatctgaatcccaccttgttagagatggatacttggaaggagaaaggaggccaggccatttacgctgccctccttccaaattttttatgctttttgatgtaaacaatgatggtctga

SEQ ID NO: 199810 - DNA, 223 bp, Glycine max
ctgcgagaagacgacagaaggggttactgatgaagcatctttcaacaatattaggaattggattcgcaacattgaacaacatgcttctgacaatgtaaacaagatacttgtgggtaacaaggctgatatggatgaaagtaaaaggactgtgcctacctccaaaggtcaagcccttactgatgagtatggtatcaagttttttgaaaccagtgcgaagacaaac

SEQ ID NO: 199811 - DNA, 269 bp, Glycine max
tacgagaagacgacagaagggggaatttcagtggttgaacaagtcactggaagagatctcgtgctcaatcatttaagcatcccagctgcttgtttcactcatcctgaaatcagcatggttggattgacagagcctcaagcaagggagaaaggtgaaacagaggggtttgaagtaagtgttgccaaaacaagttttaaagctaacacaaaggctctagcagaaaacgaaggagagggactagccaagttgatatatagacctgacaatgg

SEQ ID NO: 199812 - DNA, 268 bp, Glycine max
acgacagaagggggaagaagatattagggtttttgagtgcggtgcggcgatcctagcactctcttctgcagctttcgccgacagcttcattcaccatggctgagcaaaccgagaaggcttttttgaaacaaccaaaagtgtttctcagctcgaagaaaactgggaagggaaagagacccggaaagggtgggaaccgcttttggaaatccattgggcttggatttaagactcccagggaagccatcgaaggaacctacattgacaagaa

SEQ ID NO: 199813 - DNA, 269 bp, Glycine max
actcgagccgaatcggctcgagtacggctgcgagaagacgacagaagggggcgtacgcagcttaatccctaacgcgtgcatagcagagtcagagacagagacgcagccatggggcggagacctgcgaggcgttataggcaaattaagaacaagccataccccaagtcacgtttctgccgtggtgttcctgatcccaagatcaggatttatgatgttggtatgaagaagaagggtgttgatgagtttcctttctgtgtccatctggttag

SEQ ID NO: 199814 - DNA, 270 bp, Glycine max
tacggctgcgagaagacgacagaagggggcagttcaattccaatatatcccattctctctgtgtatttccctacctctcccttcaagatgcagatcttcgtcaagaccctcaccggcaagaccatcacccttgaggtggaaagctctgacaccatcgacaacgtcaaggctaagatccaggacaaggaaggaatccccccggaccagcaacgtctcattttcgccggaaagcaacttgaggacggccgtacccttgctgactacaacatt

SEQ ID NO: 199815 - DNA, 269 bp, Glycine max
aaaatgtccaaagaacaaacatagaaagtaacatagtcgttggagtaattgatagtggaatttggcctaattcttatagctttactgacgggggatttggtccaccaccacgacaattgagctgctataactttacttgcaataacaaaataattggagcaaaatattttcgcattctgggcgggtttgagaaagaggacatcataaatccaacggatacgtctggtcacgggtctcattgtgcatccactgctgctggaaacccagtt

SEQ ID NO: 199816 - DNA, 268 bp, Glycine max
tacggctgcgagaagacgacagaagggggcatcaattcaaaatatatcatcaattataagcatgggtttgtggaacacaacgaatgcagtgtcttgccgctttcacaagtttggtgatgaccaaaagaatctggtcttccaaggtgatgccacgtcttcttccaggggcatagaactcacaaagttagacggtggaggaaaaccagtgggtggcagtgtggggagagtgttatactcttctccagtgcacctttgggaaagctctaca

SEQ ID NO: 199817 - DNA, 270 bp, Glycine max
tctcgagccgaatcggctcgagtacggctgcgagaagacgacagaaagggacagcaaaacaattttcaaactcaattaccattccataacctaaatctcctctttgtttccgagtcagagagcaatggcacgtaccaagcaaaccgctcgcaagtccaccggcggaaaggcgccgaggaagcaattggcgactaaagccgctcgcaagtcagctccggccaccggcggagtgaagaagccccaccgcttcaggcccggaaggtggctcta

SEQ ID NO: 199818 - DNA, 261 bp, Glycine max
tacggctgcgagaagacgacagaagggggtttgattagggtttgtcattagcacttcttcttttcacactgccgctgcaacaatggcttcagagaagaaactttcgaacccaatgagggagataaaagtgcagaagctcgttctcaatatctctgttggcgagagtggagatcgtctcaccagagccgccaaggtgttggaacaacttagtggccaaaccccagtgttttccaaagcaaggtacactgttcgttcctttgg

SEQ ID NO: 199819 - DNA, 264 bp, Glycine max
aagacgacagaagggggcacaagtgagtttgttgatcgagataactagaaacagtgtgatgaaaatgaaggtccttgttttcttcgttgctacaattttggtagcatggcaatgccatgcgtacgatatgttccctctccgaatgaacactggctatggtgcccgtactccggaggtgaaatgcgcaagttggaggcttgctgtggaagcacacaacatctttggctttgagaccattcctgaagagtgcgttgaagcaacaaa

SEQ ID NO: 199820 - DNA, 265 bp, Glycine max
tacggctgcgagaagacgacagaagggggcacaagtttgttgagatagctagaagcaataagatgaaaatgaaagtgcttgttttgtttgttgctacagttttggtagcatatgaatgccatggctcagactaccagaagttccctctccaaatgaaaactgggtttggtgggcaatacagcaatgaggtggcatgtgccagttggaggcttggcgtggaagcaaacaacgtagtcaagtggcaaactgttcctgcagcttgcgg

SEQ ID NO: 199821 - DNA, 267 bp, Glycine max
acggctgcgagaagacgacagaagggggagggaatagagcacaggacagttgaagtaaatggcataaaaatgcacattgcagagaaaggagaaggccctgtggtgttgtttctccacggcttccccgaactctggcactgttggcacaaccagattgtggctcttggttccctcggataccatgcggtggcaccagatctccgaggctacggtgacaccgatgcaccaccttcaatagacagctacacatgctttcatatagtggct

SEQ ID NO: 199822 - DNA, 269 bp, Glycine max
acggctgcgagaagacgacagaagggggcgtgttttcatcattgtcgttctgaacggaaaagcactggcgcactaccctgaggcttctcttctcttctcttctctgtcgtgagtcaccatggtgagggttagtgtgctgaacgatgctctgaagagcatgtacaatgctgagaaaaggggaaagcgccaagtcatgattaggccatcctccaaagtcattatcaaattccttttggtgatgcaaaagcacggatacatcggagagtttg

SEQ ID NO: 199823 - DNA, 269 bp, Glycine max
acggctgcgaaagacgacagaagggggcattatatttgagttcaaacaaatcaaagccatggccacctccaacttctctattgttctctccgtctccctagccttctttttagtgctacttaccaaggcacactcgaccgataccgtttctttcaccttcaacaagttcaacccagtccaaccatacattatgctccaaaaagatgctagtatttcatcctctggggtgttacaactcaccaaagttggcagcaacggcgtgcccacct

SEQ ID NO: 199824 - DNA, 264 bp, Glycine max
acggctgcgagaagacgacggaaggagggaaagtggttgacgaagaagacgaagaagaagaatggagaagtcagggaagagagtgttgcttacctccaacggcgacgacatttctcaaggcattgccttccatttggtgaagcaagggtgcaggttggttttgctgggagatcagaattccctgcggagcatcgcgaacaaaatcatggattccctctccctcgcagacagaagcaccgtgcaggtcgttggattggacatgga

SEQ ID NO: 199825 - DNA, 259 bp, Glycine max
tacggctgcgagaagacgacagaaggggggtgagagctttcctgtgccagtctatctgtctttaattccaatcattggtggatgtgcacttgctgctgtgactgagctcaatttcaatatgatcggttttatgggggccatgatatcgaatttggcatttgtattccgtaatatcttttcgaaaaagggcatgaagggaaagtctgttagtggaatgaattactacgcatgtttatctattttatctcttgctattctc

SEQ ID NO: 199826 - DNA, 261 bp, Glycine max
tacggctgcgagagacgacagaaggggatcttgaaagaatttgctccatctattcccgagaaaaacatttcttgtttgactagattggaccacaatagggcactgggccaaatttctgagagactgaacattcaggtttctgatgtaaagaatgtcattatctggggcaatcactcaccaacccaatatcctgatgttaaccatgcaactgttggggagaagcccgtccgcgagcttatagctgatgatgcctggttgaat

SEQ ID NO: 199827 - DNA, 259 bp, Glycine max
acggctgcgagaagacgacagaaggggctgtatttggaatttttggagaagtttgagaggaagtttgttgcccaaggagcttacgatacacgcaatatcttccagtcactagatcttgcatggactttgcttcggattttccctcgcgagtttcttcatcgtattcctgcaaagactcttgatcagttctacagccgagatgccggaaactgatgatataatagcaaggtcttataccttagtcacatgctcaatcatc

SEQ ID NO: 199828 - DNA, 260 bp, Glycine max
tacggctgcgaagaagacgacagaagggggcacaagtgagtttgttgatcgagataactagaaacagtgtgatgaaaatggaggtccttgttttcttcgttgctacaattttggtagcatggcaatgccatgcgtacgatatgttccctctccgaatgaacactggctatggtgcccgtactccggaggtgaaatgcgcaagttggaggcttgctgtggaagcacacaacatctttggctttgagaccattcctgaagag

SEQ ID NO: 199829 - DNA, 263 bp, Glycine max
acggctgcgagaacgacagaaggaggcaaaagttagtagtagtgaagaaaatgaaagtccttgttttctttgttgctatagttctagcagcatggcattgccatggctcagaccatgaccatgaccatggccacacctaccaaattttccctctgagaatgaaaactggccatggtggccactacattccggaggtatcatgccaaagttggaggcttggtgtggaagcacacaacgtcattgactggaaaaccgttcctcaa

SEQ ID NO: 199830 - DNA, 263 bp, Glycine max
tacggctgcgagaagacgacagaagggggaagaagatattagggtttttgagtgcggtgcggcgatcctagcactctcttctgcagctttcgccgacagcttcattcaccatggctgagcaaaccgagaaggcttttttgaaacaaccaaaagtgtttctcagctcgaagaaaactgggaagggaaagagacccggaaagggtgggaaccgcttttggaaatccattgggcttggatttaagactcccagggaagccatcgaa

SEQ ID NO: 199831 - DNA, 246 bp, Glycine max
tacggctgcgagaagacgacagaagggggaactgaattgagtctcaacaacccagttgagtaactaagatggcgcaagtgaggaacaagcaagtgcttctaaaggactatgttaccggttttcccaaagaatccgacatgaatattgtcgaaagtaccataacattgaagcttccacaaggttccaatgatgtcttgctcaaaaatttgtacttgtcttgtgatccgtatatgaggaatctcatga

SEQ ID NO: 199832 - DNA, 261 bp, Glycine max
tgcgagaagacgacagaaggggacaacaacaataacaatggctgcctcactacaagctgcagctaccttcatgcaacccaccaaggttggcatagcctctcgcaacctcaaatctacacaatacatttctaaggcttttggcttggaacctgctgcagctaaactcacttgctcccttcagcctgatctcaaagaatttgctcaaaaatgtgtcgacgctaccaaaattgcaggattcgcccttgccacctctgctctcgt

SEQ ID NO: 199833 - DNA, 266 bp, Glycine max
gctgcgagaagacgacagaagggggcaacgtactttgcaaaaaccctaaaccctctctctttctctctcggcgactctgcactcatcgatggcaacgcaatcgttagacgaagaaacaactaagaaagtcatacgacaggttgagttttatttcggcgatagcaaccttctcaccgatggtttcatgaggaatagtatcactgaaagcgaagatggcatgattagtttggcgctgatttgctcgtttaatcgaatgcgaaacacct

SEQ ID NO: 199834 - DNA, 260 bp, Glycine max
ggaagatgatgctcctgacggcggtgacgacgacgacgacgaagatgatgaagaagaaggtgatgtccagcgtggtggtgagcctgacgatgacgataacgactcagacgacgactcagacgacgacgaagatgaagacgaggaggacgatgaggagcaatgggaagacgaggatttcggaacagagtaccttatccgacctttagaaactgctgacgaggaggaagcatcaagtgattttgaaccagaggagaatggtg

SEQ ID NO: 199835 - DNA, 234 bp, Glycine max
  unsure (1)..(234): unsure at all n locations
gaccactagtgctaaaatcatcaaccaaaaaggtaaacttctgcaacaaccatggttgcaatggcagcagcaacagcatcctcccagttgattttctcaaagcctcgntcancctcgcgtctntggcccttccaactatgtgtctttgacaccaaacaagtgctgtcaagttcaantggnaggngaangcatntggggggntctggagttagntgaatgggggtggnanaaanc

SEQ ID NO: 199836 - DNA, 257 bp, Glycine max
ttgagttgggaaactctagttatcccatggtcttggtccaagtcccaatgtacaacgaaagagaggtttatcaactatcaattggtgcagcttgtggtctttcttggccttcagacagaatcatcatacaagttcttgatgattctactaacccaacaatcaaggagctggtgcaaatggaatgtagtagatgggcgagcaaaggggtgaacataaagtacgaggtgagggacaacagagacgggtacaaagcaggg

SEQ ID NO: 199837 - DNA, 260 bp, Glycine max
tacggctgcgagaagacgacaaagggaactgaggttaagtctgttgagatgcaccatgaggctctcacagaggctcttccaggtgacaatgttggatttaatgtgaagaatgttgcagtcaaggatctcaagcgtggttttgttgcatccaactccaaggacgaccctgccaaggaagctgccaacttcacatcccaagtcattatcatgaaccatcctggccagattggtaatggatacgcaccagtccttgactgcca

SEQ ID NO: 199838 - DNA, 259 bp, Glycine max
cggctcgagacggctgcgagaagacgacagaaggggaggcgcggcgggatcatcacgagattgcaaaatgaagttcaacattgcaaatcccaccactgggtgccagaagaagctggaaatcgatgacgacctgaagcttcgggcattttgggacaagaggatctcccaggaggtccttggtgacgccctgggtgaggagtttaaaggatatgttttcaaaatcactggtgggtgtgacaaacaaggattcccaatgaag

SEQ ID NO: 199839 - DNA, 259 bp, Glycine max
tacggctgggaagacgacagaaggggcaaaagagaaagaagcgcttatcgaactcggacggaagcactgagttgactcggagggagtggaaagtgttgttgcgtaatgtctggtggtatcgctcgtggacgcctcaccgaggagcgcaagtcgtggcggaagaaccatccccatggttttatagagaaccggagacgctgcccgatggaaccgtgaatttgatggtgtggcattgcactattcccgggaagactgggac

SEQ ID NO: 199840 - DNA, 267 bp, Glycine max
tacggctgcgagaagacgacagaagggaatatcatcaacatataatagcaatatcacaaactcaactttagaaggaaatttgaagtaaacacaattatcatagtgacttctatgaaactttatgtgagccataaattcatcaaatctcctattccattgcctgggggattgctttaaaccatacatggatttgtttaattttcaaacataatcctctttacctctgacttcaaatccctcaggttgtttcatcaatatcacctcatc

SEQ ID NO: 199841 - DNA, 262 bp, Glycine max
ggctgcgagaagacgacagaagggggaggtttggtggtgtggtttagtgtcaaaatggcggcgagtagaagcactttacctctgatgaagtacttgagagtgcgcgtggacgctcttccccgcaacactcccttgaccctcacttccaacttgttgattcgccgcttctccgaagaagataggggttgttttctcgacaagtccgaggtcacagatcgcgtcatttcctgcgtcaaaaacttccagaaagtcgatccttcta

SEQ ID NO: 199842 - DNA, 260 bp, Glycine max
acggctgcgagaagacgacagaagggtgcgacattcaccattgattgcgcgaagcggctggaggacaagatcatggacattgcgtctctcgagaagttccttcaagagaggattaaggttggtggcaaggccggtgctctcggcgactccatcaccgtcgtacgtgagaagaccaaaatcattgttacttccgacagcaacttctccaaacggtacctcaagtacttgactaagaagtacctgaagaagcacaatgtgcg

SEQ ID NO: 199843 - DNA, 253 bp, Glycine max
acggctgcgagaagacgacagaagggggatgcacaagtttgttgagatagctagaagcaataagatgaaaatgaaagtgcttgttttgtttgttgctacagttttggtagcatatgaatgccatggctcagactaccagaagttccctctccaaatgaaaactgggtttggtgggcaatacagcaatgaggtggcatgtgccagttggaggcttggcgtggaagcaaacaacgtagtcaagtggcaaactgtt

SEQ ID NO: 199844 - DNA, 257 bp, Glycine max
tctcgagccgaatcggctcgagacggctgcgagaagacgacagaaaggtacggctgcgagaagacgacagaagggacctacaggacagaagcttttgaaaatcaacatcattctcaagtgaggtcctgaacctaccagcagaagctgaaccaaatgaatcatgcaatgcactgtctaccttatcaaaatgaaaaaaaaaagaaaaaaaaaaaaaaaaatggggccgccgaataggttactctcatgcccgggaatta

SEQ ID NO: 199845 - DNA, 255 bp, Glycine max
gctgcgagaagacgacagaagggggcacaagtgagtttgttgatcgagataactagaaacagtgtgatgaaaatgaaggtccttgttttcttcgttgctacaattttggtagcatggcaatgccatgcgtacgatatgttccctctccgaatgaacactggctatggtgcccgtactccggaggtgaaatgcgcaagttggaggcttgctgtggaagcacacaacatctttggctttgagaccattcctgaagag

SEQ ID NO: 199846 - DNA, 256 bp, Glycine max
tacggctgcgagaagacgacagaagggctccacgtaggatataaggctctcaacagtcccacaatgcctgaaacgtgagggcatgacattgatgtgcctgaaactgagttaaatggaatcctgcgtttgtcgaacacttgattggttggtccttgggcttcagtataggccgctgtaactgacacccctggtgcagtgatatcaggctgaatatattggacaaattaagattgttagatatctaacacattacaac

SEQ ID NO: 199847 - DNA, 256 bp, Glycine max
tacggctgcgagaagacgacagaaggggaaactaaagataaacaaaatttagaaacaaaaacatgttggtgaaggtgtacggtccaacctatggagcccccaagagggtgctggtgtgtctgattgagaaggaaattgagtttgaaacagtacatattgatctcttcaagggagagaataaggaacctgagttcctaaagctgcagccatttggatcacttcctgttattcaagatggtgattatactctctatga

SEQ ID NO: 199848 - DNA, 258 bp, Glycine max
tacggctgcgagaagacgacagaagggggatcacaaatctttcgctaacactcattaattgcaagaatggcacttcgttgcttggtgatgtccctttctgttctcttcactcttggtcttgcgagagaaagccatgccagagacgaagatttttggcatgctgtttggccaaacactcccattccaagttcattgcgagatcttctaaagcctggccctgcaagtgttgaaatcgatgatcaccctatgcaaattgaa

SEQ ID NO: 199849 - DNA, 259 bp, Glycine max
agacgacagaagggggaagagaaaagaaaagaatcgagtgattttcgtttgcgttgctgttgcgactgagtgagtgaagatggcgtgcttgcacgaccacagttgcgaagaccatgactgttcctctaactggtctctctacaaacacatcgacctctccaaggtaactgctttgaatgaggcaaatccaggaagtgttaagtcagttttcaaagcttgggaagagcgtctggattcttctggggttcacttggaaagc

SEQ ID NO: 199850 - DNA, 257 bp, Glycine max
tacggctgcgagaagacgcagaagggggcacaagtttgttgagatagctagaagcaataagatgaaaatgaaagtgcttgttttgtttgttgctacagttttggtagcatatgaatgccatggctcagactaccagaagttccctctccaaatgaaaactgggtttggtgggcaatacagcaatgaggtggcatgtgccagttggaggcttggcgtggaagcaaacaacgtagtcaagtggcaaactgttcctgcag

SEQ ID NO: 199851 - DNA, 255 bp, Glycine max
gaagacgacagaagggggaacaagcaaaattaagcacaaaagcccaaccctctctctcgctgttggtctctcctatttggcatacgcagatcgattacgaagtaatttcactgaatcttattgaagatgtttctcacaaggactgagtatgaccgaggagtcaacaccttttctcctgaaggccgtttatttcaggttgaatatgcaatcgaagccatcaagctgggatcaactgcaattgggttgaagacgaaa

SEQ ID NO: 199852 - DNA, 254 bp, Glycine max
tacggctgcgagaagacgacagaaggggatcacaacacaagttgaaacacaaagaagaaaaaatgggttcctctttgtggacttgtctgattttgttatcacttgcttctgcttccttcgccgccaacccaagaacaccaattgatgtgccatttggcagaaactatgtgcctacttgggcctttgatcacatcaaatacctcaatggtggttctgagattcagcttcatcttgataagtacactggtactggc

SEQ ID NO: 199853 - DNA, 260 bp, Glycine max
acggctgcgagaagacgacagaaggggacaccaacgccaaaacaaacccactaagatggcttcctttgtatccttcctagtgctgcttcttgcagcccttatcctcatgcctcaggggcttgctacttactacaaaccaattaagaagccaccagtgtacaagcctccagtgtacaagccaccagtgtacaaaccaccggtttataagccaaaaccaccggtttacaagccgaaaccaccggtttacaagccaccatata

SEQ ID NO: 199854 - DNA, 253 bp, Glycine max
gctgcgagaagacgacagaagggaatgaaggaggaagattttattgagagacttatgtacaggtttgatagcaagagattttgcagagattgtagaagaaatgttattcgagaatacaaggaactaaaagaactgaagcgcattcgcagagaacctcgttgcaccagctggttttgtgttgctgactctgcctttcaatatgaggtatctgatgactcagttcaagctgattggcgtcagacatttgctgatg

SEQ ID NO: 199855 - DNA, 251 bp, Glycine max
ttcgggtgagatcagctcacatacggctgcgagaagacgacagacggggatcacttcatagtaagcactatagaaaaaacgacattcattcatctatggctacccttattgctcccagcaaccactctccccaagaagacgctgaggctctcagaaaggcttttgaaggatgggggactgaagacagaactgtcatagtaatattgggtcatagaattaagtaaaagaggcagcaaatcagtagagtctat

SEQ ID NO: 199856 - DNA, 255 bp, Glycine max
gcaattaatcctggcaacagtggagggcctctcttagatagttctggaaacctcattgggataaatacagcaatatattccccatctggtgcatcctctggtgttggattttctattccagtggacactgtaaatggtattgttgaccagttggtgaagtttgggaaggttacaagacctattttagggattaagtttgcccctgatcagtctgtggagcagttgggagtaagtggagtgcttgtcttagatgct

SEQ ID NO: 199857 - DNA, 264 bp, Glycine max
  unsure (1)..(264): unsure at all n locations
acgctgcgagaagacgacagaagggtcactaatccaacacactactttttgccaaaatctcaaagtgctgcagattacaaggcagcaagtagagctctggacttcttctttggttggtattctgatccggttttctatggtgactatccggagagtatgaaatcttcagtaggttctaggctcccaaaattcacaaaagctgaatctgaaggtctanaaaattccatagattttcttggtgtgaattactacaccacttattat

SEQ ID NO: 199858 - DNA, 259 bp, Glycine max
tacggctgcgagaagacgacagaagggggtggaggtgaaaaagagtggaaatggcaggtgcaggaggagggtatggggacgcgaaccagaggatagactacgtgttcaaggtggtgctgataggggactcggcggtggggaagtcgcagatactagctcggtttgcgaggaacgagttcagcttggactccaagtccaccatcggtgttgaatttcagacaaggaccttggtcatagatcacaagaccgttaaggctca

SEQ ID NO: 199859 - DNA, 248 bp, Glycine max
tacggctgcgagaagacgacagaaggggaatcacaatgatctcaatcacttctactgaattgaactacttagtcttccgttacctccacgaatcaggttttactcattctgcatttgcattcgggtatgaagcagggattgataaaaacaaaaatgatgatagtgtggttccaccgggtgctcttgttactttcatacagaaaggaattcagtatcttgagctggaagcaaacttgagtggtagtgat

SEQ ID NO: 199860 - DNA, 258 bp, Glycine max
acggctgcgagaagacgacagaagggaaagagacccggaaagggtgggaaccgcttttggaaatccattgggcttggatttaagactcccagggaagccatcgaaggaacctacattgacaagaagtgccccttcactggcaatgtttccattcgtggccgtatcctggctggaacatgtcacagtgctaagatgaacaggactattattgttaggaggaattatctccattttatcaagaagtaccagaggtacgag

SEQ ID NO: 199861 - DNA, 234 bp, Glycine max
  unsure (1)..(234): unsure at all n locations
ggcagttgtattgttgaacaagggtttctctgtctgcttcttcactttctctcgtttcaatcgaaaccaaaacaaaaacatgggcagaaaattcttcgtcggtggcaactggaaatgcaatgggaccactgaggaggtaaagaagattgttactactttgaatgaggctaaagtccctggagaagatgtcgtagaagttgttgtgagcccnccttgtgtncctcctgttgnaaa

SEQ ID NO: 199862 - DNA, 242 bp, Glycine max
tacggctgcgagaagacgacagaagggggaggaaaaggaaaggaaagggaagccaaagcgaaaccctaaccctaacggagagatggcggagacttggcatcgatattcgggacggagaaggacagggtgaactgtccgttctacttcaagatcggcgcgtgcaggcacggcgaccggtgctcccggcttcacacgaagcccacaattagcccaacgttggttctgtcgaacatgtaccagag

SEQ ID NO: 199863 - DNA, 252 bp, Glycine max
acggctgcgagaaaacgacagaaggggacctgatgatgtatgctcacaggttggtttatgtttcaaaagggctaaatcagagagcaatggaattgagatggtgaccgaaaagggacaaagagagttatcagctaaagatactgctttgtgcacttcctgtcagatgcttgtggtttggattcagaatcaactaaaacaaaagaagaccaaggagatagtattcaactatgtaaatcagctgtgcgagagctt

SEQ ID NO: 199864 - DNA, 223 bp, Glycine max
  unsure (1)..(223): unsure at all n locations
ggcacattgaaatctgaaccttccggatttcgttttgctttgttcaggtagccagccagtcatggtgctcttcaatgtttcacgcgtagagaccactcccttcgatggccngaagcctggaacctctngtctccgcaagaaggtgaaagtgttcgtgcaacctcattacctccataactttgttcagtcnncnnntcaatgcattaactgtggaaaaagttag

SEQ ID NO: 199865 - DNA, 257 bp, Glycine max
tacacgacagaaggggaaggatcagcagggagaattaggtttttagggtttacaccgagcagccacacctcccgcagcagccatggttctcaaaactgaactatgccgattcagtggtgccaagatctacccaggaaagggcatcagatttgttcgtggtgattctcaggttttcctgtttgcaaactcaaaatgtaagaggtatttccacaatcgcctgaagccttcaaagctcacctggactgcaatgtacagaa

SEQ ID NO: 199866 - DNA, 255 bp, Glycine max
acggctgcgagaagacgacagaaggggaaaaaaacgggcacttcacagcgtatttgaatggaacatgctacttcagcatagagtcgtatgagctaaagtacaagtccaccatcaagggagtgatctccaagggcaagttgtcgaagctgaaaggtgttagtgtgaagattgaagtgttgtggctcaaaatcgtggagctaactcgcgacggcgatgacctccaattctcggtgggtgttgcctctgctggcttca

SEQ ID NO: 199867 - DNA, 248 bp, Glycine max
acggctgcgagaagacgacagaaggggacactcattccatttttacctttctctctcgctcgcaaacgcaaataataaaaaacaaggttttagccatggcatcgaagcggatcttgaaggaactcaaggatctccaaaaggatcctcctacctcatgcagcgccggtcttgttgctgaagacatgtttcactggcaagcaacaattatgggtcctccagacagtccttatgctgggggtgttttccta

SEQ ID NO: 199868 - DNA, 249 bp, Glycine max
cggaagacgacagaaggggactgaaggtcgtaagcatgaattgttggttactaatgcagttgcaacaaagggaggagccagttctgcggcttctacctcaaaatctggatctgggcatgaacttctcctttttgaggccctacgtgaaggtttggaggaagaaatggagaggggtccttgtgtatgtgtcatgggtgaagatgtaggtcattatggaggatcttataaggtgactaaaggccttgcccc

SEQ ID NO: 199869 - DNA, 248 bp, Glycine max
tacggctgcgagaagacgacagaaggggagtgcacaagtgagtttgttgatcgagataactagaaacagtgtgatgaaaatgaaggtccttgttttcttcgttgctacaattttggtagcatggcaatgccatgcgtacgatatgttccctctccgaatgaacactggctatggtgcccgtactccggaggtgaaatgcgcaagttggaggcttgctgtggaagcacacaacatcttggttattgaga

SEQ ID NO: 199870 - DNA, 246 bp, Glycine max
tacggctgcgagaagacgacagaagggggcacaagtgagtttgttgatcgagataactagaaacagtgtgatgaaaatgaaggtccttgttttcttcgttgctacaattttggtagcatggcaatgccatgcgtacgatatgttccctctccgaatgaacactggctatggtgcccgtactccggaggtgaaatgcgcaagttggaggcttgctgtggaagcacacaacatctttggctttgagac

SEQ ID NO: 199871 - DNA, 258 bp, Glycine max
tacggctgcgagaagacgacagaagggggcacaagtttgttgagatagctagaagcaataagatgaaaatgaaagtgcttgttttgtttgttgctacagttttggtagcatatgaatgccatggctcagactaccagaagttccctctccgaatgaaaactgggtttggtgggcaatacagcaatgaggtggcatgtgccagttggaggcttggcgtggaagcaaacaacgtagtcaagtggcaaactgttcctgcag

SEQ ID NO: 199872 - DNA, 249 bp, Glycine max
acggctgcgagaaaacgacagaaggggcacaagtttgttgagatagctagaagcaataagatgaaaatgaaagtgcttgttttgtttgttgctacagttttggtagcatatgaatgccatggctcagactaccagaagttccctctccaaatgaaaactgggtttggtgggcaatacagcaatgaggtggcatgtgccagttggaggcttggcgtggaagcaaacaacgtagtcaagtggcaaactgtt

SEQ ID NO: 199873 - DNA, 247 bp, Glycine max
cgagaagacgacagaaggggaacgcagccaaagaaaagaaaatcctcaattttctgagcagccaaacactccctctctgtctctcgaaaattctcagtttgcagagaaaatctgaatcatgtcgtggcaagcgtatgtcgacgatcaccttctgtgtgacatcgaaggtaaccacctcactcacgctgctatcatcggccaagacggcagcgtttgggctcagagtaccgacttccctcagttcaaa

SEQ ID NO: 199874 - DNA, 253 bp, Glycine max
gcgagaagacgacagaaggggtccctctccttttcctgatggatcatttgacaaaccagttaatttctcccccccaaagctagtgattcttcatatgaatatggcactacatgtgtatgaagatatcatgaggatgactgaaaacctgagtgagaagtatataattggatatggagcatcaagtacagtttataaatgtgttcttaagaattgcaagccggtggctatcaagaggatctattctcactatccc

SEQ ID NO: 199875 - DNA, 247 bp, Glycine max
tacggctgcgagaagacgacagaagggggggcgaggtagccagagagtgatacaatacagagtgcgttgttgctccttcgccacaactccctgccaacatgggtatctccagagattctatgcacaagaggcgtgccactggtggcaagaagaaggcatggaggaagaagagaaagtatgagcttggtcgccagcctgctaacactaagctgtcaagcaacaagacagtcaggaggatccgggttag

SEQ ID NO: 199876 - DNA, 248 bp, Glycine max
tacggctgcgagaagacgacagaagggggcacaagtgagtttgttgatcgagataactagaaacagtgtgatgaaaatgaaggtccttgttttcttcgttgctacaattttggtagcatggcaatgccatgcgtacgatatgttccctctccgaatgaacactggctatggtgcccgtactccggaggtgaaatgcgcaagttggaggcttgctgtggaagcacacaacatctttggctttgagacca

SEQ ID NO: 199877 - DNA, 246 bp, Glycine max
tacggctgcgagaagacgacagaagggggaagaagatattagggtttttgagtgcggtgcggcgatcctagcactctcttctgcagctttcgccgacagcttcattcaccatggctgagcaaaccgagaaggcttttttgaaacaaccaaaagtgtttctcagctcgaagaaaactgggaagggaaagagacccggaaagggtgggaaccgcttttggaaatccattgggcttggatttaagactc

SEQ ID NO: 199878 - DNA, 244 bp, Glycine max
tacggctgcgagaagacgacagaaggggtggcaaaagatgcaaactcgtgaagagttgattgaagcctcggctaccctcgtatggatcgcttcagcccttcatgcagctgttaactttggacagtatccatatggaggtttaatcctaaacaggccaaccattagcaggagattcatgcctgagaaagggtctgctgagtatgcagctttggctaagaaccctgagaaggagtttttgaagact

SEQ ID NO: 199879 - DNA, 254 bp, Glycine max
cggctgcgagaagacgacaaaagggcatggtatcaactgttttgttaacagacagttgatttacaattttccagaggagctctttgctgatgcgggaatattggctattgaacatgctgattttgatggtattgagcgtctggctttggtaactggtggtgaaattgcatcaacctttgacaatcctgagtctgttaagcttgggcattgtgaccttattgaggagattatgattggcgaggataaactgattc

SEQ ID NO: 199880 - DNA, 295 bp, Glycine max
cggctgcgagaagacgacagatagggacccatttcctcactctttcactcttcttgtatgatggagaagatccagcacagtgaggtggaagtgaagggactgaagcttcacgtggcagagattggaagtggctccaaaacagtggtattcttgcatggattcccagagatctggtacacatggaggcaccaaatgatttctgtggcaaacgctggttatagggctattgcctttgatttcagaggctatggactttctcagcatacagcagagcctgaaaaggaaaccatgtttg

SEQ ID NO: 199881 - DNA, 281 bp, Glycine max
cgagaagacgacagaaggggactgcaaatcacttttctactttgagtcttcttgatccttctttttctccttgaactcaaacatggcagatgaggtggttctgctagatttctggccaagtccatttgggataagggtcaggattgcacttgctgaaaagggtatcaaatatgagtacaaagaagaggacttgaggaacaagagtcctcttctcctccaattcctaccggttcacaagaagattccggttctcatccacaatggcaaacccatttgtgaat

SEQ ID NO: 199882 - DNA, 284 bp, Glycine max
tacggctggagaagacgacagaagggacaacgaatgcagtgtcttgccgctttcacaagtttggtgatgactaaaagaatctggtcttccaaggtgatgccacgtcttcttccaggggcatagaactcacaaagttagacggtggaggaaaaccagtgggtggcagtgtggggagagtgttatactcttctccagtgcacctttgggaaagctctacagtggtcgcaagctttgaaaccgacttcaccttttccatctcatcagactctactactccaggtgat

SEQ ID NO: 199883 - DNA, 257 bp, Glycine max
gacacaccgtttgttctattcttaactcaacttctgctacccactctcttcttccaagtccaaccacgcttttctctacagtcatgggcaaggtcaagatcggaatcaacggatttggaagaattggccgtttggttgccagagtcgctctgcaaagagacgatgtggagctcgttgccgttaacgaccctttcattaccaccgattacatgacatacatgtttaaatacgacagtgttcaggacactggaagcatc

SEQ ID NO: 199884 - DNA, 278 bp, Glycine max
gctgcgagaagacgacagaagggggtgtctcactcacatcacacacactctcatagctgtagcggcgacactaagatcggagaaagaatggcgaaaacgacgtcgttgctgctctttacactgctcctcttcggaaccctagctctcatccaggcgaagaaatcgaaggaggatttgaaggatgtgacccacaaggtttactttgatgttgagattaatggaaaagaagcaggtcgtattgtaatgggtctttatgggaaggctgttccaaaaactgc

SEQ ID NO: 199885 - DNA, 283 bp, Glycine max
tctcgagccgaatcggctcgagtacggctgcgagaagacgacagaaggggacgatgagtcgatttgataactaagatattgatattcgtgatattgatccaatttgatatcatcgaaatccaatttataccattgttgaattaattatcgatgaaagatttatcatctctatgggattaaatcccgaattttttattggaaatttaagagaagtaaaacataataaagattatggaagtaaatattcttgcatttattgctactgcactgtttattctagttc

SEQ ID NO: 199886 - DNA, 281 bp, Glycine max
cggctgcgagaagacgacagaagggctatgctggttgggcagataagatccatggtctaacagttccagctgatggaccatatcatgtgcaaacattatatgaaccaattggtgttgccggtcagatcattccttggaacttccctcttctcatgtttgcctggaaggttggaccggcattggcctgtagcaacaccattgttctcaaaacagctgagcagacaccgttatatgctttatatgcagcaaaactatttcatgaagctggacttcctgctggt

SEQ ID NO: 199887 - DNA, 276 bp, Glycine max
tgagagacgacagaagggggagagtcagattcgcacgcattgcttcgcctcacaacagcagctgcagcagcaatggctcccaaacgaggtggaaaggctccggctcttgccgctaagaagaagcctgagaaggtcacgaatccgttgttcgagaagcgtccgaagcagttcggaatcggaggggcgttgcctccgaagagagacttgactaggttcgtgaagtggccaaagcatgttcaaattcagaggaagaagaggattctgaagcagatgttg

SEQ ID NO: 199888 - DNA, 276 bp, Glycine max
gctgcgagaagacgacagaaggggggtgataaagttggagttggtgtgatagtggagtcttgcaaggaatgtgaaaattgccaacaggatctggagaattactgtccccgccctgtgtttacctataactctccttattatgatgggacacgaacccaaggtggttattctaacattgtggtcgtgcaccagcgttatgtgctccggtttcctgagaacttgccccttgatgctggtgctcctctgctgtgtgctgggataactgtgtatagccca

SEQ ID NO: 199889 - DNA, 270 bp, Glycine max
tacggctgcgagaagacgacagaaggggggtcctgctgatagtccttatgctggaggtgtattcctagtcactattcacttccctccggattatcctttcaagcctcctaaggttgcctttaggactaaggtgtttcacccgaacatcaataacacaggtagcatttgtcctgatatcctgaaggagcagtggagccctgcactcaccatctctaaggtactgctttctatctgctcattgctgactgatccaaatcctgatgatccact

SEQ ID NO: 199890 - DNA, 276 bp, Glycine max
tacggctgcgagaagacgacagaaggggattgagagagagagagaaatggagaagacaggagtgttatcggcgaaggaggcattcgagaagcttgaaaaggtgggagaagggacatatgggaaggtgtacagagcaagagagaaggcaactggggagatcgtggctctgaagaagactcgtctccacgaggacgaagaaggtgtccctcccaccactctccgtgaggtttccattctgcgaatgctctctagcgatccccatgtcgttaggttaat

SEQ ID NO: 199891 - DNA, 283 bp, Glycine max
tacggctgcgagaagacgacagaagggggaggcaagaagttgtattttggcatccccgtggcttcaagaagagaatctcaatggaggcccaggagctgaagcgcgtgttccagatgttcgaccgcaacggcgacgggagaataacgaagaaggagctgaacaactcgctggagaacctgggcatcttcatctctgacaaggacctgagccaaatgatccagaggatcgacgtcaacggcgacggttgcgtggacatggacgagtttggggagctgtatcagac

SEQ ID NO: 199892 - DNA, 256 bp, Glycine max
  unsure (1)..(256): unsure at all n locations
gaacctgatcgatctctttaccagttgccacactacaccgagatagncccctaaacccgtttgcgttgttgtttgcgaagaaatggcgactaagaggagcgtgggaacgttgaaggagggtgatttgaaagggaagagggtgttcgtgagggtcgatctgaacgtgcctttggatgacaaccttaacatcaccgatgacatagagtccgtgctgctgttcccaccatcaagtacttaactggtcatggagccaaag

SEQ ID NO: 199893 - DNA, 275 bp, Glycine max
tactcgagccgaatcggctcgagtacggctgcgagaagacgacagaagggggagctgaaaccgagaagaagaagatggagatgtatcagatctggagcaggagaatagcgttgggagcgttcgcgtttgttctgcttttcctatcggcctcagcagacgacgtcgttgtgctctctgaagataacttcgagaaggaagttggtcaggacagaggagctctcgttgagttctatgctccttggtgtggacatgcaaatagctgctcagaatatgaa

SEQ ID NO: 199894 - DNA, 274 bp, Glycine max
cggctgcgagaagacgacagaaggggaacgagggaggggagaagagaaagaaggaaggagacatttataaaaagctctttcccttcccctaaatccctcacactcattccatttttacctttctctctcgctcgcaaacgcaaataataaaaaacaaggttttagccatggcatcgaagcggatcttgaaggaactcaaggatctccaaaaggatcctcctacctcatgcagcgccggtcctgttgctgaagacatgtttcactggcaagcaac

SEQ ID NO: 199895 - DNA, 272 bp, Glycine max
cggctgcgagaagacgacagaaggggaaggattcatgtgctcaagtcatctgtcaatcactcaaagaaattcaagattgatccattctactagcaagattgttccaaattctgaaattcagaatataactactgagatggtgaagacaccagaggtctcaagatggatggatcaagtcatccctacaatagccccttgtgatgcagcagaaccatggcaactagggtttcaagatgcagcaacactataatgcaggaataatcgacttacat

SEQ ID NO: 199896 - DNA, 280 bp, Glycine max
cgagaagacgacagaaggggacttccgttcacttttgaacccaaagagcggatagctgagatcggagaaccctctctttcttctccttcttcagcagttgaaaataaaaaatggcagatggtgaggatattcaaccactcgtctgcgataatgggacaggaatggtgaaagctggatttgctggggatgatgctccgagggctgtgtttcccagcattgttggtcgtccccgtcacacgggagtgatggttggcatgggccaaaaagatgcatatgttgg

SEQ ID NO: 199897 - DNA, 254 bp, Glycine max
  unsure (1)..(254): unsure at all n locations
ggcagttgtattgttgaacaagggtttctctgtctgcttcttcactttctctcgtttcaatcgaaaccaaaacaaaaacatgggcagaaaattcttcgtcggtggcaactggaaatgcaatgggaccactgaggaggtaaagaagattgttactactttgaatgaggctaaagtccctggagaagatgtcgtagaagttgttgtgagccctccttntgtgttcntcctgttgtaaaaagtttgctgcgccctga

SEQ ID NO: 199898 - DNA, 275 bp, Glycine max
tctcgagccgaatcggctcgagacggctgcgagaagacgacagaagacgggatgcacaagtttactgagatagctagaagcaaacagatgaaaatgaaagtgcttgttttgtttgttgctacagttttggtagcatatgaatgccatggctcagactaccagaagttccctctccaaatgaaaactgggtttggtgggcaatacagcaatgaggtggcatgtgccagttggcagcttggcgtggcagcaacaacgtagtcaagtggcaaactgtt

SEQ ID NO: 199899 - DNA, 274 bp, Glycine max
tacggctgcgagaagacgacagaagggggtgagggagaattatcaaaggtgaaacgaagaagccctaactacgcacgcattcgtgagataactcaatattcgtcgctcatggcactctcttctcgtctcttttccaaatccaaattgatctatggcagtcaaatgcttctacaaaaggagcaaacaattccagttcgtcactttgctaaagagtctgcccctcctgcccttaagggagacgagatgctgaagaacatttttgtggaggtgaaga

SEQ ID NO: 199900 - DNA, 272 bp, Glycine max
cacggctgcgaagacgacagaagggggctctgaccgggataagataaaccagctttcttcaagcacctagatttcctctctctctaaatggcgttctcttcttttctcggcagagtcctcttcgcctccgttttcatcctctccgcttaccaagaatttaattcttatggagttgatgggggaccccagcaaaagcactcagaccgtagtctgatgcctttgcacatcaagtacattctaaagttggctttcaacttccagatattgatatg

SEQ ID NO: 199901 - DNA, 282 bp, Glycine max
tacggctgcgagaagacgacagaaggggatcacaacatcatagtaagcactatagtaaaaaaaggacattcattcatctatggctacccttattgctcccagcaaccactctccccaagaagatgctgaagctctcagaaaggcttttgaaagatgggaactgatgagaacactgtcatagtaattttgggtcatagaactgtgtatcagaggcagcaaatcagaagagtttatgaggaaattaattaagaggatcttgtgaagcgcctagagtctgagatc

SEQ ID NO: 199902 - DNA, 275 bp, Glycine max
agacgacagaaggggacaacatatccattttatttacaacaacaatggcttctgtgcctcaaccaaaaatctcccttctaaccttattcttcttctcgtccttcaccatcattgcgcatgcaattgttcctcaaaacgaaaccttcaaatttgagaactcaggtgaacttggaccctacattgttgagtacggtgcagattacagaatgataagcatcttcaactctccattccaagttggtttctacaacaccaccccaaatgccttcactcta

SEQ ID NO: 199903 - DNA, 271 bp, Glycine max
tctcgagccgaatcggctcgagcggctcgagttgcgagaagacgacacaagggggcacaagtgagtttgttgatcgagataaatagaaacagagtgatgaaaatgaaggtccttgttttcttcgttgctacaattttggtagcatggcaatgccatgcgtacgatatgttccctctccgaatgaacactggctatggtgcccgtactccggaggtgaaatgcgcaagttggaggcttgctgtggaagcacacaacatctttggctttgaga

SEQ ID NO: 199904 - DNA, 265 bp, Glycine max
cgtcaagtcaataccagtgtgtgcatgtgcacttttcacctctactggccttgatgatgcaggccaaatgcctggggcaggagaagaggtgtagttttgattaggcggaggaacactgcctggagaagctaacttatcactactctgaggctctgaactggtatcttttgtagtagtagtggtcacttgtttagtctttggcttggagccccctatacgaactgcatgctaccactgcactgggcttgaagcaacaacctagtaa

SEQ ID NO: 199905 - DNA, 268 bp, Glycine max
acggctgcgagaagagacagaaggggcagtggctggtgatctcatgtcaaaaccaacatggtatgctgctagcagaatccacgacgcattaatacgaatggacaatgaatatttgagatcggctcttgactatctagagctgcagcctgatctaaaatcccttgttcgtggagcacaaattttagatgtccaatcttggtatcactagctgggcaaggcttccaatccatgatgctgactttggttggggaagacccttttcatggga

SEQ ID NO: 199906 - DNA, 274 bp, Glycine max
gcagtccttactaatggacctttcttattgaatcttgattgtgatcactacataaacaacagtaaagccttgagggaagctatgtgctttatgatggatcccaaccttgggaaaaatgtttgctatgtccagtttccacagaggtttgatggtattgataggaatgatcgatatgccaatcgcaatactgttttctttgatataaacttgagaggtttggatggcattcaaggtcctgtttatgtgggtactggatgtgcctttaatagaacag

SEQ ID NO: 199907 - DNA, 293 bp, Glycine max
gacgacagaaggggagggcacaacacaacacaaaagtcacaatcacaaatctgagtatagtggagtagggtttttttgcgtttgagagaagcatgagcaggagtttgggaattccggtgaagctgctccacgaggcttcggggcacgtggtgacggtggagctcaagagcggagaactctacagaggcagcatgatcgagtgcgaggacaactggaactgccaactcgagagcatcacctacactgccaaggatggcaaaacatcgcaacttgagcatgtttttattcgagga

SEQ ID NO: 199908 - DNA, 276 bp, Glycine max
tacggctgctagaagacgacagaagggggagaggccaaaatatccattgcacctttctctttctccgatggctaatccctcactcttgttcttcagtctcctcctattatccgccaccgtagccgccgccgaacggatcgacgatgaagacgaccttctgatccgtcaagtggtgccggatgcggaggaccaccacctgctcaacgcggagcaccacttctccgccttcaagacaaagttcggcaagacctacgccacgcaagaggagcacgacca

SEQ ID NO: 199909 - DNA, 274 bp, Glycine max
  unsure (1)..(274): unsure at all n locations
tgcgagaagacgacagaaggggaataaaaaaatgatatgattcaacctcaaactcatttgaatgtagctgataatagcggagcacgcgaactgatgtgtatccgaatcctaggagctagtaatcgacgatatgcttatattggtgacattgttgttgctgtaatcaaacaagcagtaccaaatacgaacttagaaagatcagaagtgatcagagctgtaattgtacgtacttgtanagaactcaaacgtagcaacggtataataattcagtatg

SEQ ID NO: 199910 - DNA, 213 bp, Glycine max
agagaagacgacagaagggggcagagagaagagggtcagagtgagcaagagagagcgagagagagagactgagagaaattcgcaaacgcgaatttcggaaagatcggcgatggctgcctccaaggatcgcgagaacttcgtgtacatcgacaagctcgccgaacaggccgagcgatacgagcgatggtggaatccatggagaacggtgcgaat

SEQ ID NO: 199911 - DNA, 243 bp, Glycine max
gagaagacgacagaaggggctgcaaaaaagctgacgttgaaaaatgtcacagactatatcgtagatgttgtttgtaaaagagctgaaattaattacaattatggtgttattcttatccccgaaggtctaattgatttcatacctgaggtccagcatctcattgcagaactaaatgaaattcttgcccatgataccgtggatgagggtgggttatggaagaagaaactcactgatcaatcgttg

SEQ ID NO: 199912 - DNA, 245 bp, Glycine max
tacggctgcgagaagacgacagaaggggactgaactaataaaaaatccaagcattatgaagaaagtgcaagaagaaattagaggcttaagtggtaagaaagatttcttggatgaagatgatattcaaaagttttcctacttaagggcagtgataaaagagacacttagattgcacttaccagcaccactacttataccaggagaaacaaataaaaaatgcatgttagatggctacgaaattccag

SEQ ID NO: 199913 - DNA, 271 bp, Glycine max
gcgagaagacgacagaagggcactggtggttttgaagctggtatttccaaggatggacagactcgtgaacatgctctgctttcattcacccttggtgtgaaacagatgatttgctgctgtaacaaaatggatgctactacacccaagtattccaaggccaggtatgatgaaattgtgaaggaagtctcttcctacttgaagaaagtaggatacaaccctgacaagattccttttgttcctatctctggttttgagggagacaacatgattg

SEQ ID NO: 199914 - DNA, 266 bp, Glycine max
acggctgcgagaagagacagaagggggagctggtgttcaaggaggacgggcaggagtacgcgcaggtgctccggatgctggggaacgggcggtgcgaggcgatgtgcatcgacgggacgaagaggctctgccacatccgcgggaagatgcacaagaaggtgtggatcgccgccggagacatcatcctggttggactcagggactaccaggacgacaaggctgacgtcatcctcaagtacatgcccgacgaggccaggctcctcaag

SEQ ID NO: 199915 - DNA, 266 bp, Glycine max
tacggctgcgagaagacgacagaagggaccgttgcaaaccataacccacttgggaggcttgataactggaggttgagctgggactggatgaatgatgagtttatatattcaatgaaaggggcttatccttcggttgtggatgcttctgattgtctctttggtaagcaaggaactttctatagggatcttgactttgcccttgtgttgaattgtgagagaaggccaaccataattgatctccctcccaccaagttcaatgattccga

SEQ ID NO: 199916 - DNA, 272 bp, Glycine max
tacggctgcgagaagacgacagaaggggggtttcaatcaaaacaaaaactcacactttggtggccacagcaacaataacaatggcagcctcactacaagctgcagctaccttcatgcaacccaccaaggtgggcatggccactcgcgacctcaaatctacacaatgcatttctaaggcttttggcttggaacccgctgcagctaaactcatttgctcccttaagcccgatctcaaagattttgctcaaaaatgtgtcgacgccaccaaaatt

SEQ ID NO: 199917 - DNA, 271 bp, Glycine max
tacggctgcgagaagacgacagaaggggggagaagaattaagcactcggttgcagaacagaacaaacttctttcactctttcgcttctgaatcttcaacaatggtgctcgaggcgacgatgatctgtatcgacaattctgaatggatgcgtaacggagattactctccttctcgacttcaagctcaagcagacgctgtcaatctcatatgcggtgctaaaacgcagtctaatccggaaaatacagtgggagttctcacaatggctgggaaa

SEQ ID NO: 199918 - DNA, 263 bp, Glycine max
cgagaagacgacagaagggcatagaggagattgctgagttgtttattgttggaaaacctgacatgacgatagtggcttttggatctgctgttctggatatattcgaagtcaatgatgttatgtcatccaaagggtggcatttgaatgcattacagagacccaacagcatccatatctgtgtgaccctgcaacatgtgccaattgttgaagactttctcaatgatttgaaggaatctgtgaaaactgtgaaagcaattccaggt

SEQ ID NO: 199919 - DNA, 275 bp, Glycine max
tctcgagccgattcggctcgagtacgcgaaaagacgacagaagggattagcgcagagaaagaactagaactagggtttcatctttgccatcagtaaacgacaatgatttacgacgttaactctcctcttttccgatccttcctcagccagaagggaggctcctctgataagaggaaatcggacgaacagaagccaaaagagcagaaacccaaagccagcgagaacaaacctataatgactgaatgattacagctgagctgcattcagttgtagaa

SEQ ID NO: 199920 - DNA, 274 bp, Glycine max
tacggctgcgagaagacgacagaaggggggaccaatcgctatcgtaatggtattggtacgatgcgcttcgcctcttcaatgttgcgactgaggccgtgagagggttttgccaactcaagttgagattctacaaacatgatgcactctgtaaagggtggctgggggcagacgtttgcgcttgctaaacacaatgaatccgaagggagaaagactcggattcgccgctcaaagcaggaaaggaaggcaatggttgaatcctttataaagaagtacc

SEQ ID NO: 199921 - DNA, 264 bp, Glycine max
tgcgagacgacagaagggtaaccctagaggtcgaaagctctgacaccattgacaacgtcaaggccaagatccaggacaaggagggaatccccccagaccagcaacgtctcatcttcgccggaaagcaacttgaggacgggcgcaccctcgccgactacaacatccagaaggaatcaacccttcacctcgtcctccgtctccgtggtggcatgcagatcttcgttaagaccctcaccggcaagactataaccctagaagtcgaga

SEQ ID NO: 199922 - DNA, 264 bp, Glycine max
gacgacagaagggttggtaggaagggatggaaaaggatttagctgaatttgtacataaatgtctagtatgtcaacaaattaaagcaaagcatcaaaatcccccaggcttatttcaatgaattgatatacctgaatggaaatgggagaggattactatggattttgtgacgaggttacgtaaaacctcaaagggttatgactcggtttgggtgattgtagatcgattgactaagttagcacacttttttcctgtgaaaactacct

SEQ ID NO: 199923 - DNA, 265 bp, Glycine max
acggctgcgagaagacgacagaaggggataccaaaaacaaaacacaagccaagtgaaagtgagaaaaaataaaaatcaaagagcataatgtcagggatcattcacaagattggggagacccttcaatagggagggcacaagaaggaggaggagcataagggtgagcaccatgctggagaatacaaaggggagcaccatggtgaacacagtagtgagtacaaaggagagcatcatggtgaacacaaagctggagagtaccatggtg

SEQ ID NO: 199924 - DNA, 265 bp, Glycine max
tacggctgcgagaagacgacagaagggggaacaaaacaagtgtttcgaatagattatcctaagtctttgggaatagtgctgcaatggcttcaagtcaggaggaggtgacccttttgggagctactggaagcccatttgtgtgcagggttcatattgccctcaagttgaagggagttcaatacaaatatgtcgaagaaaatttgaggaacaagagtgaactgctataaaaatccaacccagttcacaagaaggttccagtgtttat

SEQ ID NO: 199925 - DNA, 266 bp, Glycine max
tacggctgcgagaagacgacagaagggggtgtgagtgaagaagcagagggagtagcggcattaaaaatgcagatcttcgtgaaaactctgacagggaagactataaccctcgaggtcgagagcagcgacaccatcgacaatgtcaaggccaagattcaagacaaggaaggcattcctccggatcagcagcgtttgattttcgccggaaagcagcttgaagatggaaggaccctggccgattacaacatccagaaggaatcaaccct

SEQ ID NO: 199926 - DNA, 268 bp, Glycine max
tacggctgcgagaagacgacagaaggggggggttacgctttgcgagtgagaattgataaacaaatcgttagggttttttggttgtgcgagtgagagtgagagagaacaatggaagacataacagagggagtgaacaacatcaacatccctgattcgtataagaaaaatcgcattcaggtctctaacaccaagaagcccctcttcttctacgttaatctggccaagagatatatgcaacagcgtgatgaggtcgagctctcagctctag

SEQ ID NO: 199927 - DNA, 268 bp, Glycine max
cgagaagacgacagaagggggaagcccaaaatattttcatagcattttcagaggaaaatggcgggtacggtttcgacttgtttcttcttcgtgtttcttctttctctccttcttccttttcagatctccgctgaggaatcctcggagaaggagttcgtactcacattggatcactctaacttgcacgacactgtcagcaagcacgatttcatcgtcgtcgagttctacgccccatggtgtggtcactgtaagaagcttgctccggagt

SEQ ID NO: 199928 - DNA, 272 bp, Glycine max
tacggctgcgagaaacgacagaagggggcagccaagaaaagaaaatcctcacccattttcttcgtagccaaacactctgaaattctcagttatgtcgtggcaagcgtatgtggatgatcacctactgtgtgaaatcgaaggtaaccacctcactcacgccgctatcatcggccaagacggaagcgtttgggctcagagcaccaacttccctcagttcaaacctgaggaaataactgccatcaataatgactttaatgagcctggatcacttg

SEQ ID NO: 199929 - DNA, 224 bp, Glycine max
gctgcgagaagacgacagaaggggggtgataaagttggagttggtgtgatagtggagtcttgcaaggaatgtgaaaattgccaacaggatctggagaattactgtccccgccctgtgtttacctataactctccttattatgatgggacactaacccaaggtggttattctaacattgtggtcgtgcaccagcgttatgtgctccggtttcctgagaacttgcc

SEQ ID NO: 199930 - DNA, 265 bp, Glycine max
ctcgagccgcagggtcaggatcggttaaatcgtctgcgggtacataaactgcttgaatagaacgttatggacccctctttggtagaagtgattctttcttgtaaagaacccatttcagtactaagagtgggttgataacccacagcagaaggcattcgacccaataaggcagatacttcagatcctgcttggacgaagcgaaagatattgtcgataaatagaagtacatcttgttcattgacatctcgaaaatgttccgccatag

SEQ ID NO: 199931 - DNA, 208 bp, Glycine max
agaacaggcctcgaagattcgagatgcttctcaagaagcgtacgagctgtactccgagaaggcgattgcggtgttgaaggacgccacggaggagctgagagtggccgccaaggaaatcggcgacgaaggcaaacagtatctcaccgtagttgccgagaattcaccggaggtcaacgaactcgttgaatcattcacctcaccaattcgt

SEQ ID NO: 199932 - DNA, 260 bp, Glycine max
acggctgcgagaagacgacagaagggagaatctatataaatataaaaataatatatataaggtacaaatagtaaatcgaggtacccattttatgataaactttccttccatttttgttcctctagtaggcctagtatttccggcaattgcaatggcttctttatttctttatgttcaaaaaaacaagattttttagatacagaaaacaaagtaaaattctggggttttttattccccaattataatactaaattcaaaaa

SEQ ID NO: 199933 - DNA, 265 bp, Glycine max
cggctgcgagaagacgacagaaggggaacgagggaggggagaagagaaagaaggaaggagacatttataaaaagctctttcccttcccctaaatccctcacactcattccatttttacctttctctctcgctcgcaaacgcaaataataaaaaacaaggttttagccatggcatcgaagcggatcttgaaggaactcaaggatctccaaaaggatcctcctacctcatgcagcgccgattcaattgctgaagacatgtttcactg

SEQ ID NO: 199934 - DNA, 263 bp, Glycine max
aagacgacagaagggggggaacatcatcacattacattagattggtggtaatggcagcgtcactacaagcagcagctactttcatgcaacccaccaagttgagcaggagcaacactttgcagcaaaagtctactcagtccatttccaaggcttttggtttggaacctgttggagctaaaaaggtcacatgctcccttcaggctgatcttaaggacttggctcacaagtgtgttgatgctaccaaaattgcaggattcgccctt

SEQ ID NO: 199935 - DNA, 266 bp, Glycine max
acggctgcgagaagacgacagaagggcggactgcctacaaagcacccataggaatgtctccttatcgggttgtctttggaaaggcatgtcatcttccagtggaaattgagcacaaagcatactgggcagtgaagacttgcaacttctctatggatcaagctggcgaggaaaggaagttgcaactgagtgagttagatgaaatccgcctagaagcctacgagaatgccaagttctacaaagaaaagaccaagaagttccatgatagc

SEQ ID NO: 199936 - DNA, 268 bp, Glycine max
tacggctgcgaaagacgacagaagggggcacaagtgagtttgttgatcgagataactagaaacagtgtgatgaaaatgaaggtccttgttttcttcgttgctacaattttggtagcatggcaatgccatgcgtacgatatgttccctctccgaatgaacactggctatggtgcccgtactccggaggtgaaatgcgcaagttggaggcttgctgtggaagcacacaacatctttggctttgagaccattcctgaagagtgcgttgaag

SEQ ID NO: 199937 - DNA, 272 bp, Glycine max
tacggctgcgagaagacgacagaaggggtaatcaaccttggtgaccaacttgaggtcataaccaatggcaagtacaagagtgtgatgcaccgagtgattgctcaaaccgatggtaccagaatgtccatagcttctttctacaaccctggtgatgatgctgtcatttctcctgcaccagccttggtgaaggaattagatgagacaagccaagtgtacccaaaatttgtgtttgatgattacatgaagctctatgctggtctcaagtttcaggc

SEQ ID NO: 199938 - DNA, 272 bp, Glycine max
tacggctgcgagaagacgacagaagggggcatcaattcaaaatatatcatcaattataagcatgggtttgtggaacacaacgaatgcagtgtcttgccgctttcacaagtttggtgatgaccaaaagaatctggtcttccaaggtgatgccacgtcttcttccaggggcatagaactcacaaagttagacggtggaggaaaaccagtgggtggcagtgtggggagagtgttatactcttctccagtgcacctttgggaaagctctacagtgg

SEQ ID NO: 199939 - DNA, 259 bp, Glycine max
tacggctgcgagaagacgacagaaggggattcccaaaatttctcattctccctttcctctccgaaccctcgatcactctcacgcgctcctatattcgctcctccaccgtcgctctctcgaacaaccacaacaccatcttcatcacatggcaaacgcagcatctggtatggcagtccatgatgactgcaagttgaggtttttggagctgaaggcaaaaaggacacaccgttccatagtttttaagattgaggagcagcag

SEQ ID NO: 199940 - DNA, 263 bp, Glycine max
acggctgcgagaaacgacagaagggcacaggcaaagttgtcattggaatggatgttgcagcttctgaattctacaaggaagacaaaacatacgatttgaacttcaaggaagataacaatgatggctcccagaggatctctggagatgctttgaaagatctgtacaagtcatttgtgtcagagtacccaattgtttcaattgaggatccatttgaccaggatgactgggagcactatgctaagctaactgctgaggttggagcc

SEQ ID NO: 199941 - DNA, 259 bp, Glycine max
agaaacgacagaaggggagtgtgaagataacagttgccggttcaagtgtcagcgttggtgctgccagtgaaacgcgaaccgtgccaggcagtgaggctagtgatattcaaatggttgaagcagggaatatggtcatttccatacaagttctggagaatgtcactgacaatttcagtgagcatgatgttctgggacaacgaggttttggaacggttgatagaggtgaactccatgatggtacaagtattgcggtgaacag

SEQ ID NO: 199942 - DNA, 266 bp, Glycine max
ctgcgagaagacgacagaaggggggaaaagttagaagtagtgaagaaaatgaaagtcattgttttcttcgttgctataataattttaggtgcagaatggcaatgcaatgggtcagagcatgagcatgagcatggccacagctaccaaattttccctttgcgaatgaaaaccggccccggtggccactacattccggaggtatcgtgcaaaagttggaggcttggtgtggaagcacacaacgtcattgactggagaaccattcctca

SEQ ID NO: 199943 - DNA, 268 bp, Glycine max
acggctgcgagaagacgacagaagggatacgtgtttcagtaggtcttactgtaaccggtttgtctggaaatatgcgtacccatatttgtccacctcggcgaacatttcgtgacattgcccgccgtcccgcttctatttgtctagatgttatccaagctggctcaagtgcttgaagagcatatcttccgaagcaaatatgattccctcgataggatattcctttcattcttcctctatgttgtttacgaaatctggttctttgggggtt

SEQ ID NO: 199944 - DNA, 245 bp, Glycine max
gctcgagaagacgacagaagggggggaacatcatcacattacattagattggtggtaatggcagcgtcactacaagcagcagctactttcatgcaacccaccaagttgagcaggagcaacactttgcagcaaaagtctactcagtccatttccaaggcttttggtttggaacctgttggagctaaaaaggtcacatgctcccttcaggctgatcttaaggacttggctcacaagtgtgttgatgc

SEQ ID NO: 199945 - DNA, 259 bp, Glycine max
tacggctgcgagaagacgacagaagggggcacaagtgagtttgttgatcgagataactagaaacagtgtgatgaaaatgaaggtccttgttttcttcgttgctacaattttggtagcatggcaatgccatgcgtacgatatgttccctctccgaatgaacactggctatggtgcccgtactccggaggtgaaatgcgcaagttggaggcttgctgtggaagcacacaacatctttggctttgagaccattcctgaagag

SEQ ID NO: 199946 - DNA, 259 bp, Glycine max
cggctgcgagaagacgacagaagggaggtcatttgttgtaaatgggtcttttagaccaaaagggattcattaggcaatattgagagatacaaggcaagactcgttgctaagggatttactaaaaatgaaggaatcaactacatagagactttgtctcttgtacctaagaaatattctctttgtattattttggcattagttgctcattttgaccttgagttgcaaaaaatagatgtgaaaacaacatttcttaatggtg

SEQ ID NO: 199947 - DNA, 258 bp, Glycine max
aagacgacagaaggggactcgcagattcaaacgtttccgaggtgaggctgaggcatctctctctgctttctagaatgggagctgggcgtggagtctccatcccacttgatggggtgagggacaagaaccttatgcagctcaaaaagctcaatctcgctcttttccccgttcgttacaatgacaaatactatgtcgatgcactcgcttccggtgaatttaccaaactagcttactatagtgatatttgtgttggagcaa

SEQ ID NO: 199948 - DNA, 262 bp, Glycine max
agacgacagaaggggtatacttcaaagatgcttcttgctgcaatagacgagcaatgtaagggaacttatgattttctgtatttaccgattgatttcaagaataaatgtaatgttggctatgcattcataaacatgattgatcctggtcaaattattcctttccaccaggcttttgatgggaaaaaatgggagaagtttaatagtgaaaaagtagcctcacttgcctatgcccgaattcaaggaaaagcttctcttattgctc

SEQ ID NO: 199949 - DNA, 171 bp, Glycine max
tacggttgcagaagaccgaaggggtggtcaaccttggtgaccaacttgaggacataaccaatggcaagtacaagagtgtgatgcaccgagtgattgctcaaaccgatggtaccagaatgtccatagcttctttctacaaccctggtgatgatgctgtcatttctcctgaac

SEQ ID NO: 199950 - DNA, 271 bp, Glycine max
tacggctgcgagaagacgacaaagggaactgaggttaagtctgttgagatgcaccatgaggctctcacagaggctcttccaggtgacaatgttggatttaatgtgaagaatgttgcagtcaaggatctcaagcgtggttttgttgcatccaactccaaggacgaccctgccaaggaagctgccaacttcacatcccaagtcattatcatgaaccatcctggccagattggtaatggatacgcaccagtccttgactgccacacttctcaca

SEQ ID NO: 199951 - DNA, 236 bp, Glycine max
  unsure (1)..(236): unsure at all n locations
gaacctgatcgatctctttaccagttgccacactacaccgagatnnacccctaaacccgtttgcgttgttgtttgcgaagaaatggcgactaagaggagcgtgggaacgttgaaggagggtgatttgaaagggaagagggtgttcgtgagggtcgatctgaacgtgcctttggatgacaaccttaacatcaccgatgacactagatccgtgtgctgttcccaccatnaagnantna

SEQ ID NO: 199952 - DNA, 258 bp, Glycine max
gccgagaagacgacagaaggggatgcacaagtttgttgagatagctagaagcaataagatgaaaatgaaagtgcttgttttgtttgctgctacagttttggtagcatatgaatgccatggctcagactaccagaagttccctctccaaatgaaaactgggtttggtgggcaatacagcaatgaggtggcatgtgccagttggaggcttggcgtggaagcaaacaacgtagtcaagtggcaaactgttcctgcagcttg

SEQ ID NO: 199953 - DNA, 268 bp, Glycine max
tctcgagccgaatcggctcgagagacgacagaaggggggaccgcattcactttctcctacctcgatccttctaacccaacctcaacctgtttctccgagaatcacatccaacgcttctgtcatggaggaagttaacgttgtggaaactaaggatggaactgtctcagtagctgctgcgtttgctggtcatcaggaagccgtgcaggatagagaccacaaatttttaagaaaagctgttgaagaagcatataaaggggtagattgcaaa

SEQ ID NO: 199954 - DNA, 257 bp, Glycine max
ggctcgagacggctagcgacagaaggggacattaaacaagttaaaatctgagcatcactgaactaacatagcaaccctatgtcgaaggtggtttgtgtcaccggagccagcggcgccatcggatcatgggtggtcctactcctcctccagcgtggttacaccgtccatgccaccgtccaagatatcaaggatgaaaatgagacgaaacattttgtacgaatggaaggagcaaagagtcatctccatttttttgaaat

SEQ ID NO: 199955 - DNA, 267 bp, Glycine max
  unsure (1)..(267): unsure at all n locations
tacggctgcgagaagacgacagaagggggaggtcattttctcttggatatattagcaaggttaagatacttcatcttctgcaaggagctaccagtggtgttgaaggccgtcgttcacggcgatgagaacctattcaacagctacccagaattgcaagatgccttggtttgggtctactttcactcaaacattccagaattcaacaaggtggaatgttggggcccactgaaggaagcgtcacancccacaggtggggtccaggaggag

SEQ ID NO: 199956 - DNA, 255 bp, Glycine max
  unsure (1)..(255): unsure at all n locations
cggctcgagtacggctgcgagaagacgacagaagggggtgcacaagtgagtttgttgatcgagataactagaaacagtgtgatgaaaatgaaggtccttgttttcttcgttgctacaattttggtagcatggcaatgccatgcgtacgatatgttccctctccgaatgaacactggctatggtgcccgtactccggaggtganatgcgcaagttggaggcttgctgtggaagcacacaccatctttggcttgaga

SEQ ID NO: 199957 - DNA, 220 bp, Glycine max
tacggctgcgagaagacgacaaaagggggatgcacaagtttgttgagatagctagaagcaataagatgaaaatgaaagtgcttgttttgtttgttgctacagttttggtagcatatgaatgccatggctcagactaccagaagttccctctccaaatgaaaactgggtttggtgggcaatacagcaatgaggtggcatgtgccagttggaggcatggcgt

SEQ ID NO: 199958 - DNA, 270 bp, Glycine max
tactgcgagaagacgacagaaggggattcgttagggcactcaacattttacactcttttcttcttctcgttgttgcttcggtgttgaatcatggatcagaaagtcgatttcagtgctccgcattccatgggaaccactatcatcggcgttacttacaacggcggtgtcgttctcggagccgactctcgaaccagcactggagtgtatgttgccaaccgagcatcggacaaaatcacacagctcactgataatgtttacgtgtgtcgctcc

SEQ ID NO: 199959 - DNA, 269 bp, Glycine max
aggctcgagctcgagccgaatcggctcgagacggctgcgagaagacgacagaagatagacaactttactcaaaggtgcctactttattgggaagatgatatggagcaaaggctacaaagaactgctccaacttcttaaagatcatgaaaaggaattatctgctcttgaggttgacttatttggcagtggagaggactcagatgaagttcagaaagctgcagaaaagttggaactagcagttagagtccacccagctcgtgatcatgctg

SEQ ID NO: 199960 - DNA, 264 bp, Glycine max
tacggctgcgagaagacgacagaaggggattggtgacaaagttagaaacaaggagaaagaaagaagatggcaggaaagaaaatcccagatgtgttgctgaattcaggacacaaaatgccagttataggcatgggaacttcagtggagaatcgtccatcaaatgagacccttgcttctatctatgttgaagccattgaggtgggttaccgtcattttgacactgctgcagtgtatggaacagaggaagccataggcctagccgtg

SEQ ID NO: 199961 - DNA, 236 bp, Glycine max
acggctgcgagaagacgacagaagggaaagagacccggaaagggtgggaaccgcttttggaaatccattgggcttggatttaagactcccagggaagccatcgaaggaacctacattgacaagaagtgccccttcactggcaatgtttccatccgtggccgtatcttggctggaacatgtcacagtgctaagatgaacaggactattattgttaggaggaattatccccattttat

SEQ ID NO: 199962 - DNA, 242 bp, Glycine max
tctgcgaagacgtcagatcggggcacaagtgagtttgttgatcgagatgactagaaacagtgtgatgaaaatgaaggtccttgttttcttcgttgctacaattttggtagcatggcaatgccatgcgtacgatatgttccctctccgaatgaacactggctatggtgcccgtactccggaggtgaaatgcgcaagttggaggcttgctgtggaagcacacaacatctttagctttgagacca

SEQ ID NO: 199963 - DNA, 253 bp, Glycine max
tacggctgcgagaagacgacagaagggtgacaaatacaatgatatttatttttatagttacatttttttgaagggcagaaattgtagtgaaagcgataattctagtactagtataataactagtatgtaatgatacaaatgatagtgattccactataggagaaagttctaataatctcgatgaaagtcaaaaatataagcatttgtggcttgaatgcgaaaaatgttatggattaaaatataaaaaatttta

SEQ ID NO: 199964 - DNA, 250 bp, Glycine max
tacggctgcgagaagacgacagaagggaacagacaccgacacagatctgtcttccgaagcaggaactaaatatggctgacttgttggaatggtcaaagcaagataagaaacgaatgcttcatgtcgtctaccgtgttggtgaccttgatcgcaccatcaaattttacacagaatgtttaggaaccgcagcttttgagggcaaagagatatcccagaggagaaatatgctaatgcttatcatggatttggc

SEQ ID NO: 199965 - DNA, 270 bp, Glycine max
tacggctgcgagaagacgacagaaggggaacacgcggcttccgccggaggtgaaccgcgtgctgtacgttcggaaccttcccttcaacatcaccagcgaggagatgtacgacatctttggcaaatacggcgccattcgccagatccgcatcggcaccaacaaggacactcgcggaaccgctttcgtcgtctacgaggacatctacgacgccaaaaccgccgtcgaccacctctccggcttcaacgtcgccaaccgctacctcatcgttct

SEQ ID NO: 199966 - DNA, 274 bp, Glycine max
tacggctgcgagaagacgacagaaggggccaacggtatattgaacgtgtctgcggaggacaaaaccactggacagaagaacaagattacgattaccaacgacgaaggaatgctttctaaggaggagactgagaagatggtgcaggaagctgagaagtacaaggctgaggatgaggagcataagaagatagtggatgccaagaatacattggagaattacgcctataacatgatgtacacaattatagatgatctagatgcttccgagctggctg

SEQ ID NO: 199967 - DNA, 267 bp, Glycine max
  unsure (1)..(267): unsure at all n locations
tacggctgcgagatgacgacagatgggctccaagcccatcagctcttggatcagtcatgtgatgagcatcacatgttatggcaccccccaaatattctgctattattctggctcccctttttgttgcactctccaagctctccattaccttattcatntttccggtgatagagattcaagttgtctttaggtgaccaaaggtaagttaaaacaaaaatttgttaagccatattgctttagatttgctagcaaaagttgcatatggtg

SEQ ID NO: 199968 - DNA, 265 bp, Glycine max
acggctgcgagaagacgacagaagggggtcacacagctattcctcttaagcttgctactgagtttccacactgcataccttaggtcttccgaattcgaagttaatttgcaagatggctaaggaaaaggctcagatcaacattgtggtggttggtcatgtggaccctgaggaggcaaccaccatccacgagctgaagaagcctgttgtggagaaagaagctccagggcatgccatatgagggattccacgtacggcctcggagggg

SEQ ID NO: 199969 - DNA, 269 bp, Glycine max
ctcgagtacggctgcgagaagacgacagaagggcaaacttgaggatttgaaatatgaggagaactctgttaaggcagtgcaatgcttaaatgacatggtcactaatgctctgatgcatgctgaagattgcttaaaatacatggctgctttacgtgacccgcctatatttcgcttttgtgctataccccagataatggcaattggaacacttgcattatgctacaacaacattgaggtcttcagaggtgtagttaaaatgagcgaggttt

SEQ ID NO: 199970 - DNA, 131 bp, Glycine max
gggagagagagaacggaaggtccccttggctgtaagaaagcacacacaaacaaaggtgcatggaccaaagaagaagatcatcgcctcatttcttacattagagcttcacggtgaaggctgctggcgctctc

SEQ ID NO: 199971 - DNA, 175 bp, Glycine max
gaagacgacagaagggggttgctaaaactcgtgcatgggaagaagatcatggcatgtcatttacatatgatggtgttcctcttcttgccatgttagatgaatatgccatgctcagacatgaacgggaagaggaaaaacggaggatgagggatcagaaaaagcatcacgagcagcg

SEQ ID NO: 199972 - DNA, 263 bp, Glycine max
tacggctgcgagaagacgacagaagggggcacaagtgagtttgttgatcgagataactagaaacagtgtgatgaaaatgaaggtccttgttttcttcgttgctacaattttggtagcatggcaatgccatgcgtacgatatgttccctctccgaatgaacactggctatggtgcccgtactccggaggtgaaatgcgcaagttggaggcttgctgtggaagcacacaacatctttggctttgagaccatcctgaagagtgcgt

SEQ ID NO: 199973 - DNA, 195 bp, Glycine max
acggctgcgagaagacgacagaaggggaaattaaatatttagattaataaaattagtcgtgttctattcgattttttgaattggtttttttttacagtagctaatgctagtcaccgaacttagtcaatgagctagaatgggttataaagatatctatagatatatatagatatatgtatctatagatatctttag

SEQ ID NO: 199974 - DNA, 235 bp, Glycine max
cggctcgagtacggctgcgagaagacgacagaagggggatgcacaagtttgttgagatagctagaagcaataagatgaaaatgaaagtgcttgttttgtttgttgctacagttttggtagcatatgaatgccatggctcagactaccagaagttccctctccaaatgaaaactgggtttggtgggcaatacagcaatgaggtggcatgtgccagttggaggctggccgtggaagc

SEQ ID NO: 199975 - DNA, 268 bp, Glycine max
tacggctgcgagaagacgacagaaggggttatctgaaaagcctaaagcaaaagcacatacccccatcactcagctgtggcatacaaatggtagatgccctgaggacacaatacctgtcaggagaaccaaggaggaggatgttctgagagcaagttcagtgaaacggtatggtaggaagaagcacagagcaatccctaagcctaggtctgcagaacctgatctaattaaccaaagtggtcatcagcatgcaatagcatatgttgaagga

SEQ ID NO: 199976 - DNA, 247 bp, Glycine max
acggctgcgagaagacgacagaaggggaagaaaacacaacacgaatttcattgcagagtgttattttgagtatcagcatcaatggctccaattgcagtgggaaacgtgattccagacggcattttggcttacttggatgaagaaaacaaaccccaaactgtctccattcactctctcgccaccggcaagaaagtcatcatctttggggttcccggtgccttcactcctacttgcagcttgaagcacg

SEQ ID NO: 199977 - DNA, 248 bp, Glycine max
cggctcgagcggctcgagtacggctgcgagaagacgacagaagggaagaaaaggtggtcctttagaaggagctcatgttcacattgttcacttgtctgattcaagtgcttccttggatctgattaaggaagcaaaaagtcgtggtgacagcataagtgttgagacttgtccccattactatagcttttcatctgaagagataccagatggagatactcgttttaagtgttccccggccattcgtgatg

SEQ ID NO: 199978 - DNA, 270 bp, Glycine max
aggctcgagtacggctgcgagaagacgacagaaggggactctgggaaatccactaccactggtcacctgatttacaagcttggatccattgacaagcgtgttattgagaggtttgagaaggaagctgctgagatgaacaagaggtctttcaagtatgcctgggtgctggacaaacttaaggctgagcgtgaaagaggaatcaccattgatattgctttgtggaagtttgatacaacaaagtattattgcacagttattgatgcgcctgga

SEQ ID NO: 199979 - DNA, 267 bp, Glycine max
ttgcgccatttctggctaatgtgatatgttgcccccaattggaagccactctcacaattcttattggtcaatccagtaaacataccaatgtacttgccttaaacgggaccgatgctaaacattgcctggcagatgtggaacaaattttgatgggtcagggtgccactaataatctgaagcagatatgttcaattcattcttcaaatctcaccgaggcatcttgcgcagtagaaaatgtgaatgatttatatgacatggtggatacta

SEQ ID NO: 199980 - DNA, 267 bp, Glycine max
taccgagaagacgacagaagggggagctgaaaccgagaagaagaagatggagatgtatcagatctggagcaggagaatagcgttgggagcgttcgcgtttgttctgcttttcctatcggcctcagcagacgacgtcgttgtgctctctgaagataacttcgagaaggaagttggtcaggacagaggagctctcgttgagttctatgctccttggtgtggacactgcaaaaagcttgctccagaatatgaaaagcttggtagcagctt

SEQ ID NO: 199981 - DNA, 265 bp, Glycine max
atgttggtcatcaagtattgtcatgacatgggagttgtgcacagagatatcaaacccgagaatattctcctcactgcatccggaaaaataaagcttgcagatttcggcttggccatgagagtttccgaaggtcagaacttgactggtttggcaggaagccctgcctatgttgccccagaagtattgttaggcagatactctgagaaggtggatatatggagtgctggagtgctcctgcatgctctgttggttggcagtcttccat

SEQ ID NO: 199982 - DNA, 255 bp, Glycine max
tacggctgcgagaagacgacagaaggggacacaacattgatttctgagattcagatgatggcgagtgagtcgcaaaactgggtgttcatggtcactgcacagacaccaaccaacattgccgttatcaagtattgggggaaaagagacgaaatcctcatcttaccggttaacgacagtatcagtgtctctctcgatcccagccacctctgcaccaccaccactgctgccgtcagtcccgctttccaccaagatcgc

SEQ ID NO: 199983 - DNA, 242 bp, Glycine max
tgcgagaagacgacagaagggaaagagacccggaaagggtgggaaccgcttttggaaatccattgggcttggatttaagactcccaggggagccatcgaaggaacctacattgacaagaagtgccccatcactggcaatgtttccatccgtggccgtatcttggctggaacatgtcacagtgctaagatgaacaggactattattgttaggaggaattatctccattttatcaagagtacca

SEQ ID NO: 199984 - DNA, 237 bp, Glycine max
aggcgagaagacgacagaagggggaagaaggactcaattgagagagagagatggagaagccaggaggaggaggagtgttatcggcgaaggaggcattcgagaagcttgaaaaggtgggagaatggacatatgggaaggtgtacagagcaagatagaaggccacggggaagatcgtggctctgaagaagactcgtctccacgaggacgaagaaggtgtccctcccaccactctccgtg

SEQ ID NO: 199985 - DNA, 261 bp, Glycine max
tacggctgcgagaagacgacagaaggggggtgaggtgctgggagtaccgccagcaaccttctattgtccgtttgacaaggtctactcgcccagacaaggctcgccgcttgggtttcaaggctaagcagggttatgtgatttaccgtgactcgtgtacgaaggggtggccggaatcaacctcttccaaaaggtattgtttatggtaagcccaccaaccaaggtgttactcaactgaaatttcagcgcacaagaggtctgttg

SEQ ID NO: 199986 - DNA, 269 bp, Glycine max
atatcgcacatttgctagtccccttgctcgaaaattggctgaagagaaaaatgtacctctctctagcattaaaggaacaggacctgaagggctcattgtcaaggccgacattgatgattacttggcttctggtgctaaagaagtttcggcatcctccaagtcgaaggttgcagcagatgcagcattggattataccgacattcctgtctctcagatacggaaggtcacagcttcacggttattattatcaaaacaaactatccctcatt

SEQ ID NO: 199987 - DNA, 229 bp, Glycine max
tacggctgcgagaagacgacagaagggaagccagctggattcaaacaagaaagcaatgtcgattcagtgcaaggtgtgcatgcaaacatttatgtgcaccacatcggaagtgaagtgtagggagcatgctgaagccaaacaccctaaatctgatgtttatgcttgttttcctcatctgaaaaagtgaacatattggagactgcaaatggagaaaactttatatcattat

SEQ ID NO: 199988 - DNA, 274 bp, Glycine max
acggctgcgagaagacgacagaagggggagcgaagaagatattagggtttttgagtgcggtgcggcgatcctagcactctcttctgcagctttcgccgacagcttcattcaccatggctgagcaaaccgagaaggcttttttgaaacaaccaaaagtgtttctcagctcgaagaaaactgggaagggaaagagacccggaaagggtgggaaccgcttttggaaatccattgggcttggatttaagactcccagggaagccatcgaaggaaccta

SEQ ID NO: 199989 - DNA, 272 bp, Glycine max
cggctcgagcgagaagacgacagaaggggatgatgtaaatgctgcttttgacgatgctgaggaaccgagggctgatcaacaatgtgacaacgatgacatgggtcctctaatgcttaatgcatttgacttgataattttgtctcaaggcttaaatcttgcaacaatctttgatcgtgggcaggactctgtgaagtaccaaacccgttttatctctcaaaaaccagcaaaggtggttttatcaagtatggaagttgtggcacaatcaatgggat

SEQ ID NO: 199990 - DNA, 264 bp, Glycine max
acggctgcgagaagacgacagaaggggatatcatagatacatatagaattctgtggaaagccgtattcgatgaaagtcgtatgtacggcttggagggagatctttcatatctttcgagatccaccctacaatatggggccaaaaagccaaaataaatgattttagcccttataaaagttataaaaaaacggattcctcctttcacgctcatgtcacggcgaggtactgcagaagaaaaaaccgcaaaatccgatccaatttatc

SEQ ID NO: 199991 - DNA, 265 bp, Glycine max
acaagacgacagaagggggaagaggaagggaacggcctggaggaaggtatatgagttttatccatggtgatggagttcaggatgtggtaatcacaggtgaaaatgggacaatagatgggcaaggagatgcgtggtggaataagtggaggcagggaactcttcagtttaccagaccaaacctagttgaatttgtgaattctagagatattattatttcaaatgtaatctttaagaattctcccttttggaacatacacccggttta

SEQ ID NO: 199992 - DNA, 268 bp, Glycine max
tacggctgcgagaagacgacagaaggggagcactgcactcttcgcaacacaacaaaaaaagacaacccagagagcgcgtcttaataaacgctcttctctgaaaacccccatttcttttcttctttcttcttctctttcgcttcttcgatcttcgatcttcgtcgctgaaaatgagagagtgcatttcaatccacatcggccaggccgggattcaggttggaaacgcctgctgggagctttactgcctcgaacacggcattcagcctga

SEQ ID NO: 199993 - DNA, 259 bp, Glycine max
tacggctgcgagaagacgacagaagggagaaggcgagttctttgaggcagagaaagaggaaaagagtgtgttgccccagcagaagaaagatgaccagaaaactgtggacgctgcagtgttaaaagccattgagagtgtgccagacttgaagtcctatttgggtgccaggttttctctgaaggccggggtgaaaccacatgagctagtcttctagaggaaagaggggtgttactcttgtttttgatatcgtgtttgttta

SEQ ID NO: 199994 - DNA, 264 bp, Glycine max
acggctgcgagaagacgacagaagggggacgtgggtttttctagggtttggaggctatgccgaaaacgggttaaataagctcggaaaatgattctcacaaagcagtaccgatgcatacactcagctagttgtcaatgtactaaagggcatttaagtgaagatatgatattcttagtatttcataatttcaattggaatcccaagctaattgcaactctatcatgtgtgtgcaaatggtttgatgatcttgccaagcgagttcta

SEQ ID NO: 199995 - DNA, 261 bp, Glycine max
  unsure (1)..(261): unsure at all n locations
gagaagacgacagaaggggacatagaaagaaaaacatgagtttgagggaagacaatgtagagggaagggatctgaagaagccatttcttcacacaggaagttggtatcgtatgagtgggagacaatccagtgtgtttggttccacacaggccattagatagtcctccatctctgtctntgcgtgngncctaatcgttgctttgggtccaattcagtttggtttcactgctggttacacctcacctacaaatctggtatcat

SEQ ID NO: 199996 - DNA, 243 bp, Glycine max
  unsure (1)..(243): unsure at all n locations
ggaataaaacaagaggaggaaatgcaacttacttgttgatataaacttcacagagagaaagttgttgtaaagccttgttgctgcnatggncacccacgnggntcttgcttctanaaggntcccttcaaacacnaggttcccatccaaggcctctcactctttcccaacccaatgcgccttaaagagacttgaggtgacaganttctctgggctnaatcnncttctgtgccaaaatgtagaagg

SEQ ID NO: 199997 - DNA, 280 bp, Glycine max
ggtgaacaaatgcccgaacctaaatatgttattgctatgggagcatgtacaattacaggggggatgtttagtaccgattcttatagtactgttcggggcgtggataaactaatcccagtggatgtctatttgccgggctgtccacctaaaccggttgctattatagatgctataacaaaacttcgtaagaaaatatctcgagaaatatatgaaatttatatgagttctcaacgagagaatagatgttttacaaccaaccacaagtttcatattggataca

SEQ ID NO: 199998 - DNA, 260 bp, Glycine max
tacggctgcgagaagacgacagaagggaagagacattaattaatcaaagatccaactgatcacctcgtcggtattgtaaatatgcagttacaaataatccagccaaagtaatgggaattaaacctatcacgattccaaatagaaaaacttcaatcatttttatttgttcgaaaggtaaaaagaaaggtaatatctatccttaaccattaatctgtattgatcatgaatctcaacgaccgagaattgtaaattgacacagt

SEQ ID NO: 199999 - DNA, 257 bp, Glycine max
acgagtgttttcaagctgcggcgtgtggtctttctctccgtgacacagcacaaacaaattctcagtgttggagacttgagctcatagagaaatcatagtttgtttaatttcaattctgagcaaaggtcaacatgcaagttttttccattgattgcgaaagtgctttgtcagttgttggtccaaggccaatggaatggtctactgttccatacaatgcccctcaagctcctgggccaaatggaaagcagcggacctca

SEQ ID NO: 200000 - DNA, 272 bp, Glycine max
cgagaagacgacagaaggggacacattgttctactcatacctcaaaaaaggcaaagcttattcccccaagacttagctagcactagccaacacctctatatctaaaatggtttcaatttctgatcatgaactggttttgatctttggtctcctaggtaacattgtgtcattcatggtgttcttagcacccttgccaaccttctatacaatttacaagaagaaatcatcagaaggatttcaatcaattccatatgcggttgcacttcttagcg

SEQ ID NO: 200001 - DNA, 269 bp, Glycine max
tacggctgcgagaagacgacagaagggcttattaactctttggttcgagaatttatatataatttaagtgacacaataaaagctttttctattcttcaattaactgatttatgtataggattccattcaacccatggtttgggaactagtgattggtttcgtctataaagattttggatttgctcaaaatgatcaaattatatctggtcttgtttccacttttccagtcattttagatacaattttaaaatattggatttttcgttatt

SEQ ID NO: 200002 - DNA, 265 bp, Glycine max
tctcgagccgaatcggctcgagtacggctgcgagaagacgacagaaacggtacggctgcgagaacacgacagaagggatcagtggtgccccccaggataacaacataatgctgtggaatgctgtcatatttggtcctgatgatactccatgggatggaggcacgttcaagttgacactccaatttactgaggactatccaaataaaccaccgactgtacgatttgtgtctcgcatgtttcatccaaatatttatgctgatggaag

SEQ ID NO: 200003 - DNA, 263 bp, Glycine max
tacggctgcgagaagacgacagaaggggatagcatattccagtgtttttcatttcatcgtgcattcaatggccaccacagcagctctatccggaaccatggtgagcacctccttcatgaggaggcaacctatgaccaccacaagcctaaagacattccccaacgttggtgaagctctttttggtctgaaaagtggacgaggtggtcgtgtcacttgcatggcctcgtacaaggtgaagctcataaccccagaaggagaagtgg

SEQ ID NO: 200004 - DNA, 190 bp, Glycine max
acggctgcgagaagacgacagaagggggcacaagtttgttgagatagctagaagcaataagatgaaaatgaaagtgcttgttttgtttgttgctacagttttggtagcatatgaatgccatggctcagactaccagaagttccctctccaaatgaaaactgggtttggtgggcaatacagcaatgaggtg

SEQ ID NO: 200005 - DNA, 262 bp, Glycine max
acggctgcgagaagacgacagaagggggagtttgttgatcgagataactagaaacagtgtgatgaaaatgaaggtccttgttttcttcgttgctacaattttggtagcatggcaatgccatgcgtacgatatgttccctctccgaatgaacactggctatggtgcccgtactccggaggtgaaatgcacaagttggaggcttgctgtggaagcacacaacatctttggctttgagaccattcctgaagagtgcgttgaagca

SEQ ID NO: 200006 - DNA, 262 bp, Glycine max
tacggctgcgagaagacgacagaaggggacggacgagggtttcgtttcgggtttgacgttgttcacaatcactttctgcgcttcactcactcccttcgtgcggttttctttctttgtcgaactcgtgcgaaaatgcgtgagattcttcacatacagggagggcaatgcggaaaccagatcgtagcgaagttctgggaggtggtgtgcgcggacatccgaaatcaatccacggggaggtaccagggggacaacgagttgcaac

SEQ ID NO: 200007 - DNA, 258 bp, Glycine max
tacggctgcgagagacgacagaagggagctccctgcatcctatcaaaacttgtacttttccagacaaagtcaacactgaaaccatggttaacatcaactggaaccccctgcaaataacaagggcaataagcacagggcacagatgaagagcttgaaggcacaacataagcatcacaaactaatgctaagttcacctgactagcacgaagctccagtgcaacctccccttgtgcagttagcttaatctgaaaatagaat

SEQ ID NO: 200008 - DNA, 261 bp, Glycine max
ggacgacagaagggggtggtagtgtggcagcgacacgtatcaacttcaataatcgcatcgcagaagcagtttccggtgcatctcatcgtctccgaaaatgaacgacgcagatgtctcgaagcaaatccagcagatggtgcggttcatccgccaggaagctgaggaaaaggccaacgagatctctgtctccgccgaagaggaattcaatatcgagaagctgcagttggtcgaagccgacaagaagaagatcaggcaagaata

SEQ ID NO: 200009 - DNA, 262 bp, Glycine max
tacggctgcgagaagacgacagaagggcacagaggcaaagcagaaaagcagaaggcggaaaactgcctcgtggttaaggaagtgtgtattgcagcttggtccaactttcattaaacttggtcagttatcatcaacaaggtcagatctatttccacgtgaatttgtggatgagctcgcaaaattacaggacatggttcctgccttctctcctaagaaagcaagaaaattcatcgagagtgaattgggagctcccattaacata

SEQ ID NO: 200010 - DNA, 272 bp, Glycine max
cgagaagacgacagaaggggacacattgttctactcatacctcaaaaaaggcaaagcttattcccccaagacttagctagcactagcaaacacctctatatctaaaatggtttcaatttctgatcatgaactggttttgatctttggtctcctaggtaacattgtgtcattcatggtgttcttagcacccttgccaaccttctatacaatttacaagaagaaatcatcagaaggatttcaatcaattccatatgcggttgcacttcttagcg

SEQ ID NO: 200011 - DNA, 223 bp, Glycine max
tacggctgcgagaagacgacagaaggggggagtgaagaagattaacgaaggatggaatctgggtctagcgaaggagaagaggtgcagcaacgcgtgccgttgagggagagagtggagtggtcagatgttactccggttcctcaaaacgacggccctaaccctgtcgttccgatccagtacactgaagagttttccgaagttatggattactttcgcgccgttt

SEQ ID NO: 200012 - DNA, 262 bp, Glycine max
acggctgcgagaagagacagaagggggagggcgaggaagccacatagagacacaatacagagtgagttgttgctccttcgccacaactctctgccaacatgggtatctccagagattctatgcacaagaggcgtgccactggtggcaagaagaaggcctggaggaaaaagagaaagtatgagcttggtcgccagcctgctaacactaagctgtcaagcaacaagacagtcaggaggatccgtgttagaggtggaaatgtgaa

SEQ ID NO: 200013 - DNA, 252 bp, Glycine max
acggctgcgagaagacgacagaagggcatggagctatattttttattagagattataatccagaacagaatgaagataatgtcttagcaagaatgttagaccataaagaagctatcatatcccacttaagttgggctagcctctttctggggttccatactctgggactttatgtccataatgatgtcatgcttgcttttggtactccggagaaacaaatcttgattgaacctatatttgcccaatggatac

SEQ ID NO: 200014 - DNA, 255 bp, Glycine max
tacggctgcgagaagacgacagaagggggagaacaaaacaagtgtttcgaatagattatcctaagtctttgggaatagtgctgcaatggcttcaagtcaggaggaggtgacccttttgggagctactggaagcccatttgtgtgcagggttcatattgccctcaagttgaagggagttcaatacaaatatgtcgaagaaaatttgaggaacaagagtgaactgcttctcaaatccaacccagttcacaagaaggt

SEQ ID NO: 200015 - DNA, 287 bp, Glycine max
tacggctgcgagaagacgacagaaggggaagcaaaagatggaacttgtgatgcatcaaaggtgaatgaacctgcagtgtcaattgatggccatgagaatgtccccgtgaacaatgaggccgcattgctcaaagctgttgcccatcaacctgtatcggtagccattgaagctgggggaattgacttccagttctattcagagggagtatttacgggaaactgtggcactgctctggatcatggggtagcattgtgggctatggaacaactcaagatggaaccaaatat

SEQ ID NO: 200016 - DNA, 289 bp, Glycine max
acggctgcgagaagagacagaagggggagggcgaggaagccacatagagacacaatacagagtgagttgttgctccttcgccacaactctctgccaacatgggtatctccagagattctatgcacaagaggcgtgccactggtggcaagaagaaggcctggaggaaaaagagaaagtatgagcttggtcgccagcttgctaacactaagctgtcaagcaacaagacagtcaggaggatccgtgttagaggtggaaatgtgaaatggagggcattgagattggatactgg

SEQ ID NO: 200017 - DNA, 289 bp, Glycine max
acggctgcgagaagacgacagaaggggaagagagatctaactattatgattctcttcttgctgctgaatcgcgtgcaatttctggaaggaaaggcacccactctgccaaggatcctccagtgatgcatataactgatttgaccatggcatcggctaagaaagccagagacttcttgcctttcctgcaccgaagtagaagagttcctgctgttgtggaatatgtgctcagtggccatcgttttaaattgttaattccaaaagaaacttgcagcattgcgttctctttttc

SEQ ID NO: 200018 - DNA, 289 bp, Glycine max
ggttgttggtttttgttaatccgtttggtgggaagaaatccgctacgaagattttcgctgaacaagtgaaacctctttttgaagatgctcatatccaaatcacagttcaagaaaccaagcaccagctccatgcaaaggaagttgctcgttcgctagatattactaaatacgatgggattgtttgtgttagtggagatggaattttggttgaggttagcttcattgccattacacttgttgcactatttgttatcatcatcttgatcgtcatcgtcatgttcgtggttat

SEQ ID NO: 200019 - DNA, 292 bp, Glycine max
  unsure (1)..(292): unsure at all n locations
tggcgtgaaacaagcctctcaccttctcaagtacgattcgatcctcggaaccttcgatgctgatgtcaagcctgttggcagtcgncatcatctctggtcgatggaaaggaaattcaaagttgtctctgaccgcaaccctgccaaccttccttggaaggatttggggatagacttggtgattgaaggaactggggtgtttgtagacagannaggtgcagggnnnacacattcaagcaggagctaagaaggtgctcattactgctcctggtaaaggagacatccccacatatgt

SEQ ID NO: 200020 - DNA, 288 bp, Glycine max
acggctgcgagaagacgacagaaggggggcaagggaaatccatgctaatagtgagatttggaggaacaaaaagatcaccactagcaaaagtgtttcctaagtggtacctccaccagaatgcaagcaaggtgtttgagcaagacatgggattcttgtcatcacaaaatgaaattcttctgaaagaaaaggtttcaacaaaggaactatacctgaatctgaaatcatcagacacatgggttgctgaatacaggaagtggatggacaaagcggggcatggaatgccatatc

SEQ ID NO: 200021 - DNA, 290 bp, Glycine max
tacggctgcgagaagacgacagaaggggatcttttattgaattgattccaaatacaaacatggcaatgaagaagttcttgtgggttgttctgtccctttctttggtccttggagtggccaatagctttgattttcacgacaaggatttggagtccgaggaaagcctgtgggacttgtacgagagatggaggagtcaccacacggtttcgcgaagcttggtgacaagcacaagcggtttaacgtgttcaaagcgaatgtgatgcatgtccataacaccaacaaaatggata

SEQ ID NO: 200022 - DNA, 296 bp, Glycine max
acggctgcgagaagacgacagaaggggggcaagggaaatccatgctaatagtgagatttggaggaacaaaaagatcaccactagcaaaagtgtttcctaagtggtacctccaccagaatgcaagcaaggtgtttgagcaagacatgggattcttgtcatcacaaaatgaaattcttctgaaagaaaaggtttcaacaaaggaactatacctgaatctgaaatcatcagacacatgggttgctgaatacaggaagtggatggacaaagcggggcatggaatgccatatcattttggt

SEQ ID NO: 200023 - DNA, 286 bp, Glycine max
tacggctgcgagaagacgacagaaaggggcatatccaaaggaacaaaaatattattaagatgatcaacattattggagcacttgttctactctttgcatttctcttcctcagttgtgtgtatgcacaagacacaacaacccttgtgcctgcaatcataacttttggtgattctgctgtggatgtagggaacaatgactatcttcccacccttttcaaggctgattaccctccttatgggagggactttgttaaccaccaacctactgggaggttttgcaatggcaa

SEQ ID NO: 200024 - DNA, 287 bp, Glycine max
tacggctgcgagaagagacagaaggggatcacttattaattgtgttaagaaatttaagtgaggagctagagaatgatgatgaagtctgctatgtgtgcagtggtggttgtagcacttcttcttctggcggaggtggggcccatggctgaggctgtgacatgcaccccaacagagttgagtccgtgtcttccagcaatcacttccggtgctaaaccttccaatgcttgttgcacgaagctgaagcagcaaaaaccatgcttatgtggctacctcaaaaacgctagctt

SEQ ID NO: 200025 - DNA, 287 bp, Glycine max
tacggctgcgagaagacgacagaagggggcatcaattcaaaatatatcatcaattataagcatgggtttgtggaacacaacgaatgcagtgtcttgccgctttcacaagtttggtgatgaccaaaagaatctggtcttccaaggtgatgccacgtcttcttccaggggcatagaactcacaaagttagacggtggaggaaaaccagtgggtggcagtgtggggagagtgttatactcttctccagtgcacctttgggaaagctctacagtggtcgcaagctttgaaa

SEQ ID NO: 200026 - DNA, 285 bp, Glycine max; identical to SEQ ID NO: 197688

SEQ ID NO: 200027 - DNA, 286 bp, Glycine max
acggctgcgagaagacgacagaaggggaagaaaacacaacacgaatttcattgcagagtgttattttgagtatcagcatcaatggctccaattgcagtgggaaacgtgattccagacggcattttggcttacttggatgaagaaaacaaaccccaaactgtctccattcactctctcgccaccggcaagaaagtcatcatctttggggttcccggtgccttcactcctacttgcagcttgaagcacgttcctggcttcattgagagagcagaagagctgaaaggaa

SEQ ID NO: 200028 - DNA, 287 bp, Glycine max
atacgacagaagggaaagagacccggaaagggtgggaaccgcttttggaaatccattgggcttggatttaagactcccagggaagccatcgaaggaacctacgttgacaagaagtgccccttcactggcaatgtttccatccgtggccgtatcttggctggaacatgtcacagtgctaagatgaacaggactattattgttaggaggaattatctccattttatcaagaagtaccagaggtacgagaaaaggcactccaacattcctgctcatatatcacctgcttt

SEQ ID NO: 200029 - DNA, 289 bp, Glycine max
tacggcgaagacgacagaaggggataccaaaaacaagacacaagccaagtgaaagtgagataaaataaaaatcagagagcataatgtcagggatcattcacaagattggggagacccttcatgtgggagggcacaagaaggaggaggagcataagggtgagcaccatgctggagaatacaaaggggagcaccatggtgaacacagtagtgagtacaaaggagagcatcatggtgaacacaaagctggagagtaccatggtgagcacaagccagagcacaaagaggggtt

SEQ ID NO: 200030 - DNA, 287 bp, Glycine max
tacggctgcgagaagacgacagaaggggagagaagagtgagtgtgtgtgataataattgggatcaactaatcaatcaatttgaatggcatcatccaattcggctcagctagaagggaacaaacccgcaaagagaaaacccgtgttcaccaaagtggatcagctcaaacctggaaccaccggtcacacgttggtggctaaggtcttgtcctccgacaccgtcgtacacaaaccgcgaccctcttccgcccacaacctcaaacccactgtcatcgccgagtgcctcatc

SEQ ID NO: 200031 - DNA, 288 bp, Glycine max
tacggctgcgagaagacgacagaagggcttattaactctttggttcgagaatttatatataatttaagtgacacaataaaagctttttctattcttcaattaactgatttatgtataggattccattcaacccatggtttggaactagtgattggtttcgtctataaagattttggatttgctcaaaatgatcaaattatatctggtcttgtttccacttttccagtcattttagatacaattttaaaatattggatttttcgttatttaaatcgcgtatctccatca

SEQ ID NO: 200032 - DNA, 291 bp, Glycine max
ctgcgagaagacgacagaagggggcacaagtgagtttgttgatcgagataactagaaacagtgtgatgaaaatgaaggtccttgttttcttcgttgctacaattttggtagcatggcaatgccatgcgtacgatatgttccctctccgaatgaacactggctatggtgcccgtactccggatgtgaaatgcgcaagttggaggcttgctgtggaagcacacaacatctttggctttgagaccattcctgaagagtgcgttgaagcaacaaaggaatacatccatggcgaac

SEQ ID NO: 200033 - DNA, 283 bp, Glycine max
acggctgcgagaagacgacagaagggggtcacaactcagaaaggacagctttgaggtttcttccgcattttagagtggtgagaggatggtgggtgttatttcgttggtaacagggatggctggtcctagtgggtttggatcagcttccactgcagaacaggttactgatggaattgatgccagctacctcactgcaattatcacaggaggagcaagtggtataggcttggagacagcaagagtgttggctcttcgaaaggtccatgtgatcattgcagttcgg

SEQ ID NO: 200034 - DNA, 284 bp, Glycine max
gcgagaagacgacagaagggggcacaagtgagtttgttgatcgagataactagaaacagtgtgatgaaaatgaaggtccttgttttcttcgttgctacaattttggtagcatggcaatgccatgcgtacgatatgttccctctccgaatgaacactggctatggtgcccgtactccggaggtgaaatgcgcaagttggaggcttgctgtggaagcacacaacatctttggctttgagaccattcctgaagagtgcgttgaagcaacaaaggaatacatccatgg

SEQ ID NO: 200035 - DNA, 288 bp, Glycine max
tacggctgcgagaagacgacagaaggggacaacaacatagactagtgcggtgcattccctcgtttaccatgctttcctaagagaaagagaaaagtaaaacccctcactactgatagattttcattcctccgaggaaaaaaaaaacatgtcggatgctttgatcaatggattggccggagctggaggagggatcattgctcagctcatcacatacccacttcaaactgtaaacactcgccaacaaaccgagcgtgatccgaagaaagacacgaggagtcaaggggccct

SEQ ID NO: 200036 - DNA, 286 bp, Glycine max
taggctgcgagaagacgacagaagggggcaaaagttagtagtagtgaagaaaatgcaagtccttgttttctttgttgctatagttctagcagcatggcattgccatggctcagaccatgaccatgaccatggccacacctaccaaattttccctctgcgaatgaaaactggccatggtggccactacattccggaggtatcatgccaaagttggaggcttggtgtggaagcacacaacgtcattgactggaaaaccgttcctcaagattgcgagggatatattggg

SEQ ID NO: 200037 - DNA, 283 bp, Glycine max
gagaatctgtggaaggatcctgcaattcaggagacatatgcccgtggtagtgagcttcaaattccagattgtactgattatttcatggacaatttgcaaaggctgtctgacacaaattatgtgccaacaaaggaggatgttttgtatgcaagagtgcgtacctctggcgttgttgagattcagttcagccctgttggggaaagtaagaaaagtggtgaagtctatagactctttgatgttggcggccagagaaatgagaggagaaaatggatccatttgtttg

SEQ ID NO: 200038 - DNA, 284 bp, Glycine max
tacggctgcgagaagacgacagaagggggaagtgcatattatgtggcccctgaagttctccatagatcttatagcacagaggctgatgtgtggagtataggtgtgatagcatatattctattatgtggcagtcgtccattttgggctcgaacagagtctggtatttttagggcagttttgaaagctgatccaagctttgatgaaacaccgtggccatctttatctttagaagctaaagattttgtcaaacgcttattgaataaggatccacggaagcgaatatc

SEQ ID NO: 200039 - DNA, 286 bp, Glycine max
acggctgcgagaagacgacagaagggggggtaaacacgaattttggatcttagtccgcgttctataaatccggcaaggcctgcctgtgagaccatctcaatttcttttctctttgtcgcaaagagaagagatctgcctcctttttatcaaatctatctcttcttcaagaatagttgaaaatggggctgtctttcaccaagttgttcagccgactgtttgccaagaaagagatgcgtatactgatggtgggtctcgatgctgcgggtaagaccaccattctgtacaa

SEQ ID NO: 200040 - DNA, 290 bp, Glycine max
gtccttgactgccacacttctcacattgctgtgaagttttctgaaatcttgaccaagattgacaggcgatctgggcaaggagcttgagaaggagcccaaatttttgaagaatggtgatgctggtatggttaagatggttcctaccaagcccatggtggttgaaactatctctgagtatcctccccttggtcgttttgctgtgagggacatgcgtcagaccgtagctgttggagtcatcaagagtgttgagaagaaagaccccaccggagccaaggtcacaaaggctgccg

SEQ ID NO: 200041 - DNA, 283 bp, Glycine max
aagacgacagaagggggagagagagagagagagagagagagagagatagatggtgtctctgaaacttcagaagcggcttgccgctagcgttcccaagtgtggtaggggcaaagtttggcttgaccctaatgaggtcaatgatatctccatggttaattctcgacaaaacataaggaaattggttaaggatggtttcattatcaggaagccaactaagattcattcccgttcccgtgctcgcagaatgaaggaggccaagaggaagggacgtctctctggttat

SEQ ID NO: 200042 - DNA, 283 bp, Glycine max
acggctgcgagaagacgacagaaggggaataggagaagaagggactagcggcgaactcaaacggcgtcgtatcgactcgttgttcatccatttgagaggcatctggtagcggaagatggataagggtaagatccaagaggtgatcgagaaccaagtcctgacggtggcgcaaccgtcgagttcaagatcgacgatgagatcgccgccctggaacgcctcgatgccgacgacatcgaagccctccgcgagcgccgcctccagcagatgaagaagatggcggaga

SEQ ID NO: 200043 - DNA, 283 bp, Glycine max
acggctgcagaagacgacagaaggggaacagcagcattcactgaaagcactcagtagggtttgcggtttcagagtttgtgacgcacgcatccatggccaccaccaccaacgccgccgcagccccgccgcgccagctctcccagaaggaagccgacatccagatgatgttagccgccgacgtccacctcggcaccaaaaactgcgacttccaaatggaacgttacatcttcaagcgccgcaacgacgggatttacattattaaccttgggaagacatgggagaa

SEQ ID NO: 200044 - DNA, 284 bp, Glycine max
tacggctgcgagaagacgacagaaggggggtggaaaaacactcaatcaacacacatgattgaagtgcaagcaaatgccatggagcagagttggtgggccaatatgcctcacgagcttctcagagaggtcctcctccgaattgaatcgtcggagtattcgtggccgctgcggaggagcgtcgtggcttgtggcggagtgtgccgcacctggaggaggctcatcgtcaaggagattgtcaagccacctcaattctcttccaacataaccttccccatctctctcaa

SEQ ID NO: 200045 - DNA, 235 bp, Glycine max
tacagatgcgacgagacgacagacaggaactcagcaggattcaagctactatgcgttgtcgtctcactgcaaggtgtgcatgcaagagttcatggtcacaacatcggaaatgaagtgtatggagcatggtgaagccacagaccctcaatctgatgtgtaggcttgtgtaccttatctgataaagtgaacatgttggcgactgcgtatggagaaaactttatatcgttatggcctc

SEQ ID NO: 200046 - DNA, 283 bp, Glycine max
tacggctgcgagaagacgacagaagggatagcaggaggtatttctcgtacagcaactgctcctcttgatcgtctgaaggtggtcttacaagttcaaagcgaacctgcttccatcatgccagcagtaacgaagatatggaagcaagatggtctgttaggatttttccgagaacctggtcctctagtacaactaggatgtgggacaatttctggggctgttggagctacttgtgtctatccattgcaggttattcgaacaaggtacaatgctgtcagtattactg

SEQ ID NO: 200047 - DNA, 275 bp, Glycine max
acagataaaggggggcaatattatgatttctggcaaaacactagatctgtgaagtcaacaatacttcatttccaattgaggaatttggtttggtcaacatcaaaacatgatgtatatcttgtttcaaattactccattgttcactggtcttcattaacttccaagagatctgaagtcttgaatgtatcagggcatgtagctccatgtgagaaacatcctggaagcctcttggaaggttatactcagacacaaattagtacactggctgtacgaga

SEQ ID NO: 200048 - DNA, 293 bp, Glycine max
acggctgccagcagacgacagtatgggaacacaacgcaacacaacgcgcactctctcttttctctcataacacgagtaccctatcgttcttcgcggtttcgccgattctcgccatgccgaaagccaaatccgacgccatagccgccgatagccggttgaagcgcaagggcgctggtgctggaatgaagcaatcgacgaaagctgctaaggatcctaacaagccaaagagacctccaagcgctttcttcgttttcatgtccgagttcagagagcagtttaagaaggagcatcct

SEQ ID NO: 200049 - DNA, 283 bp, Glycine max
tacggctgcgagaagacgacagaagggggcatcaattcaaaatatatcatcaattataagcatgggtttgtggaacacaacgaatgcagtgtcttgccgctttcacaagtttggtgatgaccaaaagaatctggtcttccaaggtgatgccacgtcttcttccaggggcatagaactcacattgttagatggtggaggaaaaccagtgggtggcagtgtggggagagtgttatactcttctccagtgcacctttgggaaaactctacagtggtcgcaagcttt

SEQ ID NO: 200050 - DNA, 281 bp, Glycine max
tacggctgcgagaagacgacagaagggagacaaaggaataggagatggcacagttagttatggaatggatgatggtgatgacatttacatgcgctcttggactggaaccattattggtccctataatactgtacatgaaggaagaatttatcaattgaagctgttttgtgataaagactaccctgaaaagcccccgagcgtccggtttcattcacggatcaatatgacttgtgttaatcatgaaactggagtggttgaatcaaagaaatttggtcttcttg

SEQ ID NO: 200051 - DNA, 283 bp, Glycine max
acggctgcagaagacgacagaaggggactgagaaaatcagataacctctgtcaacacctgtctgtggcgcgcgagagagaaatcggagatgtcatcaaaccctaacgatcctcgtcagccctcggcggcgagaccctacgtggcgccgcagatttcgccgcaggaccttccgatcgactactccggcttcatcgccgtcatatttggcgtcgccggcgtcatgttcaggtacaaactgagctcttggctggcgctcatattctgcgcgcaatccgtcgcgaac

SEQ ID NO: 200052 - DNA, 283 bp, Glycine max
gagagaagacgacagaagggcatggattctagatgagtattccgaatttcatggccactctcctgcagtagtgactgggaaacctgtagaactcggtggatctctaggcagagatgcagctactggacgaggagtcctctttgcaacggaggctttgcttaaggagcatgggatgagtgtatccggacagcggtttatcatacagggatttggaaatgtggggtcttgggctgcccaattgatcagtgagaaaggtggaaaagttgttgcagtgagtgacata

SEQ ID NO: 200053 - DNA, 283 bp, Glycine max
tacggctgcgagaagacgacagaagggggcacaagtttgttgagatagctagaagcaataagatgacaatgaaagtgcttgttttgtttgttgctacagttttggtagcatatgaatgccatggctcagactaccagaagttccctctccaaatgaaaactgggtttggtgggcaatacagcaatgaggtggcatgtgccagttggaggcttggcgtggaagcaaacaacgtagtcaagtggcaaactgttcctgcagcttgcggagagtacatagctgacta

SEQ ID NO: 200054 - DNA, 287 bp, Glycine max
  unsure (1)..(287): unsure at all n locations
acggctgcggaagacgacagaagggagggtcatgacttctagtaatgaaggattttcacaaacaaagtgtagtcactcagactcgtctattnttccatcttgattaaggtcggcatccaagaaagtctacacatacatacacaatatcaagcttaagcttttttatctgtgatataattataagagcttataatgtatgattttaacaaacataaatcaccttgttaataattgtttctatcatttcatatgacaacttaatttcagcttcacaaagaagtgcattt

SEQ ID NO: 200055 - DNA, 289 bp, Glycine max
tacggctgcgagaagacgacagaagggaagccagctggattcaaacaagaaagcaatgtcgattcagtgcaaggtgtgcatgcaaacatttatgtgcaccacatcggaagtgaagtgtagggagcatgctgaagccaaacaccctaaatctgatgtttatgcttgttttcctcatctgaaaaagtgaacatattggagactgcaaatggagaaaactttatatcattatggcctcttccttaaaacctattgacagagatcttccccattttctatctatataaaaatg

SEQ ID NO: 200056 - DNA, 279 bp, Glycine max
tctcgagccgctcgagccgctcgagtagaagacgacagaaggggggatcagcagggagaattaggtttttagggcttacaccgagcagccacacctcccgcagcagccatggttctcaaaactgaactatgccgattcagtggtgccaagatctacccaggaaagggcatcatatttgttcgtggtgattctcaggttttcctgtttgcaaactcaaaatgtaagaggtatttccacaatcgcctgaagccttcaaagctcacctggactgcaatgtac

SEQ ID NO: 200057 - DNA, 280 bp, Glycine max
tacggctgcgagaagacgacagaaggggataagaaagaagatcaaaagaaaaaagagaaacaaatggcagcactgggtggctttaccgacatcaccggagcacagaacagcatcgatatcgaaaatctcgctcgctttgctgttgatgaacataacaaaaaagagaatgcagttctggagtttgtgagggtgattagtgcaaagaaacaagtggtttctggcaccttgtactatatcactttggaggcaaatgatggtgtgacgaaaaaggtttatgaaa

SEQ ID NO: 200058 - DNA, 280 bp, Glycine max
tacggctgcgagaagacgacagaagggggcatcaattcaaaatatatcatcaattataagcatgggtttgtggaacacaacgaatgcagtgtcttgccgctttcacaagtttggtgatgaccaaaagaatctggtcttccaaggtgatgccacgtcttcttccaggggcatagaactcacaaagttagacggtggaggaaaaccagtgggtggcagtgtgcggagagtgttatactcttctccagtgcacctttgggaaagctctacagtggtcgcaagc

SEQ ID NO: 200059 - DNA, 280 bp, Glycine max
gctgcgagaagacgacagaaggggaacacgcggcttccgccggacgtgaaccgcgtgctgtacgttcggaaccttcccttcaacatcaccagcgaggagatgtacgacatctttggcaaatacggcgccattcgccagatccgcatcggcaccaacaaggacactcgcggaaccgctttcgtcgtctacgaggacatctacgacgccaataccgccgtcgaccacctctccggcttcaacgtcgccaaccgctacctcatcgttctctagtatcaacaag

SEQ ID NO: 200060 - DNA, 282 bp, Glycine max
tacggctgcgagaagacgacagaagagaacaagaagagcgttgagacctacaagatctacatcttcaaggtgttgaagcaagtgcaccccgacatcgggatctccagcaaggctatggggatcatgaacagtttcataaacgacatcttcgagaagctcgcccaggagtcatcgcgtctcgctaggtacaacaagaagcccaccattacttccagggagatccaaacggcggtgcgtttggtcctccctggggagttggccaagcatgccgtttctgaaggc

SEQ ID NO: 200061 - DNA, 283 bp, Glycine max
tacggctgcgagaagacgacagaagggggatccaatcaagaatacaataacatagcatagagtgagaagtgagaagagataaatggcaatctccatacccagtagacaacttttcatagatggagagtggaaagtccctcttctcaacaatcggtttccgatcatcaaccccgctactgaagacatcatagggcatattccagccgctactaaggaagatgttgaccttgcggtggatgctgctaaaagagccttttcccataacaaaggcaaagattggtct

SEQ ID NO: 200062 - DNA, 290 bp, Glycine max
acggctgctagaagacgacagaagggggggagcagaggacaagatgggtactgtgagttatagcaatctggaagaacgccacgatagcatccttggtccctctaccctccatcctattctacctctcattccaatcggccattagtactccttcttcttggtcttctctgtggacatggtgctatcaccaccctctgctattggccaatgtccttttcttcttcaatgtcaatctcctcttctggctcatcggcctaatccaatccagccactggatgattgacccgtat

SEQ ID NO: 200063 - DNA, 278 bp, Glycine max
gggatcgaagcaaaaaatgaaaacccaaagtgcttctctcctctgtctttttctctctcttgctatccttttggctagtggcactgctgcaagtgcaactccaagaagcgcagtgccaagccacatgtttcaacattcaacagaagcctttttccttccacttttctctttggaattggttcttctgcttaccaggcagaaggagcagcaagtgtagattggagaggaccaagcatatgggacacctacactagacagcatactgaaaagatttggga

SEQ ID NO: 200064 - DNA, 275 bp, Glycine max
tacggctgcgagaagacgacagaaggggggaaaagttagaagtagtgaagaaaatgaaagtcattgttttcttcgttgctataataattttaggtgcagaatggcaatgcaatgggtcagagatgagcatgagcatggccacagctaccaaattttccctttgcgaatgaaaaccggccccggtggccactacattccagaggtatcgtgcaaaagttggaggcttggtgtggaagcacatatcgtcattgactggagaaccattcctcaagatt

SEQ ID NO: 200065 - DNA, 262 bp, Glycine max
gtatccttgtttgtttgctcacaaccttatttgcaactggcttctttgagatcaaggctgtaaaggagattgagcctgcattgaagaaacaactcatcatttccactgcctgatgactattgggattgcaattgttagttggattgcactcccaacttccttcactatcttcaattttggagttcagaaagatgtcaagaattggcagctattcttgtgtgttgctgttggtctttgggcaggtcttattattggatttgta

SEQ ID NO: 200066 - DNA, 278 bp, Glycine max
tacggctgcgagaagacgacagaagggggggaacatcatcacattacattagattggtggtaatggcagcgtcactacaagcagcagctactttcatgcaacccaccaagttgagcaggagcacactttgcagcaaaagtctactcagtccatttccaaggcttttggtttggaacctgttggagctaaaaaggtcacatgctcccttcaggctgatcttaaggacttggctcacaagtgtgttgatgctaccaaaattgcaggattcgcccttgcca

SEQ ID NO: 200067 - DNA, 276 bp, Glycine max
acggctgcgagaagacgacagaaggggaggaaggatgtgatgactaagaacgtctccatttacaagtcccaggcttctgcccttgaaaagcatgctgctgccaactgcaaggttcttgttgtgctaacccagcaaacaccaatgcattgatcttgaaagaatttgctccatctattcccgagaaaaacatttcttgtttgactagattggaccacaatagggcactgggccaaatttctgagagactgaacattcaggtttctgatgtaaagaatg

SEQ ID NO: 200068 - DNA, 272 bp, Glycine max
gctgcgagaagacgacagaagggggggcatatgctgtctaacggttcttatgtatggagtaagaagtattcattcaaggcatccccatatcctggacagaactctttgcaacgtgttatctatttggtgacatgggaaaggctgagcgtgatggttcaaatgaatatgctgattatcaaccgggttctctaaacaccacagaccaactcgtcaaggatttagaaaattatgacattgttttccacataggagacatgccttatgcaaatgga

SEQ ID NO: 200069 - DNA, 275 bp, Glycine max
tacggctgcgagaagacgacagaagggggaactaataagttgaataatcaaaggcaaaaggaagaagcaaaaccaaacgcagtgcgtgtgttcttctctgaagtctgaaccattcgttcctctcccataacatgccctctgctcaggatccattttacgttgtcaaggccgagattcaagattctattgataagctgcaatctacttttcaccaatgggaaagcaagtctggagctgcggaacaaggacatcttacaaaggaggttcttgctgga

SEQ ID NO: 200070 - DNA, 277 bp, Glycine max
tacggctgcgagaagacgacagaagggaagaagatgtcgtacctgttgcctcacttgcactctgggtgggcggttgatcaagcaatcctggcagaagaggagcgtctggtcgtgatccgtttcggcacgactgggacgaaacctgcatgcagatggacgaggtgttggcgtcggtggcggagacgataaaaaactttggggtcaatacctggataacataacggggtgccggatttcaacaccatgtacgagctctacgacccttccacggtgatgt

SEQ ID NO: 200071 - DNA, 246 bp, Glycine max
acggctgcgagaagacgacagaagggggcacacgtttgttgagatagctagaagcaataagatgaaaatgaaagtgcttgttttgtttgttgctacagttttggtagcatatgaatgccatggtcagactaccagaagttccctctccaaatgaaaactgggtttggtgggcaatacagcaatgaggtggcatgtgccagttggaggcttggcgtggaagcaaacaacgtagtcaagtggcaaact

SEQ ID NO: 200072 - DNA, 281 bp, Glycine max
agaagacgacagaaggggataccaccctcaaataatcaaacttatcgtatgtatgacttctatcttatttcaacacgaagtgcagactaagcagcgaggtttttcataacaaaggagaatgatgctttttcagttaaggttggggagggaagggaaggtaaaaatggcaacctttctgttggtcctgtgtaccgtaacctcctctcagagaatgaatttcctccaatggatcccgatttcagtaccacttgggatattttctgtgtgtctgtcaaaaatca

SEQ ID NO: 200073 - DNA, 280 bp, Glycine max
tacacgacagaaggggggtgtctgatctctttatggaaagagttcagagcaatgggcaatggtctttgttttgccccaatgaagcgccaggtttggctgattgctggggtgaagaatttggaacttgtacactcaatatgaaagagaaggcaaagcaaagaaggttgttcaggcacaaaatctctggtttgaaattttgaagtcccagatagaaactggaactccttacatgctttttaaggacacttgcaataaaaaaagcaaccaacagaatttgggc

SEQ ID NO: 200074 - DNA, 275 bp, Glycine max
acggctgcgagaagacgacagaagggggacgtgggtttttctagggtttggaggctatgccgaaaacgggttaaataagctcggaaaatgattctcacaaagcagtaccgatgcatacatcagctagttgtcaatgtactaaagggcatttaagtgaagatatgatattcttagtatttcataatttgaattggaatcccaagctaattgcaactctatcatgtgtgtgcaaatggtttgatgatcttgccaagcgagttctatggaaagagttt

SEQ ID NO: 200075 - DNA, 273 bp, Glycine max
ctgcgagaagacgacagaagggggagcaagagtgaagagcgaagagaatggctcccaagggtttaatctttttggctgtgttatgcttctcagcactgtcactgagtcgttgtcttgcgaggataatggacttgttatgaacttctacaaggaatcatgccctcaggctgaagacatcatcaaagaacaagtcaagcttctctacaagcgccacaagaacactgctttctcctggctcagaaacatcttccatgactgtgctgttcagagttg

SEQ ID NO: 200076 - DNA, 272 bp, Glycine max
acggctgcgagaagacgacagaagggggcacaagtttgttgagatagctagaagcaataagatgaaaatgaaagtgcttgttttgtttgttgctacagttttggtagcatatgaatgcatggctcagactaccagaagttccctctctaaatgaaaactgggtttggtgggcaatacagcaatgaggtggcatgtgccagttggaggcttggcgtggaagcaaacaacgtagtcaagtggcaaactgttcctgcagcttgcggagagtacat

SEQ ID NO: 200077 - DNA, 281 bp, Glycine max
acggctgcgagaagacgagagatgggggacaataataacacacaaaatcaattccacacctacatatccatcacaccatggccaccaccaccatgttctcatcaccatcagccattttatctcaaccactacaaccaccacaccaaaaccatcatcttcagcaccaccctccccatcatgcaaacctcttctacgcttcaaacaacccttaacaaccttaactgccgccgccgccatcgccaccattttaaccaccgcaccagcaccctccttagcacaag

SEQ ID NO: 200078 - DNA, 259 bp, Glycine max
tacggctgcgagaagacgacagaaggggatttaaggaagatgggtaaggaaaaggttcacatcagtattgtggtcattggccatgtcgactctgggaaatccactaccactggtcacctatttacaagcttggaggcattgacaagcgtgttattgagaggtttgagaaggaagctgctgagatgaacaagaggtctttcaagtatgcctgggtgctggacaaacttaaggctgagcgtgaaagaggaatcaccattga

SEQ ID NO: 200079 - DNA, 273 bp, Glycine max
acggctgcgagaagacgacagaaggggggagaaggagggtggcgcgagcgaggaaactttgtctttggagcttcctgctccacctggttggaagaagcagttcattccaaagaaagctgtaccccaaagaaaaacgagattgtgttcactgcaccaacaggagaggagatcaataacaggaagcagctggaaaaatatttgaaagcacaccctggaggcccagctgtatcagaatttgactggggcactggtgagaccccaagaagatctaca

SEQ ID NO: 200080 - DNA, 272 bp, Glycine max
cggctgcgagaagacgacagaagggggtaccagaaaatatagcaagaaaggctatttcaatagcatcatccaaaatgcctatacgaactcaattcattatttcagggtaataaattagaccataggaaagaggtctttaagatgaaagcacaaaaatgcaaatgtaggttcctttttttgaacacaaaatatttttacttccattcgttgactgatagaatagtaaaatgatatgattcaacctcaatctcatctgaatgtagctgataata

SEQ ID NO: 200081 - DNA, 270 bp, Glycine max
acggctgcgagaagacgacagaagggggggtaaacacgaattttggatcttagtccgcgttctataaatccggcaaggcctgcctgtgagaccatctcaatttcttttctctttgtccaaagagaagagatctgcctcctttttatcaaatctatctcttcttcaagaatagttgaaaatggggctgtctttcaccaagttgttcagccgactgtttgccaagaaagagatgcgtatactgatggtgggtctcgatgctgcgggtaagac

SEQ ID NO: 200082 - DNA, 256 bp, Glycine max
agaagacgacagaagggggcacaagtgagtttgttgatcgagataactagaaacagtgtgatgaaaatgaaggtccttgttttcttcgttgctacaattttggtagcatgacaatgccatgcgtacgatatgttccctctccgaatgaacactggctgtggtgcccgtactccggaggtgatatgcgcaagttggaggcttgctgtggaagcacacaacatctttggctttgagaccattcctgaagagtgcgttg

SEQ ID NO: 200083 - DNA, 277 bp, Glycine max
acggctgcgagaagacgacagaaggggagacagaatacaattgagaatggggatccgattcgtactgatggtgaacaagcaaggccaaactcgtcttgctcaatactacgaatatctcacctcgaagagcgacgtgccctcgaaggcgaaatcgttcgcaaatgcctcgcccgcaacgaacagcagtgttccttcgttgagcatcgcaactacaaaattgtatatcgtcgctacgcctctttgtttttcctcgttggagttgacgatgatgagaatg

SEQ ID NO: 200084 - DNA, 275 bp, Glycine max
tacggctgcgagaagacgacagaagggatagcaggaggtatttctcgtacagcaactgctcctcttgatcgtctgaaggtggtcttacaagttcaaagcgaacctgcttccatcatgcagcagtaacgaagatatggaagcaagatggtctgttaggatttttccgagaacctggtcctctagtacaactaggatgtgggacaatttctggggctgttggtgctacttgtgtctatccattgcaggttattcgaacaaggtacaatgctgtcagt

SEQ ID NO: 200085 - DNA, 268 bp, Glycine max
cggctcgaggctgcgagaagacgacagaagggggagctagttaggtgttaaatatttgattgcaatattaatatgaaggcacagtgtgagtagtgagaaggggcattagtaaagagatgggtagacgaccctgctgccccaaagagatcaacaaaggtgcttggtctcgagaagaagatgaaaccctctccaaatatgtttccatccatggagaaggaaaatggcagaaggttgcccaaaatgcagggttaaagcgatgtggaaagag

SEQ ID NO: 200086 - DNA, 268 bp, Glycine max
agaagacgacagaagggggaagtactgtaagatattgggcatgtatcaacttctcacgaagtgtacaggaaagtgcagctcgtggattttaccaacagttagttcagatgtgccaatctcaggcatggaattcagtcaggaccctgcgattcctatacattcggctagaccagatcaggtaaagaaggctttgaagtatgtacattctgctgttatagacaaacttgatgggaaagagctagagttgctgattgcccttcttccagac

SEQ ID NO: 200087 - DNA, 253 bp, Glycine max
  unsure (1)..(253): unsure at all n locations
gacacaccgtttgttctattcttaactcaacttctgctacccactctcttcttccaagtccaaccacgcttttctctacagtcatgggcaaggtcaagatggaatcaacggatttggaagaattggccgttggttgccggagtcgctctgcaaagagacgatgtggagctcgttgccgttaacgaccctttcattaccaccgattacatgacatacatgtttaaatacgacagtgttcacggacactgnnagc

SEQ ID NO: 200088 - DNA, 272 bp, Glycine max
acggctgcgagaagacgagagaggggggacaataataacacacaaaatcaattccacacctacatatccagcacaccatggccaccaccaccatgttctcatcaccatcagccatttatcctcaaccactacaaccaccacaccagaaccatcatcttcagcaccaccctccccatcatgcaaacctcttctacccttcaaacaacccttaacaaccttaactgccgccgccgccatcgccaccattttaaccaccgcaccagcaccctcct

SEQ ID NO: 200089 - DNA, 271 bp, Glycine max
acggctgcgagaagacgacagaagggggtcacacagctattcctcttaagcttgctactgagtttccacactgcataccttaggtcttccgaattcgaagttaatttgcaagatggtaaggaaaaggctcagatcaacattgtggtggttggtcatgtggaccctgaggaggcaaccaccattaacgagctgaagaagcctgttgtggagaaagaagctccagggcatgccatatgagggcatgcacgtacggcctcggtagggaaccaga

SEQ ID NO: 200090 - DNA, 267 bp, Glycine max
cggctgcgagaagacgacagaaggggattccagagatacagagatcaagtatggtctcctgcgttatccagttaaaggccttggggattgataatatcttgggctttgactggcagcgtctccatctactgaagcaatgatccgagcattagaaattctctactcacttagggttttggatgatgatgctaagctgacttcaccaactggatttcaagttgcagagattccacttgatccgatggtctcaaaaatgataattgcttc

SEQ ID NO: 200091 - DNA, 264 bp, Glycine max
tacggctgcgagaagacgacagaaggggactctgctcttgctttagccatcactaacactcagtctctgaattggggctgagggtttcgagtaacgtttatttttcacgagtttagatatcatgggtaaagagaaggttcacattaacattgtggtcattggccatgttgactctgggaagtcaaccaccactggccacttgatttacaagcttggaggtattgacaagcgtgttattgagaggtttgagaaagaagctgctga

SEQ ID NO: 200092 - DNA, 275 bp, Glycine max
agaagacgacagaagggggcatatccaaaggaacaaaaatattattaagatgatcaacattattggagcacttgttctactctttgcatttctcttcctcagttgtgtgtatgcacaagacacaacaacccttgtgcctgcaatcataacttttggtgattctgctgtggatgtagggaccaatgactatcttcccacccttttcaaggctgattaccctccttatgggagggactttgttaaccaccaacctactgggaggttttgcaatggca

SEQ ID NO: 200093 - DNA, 277 bp, Glycine max
  unsure (1)..(277): unsure at all n locations
acgacagaaggggaatcaagaatacaataacatagcatagagtgagaagtgagaagagaaaaatggcaatctccatacccagtagacaacttttcatagatggagagtggaaagtccctcttctcaacaatcggtttccgatcatcaaccccgctactgaagacatcatagggcatattccagccgctactaaggaagnatgtgaccttgcggtggatgctgctaaaagagcttttcccattaacaaggcaaagattggtcttcagctcctggctct

SEQ ID NO: 200094 - DNA, 255 bp, Glycine max
  unsure (1)..(255): unsure at all n locations
gagattaaaagcaagggtagaantattgcaacgttctcaaaggaacctactcggggaagatcttgcccaaatgaatacaaatgagctagagcagcttgagaatcaactggaggcagcactgaggaatattncgtcaacaaagactcaattcatgcttgaccagctttctgatcttcaccaccgggaaacattgcttattgaaactaataacgtgttaaggagtaagttggaagaaactgatcactcacaagttca

SEQ ID NO: 200095 - DNA, 274 bp, Glycine max
tacggctgcgagaagacgacagaaggggaggtacttgagaagagaaaatggtgtcgtcgcaggttgtgaatacgtacccgttgtcgagctacacgttcggcacgaaggagcccaagatggagaaggatacctccgtcgcggatcgtctcgctcgcatgaaagtcaactatatgaaagaagggattaaggccacatgtggaagcatttttactggtacaagagcacgatcatcctcatatacttcttctgcaaattggaacacattctgcaaact

SEQ ID NO: 200096 - DNA, 255 bp, Glycine max
ctcagagtactgttattgaaaggcaaaggacaatagagtatacctgaagccctagagccctatccccttcaacacttttgaagtcattgacaatagcaattcccaactgcaatgtgatttaacaacaacattaataaccatttttatttgacatattatcatattcatatccaacaaaatgtcatgaagaatatattacatactccagctatgctgtataggagtgtgagaacaattatatctggtgtaagagtt

SEQ ID NO: 200097 - DNA, 275 bp, Glycine max
tctcggccgaatcggctcgagtacggctgcgagaagacgacagacgggggaacctttgcattctattcattcaagattcagcaagtgcgttttggaagcagagaccgaaatacttcgagatggcccgtacaaagcaaactgctcgtaagtcaactggaggaaaagctcccaggaagcagcttgcaaccaaggctgcacgtaagtccgcaccaacaactggtggtgtgaagaagctccatcgttatcgccctggaactgttgctcctcgtgagatt

SEQ ID NO: 200098 - DNA, 209 bp, Glycine max
actgcgaaaagacggcagaacgggaaaggaccaagggaccgtgtaagaactgtttgaaggatgctaacatatctatcaaaggagttgatgagggtccacctgttggaggcatgactcgtgtgcctaaagtccaggaagtagtttcagcgatctttggaaatagtcctagccaaggagtaaatcctgatgaagcagttgccatgggagca

SEQ ID NO: 200099 - DNA, 284 bp, Glycine max
gctggcggaggaagacgacagaaggggatagttacatacgtaaaaaaacttgcaattgttttataaggaatcagattagttacacttccattcccttccagcagctgggtttgagaagacaattgattatataggttttgttagtaaacaaaagaaaaggaaacatgaaggacgcagatgtgtcaaggcagatccagcagatgatcaggttcatccgtcaagaggctgaagagaaagctctttggtttactgttgctgctgaagaggaattcaatattgagaaa

SEQ ID NO: 200100 - DNA, 279 bp, Glycine max
ttgcgagaagacgacagaagggggaagcaaaaaatgaaaacccaaagtgcttctctcctctgtctttttctctctcttgctatccttttggctagtggcactgctgcaagtgcaactccaagaagcgcagtgccaagccaccatgtttcaacattcaacagaagcctttttccttccacttttctctttggaattggttcttctgcttaccaggcagaaggagcagcaagtgtagatgggagaggaccaagcatatgggacacctacactagacagcat

SEQ ID NO: 200101 - DNA, 280 bp, Glycine max
acgacagaagggattgtgaaggaagtctcttcctacttgaagaaagtaggatacaaccctgacaagattccttttgttcctatctctggttttgagggagacaacatgattgagaggtccacaaaccttgactggtacaagggtccaactctgcttgatgcacttgaccagattagtgagcccaagaggccctctgacaagcccctcaggcttccccttcaggatgtgtacaagattggaattattggaactgtgccagtgggacgtgttgagaccggtg

SEQ ID NO: 200102 - DNA, 276 bp, Glycine max
tctcgagccgaatcggctcgagacggctgcgagaagacgacagataccgggcacaagtgagtatgttgatcgagataactagaaacagtgtgatgaaaatgaaggtccttgttttcttcgttgctacaattttggtagcatggcaatgccatgcgtacgatatgttccctctccgaatgaacactggctatggtgcccgtactccggaggtgaaatgcgcaagttggaggcttgctgtggaagcacacaacatctttggctttgagaccattcctg

SEQ ID NO: 200103 - DNA, 278 bp, Glycine max
tctcgagccgaatcggtatcacggctcgagcggctcgagacggctgcgagaagacgacagaagggggaaacgaagaagccactaactacgcacgcattcgtgagaaaactcaatattcgtcgctcatggcactctcttctcgtctcttttccaaatccaaattgatctatggcagtcaaatacttctacaaaaggagcatgctattccagttcgtcactttgttaaagagtctgcccctcctgcccttaagggagacgagatgctgaagaacattttt

SEQ ID NO: 200104 - DNA, 280 bp, Glycine max
ggctgcgagaagacgacagaagggggcacaagtttgttgagatagctagaagcaataagatgaaaatgaaagtgcttgttttgtttgttgctacagttttggtagcatatgaatgccatggctcagactaccagaagttccctctccaaatgaaaactgggtttggtgggcaatacagcaatgaggtggcatgtgccggttggaggcttggcgtggaagcaaacaacgtagtcaagtggcaaagaattcctgcagcttgcggagagtacatagctgacta

SEQ ID NO: 200105 - DNA, 277 bp, Glycine max
cgctgcgagaagacgacagaagggggcagcgcttgatttgaggccaggcaagccccactcaaccaccacacctctcctcgttcacgctactcctttctgctcttcttctacctttcaagttttaaaagtataaagatggcagagacattcctatttacctcagagtcggtgaacgagggacaccctgacaagctctgcgaccacatctccgatgctgtcctcgacgcttgcctcgagcaggacccagacagcatagttgcccgcgaaacatgcacca

SEQ ID NO: 200106 - DNA, 257 bp, Glycine max
  unsure (1)..(257): unsure at all n locations
ggccgctttgtgctgctgttgcaaaacttagggttgggcctttttttgaggttttcagcgcttctttctcacaatggttcttcagaatgatattgatttgctgaatcctccagctgagntnnagaagagaaagcacaaactcaagcgtcttgttcagtcaccaaactctttcttcatggatgttaagtgccagggatgcttcaacataacaatgtgtttagccactctcaaactgttgtggtgtgcggaaactgcca

SEQ ID NO: 200107 - DNA, 271 bp, Glycine max
tacggctgcgagaagacgacagaagggggcacaagtgggtttgttgatcgagataactagaaacagtgtgatgaaaatgaaggtccttgttttcttcgttgctacaattttggtagcatggcaatgccatgcgtacgatatgttccctctccgaatgaacactggctatggtgcccgtactccggaggtgaaatgcgcaagttggaggcttgctgtggaagcacacaacatctttggctttgagaccattcctgaagagtgcgttgaagca

SEQ ID NO: 200108 - DNA, 275 bp, Glycine max; identical to SEQ ID NO: 197192

SEQ ID NO: 200109 - DNA, 276 bp, Glycine max
tatcgagccgaatcggctcgagtgcgagaagacgacagaagggggaacaagcaaaattaagcacaaaagcccaaccctctctactcgctgttggtctctcctatttggcattcgcagatcgattacgaagtaatttcactgaatcttattgaagatgtttctcacaaggactgagtatgaccgaggagtcaacaccttttctcctgaaggccgtttatttcaggttgaatatgcaatcgaagccatcaagctgggatcaactgcaattgggttgaa

SEQ ID NO: 200110 - DNA, 276 bp, Glycine max
  unsure (1)..(276): unsure at all n locations
tacggctgcgagaagacgacagaaggggacggcaacagaagaataatcgagacacagatcatagtgatcattttttaatttctcagatttatccgacgtcgctgcagatccaccaaccgttatggctgccttcagcggtgatgaaacggcaccgtttttcggcttccttggcgccgcagctgccctcgtcttctcctgtatgggagctgcctatggcacagcgaagagtggcgtgggcgtgganttaaaaggtgtaatgagacctgagctggtgat

SEQ ID NO: 200111 - DNA, 276 bp, Glycine max
acgagaagacgacagaaggggggtggggtgtgcagaagagcgtcgcagttgtaaccctaatcagaagaagcgcggcttcaagcgagtgacagccaccagccatgggtcgtatgcacagccgcggtaagggtatatcctcttctgctttgccctacaaaaggacacctcctagctggctcaagatctcttcgcaagatgtcgaagaaaatatctgcaagtttgcgaagaaaggtttgaccccgtctcagattggtgccattctcagagattctcacg

SEQ ID NO: 200112 - DNA, 280 bp, Glycine max
acggctgcgagaagacgacagaaggggacaccaacgccaaaacaaacccactaagatggcttcctttgtatccttcctagtgctgcttcttgcagcccttatcctcatgcctcaggggcttgctacttactacaaaccaattaataagccaccagtgtacaagcctccagtgtacaagccaccagtgtacaaaccaccggtttataagccaaaaccaccggtttacaagccgaaaccaccggtttacaagccaccatataagaagccaccatacaagaaa

SEQ ID NO: 200113 - DNA, 276 bp, Glycine max
acggctgcgagaagacgacagaagggggaagccgaggctctatcttcccaaaatcatataattctctttcatctgaattttccccttcaaatctcttcctttgaagttttcgtagttctctgcatcatggagatggaacgcgtcttcgagtttcctcacactcacatggatcggcgcccgagaaagagagcgagattgggctgggacatccctgaggtccccaaggctcaggtaggattgttttgtggacaagatgttgggactatttcaagcttt

SEQ ID NO: 200114 - DNA, 270 bp, Glycine max
gctcttcagttttcacgtcttacattgttttgagtctagtgatggcactagcaattagcggtttcaatttcaaaggggcagaggcagcacgtgccttctttgtgtttggtgattctctcgttgacaatggcaacaacaactacttagccaccacagctagagcagacgctccaccttatggcattgattatccaactcgcagacccactggccgtttctctaatggcctcaatattcctgattttatcagtcaagaacttgggtcagagt

SEQ ID NO: 200115 - DNA, 271 bp, Glycine max
acggctgcgagaagacgacagaagggggcatatccaaaggaacaaaaatattattaagatgatcaacattattggagcacttgttctactctttgcatttctcttcctcagttgtgtgtatgcacaagacacaacaacccttgtgcctgcaatcataacttttggtgattctgctgtggatgtagggaacaatgactatcttcccacccttttcaaggctgattaccctccttatgggagggactttgttaaccaccaacctactgggagg

SEQ ID NO: 200116 - DNA, 271 bp, Glycine max
cggctcgagctcgagcgaatcggctcgagtacggtgcgagaagacgacagaagagggcatatcatgaggacacaaaaatattattaagatgatcaacattattggagcacttgttctactctttgcatttctcttcctcagttgtgtgtatgcacaagacacaacaacccttgtgcctgcaatcataacttttggtgattctgctgtggatgtagggaacaatgactatcttcccacccttttcaaggctgattaccctccttatgggagg

SEQ ID NO: 200117 - DNA, 270 bp, Glycine max
tacggctgcgagaagacgacagaagggtaatttgggaattattgctcccatcgccattggtttcattgtcggcgctaacattttgttgggtggggccttctctggagcggccatgaaccccgctgtgacatttgggcctgctgtcgtgagctggacctggaccaaccactggatctactgggccgggcctctcatcggtggtggaatcgctggccttgtctacgaggttgtctttatcagccataactacgagcagcttcccaccactga

SEQ ID NO: 200118 - DNA, 273 bp, Glycine max
tacggctgcgagaagacgacagaaggggaaagacctgaaatcagggcaaaagctttctaggtatgctgccgaggcaaccgcggaagttgttggccgaaaggctaggggcttgggattgaaatctgttgtcatgaaagtgaatggatttacacattttaggagaaaaaggaatgcaataatgagctggaaggagggctttactgctggttctagaggggatagaaatccaattgtatacattgaagataccactagaaaaccccataatggctg

SEQ ID NO: 200119 - DNA, 280 bp, Glycine max
gcgagaagacgacagaagggggcagttcaaagcgaaggaagattcgaaacgaagaaagaaagcgttgtgaagaatggcggaagagggacaagtgatcggtgtccacagcgtagaggagtggaaggaacatctcaagaagggagaagagtccaagaaattgattgtggtggattttactgcttcttggtgcggtccatgccgtttcattgccccaattcttgcagagtttgctaaaaagttgccgaatgtcaccttcctcaaggtggatgtggatgaattg

SEQ ID NO: 200120 - DNA, 278 bp, Glycine max
tacgcgagaagacgacagaaggggaagagagttggaaaacaaagtatagagtgaaagaatgggtgagataagcaagattttgatcataggaggcaccggctacatcggcaaacatatagtggaagcaagcgcaaaggctggaaatcccacttttgctttggtgagggaatccacactctctgacccctccaaggcacaactcatccacaattttgaggctttgggcgttaatttggtccgcggggatctgtacgatcatgagaagttggtgaaagcta

SEQ ID NO: 200121 - DNA, 245 bp, Glycine max
gactcgcagttgtattgttgaacaagggtttctctgtctgcttcttcactttctctcgtttcaatcgaaaccaaaacaaaaacatgggcagaaaattcttcgtcggtggcaactggaaatgcaatgggaccactgaggaggtaaagaagattgttactactttgaatgaggctaaagtccctggagaagatgtcgtagaagttgttgtgagccctccttttgtgttccttcctgttgtaaaaagt

SEQ ID NO: 200122 - DNA, 272 bp, Glycine max
gcgagaagacgacagaagggggcagttcaaagcgaaggaagattcgaaacgaagaaagaaagcgttgtgaagaatggcggaagagggacaagtgatcggtgtccacagcgtagaggagtggaaggaacatctcaagaagggagaagagtccaagaaattgattgtggtggattttactgcttcttggtgcggtccatgccgtttcattgccccaattcttgcagagtttgctaaaaagttgccgaatgtcaccttcctcaaggtggatgtgg

SEQ ID NO: 200123 - DNA, 269 bp, Glycine max
tacggctgcgagaagacgacagaagggggagcaagagtgaagagcgaagagaatggctcccaagggtttaatctttttggctgtgttatgcttctcagcactgtcactgagtcgttgtcttgcggaggataatggacttgttatgaacttctacaaggaatcatgccctcaggctgaagacatcatcaaagaacaagtcaagcttctctacaagcgccacaagaacactgctttctcctggctcagaaacatcttccatgactgtgctg

SEQ ID NO: 200124 - DNA, 271 bp, Glycine max
acggctgcgagaagacgacagaagggggttctagtgtgtgattgtttgttgttgtaactcgttcttcttcttttgttgttctgtgtttgtgtttgtattttctctcacctgaaaatgtcttgctgcggtggtaactgtggttgcggaagctcctgcaagtgcggcaacggctgcggaggctgcaagatgtacccagacttgagctacactgagtcaaccaccaccgagaccttggtcatgggagtggcacctgttaaggctcaatttgagg

SEQ ID NO: 200125 - DNA, 268 bp, Glycine max
cggctgcgagaagacgacagaagggggaagcatcgagaacatcgcagcgatggcgagagtgggtagaatgaagttgggttcacaaggcatggaggtgtctttgcagggacttgggtgcatgggcatgtctgcgttctatggtcctcccaagcctgaccccgatatgattgctctcatccaccacgctgttcaaactggtgtcacttttcttgacacttctgacgtctatggtccttaaaacaacgaactccttctaggaaaggctctg

SEQ ID NO: 200126 - DNA, 273 bp, Glycine max
tacggctgcgagaagacgacaaagggaactgaggttaagtctgttgagatgcaccatgaggctctcacagaggctcttccaggtgacaatgttggatttaatgtgaagaatgttgcagtcaaggatctcaagcgtggttttgttgcatccaactccaaggtcgaccctgccaaggaagctgccaacttcacatcccaagtcattatcatgaaccatcctggccagattggtaatggatacgcaccagtccttgactgccacacttctcacatt

SEQ ID NO: 200127 - DNA, 269 bp, Glycine max
cgacagaagggggacaagccaatcctttgtgtaggtgctcaaccctagtaagccgcaatggtgaagtactcaagggagcctgacaatccaactaagtcttgcaaggctagaggcgccgaccttagggttcattttaagaacacaagggaaactgcctttgcaatcaggaagttgcccttggtcaaggctaaaaggtacttggaagatgttcttgcccacaagcaggcaattccattcagacgtttttgtcgaggtgttggaaggacagc

SEQ ID NO: 200128 - DNA, 140 bp, Glycine max
tcgcactcacgcgtacggctcgagctgcgagaagacgacagaaggggaaaggacaaaggcaccgtgtaagagctgtttgaaggatgctaacatatctatcaaggaagttgatgaggttcttcttgttggaggaatgactc

SEQ ID NO: 200129 - DNA, 274 bp, Glycine max
acgagaagacgacagaaggggacagcagcagagcaaaagaaagaaagaaagaaagtgcaacttcctctgttttgctcccctgtttaagccttatcataagcttagaatggcacacaaggaattttccattgccctagtgactctcattgttctctttgtcaacacgaacctccaaggtgccacggctgactatggtggtggttggcagagtgctcatgccactttctatggtgggggtgatgcttctggcacaatgggtggagcatgtgggtat

SEQ ID NO: 200130 - DNA, 273 bp, Glycine max
acggctgcgagaagacgacagaagggggaagaggaaaagaggattagagggtcgccacgtttagcaataaccaaaccctctctactcttttttcttctccttctcttcgctagggttttagcttcttcctcttcacttcgttctttttcacctctacaatgagcaacgacaaggacacattcaacgtcgccgatctcacttctgctctcaacgaggacaatagagcagatctagtcaatgctcttaagagcaagatacagagtttggctggac

SEQ ID NO: 200131 - DNA, 270 bp, Glycine max
tacggctcgagaagacgacagaaggggaggaaggaagggagggaagaatagaatgggatctggaagtggaaaacacactggagagttcttcagagaagggatgcatggaggaagcatccgatgctcaccaatcagctccgccacgccacccctggccttggcatcgccgtcgtcgccttcggtatctacctcgtcggcgaacaagtctacaataggctctatgctcccgatcctcattcgtaacctcgcgtgaaagccggggatcaccat

SEQ ID NO: 200132 - DNA, 272 bp, Glycine max
acggctgcgagaagacgcagaagggcacgctctgtaggatttgaacctacgacatcgggttttggagacccgcgttctaccgaactgaactatgagcgctttgttttcataaattattttatatgatccaaatccattttacatgtatatactatatcactatatatacatatagatattcggtatgtatgtccaattggaattcgtcttcaattggtcccgttttattgctcatctcatataataaatatataatacggaatataatacgg

SEQ ID NO: 200133 - DNA, 223 bp, Glycine max
gggagctgaagagtcgagaagaacaagatggagatatatcagatctggagcaggagaatagcgttgggagcgttcgcgtttgttctgcttttcctatcggcctcagcagacgacgtcgttgtgctctctgaagatgacttcgagaaggaagttggtcaggacagaggagctctcgttgagttctatgctccttggtgtggacatgcaaaaagcttgctccaga

SEQ ID NO: 200134 - DNA, 229 bp, Glycine max
ggacttccgctcgagtacggctgcgagaagacgacagaaggggatgaatgctaggaggcactactactgcacagattaatcatgagtcttccacaaactgcaactagcctcctccacatctgtatccacaggaacttcagcttaagctttaccaagccttcatattctcaattccaatactcttctccatcattctcttcctcttgttttacttgttctaccttaagag

SEQ ID NO: 200135 - DNA, 269 bp, Glycine max
tctcgagccgaatcggctcgagacggctgcgagaagacgacagaaacggattcatgagaagatcgaaaaacagtgtaacaaaaaggaaaagaaaccaatatgaagttcactataatcacaatatttttctctttatttctacttgactttggttttgcacaacagggggatcttgacatatcaagatttggaggagaaccaaatacaaatataggccaggctttcttaagtgcctggactcaagcatgtgcatcaccaactgctgtcaa

SEQ ID NO: 200136 - DNA, 270 bp, Glycine max
gcggagggtgaagaggaaagtgcctgaagctaactccaacactctaataatcattcggattcaggggaaaaaggacatgcatccgaggacaggaaggtgttgtacagcttggggttgaggagaagattcagtgctgtgtttgtgaagccaagtgagggaataatggccaagctgcagagggtggaaccatatgtcacctatggatatcctaatcttaaaagcataaaggagctaatttacaaaaaaggacatgcaaggatggaacagcga

SEQ ID NO: 200137 - DNA, 270 bp, Glycine max
tacggctgcgagaagacgacagaaggggacacacagctattcctcttaagcttgctactgagtttccacactgcataccttaggtcttccgattcgaagttaatttgcaagatggctaatgaaaaggctcagatcaacattgtggtggttggtcatgtggaccctgaggaggcaaccaccattaacgagctgaagaagcctgttgtggagaaagaagctccagggcatgccatatgagggcatgcacgtacggcctccgaggggaaccag

SEQ ID NO: 200138 - DNA, 201 bp, Glycine max
acggctgcgagacgacgacagaagggggaaaccgagaagaagaagatggagatgtatcagatctggagcaggagaatagcgttgggagcgtcgcgtttgttctgcttttcctatcggcctcagcagacgacgtcgttgtgctctctgaagataacttcgagaaggaagttggtcaggacagaggagctctcgttgagttct

SEQ ID NO: 200139 - DNA, 264 bp, Glycine max
tacgaagacgacagaaggggaagaaagctgggatcaagctgaactgggccattaggcggaaaattgctattggagctgctaggggattggttttcttcaccacaattgtatcccccacatcattcatagagatatgaagtcgagcaatgtgttacttgatgaaaacctggaagccagagtctctgattttggaatggctaggcttatgagtgctatggatacacatttgagtgtgagcacattggctggcacaccggggtatgt

SEQ ID NO: 200140 - DNA, 266 bp, Glycine max
tacggctgcgagaagacgacagaagggggcagcgcttgatttgaggccaggcaagccccactcaaccaccacacctctcctcgttcacgctacccctttctgctcttcttctacctttcaagttttaaaagtataaagatggcagagacattcctatttacctcagagtcggtgaacgagggacaccctgacaagctctgcgaccaaatctccgatgctgtcctcgacgcttgcctcgagcaggacccagacagcaaagttgcctg

SEQ ID NO: 200141 - DNA, 266 bp, Glycine max
agaagacgacagaaggggtagttggggaacatattgccccggggagtatcctagtcctcccccagaatatacaacctgtttgggtgattgtacagtgttgcttggatggaagacagtgacagacacaatttgcgaacagaaactctgcaccaacaatataaattggttaaagagaggactatatctggagattcatactatggctctcacgtgatgcagtatggtgatgtagggcttagcagagatgttctcttccattatttggg

SEQ ID NO: 200142 - DNA, 238 bp, Glycine max
tacggctgcgagaagacgacagaagggggccattgttgttgctattatcatccgcagctgcttttattcgcaccgcaaacagtgagcctggccgtcggaaagaacaagcgcatctccaaggggaagaagggtggcaagaagaaggcagctgatccctttgccaagaaggattggtatgacattaaggctccttctgtttttcaagtgaaaattgtcggcaaaaccctcgtctctcgta

SEQ ID NO: 200143 - DNA, 265 bp, Glycine max
acggctgcgagaagacgacagaagggggtagcgccagactgagaggaagagagagggagattctttgtttgctaccttctctcggaaaatggttacgttcaggtttcaccagtaccaggtggttgggagggctcttcccacggaagcagatcagcaccccaagatctaccgaatgaagctctgggccaccaacgaggttcgcgccaagtccaagttctggtattttctgaggaaactgaaaaaggtgaagaagagcaatggccaa

SEQ ID NO: 200144 - DNA, 267 bp, Glycine max
acggctgagaagacgacagaagggggagggttattggacacattcttcagcgactgcgtttttggatcggaacctcttctgcggcgtagcaatgggacactccaacgtttggaactctcacccaaaaaactacggtcctggttctcgcacttgccgtgtgtgtgggaatccacatggactgatcaggaagtatggccttatgtgctgcaggcagtgcttccgtagcaatgccaaggaaattggcttcatcaagtatcgctaaaagag

SEQ ID NO: 200145 - DNA, 187 bp, Glycine max
acggctgcgagaagacgacagaagggtgaaggagttgaagcttacatttggttactgacaaaggcttacgttgttgtgaatgatgcttgctaccatcaaatcattagccattggctaaacactcatgcggttgtggagccattcgtcatagcgacaaacaggcatctgagcgtggttcaccctattt

SEQ ID NO: 200146 - DNA, 173 bp, Glycine max
tacggctgcgagaagacgacagaagggggcacaagtgagtttgttgatcgagataactagaaacagtgtgatgaaaatgaaggccttgttttcttctttgctacaattttggtagcatggcaacgccatgcgtacgatatgttccctctccgaatgaacactggctatggtgc

SEQ ID NO: 200147 - DNA, 261 bp, Glycine max
tacggctgcgagaagacgacagaagggggaacaaagttgaaccttcacttcactcgctacttcacctcaagtgttgatgcctcgttcttgcctcgatcagttgctgattccatacccttttcatcaaacaaggtgaatgaagtgttaaacaagttctccatcaaggaagggtcagatgaggctcaaactgtgaagaacaccatcagtgagtgtgaagtgcctggcattaagggagaggaaaagcgttgcgtgacttcactt

SEQ ID NO: 200148 - DNA, 262 bp, Glycine max
tacggctgcgagaagacgacagaagggagcgagctttgtgatcgattgcgcgaggccggtggaggataaaattatggacattcttctctggagaagttccttcaggagaggattaaggttggcggcaaggccggtgcactcggcgattccattactgtcactagggacaagagcaagatcaccgtcacctccgacagcaacttctctaaacggtatctgaaatatttgaccaagaagtacttgaaaaagcacaatgtgaggg

SEQ ID NO: 200149 - DNA, 261 bp, Glycine max
acggctgctagaagacgacagaagggggcagcgcttgatttgaggccatgcaagccccactcaaccaccacacctctcctcgttcacgctacccctttctgctcttcttctacctttcaagttttaaaagtataaagatggcagagacattcctatttacctcagagtcggtgaacgagggacaccctgacaagctctgcgaccaaatctccgatgctgtcctcgacgcttgcctcgagcaggacccagacagcaaagttg

SEQ ID NO: 200150 - DNA, 222 bp, Glycine max
gctgcgagaagacgacagaagggggtgcagttcaaagcgaagaaagattcgaaacgaagaaagaaagcgttgtgaagaatggcggagagggacaagtgatcggtgtccacagcgtagaggagtggaaggaacatctcaagaagggagaagagtccaagaaattgattgtggtggattttactgcttcttggtgcggtccatgccgtttcattgccccaattc

SEQ ID NO: 200151 - DNA, 257 bp, Glycine max
tacggctgcgagaagacgacagaagggggaggaaaggaaaggggaacacaaaccgaaaccctaaccctaacggagagatggcgggcacttggcatcgatattcgggacggagaaggacagggtgaactgtccgttctacttcaagatcggcgcgtgcaggaacggcgaccggtgctcccggctttcacaccaagccgacaattagcccaacattggttctgtcgaacatgtacaagaggcacgacatgaacatgagc

SEQ ID NO: 200152 - DNA, 261 bp, Glycine max
tacggctgcgagaagacgacagaagggaaagagacccggaaagggtgggaaccgcttttggaaatccattgggcttggatttaagactcccagggaagccatcgaaggaacctacattgacaagaagtgccccttcactggcaatgtttccatccgtggccgtatcttggctggaacatgtcacagtgctaagatgaacaggactattattgttaggaggaattatctccattttatcaagaagtaccaggggtacgagaa

SEQ ID NO: 200153 - DNA, 284 bp, Glycine max
tctcgagccgaatcggctcgagacggctgcgagaagacgacagaaatgggcacaagtgagtatgttgatcgagataactagaaacagtgtgatgaaaatgaaggtccttgttttcttcgttgctacaattttggtagcatggcaatgccatgcgtacgatatattccctctccgaatgaacactggctatggtgcccgtactccggaggtgaaatgcgcaagttggaggcttgctgtggaagcacacaacatctttggctttgagaccattcctgaagagtgcg

SEQ ID NO: 200154 - DNA, 239 bp, Glycine max
ttatggcactggacaaattgaaacactagaggcatatgacagggcgaatgcagagaagtttgaatctgacaacaaccttggactggttaatcaggttgtatcatccatgtataagcggaatattcagagattgatacagacatacttgaccctttctctccatgatatagtcagcacagtgcaggtgaatagctccaaagaagctgaaatgcatgtgctacaaatgattcaggatggcg

SEQ ID NO: 200155 - DNA, 245 bp, Glycine max; identical to SEQ ID NO: 197607

SEQ ID NO: 200156 - DNA, 254 bp, Glycine max
  unsure (1)..(254): unsure at all n locations
gngattanaagcaagggtagaagttttgcaacgttctccaaaggaacctactcggggaagatcttgcccaaatgaatacaaatgagctagagcagcttgagaatcaactggaggcagcactgaggaatnttaggtcaacaaagactcaattcatgcttgaccagctttctgatcttcaccaccgggaaacattgcttattganactnataacgtgttanggagtaagttggnagnaactgatcactcacaagtt

SEQ ID NO: 200157 - DNA, 276 bp, Glycine max
cggctcgaggcgagaagacgacagaaggggaatggtgagaaggagaagggtggtgagggggtgcagcggtcttgtggcgaaaggagaagatcgaaggcgaatccgaggctgagcaatcccccgaagcatttgaggggggagcaggttgcagctgggtggccgccgtggctcactgcagtgtgtggggaagcactcagcggctggattccgcgaaaggccgacacctttgagaaaattgataagattgggcaaggaacttatagtaatgtgtacaaa

SEQ ID NO: 200158 - DNA, 279 bp, Glycine max
tacggctgcgagaagacgacagaagcgcgcgaagaagagcgtggagacctacaagatctacatcttcaaggtcctcaagcaggttcaccccgacattggtatttccagcaaggccatgggcatcatgaacagcttcatcaacgacatcttcgagaagctcgcccaggaagcgtcgcgtttggctcgctacaacaagaagcccaccatcacctcgagggagatccagaccgccgtgcgtctcgtgctccctggtgaattggccaaacacgccgtttctga

SEQ ID NO: 200159 - DNA, 276 bp, Glycine max
tacacgacagaaggggaaggatcagcagggagaattaggtttttagggtttacaccgagcagccacacctcccgcagcagccatggttctcaaaactgaactatgccgattcagtggtgccaagatctacccaggaaagggcatcagatttgttcgtggtgattctcaggttttcctgtttgcaaactcaaaatgtaagaggtatttccacaatcgcctgaagccttcaaagctcacctggactgcaatgtacagaaagcaacacaaaaaggacat

SEQ ID NO: 200160 - DNA, 274 bp, Glycine max
tacggctgcgagaagacgacagaagggggtgtgaagcagatgatctgttgctgtaacaagatggatgccactacccccaagtactctaaggctaggtatgatgaaatcgtgaaggaagtctcttcttacttgaagaaggttggttacaacccagacaagattccctttgttcccatctctggttttgagggtgacaacatgattgagaggtccaccaaccttgactggtacaagggaccaactctccttgaggctcttgaccaaatcaatgagc

SEQ ID NO: 200161 - DNA, 269 bp, Glycine max
cgtcaagtcaataccagtgtgtgcatgtgcacttttcacctctactggccttgatgatgcaggccaaatgcctggggcaggagaagaggtgtagttttgattaggcggaggaacactgcctggagaagctaacttatcactactctgaggctctgaactggtatcttttgtagtagtagtggtcacttgtttagtctttggcttggagcccccatatacgaaactgcatgctaccacctgcactgggcttgaagcaacaagcctagtaa

SEQ ID NO: 200162 - DNA, 269 bp, Glycine max
tacggctgcgagaagacgacagaaggggctctcactctctcagagtcttccacgttattctctctccgagcttcactctcttttcgcctctgccaaagggagaaaaatggggttctcctcctttctgggtcgtgttctctttgcctccctcttcatcctctccgcatggcagatgtttaatgaatttgatgccaatggtggacccatctcgaaagagttgattcccaaactcagtgtggtgaagaataatttatcctctaaattggggg

SEQ ID NO: 200163 - DNA, 274 bp, Glycine max
acggctgcgagaagacgacagaaggggggcatattccagccgctactaaggaagatgttgaccttgcggtggatgctgctaaaagagccttttcccataacaaaggcaaagattggtcttcagctcctggctctgttcgtgctcgctatcttcgagccatcgcttcaaagataacagagaaaaaggatgaactaggaaagcttgaagcaattgattgtggaaaaccactagatgaagcactggcagacctggatgatgttattggttgttttaa

SEQ ID NO: 200164 - DNA, 236 bp, Glycine max
ctgcgagaagacgacagaagggggagctgaaaccgagaagaagaagatggagatgtatcagatctggagcaggagaatagcgttgggagcgttcgcgtttgttctgcttttcctatcggcctcagcagacgacgtcgttgtgctctctgaagataacttcgagaaggaagttggtcaggacagaggagctctcgttgagttctatgctccttggtgtggacactgcaaaaagcttg

SEQ ID NO: 200165 - DNA, 279 bp, Glycine max; identical to SEQ ID NO: 198813

SEQ ID NO: 200166 - DNA, 276 bp, Glycine max
accaagaatttttgaagggtagcatcaacaagaagttctggaaatggagatcaccaatgtcagcgagtatgaagctattgcaaagcagaagttgccaaagatggtgtttgactactacgcatctggtgcagaggaccagtggactctgcaggagaacagaaatgccttttccagaattttgtttcggccacgtattcttattgatgtgagcaggatagacatcacaactactgtcctgggcttcaaaatatccatgccaatcatgcttgccccaac

SEQ ID NO: 200167 - DNA, 278 bp, Glycine max
tacggctgcgagaagacgacagaaggggggtagggtttcgagttacagccgcaccttgattcagagcagagcgaccttgaagagctatggctgtcggaaagaataagaggatttccaagggaaagaagggtggcaagaagaaagccgctgatccctacgccaagaaggactggtacgatatcaaggccccttccgtctttcaggtcaagaatgttggcaaaaccctcgtctctcgtacccagggaaccaagattgcttctgaaggactcaaacataga

SEQ ID NO: 200168 - DNA, 274 bp, Glycine max
gcgagaagacgacagaaggggtccctctccttttcctgatggatcatttgacaaaccagttaatttctcccccccaaagctagtgattcttcatatgaatatggcactacatgtgtatgaagatatcatgaggatgactgaaaacctgagtgagaagtatataattggatatggagcatcaagtacagtttataaatgtgttcttaagaattgcaagccggtggctatcaagaggatctattctcactatccccaatgtattaaagaatttgaa

SEQ ID NO: 200169 - DNA, 270 bp, Glycine max
ggagctcaacttagaaaacatattgatgccacgttgggtagtggaaatctgagggaagcagtaaagctacctcctggggaggatttaaatgagtggctagctgtcaacactgttgatttcttcaaccaggtgaatctgctttatggtacccttacagagttctgtactcctgagaattgtcggacgatgtctgcaggacccaagtatgaatatagatgggcagatggtgtacaaattaagaaacctattgaggtttctgctccaaaatat

SEQ ID NO: 200170 - DNA, 266 bp, Glycine max
tacggctgcgagaagacgacagaagggggtttgattagggtttgtcattagcacttcttcttttcacactgccgctgcaacaatggcttcagagaagaaactttcgaacccaatgagggagataaaagtgcagaagctcgttctcaatatctctgttggcgagagtggagatcgtctcaccagagccgccaaggtgttggaacaacttagtggccaaaccccagtgttttccaaagcaaggtacactgttcgttcctttgggatta

SEQ ID NO: 200171 - DNA, 264 bp, Glycine max
acggctgcgagaagacgaagaagggggaaaaggttacttcaagagggggaaaagatggatgggtttcaaataacattaacaagggtcgatttgacaagtactactggcttcttgccacaatgagtgctgttaatgtactgtattatctagtatgcagttgggcttatggacctacttctgatcaagaatcaaaggtaactgaagaaaatggttccaatgaggaagaattgccattaattcgatccaggactaagggtcagtttg

SEQ ID NO: 200172 - DNA, 213 bp, Glycine max
acggctgcgagaagagacagaaggggcagtggctggtgatctcatgtcaaaaccaacatggtatgctgctagcagaatccacgacgcattaatacgaatggacaatgaatatttgagatcggctcttgactatctagagctgcagcatgatctaaagtcccttgttcgtggagcacatacttttagatgtccaaatcttggtatcactagctg

SEQ ID NO: 200173 - DNA, 275 bp, Glycine max
ctgcgagaagacgacagaagggcaagtccaaagtccaatgaaattaaaatttattattatattgtgtgcctcaattagcacgtttgtatgtatgggagaatgggagccaacttggagcacaagagctgcagaagaagctgaggctgtggcagcaataccatgttcaggacatggaagagcctacttagatggtcttattcttaaagatatgaataagtctcgttgtgaatgcaattcatgctatgctggatctgactgctcccagtttttatctg

SEQ ID NO: 200174 - DNA, 209 bp, Glycine max
tgcgagaagacgacagaaggggacttcaaaacactcataacacaaagcacaaagcaaagctcatccttgagttaaaaaatggcagcagcttcttccatggctctctcatccccatccttggctggcaaggccgtgaagctgggcccatcagccccagaagtgggaagggtgagcatgaggaagaccgtcaccaagcaggtctcctcagg

SEQ ID NO: 200175 - DNA, 266 bp, Glycine max
aagacgacagaaggggaaggttttgaaggtagtctagatgttggggctggtcaaactcctcaattgcggttgcctcgaattaaggaagttgaggtcaatggaattactgttaaggtcaagtattgtgatacttgcatgctctacaggcctcctcgatgttctcactgctcaatttgtaataactgtgtggaacggtttgatcaccattgtccctgggttgggcagtgcattgggctgcgtaattatcgcttcttcttcatgtttgt

SEQ ID NO: 200176 - DNA, 268 bp, Glycine max; identical to SEQ ID NO: 199816

SEQ ID NO: 200177 - DNA, 264 bp, Glycine max
tacggctgcgaagacgacagaagggggcatcaattcaaaatatatcatcaattataagcatgggtttgtggaacacaacgaatgcagtgtcttgccgctttcacaagtttggtgatgaccaaaagaatctggtcttccaaggtgatgccacgtcttcttccaggggcatagaactcacaaagttagacggtggaggaaaaccagtgggtggcagtgtggggagagtgttatactcttctccagtgcacctttgggaaagctcta

SEQ ID NO: 200178 - DNA, 263 bp, Glycine max
tacggctgcgagaagacgacagaagggggcacaaaaatacaatacaaaacaaaacagagcaaagagagagtgtgtgaaaagtgaaacaaaaaacagaacaacaatggcgacacttaaggttcctcagcctcttccccccgttgcagatgattgtgagcagctccgaaaagccctctcaggttggggaactaacgaggagctgattgtatcgatcttggctcataggaatgctgctcagaggaagcttatcagagaaacttatg

SEQ ID NO: 200179 - DNA, 264 bp, Glycine max
tacgagaagacgacagaagggggagaagaatatggaacgaagtggcggaatggtaacggggtcgcatgaaaggaacgaacttgttagagttagacacggttctgacagtgggtctaaacccttgaagaatttaaatggtcagatttgtcaaatatgtggtgacaccattggattaacggctactggtgacctctttgttgcttgtcatgagtgtggcttcccactttgtcattcttgttacgagtatgagctgaaaaatgtgag

SEQ ID NO: 200180 - DNA, 276 bp, Glycine max
tgcgagaagacgacagaagggagagttacaatctcatggaaatattcgtttgaagagaatgggggaacttgatactagaccattccttgaagcaatgaagcaaagatataatgaggaggatgctgaagagagagcttcagagctgtgttcattgtgggaagaatatctaaaggacccagattggcatccattcaaagttatcatggttgaaggaaaagaaaaggaaattattagagatgacgatgaaaagctgaatgggttgaaaaatgacttggg

SEQ ID NO: 200181 - DNA, 269 bp, Glycine max
agaagacgacagaagggggcacccagagaggaggaagctttgagagagagagagggaggagggagagtgttgacgctccatcaagatgggtatttctagggattccatgcacaagaggcgtgccactggtggcaagaagaaggcatggagaaagaagagaaagtatgagcttgggcgtcaggccgcaaacaccaagttatcaagcaacaaaactatccggaggattcgtgttcgaggtggcaatgttaaatggagggcattgaggttgg

SEQ ID NO: 200182 - DNA, 263 bp, Glycine max
tacggctgcgagaagacgacagaaggggagagaaagagagagaaagatgtcgaagcgtggtcgtggtggttcggcggggaacaagttccgcatgtcgctgggtcttccagtggcggcgacggtgaactgcgccgacaacacgggggcgaagaacctctacatcatttcggtgaaagggatcaaaggccgtttgaaccgtcttccctcggcctgcgttggcgacatggtgatggccaccgtgaagaagggaaaacccgatctga

SEQ ID NO: 200183 - DNA, 268 bp, Glycine max
acggctgcgagaagacgacagaagggagattctgcagcttctgcgtttgagacagatttttaatggcgtctttcttaaagtgaacaaagctaccgtgaatatgctgcatagggtagagccttatgttacctatgggtaccctaatttgaagagtgtaaaagaattgatctacaagaggggctatggaaaagttaacaagcagagaattgccttaaatgacaactctattgttgaacagactttggggaagcatgggatcatttgcgtt

SEQ ID NO: 200184 - DNA, 280 bp, Glycine max
ctcaatataacaccagcaccattggcaacagcccatcttggagttgaaggcacaagttgaggatgcttcccagaaccacgggaagaagcggttgatggaggcttcagttctcctgcagcatatttacccataacaccactgcaccatcggaaatagtcacttctaataccaactggtgaagccaacaatatatcagtaatccagggggacaacggcctaataggtttcttctcttgctgtgtcaaagaattatgcccagatttcccaggttcactagttg

SEQ ID NO: 200185 - DNA, 261 bp, Glycine max
gctgcgagaagacgacagaagggggcagcgcttgatttgaggccgggcaagccccactcaaccaccacacctctcctcgttcacgctacccctttctgctcttcttctacctttcaagttttaaaagtataaagatggcagagacattcctatttacctcagagtcggtgaacgagggacaccctgacaagctctgcgaccaaatctccgatgctgtcctcgacgcttgcctcgagcaggacccagacagcaaagttgcct

SEQ ID NO: 200186 - DNA, 267 bp, Glycine max
cttgcttgctccaactccaacccagtttcacactagtttgttgctccaattcttgtcaaggggaacaatgaatgcactagcagccaccaacaggaactttaagttggcctctaggcttctgggattggattcaaagcttgagaaaagtttactgattccattcagggaaatcaaggttgaatgtaccatacctaaggatgatggcaccttgcaatcttatgtagggttcagggttcaacatgataatgccagaggccccatgaaagg

SEQ ID NO: 200187 - DNA, 259 bp, Glycine max
acggctgcgagaagacgacagaagggggatcctttgtattctattcttcaagattcaggtactgcgtttcggaagcagacacagatggctcgtacgaagcaaaccgctcgtaagtccacaggaggaaaggctcctaggaagcagcttgcaaccaaggctgcgcgtaagtctgcaccaactactggtggtgtgaagaagccccaccgttatcgtcctggtaccgttgctcttcgtgagattaggaaataccagaagagta

SEQ ID NO: 200188 - DNA, 265 bp, Glycine max
acggctgcgagaagacgacagaaggggagggtgagagagaattatcaaaggtgaaacgaagaagccctaactacgcacgcattcgtgagaaaactcaatattcgtcgctcatggcactctcttctcgtctcttttccaaatccaaattgatctatggcagtcaaatacttctacaaaaggagcatgctattccagttcgtcactttgctaaagagtctgcccctcctgcccttaagggagacgagatgctgaagaacatttttgt

SEQ ID NO: 200189 - DNA, 163 bp, Glycine max
ggctgcgagaagacgacagaaggggatgaggtcaaagagagggaaaacaagcaagaatacaacctactctgtgattggataaaacaacaacttggtgacaaggtggccaaagttcaaatctcaaatcgcttgagttcatctccttgtgtgcttgtatcaggga

SEQ ID NO: 200190 - DNA, 278 bp, Glycine max
tacggctgcgagaagacgacagaagggggccataagaaagagcaagtcgaaaagttcatctctccctctctctcacacatcccagccatgagcctcttcggtataggcagaaaccagagaacattccgcccgaaaaaaagtactccttctggaagtaagggagctcaacttagaaaacatattgatgccacgttgggtagtggaaatctgagggaagcagtaaagctacctcctggggaggatttaaatgagtggctagctgtcaacactgttgattt

SEQ ID NO: 200191 - DNA, 273 bp, Glycine max
tacggctgcgagaagacgacagaagggggagcctttctccctaaagatagtcctcttcgtaaggatccggcatactatgttcttaaagaagacgagtctccttgcatttttggttctattgaaaaacagaggtggtcttatgcctgtgcgaaacagttgattgagaggctgatttatgctgagggtgctgaaaatggcttggagttcacaattgtgaggccttttaactggattggacctcgaatggatttcattcctggcattgatggtcca

SEQ ID NO: 200192 - DNA, 226 bp, Glycine max
atgcgagaagacgacagaaaggggaggagactgtcaaaacacaagacaacaaaatggaagacacagtttctgcgttgaggtctttgatggtttctcactctccgccgctggatgccttagtggtgccctctgaagattatcacctgagcgaatatgtgtctgcacgagacaagcgccgcgaattcgcttccggcttcactggaagtgcccggttggcacttataac

SEQ ID NO: 200193 - DNA, 247 bp, Glycine max
aagacgacagaagggatcagtggtgccccccaggataacaacataatgctgtggaatgctgtcatatttggtcctgatgatactccatgggatggaggcacgttcaagttgacactccaatttactgaggactatccaaataaaccaccgactgtacgatttgtgtctcgcatgtttcatccaaatatttatgctgatggaagtaattgtttggatattttccaaaatcaggggagtcccatttatg

SEQ ID NO: 200194 - DNA, 273 bp, Glycine max
tacggctgcgagaagacgacagaaggggatttgaatcttatgtcactgtataagaaaataggcaaggcggaatacaaatgtccaaactggtttccatttgaagtgcgcagactgttagcgaaaatccttgaccccaacccaaataccaggatatccatggcaaaagttatggaaaattcgtggttcagaaaaggattcaaacctaaatctggtcaagtgaaaagagaggctgttgatgtggctttagttgtttctgatcaaattttgggctgt

SEQ ID NO: 200195 - DNA, 274 bp, Glycine max
gctgcgagaagacgacagaaggggaggaatcaaaggatgacccagttgactctgatgctgatgaggaagaggaagatgctgatgaagctggcaatgactccgatgctgaatcaaagacggaagctggggaagacaccaaggaagagggtgtacatgatgaactctaggaagtttgcaaaacggataaagagtgagcggaagttatattccggatagttatatttcagtcgtagtgttttttgttttccctagataagcagaccgtggaaaactg

SEQ ID NO: 200196 - DNA, 271 bp, Glycine max
acgacataaggggaagagatatcacaagatgctgcatattggattcgaagaattccacctcgtctctgggccactgcttattttgatgggcatacgtttggtcatttgacagctaacatagttgaatcttgaaacacttggatattggaggcatctggacttccaataattcacatgatggtatgcattagaaggcagctaatgacttggtctaatgagcgccgggaggccagtatgcagtggacatcaatacctgtaccatctgccgaga

SEQ ID NO: 200197 - DNA, 273 bp, Glycine max
acggctgcgagaagacgacagaaggggaggcaaggatgcaggcaatgaccaagccaacttacactgcaattgttcaacatgccaagaatggaaaacctgccctcgtatttgtacctacaaggaaacatgtccgactgacagctgtggatctgattacatactcaggtgcagacagtggggagaagcgatttttattgcggtcagcagaagagcttgaacctttcttgacaagattactgacgaaatgttgaaagttactttacgtgaaggagt

SEQ ID NO: 200198 - DNA, 269 bp, Glycine max
tgcgagaagacgacagaagggggtttcggagaagaattaagcactcggttgcagaacagaacaaacttctttcactctttcgcttctgaatcttcaacaatggtgctcgaggcgacgatgatctgtatcgacaattctgaatggatgcgtaacggagattactctccttcttcgattcaagctcaagcagacgctgtcaatctcatatgcggtgctaaaacgcagtctaatccggaatatacagtgggagttctcacaatggctgggaa

SEQ ID NO: 200199 - DNA, 266 bp, Glycine max
aagagctggtctcatcaaagccctaaccactgatgttgaagatttttacaaccaatgtgatcctgagaaagagaatttgtgcttgtatggctttcccagtgagcagtgggaagtaaatttacctgctgaagaagtaccaccagagcttcctgagcccgtgctgggcattaacttttgcagggatggcatgcaagaaaaagactggctatctttagttgctgttcatagtgatgcatggttacttgctattgcattctattttggag

SEQ ID NO: 200200 - DNA, 245 bp, Glycine max
  unsure (1)..(245): unsure at all n locations
gactcgcagttgnattgttgaacaagggtttctctgtctgcttcttcactttctctcgtttcaatcgaaaccaaaacaaaaacatgggcagaaaattcttcgtcggtggcaactggaaatgcaatgggaccactgaggaggtaaagaagattgttactactttgaatgaggctaaagtccctggagaagatgtcgtngaagttgtgtgagccctcctttgtggtccttccnggtggtaaaaantt

SEQ ID NO: 200201 - DNA, 266 bp, Glycine max
acggctgcgagaagacgacagaagggggcatcaattcaaaatatatcatcaattataagcatgggtttgtggaacacaacgaatgcagtgtcttgccgctttcacaagtttggtgatgactaaaagaatctggtcttccaaggtgatgccacgtcttcttccaggggcatagaactcacaaagttagacggtggaggaaaaccagtgggtggcagtgtggggagagtgttatactcttctccagtgcacctttgggaaagctctac

SEQ ID NO: 200202 - DNA, 274 bp, Glycine max
tacggctgcgagaacgacagaaggggggcgccgggcggagcggcaagcccctccactacaaaggctcgtccttccaccgcgtgatcccgaacttcatgtgccagggcggcgacttcaccgccggaaacggcaccggaggcgagtcgatctacggcgccaagttcgccgacgagaacttcgtgaagaagcacactggtcccggcatcctctccatggcgaacgccggtcccggaaccaacggatctcagttcttcatctgcacgacgaagacgga

SEQ ID NO: 200203 - DNA, 270 bp, Glycine max
agaagacgacagaagggggcacaagtgagtttgttgatcgagataactagaaacagtgtgatgaaaatgaaggtccttgttttctccgttgctacaattttggtagcatggcaatgccatgcgtacgatatgttccctctccgaatgaacactggctatggtgcccgtactccggaggtgaaatgcgcaagttggaggcttgctgtggaagcacacaacatctttggctttgagaccattcctgaagagtgcgttgaagcaacaaaggaa

SEQ ID NO: 200204 - DNA, 270 bp, Glycine max
tacggctgcgagaagacgacagaagggggcacaagtttgttgagatagctagaagcaataagatgaaaatgaaagtgcttgttttgtttgttgctacagttttggtaacatatgaatgccatggctcagactaccagaagttccctctccaaatgaaaactgggtttggtgggcaatacagcaatgaggtggcatgtgccagttggaggcttggcgtggaagcaaacaacgtagtcaagtggcaaactgttcctgcagcttgcggagagt

SEQ ID NO: 200205 - DNA, 269 bp, Glycine max
acggctgcgagaagacgacagaaggggggtctcgtgcaagtgtaacccaaaaccctagcggcgcctgctttcttcgttcgtcttttgcatcagccatcaggtgcgaactcaccctatggatttctatccaccgctggctgatccttcttctctaactctaatttattattttcatgatggagtctcaggtgaagcatgctcttgttgtcaaagttatgggtcgtactggatccagaggacaggtgactcaggttagagtgaagtttttg

SEQ ID NO: 200206 - DNA, 269 bp, Glycine max
cgagaagacgacagaagggggggtatttgtgagtgtgtgagagagagagcgagcagtttcagacacagagggaggggttgggattggagggattgacgctgcgtctcttcctcttctctttcgatccatccctcattcctaatcctccaatccaaccacctcagcctcacactcacatatacacatatctgaacgcgtatcgtccctcctatggcttcaaagcgcatcctcaaggagctcaaggacttgcagaaagacccaccaacttc

SEQ ID NO: 200207 - DNA, 266 bp, Glycine max
tacggctgcgagaagacgacagaagggggaagagtgaagagaatggctcccaagggtttaacctttctggctgtgttaatatgcgtttcagcactgtcactgagtccttctgttgcgggggaagggcaaaataatggccttgttatgaacttctacaaggaatcatgccctcaggctgaagacatcatcacagaacaagtcaagcttctctacaagcgccacaagaacactgctttctcctggctcaggaacatcttccatgactg

SEQ ID NO: 200208 - DNA, 266 bp, Glycine max
cggctcgagacggcgagaagacgacagaagggggcatcaattcaaaatatatcatcaattataagcatgggtttgtggaacacaacgaatgtagtgtcttgccgctttcacaagtttggtgatgaccaaaagaatctggtcttccaaggtgatgccacgtcttcttccaggggcatagaactcacaaagttagacggtggaggaaaaccagtgggtggcagtgtggggagagtgttatactcttctccagtgcacctttgggaaag

SEQ ID NO: 200209 - DNA, 280 bp, Glycine max
gagaattgctatatcttgacatgtaatgtatctttggagtatgagaagagtgaagtaaactcagggtttttctactcaagtgcggaacagagagaagctatggttgcagctgaaagacggcaggttgatgaaaaagtcaaaagaatcattgaactgaagaataaggtttgttctggtaatgatagcaattttgttgtcatcaaccaaaaaggaattgatcccccatctctggacctgcttgcaagggaaggaataattgcccttcggagagcaaagagga

SEQ ID NO: 200210 - DNA, 260 bp, Glycine max
ctgctcgagcggctcgagcggctcgagtacggctgcgagaagacgacagaagggggaatcacactggtgcctacatcgctgacgttatcatcttctgcttcctctttcttagatctcttctttctctacgccgcacgccgaaaccatggccggtaaaggagagggtcctgctatcggaatcgatctcggaaccacctactcttgcgtcggtgtgtggcaacatgaccgtgctgaaattatcgccaacgaccaagggaaca

SEQ ID NO: 200211 - DNA, 269 bp, Glycine max
gacgacagaagggagaacatgcctttaccaaaggtgcctactttattgggaagatgatatggagcaaaggctacaaggaactgctccaacttcttaaagatcatgaaaaggaattatctgctcttgaggttgatttatttggcagtggagaggactcagatgaagttcaaaaagctgcagaaaagttggaactagcagttagagtccacccagctcgtgatcatgctgatgctctatttcatgattacaaattgtttcttaatccaagc

SEQ ID NO: 200212 - DNA, 266 bp, Glycine max
tacggctgcgagaagacgacagaaggggagtgcacaagtgagtttgttgatcgagataactagaaacagtgtgatgaaaatgaaggtccttgttttcttcgttgctacaattttggtagcatggcaatgccatgcgtacgatatgttccctctccgaatgaacactggctatggtgcccgtactcctgaggtgaaatgcgcaagttggaggcttgctgtggaagcacacaacatctttggctttgagaccattcctgaagagtgcg

SEQ ID NO: 200213 - DNA, 266 bp, Glycine max
acggctgcgagaagacgacagaaggggacaagcacgaggcgcaaacgaacccaccaaacgagtattggaatcactctctttctgcaaaacgaaaatggcgcagaagaagaaagctagggtttccgacgacgaggaaatggaagtgcaacatgatcaaaccagcctttaccaggttcttggcgtggagagaacggcgtctcagcaggaaataaagaaggcgtactacaagttggcgttgcggcttcaccccgataagaaccctggtg

SEQ ID NO: 200214 - DNA, 267 bp, Glycine max
acggctgcgagaagacgacagaaggggacttattaattgtgttaagaaatttaagtgaggagctagagaatgatgatgaagtctgctatgtgtgcagtggtggttgtagcacttcttcttctggcggaggtggggcccatggttgaggctgtgacatgcaccccaacagagttgagtccgtgtcttccagcaatcacttccggtgctaaaccttccaatgcttgttgcacgaagctgaagcagcaaaaaccatgcttatgtggctac

SEQ ID NO: 200215 - DNA, 268 bp, Glycine max
acggctgcagaagacgacagaagggggatccaatcaagaatacaataacatagcatagagtgagaagtgagaagagaaaaatggcaatctccatacccagtagacaacttttcatagatggagagtggaaagtccctcttctcaacaatcggtttccgatcatcaaccccgctactgaagacatcatagggcatattccagccgctactaaggaagatgttgaccttgcggtggatgctgctaaaagagccttttcccataacaaagg

SEQ ID NO: 200216 - DNA, 268 bp, Glycine max
acggctgcgagaagacgacagaaggggacctacggaacacaggaaaagcctccaaaaccaacccaccgttggcgcgatggctttcccctccaaaggcgatgacgtgcaggttctggtgcagcgtaaatcgaatgcgagagttttgacactaaacaggactaaacagttgaatgccctctctttttatatggtttctcggctacttgaaattttttctgaagatgagaaagattctgatattaaattggttgtcgtgaagggaaatgga

SEQ ID NO: 200217 - DNA, 271 bp, Glycine max
tacggctgcgagaagacgacagaaggggagagaaagagaaggaaccaacaacaaagagcagagagaaagagaggaccattccaaccctaatttctctgctaaaccctagttgtttggcatttcctctcttctccctcgtaaatcttctcccattccctccggtagctttccagatccaaataaatcatggttttctgggtttttggctacggttcactggtgtggaaccctggattcgattacgacgagaagattattggtttcatcaagg

SEQ ID NO: 200218 - DNA, 270 bp, Glycine max
cggctgcgagaagacgacagaagggggtgatgtgagagaagaagagatgggtagaggagaagatcgagaaggggtcgcagtagccgggggcttcttctggtcctacacagacgaaccccatgccacacgacgtcgtcagatcctctccaaataccctcaaatcaaacaactctttggccccgaccactctgctttcttcaagattagtggagttgttctgcttcagcttggtacgggtgctttacttcacgatgctggctggctgaagat

SEQ ID NO: 200219 - DNA, 268 bp, Glycine max
tctcgagccgaatcggctcgagctgcgagaagacgacagaaggggatagaagaagcagaaagagaagcattagcaaaagcaataagaactagtctaagcagaaatggcctcttcagtgatggcatctgtggccctcaaacctgcccctttcactgttgagaagtcctcagttagaggccttccctccctctcaaggaactcctcttcattcagagttgtggccagtggtggcaagaagatcaagactgacgagccttatggaattaat

SEQ ID NO: 200220 - DNA, 264 bp, Glycine max
acggctgcgagaagacgacagaaggggggaatttggcagaaccaaaggactctatatacttattggataattgcccgcatgattggcttttcttgcgttgcaaggctgtggttcattcacggaggtgctggaacaacagctgccgggctcaaagctgcttgcccaacaaccatagttccttttttcggcgatcaaccattttggggtgagagagtacatgttagaggagttggacctccacctatcccagttgatgagttttcg

SEQ ID NO: 200221 - DNA, 263 bp, Glycine max
ctgcgagaagacgacagaaggggaccctataaaccaaattcgcaatcccgtgttatctacacttcccttcccattcctttcaatttggagaggaattcatttgaattagggtttctcttttcctttgtttcattatggacgctcagagggctttactcgacgaactcatgggtgcagcgcgcaacttgacggaggaagagagaaaggggtacaaggaagtgagttgggacgataaggaagtgtgtggattctacatggtgcgc

SEQ ID NO: 200222 - DNA, 265 bp, Glycine max
tacggctgcgagaagacgacagaaggggacaacgagctgatagaggagacaagaaaagaaagagaaagagtttgcagagttgaattccgaaagaggaatggcgaacacgaggagcttcctatcccgattaacaataacctagaacccgtctatggcggaggttccgcactcgaagaagctcagcttcgtttcgataatttgaagtccaaattcgtcgaaatcttcggtcatcatcctcaaatcttcgctcgctcacctggaagag

SEQ ID NO: 200223 - DNA, 261 bp, Glycine max
tacggctgcgagaagacgacagagggttggctgttgagtggtctgttgatgaacagtacagattggaagaaggccttgccaaatatgctgatgagccaagtatcatgaggtatatcaaaattgctgccctgttgccagataaaactgttcgtgatgttgctttgaggtgtagatggttgacaagaaagcgaagaaaatcagaagaacacaatctggggaaaaaggtcaataatagaaaggataagccagtggaattagctt

SEQ ID NO: 200224 - DNA, 262 bp, Glycine max
gcgagaagacgacagaagggggcacaagtgagtttgttgatcgagataactagaaacagtgtgatgaaaatgaaggtccttgttttcttcgttgctacaattttggtagcatggcaatgccatgcgtacgatatgttccctctccgaatgaacactggctatggtgcccgtactccggaggtgaaatgcgcaagttggaggcttgctgtggaagcacacaacatctttggctttgagaccattcctgaagagtgcgttgaag

SEQ ID NO: 200225 - DNA, 261 bp, Glycine max
tacggctgcgagaagacgacagaagggtgcgattgttaacatgggttctggagctgctattgttatcccttcggatcctctttatgctgtttatgctgccaccaaagcgtacatcgatcagttttcgagatgtctctatgttgaatacaagaggagtggaattgacgttcagtgtcaggttccattatatgtggcaaccaagatggcatcaatcaggaaatcttcattctttgttccatcaacagatggctatgccaaagc

SEQ ID NO: 200226 - DNA, 261 bp, Glycine max
tacggcgacgacagaaggggaagcttagtgaggtgcaagttaatttacttgaacaaaactttggaaatgaacgcaaacttgagtccgaaagaaaggataggctggcaatggagcttggtttggaccctcgacaagttgctgtgtggtttcaaaacagaagagcccgttggaagaacaaaaagttggaagaagagtactccagccttaaaaaaaaatcatgaagccaccttgcttgagaaatgttgcctggagagtgaggtg

SEQ ID NO: 200227 - DNA, 261 bp, Glycine max
tacggctgcgagaaacgacagaagggcagatcaagcttctcatgctgagcctatttggaagcttggtggtttgcaggtgacttgtggaactatgggttcttcaacagcaactatcaaacttgttactagtgatggtagcacacatgttgcttgttctgttggtgtaggaccagtagattcagcttacaaggctattaatctcatagtgaaggaaaccgtaaaagtacttgaatactcaccaagtacagttacaggaggcac

SEQ ID NO: 200228 - DNA, 264 bp, Glycine max
ggctgcgagaagacgacagaaggggagaggagtgaagcagcagagggaggagcggcattaaaaatgcagatcttcgtgaaaaccctaacggggaagaccataatcctcgaggtcgaaagcagcgacaccattgacaatgtcaaggctaagattcaagacaaggaaggcatccctccggatcagcagcgtttgattttcgccggaaagcaacttgaagatggaaggaccttggccgattacaacatccagaaggaatcaaccctt

SEQ ID NO: 200229 - DNA, 265 bp, Glycine max
tacggctgcgagagacgacagaagggaacgatgtgagcgtgaagaggataaaggagtataggctgaaggtggagtctgagttgtccaatatctgcagtgatatcatgactgttattgatgaataccttattccctctagctcatctggtgaacctagtgtctttttctacaaaatgaagggggactattaccggtacctcgcagagttcaagtccggtgatgagagaaaagaggctgctgatcattccatgaaagcgtatcagtt

SEQ ID NO: 200230 - DNA, 264 bp, Glycine max
agcgagaagacgacagaagggggaacataaagtgaggaaaacgagtcaattcatcatttgccctctgctctgcttgttcaaattttaggagcggagaatccagagaaagagagatgtctggtatcgcccgtggacgtcttgccgaggagcgaaagtcatggcgcaaaaaccaccctcatggtttcgttgccaagcccgagactctccctgatgccaccgttaatttgatggtctggcattgcactattcctggcaaggctggga

SEQ ID NO: 200231 - DNA, 259 bp, Glycine max
cggctgcgagagacgacagaagggggcacaagtttgttgagatagctagaagcaataagatgaaaatgaaagtgcttgttttgtttgttgctacagttttggtagcatatgaatgccatggctcagactaccagaagttccctctccaaatgaaaactgggtttggtgggcaatacagcaatgaggtggcatgtgccagttggaggcttggcgtggaagcaaacaacgtagtcaagtggcaaactgttcctgcagcttg

SEQ ID NO: 200232 - DNA, 258 bp, Glycine max
cggctgcgagaagacgacagaagggaagagaccacaaagagacgatagtgaacggaataaaagatgcggcagaaaagtacgggtgcgtgtacgtgttctccttcgagaatatgaggaatcagaaattaaaggagttcagggaacagttgaaatcgaatagcaggttctttctgggttctaacaaagtaatgcaagttgctttaggtcgctccgcttcagatgagatcagacctggccttcacaaggtttcaaagctat

SEQ ID NO: 200233 - DNA, 259 bp, Glycine max
tacggctgcgagaagacgacagaaggggggggaacaaaagatttcttagatgaagatgatattcaaaaacttccctatttcaaggcaatgataaaagagacgttgagattgcacctaccaggtccactacttataccaagagaatcaactgaagagtgcattgtagatggctaccgaattccagccaagacaattgtgtatgtgaatgcttgggttattcaaagagaccctgaagtttggaaaaatcccgaagaatttt

SEQ ID NO: 200234 - DNA, 257 bp, Glycine max
tacggctgcgagagacgacagaagggaacgatgtgagcgtgaagaggataaaggagtataggctgaaggtggagtctgagttgtccaatatctgcagtgatatcatgactgttattgatgaataccttattccctctagctcatctggtgaacctagtgtctttttctacaaaatgaagggggactattaccggtacctcgcagagttcaagtccggtgatgagagaaaagaggctgctgatcattccatgaaagcg

SEQ ID NO: 200235 - DNA, 259 bp, Glycine max
tacggctgcgagaagacgacagaagggggcacaagtttgttgagatagctagaagcaataagatgaaaatgaaagtgcttgttttgtttgttgctacagttttggtagcatatgaatgccatggctcagactaccagaagttccctctccaaatgaaaactgggtttggtgggcaatacagcaatgaggtggcatgtgccagttggaggcttggcgtggaagcaaacaacgtagtcaagtggcaaactgttcctgcagc

SEQ ID NO: 200236 - DNA, 258 bp, Glycine max
tacggctgcgagaagacgacagaagggggagtacgatcaccaggagaaggaattgattcggttgaaacgcgaggccaagctgaaaggtggtttctatgtggatccagaggctaagctgttgtttattattcgcattcgtggtattaatgccatggaccccaaatcaaggaagatcctgcagttgttgcgattgagacagattttcaatggtgtatttctcaaagttaacgaagccacagtgaacatgctgcacagagt

SEQ ID NO: 200237 - DNA, 259 bp, Glycine max
tacggctgcgagaagacgacagaaggggaggcccaaaaccaaaaaaagcttctttgtctctcgtgccgattctccaccactattcccttcaccccaatcacactttccggtagttgttgctattagtgtagaagatgagtacgctggatgcaacaagggctgaacttggtcttcttgttttatatttgggcaaggctgaagcaagggacaaaatatgcagggcaatacaatatggttccaaatttttgagtaatgggga

SEQ ID NO: 200238 - DNA, 259 bp, Glycine max
ataagctgcgagaagacgacagaaggggatcaattcataatatatcatcaattataagcatgggtttgtggaacacaacgaatgcagtgtcttgccgctttcacaagtttggtgatgaccaaaagaatctggtcttccaaggtgatgccacgtcttcttccaggggcatagaactcacaaagttagacggtggaggaaaaccagtgggtggcagtgtggggagagtgttatactcttctccagtgcacctttgggaaag

SEQ ID NO: 200239 - DNA, 258 bp, Glycine max
cgagaagacgacagaaggggaagggagttggcacaaggaggataagattcttgatgacaaatgtgttcaacaaagatggaaaaaaggtcaggaaagagggtcaccgactgatacttcacatttggttggattgaattgggaaattttggtggtaaatgagccagttcttaatgccttctgcttacctgatgggaagatagttgtgttcactggtttgtttgatcattttaaaagagatgcagaaatagcaactattat

SEQ ID NO: 200240 - DNA, 253 bp, Glycine max
tacggctgcgagaagacgacagaagggatctcagtttgcatggcaataacagggttgacgatgcatattggaattggatttaatgcagctgcaagcgtgagggtgagtaacgagttgggagctgagcatccaaagtctgcagcattctcagtgattgtagtgaatatgatatctttcataattgcggtgatagaagcagtggtggtccttgcactgcgtcgggttgtaagctatgcattcacagatggtgaaa

SEQ ID NO: 200241 - DNA, 258 bp, Glycine max
gctgcgagaagacgacagaagggctataaacaatttgaagaatatccaaatgcactccaaattgcattgttcatggataacatgcagcacgtgagggaggtgttcacctcttgtaatgatgtgctgcggaagaagcaattctgttacatgcttgcacgtcatggaattacttttgagcttgatgggaagatggtttcagacgatgaggacagagaattgttgcaggaaatcataaacaattctaagttaagtgaagga

SEQ ID NO: 200242 - DNA, 224 bp, Glycine max
tacggctgcgagaagacgacagaagggtaatttgggaattattgctcccatcgccattggtttcattgtcggcgctaacattttgttgggtggggccttctctggagcggccatgaaccccgctgtgacatttgggcctgctgtcgtgagctggacctggaccaaccactggatctactgggccgggcctctcatcggtggtggaatcgctggccttgtttacg

SEQ ID NO: 200243 - DNA, 294 bp, Glycine max
tggctgcggaagacgacagaaggggggcaagaagcttgtctctgccaccaaggagggtctcaaacttgacgagagtgaagatgagaagaagaagcaagaggagttgaaggagaagtttgacaacctatgcaaggtgatcaaggatgttttgggtgacaaggttgagaaggttgtagtctctgaccgtgttgttgattcaccatgctgtctggtgactggagaatacggttggactgcaaacatggaaaggatcatgaaagctcaagccctaagggacaacagcatggcaggata

SEQ ID NO: 200244 - DNA, 295 bp, Glycine max
actgcgagaagacgacagaagggggcacaagtgagtttgttgatcgagataactagaaacagtgtgatgaaaatgaaggtccttgttttcttcgttgctacaattttggtagcatggcaatgccatgcgtacgatatgttccctctccgaatgaacactggctatggtgcccgtactccggaggtgaaatgcgcaagttggaggcttgctgtggaagcacacaacatctttggctttgagaccattcctgaagagtgcgttgaagcaacaaaggaatacatccatggcgaacaat

SEQ ID NO: 200245 - DNA, 290 bp, Glycine max
tatcgagccgaattggctcgagacggctgcgagaaacgacagatactggacagtatgatgacttgtggcggtgcaatctcagtgtcactgctgctgctgcttctctcttgttttacagaaatagccttggctggctgcgataaggctccagtgctgttcgtcttcggcgattccaactcggacacgggtggactcgcctccggactcggtttccctataaatcctcccaatggccgcaatttttttcacagatccactggccgcttgtacgatggtcgcctcctcatcga

SEQ ID NO: 200246 - DNA, 298 bp, Glycine max
cggctgcgagaagacgacagaagggggaacaacagttgcggagtcaatcgacatcgagcggacatgcgttgcccatgacggtcttcaaccaagtcactcgcgtggtggggaaggggctcttcctaccgaatccgatgagcatcctaagatctaaccgcatgaaactctgggccaccaacgaggtccgtgccaaatccaagttctggtattttttgagaaaattgacgaaggttaagtaaagcaatggacaagtgctagccatcaatgagttttttgagaagaatcctaccaagattaa

SEQ ID NO: 200247 - DNA, 295 bp, Glycine max
tacggctgcgagaagacgacagaagggggatgcacaagtttgttgagatagctagaagcaataagatgacaatgaaagtgcttgttttgtttgttgctacagttttggtagcatatgaatgccatggctcagactaccagaagttccctctccaaatgaaaactgggtttggtgggcaatacagcaatgagattgcatgtgccagttggaggcttggcgtggaagcaaacaacgtagtcaagtggcaaaccgttcctgcagcttgcggagagtacatagctgactacgttctagg

SEQ ID NO: 200248 - DNA, 293 bp, Glycine max
tacggctgcgagaagacgacagaagggggcagttcaattccaatatattccattctctctgtgtatttcactacctctcccttcaagatgcagatcttcgtcaagaccctcatcggcaagaccatcacccttgaggtggaaagctctgacaccatcgacaacgtcaaggccaagatccaggacaaggaaggaatccccccggaccagcaacgtctcattttcgccggtaagcaacttgaggacggccgtacccttgctgactacaacattcagaaggagagtactcttcacct

SEQ ID NO: 200249 - DNA, 293 bp, Glycine max
gaagacgacagaaggggatccttcgtccagctagcaccacattcacctgaggcttccaaagcaatggcttcccttgcagcatccactgctgctgcttcccttggcatgtcagaaatgcttggaaaccccatcaacttcagtggtgccacaaggccagctccatctgcttctagtcctgcttccttcaagactgtggctcttttctcaaaaaagagggctacacaaacacctccaaaaaaagctgctgctgctgctcctgccaatgatgagtttgcaaagtggtatggtcctga

SEQ ID NO: 200250 - DNA, 243 bp, Glycine max
ctgcgacagaaggggataatggtgtttttgaagttcttgccacaaatggagatactcatcttggaggtgaggactttgatcagagaataatggagtacttccattacattgatcaagaaaaagcatggaaaggatattagcaaggacaacagagcacttggaaagctgaggagagatgctgagcgtgcaaagagggctctcagcagccagcaaccaggtccgagtggaaattcaatcactttt

SEQ ID NO: 200251 - DNA, 271 bp, Glycine max
tacggctgcgagaagacgacagaaggggttcgaggttctctacatggttgatgctattgacgagcatgctgttggtcagcttaaggaatttgagggaaagaagttggtctctgctactaaggaaggcctgaaacttgacgagagcgaagacgaaaagaaaaagaaggaagaattgaaggagaaatttgagggtctcctgccatgtgatcaaggatgtgttgggtgacaaggtggagaaagttgtggtgtctgatcgtgttgtggattctcc

SEQ ID NO: 200252 - DNA, 288 bp, Glycine max
tagacgacagaaggggggattattgaacgtaaatctgtgcacgagcctatgcaaacagggttaaaagcagtagatagcctggttcctataggccgtggtcaacgagaacttataatcggggaccgacaaactggaaaaacagctattgctatcgataccatattaaaccaaaagcaaatgaactcaagggccacctcagagagtgagacattgtattgtgtctatgtagcgataggacagaaacgctcaactgtggcacaattagttcaaattctttcagaagcgaat

SEQ ID NO: 200253 - DNA, 290 bp, Glycine max
tacggctgcgagaagacgacagaaggggatcgaagcaaaatatgataacccaaagtgcttctctcctctgcccttttctctctcttgctatccttttggctaatggcactgctgcaagtgcaactccaagaagcgcagtgccaagccaccatgtttcagcattcaacagaagcctttttccttccacttttctctttggaattggttcttctgcttaccaggcagaaggagcagcaagtgtagatgggagaggaccaagcatatgggacacctacactagacagcatact

SEQ ID NO: 200254 - DNA, 293 bp, Glycine max
cgagaagacgacagaagggggagcgaagaagatattagggtttttgagtgcggtgcggcgatcctagcactctcttctgcagctttcggcgacagcttcattcaccatggctgagcaaaccgagaaggcttttttgaaacaaccaaaagtgtttctcagctcgaagaaaactgggaagggaaagagacccggaaagggtgggaaccgcttttggaaatccattgggcttggatttaagactcccagggaagccatcgaaggaacctacattgacaagaagtgccccttcactg

SEQ ID NO: 200255 - DNA, 290 bp, Glycine max
gctggagaagacgacagaaggggacaactacatttacaaaacaaaagccatagtttgttacttctcttcgccttttgctttgcaattgtcaccacacaattcttgcttagctctcacaagcaagcattatcaacaatgaagaaaattgtgttaaaggtggacttacatgatgacaggatcaagcgaaaagctatgaagacagcatctggcctttcgggggttcaatcagtttctgttgacattaatgacaagaaaatgaccttattgggggatgttgatccagtgagtgc

SEQ ID NO: 200256 - DNA, 291 bp, Glycine max
acggctgcgagaagacgacagaaggggagagcagagaagagaagagagtttcaagaatggggagcgaagaggagaagggtgaattctacttgcgatactacgtgggccacaagggcaagttcgggcacgagtttctggagttcgagttcagacccgacggcaagctccgctacgcgaacaactccaactacaaaaacgacaccatcatccgcaaggaggtttacctcaaccctgccgttttgcgtgagtgccgccgtatcatcgccgagagcgaaatcatgaaggaagacg

SEQ ID NO: 200257 - DNA, 285 bp, Glycine max
acggctgcgagaagacgacagaaggggaaagggaattgctgttgaagatccattttctccacatggcttaaagcttaccattcaagactatccttttgccaatgatggactccttctgtgggatgctataaagctatgggtcactgactatgtcaaccactactaccctgaaccaagtcttgtagagtcagatgaagagctgcaggcatggtggacagagattagaacccttggtcatgctgacaaaaagatgagccatggtggccacatcttaaaaccccaaaa

SEQ ID NO: 200258 - DNA, 277 bp, Glycine max
tacggctgcgagaagacgacagaaggggagtgtgaaataaccaaacaaaccataaaatggaaaaggtgaacagaaataatttgaagtaaacattgtattgttcttatttgtctcaccccatgctcaccatgctggccttgtcgcagaatgcagataatgcagctaccgtgtctaattagatttgaggcacgtaaactacgcttttcatgccaaatgctgttgcctaatgaagaatgagttgatgtttaacacttggcacatgtgaaactagtatcaa

SEQ ID NO: 200259 - DNA, 285 bp, Glycine max
gctgcgagaagacgacagaagggtacgaactcaattcattatttcagggtaataaattagaaccaaaggaaagaggtctttaagatgaaaacaaaaaatgcaaatgtaggttccttttttgaacacaaaatatttttacttccattttttgactgaaagaataaaaaaatgatatgattcaacctcaaactcatttgaatgtagctgataatagcggagcacgcgaactgatgtgtattcgaatcctaggagctagtaatcgacgatatgcttatattggtgaca

SEQ ID NO: 200260 - DNA, 161 bp, Glycine max
tacggctgcgagaagacgacagaagggggggatcatgaacagcttcatcaacgatatattcgagaagcttgcgcaggaagcagcgcgtctcacgaggtataacaagaagccgaccattacatccagggagatccagaccgctgtcaggttggtgctgcccg

SEQ ID NO: 200261 - DNA, 294 bp, Glycine max
acggctgcgagaagacgacagaagggggagacatcgaagaccagcactctggttgccgatgcaccatcttctccaaagttatcatattcgaaagagacacaaggaagtgacctgtcacaggtctgggcaattagggacggaaaaggagaaacacgaaaatgtttttccacatagtactggagcgaaatatgcagcttcatccacgctactttggtcgtaaccttcgcgataatctcgtttccaagcttatgaaagacgtggaaggcacttgcagtggccgacatggatttgtgg

SEQ ID NO: 200262 - DNA, 291 bp, Glycine max
tgcgagaagacgacagaacggatcgaaaatactaatagagtagaaatagaactgtcttttcatatagatatcccttcaacacaacataggtcatcgaaaggatctcgaagacccaccaacgcacgaaagccgggatctttcagaaaatggattcctattcgaagggtgcataaccgcatggataagctcacactaacccgtcaatttgggatccaattcggttccttaggaggtatcgggaaggaattttggaatgtaataatatcgattcatacagatacagaagaaagg

SEQ ID NO: 200263 - DNA, 287 bp, Glycine max
tacggctgcgagaagacgacagaaggggagagagcttccatctgatgatcctcgaagtttcaagcaacaagctgatatccattgtgcttattgtgatggtggctataagcaattagggttcccagttgagctagacttcaaagtccacttttcatggatatttttccctttccaccgttggtacctctatttctatgagcgaatcttgggtagcttgattgatgacccaacctttgcacttccgtattggaactgggacaatcctgatggtggcatggtattgcctt

SEQ ID NO: 200264 - DNA, 286 bp, Glycine max
ctgcgagaagacgacagaagggggtgatttgagaggatcgtgagagggacggtagcagagattccgtgagttgcaaaaatgaaaacaattctttctgcagagaccatgaacatcccggacggcgtgagcgtcaaggttaatgccaaggtcatcgaagttgagggcccccgcggaaaattggtgcgagacttcaagcacttgaatctcgattttcagctcatcactgacgaaaacggtaaaaggaagctgaaggtggaggcctggttcggttctcggaaaacatccg

SEQ ID NO: 200265 - DNA, 286 bp, Glycine max
acggctgcgagaagacgacagaagggggcacaagtgagtttgttgatcgagataactagaaacagtgtgatgaaaatgaaggtccttgttttcttcgttgctaaaattttggtagcatggcaatgccatgcgtacgatatgttccctctccgaatgaacactggctatggtgcccgtactccggaggtgaaatgcgcaagttggaggcttgcttgtggaagcacacaacatctttggctttgagaccattcctgaagagtgcgttgatgcaacaaaggaatacttc

SEQ ID NO: 200266 - DNA, 162 bp, Glycine max
acggctgcgagaagacgacagaagggggcaaaagttagtagtagtgaagaaaatgaaagtcctcgttttctttgttgctatagttctagcagcatggcattgccatggctcagaccatgaccatgaccatggcaacacctaccaaattttcctctgagaatg

SEQ ID NO: 200267 - DNA, 286 bp, Glycine max
acggctgcgagaagacgacagaaggggagcgaaacagagagtgatttcagtgagtgatcggtgttcacttgatctcatcataatcgtcagcgtcaattgaagaagatgccgatcagaaacatcgccgtcggaaggcctgaagaggcgactcaccccgacacgttgaaggcggctttggctgagttcatctcaaccttcatcttcgtgttcgccggctcaggctccggcatcgcctacaacaagctcaccgacaacggcgctgccacccctgccggcctcatctccg

SEQ ID NO: 200268 - DNA, 286 bp, Glycine max
acggctgcgagaagacgacagaaggggactcactcaacaaaaactatcagtgaggtcagtggcactgggagaaaaccttggaatcaaaagggaactggtagagcaaggccatggttcattgcgtgggcctcagttcaggggtggtgccaccatgcatggccctaagccccgaagccatgctttcaaagtcaataagaaggttcggcgtctagggctgaagattgctttatcagctcgtgcagcagaaggaaagcttcttgtttttgaggatctggcggttcccaca

SEQ ID NO: 200269 - DNA, 262 bp, Glycine max
acggctgcgagaagacgagagaagggtgcgccacgtcgctgaaaccctcaacatcgatttggaggagctctatattcacattggatggcctttgtatcgcaaatatggtcacgctttcgaggctttcaaaataattgtgactgatcctgatactgttttaagtactctcactcgtgaagttaaggaagttggccctgatgggcaagaggtgactagtgtggtgccagctgtatcagaagaagtgaaggactctcttgtgaag

SEQ ID NO: 200270 - DNA, 282 bp, Glycine max
tacggctgcgagatagcgacagctgggggaacttctcacgttcatttctacacatcgctagctctgtcgttccgtcgttgacgatggcgtgtccggtgcgaaccctgaccctccgatctctctttcttctctctctcttgtccatcgcttccgccaatgtcttcttcgaagagcgtttcgatgacgggtgggaaaatcgatgggttaaatcagattggaaaaaagatgagaacgtggctggggagtggaacacacctctggtcaatggaatggggacgctaa

SEQ ID NO: 200271 - DNA, 283 bp, Glycine max
acggctgcgagaagacgacagaagggggcagcagcacctttaaacgccgaatgttcatccaatctccgaaggccttcaccggattgcaaccatgtcgaggagaaaggttagagagccaaaggaggaaaacgtgactctgggcccagctgttagagatggtgaacatgtttttggagtcgctcgcatctttgcctccttcaatgacaccttcattcatgtcactgatctgtctgggagggaaacacttgtccgcatcactggcgggatgaaggttaaagctgac

SEQ ID NO: 200272 - DNA, 280 bp, Glycine max
tacggctgcgagaagacgacagaaggggggagaagaattaagcactcggttgcagaacagaacaaacttctttcactctttcgcttctgaatcttcaacaatggtgctcgaggcgacgatgatctgtatcgacaattctgaatggatgcgtaacggagattactctccttctcgatttcaagctcaagcagacgctgtcaatctcatatgcggtgctaaaacgcagtctaatccggaaaatacagtgggagttctcacaatggctgggaaaggcgttcgc

SEQ ID NO: 200273 - DNA, 277 bp, Glycine max
cggctgcgagaagacgacagaagggggcacaagtgagtttgttgatcgagataactagaaacagtgtgatgaaaatgaaggtccttgttttcttcgttgctacaattttggtagcatggcaatgccatgcgtacgatatgttccctctccgaatgaacactggctatggtgcccgtactccggaggtgaaatgcgcaagttggaggcttgctgtggaagcacccaacatctttggctttgagaccattcctgaagagtgcgttgaagcaacaaagga

SEQ ID NO: 200274 - DNA, 268 bp, Glycine max
  unsure (1)..(268): unsure at all n locations
ggggcngcagaagaacaagtagttgagaactanagaagggagaagcgaatgngcttcctccaatgnatctcttccccccagctgttacccactgtncaaccgtgccggtgccggcatggttgctccattccactgggcctcaagtccatggctggcttccccaccagaaagaccaacaatgacattacctccattgctagcaacggtggaagagtgcaatgcatgcaggtgtggccaccagttggcaagaagaagtttgagactcttt

SEQ ID NO: 200275 - DNA, 270 bp, Glycine max
caaccaggttcccaaggaaagtactcaaactaaggtgaagagacgaggtggcccaggaggtctcaccaaaatctgtggtgtttcgcctgaacttcaggtcattgttggccagccagcattgtcgaggactgagattgtgaagcaactgtgggcttacataaggaagaacaatctccaagatcccagcaacaaaaggaaaataatttgcaatgatgaactgcgtgtgggtgttgagacggattgtactgatatgttcagatgaataagttg

SEQ ID NO: 200276 - DNA, 267 bp, Glycine max
aaccgctgcgagaagactacagaaggggaaatacaacacaaacaattaacacacacaaacagaggctacgtacgatcaaattaattaagatggcggaagtgaggaacaaacaagtggttctgagggactatgtgagtcgttttcctaaggaatccgacatgaacatagttgaaggaaccacaatattgaagcttccacaaggttccaatgatgtgcttctaacaaatctctacctttcctgtgacccttacatgagaatgctcataa

SEQ ID NO: 200277 - DNA, 265 bp, Glycine max
tacggctgcgagaagacgacagaaggggagagtggtggagtgtgcagaagagcgtcgcagtcgcaaccctaatcagaagaagcgcacttcaagcgagtgacagccaccagccatgggtcgtatgcacagccgcggtaagggtatatcctcttctgctttgccctacaaaaggacacctcctagctggctcaagatctccttcgcaagatgtcgaagaaaatatctgcaagtttgcgaagaaaggtttgaccccgtctcagattgg

SEQ ID NO: 200278 - DNA, 263 bp, Glycine max
gactcatagtagagtaaccaaaaggagagtgcaataactcgttgtacattcctagtgtgtgggagagacatggctaagatgtgtgttttggtgttggttcttgctctggctgtggccacaagtgccagaaacgttcccaaccccaaggatgctggtcttaaggaccagaagaacttcatcagctatggtggagttggtggttattccgggattgggaacaatggactgctttttggaggagctggtgccggaataggtggtgg

SEQ ID NO: 200279 - DNA, 263 bp, Glycine max
acggctgcgagaagacgacagaagggggcgcattgaacgaaaattagggtttgtagtgtagcaggaagaagcagcaatggcgccgaagataacacgtaaggttagcagaaaccctgaattgataaggggaatcggaaagtactcgaggtcacagatgtaccacaagaggggcatttgggctatcaaggccaaaaacggtggcgttttacctcgccacgaccctaaacccaagcctgaagctcctgctgaaaaaccacccaaat

SEQ ID NO: 200280 - DNA, 260 bp, Glycine max
tacggctgcgagaagacgacagaaggggaatgaagaacatcgacgaacagatgatcaatgtgcagaacaagaactcctcctactttgttgagtggattcctcacaacgtgaaatccacagtctgtgacattcccccaactggcttgaagatggcttcaacattcattggtaactctacctccattcaggaaatgttccgtagagtgagtgagcaattcactgctatgtttaggaggaaggctttcttgcattggtatacc

SEQ ID NO: 200281 - DNA, 264 bp, Glycine max
acggctgcgagaagacgacagaagggggagaaagacacgatgcaggaagcgacgaaggtgataataatcggtgccggaacttctggtatcgccaccgccggttgcttaacgaagcaatcaataccttacataatgctcgagagagaagactgtttcgcttcgctgtggcagaaatacacctacgatcgtctccaccttcatttgaggaagcaagtttgcgagttaccgcacttaccgtttcccaagtcttaccctcactacgtg

SEQ ID NO: 200282 - DNA, 264 bp, Glycine max
acggctgcgagaagacgacagaagggggaggagcaagcaaataaaacccaaacaaacgcttctcattctctctctactcgttttgaagatgtttctcacaaggactgagtatgaccgaggagtcaacaccttttcccccgaaggacgtttgtttcaggttgagtatgcaatcgaagccatcaagctgggatcaactgcgattgggttgaagaccaaagagggtgttgtcctcgcagttgaaaagcgcatcacttcgccgctcct

SEQ ID NO: 200283 - DNA, 268 bp, Glycine max
tacggctgcgagaagacgacagaagggatcgactcaacgaacacttccaagagttgggaaacgcgttagatcctgatagaccaaagaatgacaaggcaactatcctcactgagaccgtccaaatgctaaaggacttaaccgctgaagttaataggcttaaaacagagcataaaacactttctgaagagtcacgcgaactaatgcaagaaagaatgaactcagagaagagaagacatctcttaaatctgatatagaaaatcttaatgtg

SEQ ID NO: 200284 - DNA, 257 bp, Glycine max
ggctgcgagaagacgacagaagggggaacacaaacagcagcgtcttggtttgtgagagagacagaggcacagagagaaaatggtttcggggtcaggaatctgcgcgaagagggtagttgtggacgcgcggcaccacatgctggggaggctggcatcgatcgtggcgaaggaacttctgaatgggcagaaggtggtggtggtgcgctgcgaggagatttgcatctccggtggggctcgtcaggcagaagatgaagtac

SEQ ID NO: 200285 - DNA, 262 bp, Glycine max
ctgcgagaagacgacagaaggggacgcaactgaaaaagaaaagccttccactattccatatatagcagccaaaaaagaatgaagaatactgcgttgttcactatctttctactccttgctttcacctcatacctaccttcagccaccgctgctagtgtgtacgatacggatggtaatattcttcaaaagggttgcacatattttgtgttggcagctacaagaggaaacggcggtggaatagaatttgccgcaactggaaacg

SEQ ID NO: 200286 - DNA, 262 bp, Glycine max
tacggctgcgagaagacgacagaagggggaggaaaggaaaggggaacccaaaccgaaaccctaaccctaacggagagatggcggacacttggcatcgatattcgggacggagaaggacagggtgaactgtccgttctacttcaagatcggcgcgtgcaggcacggcgaccggtgctcccggcttcacaccaagccgacaattagcccaacattggttctgtcgaacatgtaccagaggcccgacatgaacatgagcattatc

SEQ ID NO: 200287 - DNA, 260 bp, Glycine max
tacggctgcgagaagacgacagaagggggaacttctcacgttcatttctacacatccctagctctgtcgttccgtcgttgacgatggcgtttcgggtgcgaaccctgacctccgctctctctttcttctctctctcttgtccatcgcttccgccaatgtcttcttcgaagagcgtttcgatgacgggtgggaaaatcgatgggttaaatcagattggcaaaaagatgagaacgtggctggggagtggaaccacacctctg

SEQ ID NO: 200288 - DNA, 263 bp, Glycine max
acggctgcgagaagacgacagaagggttacacccttggtggctgcttggtgagttggaaggcaacacttcaaccttctgttgctctctcaactattgaggctaaatatatggctcttattgaagctgcaaaggaaggaatttggctgagaggtctgataaatgatctcgaaattaatcaagaatatgctaacatctactgtgacagccttagtgctatatgcttggccaaggattaggttcatcatgatagaaccaagcatat

SEQ ID NO: 200289 - DNA, 268 bp, Glycine max
tgcgagaagacgacagaagggggaggcttaggcaactaagaaagaaagatgaagctgaaggtatatgcggaccgcatgtcccagccatcccgtgcggttctcatattttgcaaagtgaatggaatagattttgaggagatcaaagtcgatttatccaaacgtcagcagttatctcccgaattccgagcggttaaccctttaaggaaagtccctgctattgttgatggaacttacaagctatttgagagtcatgctattctcatatatc

SEQ ID NO: 200290 - DNA, 256 bp, Glycine max
acctcgagcgaatcggctcgagacggctgcgagagacgacagaccggcatgttaaaggctcagcttactttgtctatacgcttctcaagaagaggccacaaaacagaaggatgcattggctagtgaagttacatctctccgagtagagttgcaacaagtgagggatgatcgagaccgccaattatctcaagcgcaaactttaacatctgaattagagaagtctaaagattttacagaaaagtcctgctctgaactg

SEQ ID NO: 200291 - DNA, 256 bp, Glycine max
gggcacaagtgagtttgttgatcgagataactagaaacagtgtatgaaggtccttgttttcttcgttgctacaattttggtagcatggcaatgccatgcgtacgatatgttccctctccgaatgaacactggctatggtgcccgtactccggaggtgaaatgcgcaagttggaggcttgctgtggaagcacacaacatctttggctttgagaccattcctgaagagtgcgttgaggcaacaaaggaatacatccat

SEQ ID NO: 200292 - DNA, 260 bp, Glycine max
acggctgcgagaagacgacagaaggggagggtattgcactgcggctgctacttcggctccatcttctccgatctcctcaaactctatcagcgcagaaccaagcctctatcaccatggggaagacacatggaatgggagctgcccgcaagctgaagtctcaccgtaggagacaaaggtgggctgacaagtcatacaaaaagtctcatctgggaaatgaatggaagaagccttttgctggttcatcccatgccaagggtatt

SEQ ID NO: 200293 - DNA, 253 bp, Glycine max
gtcatgtgcctgagacaaattatatttttatgggagactttgttgatcgaggttacaatagtcttgaagtttttaccatccttttacttctaaaagctagatacccagctaatattactcttttacgtggaaatcatgaaagtagacaattaacccaggtctatggattttatgatgaatgccagaggaagtatggcaatgccaatgcttggcggtattgtacagatgtgtttgacaatttaacactttctgc

SEQ ID NO: 200294 - DNA, 262 bp, Glycine max
ggccaacgagatctctgtctccgccgaagaggaattcaatatcgagaagctgcagttggtcgaagccgacaagaagaagatcaggcaagaatacgaacgcaaagagcgccaagttgaaattcgcaagaagattgagtactcaatgcagctgaatgcttctcggattaaagttcttcaagctcaagatgacgtgatcggttccatgaaagaagctgcatccaaggaacttttgactgtgagtcatcatcatgatgatcatgtg

SEQ ID NO: 200295 - DNA, 262 bp, Glycine max
tacggctgcgagaagacgacagaaggggacaagtgagtttgttgatcgagataactagaaacagtgtgatgaaaatgaaggtccttgttttcttcgttgctacaattttggtagcatggcaatgccatgcgtacgatatgttccctctccgaatgaacactggctatggcgcccgtactccggaggtgaaatgcgcaagttggaggcttgctgtggaagcacacaacatctttggctttgagaccattcctgaagagtgcgt

SEQ ID NO: 200296 - DNA, 262 bp, Glycine max
tacggctgcgagaagacgacagaagggaaagagacccggaaagggtgggaaccgcttttggaaatccattgggcttggatttaagactcccagggaagccatcgaaggaacctacattgacaagaagtgccccttcactggcaatgtttccatccgtggccgtatcttggctggaacatgttacagtgctaagatgaacaggactattattgttaggaggaattatctccattttatcaagaagtaccagaggtacgagaaa

SEQ ID NO: 200297 - DNA, 258 bp, Glycine max
tacgctgcgagaagacgacagaaggggaatggataaagggaatagagatgatgatagagatcatactgagaaacagaataattccgtacgggtacaacttttatttgaacgaatgaaaaaaatgcgatctttgttgtctaatagaacaaacacgaataccttaattgagtcggtcaagatcaaatctgtttatcaaagtgcttctctgattgctcaagacatttcttttcaactgagaaagaaaacaagatcatttcg

SEQ ID NO: 200298 - DNA, 256 bp, Glycine max
tagctgcgagaagacgacagaagggggcacaagtttgttgagatagctagaagcaataagatgaaaatgaaagtgcttgttttgtttgttgctacagttttggtagcatatgaatgccatggctcagactaccagaagttccctctccaaatgaaaactgggtttggtgggcaatacagcaatgaggtggcatgtgccagttggaggcttggcgtggaagcaaacaatgtagtcaagtggcaaactgttcctgcag

SEQ ID NO: 200299 - DNA, 259 bp, Glycine max
tacggctgcgagaagacgacagaaggggatccaatccaattgaattctccagagagaagaagaaacttaatcgatcatcacttcacttcactaatacatcatggcagacgagacccagaacaagtatgagagctctgaggttgaggtccaggatcgtggtgtttttgactttctcggtaagaaaaaggatgaagaagacaagcctcatcctcaggaggaggtcatcgccaccgagtttcaaaaagtcactgtctcagac

SEQ ID NO: 200300 - DNA, 240 bp, Glycine max
tacggctggagaagacgacagaagggggcatcaattcaaaatatatcatcaattataagcatgggtttgtggaacacgacgaatgcagtgtcttgccgctttcacaagtttggtgatgaccaagagaatctggtcttccaaggtgatgccacgtcttcttccaggggcatagaactcacaaagttagacggtggaggaaaaccagtgggtagcagtgtggggagagtgttatactcttct

SEQ ID NO: 200301 - DNA, 256 bp, Glycine max
gcataaacaaatcacagcatctctacctataaccacattctctctaccaggcgcaaaataagagaagggactcgcaacaaattcggactgccaagatatagggaggaaaatcaatttaagaaacattaaaaaacaacatgaaacccactttcacattaggacattctcgaacaccaacaaaactcaactacataaatgacattctgcataaatacttctactgctgcttgcactctggaggtcgctcaccctgctg

SEQ ID NO: 200302 - DNA, 251 bp, Glycine max
tacggctgcgagaagacgacagaaggggggtattgcgtgttggtgtgaatcaagaaccgctctgctatggctgctctgcaatacttggaatcgctgcgtaattcgcaccctgagctctccgattggtacaattcgctggcggatctgtaccagaagaagctctggcaccagctcactctcaagctcgagcagtttgtggctctcgccgtcttccaggctggtgatgctttaatacaataatatcacaattt

SEQ ID NO: 200303 - DNA, 259 bp, Glycine max
actcgagcgaatcggctcgagtacggctgcgagaagacgacaacagggcatgactcctatatctgaaacatttactgatgatattaattcaaagcttgatagggaactgatgaatgagatattggagaaagggcacagcagagtcccagtctattatgagcagcctacaaacattattggacttgtactggtcaagaatttattgacagttcatccagaagatgaagcacccatgaagagtgtaaccatacgcaggatt

SEQ ID NO: 200304 - DNA, 244 bp, Glycine max
cggctggagaagacgacagaaggggaaggtgctttggctgaagaaaacatgagagccatctgctttgaagtatgtgatgttgtgctgcacgctgatgctatccacagaggaggtggtcaaatcattcctactgccaggagagtcttctatgcttcccagattactgccaaacccaggcttcttgagcctgtctacctgggtgaaaatacagctcctgaacaagctcttggtgggatctacagtg

SEQ ID NO: 200305 - DNA, 255 bp, Glycine max
tacggctgcgagaagacgacagaagggggttgtgtgagtgaagaagcagagggagtagcggcattaaaaatgcagatcttcgtgaaaactctgacagggaagactataaccctcgaggtcgagagcagcgacaccatcgacaatgtcaaggccaagattcaagacaaggaaggcattcctccggatcagcagcgtttgattttcgccggaaagcagcttgaagatggcaggaccctggtcgattacaacatccag

SEQ ID NO: 200306 - DNA, 252 bp, Glycine max
ccatctccaacgacggcgccaccatcatgaagctcctcgacatcgtccaccccgctgcaaaaatcctcgccgatatcgccaagtctcaggactccgaggttggcgatggaaccaccactgtggtgttgcttgcagctgagtttttaagggaggccaagccattcattgaagacggtgttcactctcaaaacttgatacggagctataggacggcctgctccttggctattgagaagattaaagatctagctg

SEQ ID NO: 200307 - DNA, 233 bp, Glycine max
tactcgagccgattcggctcgagacgggacgacagaaggggattgactctgaattttctgcatcatattgcacacagagatcgtgatcgaaaatggcgacgttgaaggttcctgcacaacttccttctccattggaagacagtgagcaattgcgaaaagcttttcaagggtggggaacgaatgaaggattgataatatcaatcctgggtcacagaaacgcggctcagcgtaag

SEQ ID NO: 200308 - DNA, 251 bp, Glycine max
tacggctgcgagaaacgacagaaggggatgaggaaacctgaagagattacgaaagaagaatatgctgctttctacaagagtcttaccaatgattgggaagagcatttggctgttaagcacttttctgttgagggtcagctggagtttaaggctgtcctctttatccccaagagggcaccttttgatctctttgacaccaggaagaagcctaacagcatcaaactgtatgtccgccgtgtcttcatcatgga

SEQ ID NO: 200309 - DNA, 260 bp, Glycine max
tacggctgcgagaagacgacagaaggggggcaatggcaatggcaatggcacttggcaggctttcatcttccttcaacaagcctttacgtcctctcttcaatgctggctcagtttactacaagtcctctttgcctgctgaagctgcgtacgacaatgagaaaagctgtgatacggaattgaatgctccacttgaggttgttgatcctgagattgctgatatctatgagcttgaaaaagctagacaatggaagggactggaa

SEQ ID NO: 200310 - DNA, 140 bp, Glycine max
tcatgaggaattgaagaaaggggcatggacgggtccaagagatcagaaactcattgcttacattcagaaacatggcacaggaagctggcgtaccttgccacaaaaagcaggtcttcaaagatgtggcaagagttgcaggc

SEQ ID NO: 200311 - DNA, 134 bp, Glycine max
ctcgagcgaaaatatatatggagaactgaaggttttcgtgggctgttcaaaggacatggtactaactgtgcgcgaattgtcccaaattctgctgtgaagttcttcagttatgagcaagcttccaaaggcatact

SEQ ID NO: 200312 - DNA, 130 bp, Glycine max
tacggctgcgagaagacgacagaagggggcacaagtgagtttgttgatcgagatgactagaaacagtgtgatgaaaatgaaggtccttgttttcttcgttgctacaattttggtagcatggcaatgccat

SEQ ID NO: 200313 - DNA, 132 bp, Glycine max
tacggctgcgagaagacgacagaaggggatagcaatccttatagtcggcttatggcacttcagagaatgggtattgtggacaactatgaaagaatacgcgatttctccgttgccatagttggagtaggtggt

SEQ ID NO: 200314 - DNA, 129 bp, Glycine max
gctgttggtgaggcagttgcctatgttctttcggggatgtatggcagtgtggggcaacttggagtagggaatgccatcctcatcatcatccagctatgttttgcgggtataattgtgatatgtctagat

SEQ ID NO: 200315 - DNA, 131 bp, Glycine max
ctcaactcagctgcaacgagtcttcaaaagcaacttcctggtcttaagattgcggttttcgacatttacaagcctctctatgaccttgttcaatccccttcaaaatctggttttgtggaggcaaacagagg

SEQ ID NO: 200316 - DNA, 130 bp, Glycine max
aatcgagcgaatcggctcagtacggctgcgagaagacgacactagggggaccctttagcttcttttcagataatatgggcttagtctgcagcagaagtcgtcgttttcgtgaagctgatgctgaagaaaa

SEQ ID NO: 200317 - DNA, 130 bp, Glycine max
tctcgagcgaatcggctcgagacggctgcgagaagacgacagcagggaaagagacccgcgaaagggtgggaaccgcatttggaaatccattgggcttggatttaagactcccagggaagccatcgaagga

SEQ ID NO: 200318 - DNA, 265 bp, Glycine max
cggctcgagacgacagaaggggggagtaattcaattctcactcactagtcactatggaaatgcatagtagtataattttttgcatgttcttccttccgtggctctccatggttggtgctaaggttccggcaatgatcgcgttcggggactcgtcggttgatgctgggaacaacaattacatagcaacggttgctcggagcaatttccagccatatgggcgtgactttgtgggtgggaagccaactgggagattcagcaatggccg

SEQ ID NO: 200319 - DNA, 264 bp, Glycine max
tactgcgagatgacgacagaaggggcaccacactcttattgttttcttcatatcttccttgtcactgcccgtgtgtcgccgccatggccaccgtcaccacccaagcctccgccgcaattttccggccatgtacctcgaaatcgaggtttttgaccggctcttccggtaaacttaaccgggaagtgactatgcggccaatggggtgccctccttctgcctctttcaaggttgaagccaagatcggagagtggttacctggcttgg

SEQ ID NO: 200320 - DNA, 263 bp, Glycine max
tacggctgcgaagacgacagaaggggaacggaaaagcactggcgcagtaccctgaggcttctcttctcttctcttctctgtcgtgagtcaccatggtgagggttagtgtgctgaacgatgctctgaagagcatgtacaatgctgagaaaaggggaaagcgccaagtcatgattaggccattctccaaagtcattatcaaattccttttggtgatgcaaaagcacggatacatcggagagtttgagtatgttgatgaccacagg

SEQ ID NO: 200321 - DNA, 245 bp, Glycine max
acgaacagctcggaacgacttttaagaaaacgaagtccgttttgattgccaaggtggattgtgatgaacagaaaagtgtttgtagtaaatatggggtatctggttaccctaccattcaatggtttcctaagggatctctagagcctaaaaagtatgaaggtgcacgtactgcagaagcccttgcggcgtttgtgaacattgaagcaggtacaaatgtgaagatagcttctgttccatccagtgtg

SEQ ID NO: 200322 - DNA, 264 bp, Glycine max
cggctcgagcggctcgagacggctgcgagaagagacagaagggggctccgccatttttcgtggctgctgttcttgcgcgtgaacaagcctcaggtaagccaaaaccatggttaagcataacaatgttatcccaaacggacacttccgtaagcactggcagaactatgtgaagacttggttctatcagccagcacggaagacaaggagacgattggctcgtcagaagaaagctgtgaagatattccccagacctacggctggacc

SEQ ID NO: 200323 - DNA, 267 bp, Glycine max
tggctgcgagaagacgacagaagggggcacaagtgagtttgttgatcgagataactagaaacagtgtgatgaaaatgaaggtccttgttttcttcgttgctacaattttggtagcatggcaatgccatgcgtacgatatgttccctctccgaatgaacactggctatggtgcccgtactccggaggtgaaatgcgcaagttggaggcttgctgtggaagcacacaacatctttggctttgagaccattcctgaagagtgcgttgaag

SEQ ID NO: 200324 - DNA, 266 bp, Glycine max
cggctgcgagaagacgacagaagggagatgaaaaataaaggaaggaatgttgtgtggtcaattgcgatggataagtgtctaattgaagccctggcagctcaggcaaaacgtggaaacaaaattgacaaatgtttcaatgaaaatgcatacacggatttatgtgtagcagtaaacacttgcttcagcttgaatttgagtaatcagaaagttatcaaccgtttgaaaacaattaagaagaggtatagagtaataaaagatatcctaag

SEQ ID NO: 200325 - DNA, 264 bp, Glycine max
acggctgcgagaagacgacagaaggggatagctattcgcagttcccaaattcattttaatcctaattctgcacttcttgatcattcgatttttctcctcaagatgcagatattcgtaaaaactttgaccggcaagaccatcacccttgaggtggaatcctccgacaccattgacaacgtaaaagctaagattcaagacaaggaagggatcccacctgaccagcagagacttatctttgcgggtaaacaacttgaggatggtcgc

SEQ ID NO: 200326 - DNA, 262 bp, Glycine max
tacggctgcgagaagacgacagaaggggagagtggtggagtgtgcaaaagagcgtcgtagtcgcaaccctaatcagaagaagcgcacttcaagcgagtgacagccaccagccatgggtcgtatgcacagccgcggtaagggtatatcctcttctgctttgccctacaaaaggacacctcctagctggctcaagatctcttcgcaagatgtcgaagaaaatatctgcaagtttgcgaagaaaggtttgaccccgtctcagatt

SEQ ID NO: 200327 - DNA, 261 bp, Glycine max
gctgcgagaagacgacagaagggatcagtggtgccccccaggataacaacataatgctgtggaatgctgtcatatttggtcctgatgatactccatgggatggaggcatgttcaagttgacactccaatctactgaggactatccaaataaaccaccgactgtacgatttgtgtctcgcatgtttcatccaaatatttatgctgatggaagtatttgtttggatatattacaaaatcagtggagtcctatttatgatgtgg

SEQ ID NO: 200328 - DNA, 265 bp, Glycine max
tacggctgcgagaagacgacagaaggggggcatcaaattattgtcagatatgctgaatgcatgggattgccattgttcaggaggcgaatacaaggatcctcaaggcatcaggagcttggttacaaagaaactcaaggtgatgaagttgaagacctgtgcattttgttacgtgaagttaaaaggcagataccctcagttagtgcagtttcttctggagccattgcatctgactatcagagattgcgggtggaaagtgtttgttcaa

SEQ ID NO: 200329 - DNA, 248 bp, Glycine max
accgtttgttctattcttaactcaacttctgctacccactctcttcttccaagtccaaccacgcttttctctacagtcatgggcaaggtcaagatcggaatcaacggatttggaagaattggccgtttggttgccagagtcgctctgcaaagagacgatgtggagctcgttgccgttaacgaccctttcattaccaccgattacatgacatacatgtttaaatacgacagtgttcacggacactggat

SEQ ID NO: 200330 - DNA, 262 bp, Glycine max
acggctgcgagaagacgacagaaggggatcccaatcagaaaaagttagggtttgtaactttgtcttttgcttgcgaatctgaatcgaataataatcaatcaatcatcatgtcgtcggcgaagaagatcacactgaagagttcggacggcgaggctttcgaggtggacgaggcggtggcgctggagtctcagacgataaagcacatgatcgaggacgactgcgccgacagcggcatccctctgccgaacgtgacgagcaagat

SEQ ID NO: 200331 - DNA, 259 bp, Glycine max
acggctgcgagaagacgacagaagggggaaaaatgatggaaaggctctggggtgaaaacttctttgatccagccacaaagaaatggtccagcaagaatactggttctgctacctgcaagcgtgggtttgttcagttctgttacgagcccatcaagcagattattaacacttgtatgaatgatccgaaggataagctgtggccatgctgcaaaagcttggggtcaccatgaaatctgaggagaaggacctaatgggcaaa

SEQ ID NO: 200332 - DNA, 258 bp, Glycine max
cggcttcgagaagacgacagaagggatgcagaatcaaagtacctagcaggccttggagtttctcgtcagcgccaagccatagttgatgggctaagagacagtgttctagcattttctggtaatgtgcctggaacatcatcaaaggatatcatggacatggttctcatgactcaatattttgacacaatgaaggagattggtgcatcctccaaatccaatgctgttttcattccacatggacctggtgctgtgagtgat

SEQ ID NO: 200333 - DNA, 258 bp, Glycine max
tacggctgcgagaagacgacagaagggggtagagaaagagagaggaagatgtcgaagcgtggtcgtggtggttcggcggggaacaagttccgcatgtcgctgggtcttccagtggcggcgacggtgaactgcgccggcaacacgggggcgaagaacctctacatcatttcggtgaaagggatcaaaggccgtttgaaccgtcttccttcggcctgcgttggcgacatggtgatggccaccgtgaagaagggaaaaccc

SEQ ID NO: 200334 - DNA, 265 bp, Glycine max
tctcgagccgaatcggctcgagtacggctgcgagaagacgacagaatggggtacaagtgagtttgttgatcgagataactagaaacagtgtgatgaaaatgaaggtccttgttttcttcgttgctacaattttggtagcatggcaatgccatgcgtacgatatgttccctctccgaatgaacactggctatggtgcccgtactccggaggtgaaatgcgcaagttggaggcttgctgtggaagcacacaacatctttggctttga

SEQ ID NO: 200335 - DNA, 259 bp, Glycine max
tgcgagaagacgacagaaggggtgaccacatataccatggtgttcatttccatggccgtggccactgactcaaacgtgacaggacagctatcaggagtagcagtaggttcttctgtttgcatagcaagcattgtagccggaccaatatcagggggatcgatgaatccagcaaggacattaggtcctgcaattgcgacatcatactacaagggactttgggtatattttgttggacctattactggggcggttttagcac

SEQ ID NO: 200336 - DNA, 260 bp, Glycine max
tacggctgcgagaagacgacagaaggggggtgtagcgcagagaaagaactagaactagaactagggtttcatctttgccatcagaaacaacaatgatttacgacgttaactctccccttttccgatccttcctcagccagaagggaggctcctccgataagaggaaaacggatgaacagaagccaaaagagcagaaacccaaagccagcgagaacaaacctataatgacagagtgacaacaaatttgctgcattcagttg

SEQ ID NO: 200337 - DNA, 258 bp, Glycine max
acggctgcgagaagacgacagaagggggcatcaattcaaaatatatcatcaattataagcatgggtttgtggaacacaacgaatgcagtgtcttgccgctttcacaagtttggtgatgaccaaaagaatctggtcttccaaggtgatgccacgtcttcttccaggggcatagaactcacaaagttagacggtggaggaaaaccagtgggtggcagtgtggggagagtgttatactcttctccagtgcacctttgggaa

SEQ ID NO: 200338 - DNA, 255 bp, Glycine max
tctcgagccgaatcggctcgagtacggctgcgagaagacgacagaacggggggggaaggagtgcatgatggtttgtctggactcggaccaaatgattcacttattcctggtcttattgatgatgtagccttgaattgtcttgcttcggttagtggatctgattatgccgtgctatcgtgtattaataaaaggttcaataaactgatcaatagtgggtatctatatgggttgaggaaacaattgggggctgtggag

SEQ ID NO: 200339 - DNA, 255 bp, Glycine max
acggctgcgagaagacgacagaagggggaggaatgaaatggccaatggtaacaacattagtcatttcttcaagctcttgcttttccttctaactttccactcttgtctcgctgagattttcttccaagagagattcgaagatggatggaagagccgttgggtgctatccgattggaaaaggagcgagggaaaagcgggtaccttcaagcacacagcagggaaatggtcttgggatcctgatgacaaaggtcttca

SEQ ID NO: 200340 - DNA, 258 bp, Glycine max
tacggctgcgagaagacgacagaagggggttgattggaggaaggaaggtgctgttcctccagtcaaagaccaaggaggctgtgggagctgttgggcattctcagcaatcggtgcagtggaaggaataaataagatagtgacaggtgaactgatttcgttatcagaacaagaattggtggattgtgatacaggatataacgaaggatgcaatggaggacttatggactatgcatttgagttcattatcaacaatggcgg

SEQ ID NO: 200341 - DNA, 266 bp, Glycine max
tctcgagccgaatcggctcgaggcgagaagacgacagaagggggaacaactaaaggagagtgaaattacgtagtgtgtgggaaccaaagagagatggctaagtggtgtatgttggtgttggttcttgctctagctctggctgtggccacaagtgccagagatgcacccgaagatgtatatactcaaggaccagaagaacttcatcagctatgctggagttggtggctattcaggaattggaagcaatggactaccttttggaggtg

SEQ ID NO: 200342 - DNA, 241 bp, Glycine max
cctcgagccgaatcggctcgaggcgagaagacgacagaagggggaacaactaaaggagagtgacattacgtagtgtgtgggagacaaagagagatggctaagtggtgtatgttggtgttggttcttgctctagctctggctgtggccacaagtgccagagatgcacccgaagatgttggtctcaaggaccagaagaacttcatcagctatgcctggagttggtggttttttcaggaattgg

SEQ ID NO: 200343 - DNA, 261 bp, Glycine max
acggctgcgagaagacgacagaagggggcatcgaaccaaaattagggtttttgtcgtagcaggaagaagcagcaatggcgccgaagataacacgcaaggtcagcagaaaccccgaattgataaggggaatcggaaagtactcgaggtcgcagatgtaccacaagaggggcatttgggctatcaaggccaaaaacggtggcgttttacctcgccacgaccccaaacccaaacctgaaactcccactgaaaaaccacccaaat

SEQ ID NO: 200344 - DNA, 257 bp, Glycine max
acggctgcgaaagacgacagaaggggggtgatggaacagcaggttggcttcttggagttgtttgtgatctcaaattatctcatcctccaccaatagccacggtccctttgggcacagggaataatctaccttttgcatttggttggggaaagaagaacccagcgacagatcaaagatccattgaggcatttttagatcaagtcatgaaggctacaaaaatgaaaatagacaactggcacattctcatgagaatgaga

SEQ ID NO: 200345 - DNA, 252 bp, Glycine max
tacggctgcgagaagacgacagaaggggatagatagctccttcaattagggtttttgtgatctgcaagctacgatgggtaagggaacggggagtttcggtaagagaaggaacaagacccacaccctctgtgtgaggtgtggccgccgcagtttccacctccagaagagtcgttgcgccgcgtgcgctttccccgctgcgcgcaccaggaaatataactggagcgtgaaggccattaggagaaagaccaccgg

SEQ ID NO: 200346 - DNA, 259 bp, Glycine max
tctcgagccgaatcggctcgagacggctgcgagaagacgacagaaggggacaacatcatcatcaacaacaagcagatcaatctctctctctctcaaccataatagtcatgggtttgaaggaggattttgagcagtatgctgagaaagcaaagactttgccaccgactcaatcaagcgaagacttgcttatcctttatggattgtacaaacaggccaccgttggacctgtcaacaccagccgtcctggaatgttcaacat

SEQ ID NO: 200347 - DNA, 255 bp, Glycine max
tctcgagccgaatcggctcgagtacggctgcgagaagacgacagaacggcatgactcctatatctgaaacatttactgttgatattaattcaaagcttgatagggaactgatgaatgagatattggagaaagggcacagcagagtcccagtctattatgagcagcctacaaacattattggacttgtactggtcaagaatttattgacagttcatccagaagatgaagcacccatgaagagtgtaaccatacgca

SEQ ID NO: 200348 - DNA, 260 bp, Glycine max
cggctgcgagaagacgacagaaggggtgacaaaggaagaggacgttgaaaactgcgtgaacacaacggtttccaagtatggcaaattagatatcatgtttaacaatgcaggtgtatctgatgagatcaaaacaagcattcttgacaacaacaagtctgattttgagagagtgataagtgttaacttggttggtccttttctgggaacaaagcatgctgcaagggtcatgattcctgctaaaaagggatgcataatcaaca

SEQ ID NO: 200349 - DNA, 260 bp, Glycine max
gagaagacagaagggggcacaagtgagtttgttgatcgagataactagaaacagtgtgatgaaaatgaaggtccttgttttcttcgttgctacaattttggtagcatggcaatgccatgcgtacgatatgttccctctccgaatgaacactggctatggtgcccgtactccggaggtgaaatgcgcaagttggaggcttgctgtggaagcacacaacatctttggctttgagaccattcctgaagagtgcgttgaagcaa

SEQ ID NO: 200350 - DNA, 264 bp, Glycine max
tacgggcgagaagacgacagaaggggtcgattccaaagtcatcaaggcccagatctgggacaccgcaggccaagaaaggtatcgtgccatcaccagtgtatactatcgtggggcagtcggtgcacttctcgtgtatgatgtcactcgccatgcaacatttgaaaatgttgacagaaaatagaaagaattgcggaaccacacagatgccaacattgttgtgatgctcgtgggtaataaatcagaccttcgtcaccttgtagccgt

SEQ ID NO: 200351 - DNA, 257 bp, Glycine max
tacggctgcgagaagacgacagaaggggacagctattcctcttaagcttgctactgagtttccacactgcataccttaggtcttccgaattcgaagttaatttgcaagatggctaaggaaaaggctcagatcaacattgtggtggttggtcatgtggaccctgaggaggcaaccaccattaacgagctgaagaagcctgttgtggagaaagaagctccagggcatgccatatgagggcatgcacgtacggcctcgga

SEQ ID NO: 200352 - DNA, 257 bp, Glycine max
tacggctgcgagaagacgacagaaggggtaagagaaggaacaagacccacaccctctgtgcgaggtgtggccgccgcagtttccacctccagaagagtcgttgcgccgcgtgcgctttccccgctgcgcgcaccaggaaatataactggagcgtgaaggccattaggagaaagaccaccggaactggaaggatgaggtacttgcgtaacgtgccccgtagatttaagagtggcttcagagacggtaccgaagctgcc

SEQ ID NO: 200353 - DNA, 249 bp, Glycine max
acggctgcggaagacgacagaagggggcagccaaagaaaagaaaatcctcaattttctgagcagccaaacactctctctctgtctctcgaaaattctcagtttgcagagaaaatctgaatcatgtcgtggcaagcgtatgtcgacgatcaccttctgtgtgacatcgaaggtaaccacctcactcacgctgctatcatcggccaagacggcagcgtttgggctcagagtaccgacttccctcagttcaa

SEQ ID NO: 200354 - DNA, 254 bp, Glycine max
acggctgcgagaagacgacagaagggggcgtgttttcatcattgtcgttctgaacggaaaagcactggcgcactaccctgaggcttctcttctcttctcttctctgtcgtgagtcaccatggtgagggttagtgtgctgaacgatgctctgaagagcatgtacaatgctgagaaaaggggaaagcgccaagtcatgattaggccatcctccaaagtcattatcaaattccttttggtgatgcaaaagcacggat

SEQ ID NO: 200355 - DNA, 256 bp, Glycine max
gacgacagaaggggcgtctggaatgtcaccaaacgtgctgttggcgtcgaagtcaacaagcaggttggcaacagaattataaggaagaggattcatgtgcgggtagagcatgttatgccttcaaggtgcactgaggagttccgcctcaggaagattaagaatgatcagctaaaggccgaagccaaggtcaagggtgagaagatcggcaccaagagacagcctcagggtcccaaacccggtttcatggtggagggtg

SEQ ID NO: 200356 - DNA, 252 bp, Glycine max
ggctgcgagaagacgacagaaggggatgtcatagtattatcattcattctcatctttctctcttctctctccacccaaaccctaactcccgaccctgttcccctctcgtatccgtcatgaaaggaggaaagtccaagaccgaatctaagagagccgatcccaaacttgctgtgaataagaagggagccgccaccaaggctaggaaacccgccggcaaggggaaggcagcgaaagaccctaacaagccaaaga

SEQ ID NO: 200357 - DNA, 195 bp, Glycine max
taggctgcgagaagacgacagaaggggggttgagctatgatgaagtggaacaagatgatatagaactacttaaactggaaacctccttagattacttatgtaacttgccacctcatagatttgtgactctgtatgctaagacaattcctgagtccattgttggtgagacatttttggagcaatatcaaaatcata

SEQ ID NO: 200358 - DNA, 257 bp, Glycine max
cggctgcgagaagacgacagaaggggacgtacgcaactgaaaaggaaaaccctaagagatgaagagaactcctatcttgttccctctcttctttcttctttgtgccttcacctcatatctaccttcagccaccgctgatgatgatcatgtgtacgacactgacggcgataagcttcaatacggtgtcaattatttcgtgttgccagtgataagaggaaatggcggtggaatacaagtagcaaaagcaggaaacgaaa

SEQ ID NO: 200359 - DNA, 261 bp, Glycine max
cggctgcgagaagacgacagaaggggaccacactcttattgttttcttcatatcttccttgtcactgcccgtgtgtcgccgccatggccaccgtcaccacccaagcctccgccgcaattttccggccatgtacctcgaaatcgaggtttttgaccggctcttccggtaaacttaaccgggaagtgactatgcggccaatggggtgccctccttctgcctctttcaaggttgaagccaagaagggagagtggttacctggct

SEQ ID NO: 200360 - DNA, 239 bp, Glycine max
cgagaagacgacagaagggggaagcccaaaatattttcatagcattttcagaggaaaatggcgggtacggtttcgacttgtttcttcttcgtgtttcttctttctctccttcttccttttcagatctccgctgaggaatcctcggagaaggagttcgtactcacattggatcactctaactttcacgatactgtcagcaagcacgatttcatcgtcgtcgagttctacgccccatggtg

SEQ ID NO: 200361 - DNA, 273 bp, Glycine max
tacggagaagacgacagaaggggaacacactcatcaaaaaacccttctttctttcaggttcattacttgatcagtgtcaaaagggtagttgcaaattgcaatggctaagcatgatgttgagggtggttccttctcagcaaaggactaccatgatcctcctccagcacctttgattgatgctgaggaactcacacagtggtccttctacagggctttgattgctgaattcattgccacattacttgtcctttacatcacagtgctcactgtgat

SEQ ID NO: 200362 - DNA, 261 bp, Glycine max
tacggctgcgagaagacgacagaagggggaacacaattaaagatgataagattgcttccaagctgtctgctgatgataagaagaaaattgaggatgcaattgagcaggctatccaatggctcgatggaaaccaacttgctgaagctgacgaattcgaggacaagatgaaggagttggagagcatttgtaaccccatcatagcaaagatgtaccaaggagctggtggtgacgcgggtggagccatggatgaggatggtcctg

SEQ ID NO: 200363 - DNA, 261 bp, Glycine max
aagacgacagaaggggtagtatcacttttgtctcggaatttgttcttttgagttatggcaagcttaaaggttgcatgtgtggttttgatgtgcttggctgtgatgagtgcaccaatgatggtgcaagccgtgtcatgcaatgatgtttctgtgaacctagcaccgtgcctatcttacctgatgcagggtggagatgttccagaatcgtgctgtagcggagtgaggaacattctgggttctgccagcaccacctttgacaaa

SEQ ID NO: 200364 - DNA, 262 bp, Glycine max
acggctgcgagaagacgacagaagggggttctagtgtgtgattgtttgttgttgtaactcgttcttcttcttttgttgctctgtgtttgtgtttgttttttctctcacctgaaaatgtcttgctgcggtggtaactgtggttgcggaagctcctgcaagtgcggcaacggctgcggaggctgcaagatgtacccagacttgagctacactgagtcaaccaccaccgagaccttggtcatgggagtggcacctgttaaggctc

SEQ ID NO: 200365 - DNA, 257 bp, Glycine max
ctcgagccgctcgagtacggctgcgagaagacgacagaagggggatggtgcacttcacaaaaacattgattcaggcaaaaatagtaactgtagaagatttcctacgtcctcttgttcgtgagccacaaaagttaagaagtatacttggtagtggaatgtccaatagaatgtgggagaatactgtggagcatgccaggacatgtgtcttgggtggcaagtctttgtatactacactgatgaaaccaatagtgctggca

SEQ ID NO: 200366 - DNA, 269 bp, Glycine max
  unsure (1)..(269): unsure at all n locations
ctgcgagaagacgacagaagggggcacaagtgagtttgttgatcgagataactagaaacagtgtgatgaaaatgaaggtccttgttttcttcgttgctacaattttggtagcatggcaatgccatgcgtacgatatgttccctctccgaatgaacactggctatggtgcccgtactccggaggtgaaatgcgcaatttggaggccttctgttggagcacaatcctttaaatcnnngagaccattcctgaagaatgcgttgaagcaacaa

SEQ ID NO: 200367 - DNA, 267 bp, Glycine max
gacgacagaagggggaagacctaagatacaatagagatggcaaagctatttttgaaacaggcaaagcaatacgcagatgcaagaccaagctatcctccacaactcttccaattcattgcttccaagactccctctcactacctcgctctggacgtcggcactgggagcggccaagctgccaattctttagctgcaatatacaagaatgtgatagccacagatgctagtgacaaacaacttgaatttgcagccaagctcccaaatgtg

SEQ ID NO: 200368 - DNA, 269 bp, Glycine max
tacggctgcgagaagacgacagaagggtactaatatataatcatttaactaattaatatatacatacttatcggtataatatcatattattctttgatagatatatagatccaattattttgtatatacagttaaatatgtcattttataacctttgacacttaatatcaactaatcttatgtcatagagagagataatataacataaaagcaaccaaaaatcatactattatcgtgaaaatgatttattttattttattcttaattaa

SEQ ID NO: 200369 - DNA, 188 bp, Glycine max
gctcgaatacggctgcgagaagacgacataaggggactatggacttgatgaaaagtgttagaaatcagttaactgaactcatatctggtctagctgttcaagacatggcccccaatgagtttgggtttatctcaaagcttattcacgataccaaatggaagtttaatgtcacaacaagggggatacca

SEQ ID NO: 200370 - DNA, 271 bp, Glycine max
tacggctgcgagaagacgacagaagggggaggaaagtgagtgagagaaagagatcgcagacacagagcagaatggcttctacccaatgtttcttgcaccaccatgctcttaccacccctgccagtgccagatccccatcactacgcatcttggttagcaccaagcctaaccagcttgtttgcaaggcacagaaacaacaaacaccacaagaggatattgatgtcagcccaatctctcgccgtttagctctaactgtgctcattggtgctgc

SEQ ID NO: 200371 - DNA, 213 bp, Glycine max
tacggctgcgagaaacgacagaaggggggagtagggtttttttgcgtttgagagaagcatgagcaggagtttgggaattccggtgaagctgctccacgaggcttcggggcacgtggtgacggtggagctcaaaagcggagaactctacagaggcagcatgatccagtgcgaggacaactggaactgccaactcgagagcatcacctacattgc

SEQ ID NO: 200372 - DNA, 255 bp, Glycine max
acggctgctagaagacgacagaagggggcagcgcttgatttgaggccaggcaagccccactcaaccaccacacctctcctcgttcacgctacccctttctgctcttcttctacctttcaagttttaaaagtataaagatggcagagacattcctatttacctcagagtcggtgaacgagggacaccctgacaagctctgcgaccaaatctccgatgctgtcctcgacgcttgcctcgagcaggacccagaccagc

SEQ ID NO: 200373 - DNA, 236 bp, Glycine max
tacggctgcgagaagacgacagaagggggcacaagtttgttgagatagctagaagcaataagatgaaaatgaaagtgcttgttttgtttgttgctacagttttggtagcatatgaatgccatggctcagactaccagaagttccctctccaaatgaaaactgggtttggtgggcaatacagcaatgaggtggcatgtgccagttggaggcttggcgtggaagcaaacaacgtagtc

SEQ ID NO: 200374 - DNA, 265 bp, Glycine max
gctgcgagaagacgacagaagggggtgcagttcaaagcgaagaaagattcgaaacgaagaaagaaagcgttgtgaagaatggcggaagagggacaagtgatcggtgtccacagcgtagaggagtggaaggaacatctcaagaagggagaagagtccaagaaattgattgtggtggattttactgcttcttggtgcggtccatgccgtttcattgccccaattcttgcagagtttgctaaaaagttgccgaatgtcaccttcctca

SEQ ID NO: 200375 - DNA, 270 bp, Glycine max
tacggctgcgagaagacgacagaaggggacactagacaagttaaaagaagagcatcactgaactaacaaagcaaccctatgtcgaaggtggtttgtgtcaccggagccagcggcgccatcggatcatgggtggtcctactcctcctccagcgtggttacaccgtccatgccaccgtccaagatatcaaggatgaaaatgagacgaaacatttggaggaaatggaaggagcaaagagtcatctccatttttttgaaatggatcttcttgac

SEQ ID NO: 200376 - DNA, 272 bp, Glycine max
cccttggggctttctattttattgtattgaaaggcccaatgaattgggatttccctattgggccaggtcatttcgggacaagcggatcatttatgatgaagaggatgagcttcaagagaatgattcagagttcttgcagggtggaaccatgcagtaccagacacgagatagatcttccaaagaacagggctttttttcgaataagccaattcatttgggaccccgcggatccactctttttcctattcaaagatcagccttttgtctctgtg

SEQ ID NO: 200377 - DNA, 242 bp, Glycine max
agaagacgacagaaggggtagttggggaacatattgccccggggagtatcctagtcctcccccagaatatacaacctgtttgggtgacttgtacagtgttgcttggatggaagacagtgacagacacaatttgcgaacagaaactctgcaccaacaatataaattggttaaagagaggactatatctggagattcatactatggctctcacgtgatccagtatggtgatgtagggcttagca

SEQ ID NO: 200378 - DNA, 245 bp, Glycine max
cggctgcgagaagacgacagaagggggagtggcgaggatggcaaacacaaacagcgacaccaaagaagaaagcaaaaaaatggatgaaagagagacaatacctctcctcacctcatacaagatgggaaattttaatctatcccacaggattgtgttggcaccgttaacacgatcaaggtcttacaacttcgttcctcagccgcatgctgctctgtattattctcaaagaactactaagggtggct

SEQ ID NO: 200379 - DNA, 262 bp, Glycine max
tacggctgcgagaagacgacagaagggggcacaagtgagtttgttgatcgagataactagaaacagtgtgatgaaaatgaaggtccttgttttcttcgttgctacaattttggtagcatggcaatgccatgcgtacgatatgttccctctccgaatgaacactggctatggtgcccgtactccggaggtgaaatgcgcaagttggaggcttgctgtggaagcacacaacatctttgtttttgagaccattcctgaagagtgc

SEQ ID NO: 200380 - DNA, 269 bp, Glycine max; identical to SEQ ID NO: 198704

SEQ ID NO: 200381 - DNA, 180 bp, Glycine max
tacggctgcgagaagacgacagaaggggaatgaagaacatcgacgaacagatgatcaatgtgcagaacaagaactcctcctactttgttgagtggattcctcacaacgtgatatccacagtctgtgacattcccccaactggcttgaagatggcttcaacattcattggtaactctacct

SEQ ID NO: 200382 - DNA, 226 bp, Glycine max
ggcgagaagacgacagaagggggggcgaggtagccagagagtgatacaatacagagtgcgttgttgctccttcgccacaactccctgccaacatgggtatctccagagattctatgcacaagaggcgtgccacaggtggcaagaagaaggcatggaggaagaagagaaagtatgagcttggtcgccagcctgctaacactaagctgtcaagcaacaagacagtcag

SEQ ID NO: 200383 - DNA, 263 bp, Glycine max
acggctgcgagaagacgacagaaggggggcgcaaaggggaacaagaagaagaagatggtgtccttgaagcttcagaagcggctcgccgctagcgtcctaaagtgtggcagaggcaaggtctggctcgatccaaatgaagtcaatgaaatctccatggccaattcttgacaaaacataagaaagttggttaaggatgggtttattatcaggaagccaactaagattcactctcgctctcgtgctcgtcgaatgaaggaggccaa

SEQ ID NO: 200384 - DNA, 261 bp, Glycine max
tacggctgcgagaagacgacagaaggggatcaattcaaaatatatcatcaattataagcatgggtttgtggaacacaacgaatgcagtgtcttgccgcttccacaagtttggtgatgaccaaaagaatctggtcttccaaggtgatgccacgtcttcttccaggggcatagaactcacaaagttagacggtggaggaaaaccagtgggtggcagtgtggggagagtgttatactcttctccagtgcacctttgggaaagct

SEQ ID NO: 200385 - DNA, 261 bp, Glycine max
tacggctgcgagaagacgacagaagggggccatccatctccttctcttcgctattatgttttctaatgtttctctgtttgaaattttcagagaccatggccaaaagccccttcaagcttgaacatcccttggaaagaaggcaggctgagtctgctcgcattagagacaagtatcctgatagaatacctgtgattgttgagaaagctgaaagaagtgacatcccagacatcgataagaagaagtaccttgtcccagcagatt

SEQ ID NO: 200386 - DNA, 265 bp, Glycine max
acggctgcgagaagacgcagaagggggcagccaagaaaagaaaatcctcacccattttcttcgtagccaaacactctgaaattctcagttatgtcgtggcaagcgtatgtggatgatcacctactgtgtgaaatcgaaggtaaccacctcactcacgccgccatcatcggccaagacggaagcgtttgggctcagaacaccaacttccctcagttcaaacctgaggaaataactgccatcaataatgactttaatgagcctggat

SEQ ID NO: 200387 - DNA, 265 bp, Glycine max
acggctgagaagacgacagaagggggagcaaaaccctaatccctatttttcttcctcagtagtgtcatttacgcttctcttctctgcagcaactatgcctaaccctaaggtcttcttcgacatgaccatcggcggtcaatctgctggccgcatcgtgatggagctctacgccgacgtcactccccgcaccgccgagaacttccgcgcgctttgcaccggcgagaagggcgtagggcggagcggcaagcccctccactacaagggc

SEQ ID NO: 200388 - DNA, 266 bp, Glycine max
tacggctgcgagaagacgacagaagggcaagcaaaagctgtcaacggatttgatgcgagaattaggttgtaatcttgggacaatacgagctcctgggattggtttgctttataatgagttggtaaaaggaataccggcaatttttggtcattttctgaccacacttcctgcaatacactccatgattatatttgtgagtatcaagtatgttccagttcctatggtgctgcaaagtgaaaggtttctttttcggcgagtctgcccca

SEQ ID NO: 200389 - DNA, 266 bp, Glycine max
tacggctgcgagaagacgacagaagggggagaggaatagcagcagcagcaagctatggcggaagaaccgaaagttccaccaccttccaatcctacgttgtcgtttgatcctagtcgaacggttggtattatcaagaggaaggccttgatcattgacttagctgcggtataccatgccgaatgccttgcatactgtcaagagcttttggaacttcaaactaaatgggaagagccatatattgacttaaaaactccagaggaatcaaa

SEQ ID NO: 200390 - DNA, 245 bp, Glycine max
ctccatttccattttctctctcacttttcaagaatcgtaagctatgggaaagtcttacccaactgtgagtgctgattaccagaaggccgttgagaaggcgaagaagaagctcagaggcttcatcgctgagaagagatgcgctcctctaatgctccgtttggcatggcactctgctggaacctttgacaagggcacgaagaccggtggacccttcggaaccatcaagcaccctgccgaactggctc

SEQ ID NO: 200391 - DNA, 241 bp, Glycine max
atccttctaatggggccaaccggatcagggaagacattacttgccaaaactttggctcgatgtgtaaatgttccctttgttattgcagatgcaacttcactcactcaggcaggttatgttggagaggatgtggaatccatattatacaagctcctcatggttgcagattataatgttgcagctgcacagcaaggcattgtttacattgatgaagttgacaagattactaaaaaggctgaga

SEQ ID NO: 200392 - DNA, 239 bp, Glycine max
cacaggctctgcctgttgctttgatgattcatgataactcgtcggatcgcacggcctttgtgccggcgacgcatcattcaaatttctgccctatcaactttcgatggtaggatagtggcctaccatggtggtgacgggtgacggagaattagggttcgattccggagagggagcctgagaaacggctaccacatccaaggaaggcagcaggcgcgcaaattacccaatcctgacacggg

SEQ ID NO: 200393 - DNA, 239 bp, Glycine max
acaacatttacatcgctctctcactttctccaatatggcttcttctcgaaatgagttttatgcacttatgctagtggtggtggttcgctccatagtggcttcctgtggtgctaacttcaaccaagactttgatctaacttggggtgatcagcgtgctaagatattcaatggtggtcagcttctatctctttccctggacaaagtcctctggactctggcttccaattccaagaacagag

SEQ ID NO: 200394 - DNA, 235 bp, Glycine max
caacaatagatgcacctttacctctcgtatggtccctcataaggcgctttgagtatccacaagggtacaagctctttgtgaagaagtgcaaccttcttgatggggatggtggcattggaagcgtgcgtgaggtcatgatcacatctgggttacccgctggtgttagtgtggagaggttggacaagctcgatgatgacaagcatgtcttgaagtttagcatcattggtggtgatca

SEQ ID NO: 200395 - DNA, 242 bp, Glycine max
cgaacacactctcacataactctctctctctctctctctctgagtccttcttcttcttcgtccagccaacatgagcccacatcgttcagggtttctccaagtcactggccatgaccattctctctgagatcggtgacaaaacgttttttgcagctgcgatactggctatgcgacaccctagacgcctagtcttatcaggttgcttatcggctttgattgtgatgaccattctctctgctctt

SEQ ID NO: 200396 - DNA, 240 bp, Glycine max
ctatttttcaagtaacttaaggtttcaaacctaggaagttggaagtcatggcagcaacattgatggcagcaacaacaagttctggtactcttaaagcaactcctttccttggccaaggcaagggtgccaatgccaatgctcttagggatgttgtctccatgggaactgggaagtacaccatgggctatgatttgtggtatggaccagacagagtgaaatacttgggacccttctcagctc

SEQ ID NO: 200397 - DNA, 240 bp, Glycine max
gttagtcgtttgtaacgcctttgtttgcgttttttgcacagaagaattaacacgtatatagcaagcatggcagtcacactctacgaccttagctctgcctctgggttgaagaagcttgatgagtaccttctcccacgcagctacatcaccgggtaccaagctacaaaggatgatcttactgtttatgcagctttgccaactgctccatcagatgaatatggaaatgtttccaggtggtac

SEQ ID NO: 200398 - DNA, 240 bp, Glycine max
aagagcgaagagaatggcgcccaagggtttaatctttttggctgtgttatgcttctcagcactgtcactgagtcgttgtcttgcggaggataatggacttgttatgaacttctacaaggaatcatgccctcaggctgaagacatcatcaaagaacaagtcaagcttctctacaagcgccacaagaacactgctttctcctggctcagaaacatcttccatgactgtgctgttcagagttg

SEQ ID NO: 200399 - DNA, 240 bp, Glycine max
cgcagagagaaattgagtttctgagataaccacttttctctttgattcatcaatggcaaccgcgaggaccgtgaaggatgtttcgcctcacgatttcgtgaaggcttacgcctcccatctcaagcgttccggcaagatggagcttcctgagtggactgatattgtaaaaacagcaaaatttaaggaattggctccatatgatcctgactggtattatgttagggctgcctcaatggcaag

SEQ ID NO: 200400 - DNA, 236 bp, Glycine max
ctatttttcaagtaacttaaggtttcaaacctaggaagttggaagtcatggcagcaacattgatggcagcaacaacaagttctggtactcttaaagcaactcctttccttggccaaggcaagggtgccaatgccaatgctcttagggatgttgtctccatgggaactgggaagtacaccatgggcaatgatttgtggtatggaccagacagagtgaaatacttgggacccttctca

SEQ ID NO: 200401 - DNA, 229 bp, Glycine max
ctgaaaaacaaaaaaaatgatgggtacccttaaggtgtccaacagtagtttatacatattttcgaagttcctagtaatttgtatggtgatgatatcttctttggttgattcaagttattccttgtgtgattttgaggcaatcttcaatttcggggattcaaattcggatacgggtgggtttcatacaagctttccagcacaacctggtccctatggaatgacttacttc

SEQ ID NO: 200402 - DNA, 235 bp, Glycine max
caaactaacatcagtttgccattcataactgccacggcagatggacccaaacatattgagaccaccatcacaagggctaaatttgaggaattgtgttcagatcttcttgacaggctcaggacaccagttgaaaattcattgagggatgcgaaactctcgtttaaggatcttgacgaagtcatccttgttggtggatcaacacgtatcccagctgttcaggagcttgtaaagaagt

SEQ ID NO: 200403 - DNA, 236 bp, Glycine max
caaattctcattttcaagctgtttggtgtaaagatgggacaagtgcttggttgtgttcaagtgaagcagtcaactgtagccgtcaaggaatgtttcgggaagtacgatgatgttcttcaacctggttgccattttgtgccatggtgtcttggctgcggtgtggctggtgtcctttctacgcgtgtcatgcagctaagtcttcgttgtgaaactaagacaaaggacaatgtgtttgt

SEQ ID NO: 200404 - DNA, 241 bp, Glycine max
cgaagagaatggctcccaagggtttaatctttttggctgtgttatgcttctcagcactgtcactgagtcgttgtcttgcggaggataatggacttgttatgaacttctacaaggaatcatgccctcaggctgaagacatcatcaaagaacaagtcaagcttctctacaagcgccacaagaacactgctttctcctggctcagaaacatcttccatgactgtgctgttcagagttgtgatgc

SEQ ID NO: 200405 - DNA, 238 bp, Glycine max
atcgccgaagaaggtattgacgtcgatgatgaaaatgaaattcgtgaaaacattactgcttctcctttgtgtgaaactcttctgttatgcagtgattggtgctcctcaaacttgtcctgctaacaatgaggataaatgcggcgattcagatgaatggaaaggggagttcttccctgacattcctccaattagatatgagggtccgtcaagtaagaatgtgctttcatttaaatggtat

SEQ ID NO: 200406 - DNA, 239 bp, Glycine max
atttctctctgccttgctcatttacacacctctccaacctatcactttcagctttatttgaatccctctctctcctttccaaatggccagcgttgaggttgcacatcaaacaccaacaacagttccagaaaatgaaacaaccgaggtaatcaagacccaggaaacaaccccggaaccagtaccagccactgaggctcctgcaacagaacaagcagcagctgaggttcctgctcaagaag

SEQ ID NO: 200407 - DNA, 239 bp, Glycine max
  unsure (1)..(239): unsure at all n locations
ctcaacttctgctcttccaactcctacaacgcttttctctgcactcatgggcaaggtcaagatcggaatcaancngatttggaagaattggccgtttggttgccagantcgctctgcaaagagacgatgttgaactcgttgccgttaacgaccctttcattaccaccgattacatgacatacatgtttaaatacgacagtgttcacggacactggaagcatcacgatgtcaccgttaag

SEQ ID NO: 200408 - DNA, 238 bp, Glycine max
agttgctctctactctgcttagggttccaacttccaacccaacacttatccttctcatgcaacaagggaaaatgaggcctattttctgtggaaattttgaatatgatgcccggcagtcagagctggagcggctttttagacgatatgggaaggttgatagggtggatatgaagtctggttttgcttttatctatatggaagacgagagagatgctgaggctgctattcgtgctcttga

SEQ ID NO: 200409 - DNA, 238 bp, Glycine max
caaactagttttctctaaccaaccatacagtactcctcactagctataccctggttaatccatggagaaagaagctgttggccttgaaatcactactgagctaaggttgggccttcccggtggggaattacctgacaagaacgagaagataaagaagagggtgttctccgagattcaagctcatgatgatgatgaaaacagttcctccgaacaagaccgcaaaatccaaaccaagaat

SEQ ID NO: 200410 - DNA, 179 bp, Glycine max
agcacatccaccacttacttctattacaataacacaatattctcatcggtaacatccatcaccagaaccatggtccaagagaagaagctcgtggacgaagtgtcgggttggctgagactctacgaagacggttcagtagaccggacttggaccggttcgccagaagttaaattcttggt

SEQ ID NO: 200411 - DNA, 248 bp, Glycine max
gttttctctgtatactaagttcgacaacacatcacgatctggtccaaaggcttttgttagtgaatacgctgtgaaaagtgatgctgcaaacggaaatctcttggctgctgtggctgaagccgcaagacttattggactagaaaagaacagtgatattgtggagatggtttcttatgcaccacttttcttaaatataaatgacaagagatggattcccgatgcaattgtgttcgactcttatcaggttt

SEQ ID NO: 200412 - DNA, 237 bp, Glycine max
ttgccttctacaatcttccgtttcataccatataatggagattggacatctaatcgttttagctttattatgtgtaactctcaagggagctgatgcgtcgcaatccgcgaaagattattggcactccgtttttccaaacactcgtctgcccaagcctctctgggatctagtgttgccttcccctaaaacaaatatgcctattaaagtcgaagaagagaagcagtattggactctctt

SEQ ID NO: 200413 - DNA, 238 bp, Glycine max
gaagctgctgatgaggcagtcttcccatgtgttatgagtatcttaccaaattgcattttcaacaagaaggacccaattgttttgggagttgatatccttgaaggcattttaaagattgggactccaatttgcattccttctagagagttcattgatattggtcgcattgcctccattgagaataaccataaacctgttgattatgcaaagaagggacagaaagtagccattaagattg

SEQ ID NO: 200414 - DNA, 239 bp, Glycine max
ggcttccttaagctccttagtgctgctccttgcagctctaattctatcccctcaagttcttgcaaactatgagaatcccccagtgtacaagcctcccactgagaaaccaccagtttaacagcccccagttgagaagcctcctgtttacaaacctccagttgaaaaccccccaatttataagcctccagtagagaagccaccagtgtacaagcccccagttgagaaacctccagtgtaca

SEQ ID NO: 200415 - DNA, 231 bp, Glycine max
ctctaatcactctagctgttgcaaatttctactatttttcaatggcttctgcagatgttgagttccgttgctttgttggtgggcttgcttgggtcaccggcaacgatgccctcgagaaagccttttcaatctacggcgacatcgttgaatcgaaggttatcaacgaccgtgagactggaaggtccagaggattcggatttgtgaccttcgcctcagagcagtcaatgaaag

SEQ ID NO: 200416 - DNA, 235 bp, Glycine max
cagaaatatattggacaacaagggcttgttgatagtggatcaccaactagccaatgacaagaggaccaagccttatgtgaagaaaatggccaagagccaggactatttcttcaaggagttttctagagccattactttgctctctgagaacaaccctctcactggcacaaagggtgagatcagaaagcagtgcaatgctgccaacaagcaccatgaggagccttaattgcttccc

SEQ ID NO: 200417 - DNA, 248 bp, Glycine max
gttttcttaaaatctcttccttgccactgccagtgtgtcaccaccatggccaccgtcacaacccaagcctccgccgcgattttccggccatgtgcctcgaaatcgaggtttctgaccggctcttccggtaaactcaaccgggaagtgactatgaggccaatggggtgccctccttctgcctctttcaaggttgaagccaagaagggagagtggttacctggcttacgctccccaacttacctcaatgg

SEQ ID NO: 200418 - DNA, 234 bp, Glycine max
cgagattctttgtttgctaccttctctcggaaaaatggttacgttcaggtttcaccagtaccaggtggttgggagggctcttcccacggaagcagatcagcaccccaagatctaccgaatgaagctctgggccaccaacgaggttcgcgccaagtccaagttctggtattttctgaggaaactgaaaaaggtgaagaagagcaatggccaagtgcttgccatcaacgagatttt

SEQ ID NO: 200419 - DNA, 239 bp, Glycine max
  unsure (1)..(239): unsure at all n locations
gttctttgaaaagagcaaggctgacccatctcactgggacaaaatctcccagggtggactcaagcgtattcatgagaagtacacatggcaaatttactctgacaggctcttgacactcactggtgtgtatggcttctggaagcatgtgaccaatcttgaacgccgtgagagcaaacgttaccttgagatgttctatgctnctncagtancgcaaattggctgagtctgtgccccttgct

SEQ ID NO: 200420 - DNA, 236 bp, Glycine max
gagtgatacaatacagagtgcgttgttgctccttcgccacaactccctgccaacatgggtatctccagagattctatgcacaagaggcgtgccactggtggcaagaagaaggcatggaggaagaagagaaagtatgagcttggtcgccagcctgctaacactaagctgtcaagcaacaagacagtcaggaggatccgggttagaggtggaaatgtgaagtggagggcactgagatt

SEQ ID NO: 200421 - DNA, 236 bp, Glycine max
ggagagctctgacaccattgacaatgtgaaggccaagattcaggacaaggaaggcatcccaccggaccagcagaggctgatttttgctggcaagcagctcgaggatggaaggaccctcgctgactacaacatccagaaggaatcaacccttcaccttgtcctccgtctccgtggggggttttaagctcgttgtgtaatgttggatgtgttcccaaaacatttgaagaactttgatg

SEQ ID NO: 200422 - DNA, 234 bp, Glycine max
ctgaaacttcagaagcggcttgccgctagcgttctcaagtgtggtacaggcaaagtttggcttgaccctaatgaggtcaatgaaatctccatggctaattctcgacaaaacataaggaaattggttaaggatggtttcattatcaggaagccaactaagattcattcccgttcccgtgctcgcagaatgaaggaggccaagaggaagggacgtcactctggttatggtaagcgt

SEQ ID NO: 200423 - DNA, 230 bp, Glycine max
cggacctgcaagtgacactcaaggaaggagttgggacattaggggaactgacatttacagataattccagctggataaggagtcggaaattcaggcttggcttgaaggttgcatcaggtttttgcgagtccatacgcattcgtgaagctaagacagtggctttcatagttaaagatcatagaggagaattatataagaagcattatccacctgcattgactgatgaagtg

SEQ ID NO: 200424 - DNA, 231 bp, Glycine max
gggtgcccagtgggatgtctttcgcagacaagatgttccaaagctcatcgaataccttaaaagacattatgctgaattttcttatacccatgactatgacaagaagatggttcatccaattctagatcagagcattcttcttgacagtactcacaaaaagagactaaaggaggaatttaagattgaaccatggacttttcagcaacatgttggacaagctgtcatcattcc

SEQ ID NO: 200425 - DNA, 234 bp, Glycine max
cttttcacacatgaccatgctacctcattcattaactatgattgcaccactaataatcatttttcttgcacaaacacttgtgggggtgagttcacttcctgaagctgataaaataaccaatttgccggggcagccacgggtcgaatttcagcaatattctggttatgtcaccgtggatgatcaaaatcaaagagctttgttttactactttgttgaggctgaagaaaacccttc

SEQ ID NO: 200426 - DNA, 238 bp, Glycine max
gttttctacgattattcatagtgaggcaatagtagcagcaattcacactggtctttgcttctcgttactcatttctcacctaactttctattcttctcagtctcagatcagaaccttagccatggcagcgttccagaagatcaaggtcgccaaccccatcgtcgagatggacggagatgaaatgactagggttatctggaagtcaatcaaggacaagctcattttgcccttcttggag

SEQ ID NO: 200427 - DNA, 235 bp, Glycine max
ctcgagccgctcattttcaagctgtttggtgtaaagatgggacaagtgcttggttgtgttcaagtgaagcagtcaactgtagccgtcaaggaatgtttcgggaagtacgatgatgttcttcaacctggttgccattttgtgccatggtgtcttggctgcggtgtggctggtgtcctttctacgcgtgtcatgcagctaagtcttcgttgtgaaactaagacaaaggacaatgtgt

SEQ ID NO: 200428 - DNA, 237 bp, Glycine max
aaaaaaaaaaatccgcgattcgctcttctcttggaaaagtgaaaaccagaagtacgaacgaaagagaagagcgatttagaagtgagagaagatggggttgtcgttcacgaagctgttcagcaggttgtttgcgaagaaggaaatgaggattctgaaggtaggtctcgatgctgctggtaagacaaccatcttgtacaagctcaagcttggagaaatcgtcaccactatccccaccat

SEQ ID NO: 200429 - DNA, 233 bp, Glycine max
aggagtcgcctcgtgtttccgtttccgtttcaatttcctctcacaggctttaaccttaccagctcgagataagacatggaccggatcaaaggcccatggagtccggaggaggacgaggctctgcagaagctggtggagaaacacgggcccaggaactggtctctgatcagcaagtccatcccgggccggtccggcaagtcctgcaggctccggtggtgcaaccagctgtcccc

SEQ ID NO: 200430 - DNA, 231 bp, Glycine max
ctgacattgaaggaactactactcccatatcatttgtttccgaggttctcttcccatatgcccgtgataatgttgggaggcatctatctctaacatatgatacccccgagaccaaagctgatatcaagttgcttcgttcccaagttcaaagtgaccttgaacaagggattgcaggtgctgtgcctatccctccagatgatgctgggaaacaggaagtcattgctgcacttg

SEQ ID NO: 200431 - DNA, 233 bp, Glycine max
cagggattgtggagagcgtgggcgagggtgtgacacatctgaaaccaggtgaccatgcactcccaatattcactggggagtgtggtgaatgcacttattgtaagtctgaagagagcaacctgtgtgagctactcaggatcaacactgacaggggtgttatgctgagtgatggaaaaacaaggttctccaaaaatgcccaacccatttaccacttcgttggaacctccactttc

SEQ ID NO: 200432 - DNA, 224 bp, Glycine max
ctcaaccctagtaagccgcaatggtgaagtactcaagggagcctgacaatccaactaagtcttgcaaggctagaggcgccgaccttagggttcattttaagaacacaagggaaactgcctttgcaatcaggaagtgcccttggtcaaggctaaaaggtacttggaagatgttcttgcccacaagcaggcaattccattcagacgtttttgtcgaggtgttggaa

SEQ ID NO: 200433 - DNA, 224 bp, Glycine max
gacgtcatccacgatcctggccgtggcgcgcctctcgctaaggtcgccttccgccacccgttccgctacaagaagcagaacgagctcttcatcgccgccgagggtctctacaccggccagttcatctactgcggaagaaggccaccctcgttgtcggcaatgtgttgcctcttcgatccattcctgaaggagctgtcatctgcaacgtcgagcaccatgtcggc

SEQ ID NO: 200434 - DNA, 222 bp, Glycine max
ctctgcactctctctttctcatcctattctcttcgcttctctgtccgtgccacttcttctcgagcaatggcatctcatattgttggttatccacgcatgggacccaacagagaacttaagtttgctttggaatcttttgggatggaaagagtagtgctgaggagctgcagaaggttgctgcagaccttaggtcagccatctggaagcagatggctgatgctg

SEQ ID NO: 200435 - DNA, 223 bp, Glycine max
ggcttatggtggatacctaggcacccagagacgaggaagggcgtagtaagcgacgaaatgcttcggggagttgaaaataagcgtagatccggggattcccgatataggtcaacctttcgaactgctgctgaatcacgggcaggcaagagacaacctggtgaactgaaacatcttagtagccagaggaaaagaaagcaaaagcgattcccgtagtagcggcgag

SEQ ID NO: 200436 - DNA, 223 bp, Glycine max
acttattacagagatggtgcgatttgattctattgttttaccgaaatcggtaaaaagtggaaaaaacccacgcttgctgaaggtgaaatttgtaaatataaaggattaattccttctgtcgtgtatcctcgattatgcagcctcatacccttaaactttaggtttatagtattaagcgacaggacatctcaatacttatgtggttaggtcaaccctaacctac

SEQ ID NO: 200437 - DNA, 225 bp, Glycine max
tggtaacaaagctgatattgctgcaaaagatggtccaagaggaagcagtgggaatcttgttgatgttgcacgccaatgggttgagaagcagggtttgcttccttccagtgaggagcttcctttgactgagagtttcctagtaatgggggccttattgctgctgccaaagaagcaaggcatgacaaggaggctgtggtgaaatttttccgcaagttgatcaggaga

SEQ ID NO: 200438 - DNA, 225 bp, Glycine max
cttgttatgaacttctacaaggaatcatgccctcaggctgaagacatcatcaaagaacaagtcaagcttctctacaagcgccacaagaacactgctttctcctggctcagaaacatcttccatgactgtgctgtcagagttgtgatgcttcactgttgctggactccacaagaaggagcttgtctgagaaggaaacagatagaagctttgggttgagaaatttca

SEQ ID NO: 200439 - DNA, 222 bp, Glycine max
aaactccgattcttcttgtaaacagcggtgccaggtgttaatctagaagttgatataggatgggggcaatgatgtcgaggttctggttcatgttattccctgcaaaagagtataagattgttgttgttggatggataacgctggaaaaaccactaccctttataaattgcatctgggtgaggttgtaacaaccaatcctactgttggtagcaacgtcgaaga

SEQ ID NO: 200440 - DNA, 221 bp, Glycine max
aaattctgggtctcaactgtcttgctactgcatatgtgttgagtgttatgtatctggatggtgtcaagctaggtgacatacaagccacaataagtggtatcttcactgctgcacttttcctctttatctcactgcacgccctcttcccactctttctgctgaacgtcctcaccccaacatcttctgtgcttatgttttcctttccctcttgggacaatttt

SEQ ID NO: 200441 - DNA, 222 bp, Glycine max
ctttaatttcctctcaaaccctaaccctaaccctaaccctcgccgtcacaaaagaaaaccctctttgtccgatcatcgtcgtcaagatgttggaactccgtctcgtgcaaggctccctcctgaagaaggttttggatccgtcaaggagctcgtgaacgacgcgaacttcgactgctcctccaccgggttctccctccatgccatggagtccagccacgtcgc

SEQ ID NO: 200442 - DNA, 219 bp, Glycine max
cggaaattggttgaagggtatttgcttagagctgctcaaagaagtgacatatttgcccatattcttatctggcatttgcacgggtgagactgtacctgagacagggaaagacccaaacagtgggaagaatgttcatttctagaactgctgccagcggtaaggcagcgtataattgatggttttaatccaaaggcacttgacatatttaacagagagttt

SEQ ID NO: 200443 - DNA, 220 bp, Glycine max
acggtgcccatatatgaagggtatgctcttcctcatgcaattcttcggttggaccttgctggccgtgatttaacagagtacttggtgaaaatccttaccgagagaggatactccttcagcacctctgccgaaaggaaattgtccgtgatgtgaaggagaaattggcatacgtggcccttgatttcgaacaagaaatggagactactaagagtagttctgc

SEQ ID NO: 200444 - DNA, 227 bp, Glycine max
ggctccagccctctcctttgaatttgagcatgaatttgttcaaaacacggcaagagtgaaatctgttgatatgcatccaactgatccatggattctattgggtttgtattcaggaactatttctatttggaactatcgacaaagactgaagagaagtctttaaaaatcagcgaatctccagtgagatcagcaaagttcattgctcgggaaaactggattgttgcagc

SEQ ID NO: 200445 - DNA, 219 bp, Glycine max
agcacaatttctctttctctctttttttgtgtgtccaaaatggctcctagttctgctcacaacaatgggttctatgtgcttatgctagttgggatagtggttagcactatggttgctacctgtgctggtacttctaccaagactttgatctaacatggggtggtgaccgtgctaagatattcaatggtggccagcttctatcactttccctagacaaag

SEQ ID NO: 200446 - DNA, 220 bp, Glycine max
tccatcgatcaattaatttccaatggccgatcagctcaccgacgaacagatctctgagttcaaggaagcctttagcctcttcgacaaggacggcgatggttgtattaccaccaaggaacttgggactgtgagcggtcgcttgggcagaacccaactgaggctgagctgcaggacatgataaatgaggttgatgctgatgggaatggtaccattgatttcc

SEQ ID NO: 200447 - DNA, 221 bp, Glycine max
caaagtcacaatggaccccctctctctcttctgcaccggagccctcctcgccggcggcctctactggttcgtgtgcgttctgggccccgccgagcagaagggcaaacgcgccaccgatctttccggcggctcatctccgccgagaaagtccaagacaactacaaacagtactggtccttcttccgccgctcaaaggagatcgagaccgccgacaaagtccc

SEQ ID NO: 200448 - DNA, 221 bp, Glycine max
cggctcgagcttcttgttcctctcgcccagaatccgagatcaaccctgacccctaaggccaggggtttttctcggcttcttcagattcctgaaatggcgtctgtttcagctttagccaagtacaagctcgtttcttgggtgaccaatccgtgggcaaaaccagcatcatcactcgcttcatgtacgataaattcgataacacctatcaggctacaattggt

SEQ ID NO: 200449 - DNA, 221 bp, Glycine max
ggccactatcaagccaactggaaagaaggcatgtgtgattggagggagtggatttatggcctctttgttgatcaagcagttgcttgaaaagggttatgctgtcaataccacagttagagacccagataatataaaaaaatacctcaccttttggcactgcaaagtttgggcgaattgaacatatttggagcagatttaactggtgaaaaagattttgatgc

SEQ ID NO: 200450 - DNA, 222 bp, Glycine max
aaagcaccagctggatgcacttcccccttcttcacataatgctgcacgtaacataaagatctttaccattttattatgatacaaaatagataatgttctgtatcaaatttcagtcagacattggctctgtaatagggttatattatcgatgcactgtatttgtattcaaattccaaatggcgaacatatttgattgctgttagttttcaaggttctgtagat

SEQ ID NO: 200451 - DNA, 222 bp, Glycine max
gtttgcgggtatgaacataatcaccaaggtttccctcaaccgtgggatgagccactatgtgcttgtggtttatagacacgcctttgctactgcagctattgctccttttgctattgttctagagaggaaagcaggcccaagattacatttctcatgttcatgcaaatattcgtgttgggaaaccaagaaactgtgattgatcagaacttatattatgcgggg

SEQ ID NO: 200452 - DNA, 219 bp, Glycine max
ctgcacccaccattactcagcactgccattcttcaatcacactaatggctgtcaccttctcagatcttcacaccgaagagggcatcaaatccctcgatcaattcctttctgggaaaacctatatctctgggatcaattgacaaaggatgatatcaaagtgtatgcagctgttgtggaaaagccaggagactcttttcctaatgctgctaagtggtacga

SEQ ID NO: 200453 - DNA, 218 bp, Glycine max
acccctcttagtcccaattttctagggttttattcattttccgatggcttctgcagatgttgagtaccgttgctttgtcggtgggctcgcttgggccactgacgaccatgccctcgagagagccttctctcgtacggcgaaatcgttgaaacgaagattatcaacgatcgtgagactggcagatccaggggttttggatttgtgaccttcgcctcgga

SEQ ID NO: 200454 - DNA, 222 bp, Glycine max
aaaatgaccaagttcacaatcctcctcatctctcttctcttctgcatcgcccacacttgcagcgcctccaaatggcagcaccagcaagatagctgccgcaagcagctccagggggtgaacctcacgccctgcagaagcacatcatggagaagatccaaggccgcggcgatgacgatgatgatgatgacgacgacaatcacattctcaggaccatgcggggaa

SEQ ID NO: 200455 - DNA, 221 bp, Glycine max
atctgatcagcccactttcacattgaatttctccaaaggatctagtcaaattattgctcaatattatcaattgattcggcttggctttgagggttacaaaaatatcatggaaaattgctgggagaatgcaaagttctgaaggaaggaatcgagagaacaggtcggtttaacatcatctccaaacatatcggtgtgccacttgtagccttctccttgaaaga

SEQ ID NO: 200456 - DNA, 234 bp, Glycine max
tcggaatgcgcctcgagcagacagagagagagagtgagatagagaggatggaaaaactaattttcagtggtctaattgtgcttgtggggttattaaccacagaaatcaaagtagcatctgcaatttggctgcgagctcatgcaacttctatggtggaagtgatgcctcaggaacaatgggtggggcatgtgggtatggaaatttgtacactgatggttatggaataaaaacagc

SEQ ID NO: 200457 - DNA, 217 bp, Glycine max
aaacatacttatgtaccagttacacggaaaggatattggcagtttgacatgggagatgtgcttattgctggtaaacccactggatactgtgctgatgactgctcagcaattgcggactctggaacttgttattggctggtccaacgactgtggttactatgataaatcaagcaatcggatcatctggagttgtaagcaaagaatgcagatccgttgt

SEQ ID NO: 200458 - DNA, 216 bp, Glycine max
gtgcagcaccggatcctctcatttctccggcgataactctcccttttccggcgaattcaccgcttcctcgatatgaatcccgagtatgactatctgttcaagctccttctgattggagactctggtgtggtaaatcatgccttcttctaagatttgctgatgattcatacattgagagctacataagcaccatcggagttgattttaaaattcgca

SEQ ID NO: 200459 - DNA, 220 bp, Glycine max
ctcgagccggtcaggcgggcgctacccgctgagtttaagcatatcaataagcggaggaaaagacactaacaaggattcccttagtaacggcgagcgaaccgggaaaagcccaccatgaaaatcggtcgcctcggcgtccgaattgtagtctggagaagcgtcctcagtggcggaccgggcccaagtcccctggaagggggcgccagagagggtgagagcc

SEQ ID NO: 200460 - DNA, 219 bp, Glycine max
attaattgcaagaatggcacttcgttgcttggtgatgtccctttctgttctcttcactcttggtcttgcgagagaaagccatgccagagacgaagatttttggcatgctgtttggccaaacactcccatccaagttcattgcgagatcttctaaagcctggccctgcaagtgttgaaatcgatgatcaccctatgcaaattgaagaaacacagtacccg

SEQ ID NO: 200461 - DNA, 217 bp, Glycine max
cagatctctctctctctctctctcttccaacaatccaaatccaaatccaaaaccctactaacaccacactcaatcgatcgatggggcagaagtctctgatctacgcgttcgtgtcgcggggaactgtgttctcgcggagtacacggaattcagcggaaacttcaactccatcgccttccagtgccttcagaagctccctgccaccaacaacaagttc

SEQ ID NO: 200462 - DNA, 218 bp, Glycine max
  unsure (1)..(218): unsure at all n locations
agaagcaaaggntggatctcagtaagaggcttggcttggagaataagcaagtcaagttctggntncagaatcgacgaacccaaatgaagacccaactggaacgccatgagaacataatgcttaggcagagaatgataagctcagagctgagaacagtttgatcaaggaagccatgtcaaatccagtgtgtaacaactgcggtggccctgcaattcctg

SEQ ID NO: 200463 - DNA, 220 bp, Glycine max
ccgacgaccagatcgccgagttcaaggaggccttcagcctcttcgacaaggacgggaatggttgtattactactaaggaacttgggactgtgatgcggtcactagggcaaaacccaactgaggcagaactcaggatatgattaatgaggttgatgctgatggcaatggaaccatcgacttcccagagttcctcaacctgatggctcgcaagatgaaagac

SEQ ID NO: 200464 - DNA, 259 bp, Glycine max
agaaaatcaagaaccccaactataaaggaaaatggaaggcaccattgattgataacccagatttcaaggatgaccccgacctctatgttttccccaacttgaagtacgtggggattgaattgtggcaggtgaaatctggtactttgtttgacaatgtcttaattactgatgatcctgagtatgctaagcagctggttgaagaaacatggggcaagcacaaggatgctgagaaggcagcatttgaggaggccgagaagaa

SEQ ID NO: 200465 - DNA, 262 bp, Glycine max
aagagaatggctcccaagggtttaatctttttggctgtgttatgcttctcagcactgtcactgagtcgttgtcttgcggaggataatggacttgttatgaacttctacaaggaatcatgccctcaggctgaagacatcatcaaagaacaagtcaagcttctctacaagcgccacaagaacactgctttctcctggctcagaaacatcttccatgactgtgctgttcagagttgtgatgcttcactgttgctggactccacaa

SEQ ID NO: 200466 - DNA, 260 bp, Glycine max
attcaataccatttaccaaactcactcatcaattctcatctttcttctcactaactattaattcatcatgtcgagcacagctggccaagtcatcaaatgcaaagctgcggtttcatgggaggcagggaagccacttgtgattgaagaagtagaggttgcgccaccacaagctggtgaagtgcgtttgaagatcctctacacctctctttgccacactgatgtttacttctgggaagctaagggccaaactccattgtttc

SEQ ID NO: 200467 - DNA, 259 bp, Glycine max
gcaagaacaattactttagtgttttctcttgtcacataaaagtcatctaagaagaattacaagatcatcatcacaataacaagatgagttcaggaattagagcatggagtgtggcagcaagtgttggaattgtggaggccttgaaagaccaaggcatatgcaggtggaatcatgccttaagatcagctcaacaccatctcaaaaaccatgttggctcattctctcaggctaacaagctttcttcttctgctatgatatc

SEQ ID NO: 200468 - DNA, 259 bp, Glycine max
gttttcttcatatcttccttgtcactgcccgtgtgtcgccgccatggccaccgtcaccacccaagcctccgccgcaattttccggccatgtacctcgaaatcgaggtttttgaccggctcttccggtaaacttaaccgggaagtgactatgcggccaatggggtgccctccttctgcctctttcaaggttgaagccaagaagggagagtggttacctggcttggcctccccaacttacctcaatggcactcttcctggt

SEQ ID NO: 200469 - DNA, 224 bp, Glycine max
catgagttgatgttggatggtgcaccaaggctcaacttggcttcgtttgtgaccacttggatggagcctgagtgtgacaagctcataatggcttcacttaacaaaaactatgttgatatggatgagtatcctgtcaccactgagctccagaaccgttgtgttaatataatagcaaatctattccatgctcctataagtgaagaggagactgcagtaggtgtggg

SEQ ID NO: 200470 - DNA, 262 bp, Glycine max
  unsure (1)..(262): unsure at all n locations
cttaaatcctgtgaaaaggatttggggttttagttatcatgatttgccttaccatctcaaaccatgcttcttgtatttcggaatatatccagaagattacaaagttgaacgcgggacattgattctacaatggatagctgaggggtttgttaaatctgaagcaacagaaactttagaggaagtggcagaaaaatatttaaatgagttgatccaaagaagtttggttcaagtatcttcatttactaagggtggcnaaattaaa

SEQ ID NO: 200471 - DNA, 254 bp, Glycine max
actcgagccgaatcggctcgagtggctcgcaagatgaaagacactgattcagaggaggagcacaaggaggctttccgcgtgactgacaaggatcagaatggcttcatctctgcagcggagctccgccatgtgatgaccaatctcggtgagaagctgaccgacgaggaagtcgatgagatgattcgcgaggctgacgttgatggtgatggtcagatcaactatgaggagtttgtcaaagtcatgatggccaagtg

SEQ ID NO: 200472 - DNA, 241 bp, Glycine max
aaggatttaatcattttggctgtgttatgcttctcagcactgtcactgagtcgttgtcttgcggaggataatggacttgttatgaacttctacaaggaatcatgccatcaggctgaagacatcatcaaagaacaagtcaagcttctctacaagcgccacaagaacactgctttctcctggctcagaaacatcttccatgactgtgctgttcagagttgtgatgcttcactgttagctggac

SEQ ID NO: 200473 - DNA, 258 bp, Glycine max
aaaaaaatgatgggtacccttaaggtgtccaacagtagtttatacatattttcgaagttcctagtaatttgtatggtgatgatgatatctttggttgattcaagttattccttgtgtgattttgaggcaatcttcaattttggtgattcgaattcagatacgggtgggtttcatacaagctttcctgcacagcctgctccctatggaatgacttacttcaaaaaaccagtggggcgtgcttctgatggaaggcttatt

SEQ ID NO: 200474 - DNA, 259 bp, Glycine max
cggttatgcaagatggtaccccgtggcctggaaataacaccagagaccatccaggaatgatccaggttttcttgggccaaagtggaggacttgacactgagggtaatgaacttccacgtttagtctatgtttctcgtgaaaagcgtccagggttccaacatcacaagaaagctggtgccatgaatgcccttgttcgagtatctgcagtccttaccaatggacctttcttattgaatcttgattgtgatcactacataaa

SEQ ID NO: 200475 - DNA, 257 bp, Glycine max
agtagctgttcctgcaagcttcgccgtttgaaacagtgcctcaaccatggcagaacaaacagagaaagcttttctgaagcaaccaaaagtgtttctatgctctaagaaaggtgggaagggaaagaggcctgggaaaggtgggaatcgcttttggaagtcaattgggcttggattcaagactcccagagatgccattgaaggaacctatattgacaagaagtgccccttcactggcaatgtttccattcggggtcgta

SEQ ID NO: 200476 - DNA, 224 bp, Glycine max
agaacaacagaacaacagagcaaaaagctccaccaatggcgggttacagagccgacgacgactacgactacctctacaaggtggtcctcatcggcgactccggcgtgggcaagtccaacctcctctcgcgcttcaccaagaacgagttcaacctggagtccaagtcccaccattggcgtcgagttcgccacgcgcaccttgaacgtcgattccagagtcatcaa

SEQ ID NO: 200477 - DNA, 260 bp, Glycine max
gtttgttgtaggaagaggaatcttgagaaatggcaggggacagcaagagcaagattctgttcatcggagggactggttacatcggaaaattcatcgtggaagccagcgccaaagctggccacccaactttccttttggtgagggagtccactctctccaaccccgcaaaatcacccctcatcgacaatttcaaaggcctcggtgtcaatcttgttttaggagatctatacgatcaccaaagtttggtgagtgctataaag

SEQ ID NO: 200478 - DNA, 141 bp, Glycine max
ctcgagccgattcggctcgagcggctcgaggtgtcgtgctgctaggcgaagagcagagaatcgctgcaccctagatggcgacagtccagtacccgaaagcatcactagcttacgctctgacccgagtagcatggggcacgt

SEQ ID NO: 200479 - DNA, 263 bp, Glycine max
actcgagccgattcggctcgagaaaggaagaaaccaccgaagcaccaccaacagaaacagtaaccacaacaactacagaagaagccaagccagaggagcctaaagaagttgcagttgagaccgaggaggtggtgacaaaggagacagaggaagagaagccagcagcagaagagaaatcagaggagaaaactgaagaagtgaaagaagaagcagaagagcctaaagaaactactgaaacagaaacagaatcagcaccagcagca

SEQ ID NO: 200480 - DNA, 254 bp, Glycine max
agcgaggagaaagatggaggggaaggagcaggatgtgtcgttgggagcgaacaagttccccgagagacagccgattgggacggcggcgcagagccaagacgacggcaaggactaccaggagccggcgccggcgccgctggttgacccgacggagtttacgtcatggtcgttttacagagcagggatagcagagtttgtggccacttttctgtttctctacatcaccgtcttaaccgttatgggagtcgccgggg

SEQ ID NO: 200481 - DNA, 256 bp, Glycine max; identical to SEQ ID NO: 191039

SEQ ID NO: 200482 - DNA, 259 bp, Glycine max
cagcaccaattaatgagtatggaattattagacagcctaagtggggccaccttaaagaagttcataaggccataaagctttgtgaagaagcattgatagctactgatccaacaattacatcccttggtccatatctagaggcggcagtttacaagacaggatctgtatgtgcggccttccttgctaacgtagacaccaaatctgatgtaacagtaaactttagtggcaattcatatcacttgcctgcatggtctgtgag

SEQ ID NO: 200483 - DNA, 207 bp, Glycine max
cttcaactaagggtgagagtcacacaaatctagggagcactactctaaaagttctattagattcttcaaaacatgaccatacatcgcgagtcttgggcttttgtcttcggcgttatgggcaacatcatctcctttggagtgttccttgctccattgccaaccttttaccaaatctacaagaagaaatccactgaagggttccagtca

SEQ ID NO: 200484 - DNA, 253 bp, Glycine max
acactcttcttcatattcttcttcttcttcttgttcttgttctatctgtgacgagcatcatggcctcgagagcagtgctattgttggctatgtgtgtgcttccggccatggttgtggccattcgcccagcaaagaaccctttttgcgtgaagggtcgcgtctactgtgacccttgccgtgctggttttgagacctcagcaaccacctacattgccggtgctgagattatgttgcaatgcaagagcagggttag

SEQ ID NO: 200485 - DNA, 225 bp, Glycine max
atggctcccaagggtttaacctttctggctgtgttaatatgcgtttcagcactgtcactgagtccttctgttgcgggggaagggcaaaataatggccttgttatgaacttctacaaggaatcatgccctcaggctgaagacatcatcacagaacaagtcaagcttctctacaagcgccacaagaacactgctttctcctggctcaggaacatcttccatgactgg

SEQ ID NO: 200486 - DNA, 255 bp, Glycine max
cgaaagtgtttgcgttacaggagcttctggtttcatcgggtcatggcttgtcatgagactcatcgagcgtggctacaccgttcgagccaccgtacgcgacccagtaaacatgaagaaggtgaagcatttggtgcaactaccaggcgcaaagagcaaactgtctctgtggaaggctgatcttgctgaagagggaagctttgatgaagccattaaaggctgcaccggagttttccacgtggccacccccatggactt

SEQ ID NO: 200487 - DNA, 252 bp, Glycine max
cagggtttgggtttctcttcctcccttggagaaaaagaagagccaccgctgcgacgccgttcgtgcatttttgaggtgccgctgtcatgtttgggcgtggtggaccaaggaggagtgataactccaaatattatgatattctcgggatttccaaaaatgccagtgaagatgaaatcaagaaggcctatagaaaggcggctatgaagaaccatccagataagggaggagatcctgaaaagtttaaggagttag

SEQ ID NO: 200488 - DNA, 252 bp, Glycine max
aaaacacacaaaaactcagggtagggcagagagagagagagaaatcggaggttgggctatcgcggtgcatggtggcgctggtgtggaccctaatcttccactcgagcgtcaagaagaagcgaaacaacttctcacgcactgtctcaatcttggaatctctgctctaaattctaatcttcccgccatagatgtcgttgaacttgtggtgagggaattggaaacggatccgctgttcaattcgggccgtggatc

SEQ ID NO: 200489 - DNA, 255 bp, Glycine max
ggcgtctcgtagggctaatccgcctcacgagggtcaccaacggcacgtgcctttggggggccgaggccccctactgctggtcggcaaacggacggcggccgcacgcgtcgcttctagcccggattctgacttagaggcgttcagtcataatcacacgcacggtagcttcgcgccactggcttttcaaccaagcgcgatgaccaattgtgcgaatcaacggttcctctcgtactaggttgaattactattgcgaca

SEQ ID NO: 200490 - DNA, 254 bp, Glycine max
cttaatttcattgaagactactccggatgtgtcaaaatctccctctcactccaaagccaacagtttcaagtccaaccaaaacaaataatagtgcaacatggtgtgtgccaaaaggaggagtggcagatgcacagttacaagcaaatttggattatgcttgtgggcaagggattgattgtaccgcaattcaacaaggaggggcttgttttgaacctaacactttggtaaaccatgctgcatatgccatgaatcta

SEQ ID NO: 200491 - DNA, 253 bp, Glycine max
  unsure (1)..(253): unsure at all n locations
atcgactaaaaaatgaaatgaatcatttcatattgatagtattgctatgcttagtccccaaagaaccagatttcgtaaacaacatagagttagaatgaaaggaanaatccatcgagggaatcatatttgcttcggaagatatgctcttcaagcacttgagccagcttggataacatctagacaaatagaagcgtgacggcgggcaaagtcacgaaatgttcgccgaggtggacaaatatgggtacgcatattt

SEQ ID NO: 200492 - DNA, 252 bp, Glycine max
gtttttctttaaatgggttggttgattggttcaatgaaccgatcaagaccacagcaggttcatggggatgcgaggattaagacgctttgttttttaatcttccgatgtcactcttgtttgttagtttgattttttattttttatttcaataagtactgtgcaagtaggttagagttgggtagaagggcatgttcatggtgttaattactatgttatgtatgcatgtgagtgctgctatcgatggcaagatgt

SEQ ID NO: 200493 - DNA, 251 bp, Glycine max
cagattattaagaacttgcagtgagcaagagaagtcaatagccggattacaagatgggtttagcgaggagcttcataagaaccatcccatggagagtgttgacaagcacattgcaaaccatcacatggagaatgttgacaagcacattgcaaaaatgcgaatggagcaaatgagattaacgggtgtagaactagccttgagaaaggagttagagtcttgcaggtttcaggcagattctcttcgccatgaga

SEQ ID NO: 200494 - DNA, 251 bp, Glycine max
cgcaagacaatcactcatcaatgcaggtggcattattgagcaatcatttctgcctgggccatttgctgtggagatgtcttcggcagtttacaaggggtgggttttcactgatcaagcccttcctgcggatcttatcaagagaggaatggcagtggaggatccatcctctccctatggccttcgccttgtgatagatgactacccttatgctgttgatggactagagatatggagtgctatccagacatggg

SEQ ID NO: 200495 - DNA, 252 bp, Glycine max
gtttctgtaaccatggcatccaccactctatcccctacaaccccttctcagctatgctcaggaaagagtgggattttcagtccctcacatgcacttcttgtgaagccagtgaagaggcagatgatggggaagagcaagggaatgagaattgcatgccaagccaccagcattcctgctgatagagtccctgacatgggcaaaagacagctcatgaatctgcttcttcttggtgccatttcactcccctctgct

SEQ ID NO: 200496 - DNA, 246 bp, Glycine max
attccttcttctcccagaatcggtcactaaatccgcaatcatgaagctcgataccaccggtctcgaatcgtttcccacactgcttgcgcctcaaaacgacgtcgttggagaactctccgccgctccatccttcgatgggtttgtgaaagaagctattcagatggtgaagcccgcgaagggtattacgactcttgcttttatatttaaggagggtgttatggtagctgctgattctcgagctagcat

SEQ ID NO: 200497 - DNA, 250 bp, Glycine max
cgatgatgtatgctcacaggttggtttatgtttcaaaagggctaaatcagagagcaatggaattgagatggtgaccgaaaagggacaaagagagttatcagctaaagatactgctttgtgcacttcctgtcagatgcttgtggtttggattcagaatcaactaaaacaaaagaagaccaaggagatagtattcaactatgtaaatcagctgtgcgagagcttgccaagtccaaatggagagtcagtagta

SEQ ID NO: 200498 - DNA, 249 bp, Glycine max
cagaattctctaaaagagatctttttctgctctttgaagaaagaagggtctttgcttgattttggagatgtctctgctctcagatctcatcaaccttaacctctccgataccaccgagaaggtgatcgcagagtacatatggatcggtggatcaggaatggacctgaggagcaaagcaaggactctcccaggaccagttagcgacccttcagagcttcccaagtggaactatgatggttccagcacagg

SEQ ID NO: 200499 - DNA, 251 bp, Glycine max
acttgccttgccatggcctcaaactccatggctggcttgatcaccggttcgaattctcacttctcgcgtgactccgatgagcatcagactcctcctacccgacacgcttcatcgaaaactacttgtcgagtttgtggcgatgagattggatacaaggaaaatggggagctgtttgtggcttgtcatgtgtgtggatttcctgtttgccgaccgtgttatgagtatgagaggagtgaagggaaccagagctg

SEQ ID NO: 200500 - DNA, 225 bp, Glycine max
gcagacttaacaacagcacaaagcgggttactgtctgttcaagctaccatctctctctctctttcttagtgcctccttgccagaagttaaaatggcccaagaaactttcctattcacatctgaatcagtgaacgaggggcaccctgacaagctctgtgaccagatctccgatgctgtgctcgatgcatgcttggagcaggaccctgacagcaaggttgcctgtga

SEQ ID NO: 200501 - DNA, 244 bp, Glycine max
cgctgccaagtgctaacaaacgcctctgagtctctgacaccaacgcaactctctctgctcacatttttgaaggagatggtgaacgtgatggagtggcagaagcagcgttggcaaccgaatgggaacgcggaaatgatgtacgtgaaagtgatgaccgacgaacagctcgagactctgcgcaaacagattgcagtttacgcaaccatctgtgacaaactcatcgaaatgcacaaaaacatctcct

SEQ ID NO: 200502 - DNA, 250 bp, Glycine max
acaaccgatcttttcctctgagaagacttgtcggtagctgaagcattttataagcctccactttcctgaactagttttaacatacaatctttcaagtacacctccccagcttccatttaagaatggagatcactagaataggccaatggttaagtcttctgatatgtgtactactattactgcagacagaaggggttcctgtgggaatcacttttgttgaaaatgcagggcaaaagggggtttttttttg

SEQ ID NO: 200503 - DNA, 233 bp, Glycine max
acgaaacagaaaatgccaggactcacagcaccttccgattactcccaagaacccccccgccactcttctcttctcatcaacgccaaggaacctttcaatgcggagccaccgcgtgctgcgttggttgcttcctacgtcaccccttccgatttcttctataagaggaaccacggtccaatccccatcgttgagaacatcaacagatattccgtgaacgtgtccggcttggtgga

SEQ ID NO: 200504 - DNA, 229 bp, Glycine max
ctcatctgcttcccctagcaaccttcttcttacttctctccgcttcttatctccagattgctggggcggaagcacaaccgttgactagtctcaagcttaactctcatattcttcaggagtctactgctaaagagattaatgaaaatcccgaggcaggatgggaggctgctataaatcctcgtttctccaattatacagttgaacaatttaagcgccttcttggagtcaa

SEQ ID NO: 200505 - DNA, 225 bp, Glycine max
cacgaatatcttgttgtttggagcgatccgagaaaaactctgtaaacatgttggtttaccatgacctccttacaggtgatgagcttctctctgactccttccgttacaaggaaattgagaatggaatgctgtgggaagttgaggggaagtgggttgttaaaggagcagttgatgtagacattggtgcaaacccttctgctgagggtggaggagaagatgagggat

SEQ ID NO: 200506 - DNA, 224 bp, Glycine max
aaagttttgatgctatacattgtgggggctgcggcataccttggcattccaatggtggtaagcttctattagagatgaatcggattctacgacctggtggatactttattatgtcaactaaacatgacagcattgaagaagaagaagccatgaccacattgaccgcatctatttgttggaatgttctggcgcataaaagtgatgatgttggtgaagttggagtt

SEQ ID NO: 200507 - DNA, 224 bp, Glycine max
ccaaaggattctacccgccgctcgatgggaattgcgcttcaaggcgtctcgtagggctaatccgcctcacgagggtcaccaacggcacgtgcctttggggggccgaggccccctactgctggtcggcaaacggacggcgggcgcacgcgtcgcttctagcccggattctgacttagaggcgttcagtcataatccaacgcacggtagcttcgcgccactggctt

SEQ ID NO: 200508 - DNA, 222 bp, Glycine max
aaaaaaaagcatccaaaaatggttctcacatccactgtcactcacccagacgaacaagaccatagcctaaactctacttttgcttccagatatgtgcgtgaccctattccacaattcaagatgcccgagaaatcaataccaaaggatgcagcttttcagataataaacgatgagttgatgttggatggtgcaccaaggctcaacttggcttcgtttgtgacc

SEQ ID NO: 200509 - DNA, 221 bp, Glycine max
ctaaggcaccctgtgttctttgttttctacgcacaggcttatcggtcgcttttggttggactttgctgaatggagagtgcaagaatcagccaatggttaaatcttcttgtttgtgtactgctattgctcaaggcagaaggatctttagttccattgattttggtcgagaatgcagaatcaaaaggagctgtttgtttggatggtagtcccccagcttacca

SEQ ID NO: 200510 - DNA, 226 bp, Glycine max
ctttgtacccagagattgatccagctctgaaccctgaccacgtccctcacattctgaagaagtgccctgatgccattccagaccctaaggccgtgcagtacgtgagaaacgaccgtggcacccccatgattctagacaacaattactacagaaatatattggacaacaagggcttgttgatagtggatcaccaactagccaatgacaagaggaccaagccttatgt

SEQ ID NO: 200511 - DNA, 230 bp, Glycine max
gggcaatgcttggtgctgctggattcatcattcccgaggccttcaacaaatatggagcaaactgcggtcctgaggctgtttggttcaagactggagctctgcttcttgatgggggtaccttgaactacttcgggaaacccatccccatcaatcttattgtggctgtcattgctgagattgttcttgtgggaggtgcagagtactacagaattattaatggcctgaatttc

SEQ ID NO: 200512 - DNA, 231 bp, Glycine max
gttactatctataattaattaaattcctcgtggaatattgaagaagccatgtctacagctgggcaggtcatcaagtgcagagctgcggtggcatgggaagcagggaagccactgtcaatagaaaccatagaagtggcaccaccccagaaaggtgaagtgcgtttgaggatcctcttcaactccctttgccgtagtgatgtttattggtgggatgctaaggaccagactcct

SEQ ID NO: 200513 - DNA, 229 bp, Glycine max
  unsure (1)..(229): unsure at all n locations
agaaaacagaagaaaacaaaatggaagacacagtttctgcgttgaggtctttgatggtttctcactctccgccgctggatgccttagtggtgccctctgaagattatcacctgagngaatatgtctctgcacgagacaagcgccgcgaattcgtttccggcttcactggaagtgccggcttggcacttataacaaagaaagaagcactgctgtggacggatggacggta

SEQ ID NO: 200514 - DNA, 226 bp, Glycine max
cgaccattcaactttgaggctgcaaattcgaaagggaatctacccactttgcatatcaatccttacagctggtctaaggtttccagcgttatatatttggattcccctgctggtgttgggttctcttactccaagaacacgagcaaatatgctactggggaccttgaaactgcgtctgatacccatcttttcctcttaaagtggtttcagcaatttccggaattcc

SEQ ID NO: 200515 - DNA, 225 bp, Glycine max
cttcttctctctcaccctccaactatgagttactacaaccagcagcagccacccgtcggtgttcctcctccccaaggttacccaccgccggaatcttacggaaaggacgcgtaccctccgccagggtaccctccacagggaggataccctccgcaggcgtatccagcacaggggtaccctccaccctacgcgcctcctcagtacgctcagcctccgccgcaacaa

SEQ ID NO: 200516 - DNA, 223 bp, Glycine max
ctctgaattcttcactttgatcatcatcttcttcaattccagcaaggatgtcacagcaaggcgaatcatcggacccgaaatcggggaagaaggacttctcgaccgcgattctggaacgtaaaaagtcgccgaaccggcttgttgtggatgaggctgtcaacgacgacaactccgtagtgaccatgcacccccaaaccatggaaaagcttcagcttttccgagg

SEQ ID NO: 200517 - DNA, 224 bp, Glycine max
cctcgagccgattcggctcgagggattatacgattcaaaaaggttacctctggccgtttttgacgaggacctggttcttgccacggtgggtgaccaattggattatggggataacatatgtggtgcagtactaagcattcgtttcaacgaggatatattgagtgtctggaatcgcaatgcttcagaccatcaggctgtaatggctctgagagattcaatcaaac

SEQ ID NO: 200518 - DNA, 229 bp, Glycine max
gagaaagcgaaacgcatagaatcgaaagaggggaaaagaaaaagaaaagttagggttagggattttgagagatggcatcgactaagaagatcaccctgaagagttcggacggtgaggccttcgaggtggaggaggcggtggcgctggagtcgcagacgatcaagcacatgatcgaggacgactgcgccgacagtggaatccctctccccaatgtcaccagcaagattct

SEQ ID NO: 200519 - DNA, 229 bp, Glycine max
gagagtgaagcttccgatcaaaaagattgagaacacaaccaataggcaagtcactttctccaagaggaggaatggactcatcaagaaagcttacgaactttctgttctttgtgatgttgatgtggctctcatcatgttttccccatcaggaagagccactttcttctctggcaacaaaagcattgaagaaattctagaacgatatgttaatctttcggagggtgaacac

SEQ ID NO: 200520 - DNA, 228 bp, Glycine max
caggggttcaccaggggccagcctgtttcgacgctctgggtgcgcactcatagaatccgctggcttcccctactgcatcaccagtggcttctccatcgccgcttccaggttggctctgcccgacaccggcttcatctcctacggcgaaatgctggagcagggccaactcatcacccaagccgtttccattcccgtcattggcgacgccgacaacggctacggcaatgc

SEQ ID NO: 200521 - DNA, 228 bp, Glycine max
cacaaaccctcccctcacactctccaaaccctagcggcactacacacgttatctctctctctctctctctctctccctctctccttccccaagatgtcgagcgccgatcccgagcaccgagaagaggaggaggcacccgccgtcggcgacgacgaggacaccggagcacacgtcgctcccatcgtcaagctcgaggaggttgctgtcaccaccggcgaggaggacgaa

SEQ ID NO: 200522 - DNA, 220 bp, Glycine max
caagaaatctgtaagatattatgcaaaaaataattaaggtgtttttctttaaatgggttggttgattggttcaatgaaccgatcaagaccacagcaggttcatggggatgcgaggattaagacgctttgttttttaatcttccgatgtcactcttgtttgttagtttgtctttttattttttatttcaataagtactgtgcaagtacgttagagttgggt

SEQ ID NO: 200523 - DNA, 219 bp, Glycine max
aaaccctcttcatcttgttctatctgtgacgagcatcatggcctcaagagcagtgttattgttggctatgtgtgtgcttccggcgatggttgtggccattcgcccagcaaagaaccctttttgcgtgaagggtcgtgtctactgtgacccttgccgtgctggttttgagacctcagctaccacctacattgctggtgctgagattatgttgcaatgcaa

SEQ ID NO: 200524 - DNA, 221 bp, Glycine max
ggcagacatggatgccttggggagccatttgcatatctgcagataaaagcaatatggactcatctgcttaggaattttgagctggagttggtgtcaccttttccagagatcgattggaatgccatggttgtgggagtgaaggggaaagtgatggtccgatataagcggaaggagctttcagttaatcaataggaccacataattcagtgtctggcatgatt

SEQ ID NO: 200525 - DNA, 231 bp, Glycine max
cttcggtgtcaaactcagcattcaaaaccctcttcctctgccacacctggaaaaatggaggcggtgggctcgagactcagccgcgccacctcccgttacggcgcccccacggtgttcagcggccccgtcagaaagtggaagaagaagtgggtccacgtcacccactcttccttacccaacaacaactcacactctcacaccaacaacttcaccaccaccaccaccaacgat

SEQ ID NO: 200526 - DNA, 227 bp, Glycine max
ctcgagccgctcgagccgcccaaattcattttaatcctaattctacacttcttgatcattacatttttcacctcaagatgcagatattcgtaaaaactttgaccggcaagaccatcacccttgaggtggaatcctccgacaccattgacaacgtaaaagctaagattcaagacaaggaagggatcccacctgaccagcagagacttatctttgcgggtaaacaactt

SEQ ID NO: 200527 - DNA, 221 bp, Glycine max
gtgaaacgaatggaagcaggtgtgattagtagtaaggccttggatgaattccagtctgagattgcagttctatcgaaagtccgacaccggcatctggtgtctcttttgggttattctacagagggtaatgaaagaattctagtgtacgagtatatgccacaaggggctctcagtaagcatcttttccattggaagagccatgatctggagcccctctcttg

SEQ ID NO: 200528 - DNA, 223 bp, Glycine max
atcttcggtcattttattttgtataataaaagaaagataataaagagaataatcatattaaatattaaatagaaaaaatggcccgatcatttatcaaaggccaatcttcggtagaagagaaggttcctttggaacacttatttctatttcagtataccgggtctctttctttcatttcaaaaaatttatagaatttcgattttgaaatgaaagaaaagtgtgg

SEQ ID NO: 200529 - DNA, 220 bp, Glycine max
aaaacgccaagggattcgaacggacatgggacccacgtggcgtcaacggcggtgtgtgtggctgtgagcaacgcatcgttctatggtctagccacggggaccgcgaagggtgggtcccccgagtcaagattggcagtttacaaagtgtgttataggaatgggtgtcgtggatcagccatcctggcggcgtttgatgatgccattgccgacggagtggatg

SEQ ID NO: 200530 - DNA, 221 bp, Glycine max
gttcttctctctcgaattttcactcactttctgtgcatcaatggcggcgataagtctccggaaggggaacacgcggcttccgccggaggtgaaccgcgtgctgtacgttcggaaccttcccttcaacatcaccagcgaggagatgtacgacatctttggcaaatacggcgccattcgccagatccgcatcggcaccaacaaggacactcgcggaaccgctt

SEQ ID NO: 200531 - DNA, 221 bp, Glycine max
cgcaacacaacaaaaaaagacaacccagagagcgcgtcttaataaacgctcttctctgaaaacccccatttcttttcttctttcttcttctctttcgcttcttcgatcttcgatcttcgtcgctgaaaatgagagagtgcatttcaatccacatcggccaggccgcgattcaggttggaaacgcctgctgggagctttactgcctcgaacacggcattcag

SEQ ID NO: 200532 - DNA, 228 bp, Glycine max
cgggcccggtgggcttcgagtggggcgtcgagcccaagcctttcgatatggcggcggaagaaggagatggggaaggaagggctggtggtggccaaagagctgaagaggttccggtcggacccggtccggctagaccgcttcatccggtccagcgtctcccgcttgctcaagtccgacctcgtcgccgtcctggccgagttccagagacagaatcaattcttcctctgc

SEQ ID NO: 200533 - DNA, 226 bp, Glycine max
gatagcctcaactgaggggcttctctttgagagaatcgtatctcacaccaattagattccaattagattcaagagacatggccattaaccatgaaacttgggctttcgttttcggccttctaggcaacgtgatctcctttatggtgttcctcgctccattaccgagcttttaccaaatctacaagaagaaatctacagaagagttccaatcactaccttatgttgt

SEQ ID NO: 200534 - DNA, 220 bp, Glycine max
ctgactcgttcttcttcgtcgttatcttcttcttttgttgtttgtgtgtttgttttttctctcacctgaaaatgtcttgctgcggtggtaactgtggttgcggaagcgcctgcaagtgcggcaacggctgcggaggctgcaagatgtacccagacttgagctacaccgagtcaaccaccaccgagaccttggtcatgggagtggcaccagttaaggctca

SEQ ID NO: 200535 - DNA, 217 bp, Glycine max
ctggaaccaaaaccgatttgaccaccgacccgattgcgattggagcattccactccgtccagcgcgccatcctggtggtctgcgccgccgggaacgacggagaaccattcaccgttctcaacgacgcaccttggattttaaccgttgcagcttccaccatcgaccgtgatcttcaatccgacgtggtcttgggtaataaccaagtcgtcaagggaag

SEQ ID NO: 200536 - DNA, 218 bp, Glycine max
  unsure (1)..(218): unsure at all n locations
gccaccgctgccgagaaactctccgctctcaaatccgccgtcgccggattgaacgaaatcagtgagaatgagaagaacggattcatcagcctcgtcggccgctatctcagtggcgaangcagcatgtggaatggagcaanatccagacgcctacggacgaagtggttgtgccttacgacactttggcgccaactcctgaaggttcttcggaggtgaag

SEQ ID NO: 200537 - DNA, 219 bp, Glycine max
atggactccctctctctcttctgcaccggagcccttctcgccggcggcctctactggttcgtctgtgttctgggccccgccgagcagaagggcaaacgcgccaccgatctatccggcggctccatctccgccgagaaagtccaagacaactacaagcagtactggtccttcttccgccgccccaaggagatcgagaccgccgacaaagttcccgacttc

SEQ ID NO: 200538 - DNA, 220 bp, Glycine max
cgatcccaaacgttgaaatccctcactgggacgccgacggaggaggaccactctctccgttcatctcttcttcttccaatgctgacaagtgctcattattattctcctccgaccatttccgaatgttccagttcaaggtccggatctgtccacgtggcaggtcccacgattggacggagtgtccctacgcccaccctgccgagaaggctcgccgccgtga

SEQ ID NO: 200539 - DNA, 224 bp, Glycine max
gccgagcgtgtcctcgagatgatccagcttctcttggaccttcttgaggcaaccgaccctaccaccctgcgagaacattccttggaagagttcctatggtcttcaatgttgttatcctttctccccatggttactttgcccaagataatgtcttggggtaccctgacactggtggacaggttgtttacatcttggatcaagttcgtgccttggagaatgagatg

SEQ ID NO: 200540 - DNA, 227 bp, Glycine max
ggaggacttatggactatgcatttgagttcataatcaacaatggcggcattgattctgatgaggattacccataccgtggtgttgatggtagatgcgacacatataggaaaaatgctaaagtcgtttctattgatgactacgaagatgttcctgcctatgatgagttagccttgaaaaaggccgttgcaaatcagcccgtgagcgttgctattgaaggagggggcag

SEQ ID NO: 200541 - DNA, 228 bp, Glycine max
aaacaaacccactaagatggcttcctttgtatccttcctagtgctgcttcttgcagcccttatcctcatgcctcaagggcttgctacttactacaaaccaattaagaagccaccagtgtacaagcctccagtgtacaagccaccagtgtacaaaccaccggtttataagccaaaaccaccggtttacaagccgaaaccaccggtttacaagccaccatataagaagcc

SEQ ID NO: 200542 - DNA, 210 bp, Glycine max
aaattcctcgtggaatattgaagaagccatgtctacagctgggcaggtacaccaagtgcagagctgcggtggcatgggaagcagggaagccactgtcaatagaaaccatagaagtggcaccaccccagaaaggtgaagtgcgtttgaggatcctcttcaactccctttgccgtagtgatgtttattggtgggatgctaaggaccagactc

SEQ ID NO: 200543 - DNA, 221 bp, Glycine max
cctccatctatcccacaactaatttttgattttccttgtttatttatcttcttcctcccttgtctgtctgcctctttgtttctttggcttgacaagaagaagatgatgatgatgacaatggaggggatgatggacaagggggtgttggatgatgtgataagaaggcttctggaagggaaaggagggaaacaggtgcagctctctgagtccgagctccgtca

SEQ ID NO: 200544 - DNA, 221 bp, Glycine max
caaagacatgggtacggtggctcccagagttgaaagcttggcgagcagtgggataaagtgtatcccgaaggaatacgtgaggcctgaaaaagagttgaagagcatagggaacgtgttcgaggaggaaaagaaggaagggccagaggttcccacaattgacttgagagagatagattcggaggacgaggttgtccgaggcaagtgtcgccagaagctgaaga

SEQ ID NO: 200545 - DNA, 218 bp, Glycine max
gtgtttcgaatagattatcctaagtctttgggaatagtgctgcaatggcttcaagtcaggaggaggtgacccttttgggagctactggaagcccatttgtgtgcagggttcatattgccctcaagttgaagggagttcaatacaaatatgtcgaagaaaatttgaggaacaagagtgaactgcttctcaaatccaacccagttcacaagaaggttcca

SEQ ID NO: 200546 - DNA, 218 bp, Glycine max
ctcacgtttgggagatagaaaaggtaagggacaatccaaagaaagacaggaaacggaataattcgatacccctctcgtctcgtaactaaccatggcagcgttccgatggaagagcttcgaggagaatgaggatcgcccagccaagcctcgtcattttggcgtcaccgagattcaaagcccccactgcactctcttctcccacaaccttcttcaggata

SEQ ID NO: 200547 - DNA, 220 bp, Glycine max
cgagattgaggcgggggttgatttggaagaaacccagctaaggtaattcctcgcaacccctaactaaaccttcaaaggatcatcatgggcagtcacaatgctttggctgccactttcggaatattaggtaacatcatttctgtgatggtgtacttggctccggtgccaacgttttaccggatatacaaaaagaaatgcacggacggtttccactcgctgc

SEQ ID NO: 200548 - DNA, 221 bp, Glycine max
ccactttctctcgtttcaatcgaaaaaaatcatgggcagaaaattcttcgtcggtggcaactggaaatgcaatgggaccactgaggaggtgaagaagattgttactactttaaatgaagccaaagtccctggagaagatgttgtagaagttgttgtgagccctccttttgtgttccttccttttgtaaaaagtttgctgcgccctgatttccatgtctcgg

SEQ ID NO: 200549 - DNA, 273 bp, Glycine max
gtatttccctacctctcccttcaagatgcagaacttcgtcaagaccctcaccggcaagaccatcacccttgaggtggaaagctctgacaccatcgacaacgtcaaggccaagatccaggacaaggaaggaatccccccggaccagcaacgtctcattttcgccggaaagcaacttgaggacggccgtacccttgctgactacaacattcagaaggagagtactcttcacctcgtcctccgtctccgtggtggcatgcagatcttcgttaagac

SEQ ID NO: 200550 - DNA, 270 bp, Glycine max
agaatggactgataattgcatttatgtaggttctgatgattttgatcatctgttgtaggtggtctggtcatttcctgataaacatatttcttgcttccaaaaaatatttccctgctccctccgtaaattggttgtctttccaaaacgtgaatagtttaaagaagggagttctttatttgtacttctaaatccaactgtttagttaaggggtgtttatctcttgtagagcttttagtttgatttagagttttcttgttgaaatctggttaa

SEQ ID NO: 200551 - DNA, 270 bp, Glycine max
cttcgctcttccctttcccattcccattcctattcctcctttcactctcctctccgctcctccaattccccccaaactttctccctccgccgcttcgccgccgcctctctcgcttgccctccaccgccgccgccgcccctcgacgccatggcccagaaaatcggaaagtccacgcgccgccccggtgcctcctccaaggcccgcgtctatgccgatgtcaacgtcgttcgccccaaggaatattgggactacgagtccctcaacgtccag

SEQ ID NO: 200552 - DNA, 272 bp, Glycine max
acgaaacgttgctgcaatcgacggccgcgctccgagatcgccggggctgatgctcgttggaaaactcatcgatggttatctctcggagatcgctaccgatgcgaatttgaagccgtcgaaattctacgatctagccatctcagttcctgatcgagcgagactgttccacgatggtctctatcgtgccgttgatgtctacctcaaggcgcatccgtgggtttcgaaatcggatagggagaagatttgtgcagtattagactgccagaagctga

SEQ ID NO: 200553 - DNA, 265 bp, Glycine max
ccccttgctgcggttactccatcacctaatcacttccccacttcacctgtaaatcacgtttagttagcacaaggatataacaaaatggctgatgctgaggacattcaacctcttgttgttgataatggaactggaatggtcaaggcgggttttgcaggtgatgacgctcctagggccgttttccccagtattattgggcgaccacgccataccggtgtaatggttgggatgggtcagaaggatgcttacgtgggtgatgaagctc

SEQ ID NO: 200554 - DNA, 268 bp, Glycine max
catctttctctcttctctctccacccaaaccctaactcccgaccctgttcccctctcgtatccgtcatgaaaggaggaaagtccaagaccgaatctaagagagccgatcccaaacttgctgtgaataagaagggagccgccaccaaggctaggaaacccgccggcaaggggaaggcagcgaaagaccctaacaagccaaagaggcctccaagtgctttcttcgttttcatggaggagttcaggaaggtattcaacaaagaacatcctg

SEQ ID NO: 200555 - DNA, 266 bp, Glycine max
agaatggactgataattgcatttatgtaggttctgatgattttgatcatctgttgtaggtggtctggtcatttcctgataaacatatttcttgcttccaaaaaatatttccctgacccctccgtaaattggttgtctttccaaaacgtgaatagtttaaagaagggagttctttatttgtacttctaaatccaactgtttagttaaggggtgtttatctcttgtagagcttttagtttgatttagagttttcttgttgaaatctgg

SEQ ID NO: 200556 - DNA, 266 bp, Glycine max
gattaattctctagttatggctgagagcagagcggatcacacagtgagcgtatctgggtgggcagctcatgattcgtcgggcaagattacctcctacagcttcaaaagacggcagaacggtgtgaacgatgtgacaataaagatcctctactgtgggatctgccacacggatctccactgtgctaaaaatgaatggggcatcactatgtaccctgtggtacccggacacgagatcattggggaggtaactaaggttgggaccaatg

SEQ ID NO: 200557 - DNA, 269 bp, Glycine max
cgggggagatctgattcgggagggtggttgaggggctgtctggtggttttcgcagtggtctcagcgttgggcgtgtgtggccctgctctttactggcgattcaagaacgccatcactctccgcaacaacaacaacaaactctcttgcccttcctgcctctgtgactgccctccccctctctcgctcttccaacttgctcctgggctggcgaatctctctgtctcagattgtggaagtaatgacccggatctaaaggaggagatggagaa

SEQ ID NO: 200558 - DNA, 293 bp, Glycine max
acggaatcccgctctagtccttgcgtttccctttcattttccctcactttctcgctctccaaacgcccctctctctcctccaatggccgaccagctcaccgacgaccagatcgccgagttcaaggaggccttcagcctcttcgacaaggacggcgatggttgtattactactaaggaacttgggactgtgatgcggtcactagggcaaaacccaactgaggcagaactgcaggatatgattaatgaggttgatgctgatggcaatggaaccatcgacttcccagagttcctca

SEQ ID NO: 200559 - DNA, 255 bp, Glycine max
ggcttttgggtcatgtcctgggtcggccattcttgcggggtatgacgatgccattcacgacggagtggatatcttgtcgctgtcgctcggtggattcggtggaaccaaaaccgatttgaccaccgacccgattgcgattggagcattccactccgtccagcgagtaatcctggtggtctgcgccgccgggaacgacggagaaccattcaccgttctcaacgacgcaccttggattttaaacgttgcagcttccac

SEQ ID NO: 200560 - DNA, 268 bp, Glycine max
tgttgttgtaactcgttcttcttcttttgttgttctgtgtttgtgtttgttttttctctcacctgaaaatgtcttgctgcggtggtaactgtggttgcggaagctcctgcaagtgcggcaacggctgcggaggctgcaagatgtacccagacttgagctacactgagtcaaccaccaccgagaccttggtcatgggagtggcacctgttaaggctcaatttgagggtgctgaaatgggtgtgcccgctgagaacgatggctgcaaatg

SEQ ID NO: 200561 - DNA, 270 bp, Glycine max
actcgagccgaatcggctcgaggttggaaacaacaaaaccaccgcccagggatcgtgttgactttgagaatggagaagacagcagttaaagttcgatgccagaggattgggtgcgacgccatgttctccgaggacgacaaccccgacggttgctgtcgataccatgattcgggacctatatttcatgacgggacaaaagaatggagttgttgcaagaaaagaagtcatgattttagcttgtttttggaaattccaggatgcaagacagga

SEQ ID NO: 200562 - DNA, 172 bp, Glycine max
gcagcagcagaacagactcagactcacaagagtacttacattgtacacttggcgaaatcggagatgcccgagagcttcgagcaccacgctgtgtggtatgagtcgtcactgaagaccgtgtctgactcggcggagatgatttacacctatgacaacgccatccacggctacg

SEQ ID NO: 200563 - DNA, 268 bp, Glycine max
gtatttccctacctctcccttcaagatgcagatcttcgtcaagaccctcaccggcaagaccatcacccttgaggtggaaagctctgacaccatcgacaacgtcaaggccaagatccaggacaaggaaggaatccccccggaccagcaacgtctcattttcgccggaaagcaacttgaggacggccgtacccttgctgactacaacattcagaaggagagtactcttcacctcgtcctccgtctccgtggtggcatgcagatcttcgtt

SEQ ID NO: 200564 - DNA, 265 bp, Glycine max
atcccaaacgttgaaatccctcactgggacgccgacggaggaggaccactctctccgttcatctcttcttcttccaatgctgacaagtgctcattattattctcctccgaccatttccgaatgttccagttcaaggtccggatctgtccacgtggcaggtcccacgattggacggagtgtccctacgcccaccctgccgagaaggctcgccgccgtgacccccgcaagtaccactactccggcaccgcctgccccgattaccaga

SEQ ID NO: 200565 - DNA, 267 bp, Glycine max
tatatttccgctttcacttcttctctctcaccctccaactatgagttactacaaccagcagcagccacccgtcggtgttcctcctccccaaggttacccaccgccggaatcttacggaaaggacgcgtaccctccgccagggtaccctccactgggaggataccctccgcaggcgtatccagcacaggggtaccctccaccctacgcgcctcctcagtacgctcagcctccgccgcaacaacaccagaattcatctggcccgggttg

SEQ ID NO: 200566 - DNA, 271 bp, Glycine max
acgcgatctctctctattctttgaaaccaaagttcaaactctgtcttccctgggttctatttcgaaatcaacgacgatgagttccacagaggcagcagccacagagaagaaaggtggaagagggaaaccgaagacttcaaagtccgtttcccgttcctccaaagctggccttcagtttcccgtcggccgtgtcgcacgctacctcaaggccggtcgctacgcccagcgcgttggctccggttcccctgtttatctctccgcggttctcgaa

SEQ ID NO: 200567 - DNA, 269 bp, Glycine max
caagttactatctataattaattaaattcctcgtggaatattgaagaagccatgtctacagctgggcaggtcatcaagtgcagagctgcggtggcatgggaagcagggaagccactgtcaatagaaaccatagaagtggcaccaccccagaaaggtgaagtgcgtttgaggatcctcttcaactccctttgccgtagtgatgtttattggtgggatgctaaggaccagactcctctgtttcctcgtatcttaggccacgaagcttcagg

SEQ ID NO: 200568 - DNA, 265 bp, Glycine max
  unsure (1)..(265): unsure at all n locations
tggagacttacnaaggtgaatctcaggctcaggattggagaggcagaccctccaaccctgccaaacacggtggaatgattcccgctgcttttgttcttgggttgcaagcttttgggataatggcaatagccgtagtggggaacaatctgataacctacgtgacgagtgagatgcacttccctttgtccaaggctgccaacctagtcactaactttgttgggaccatctttctcctcgccctcatcggcggctatctttccgactc

SEQ ID NO: 200569 - DNA, 268 bp, Glycine max
cacacactctcttattgtctctccatcatggctcacattctccctttcctcctcctcaccctcctcgccgccaccgcctccgcccacaatatcacctacattctcgcctccaaccccgactacagcgacttcaacggcttcctctcccaaaccggcctcgccggcgaaatcaacacccgccagaccatcaccgtcctcgtcctcaacaacgccgccctctccgccgtggccgcaaaacaccccctctccgtcgtcaaaaacctcctca

SEQ ID NO: 200570 - DNA, 265 bp, Glycine max
attccccattcatccatctttacgtgtttgttggattccatggccaaaagctccttcaagcttgaacatcccttggaaagaagacaggctgagtctgctcgcattagagacaagtatcctgatagaatacctgtgattgttgagaaagcggaaagaagtgacatcccagacatcgataagaagaagtaccttgtcccagcggatttgactgttggtcagtttgtttatgttgtccgtaaaaggattaaggtcagtgcggagaagg

SEQ ID NO: 200571 - DNA, 263 bp, Glycine max
aattgagaagattccgttgccgtaatgtcaaatccaaatcatattcatattcttcgtgttcttcttctcgcccctgcattgatggctagcattgtgaattcaatgcagttcgagctgaaatccggtcaatccaagtgcatttccgaggatttgaagagtaacgtcatcaccgtcggtaattactacgttcttaatcccaacaacgatggattccccattcctgattctcacaagatcactgtgagggtgcgttcaccttatgg

SEQ ID NO: 200572 - DNA, 266 bp, Glycine max
cggctcgagcacactcacacacagatctctctatctatcgttcattgtcgtttcaatctcaaacgccatggcgttttggagatccctcgcgttctctgcgatccttctctcgctcttcatccatggcgctctctgcttctacctccccggcgtcgctccacaggacttccagaagggagatccactgcaagtaaaagtaaacaaattgacttcaacgaagacccagcttccttatacatattattctcttccttattgtccaccaa

SEQ ID NO: 200573 - DNA, 262 bp, Glycine max
cgcaacaaaaagaaagaatcccaggcgaggagaaagatggaggggaaggagcaggatgtgtcgttgggagcgaacaagttccccgagagacagccgattgggacggcggcgcagagccaagacgacggcaaggactaccaggagccggcgccggcgccgctggttgacccgacggagtttacgtcatggtcgttttacagagcagggatagcagagtttgtggccacttttctgtttctctacatcaccgtcttaaccgtta

SEQ ID NO: 200574 - DNA, 263 bp, Glycine max
ggcatatgtgccattgatgaatttgacaagatggacgaatccgatcgtacggctatacatgaagttatggaacaacagactgttagcattgccaaggctgggatcactacatcgctgaatgcaagaaccgctgtccttgctgctgctaatccagcttggggaagatatgatctgagaagaactccagctgaaaatattaatcttcctcatgccctcctatcaaggtttgatcttctgtggttaatccttgatcgagctgatat

SEQ ID NO: 200575 - DNA, 266 bp, Glycine max
cctttgttcactcttcttctcttgcggctagggttttagcgcacttcttctagatttaaggaagatgggtaaggaaaaggttcacatcagtattgtggtcattggccatgtcgactctgggaaatccactaccactggtcacctgatttacaagcttggaggcattgacaagcgtgttattgagaggtttgagaaggaagctgctgagatgaacaagaggtctttcaagtatgcctgggtgctggacaaacttaaggctgagcgtg

SEQ ID NO: 200576 - DNA, 261 bp, Glycine max
ctaagatggcttcctttgtatccttcctagtgctgcttcttgcagcccttatcctcatgcctcaagggcttgctacttactacaaaccaattaagaagccaccagtgtacaagcctccagtgtacaagccaccagtgtacaaaccaccggtttataagccaaaaccaccggtttacaagccgaaaccaccggtttacaagccaccatataagaagccaccatacaagaaaccaccttatggaaagtaccctccagtagagg

SEQ ID NO: 200577 - DNA, 261 bp, Glycine max
gctttcggaggaggaaatcggtcgtctataccgaataaggaagacggtgatgcagatgctgagggacagaaattttctggttggtgacttcgagatcaacatgtccaagcacgagttcaagtccaagtacggcgaacacatgaagcgcgaggacctcgtcatcaacaaatccaagaaggacaactccggcgaccagatctacgttttcttccccgacgaacccaaggtcggcgtcaagaccatgaagacctacaccaaccg

SEQ ID NO: 200578 - DNA, 260 bp, Glycine max
gagtaatgcagattatcagcattttgagtttcaacatttcccttcttcctatctcagactggccgcacatcgtgttgctcaacactatggtatgcaaacaatggttcaagataatggcttagatggccacggaaccagaattatggtaagaaagatggcggaaagcaggtatcccatggttcgcttatctgaaatacctgctaaacagttggaaaatgataaacctgagaagataaaaattgccataaggcctaggccta

SEQ ID NO: 200579 - DNA, 272 bp, Glycine max
agctcgagcaatatattccattctctctgtgtatttccctacctctcccttcaagatgcagatcttcgtcaagaccctcaccggcaagaccatcacccttgaggtggaaagctctgacaccatcgacaacgtcaaggccaagatccaggacaaggaaggaatccccccggaccagcaacgtctcattttcgccggaaagcaacttgaggacggccgtacccttgctgactacaacattcagaaggagagtactcttcacctcgtcctccgtc

SEQ ID NO: 200580 - DNA, 256 bp, Glycine max
gctttcggaggaggaaatcggtcgtctataccgaataaggaagacggtgatgcagatgctgagggacagaaattttctggttggtgacttcgagatcaacatgtccaagcacgagttcaagtccaagtacggcgaacacatgaagcgcgaggttctcgtcatcaacaaatccaagaatgacaactccggcgaccagatctacgttttcttccccgacgaacccaaggtcggcgtcaagaccatgaagacctacacc

SEQ ID NO: 200581 - DNA, 261 bp, Glycine max; identical to SEQ ID NO: 200577

SEQ ID NO: 200582 - DNA, 262 bp, Glycine max
ttgcgcttcaaggcgtctcgtagggctaatccgcctcacgagggtcaccaacggcacgttcctttggggggccgaggccccctactgctggtcggcaaacggacggcgggcgcacgcgtcgcttctagcccggattctgacttagaggcgttcagtcataatccaacgcaacggtagcttcgcgccactggcttttcaaccaagcgcgatgaccaattgtgcgaatcaacggttcctctcgtactaggttgaattactattg

SEQ ID NO: 200583 - DNA, 262 bp, Glycine max
caaaaagaaagaatcccaggcgaggagaaagatggaggggaaggagcaggatgtgtcgttgggagcgaacaagttccccgagagacagccgattgggacggcggcgcagagccaagacgacggcaaggactaccaggagccggcgccggcgccgctggttgacccgacggagtttacgtcatggtcgttttacagagcagggatagcagagtttgtggccacttttctgtttctctacatcaccgtcttaaccgttatggga

SEQ ID NO: 200584 - DNA, 264 bp, Glycine max
ctccggaaacggcgccgcgccgcctgccaccctggccgagttcaccctggacggcgccggaggactcgatttcttcgatgtaagccttgtcgacggctacaacgtgccgatgctggtggtgccgcagggtggctccggcgggaagtgcagcgcgacggggtgcgtcggggacctgaacggcgcgtgtccctcagagctgaaggtgatgagtggcgatgggagagagggagtggtggcgtgcaagagcgcgtgcgaggcgtttaa

SEQ ID NO: 200585 - DNA, 257 bp, Glycine max
gttcctctcgcccagaatccgagatcaaccccgacgaaggcaaggggtttttctcggcttcttcagatttctgaaatggcgcctgtttcagctttagccaagtacaagctcgtcttcctgggtgaccaatccgtgggcaaaaccagcatcatcactcgcttcatgtatgataaattcgataacacctatcaggctacaattggtattgattttctatcaaaaactatgtatcttgaagatcgaactgttcgactgca

SEQ ID NO: 200586 - DNA, 260 bp, Glycine max
tctctctgtgtatttccctacctctcccttcaagatgcagatcttcgtcaagaccctcaccggcaagaccatcacccttgaggtggaaagctctgacaccatcgacaacgtcaaggccaagatccaggacaaggaaggaatccccccggaccagcaacgtctcattttcgccggaaagcaacttgaggacggccgtacccttgctgactacaacattcagaaggagagtactcttcacctcgtcctccgtctccgtggtg

SEQ ID NO: 200587 - DNA, 261 bp, Glycine max
gcttcgcgaagaaggacttcaatttggccaagcaccctgagatcgacgtgccgaatctgcaggtgattaagctgatgcagagtttcaagtctcgcgagtacgtgagagaaacttttgcttggatgcactattactggttcctcaccaacgatggcatcgagtttctcagaacttaccttaaccttccttccgaaattgtccctgctactttgaagaagcaagccaagccacctggcaggccctttggaggcccatccggtg

SEQ ID NO: 200588 - DNA, 260 bp, Glycine max
ctgagaggaagagagagggagattctttgtttgctaccttccctcggaaaaatggttacgttcaggtttcaccagtaccaggtggttgggagggctcttcccacggaagcagatcagcaccccaagatctaccgaatgaagctctgggccaccaacgaggttcgcgccaagtccaagttctggtattttctgaggaaactgaaaaaggtgaagaagagcaatggccaagtgcttgccatcaacgagatttttgagaagaa

SEQ ID NO: 200589 - DNA, 257 bp, Glycine max
gcattatctgattatcagttcatgcggccacgtgcacgggacaagaagcttgttgaagaatgggcagttcccttgaaaagcgttgaagatatatatgagaggtttagactgtattgccttggaaagttgagaagcaatccttggtcagaacttgatggtcttcagcctgagacaaagatcataaatgagcagctggagaagattaacacaaagggcttcctcaccatcaatagccagccagctgtcaatggggaaaa

SEQ ID NO: 200590 - DNA, 256 bp, Glycine max
cggctcgagctccaatggagtttcatagcattaccaagtttcacaatatcccacttgtgtcttctatctcttgtgattttatgtattgctaccactatactgaataaccctgcaatggccacaaagcaatattattgtgatttccctgccatctttaactttggtgcctcaaacgctgacactggtggcttggctgcttcattttttgttgctgcaccaaaatcaccaaatggagaaacctattttcatagacctg

SEQ ID NO: 200591 - DNA, 256 bp, Glycine max
cgaaactgaggtcgtagaaagaatggcgaaaacgacgtcgttgttgctctttacactgctcctcttcggaaccttagctctcatccaggcgaagaaatcgaaggaggatttgaaggaagtgacccacaaggtttactttgatgttgagattaatggaaaagaagcaggtcgtattgtgatgggtctttttggaaaggctgttccaaaaactgcagaaaactttcgagctctttgcactggggaaaagggaactggt

SEQ ID NO: 200592 - DNA, 262 bp, Glycine max
ctccggaaacggcgccgcgccgcctgccaccctggccgagttcaccctggacggcgccggaggactcgatttcttcgatgtaagccttgtcgacggctacaacgtgccgatgctggtggtgccgcagggtggctccggcgggaagtgcagcgcgacggggtgcgtcggggacctgaacggcgcgtgtccctcagagctgaaggtgatgagtggcgatgggagagagggagtggtggcgtgcaagagcgcgtgcgaggcgttt

SEQ ID NO: 200593 - DNA, 122 bp, Glycine max
ctccggaaacggcgccgcgccgcctgccaccctggccgagttcaccctggacggcgccggaggactcgatttcttcgatgtaagccttgtcgacggctacaacgtgccgatgctggtggtgc

SEQ ID NO: 200594 - DNA, 209 bp, Glycine max
ggagaagagcatggttatgacaaagagagtgggcaaaggaaaggtcgtagccggggccggggtaagggacgtggccgagttcattgtcatcagaataatcgtgtgggaacacccccttcaaataatacaattttcactgatcaagcattgccaagcaaccccctgggccccgaatgccggatggtacaagaggttttcaaagggggggg

SEQ ID NO: 200595 - DNA, 229 bp, Glycine max
catctttctctcttctctctccacccaaaccctaactcccgaccctgttcccctctcgtatccgtcatgaaaggaggaaagtccaagaccgaatctaagagagccgatcccaaacttgctgtgaataagaagggagccgccaccaggctaggaaacccgccggcaaggggaaggcagcgaaagaccctaacaagccaaagaggcctccaagtgctttcttcgttttcat

SEQ ID NO: 200596 - DNA, 267 bp, Glycine max
attatagcacaccacacaaaaaagcaaaacagagagaacaactgttactcacacacgccatgggtaaatgaatggtttttgagcaacagcagttaaaagagaaaagggattcagcgaagatgacatcggttggtgtggcaccaattcgggtttgagagaagccagtgggcatggagcagcagctgcggatagattgccagaggagatgaacgatatgaaaattagggatgatagagaaatggaagccacagttgttgatggcaacgg

SEQ ID NO: 200597 - DNA, 229 bp, Glycine max
cagtagtcatatgcttgtctcaaagattaagccatgcatgtgtaagtatgaactaattcagactgtgaaactgcgaatggctcattaaatcagttatagtttgtttgatggtatctactactcggataaccgtagtaattctgagctaatacgtgcaacaaaccccgacttctggaagggatgcatttattagataaaaggtcaacacaggctctgcctgttgctttga

SEQ ID NO: 200598 - DNA, 181 bp, Glycine max
cttcgaagagcgtttcgatgacgggtgggaaaatcgatgggttacatcagattggaaaaaagatgagaacgtggctggggagtggaaccacacctctggtcaatggaatggagacgctaatgacaaaggtattcaaaccagtgggattacagattctatgctatttcagctgagtaccctg

SEQ ID NO: 200599 - DNA, 93 bp, Glycine max
gcgaagagaatggctcccaagggtttaatctttttggctgtgttatgcttctcagcactgtcactgagtcgttgtcttacggaagataatgga

SEQ ID NO: 200600 - DNA, 268 bp, Glycine max
gttggagggatcttgtgggctgggtacccgggtgaacttggaggagtggcactggcccaggttgtctttggtgatcataacccaggtggaaaactaccaattacttggtacccaaaagatttcatcaaagtaccaatgacaacatgaggatgagagcagatccagcatcaggctaccctgggagaacctacagattctacactggtccaaaggtgtatgaatttggctacggcctaagctacacaaaatattcctacaagctcctctc

SEQ ID NO: 200601 - DNA, 268 bp, Glycine max
ccggaactcgtttctttcaaaacacttcaaacatctcgaacgctctctttccggcaactaggttaaagttcatcaatggcaggtcgcggcaaaaccctaggatctagcgccgccaagaaggctacctcaaggagcagcaaagcggcctccaattccccgtcggccgtatcgcccgtttcctcaaggccggaaaatacgctgagcgtgtcggcgccggcgcccctgtctacctcgccgccgtactcgaatatctcgcggctgaggtttt

SEQ ID NO: 200602 - DNA, 235 bp, Glycine max
gcaacaacagccaagactctgacttagctggcccaggagaaaaccctagaatcgagcttcgttcgggacgaggaagagcgtcacaaggttgcctagaacgaattcagcgacgagatcccagtgatttctcttcgccggaatcgcgaggtggatggacgcagaatagagatttgtgagaagatcgtggaggcttgcgagatatggggtatattccaggttgtggagcacggtgtga

SEQ ID NO: 200603 - DNA, 260 bp, Glycine max
ccggaaagcaacttgaggacggccgtacccttgctgactacaacattcagaaggagagtactcttcacctcgtcctccgtctccgtggtggcatgccgatcttcgttaagacactcaccggcaagaccataaccctagaggttgaagctccgacaccatcgataacgtcaaggccaagatccaggacaaggagggtatccccccggaccagcaacgtctcatcttcgcgggaaagcagctcgaggacggccgaaccctcg

SEQ ID NO: 200604 - DNA, 270 bp, Glycine max
cggctcgagctcagcgattgttcgagaaactctaacgaaagagcgagaaagcgaagacagccatggcgtcgtttcttcaatcgtttctggatccgaagaagaactggttcgccgctcagcacatgaaatccctctccaaacgcctcgcaaatatgggctccgatacgacgatttgtacgatccttactacgatctggatgtgaaggaggcgctgaatcggcttccgaaagaggtggtggacgctcgccacgcgcgtcttaaacgcgccat

SEQ ID NO: 200605 - DNA, 262 bp, Glycine max
gttgcttctgcggctagcatttcagagtcttggtgtggtttatggagacttgggcacttcacccttgtatgttttctacaatacatttcctattggagtgaaagatgaggaggatgtaattggagcgctttctttgatttctactctcttaccttggtgccactcctcaaatatgtttttgttgtattaagagcaaatgacaatggtcaaggtggaacatttgcgctttagtccttgctttgccggcatgcaaagatgaaaa

SEQ ID NO: 200606 - DNA, 219 bp, Glycine max
cgtaagtctgcaccaactactggtggtgtgaagaagccccaccgttatcgtcctggtaccgttgctcttcgtgagattaggaaataccagaagagtaccgagcttttgatccggaagctccccttccagaggctggttcggaaattgctcaggacttcaagactgatctgcgtttccagagccacgccgtgcttgcattgcaagaagctgctgaggcat

SEQ ID NO: 200607 - DNA, 242 bp, Glycine max
cgagattgaggcgggggttgatttggaagaaacccagctaaggtaattcctcgcaacccctaactttaccttcaaaggatcatcatgggcagtcacaatgctttggctgccactttcggaatattaggtaacatcatttctgtgatggtgtacttggctccggtgccaacgttttaccggatatacaaaaagaaatgcacggacggtttccactcgctgccatacttgttgtcattaatgag

SEQ ID NO: 200608 - DNA, 264 bp, Glycine max
ctgcttcaaccttgcggaagaagaagacgccgcagccatggtgaagtactccagagaacccgacaatcccaccaagtcctgcaaggccagaggcgctgaccttagagtgcatttcaagaacactagggagactgcctttgcctcaggaagttgcccctggttaaagctaaaagatacctggaggatgttttggcccacaaacaggccatccctttccgacgcttctgtggtggtgttgggaggacagcccaggctaagagcaga

SEQ ID NO: 200609 - DNA, 266 bp, Glycine max
caaaaagaaagaatcccaggcgaggagaaagatggaggggaaggagcaggatgtgtcgttgggagcgaacaagttccccgagagacagccgattgggacggcggcgcagagccaagacgacggcaaggactaccaggagcggcgccggcgccgctggttgacccgacggagtttacgtcatggtcgttttacagagcagggatagcagagtttgtggccacttttctgtttctctacatcaccgtcttaaccgttatgggagtcgc

SEQ ID NO: 200610 - DNA, 268 bp, Glycine max
attctgcgtggtgagtgaaaatggcggtacccttgctctccaagaggatcgtgaagaagcgcgtcaagaagtttatacgcccccagagtgatcgcaagatctccgtcaagccaagctggcgcagacccaagggtattgatttcgtgtcaggagaaagttcaaaggatgcactttgatgcccagcattggttatggctcagacaagaaaacccgccattatctaccaaatggtttcaagaaatgtgtcgtgcacaatgtgaaagacctg

SEQ ID NO: 200611 - DNA, 269 bp, Glycine max
  unsure (1)..(269): unsure at all n locations
atgggagttcagcaancccactccattcatcaggagtcgcgagtttctttggcaagaagggcacactgcttttgcaacaaaggatgaagcagatgcagaggttcttgagattctggaattatataggcgtatatacgaagagatttggcagttcctgtcataaagggtaagaaaagtgagcttgagaagtttgctggtggactctacactaccagtgttgaggcatttattccaaacactggtcgtggtatccaaggtgcaattctcat

SEQ ID NO: 200612 - DNA, 185 bp, Glycine max
ggctcgagctgcggagagagaaattgagtttccgagataaccagtttactctttgattcatcaatggacactgcgaggaccgtgaaggatgtttcgcctcacgatttcgtgaaggcttatgcttccacctcaagcgttccggcaagatggagcttcctgagtggaccgatattgtaaaaacagca

SEQ ID NO: 200613 - DNA, 235 bp, Glycine max
caaccttctttctttttctgtgagcctttctttcaggttcttaacttgatcagtgtgcagtgtccaaatcataagggtagttgcaaattgcaatggctaagcatgatgttgagggtggttccttctctgcaaaggactccatgatcctcctccagcaccgttgattgatgctgaggaactcacacagtggtccttctacagggctttgattgctgagttcattgccacaatgctc

SEQ ID NO: 200614 - DNA, 247 bp, Glycine max
cgcaggcccaggcccagcccattacgctctacatggacactggcagcgacttagtctggttcccctgcgccccttttaaatgcatactctgcgagggaaagcccaacgagcccaacgcctctcccccaaccaacatcatcaaagcgtcgccgtttcgtgcaagtcccccgcgtgctccgcagcgcacaacttagcccctccctccgatctctgcgccgccgctcgttgtcctctcgaatcaatcgaa

SEQ ID NO: 200615 - DNA, 257 bp, Glycine max
ctcgagccgcaaaatcgcaatatcttcaactctatctgcaacagccaactttctcgttcgtcgatcacaaaaatggcggcgaaacttcaaatatttacgggattgccccccgcgccatttcaatcttcctcctccacttctgcgtactcaagaagcctctcactacctccttcttcggcactgcacgagtggaagttctgaaacttcgagtgatgaggattgcgaacctgcgcgcggtggaggtgctctcggtgctc

SEQ ID NO: 200616 - DNA, 202 bp, Glycine max
gcagatcctggacctcagcaaaagtttcaagctaactgatcgttcactctatgagctcgcccttggttgtcgcgatcttacaaaactcaacatcagcgggtgttcagcatttagtgacaatgctctggcttaccttgcagcttctgcagaaaactgaaagttctaaatctttgtggatgtgttagagctgcatccgatactg

SEQ ID NO: 200617 - DNA, 212 bp, Glycine max
aactaattcagactgtgaaactgcgaatggctcattaaatcagttatagtttgtttgatggtatctactactcggataaccgtagtaattctagagctaatacgtgcaacaaaccccgacttctggaagggatgcattattagataaaaggtcaacacaggctctgcctgttgctttgatgattcctgataactcgtcggttcgcagggcct

SEQ ID NO: 200618 - DNA, 240 bp, Glycine max
cccgaaggcacctctggagaaagtttgtcttcttggatgtggtgtttcaactggccttggagctgtctggaacactgcaaaagtggagtcagggtccattgttgctatttttggccttggaactgttgggcttgcgttgcagagggtgctaaaactgctggtgcatcccgggttattggcatagatattgacagcaagaagtttgatgtagcaaaaaactttggagtcactgagtttata

SEQ ID NO: 200619 - DNA, 194 bp, Glycine max
tttatatttaggttacgaggaaattatcatgaatccaattatttctgctgcttctgttattgctgctgggttggccgtagggcttgcttctattggacctggggttggtcaaggcactgctgcagggcaagctgtgaagggattgcacgacaaccggatgcagagggaaaaatacgaggtactttattgcttat

SEQ ID NO: 200620 - DNA, 253 bp, Glycine max
gaaagcacttgtgcctatgagtagtgtggagttgcttctccctgttgctgttggggactacaccgatttctttacgtctctgcatcacactaaaaactgtgggatcatatttcgtgggccgcagactcctgttctaataactggtatcgcctgcctgttgcctaccatggacgggcatcttctgttgttatttccggaacagatattgtccggccaagaggtcaggctcatccagttggcagtctacccccta

SEQ ID NO: 200621 - DNA, 261 bp, Glycine max
caattttctagggttttattcattttccgatggcttctgcagatgttgagtaccgttgctttgtcggtgggctcgcttgggccactgacgaccatgccctcgagagagccttctctcagtacggcgaaatcgttgaacgaagattatcaacgatcgtgagactggcagatccaggggttttggatttgtgaccttcgcctcggagcagtccatgaaagatgcgatcggagcgatgaatggacagaacttggacggccgtaa

SEQ ID NO: 200622 - DNA, 210 bp, Glycine max
gatggctttgtttatgagcatggaccattcaactttgaggctgcaaattcgaaagggaatctacccactttgcatatcaatccttacagctggtctaaggtttccagcgttatatatttggattcccctgctgggttgggttctcttactccaagaacacgagcaaatatgctactggggaccttgaaactgcgtctgatacccatcttt

SEQ ID NO: 200623 - DNA, 260 bp, Glycine max
ccgcactccgtcttcatcaatcagcatcaccaccgctccaacacaggggaaaatgagggagatccttcacgttcagggagggcaatgcgggaaccagatcggttcgaagttctgggaagtggtgtgcgacgagccggcatagatccgacggggaagtacgtcggaaactcagatctacaactcgagcgcgtgaacgtgtactacaacgaagcttcctgcgggcggtttgtcccacgcgcagtgctgatggacctggagcc

SEQ ID NO: 200624 - DNA, 259 bp, Glycine max
gttattatcaaataattaattagattcctcgtggaatcttgttgaagccatgtctacagctggtcaggtcatcaagtgcagagctgcggtggcatgggaagcagggaagccactatcgatagaaaccatagaagtgcaccaccccagaaaggtgaagtgcgtttgaagatcctcttcaactccctttgccgtacagatgtttactggtgggatgctaagggccagactccgctgtttcctcgtatcttaggccacgaag

SEQ ID NO: 200625 - DNA, 265 bp, Glycine max
gaaagacatgggtacggtggctccaagagttgaaagcttggcgagcagcgggataaagtgtatcccgaaggaatacgtgaggcctcaagaagagctcaagagcatagggaacgtgtttgaggaggaaaagaaggaaggctacaggttccgacaattgacttgagagagatagattcggaggacgaggttgttcgagggaaatgtcgtgagaagctgaagaaagcggcggaggagtggggtgtgatgcacttggtgaaccatggga

SEQ ID NO: 200626 - DNA, 277 bp, Glycine max
ctctctctctctctctctctctctgtgtgttgcgttttgtgaaaacttattcgacatggcgtcacgggacaacaagaaggcgtcgagcagccgagccggcagaattcgcaccctctccgatctgaaccgtccctccgacgattccgacagcgactccgatggccctcaggagtactacaccggcggcgaaaagagtggaatgcttgtccaggatccttcaaagggaaatgatgtggatgaaattttcaatcaagctaggcaacttggggctgttgaa

SEQ ID NO: 200627 - DNA, 240 bp, Glycine max
  unsure (1)..(240): unsure at all n locations
cgggggagatctgattcgggagggtggttgaggggctgtctggtggttttcgcagtggtctcagcgttgggcgtgtgtggctctgctctatactggcgattcaagaagccatcactctcggcactcanaacaacaaactctcttgcccttcctgcatctgtgactgccctccccctctctcgctcttccaacttgctcctgggctggcgaatctctctgtctcagattgtggaagtaatg

SEQ ID NO: 200628 - DNA, 250 bp, Glycine max
tccgacatgttcaccaccacctccttgttcacatcatcatcatcatcatcatcatcatcttcttcttcttcaatcagttgactcttcgttcctccctctattcatctgatggagcccatggacatcgttgggaaggccaaggaagacgcttctcttcctaaagcgacaatgacgaaaattattaaagagatgttgcccccggacgtgcgtgtcgccagagatgcacaggatttattgatcgagtgttgtg

SEQ ID NO: 200629 - DNA, 287 bp, Glycine max
tgagaaaggagggcaatttagcttgcacatactcaagcattccaccattgtggcaaagccaaggtcattttagactccaccacatgatcatgatcatatgatcaatccccttaattttttcttttttcttttcccttttctttactctgtattgtatcaatgcttgaaaatggggttgttccaaaaatgtcatatatatttggcctgctaatgggtattgtaaatctctgaacttgaagtgatgcacggttttgagatggttttctaataaacctacacttttgtct

SEQ ID NO: 200630 - DNA, 286 bp, Glycine max
cacacgcttcagaagacatggcctcattgggtgggttacaaaatgtgagcggcatcaattttcttatcaaagagggtccaaaagtcaatgcaaagttcgagctgaagccgccaccatatccactgaatggtttggagccggtgatgagccagcagacacttgagtttcactgggggaagcaccacaagacttatgtggaaaatctgaaaaaacaagttgttgggacagagcttgatgggaagtcactagaagagattattgtcacatcatacaataagggtgacat

SEQ ID NO: 200631 - DNA, 284 bp, Glycine max
cgccactcttcttcttcccacgctcctccttctcatacccttcgccaccctcgtctccgcccgccctcacctcgccggagactttctccgactgccctccgaaaccgataacgatgacaacgtccagggcacccgctgggccgtcctcctcgccggttccaatggctactggaattacagacatcaggctgatgtttgtcacgcctatcaaatactaaggaaaggtggcctgaaagaagaaaatattattgtttttatgtatgatgacattgcattcaatgggg

SEQ ID NO: 200632 - DNA, 284 bp, Glycine max
tctcgaatagcccagggcattattccaggggttacggctgaatcttatcaagaggacaacaaattatggaaaaagcatgttaacgcttacaaaagaatgaataaattgattggcactaccagatatcggaatgtgatggacatgaatgcaggccttggaggatttgcagctgtgcttgaatcacaaaagtcttgggtgatgaatgttgtgcctacaattgctgagaacactttgggtgttgtctatgagagaggtctgatcggcatttatcatgactggtgcga

SEQ ID NO: 200633 - DNA, 276 bp, Glycine max
tagtgtggcaaaatattcaacatgaagttcgtcaacaacacaaaagccacagtcccgttgctaccgcgccaaatttcgaaacaaataccgttctcagaagataaaaagaagcaagtgttggcgatgcttggcgtggaagcgaactcaagcaacgccaagatcatagcggagaccattggtctttgccaagagcctgcaacggagggagaaaggaaacactgcgcgacttcgttggagtccatggttgatttcgtcgtttccgcgctcgggaaaaac

SEQ ID NO: 200634 - DNA, 288 bp, Glycine max
tattgaattctccagagagaagaagaaacttaatcgatcatcacttcacttcactaatacatcatggcagacgagacccagaacaagtatgagagctctgaggttgaggtccaggatcgtggtgtttttgactttctcggtaagaaaaaggatgaagaagacaagcctcatcctcaggaggaggtcatcgctatcgagtttcaaaaagtcactgtctcagaccaaggagagaacaagcacagcctcttagaaaagcttcaccgatctgacagcagctctagctcttca

SEQ ID NO: 200635 - DNA, 275 bp, Glycine max
ggctcgatccttgtccctgacggaactaggggctacttggcttcattcacagcatttgtctgttatccaccactcttacaagtttggctgaacttcaaggaacccgtggttgatgcagacattgacttgttcaagaaaattcttggagtaacaatgtaccagtacattgaaaacgatccaagaatgaacccaatccttaacaagtccatggccaacttgtgtgcaacagagatgagtagaatacttgaaatatacactggatttgagggaatatc

SEQ ID NO: 200636 - DNA, 191 bp, Glycine max
acgcacgcgtcgcttctagcccggattctgacttagaggcgttcagtcataatccaacgcacggtagttcgcgccactggctttcacaagcgcgtacattgtgcatcacgtcctctcgactagtgatactattgcgacatgtcatcataggtaactacgccagagctaaccaccagtccatgtgggaatca

SEQ ID NO: 200637 - DNA, 282 bp, Glycine max
tctcgagccgggtttctctttctctttctctgtctgcttcttcactttctctcgtttcaatcagtaaaaatcatgggcagaaaattcttcgtcggtggcaactggaaatgcaatgggaccactgaggaggtgaagaagattgttactactttaaatgaagctaaagtccctggagaagatgttgtagaagttgttgtgagccctccttttgtgttccttccttttgtaaaaagtttgccgcgccctgatttccatgtctcggcccaaaattgttgggttcgc

SEQ ID NO: 200638 - DNA, 292 bp, Glycine max
cggctcgatacaaacgctgccgaattcgttatcgctttgcactagcagctttgaaacccggttcatccgaagcccatcaccgaaccatgtcgaggagaaaggttagagagccaaaggaggaaaatgtgactctgggtccagctgttagagatggtgaacacgtttttggcgttgctcgcatctttgcctccttcaacgacaccttcatccatgtcactgatttgtctggcagggaaacccttgtccgaatcactggtggtatgaaagttagagctgacagagatgaatcatc

SEQ ID NO: 200639 - DNA, 284 bp, Glycine max
tcttcgtctcaaacctcttcgttccttcgattcattccatttcttccaaaatggccaaagacccagttcgcgttctcgtcactggagccgcagggcaaattggatatgctcttgtccctatgattgctaggggagtgatgctgggtcctgaccagcccgtgatcctccacatgcttgacattcctccagcagcagagtcgttgaatggggttaaaatggaattggtggaaggatgtgatgactaagaacgtctccatttacaagtcccaggcttctgcccttga

SEQ ID NO: 200640 - DNA, 282 bp, Glycine max
taagaatattcagagaattccaaagacagagatgactgtcattaaggaagagcaacaaccaaaccaaatagctggccacaaagaacttggtcacaaaagtctccttcagagcgatgcactctatcagtatatacttgaaaccagtgtgtacccaagagagcatgagagcttgaaggagctacgagagttgacggaaaaacacccttggaacctgatggctacaccacctgacgaaggacaacttctaggcatgctccttaagcttatcaatgccaagaacac

SEQ ID NO: 200641 - DNA, 282 bp, Glycine max
acaacatgttcaccaccacctccttgttcttcacatcatcctcatcatcttcttcaatcagttgactcttcgttcctccctctattctttcggatggagcccatggacatcgttgggaaggccaaggaagacgcttctcttcctaaagcgacaatgacgaaaattattaaagagatgttgcccccgagctagcgtgtcgccagagatgcacaggatttattgatcgagtgttgtgtcgagtttataaaccttgtctcgtcagagtccaatgaagtctgtaaa

SEQ ID NO: 200642 - DNA, 286 bp, Glycine max
  unsure (1)..(286): unsure at all n locations
tggagtttcctcatgatagttcaaacattgatgattttggatgtttgatttcttacaacaatgcggtactgaactataataacatgttgaaagagacattgaagcaaaccagagaaagtctttctgatgcttctgtcatctatgtggacacccattctgtcttgttggagcttntctaacatcncacttctcatgggcttcaatatggctacaaagcgtgttgtggatacggagggggtgactacaacttcgatccnaaagtatcttgcggcaatacccaagagat

SEQ ID NO: 200643 - DNA, 270 bp, Glycine max
  unsure (1)..(270): unsure at all n locations
aatatcgagccgaatcggcacnacggctcgagcgaagagaatggctacaagggtttaatcttactggctgtgttatgcttctaagcactgtcactgagtcgttgtcttgcggaggataatggacttgttatgaacttctacaaggaatcatgccctcaggctgaagacatcatcaaagaacaagtcaagcttctctactagcgccacaagaacactgctttctcctggctcagaaacatcttccatgactgtgctgttcagagttgtgat

SEQ ID NO: 200644 - DNA, 282 bp, Glycine max
aacaatggtgccgcaacccattttgcatctaacccttttgtcattaataatctctctgaccactctttccttggtcgatgccgccgatcccacatttggcttcacccctcttggattatctagtagctcaaacttgcaaatccaaaagccttacgacgttgcagtcaacgagcgctacagcttttcaaatggagtgcacagattttgggtatactccacggacaagcctcatatgcaaggcagcaatacgaagccacgaactgagattcgtatcgctggata

SEQ ID NO: 200645 - DNA, 274 bp, Glycine max
ctcgcccgattccaaactcaaactcgcgctcatggcgaataacccttccgacgctcccgccgacgacttcctcgaacaaattctcggcctcccgaccttcgcttccgccgactccggcctctccgccgccgatgtcggcctcgccggtgcggccactcagtctccgatgatgctgcagctcagctccgccgacgccaacgctcacctcgccggcgcatccttccacgcgccggtgtaccagctagggctgagcttggagcagggcaaaggaaga

SEQ ID NO: 200646 - DNA, 281 bp, Glycine max
cgcaacaaaaagaaagaatcccaggcgaggagaaagatggaggggaaggagcaggatgtgtcgttgggagcgaacaagttccccgagagacagccgattgggacggcggcgcagagccaagacgacggcaaggactaccaggagccggcgccggcgccgctggttgacccgacggagtttacgtcatggtcgttttacagagcagggatagcagagtttgtggccacttttctgtttctctacatcaccgtcttaaccgttatgggagtcgccggggctaa

SEQ ID NO: 200647 - DNA, 257 bp, Glycine max
actcgagccgaatcggctcgagtgtgtatttccctacctctcccttcatgatgcagatcttcatcaagaccctcaccggcaagaccatcacccttgacgtggaatctctgacaccatcgacaacgtcaaggctaagatccaggacaaggaaggaatcacgccggaccagcaacgtctcattttcgccggtaagcaacttgaggacggccgtactcttgctgactacaacattctagaggagagtactcttcacatcg

SEQ ID NO: 200648 - DNA, 271 bp, Glycine max
gctctgcaaactgagcatggctcctctcgcattttccttcttcttcatccttatcacattcttttcttcatcatctgaagcgggatccgttggaataaactatggaagggttgcgaacgacctacctacaccagcgaaagtggtggagcttctgaaggcacaaggtctgaaccgtgtgaagctctacgacaccgacgccaccgtcttaaccgcgtttgcaaactcgggaatcaaggtcgtagttgccatgccaaacgagcttcttgccaac

SEQ ID NO: 200649 - DNA, 278 bp, Glycine max
tacccgatttaccaaccgggttcttgcccttatgtggacgaggcttacgattgcaaagttaacggaagaaccgacaccctctacaccaattggcgctggaaacctgatgcctgtgatcttcccaggtttaatgccacagacttcttggtgagactgaaaggtaaaaaactaatgctggttggagattctatgaaccggaatcaatttgagtccattctgtgcatactacgtgaaggcctgcacaataagagcagaatgtatgaggtacacggacacaa

SEQ ID NO: 200650 - DNA, 279 bp, Glycine max
gagctgaattagacgatcaaattcctactgccttcgatccttttgctgatgcgaatgctgatgactcgggtgctgggtcaaaggagtatgtgcatattcgtgtacagcagcgaaatggtaggaaaagcctgacaaccgttcagggattgaaaaaggaattcagctataacaagatacttaaagacgtcaagaaagagttctgttgcaatggaacagttgttcaggacccagaactaggacaggttattcaacttcaaggtgatcagaggaagaatgttt

SEQ ID NO: 200651 - DNA, 259 bp, Glycine max
  unsure (1)..(259): unsure at all n locations
anatcctgttgatatggatgaagannaaaaggagatgcttacctgaagcacgagcccggttacgccaacacaaaaggaaagaaagcaaaaaggaaagctagggagaaacagcttgaggaagccaggaccgcttgcttctttacaaaagaagagagaattgaaggctgctggaattgatattaggcagcggaagagaaaaaggaaaggaatagattacaatgcagaaattccatttgaaaaaaggcctcctccagggttt

SEQ ID NO: 200652 - DNA, 274 bp, Glycine max
ccagtttcaccgtacgaatatcttgttgtatggagcgatccgagaaaaactctgtaaacatgttggtttaccaggacctccttacaggtgatgagcttctctctgactccttccgttacaaggaaattgagaatggaatgcattgaggaattgaggggaagtgggttgttaaaggagcagttgatgtagacattggtgcaaacccttctgctgagggtggaggagaagatgagggagttgatgatgcagctgttaaggttgttgacattgttga

SEQ ID NO: 200653 - DNA, 271 bp, Glycine max
ctttgtccctgacggaactaggcgctacttggcttcattcacagcatttgtctgttatccaccactcttacaagtttggctgaacttcaaggaagccgtggttgatgcagaccttgacttgttcaagaaaattcttggagtaacaatgtaccagtacatggaaaacgatccaaaaatgaaccaaatctttaacaagtcaatggccaacttgtgtgcaacagagatgagtagaatacttgaaatatacactggatttgagggaatatcaaca

SEQ ID NO: 200654 - DNA, 265 bp, Glycine max
tatgtgtaccttaaggtgtccaacagtagtttatacatattttcgaagttcctagtaatttgtatggtgatgatgatatctttggttgattcaagttattccttgtgtgattttgaggcaatcttcaattttggtgattcgaattcagatacgggtgggtttcatacaagctttcctgcacagcctgctccctatggaatgacttacttcaaaaaaccagtggggcgtgcttctgatggaaggcttattgttgattttctcgctc

SEQ ID NO: 200655 - DNA, 279 bp, Glycine max
aagagaatggctcccaagggtttaatctttttggctgtgttatgcttctcagcactgtcactgagtcgttgtcttgccggaggataatggacttctaatgaacttcaacaagaactcatgccctcaggctgaagacctcaccaaagaccaagtcaagcttctctacaagcgccacaggaacactgctttctcctggctcagaaacatcttccatgactgtgctgttcagagttgtgatgcttcactgttgctggactccagaagaaggagcttgtctga

SEQ ID NO: 200656 - DNA, 271 bp, Glycine max
atatacatgaggtctatggcttccttaagctcctcattagtgctgctccttgcagctctaattctatcccctcaagttcttgctgactatgagaagcccccaatttacaagccacctgtttacacaccgccagtttataagcccccagttgagaaaccaccagtgtacaaacctccagtgtacaagcctcctgttgagaaaccacctgtttataagcctccagtttataagccacctatttaaaagcccccagtgtataaacctccagttg

SEQ ID NO: 200657 - DNA, 272 bp, Glycine max
aagagagtgagaaaagaaggaagaagaagaagaagagatggcaaatgaactacccgtcaaagcttttggttgggctgcttcagacacttctggcacccttgccccttttcatttctccagaagggaaaatggcgtcgatgacgtcactctcaagattctcttctgcggggtttgccactctgatctccacactctcaaaaacgactggggtttcaccacctaccctgtcgttcctgggcatgaaattgttggtgttgtgacagaagttggaa

SEQ ID NO: 200658 - DNA, 268 bp, Glycine max
agagacaggcttccctgttgctgtacagcttggaactatcactgctgatactggagcatcacatgtttactcttatccagatgatgaaagtgtcttggatccacaattagcgcacatctggcattttttggcattgacttttcatcactacgaaagactgaaatgacaactgctgaaagagaacttgatcagaatacgaattttgagtggaatcgaatccaagacagtggacgagaagtagatccaatttttggacctggatatacag

SEQ ID NO: 200659 - DNA, 273 bp, Glycine max
tagttactgtttctgctgcttttcgattcctgagaatgtttcagaacatcatgaacgctttcaccaccaccggagacgacgacaacgggccaggtgcacgagtgaaagggacggtggtgctgatgaagaagaatgtgttggacttcaacgatttcagtgcttcgtttcttgatcgtcttcatgagtttgtggggacacgagtttctcttcagctcgtaagttctgtcaacgttgaccctgggaatggcaatgggttgaaggggaaacttggga

SEQ ID NO: 200660 - DNA, 275 bp, Glycine max
  unsure (1)..(275): unsure at all n locations
ataaggcttgaggggaaggtggcgattatcactggtggtgcgagtggtctaggtgcagccactgcaagactcttctctaagcatggagcacatgtagtcatagctgatattcaaagagacttnggtctctctgttgccaaagagttagaatccgcttcctatgtccattgcgatgtcacaaacgaaaacgacgttgaaaactgtgtgaacacagcggtttccaagtatggcaaactcgatatcatgtttaataatgctggcataattgatgagat

SEQ ID NO: 200661 - DNA, 276 bp, Glycine max
caccaatccgctccgagttgtatgttttgcagagctagaagaaatcaacgatgcctcgctatgatgataaatatggtaatacccgcctctatgttggacgcttgtcttcgaggactcgttcccgtgacctggagcgtgtcttcagcagatatggaagagttcgaggcgtagatatgaagaatgatttcgcctttgttgaatttagtgatcctcgagatgctgatgatgctagatacaacctggatggtcgtgatgttgaaggaagtcgtattattg

SEQ ID NO: 200662 - DNA, 273 bp, Glycine max
tgagtgagtgagtgagcaagagtgaagagcgaagagaatggctgccaagggtttaatctttttggctgtgttatgcttctcagcactgtcactgagtcgttgtcttgcggaggataatggacttgttatgaacttctacaaggaatcatgccctcaggctgaagacatcatcaaagaacaagtcaagcttctctacaagcgccacaagaacactgctttctcctggctcagaaacatcttccatgactgtgctgttcagagttgtgatgcttc

SEQ ID NO: 200663 - DNA, 271 bp, Glycine max
ctctctctagggtttgatcagactcaagggtttaagccatgggaaaaaggaaggcaaaggcaaagcctcctccaaagaagcgaatggataagctcgataccgtcttcagctgccctttctgcaatcatggcagcagcgtcgaatgccgccttgacatgaagaacttgataggggaagctatttgcgggatatgccaagagagctttagcactaccatcacagctttatcagagccaatagacatatacagtgagtggattgatgaatgtga

SEQ ID NO: 200664 - DNA, 271 bp, Glycine max
cataccttttgttggcaccattattagagcaatgcaggtcatatatgttaacagattcttaccatcatcaaggaagcaggctgttagggaaataaaggaactgaataacagagaagggcctcttgtgataaatttcctcgagtactattatttcccgagggaacaacaactaatggcaggaaccttatctccttccaacttggtgcatttatccctggatacccaatccagcctgtaattatacgctatcctcatgtacactttgaccaat

SEQ ID NO: 200665 - DNA, 272 bp, Glycine max
caaattcattttaatcctaattctgcacttcttgatcattcgatttttctcctcaagatgcagatattcgtaaaaactttgaccggcaagaccatcacccttgaggtggaatcctccgacaccattgacaacgtaaaagctaagattcaagacaaggaagggatcccacctgaccagcatggacttatctttgcgggtaaacaacttgaggatggtcgcacccttgccgattacaacatccaaaaggaatcaaccctccatctcgtgcttcg

SEQ ID NO: 200666 - DNA, 117 bp, Glycine max
gttcaatgaaccgatcaagaccacagcaggttcatggggatgcgaggattaagacgctttgttttttaatcttccgatgtcactcctgtttgtaagttgattttttaatttttaatt

SEQ ID NO: 200667 - DNA, 121 bp, Glycine max
ggaaaggaactcaatcgcattgctggagtggacaagacttgcaattttgtcaaggctgacttcatgaaaatgccattaccagacaacagttttgatgcagtgtatgcgattgaagccactt

SEQ ID NO: 200668 - DNA, 152 bp, Glycine max
cgcgtacgtctacgctcatactgctcgctcgagcgtgcgtcaccatgactttcaagcgcaggaatggaggtcgcaacaaacacggccgcggccacgtcaagttcattcgatgctccaactgcggcaaatgctgccctaaggacaaggctatc

SEQ ID NO: 200669 - DNA, 116 bp, Glycine max
  unsure (1)..(116): unsure at all n locations
tgacagaagatatcttgactgggntcaagatgcatgctcgtggttggatttccatctattgcatgccacctccgcccagcatttaagggttctgcccctatcaatctttctgatcg

SEQ ID NO: 200670 - DNA, 103 bp, Glycine max
atgccattctctctgtgtatttccctacctctcccttcaagatgcagatcttcgtcaagacactcaccggggaagagcatcacccttgaggtggaaagctctg

SEQ ID NO: 200671 - DNA, 113 bp, Glycine max
cgttcgtcaccatgactttcaagcgcaggaatggaggtcgcaacaaacacggccgcggccacgtcaagttcattcgatgctccaactgcggcaaatgctgccctaaggacaag

SEQ ID NO: 200672 - DNA, 97 bp, Glycine max
gactagttctagatggatggactctcgaggtgctaagccttgatggttgtaaaagagttggtgatgctagcttgatggcaattgcaggcagttgccc

SEQ ID NO: 200673 - DNA, 115 bp, Glycine max
cggctcgaggaggagtgttcagggcagtttacaaagccaaattttgttccttagttgtatccttgttctcctgtaactgatggctgattattcagcaggaactgaatcccaggag

SEQ ID NO: 200674 - DNA, 280 bp, Glycine max
ctcgagccgcaatatagcccaagccctatacaaccaaaccctaacacacacccatttgattcagtttccatggctagcctcaaggttgcatttttggctgcagtgctctgcatggttgtggtgagtgcacccatggcacatgcagctatcacgtgcgggcaggtgacgaatagcctgatcaattgcatcggttacctccagaacggaggaacgccgccgtcgggatgctgcaacggagtgaagagcctcaatgccgccgccaagaccacgccgaccgcca

SEQ ID NO: 200675 - DNA, 281 bp, Glycine max
ctcgagccgcttgcctctgttcatatagcttttgctggaactgcacagaggaggctcaccgtccagtggacacgtggcactgtgtcaaagtggatattgaaaaatagtgcagaatctgaaaacatgaactggatacttgctaactcaaagccatgtcccaagtgcaagcgaccaattgaaaaaacccaagggaccatgcatatgacatgtactcctccttgtaaatttgagttttgctggctatgcttggtgcaggtcggaccaggtgaaggactggtgga

SEQ ID NO: 200676 - DNA, 288 bp, Glycine max
ggatatcgagacgaatcggctcgaggttgttctatttctgggtctctatgaggcagcagcagaacagactcagactcacaagagtacttacattgtacacgtggcgaaatcggagatgcccgagagcttcgagcaccacgctgtgtggtatgagtcgtcactgaagaccgtgtctgactcggcggagatgatttacacctacgacaacgccatccacggctacgcgtagagattaaccgctgaggaagcgcgtttgctccagcgccaaacggggattctggctgtttt

SEQ ID NO: 200677 - DNA, 284 bp, Glycine max
  unsure (1)..(284): unsure at all n locations
gcgtgctctttgaatccatcctaagtgacttgcttgctgaaggcgacacgaggtcggtagaaactaagaatgggggaagagaatgaagaaacaaaaacatttaaggatttgggcttatccgagtcattggtggaagcttgcgaaaaattgggttggaaaaatccattaaagatacagacagaagcaattcctcttgcatttgaaggtaaagatgtgataggacttgcccaaactggttccggtaagactggagcttntgctcttcccatattgcatgccttatt

SEQ ID NO: 200678 - DNA, 278 bp, Glycine max
gcgtgaacaagcctcaggtaagccaaaaccatggttaagcataacaatgttatcccaaacggacacttccgtaagcactggcagaactatgtgaagacttggttcaatcagccagcacggaagacaaggagacgattggctcgtcagaagaaagctgtgaagatattccccagacctacggctggacctctcaggcccattgtacatggtcaaactttgaaatacaacatgaaagtgagaggtggaaggggattttctcttgaagaactcaaggcagc

SEQ ID NO: 200679 - DNA, 279 bp, Glycine max
gtgaagagtgaaagacagacaaaaacaccatgatcctaatctactacctctcggagcacccggctatcgtgggcttccggtggagccacgcccaatcatggggagccacctggtccttcctcttcacctcaatcgcctcctacctcttcctctcaatcctcctccttctctctctttctctcctctaccgccgccgtcaaatccctcttggcccattccccgccgtccacagcctctccatgtccctcgtctccgccacgatcttcgccggcatcctcc

SEQ ID NO: 200680 - DNA, 278 bp, Glycine max
gtttataagccaccagtttacaagccaccagtgtacaagccttcagtgtataagccaccagtttacaagccaccagtgtacaagccaccagttgagaagccaccagtatacaagccacctgtttataagccaccagtttataagccaccagtgtacaagccaccagttgagaagccaccagtgtacaagcctccagtgtacaagccaccagtgtacaaaccaccagtttataagcctccagttgagaaacctcctgtttacaagccaccagtttacaa

SEQ ID NO: 200681 - DNA, 281 bp, Glycine max
tctcactttctgggtgcaacatttttttttctgtttctccgagattccatcgcatggagtcagtaatgtctaaagaagttattgctactcaatcacctactccttttgagtatgagatcttgagatagtgatgctgaagtccttagaactgttagagcctcatccaattgtgctaatccatggattgaacctgaaaggttgaaacttagacatagaattggccgaggcccctttggtgatgtctggctagcaactcatcatcagtcaactgaagattttgt

SEQ ID NO: 200682 - DNA, 279 bp, Glycine max
ttttggcttcttcgctgcaactctctaccttccctctttttccgaatctgaatagaaatggcttcggagactgagacgttcgcttttcaggccgagatcaaccagctcctcagtctaataatcaacaccttctacagcaacaaggagatctttcttcgtgagctcatcagcaatgcctctgacgctttggacaagattcgatttgagagtcttacagacaagagcaagcttgatgctcagccagagttgttcattcacattattcctgacaagaccaac

SEQ ID NO: 200683 - DNA, 270 bp, Glycine max
ccatttccttgatatcttagttatctaattacctcaattaatcccttaattgccagcatcatggctgaggagaagcaccaccaccactttcaccaccacaagggcgccgatgtgcctggcgaggttgattataagaaggaggagaagcaccacaagcatcttgagcaccttggggaacttggtgctgcagctgccggtgcttatgccttgcatgagaagcatgaggccaagaaagacccagagcatgctcacaggcacaaggtagaagag

SEQ ID NO: 200684 - DNA, 280 bp, Glycine max
aatcactctagctgttgcaaatttctactatttttcaatggcttctgcagatgttgagttccgttgctttgttggtgggcttgcttgggtcaccggcaacgatgccctcgagaaagccttttcaatctacggcgacatcgttgaatcgaaggttatcaacgaccgtgagactggaaggtccagaggattcggatttgtgaccttcgcctcagagcagtcaatgaaagatgcgatcgcaggaatgaacggccaggaccttgacggtcgtaacatcactgtc

SEQ ID NO: 200685 - DNA, 271 bp, Glycine max
cctcgagccgaatcggctcgagggacgagcgacgttcttcgtttctcgcaaagcttaagtcatcatgggtaaggacaagactcacatcaacattgtcgtcattggacatgtcgactctgggaagtcaactaccactggtcatttgatctacaagcttggaggtattgacaagcgtgtgattgagaggttcgagaaggaggctgctgagatgaacaagaggtcattcaagtatgcctgggtgcttgacaagctcaaggctgagcgcgaaaga

SEQ ID NO: 200686 - DNA, 278 bp, Glycine max
cacacacacacactctcccctaggtaactcatcttgctgctagtgctgtctcttttttgtgtgatttggatctacaaggtttgagagggtactggcatccaaaaaatgggttctaaaactaatgcttcgggccatagagcacgaaggccgctgtcaatatttgctgtgcttggtctttgctgtttcttttatcttttgggagcatggcaaagaagtggatctgggaagggagataaccttgcattgaaagttaataacctgatgactgactgcactgt

SEQ ID NO: 200687 - DNA, 272 bp, Glycine max
actttaggttgggatttgggaattagggatattcgcgtggcgaagatgattgaggtggttttgaacgatcgattggggaagaaggtgcgcgtgaagtgcaacgacgatgataccatcggcgacctgaagaagcttgtggcggctcagactggcacaagagccgacaagatccgcatccagaagtggtacaccatctacaaggatcacatcactctcaaggattacgagatccatgacggcatgggtctcgaactctactacaactaaacaca

SEQ ID NO: 200688 - DNA, 273 bp, Glycine max
ctttgttcactcttcttctcttgcggctagggttttagcgcactatcttctagatttaaggaagatgggtaaggaaaaggttcacatcagtattgtggtcattggccatgtcgactctgggaaatccactactcctggtcacctgatttacaagcttggaggcattgacaagcgtgttattgagaggtttgagaaggaagctgctgagatgaacaagaggtctttcaagtatgcctgggtgctggacaaacttaaggctgagcgtgatagagg

SEQ ID NO: 200689 - DNA, 275 bp, Glycine max
gcagaagctcctcctccgttccaagaagcagcgcgatgcgttgtgtgcaattgcagtttcaacaccttcagaagaaggcatcactgtcgatcctgtgggagaacattgtgcaatgaacattcatcagatcaaatggctttaccacaatttggcatttactcaaatgtccgagtatgtgctgattgtttcaacaactcacggtctgggaaggatgaaccacagacttcttcagatggagtaaacagtgtgacagatacaatttctaaattagatat

SEQ ID NO: 200690 - DNA, 272 bp, Glycine max
accctagcccctcttctcttcattcttcactcaggaaacaagcataatggccttctgtaataaggttggaaatgtcttgaggcagggtgctgctcgcagcacacaagcacctgtttcatccatgcttaattacattcgctgcatgtcttcaagcaagctttttattggaggcctttcatatggagttgacgatcagtctcttaaggatgcattttctggctttggagatgtggttgatgccaaagttataactgacagagactctggaagat

SEQ ID NO: 200691 - DNA, 254 bp, Glycine max
gccaagtcgaagtgagagaaaataaaaatcaaagagcataatgtcagggatcattcacaagattccgggagacccttcatgtgggagggcacaagaaggaggaggagcataagggtgagcaccatgctggagaatacaaaggggagcaccatggtgaacacagtagtgagtacaaaggagagcatcatggtgaacacaaagctggagagtaccatggtgagcacaagccagagcacaaagagggggtactagac

SEQ ID NO: 200692 - DNA, 277 bp, Glycine max
tctcttcgagggtttgggcggctcttcctcccttggagaaaaagaagagccaccgctgcgacgccgttcgtgcatttttgaggtgccgctgtcatgtttgggcgtggtggaccaaggaggagtgataactccaaatattatgatattctcgggatttccaaaaatgccagtgaagatgaaatcaagaaggcctatagaaaggcggctatgaagaaccatccagataagggaggagatcctgaaaagtttaaggagttaggtcaagcatatgaagttt

SEQ ID NO: 200693 - DNA, 272 bp, Glycine max
gccttatcgctgtggttttcatcgtcttccttctcttatatttcttttgtttttttgtcttcgccgcacgccgtaacaatggccggaaaatccgagggtcctgctatcggaatcgtgctcggaaccacctactcttgtgtcggtgtgtggcaacatgaccgagttgaaatcatcgccaacgaccaagggaacagaacgacgccgtcttacgtcggcttcactgataccgagcgtctcatcggtgatgcggctaagaaccaggtggccatgaa

SEQ ID NO: 200694 - DNA, 275 bp, Glycine max
aattctctcatttttcaagtttcaaccaagaaaagcagcaacaatgtcgggtcgcggaaagggtgggaagggtttaggaaagggaggagcaaagaggcatcgcaaggtgctccgcgacaatatccagggaatcacgaagcccgcgattcggagactggcgagaagaggtggcgtgaagagaatcagtggtttgatctacgaagagaccaggggcgtgctcaagatctttctcgagaacgtgattcgcgatgccgtgacgtacacggagcacgcta

SEQ ID NO: 200695 - DNA, 266 bp, Glycine max
cctcgagccgattcggctcgaggaacaactgaaactattagattcactttattcgctccttacttcactgaaccaaaattatcttgaatggatgctatcagaaagcaagcctccaagcttcgagaactggtcgctcgccagcaacaggctgttctgaagcagtttgggggtggcggttatggaggtccagataatgtggttactgatggagtggagctccagctacaccagagacttgagaaactttatatatcgacacgtgcggg

SEQ ID NO: 200696 - DNA, 262 bp, Glycine max
tgcgaaaccgagagagcgaaggggcaaacacaatttttttttatcgtcttttttattttttgtagagagagagagagagaaaatgttggggatcttcagcagttcagtggtgtcgccgccggaggagctggtggccgctggcagcagaacgccatcgccgaagacgacggcggggaagctgctgaaccggttcgtggagagcaaggcgtcggcggtgtcgctgcaggtgggggaacacgtgcagttggcttacacacaccac

SEQ ID NO: 200697 - DNA, 268 bp, Glycine max
cgggagaagcccgtccgcgagcttatagctgatgatgcctggttgaatggtgaattcattactactgttcaacaacgtggtgctgcaattatcaaagctagaaagctttcaagtgcactatcagctgctagtgctgcttgtgaccatattagagattgggttcttggaactcctcagggcactgggtgtcaatgggagtatattctgatggttcctacaatgttccagctggactgatctattcattcctgtcacttgtgcccatggg

SEQ ID NO: 200698 - DNA, 269 bp, Glycine max
tggtacggcgcagaccgtgtcaagtacttgggcccattctctggtgagcccccatcctacctcactggtgaattcccaggtgactatggttgggacactgctgggctttctgctgacccagagacctttgccaagaaccgtgaacttgaagttatccactccagatgggccatgttgggagccctgggctgtgttttccctgaactcttggcccgcaacggtgtcaagttcggtgaaagcgtgtggttcaaagccgggtctcaaatatt

SEQ ID NO: 200699 - DNA, 274 bp, Glycine max
agaaaaaaaaacgtgattcgctcttctcttcgaataaaccacaaaaccaacaaacgagaagaggagtgagagaagatggggttgtcgttcacgaagctgttcagcaggttgtttgcgaagaaggaaatgaggattctgatggtaggtctcgatgctgctggtaagacaaccatcttgtacaagctcaagcttggagaaatcgtcaccaccatccccaccatcggatttaatgttgagactgtggagtacaagaacatcagcttcactgtgtggg

SEQ ID NO: 200700 - DNA, 272 bp, Glycine max
gaagcagagggagtagcggcattaaaaatgcagatcttcgtgaaaactctgacagggaagactataaccctcgaggtcgagagcagcgacaccatcgacaatgtcaaggccaatcttcaagacaaggaaggcattcctccggatcagcagcgtttgattttcgccggaaagcagcttgaagatggaaggaccctggccgattacaacatccagaaggaatcaacccttcatctcgtcctcaggcttcgtggtggcatcattgagccttccct

SEQ ID NO: 200701 - DNA, 271 bp, Glycine max
ctcgagccgttcaaattctcattttcaagctgtttggtgtaaagatgggacaagtgcttggatgtgttcaagtgaagcagtcaactgtagccgtcaaggaatgtttcgggaagtacgatgatgttcttcaacctggttgccattttgtgccatggtgtcttggctgcggtgtggctggtgtcctttctacgcgtgtcatgcagctaagtcttcgttgtgaaactaagacaaaggacaatgtgtttgttaatgtggttgcctcaatccaata

SEQ ID NO: 200702 - DNA, 263 bp, Glycine max
acggtctttcagctttgacttttgttggaaactaaggcctaatcaaaatggtgaagttcacagctgaagagctacgtcgtattatggactataagcataatatccgtaatatgtctgtcattgctcatgttgatcacggaaaatcaaccctcactgattctcttgtggctgctgctggtattattgctcaagaagttgccggtgatgtccgtatgactgatacccgtgcagatgaagctgagcgtggtattaccatcaagtct

SEQ ID NO: 200703 - DNA, 290 bp, Glycine max
ggctcgagggacagttgggcaggatgccacatcgagtttcaacacgaggttgatgtgttgagcaagcttaggcatcctaatcatatcacactcataggggcctgtccagattcatgggctcttgtctatgagtatttacccaatggaagctttgaagatcgtcttgcctgcaagaataacacccctccgttgtcatggcaagctcgaattcgcattgctgctgaactatgctccgctctcatctttcttcattccagtaaacctcacagcgtagtgcatggtgacttaaa

SEQ ID NO: 200704 - DNA, 268 bp, Glycine max
tgggtttcaggagaaaagaaaaaggaaaacaatgggttccgataatcaccagaacttggagttcttgaaggagatcggtttgggctcttccaacattggctcttacattaatggccagtggaaagccactggttcttctgtcacttctgttaatccttctaacaatcagagtatagctcaagtgaccgaagcaactttgcaagattttgaggaggggttgcgagcttgcagtgaagcagctaagacatggatgactataccggcaccg

SEQ ID NO: 200705 - DNA, 265 bp, Glycine max
gccaattcatcattttctctcttctctgcttcttcttgttcaaatcttaggagctgaggagaatcaatcgagagaaatatgtctggtatcgctcgtggacgccttgctgaggaacgaaagtcatggcgcaaaaaccatccacacggtttcgttgccaagcccgagactctacctgatggcaccgtaaatttgatggtctggcattgcactattcctggcaagaccgggactgattgggagggtggatatttcccactgacaatgc

SEQ ID NO: 200706 - DNA, 265 bp, Glycine max
acaaatcctcggcgcggcatataatcctcaagtactccaaagacttaaatatagtcaatcaagaaggtggtaagacccttgcagagttccccaacagcatagagcttgggaagctcggacccggtcaagatccgaacaacaaggagcactccactactagtctagtcgttttttttctattagttgcgatgcgaacaggcgtttacttatgagatttgttgagtaggcttgcgtgagttgtctgctataagatagctagttttgg

SEQ ID NO: 200707 - DNA, 248 bp, Glycine max
cacctttctcctaaaacatctccagtgggttcttcttcttctattacaacaacgtcttcacaagaccatgaccatggccatggccacgatcctgctcctgttcacggtcttcgcggtttcatcggccctagacatgtcgataatctcgtacgacaacgcccacgccgccatgtcgcgctgatatgtgagctgatgtccatgtacgagcagttgctagtaaagcacggcaaggtgtacaacgcgctcgg

SEQ ID NO: 200708 - DNA, 268 bp, Glycine max
cttgttgtaacaggaagataattggcgcgaggttttaccctaacccagaggagaaaacggcaagggatttcaacggacatgggactcacgtttcgtcgacggcagtgggcgtgccggtgagtggcgcatcgttctatggtctggcggcggggacggcaaggggtgggtcccctgagtcaaggttggcggtttacaaagtgtgtggggcttttgggtcatgtcctgggtcggccattcttgcggggtttgacgatgccattcacgacgg

SEQ ID NO: 200709 - DNA, 268 bp, Glycine max
ggagtgttaagtgatttattagataatcgaaaacagaaaatcttgagaactattcgaaactcagaagaattacgggaaggggccattgaacagctggaaaaagcccaagcccgcttaaggaaagtcgaaacggaagcagatcgttttcgggtgaatggctattctgagatcgaacgagacaaattgaatttaattaattcatttatacgactttggaaccattaggaaattacaaaaacgaggccattcattttgaacaacaaagact

SEQ ID NO: 200710 - DNA, 132 bp, Glycine max
gaggatgttgaccctgaacttgccaaggagttgcaagccaagccagatctgatcgttggaaactaacagtgatggaaacaatgttgcctctttgtttagcgcataaattaggagtaactcagtgtaccattg

SEQ ID NO: 200711 - DNA, 221 bp, Glycine max
tctcgagccgaatcggctcgagatgactttcatcttcctgatgctgccgtttccacgtgtcacgatttgttagacttgtcagctgatgaactcagctggtccatttccgctgttcaaagttcccaaggaaatgataacagtacagggaatctaagctctgatttgaggacatggcgtagtgctgtacttgcgaatacagatacatgcatgagggtttggaa

SEQ ID NO: 200712 - DNA, 260 bp, Glycine max
accatgcaaactgtttagttccaattcaggtacttttgaaactttgagttacagcatgtatgcagcaatcttcaatgtgggctgggccgctactcaggtttcacacatgtccatggtcagttgcatcacgctgaactctacaagcagagtggcactggctagctgtcgcaatgcttttaccatggttgccaacctgagcctgtatgcatgcattgatagtattcagtgtcatcaatggaaaaacacatgatgatgttgaa

SEQ ID NO: 200713 - DNA, 261 bp, Glycine max
tcggctccgttaggttttccttccgcgtgtttgctcggaactactcctccactcatcgtttaaaatgtctgacgtggaagagtttcgttgcttcattggtggccttgcatggtcaacgtctgatagaaagttaaaggatacatttgaaaagtttggcaagcttattgaggcaaaggtggttgttgacaagttctctgggcgttctcggttttggatttgtcacatttgatgacaagaaagcaatggacgaggctattgatg

SEQ ID NO: 200714 - DNA, 262 bp, Glycine max
gggaaagtgggaaacagtagatgatcccaatgggaattggcaaaattggagatcatcgaccatagatatcaaggtctgaagttgaaccaatggattgtacagctgcaaggaaaacacaaaaggctgaccgagaaaagctaaggagggatcgattcaatgtacagtttgtagaactgggtaacattttagaccctgataggcccaaatgacaaagcaaccattctaggtgatacaattcaattgctaaaggaccttacttctg

SEQ ID NO: 200715 - DNA, 260 bp, Glycine max
agagaatggctcccaagggtttaacctttctggctgtgttaatatgcgtttcagcactgtcactgagtccttctgttgcgggggaagggcaaaataatggccttgttatgaacttctacaaggaatcatgccctcaggctgaagacatcatcacagaacaagtcaagcttctctacaagcgccacaagaacactgctttctcctggcaggaacatcttccatgactgtgctgttcagagttgtgatgcttcactgttgct

SEQ ID NO: 200716 - DNA, 264 bp, Glycine max
aaattgctgcaaacctagtaaagaatggccctcttgcagttgctatcaatgcagtttttatgcagacatatgttggtggcgtctcatgcccatacatctgtgggaagcatttggatcatggggttcttctagttggttatggtgaaggtgcatatgctcccattcgttttaagaacaaaccttactggatcattaagaattcatggggagagctggggagagaatggatattacaagatctgcagaggtcgaaatgtgtgtgga

SEQ ID NO: 200717 - DNA, 251 bp, Glycine max
cttctctagctttagctcatttgcattgcaaagcaaaaaccttgcaaattgcaatggcttccgacaaggctattgccaccatcttggttctttctcaccttgcctactcaacatcattcaccaatgcatgtggcacatgccaaccaaaacctactccttctccccctacctccatcagggaagtgccccaaggacacattgaagctaggtgtgtgctgatgttctaggacttcttaatgttgttgttggtg

SEQ ID NO: 200718 - DNA, 258 bp, Glycine max
attcttatgtggttgcactttgcttcctctctctttgggggctcaattgcactcttcaagtttgagctgtactttgggcttttggtgtttgtgggctacgttatagtagacactcaagaaattattgaaagggctcactttggtgacctggattatgtgaagcatgcattgacattgttcactgatttggctgcaatctttgtcgaattcttattataatgttgaagaattcatctgagagaaatgagaagaagaaga

SEQ ID NO: 200719 - DNA, 260 bp, Glycine max
  unsure (1)..(260): unsure at all n locations
gttctaactcctcttgtgctatataaagaagtagaaaagtcaccacagtgtttatcactgtttccactttctccaaaaatnggaagatcaccatgctgtgacaaggtgggtttaaagaagggncccgtggacgccagaggaagatcagaagctcttggcttatattgaagaacatggccatggaagctggcgtgctttgccagcaagctggacttcagaggtgtggcaaaagttgcaggttgagatggactaattatcta

SEQ ID NO: 200720 - DNA, 254 bp, Glycine max
cggctcgagcggctcgagcggctcgagcggctcgagcgccactactgaatctattgaatcaaacatcatgtcggacgaagacgcaccatatcgagtccaaggccgacgccggagcctccaaaacctaccctcagcaagccggtaccatccgcaagaacggctacatcgtcatcaaaggccgcccctgcaaggttgtggaagtcgacttccaaaactggaaagcacggtcacgctaagtgtcactttgttggaat

SEQ ID NO: 200721 - DNA, 260 bp, Glycine max
tcagatccacaacactccttcatccatgacgcttggctcttcaggatccaatgtgcgtggttccaaggaacttcagattgctggaggagcttgagaagggagaaaaaggaatcggagatggaacagttagctatggaatggatgatggtgacgacatttacatgcgctcttggactggaaccattattggcccctataatactgacatgaaggaagaatttatcaattgaagttgttttgtgataaagactacccagaaa

SEQ ID NO: 200722 - DNA, 255 bp, Glycine max
gcgaaaagagagaaattcatcgtcgcagtaatcatgggtaaggttcatggatcacttgcacgtgctggtaaggttagagggcaaaccccgaaggtggccaagcaggataagaagaagaagccacgtggccgcgcccacaagaggatgcagtacaatcgccgattcgtcaccgccgtggtgggattcggcaagaagaggggccaactcgtctgagaagtgaggccgaggcttgaggaatatgttgctactctattt

SEQ ID NO: 200723 - DNA, 253 bp, Glycine max
  unsure (1)..(253): unsure at all n locations
cccacactgaaaccagccgtaggttgacatccttccaccctgaaatcgaagaactcctttacagctcagtggagaatgaagaacacatatgtgtgctgaaggaccgcagcaagccaattatcttcaccatggcaaggttggatcgagtgaagaacatcacaggacttgtggagtggtacggtaagaacgcgaantgagggctggtgaaccttgtggttgttgctggagacaggaggaaggagtcaaaggactt

SEQ ID NO: 200724 - DNA, 253 bp, Glycine max
cggatctccgagctggcttttactcaaaaacatgtccaaaagcggaagtcatagtccgagatgtgatgaagaaagcccttatgagggaagccagaagtgttgcctctgtcatgcgcttccagttccatgattgctttgtgaatgggtgtgatgggtctatgttgcttgatgacacagcaacgatgcttggggagaaaagccctctcaaatataaattcgctgagatcatataaagttgttgatcaagtcaagc

SEQ ID NO: 200725 - DNA, 255 bp, Glycine max
taaaccctctctctttctctctcggcgactctgcactcatcaatggcaacgcaatcgttagacgaagaaacaactaagaaagtcatacgacaggttgagttttatttcggcgatagcaaccttctcaccgatggtttcatgaggaatagtatcactgaaagcgaagatggcatgattagtttggcgctgatttgctcgtaatcgaatgcgaaagcaccttaatttgggtgatgtaaagcccgaagaagtggccca

SEQ ID NO: 200726 - DNA, 252 bp, Glycine max
agaaaaggtggtggcagctggcaatcacgtgacacaagggagctgttttatagtttccaccgtgatgatgttcctgcagaatctgttatgcataagtgtgtggtgcattttgttcccatacacaaacagctcccaaatcgtaagcagcatcctgggtttattgtgcaaaaggtgtatgacacagtagaaaggaaactctaagcttactgataaggattatgaggacaataaacagcaagaaattgatgagct

SEQ ID NO: 200727 - DNA, 255 bp, Glycine max
  unsure (1)..(255): unsure at all n locations
gagaatggcaactatgactggtgtgagcctttcatgccccagggttttcttcaacgcatcagcctcacncgcaaaacgcgcatgctgtaaagttctcacttccacccagccaagcagtacnaccgggtagtatcaagttgggtcgcgtgatgaggatccgacccgttcgcgctgcgcctgagcgcatatcggagaaggtgaggagagcataaagaacgcgcaggaggcgtgcgccggcgatccgacgagcggcga

SEQ ID NO: 200728 - DNA, 250 bp, Glycine max
gaaaaatggtgttgctgtccaaggcaacaacagaacaatactcctacatcaagaactacatgccaacggcattctcctcaacaattcccatagtggacctctccaaaccagatgcaaagaccctcatagtgaaggcttgtgaggaatttggattcttcaaagtcatcaaccatggtgttcccatggaaactatatcagttggaatctgaagccttcaagttcttctctatgccactcaatgagaaggaaa

SEQ ID NO: 200729 - DNA, 250 bp, Glycine max
ctcgagccgcgctgctgccgaaacccttccggaaccctaaggtaagtgagtaatcagtggttgagaatggtggagaaggcgaagggtagaaaggaggaggtggttacacgtgagtacaccattaacctccacaagcgcctccatggctgcacatttaagaagaaagctcctaaagctattaaggagataaggaaatgcccaaaaggccatggggaccaatgatgtgagggtggatgtgaagttgaacaag

SEQ ID NO: 200730 - DNA, 248 bp, Glycine max
ctcattgagtcattgtccaactctccataattatttctcttcgatctctcgctgtcaccatgatcgacggtgtagcaatatacaatattgtcgcggctcttgtgccgctatatgtgcccatgatattagcctatgcctcagtcttgtggtggaagatcttcacaccggaacagtgttccggcataaaccgcttagggcactgtactcggttccctttcttaatttcaatttcctagcctttaacaatc

SEQ ID NO: 200731 - DNA, 253 bp, Glycine max
cagtggtgccttatcgctgtggttatcatcttcttcttcctctttcttagatctcttctttctctacgccgcacgccgaaaccatggccggaaaaggagagggtcctgctatcggaatcgatctcggaaccacctactcttgcgtcggtgtgtggcaacatgaccgcgttgaaatcatcgccaacgaccaagggaacaaccacgccgtcttacgtcggattcactgacaccgagcgtctcatcggtgatgcgg

SEQ ID NO: 200732 - DNA, 251 bp, Glycine max
attttatccaattgaaatttttaaaaatgactgggataaacttaagaattcaattattgaaattgaataagtaaacaatttaattggattggtcgaatggtatcaaaaaaatggagtactaactcccatttcttatttattattgaattaaccgatcaacttgctttgttatcgaacatttctttttgatttcaaattttccggaaaaaatttgaatctatttttatatgcgaatcaatcctactacttct

SEQ ID NO: 200733 - DNA, 249 bp, Glycine max
catatttctattgatggtaacacagagattgcgttcactgagagtgttgatagtcgttttgagggacttgggtggcatgttatttgggtaaagaatggaaataatggctatgatgatattcgtgctgccattaaggaagcaaaagctgtcaaagacaaacccacattaatcaaggtcacaaccattggttatggctcctaacaaggctaactcctacagtgtgcatggaagtgcactgggtgccaaaga

SEQ ID NO: 200734 - DNA, 245 bp, Glycine max
ggagggtcaattgcaaatgtcttatgcaatctttgtgccacaagtcctaaatttggtggcaagtcattgattgactatgacatagcacttttgtcagaaccatgtatgctgctgggagtgagtgttggagtcatatgcaaccttgtcttcccagaatggttgattactatgctgtttgctgttttcctcacggtctacctcaaagacctgcaacagtggagtgctgttttggaagattgagtcag

SEQ ID NO: 200735 - DNA, 246 bp, Glycine max
ctctttcttcttcttctcttaaaagagcctttgctttttctttaggcctttccgaattaagtacttgtttcattttctctcgaagcaagaaaaatgttcatcgagagtttcaaggttgagagtcctaacgtgaagtacacagagactgagattcagtccgtgtacaactatgaaaccactgaacttgttcacgaacaagaatggcacttatcagtgggttgtcaagcccaaaactgtcaaatatga

SEQ ID NO: 200736 - DNA, 237 bp, Glycine max
cactcataacacaaagcacaaagcaaagctcatccttgagttaaaaaatggcagcagcttcttccatggctctctcatccccatccttggctggcaaggccgtgaagctgggcccatcagccccagaagtgggaagggtgagcatgaggaagaccgtcaccaagcaggtctcctcaggaagcccatggtacggcccaccgagtcaagtacttgggcccttctctggcgggccccgtc

SEQ ID NO: 200737 - DNA, 274 bp, Glycine max
gccgctcccaaaatctcactcttcttactcttcttcctccaagagaagtaaacaaccctcacattcaccacagcagcacacacagacaaagacaaccttgtttgtctccaatcaaaacctttcaagctggcgttcgaaaaccaagacaaccctgtccgagaaatcaagcccaagaataggagaatcatgggtgctggaggccctgatgatgaggacaacaacaggtggccaccgtggctgaagcctctgctaaaagaaagtttctttgttcaat

SEQ ID NO: 200738 - DNA, 256 bp, Glycine max
tccaaagtgtgtatagtgtaggatttgttggtattcgtgataaaaacacctcatcctattcattttgccatgacgggcgaactccagataaaggttttgaaagtaatgagaaattattaattcatccatgttactggcttggtttgaatctaaatcgtaatgcacttgctccagaggaagcagaggagatatatgacgaatatgatatcagtatgatttcagattattcagccattagcaataaaccaatgggtca

SEQ ID NO: 200739 - DNA, 271 bp, Glycine max
actcgagccgattcggctcgaggaaattttgtgaacaagagatatgagggaccagaagttcactgagaaggaaaacattgtgctcatcacagtggtgtgttgtagccccgagaagataagagacaagctttgctacaaaggtggaggctctatcaagagcattgagatactggaactgcccaagctcaaggccgagaagcctaaagcagaccctcccaaagctgagaaggccaaggccgagcccgagaaaaagaaggacggtggcggcgag

SEQ ID NO: 200740 - DNA, 273 bp, Glycine max
ggaacattcgacaggtagagtttcttcaatggctcctaaagttgataagaagaacgacccaaaggcacaggccttgaagactgctaaggcagttaagtctggtgctacctttaagaagaaggcaaagaagatccgaacttctgtcactttccacagaccgaggacattgaagaaggataggaaccccaagtaccctcgcattagcgcgcctccaagaaataagcttgatcattatcagatcctgaaataccctctgaccactgaatccgccat

SEQ ID NO: 200741 - DNA, 268 bp, Glycine max
ccaacctcaaacatgactgggaaccctgcagcgatgtcataacaaagtgggttgatcaagcttcaacagttcttccacttttacatgaattcctcaacaatagcctcagggtttggattttcagtggtgacacagatggaagggtgcctattacatcaaccaagtattcagttaagaagatgaatcttcccattaaatctgtttggcacccttggttttcctatggagaggttggtggctatgtagaagtatacaagggaggcctaac

SEQ ID NO: 200742 - DNA, 269 bp, Glycine max
caggttttatactgaatgttttgggatgaagcttttgaggaaaagagatattccagaggagaaatatgccaatgcttttcttggatttggccctgaacaatcccattttgttgtggaattaacatacaattatggggtgacctcatatgatattggaactggatttggacattttgctatcgcaactccagatgtttacaaattggttgaagacatccgggctaagggtggaaatgtcaccagggagcctggtccagttaagggtggga

SEQ ID NO: 200743 - DNA, 225 bp, Glycine max
acgagattgaggcgggggttgatttggaagaaacccagctaaggtaattcctcgcaacccctaacttaaccttcaaaggatcatcatgggcagtcacaatgctttggctgccactttcggaatattaggtaacatcatttctgtgatggtgtacttggctccggtgccaacgttttaccggatatataaaaagaaatgcacggacggtttccactcgctgccata

SEQ ID NO: 200744 - DNA, 267 bp, Glycine max
agagaatggctcccaagggtttaatctttttggctgtgttatgcttctcagcactgtcactgagtcgttgtcttgcggaggataatggacttgttatgaacttctacaaggaatcatgccctcaggctgaagacatcatcaaagaacaagtcaagcttctctacaagcgccacaagaacactgctttctcctggctcagaaacatcttccatgactgtgctgttcagagttgtgatgcttcactgttgctggactccacaagaagga

SEQ ID NO: 200745 - DNA, 270 bp, Glycine max
attggctggaaaatgggaagaaaccattatagttattagcattttcactgcaggattttgtgtcacatatgcaaaacaatatccaacaatgaaggcttatgaatatggtttccgtgtgttcttgatcacctattgcttcattattgtatcagggtatcgttcaggagagtttgttgaaacagctgtagatagatttttgctcattgcactgggtgctgctgtggctctgggggtaaatgtatgtatatatccaatctgggctggtgagga

SEQ ID NO: 200746 - DNA, 273 bp, Glycine max
attgattccgaagagaaaagaaaagatgtttgagccacaacagctatacactcgcgcgaagaccgaggaattcgacctcgaatcaggagaaaccctctacccagggctgagcgtcggcgagaaccagctccgatggggtttcatccgcaaggtctacggcatcctctccgcgcagatcgtcctcaccaccctcgtctccgtcaccaccgttttctatactccaatcaatgacctcctcaagggcaattccaccctcctcctcatcctcctctt

SEQ ID NO: 200747 - DNA, 275 bp, Glycine max
gagctcaagaagcttgttcaagaagcgctcaacaaccatgagctaactgctcccaagccagaaccggagaagaagaaaccagcagcagagaagaaggaggaagttgaagtgacagaagggaagaaggaagctgaagtcatagaagagaagaaggaagtggaagtgacggaagagaagaaggaaattgaagtaacagaagagaagaaggaagctgaagtcatagaagagaagaaggaagtggaagtgacggaagagaagaaggaaattgaagtaac

SEQ ID NO: 200748 - DNA, 269 bp, Glycine max
catgaagttgagttgcaatgggtgtcgcattctccgcaaaggttgtggtgaggattgtgccataaggccatgcctcgagtggatcaacactcctcaggcccaagccaacgctaccctcttccttgccaaattctatggtcgtgctggcttggtcaacctcatcgattctgccccacaacacaatacacctgctgtattcaagtcactattgtatgaggcatgtgggagaattgcgaatccgacatttgggtcagtgggcttgttttgga

SEQ ID NO: 200749 - DNA, 231 bp, Glycine max
catccacactcccctctcagttctttgtggataagattgagctataatggctgccaggagaccgggtttgattgatttgtttgatgttgatggaactcttacagctcccaggaaggtggtcacaccggagatgttgacattcatgcaagaactgcggaaggttgtaactgttggagttgttgggggttctgaccttataaagatatcagagcaacttggcagcacagttac

SEQ ID NO: 200750 - DNA, 263 bp, Glycine max
tgagagatggggctaagaagtaaattaagaatgtcagcgtcagtggtgcagcaggggatgaaggaaataagaaggagcgtgacgtacatgcctcgaccgggggacggtgcgccgcggggggtgacgctgataccgggggacggaattgggcctctggtgactcatgcggtggagcaggtgatggaggcgatgcacgcccccatatacttcgagaagtacgatgtgcacggggacatgaggcgtgtgccggaggaggtgctgga

SEQ ID NO: 200751 - DNA, 269 bp, Glycine max
cttgttgccacattaagcttgtttcttgggaagaaggagggtatctgacatcagataaaccaatgccaaggggagagattgtagttggaggatttagtgtgacagctggttactttaagaatcaagaaaaaactaaagaagtgttcaaggttgatgagaagggaatgcgctggttttatactggcgatattgggcaattccatcctgatggatgtcttgaaatcatagataggaagaaagatattgtcaaacttcaacatggagaatat

SEQ ID NO: 200752 - DNA, 269 bp, Glycine max; identical to SEQ ID NO: 140071

SEQ ID NO: 200753 - DNA, 272 bp, Glycine max
cggagatgtcatcaaaccctaacgatcctcgtcagccctcggcggcgagaccctacgtggcgccgcagatttcgccgcaggaccttccgatcgactacgccggcttcatcgccgtcatatttggcgtcgccggcgtcatgttcaggtacaaactgagctcttggctggcgctcatattctgcgcgcaatccgtcgcgaacatgcggaatgtcgagaacgatctcaaacaagttatgatggctatgatgttttctttaatgggattgataaca

SEQ ID NO: 200754 - DNA, 235 bp, Glycine max
ggcgggggttgatttggaagaaacccagctaaggtaattcctcgcaacccctaactaaaccttcaaaggatcatcatgggcagtcacaatgctttggctgccactttcggaatattaggtaacatcatttctgtgatggtgtacttggctccggtgccaacgttttaccggatatacaaaaagaaatgcacggacggtttccactcgctgccatacttgttgtcattaatgagtt

SEQ ID NO: 200755 - DNA, 267 bp, Glycine max
gatggtataaggagcagagccgatgtggtagagcagttcctcccagaccacaatgaatctatttctgcagttcttgacaagtttggtgccatgggaattgacacccccggcgtagttgcattgcttggagcacacagtgttggtcgaacccattgtgtgaagttggtgcaccgtttgtacccagagattgatccagctctgaaccctgaccacgtccctcacattctgaagaagtgcactgatgccattccaaccctaaggccgtgc

SEQ ID NO: 200756 - DNA, 252 bp, Glycine max
catttccatttcctctctctgagtttccaagaatcttaaggtgtgggaaagtcttacccaaccgtgagcgctgattaccagaaggccgttgagaaggcgaagaagaagctcagaggcttcatcgctgagaagagatgcgctcctctaatgctccgtttggcatggcactctgctggaacttacgacgtgagctcgaagaccggtggtcccttcggaaccataaagcacccctccgaactcgctcacggcgct

SEQ ID NO: 200757 - DNA, 268 bp, Glycine max
ctttcttccaacctctcaagtccaacctacccctttttcttctcccaccaacttcaccgtcttcttcctcgatcatgtctcacttcaagggcaagtaccatgatgagcttattgccaatgctgcttacattggcactcctggaaagggtattcttgctgctgatgagtcaacagggacaattggcaagcgtttggccagcatcagtgtagagaatgttgaatccaacaggcgtgctcttagggagctgcttttcaccgctcccggtgc

SEQ ID NO: 200758 - DNA, 267 bp, Glycine max
gtttgttgttgtaactcgttcttcttcttttgttgttctgtgtttgtgtttgtttttttctctcacctgaaaatgtcttgctgcggtggtaactgtggttgcggaagctcctgcaagtgcggcaacggctgcggaggctgcaagatgtacccagacttgagctacactgagtcaaccaccaccgagaccttggcaatggaattggcacctgttaaggctcaatttgagggtgctgaaatgggtgtgcccgctgagaacgatggctgc

SEQ ID NO: 200759 - DNA, 266 bp, Glycine max
ctttcatcaagcattgccaatacattttccttcaaaatacaagataagaagggcagaatgcacagattcacatgtgatacccggagcatgatggaggttataacttcaatccttcagagacttggtgatgatatcgatcctaacaacataccccaaattctgtatgaagacgaagatcatgataaagttgtattggcttcagacagtgatcttgcagcagctgtggatcatgcaaggacagctggtttgaaggggttgaaattgca

SEQ ID NO: 200760 - DNA, 279 bp, Glycine max
  unsure (1)..(279): unsure at all n locations
ttccgctcgacgttaatccatcatcacttcacttcactaatacatcatggcagacgcgtcncagaacaagtatgacagctctgacgttgacgtncaggatcgtcgtgtttttcactttctcggtaagacaaggatgaagaagataagcctcatcttcaggaggaggtcatcgctaccgagtttcaaaaagtcactgtctcagattaaggagagaacaagtacagtctcttagaaaagcttcactgatctgacagcagctctagctcttcaagtgaggag

SEQ ID NO: 200761 - DNA, 272 bp, Glycine max
tccaaactcacaaattctcaaatccaaatccaattccaattccaattcccaatcttctcaaaccctaattcctcatcttgaaaatgagagaaatcttgcacatccagggagggcaatgcgggaaccagatcggagcgaagttctgggaggtgatatgcgacgagcacggcatcgaccacaccggaaagtacagtggcgactctgaactccaattggaacgcatcaatgtttattacaacgaagcgagtggcggaaggtacgttccacgcgcc

SEQ ID NO: 200762 - DNA, 270 bp, Glycine max
cacaaatcaacaacgtctctctctgttactctgaaaattgacttcaagttagtataactggctgtcaagttgtaatggcattggtctctggaagaagttctgcactgaacccaaatgcacctctattcatacctgctgctcttcggcaggtggaggatttttcacctcaatggtgggatcttgtgaaatcttcaacatggtttcgtgattattggttgagctaacataaggaggaagaatttgaggttgccaatgactctagtaatgatg

SEQ ID NO: 200763 - DNA, 196 bp, Glycine max
attgtcaccacccctttctcgtttgaagggagaaagagatctattcaagcccaagaaggaattacagccttaagagataatgttgacacgcttatagttattccaaatgacaagctactaacggcagtttctcaatctacccctgtaactgaggcattcattcgggcggatgatattctccgaaggggttttcggg

SEQ ID NO: 200764 - DNA, 268 bp, Glycine max
caagatgctaataccaaggcaactgctaatccccctggagccgaaaatggtacccctgaggcaggagataagcctgtgcagatggatactgataccaaggttgaggctccaaagaagaaagttaagaaaataaacattcctgtggtagagttagtttatggagcaatggcagccacagatgtccagaaagctgtagagaaggagtttgaaatggctttgcaagatagagtcatggaggaaacgaaagataagaaaaatgcagttgagg

SEQ ID NO: 200765 - DNA, 263 bp, Glycine max
gatggtagtaggagcagcgccgatgtggtagagcagttcctcccagaccacaatgaatctatttctgcagttcttgacaagtttggtgccatgggaattgacacccccggcgtagttgcattgcttggagcacacagtgttggtcgaacccattgtgtgaagttggtgcaccgtttgtacccagagattgatccagctctgaaccctgaccacgtccctcacattctgaagaagtgccctgatgccattccagaccctaaggc

SEQ ID NO: 200766 - DNA, 266 bp, Glycine max
attcattctcctttgaaagttgagaaaggagaattgaggaaatggcaggagggtctttcacaacaggcactgtgagcaaggagagggcagagcagtacaaggggagagtcactgcttatgtcatcatctcttgcattgttgctgccacaggaggggctctctttggctatgatattggaatttcaggtggggttacatccatggatgactttcttatagagttcttcccctcagtatacagacagaaaaagcatgcccatgaaaac

SEQ ID NO: 200767 - DNA, 267 bp, Glycine max
atctcatcttcccaaaaccctctctcttctctgatctcattttaaccctaaccctaaccctaaccctaaccctaaccctatcagaagaagatgttgacgaaattcgagacgaagagtaacagagtgaagggactgagtttccatccgaagcggccatggatcctggcgagtctccacagcggcgtcatccagctctgggactaccgcatgggaaccctcatcgacaagttcgacgagcacgacggccccgtccgcggcgtccatttc

SEQ ID NO: 200768 - DNA, 267 bp, Glycine max
attcaggaaaaaaaaaaaaaaaaacatggtggtaaaggtgtatggcccaacctatggatcccccaaaagggccctggtgtgcctgattgaaaaggaaattgagtttgaaacagtgcatgttgatctcttcaagggaaagaatagggaacctgagttcctaaagctgaagccatttggatcccttcctgttattcaagacggggattaaaccccctatgaatctcgtgcaataatcagatacttagctgagaagtataaagaccaagg

SEQ ID NO: 200769 - DNA, 264 bp, Glycine max
cttttcctctactctcccactttgcattttcccatggctaccgagcttcttcaaatcgaacccgccgagctccgattcgtctttgaattgaagaaacaaagttcatgtttggttcaacttgccaacaccaccgatcactttattgcttttaaggtaaaaacaacttcacccaaaaaatattgcgtcagacccaacataggcatcgtctagcccaatgataaatgtgattttactgttactatgcaagctcagcgcatggcaccg

SEQ ID NO: 200770 - DNA, 268 bp, Glycine max
aaactaagtgcttattttaatctgaactttaaagttttattattttgtgcaatggcagcaaagagcaaaatcctagtcattggaggaacaggatacattggaaaattcatagttaaggcaagttcagaagcaggacaccccacatttgccttggttagagaaagcaccctttctcatcctgaaaaatttaaacttattgagagcttcaagacctctggagttactctcctttatggtgatcttactgatcatgaaagccttgttaagg

SEQ ID NO: 200771 - DNA, 264 bp, Glycine max
ataaacatgaggtgtatggcttccttaagctcctcattagtgctgctccttgcagctctaattctatcccctcaagttcttgctgactatgagaagcccccaatttacaagccacctgtttacacaccgccagtttataagcccccagttgaaaaaccaccagtgtacaaacctccagtgccgaagctacggaggcacccgtgccggcttaagagcacaaggcctcgatatcactgcagaggactaccacggtttcgtgcacgg

SEQ ID NO: 200772 - DNA, 268 bp, Glycine max
agagaatggctcccaagggtttaatctttttggctgtgttatgcttctcagcactgtcactgagtcgttgtcttgcggaggataatggacttgttatgaacttctacaaggaatcatgccctcaggctgaagacatcatcaaagaacaagtcaagcttctctacaagcgccacaagaacactgctttctcctggctcagaaacatcttccatgactgtgctgtgacagattgtgatgctacactgttgctggactccacaagaaggag

SEQ ID NO: 200773 - DNA, 265 bp, Glycine max
cttcctccgctcaacaactataagattatcttcttcttcttcttctcttcaattcttctccaatcccaaccgcaccctcttccgtccctttcttcacacttccttcaaaccacttccttcgtctttctctttccgaacagatcacactatggccacctcaaacgccaaatcagtccatgatttcaccgttaaagatgccaagggaaatgatattaaccttggtgactacaaaggaaaggtccttatcattgtcaatgttgcctca

SEQ ID NO: 200774 - DNA, 235 bp, Glycine max
tgaagagcggagagcatgggtcccaagggtttggtcgtgttgggcgtgttatgcatctcagcacggtcactgagtcggtgtcttgaggaggatgatgggctcgtcatgaacttctacaaggaatcatgcgctcaggctgtcgacgtcctcgtagagcaagtcaagcatcgctacaagcgcaatgagaacaccgcgttctcctggctcatacacatctgccatgaccgtgctggtc

SEQ ID NO: 200775 - DNA, 264 bp, Glycine max
atggcaaccatcatcgccggcatcccaactacatcgatcactcgcgcaggtcttgtgctcaaacgacctgttggagcctcgtcctctaccgttcttggattgccagcaatggctaaggcagggaaagtgaggtgctccatggaggaaaagccttcaagcagctcaaatatagggatgggggcatccttgttagcagctgcagttgccgcaaccatgtcaagcccagccatggctttggtggatgagagactcagcactgaagga

SEQ ID NO: 200776 - DNA, 264 bp, Glycine max
ctcaaaaatgattccaaaggtatctgccgatttctttgtcattgtcacaattgtgttgctttgcttgttcagtttaagtcacagtgaatgtaatttcaaggcaattttcaactttggggattcaaattcagatacaggtggtttttatgctgcttttcctggtgagtctggcccttatggaatgacttactttaagaaaccagcaggcagggcttcagacggaagactcattattgattttcttgctcaagctcttggattgcc

SEQ ID NO: 200777 - DNA, 294 bp, Glycine max
caagattctaagagagattttgctgctctttgaagaagggtgtttgcttgattttggagatgtcgctgctctcagatctcatcacccttaacctctcagacactactgagaaggtgatcgcagagtacatatggatcggtggatcaggaatggacctgaggagcaaagcaaggactctcccaggaccagttagcgacccttcaaagcttcccaagtggaactatgatggtttcagcacaggccaagctcctggagaagacagtgaagtgattatatacccacaagccattttca

SEQ ID NO: 200778 - DNA, 296 bp, Glycine max
attggcactgccttaaaaccatggtgaggacttttgagacacattgtggatccttgtctcagtatggcatgaaacatatgaggtcctttgcaaacatctgcaatgtagggataaagaatgagcaaatggctgaggcctctgcacaagcttgtgtctctattccttccaatccttggagttctctgcaaaggggtttcagtgcataataattcctgtaatgtgcaccagtaaagaccaaagtatgattattgttacattatgctatatgattgtacttgtatatacatattttgtcc

SEQ ID NO: 200779 - DNA, 293 bp, Glycine max
gaaagactcagaactccaagcttggtggaaggaagctgttgagaagggtcacggtgacttgaaagacaagccatggtggcctaagttgaacactcttcaagatctgattcacatttgctgcattattatatggactgcttcagcactccatgcagctgtgaatttcggacaatacccttatggcggtttcatcctaaatcgtccaattctaaccagaagattgctcccagagccaggaaccaaagaatatggtgaacttaccagtaatcatcaaaaggcttatttgagaacat

SEQ ID NO: 200780 - DNA, 292 bp, Glycine max
gttgcacacggcgcaaaggggaacaagaagaagaagatggtgtccttgaagcttcagaagcggctcgccgctagcgtcctaaagtgtggcagaggcaaggtctggctcgatccaaatgaagtcaatgaaatctccatggccaattctcgacaaaacataagaaagttggttaaggatgggtttattatcaggaagccaactaagattcactctcgctctcgtgctcgtcgaatgaaggaggccaagaggaagggacgtcactctggctatggtaagcgtaagggtacaaggg

SEQ ID NO: 200781 - DNA, 287 bp, Glycine max
cagaaacgttctccgtttagcacagaaacgaacaccgtgattcctctcgccgtagatctgttccatttcgccgttcatccatggccgacgacttcgaattcgccgacaaagtccctccttccttcgatcgcgcgggttcaaaagggttcaacccagctttaattgttctcctgcttgttggtgggttgctgttgacattcctcattggaaactatgtactctacacatatgcacagaagaccctccctcctagaaaaaagaagccagtctcaaagaagaagatgaaa

SEQ ID NO: 200782 - DNA, 290 bp, Glycine max
gtttgcatgtcaaaatctcattcatcatcatcttcttcttaaaagttaaaaggttaagagagagagagaaagatgagtagcgtgttggagcatggtgttgtgggatgtgtgcaaatcagggccaggctatgctaccccactggaagccatgtctggtccaagagagtctcttatttatgtaactgctgtctacacagggacaggaatagagaagccggactatttggccacagtggacatagatccaaactctccaacttattccaaagtcatccataggcttcgtgttc

SEQ ID NO: 200783 - DNA, 250 bp, Glycine max
tggtcatcgttgggatctccatacgccggatctgctaaaatacgcttgatccatatgggcctcctcgaccacttgtgggacgacaccgtcgccggcccaaggccggaaaacggtctcggcaagctccgaaaacaccacaccttcactttccgacctagctccggcaaagaaacggagggcgggagcgtgagatcgcacggagacgaatcgtcggaggaagcgacacgattgacgcgtagtatcatgatcg

SEQ ID NO: 200784 - DNA, 296 bp, Glycine max
  unsure (1)..(296): unsure at all n locations
caggaatcgaaatcgccacgcgacaccgaaggccacggcacgcacaccgcctccaccgccgcagggcacgtcgtctccaacgcaagcctcttccactatgcgcagggcgatngcagaggaatggctacgaaagcaagaatcgcagcctataagatctgctggaagctaggttgcttcgactctgacatcctcgccgccatggacgaggctgtctccgacggcgtccacgtcatctcgctctccgtcggcgcgtccggctacgcgccccagtactaccgtgactcaatcgccgtggg

SEQ ID NO: 200785 - DNA, 287 bp, Glycine max
ctgccttgctcatttacacacctctccaacctcacactttcagctttatttgaatccctctctctcctttccacatagtcagcgctgacgttgcacatcattcaccaacaacagttccagaaaatgcaacaacagaggtaatcaagactcaggaaacaaccccggaaccagtaccagctcatgaggctcctgcaacagaacaagaagcagctgaggttcctgctcaagaagcacaacaagcaactgaggttcctgccccagaatcaaccacgaagcaccaaaggaag

SEQ ID NO: 200786 - DNA, 290 bp, Glycine max
  unsure (1)..(290): unsure at all n locations
aatcctctctttgcgattgtgttttgatctgcttcctactgcgatagtttctctactgttacatggccatggcggtttccgcaattggttttgaaggtttcgagaaaaggttggaaatatcctttttccagccgggactttttgctgaccctgaaggaaggggtctaagggctcttacaaaatcccagttgggtgagattctaacaccagctgcttgcaccattgtttcttcgctcanaaacgataatgtcgactcctatgttctatctgagtccagcctctttgtttat

SEQ ID NO: 200787 - DNA, 272 bp, Glycine max
atggctcccaagggtttaatctttttggctgtgttatgcttctcagcactgtcactgagtcgttgtcttgcggaggataatggacttgttatgaacttctacaaggaatcatgccctcaggctgaagacatcatcaaagaacaagtcaagcttctctacaagcgccacaagaacactgctttctcctggctcagagacatcttccatgactgtgctgttcagagttgtgatgcttcactgttgctggactccacaagaaggagcttgtctga

SEQ ID NO: 200788 - DNA, 268 bp, Glycine max
  unsure (1)..(268): unsure at all n locations
cagatttctacaattggaatagagtcaaggttaggtactgtgatgggtcatcgtttactggtgatgtggaagaagttgatcaaacaaccaatttgcacttcagaggagcaaggattttttcagctgtaatggaagaattactagcaaaaggattgganaaggctgaaaatgctattctctctggctgttcagctggaggactgactacatattacactgtgatcgctttaaaaatctgttgccttctgaagctaatgtgaaatgtgtt

SEQ ID NO: 200789 - DNA, 282 bp, Glycine max
ctcgcaagcaaaaagaaagaatcccaggcgaggagaaagatggaggggaaggagcaggatgtgtcgttgggagcgaacaagttccccgagagacagccgaatgggacggcggcgcagagccaagacgacggcaatgactaccaagtaccggcgccggcgccgctgaatgcacccgagcgattttacgtcatggtccatttacagagcagggatagcaagatttgtggcaaattttctgtatctctacatcaccgtcttaaccgttatgggagtcgccggggc

SEQ ID NO: 200790 - DNA, 278 bp, Glycine max
tagggttggttggtcccattccataggaagagatcaaagagaagagaaaagatgtttgagccgcagcagctatacactcgagcgaagaccgaggaattcgacctgcaatcaggggaaaccctctacccagggctgagcgtcggcgagaaccagctccgatggggcttcatccgcaaggtctacggcatcctctccgcccagatgcgtctcacaacctcgtctctgtcaccaccgttttctatactccaatcaatgactccctcaagggcaattccacc

SEQ ID NO: 200791 - DNA, 282 bp, Glycine max
gcggaatcgtaaggctgtattagaagagcagcaaagacgagttcaggaagcaatggcatcaaagccagctccttctgaagataattttgagatgaaggccttaaaagctatgggggatatggaagatggagattctgtgtttggatctggtgctgaagttaacctggattcccaggtttattggtggcatgacaaatacagacctaggaagccgaagtatttcaaccgtgttcacactggatatgagtgcgacaaatataatcagactcactatgatcatga

SEQ ID NO: 200792 - DNA, 288 bp, Glycine max
ctcgagctctgcgagatcttcattcgccgattttaaaagatgagtaagcttcagagtgatgctttgcgtgaagccatttcaggaatcatggccgattccaaggagaagaatcgcaaatttgtggagaccatcgaactccaaatcgggttgaaaaactacgatccacagaaggacaagcgtttcagtggctctgtcaagctgccccacatccctcgccccaagatgaaaatttgcatgcttggtgatgctcagcatgttgaagaggcggagaagataggactggactgg

SEQ ID NO: 200793 - DNA, 266 bp, Glycine max
  unsure (1)..(266): unsure at all n locations
ctctctctcctttgcaaatgggcagcggtgaggttgcacatcaagcaccaacacagagtccagacaatggcacaactgaccngtaatcaagacccaggggacaattccggaaccagtaccagccactgaggctcctgcaacagaacaagcagcagctgaggttcctgttcaagaagaacaacaagcaactgaggtgcctgccccagaatcaaccaccgaagcaccaaaggaagataccaccgaagcaccaacaacagaagcagtag

SEQ ID NO: 200794 - DNA, 280 bp, Glycine max
gttgcatttgatgaggcattagaagctgtactagctgacaacaatgatgctagactggaagtttctatactggccaggagtcctgatcctgagctgactgaagcatttattaatacagaggtctatgcacgtgtatcagttgctgttctgttttacaatttggcagacttggctaggatagtgggatcaccaaatgacgatgcaaactgtattgcggcacaagaatctggcaaatcatttctactagagcttcttgactctgtggtgaatgctaaagatc

SEQ ID NO: 200795 - DNA, 293 bp, Glycine max
ctaccatcttaatcttcttcatctttgcccttccgttcacatttgctaacctgcgcgttggattctataccgcaacatgtccaagagcagagacaattgtaggtgaagttgtgcaaaggcgtttcagccaggataaatccattgtcgcagcccttcttcgcatgcactttcacgattgctttgttagaggttgtgatgcctcaatactaatagatccaacaagcactagaacatcagagaagattgcagggccaaaccaaactgttcgtggatttgagatcattgatgaagca

SEQ ID NO: 200796 - DNA, 277 bp, Glycine max
tcagactcagagaaaaagagaaaatggcgctgaagtttctgaacaagaagggatggcacacggggagtttaaggaacatagagaacgtgtggaaggcagagcagaagcacgaagcggagcagaagaagctggatgagctccgcaaacagatccaggaggagagagagcgcaccgagtttcgtcttcttcaggagaaagctggcctcgttccgcatccagagaggttggaatttctgtacgattcgggattgccggttgggaaatctcgaattccgag

SEQ ID NO: 200797 - DNA, 289 bp, Glycine max
gattgttcacattgagggaggaggatggtgcaacaatgtagagagttgcctttaccgtaaggatagtcgcttaggttcatctaagcaaatggaggatctttacttttctgcaattttaagcaacgaacaagagtataatccagatttctacaattggaatagagtcaaggttaggtactgtgatgggtcatcgtttactggtgatgtggaagaagttgatcaaacaaccaatttgcacttcagaggagcaaggattttttcagctgtaatggaagaattactagcaaaa

SEQ ID NO: 200798 - DNA, 232 bp, Glycine max; identical to SEQ ID NO: 156105

SEQ ID NO: 200799 - DNA, 284 bp, Glycine max
ctttaactccacggtgcagatccgaggagttaccctttcttttcttttttcttttttctctttcctcattctacttaaaactcccaccagtgatggacggtttggctccagagggaacacaattcgatggtcgccaatatgatgctaagatgagtgaattgctttccactgatgggcaagaattcttcacctcttatgatgaagtgtatgacagctttgatgcaatgggattgcaagagaatcttctgcgaggcatatatgcttatggttttgagaggccttct

SEQ ID NO: 200800 - DNA, 303 bp, Glycine max
aatctctctcgacagagtgttgtgttggtaattaagatagagaggaaaaatgccgctcaagttggcgggaggagccactgtcggttcccttctcctatgtgttgctatttctctctttcacatcgctggggccgaagatccctacaggttcttcaactggaatgttacttatggtgacatttaccctcttggtgttcgccaaacgggaatattgatcaacgggcaattcccaggtccagatattcattctgttaccaacgacaacctcatcatcaatgtcttcaacagcttggatgagccttt

SEQ ID NO: 200801 - DNA, 287 bp, Glycine max
tgtttcgtgaagctcagtgcatcaagatctctctctctgtaatcgaaaatgagcaagggaccgggtctctttaccgatatcggcaaaaaatccaaagatcttttgactaaggactacaactccgatcagaaactcaccatttcctcatacagcatctccggagtggccctcacttcaacatctgtcaagaaaggaggactctccactggggatgtggcagcactgtacaagtataagaacactattattgatgttaaactggacaccgcatcaactatctccacaac

SEQ ID NO: 200802 - DNA, 285 bp, Glycine max
ggaaaccctagctagtagtctcagttcgtttgagagagaaaaaatggcagagggtctcgttctccgcggaaccatgcgcgcccacaccgacgtcgtgacggcgattgccactcccatcgacaactccgacatgatcgtgacggcgtcgcgcgacaaatccatcattctctggcacctcaccaaggaggacaagacctacggtgtcacccgccgccgcctcaccggacattctcacttcgtccaggacgtcgtcctctcatccgacggtcagttcgccctctccgg

SEQ ID NO: 200803 - DNA, 281 bp, Glycine max
acaaactagtcaatcggagggatatgggtttattgagtttactagtcgtgctggtgctgagagagtcttcaaacatacaatggcaccattatgccaaatggcgggcagaacttcagattgaactgggcaactcttagtgcaggtgagaggcgtcacgatgatagcccagatcacaccatatttgttggagacctggctgccgatgttacggattatcttcttcaagagacatttcgggcacgatatcgctcaattaagggggccaaagttgtaattgatag

SEQ ID NO: 200804 - DNA, 280 bp, Glycine max
gtttttgagtgcggtgcggcgatcctagcactctcttctgcagctttcgccgacagcttcattcaccatggctgagcaaaccgagaaggcttttttgaaacaaccaaaagtgtttctcagctcgaagaaaactgggaagggaaagagacccggaaagggtgggaaccgcttttggaaatccattgggcttggatttaagactcccagggaagccatcgaaggaacctacattgacaagaagtgccccttcactggcaatgtttccatccgtggccgtatc

SEQ ID NO: 200805 - DNA, 287 bp, Glycine max
  unsure (1)..(287): unsure at all n locations
gttttgggcacacatactagttgcttatgcatttaccttttggacatgctatattttactaaaggagtatgaaaaagttgcctcaatgagattgcaatttcttgcagctgaaaaacgccgacctgatcaatttacggtgctcgttagaaacattccaccagatcctgatgaatctgtaagtgagcttgtggagcacttttttctggtcaaccatccagataactatcttactcaccaggttgtttataatgcanacaaacttgcaaagttggttaaaaagaagaaga

SEQ ID NO: 200806 - DNA, 289 bp, Glycine max
tagagaagcactcttcgttcttcgactgtctacgatctgctttctctgaattgtgaaaatgtcgctcggagaaactgcttgttcatacgcagctctcatccttcatgaagatggaattagtgtaactgctgacaagatcagcaccttgttgaaaactgcaaaggttccagtagactcttattggccaaccttgtttgctaaacttgctgagaagaaaaatcttggcgatttgatagcaaatgcggcaggcggtggtgcaccagttgctgttgcagctgccccagttgct

SEQ ID NO: 200807 - DNA, 146 bp, Glycine max
cgtcatcgtcggagtcctcgacaccggcgtctggccggagagcaagagcttcgacgacaccggactcggacacgttacgagcacgtggaaaggcgcgtgcgagacgggaacgaatttcaccgcgtcgaactgcaagagatagttga

SEQ ID NO: 200808 - DNA, 289 bp, Glycine max
caaaaggagactccaaaagctgaggttattctgttggagattgatcttggctcttttggttctgtgcagagattttgttccgagtttttggctttagaacttccccttaacattctcataaacaatgcagggatgttttctcaaaacttggagttctctgaggataaaattgagatgacatttgctacaaattacttaggtcatttcttgttaacagaaatattattagacaaaatgatagagacggcagagaagacaggtattcaaggaagaataataaacgtttctt

SEQ ID NO: 200809 - DNA, 146 bp, Glycine max
tgaagagaaggctcccaagggatgaatctgtttggctgtgttatgcgtctcagcactgtcactgaatcgttgtattgcggaggataatggacctgatatgaacatctacaaggaatcatgccctcaggctgaagacatcatcaaag

SEQ ID NO: 200810 - DNA, 282 bp, Glycine max
gctgaattctatgaaccttctgctttacatggctccaatggctgtggttttccttcttcctgcaacacttataatggaagagaatgtggttggcatcacgttggctcttgccagagatgattccaagatcatttggtatctgctgtttaattcgtcacttgcatattttgtcaacctgaccaactttttggtcactaaacataccagtgctctgacccttcaggtaagtccttattatttaatatttatccaaattggctttcattccttttctttttttta

SEQ ID NO: 200811 - DNA, 284 bp, Glycine max
  unsure (1)..(284): unsure at all n locations
aaaggattctacccgccgctcgatnagaattgcgcttcaaggcgtctcgtagggctaatccgcctcacgagggtcaccaacggcacgtgcctttagagggccgaggccccctactgctagtcggcagacggactgacgacgcacgcgtcgcttctagcccggattctgacttagaggcgttcagtcataatccaacgcacggtagcttcgcgccactggcttttcaaccacgcgcgatgacacattgtgcgaatcaacggttcctctcgtactaggttgaatta

SEQ ID NO: 200812 - DNA, 227 bp, Glycine max
gggatttccactagccgcagcagcctcaggagtagaataaggatgtctcacagtgaattcgagcaccaaggcacgggtcactgggatttctccccaggaagcgtgctgctcgtcacaggggaaaagtgaaggcattccccaaggatgacccatccaaggtacccaagctcactgcattcttgggttacaaggctggtatgactcacattgttagagaggtcgagaag

SEQ ID NO: 200813 - DNA, 267 bp, Glycine max
gttactttccaatttgaattgttccattttcatttctttcgcaaaagttgcaactacttcctcagaaaaaaagtttctaagttaaggaaatccagagacacaaaaatagacggtcatcgtgcagctacatgcatagacatcttccttgccatcattctccctcctcttggagtgcttctcaaatatggctgccaggtggagttctggatttgtttggtgctgaccctttttggttatatacctggaattatctatgctgtctatgct

SEQ ID NO: 200814 - DNA, 264 bp, Glycine max
atcgagccggaatggctcccaagggtttaatctttttggctgtattatgcttctcagcacagtcactgagtcgttgtcttgcggaggataatggacttgttatgaacttctacaaggaatcatgccctcaggctgaagacatcatcaaagaacaagtcaagcttctctacaagcgccacaagaacactgctttctcctggctcagaaacatcttccatgactgtgctgttcagagttgtgatgcttcactgttgctggactcac

SEQ ID NO: 200815 - DNA, 264 bp, Glycine max
ctaagcatggcgcataggttgctcagagatcacgaagccgacggttgggaacgctccgacttccccatcatctgcgaattctgcctcggcgacagccctatgttcgaatgacaagagctgagtatgacaaggagtgcaagatttgtacacggccattcactgtttttagatggagacctggtcgagatgcaagatataagaaaactgagatctgtcagacatgtagtaaattgaaaaatgtctgtcaagtgtgccttctggatc

SEQ ID NO: 200816 - DNA, 267 bp, Glycine max
ttcagaagcactcaaaagtaaacactcaaaacacttggtattaatttgttcttcttattcttcaatttgttgtgcctctagttcttgtttctaagctaagaatatgtctggggtttgggttttcaagaacggtgtggtgaggctggtggagaaccctggctcagagcgcaaggtgttggttcacactgcaagcaacgaaatcatcacttcctatgcagtgttggagcacaagcttagctcactggggtgggagcgttactatgatga

SEQ ID NO: 200817 - DNA, 272 bp, Glycine max
tattttcttcgtagccaaacactctgaaattctcagttatgtcgtggcaagcgtatgtggatgatcacctactgtgtgaaatcgaaggtaaccacctcactcacgccgctatcatcggccaagacggaagcgtttgggctcagagcaccaacttccctcagttcaaacctgaggaaataactgccatcaataatgactttaatgagcctggatcacttgctccaactggattgtatatcggtggcaccaaatacatggtcatccagggtgag

SEQ ID NO: 200818 - DNA, 272 bp, Glycine max
ctcacccaccctccatacacactctctctgagtcggtcgagttgaatcggtgtgagtcagtgaccgagtcgaaccatgtcggacgaagaacaccatttcgaatccaaggccgatgctggagcctccaagacctatcctcaacaagccggaaccatccgcaaaaacggttacatcgtcatcaagggtcgtccctgcaaggttgttgaagtttctacttccaagactggtaagcacggtcatgccaagtgtcactttgttgggattgatatttc

SEQ ID NO: 200819 - DNA, 270 bp, Glycine max
cgagattgaggcgggggttgatttggaagaaacccagctaaggtaattcctcgcaacccctaactaaaccttcaaaggatcatcatgggcagtcacaatgctttggctgccactttcggaatattaggtaacatcatttctgtgatggtgtacttggctccggtgccaacgttttaccggatatacaaaaagaaatgcacggacggtttccactcgctgccatacttgttgtcattaatgagttctatgctttggttatactacgccttc

SEQ ID NO: 200820 - DNA, 267 bp, Glycine max
tctcgagccgaatcggctcgagagagaatggctcccaagggtttcatctttttggctgtgttatgcttctcagcactgtcactgagtcgttgtcttgcggaggataatggacttgttatgaacttctacaaggaatcatgccctcaggctgaagacatcatcaaagaacaagtcaagcttctctacaagcgccacaagaacactgctttctcctggctcagaaacatcttccatgactgtgctgttcagagttgtgatgcttcatgt

SEQ ID NO: 200821 - DNA, 268 bp, Glycine max
tcagatgatagggtgtactacaaggggatattcatttacacgtgctttattaggaattgctgctgatgaacttcacctttgtggtgatccagctgctgtgccccttattcaggagatattgaaaattactggtgacgagattgaggttcaattttatgagagactgtcacctttagtcccactgaatgttcctcttggatctttctctaatgtaagaaatggtgattgcattgtaaccttttcacgtcaggagatatacaaattgaag

SEQ ID NO: 200822 - DNA, 262 bp, Glycine max
caaagttgaattttctgatgatgaggaaaccctcatcatcaggatgtataaactggtaggggagaggtggtctataattgctggaaggattcctggaagaacagcagaggaaatcgagaagtattggacttcaagattctcgggctctagtgaatgaagctccggagtactacgattggtgttcagtctaggacgagcaagaagattttgggtgcaagattagtgtgattttgtgggacataaaaactgaattaaagttggc

SEQ ID NO: 200823 - DNA, 268 bp, Glycine max
gttcattctctttgcgcagttccctacctctcctttcaagatgcagatcttcgtcaagaccctcaccggaaagaccatcacccttgaggtggaaagctctgacaccatcgacaacgtcaaggccaagatccaggacaaggaaggaattcccccggatcagcaacgtctcatcttcgccggaaagcagctcgaggacggccgtaccctcgccgactacaacatccagaaggagtcaacccttcaccttgtccttcgtctccgtggtggc

SEQ ID NO: 200824 - DNA, 268 bp, Glycine max
ttacccactaagatggcttcctttgtatccttcctagtgctgcttcttgcagcccttatcctcatgcctcaagggcttgctacttactacaaaccaattaagaagccaccagtgtacaagcctctcgtgtacaagccaccagtgtacaaaccaccggtttataagccaaaaccaccggtttacaagccgaaaccaccggtttacaagccaccatataagaagccaccatacaagaaaccaccttatggaaagtaccctccagtagagg

SEQ ID NO: 200825 - DNA, 263 bp, Glycine max
gtcgtcgttgataacagatttgctccgtcaaaccggcggcaccgccgtcatcgacggcggtctggcgacggagctggagcgccatggcgccgacctcaatgatcctctttggagcgccaagtgcctcttttccttccctcacctcattcgccaagagtaccttgattacctggaaaatggtgcagacattataatcacagcatcttaccaagccaccattcaagggtttaaagccaaaggctattctgatgaagagagtgaag

SEQ ID NO: 200826 - DNA, 263 bp, Glycine max
gtggaatatggcttccttaagctcctcattagtgctgctccttgcagctctaattctatcccctcaagttcttgctgactatgagaagcccccaatttacaagccacctgtttacacaccgccagtttataagcccccagttgaaaaaccaccagtgtacaaacctccagtttacaagcctccagttgaaaaaccacctgtttataagcctccagtttataagccacccatttacaagcctccagtgtataaacctccagttg

SEQ ID NO: 200827 - DNA, 266 bp, Glycine max
gctttgaaacccggttcatccgaagcccttcaccgaaccatgtcgaggagaaaggttagagagccaaaggaggaaaatgtgactctgggtccagctgttagagatggtgaacacgtttttggcgttgctcgcatctttgcctccttcaacgacaccttcatccatgtcactgatttgtctggcagggaaacccttgtccgaatcactggtggtatgaaagttaaagctgacagagatgaatcatctccttatgctgctatgcttgc

SEQ ID NO: 200828 - DNA, 266 bp, Glycine max
ctaacctacctctttttcttctctctcaacaacttcaccttcttcctcctcgatcatgtctcacttcaagggcaagtaccatgatgagcttatcgccaatgctgcgtacattggcactcctggaaagggtattcttgctgctgatgagtcaacagggacaattggcaagcgtttggccagcatcagtgtagagaacattgaatccaacaggcgagctcttagggagctgcttttcactgctcctggtgttcttcaatatctcagtg

SEQ ID NO: 200829 - DNA, 260 bp, Glycine max
cacagggagatcgcactcaaaatgtgggagttgttgatagtgaatatgttgttcacaaggcaatacaaactctgggtggtagtgatgatccgactaaagtttcaaatcggcaaaggacaactccgaaacacggtgtggcggccttcgatcaacgagttgagatacgaagacagtcaacatgggaacttgaagtcttcaaagagcggtggaatagagctattgctgaggacaagaactgggttaatccattcaagagtgat

SEQ ID NO: 200830 - DNA, 263 bp, Glycine max
ttctttcagtccaatggggtggtctttctcaatttccgttttgctgtttcttacctttctcattcagatacatggaagaggctttgcagagaattatggttgtactttgttccaaggaagttgggtttatgatgaatcataccctctttatgcaacctcacagtgtccctttatagagaaagaatttgattgtcaaaacaatggcagaccggataagttctatctcaaatatagatggcagccagcaggctgcaacttaacaa

SEQ ID NO: 200831 - DNA, 265 bp, Glycine max
attctcttctttattccttttgtaatttcattcattcttaatctttgtgaaaaataatgttcatcgagaattttaaggttgagtgtcctaatgtgaagtacaccgagactgagattcagtccgtgtacaactacgaaaccaccgaacttgttcacgagaacaggaatggcacctatcagtggattgtcaaacccaaatctgtcaaatacgaatttaaaaccaacatccatgttcctaaattaggggtaatgcttgtgggttgggg

SEQ ID NO: 200832 - DNA, 267 bp, Glycine max
cggctcgagcccttagccgttgctctgcttcaacattgcggaagcagaagaagcgccgcagctattgtgaagtactccagagaacccgacaatcccaccaagtcctgcaaggccagaggcgctgacctcagagttcattttaagaacactagggagactgcctttgccatcaggaagttgccccttgttaaagccaaacgatacttagaggatgttttggcccacaaacaggctattcctttccgacgcttttgtggtggtgttggg

SEQ ID NO: 200833 - DNA, 262 bp, Glycine max
  unsure (1)..(262): unsure at all n locations
aaaaggtatgatgctcactcaggaggagaacgtgaaattcaaaggaccatgctagagttgctgaaccagttagatggttttgattcaagaggagatgtgaaagtgattctggcaaccaacnnaatngaaagtcttgatccagctttgctacgacctggtcgaattgacaggaagatagaatttcctcttcctgatatcaaaacaaggagacgcatcttccagatacacacgtcaaggatgacntagctgatgatgtcaattg

SEQ ID NO: 200834 - DNA, 265 bp, Glycine max
gccaaattggtattatcgcacttattgattcccttggtctctccttttgtcaagaacaaagtattttctttgatggagggagatcaacatggctctaattactcttttccacctggctttagattccacccttccgatgaagaactcatagttcattacttggaaaacaaagtcagttcacgtccacttccagcttgcattattgctgaaattgatctctataagtataacccgtgggagctaccgaataagtccttgtttggag

SEQ ID NO: 200835 - DNA, 266 bp, Glycine max
ttcgagtttcacagcaaagtcgtaaaagggtttcaagggatggaaaacatgcagagcttctggcaattgggtgatgaactccgtgggcactcaaaagcatcggaggatcacaagtggttaatggttgcctcgaaactggccgaacagacaagattgaagggggagcgtgtgaacaaccttgatctttcaaagggacccattgaaacaaggtcaagggataaatttgggttccaggaagagaacaaatttgattctcttaacttgag

SEQ ID NO: 200836 - DNA, 264 bp, Glycine max
agaacagtaaaggacgggcgaagttcaaaaaaccaaaaccctttgcgagtgaagccctagactacactccacactttgcaatggcggttgttgcgcaaacccctgacatcgccggcgagcgacagtccggccaagacgttcgcacccaaaacgttgtggcatgccaagccgttgccaacatcgtcaaaagctctttaggccccgttggcctcgacaagatgctcgtcgacgacattggcgacgtcactatcaccaacgacggtg

SEQ ID NO: 200837 - DNA, 265 bp, Glycine max
tgtctgtctccgatggcttcctcataccgtgaccgcacgtcggagttccggttattattggagactctgaagaagatcggaagtccggtgcaacccgagaatgctccttcgacctctcatggcgagtcgtattcgagatccgaattcaaccgaaaggcctcgcgtatcgggttggggatccacgagacctcgcagaagatcgcgaggctcacgcagctggcgaggaaatcgtccatgttcaacgatcccgcagtggagattcagg

SEQ ID NO: 200838 - DNA, 267 bp, Glycine max
gtcgactacaacatccagaaggaatcaacccttcacctcgtcctccgtctccgtggtggcatgcagatcttcgttaagaccctcaccggcaagactataaccctagatgtcgagagctccgacaccatcgacaacgtcaaggctaagatccaggacaaggagggtatccccccagaccagcagaggctgatcttcgccggcaagcagctcgaggacggacgtacccttgctgactacaacatccagaaggagtcaactctccacttg

SEQ ID NO: 200839 - DNA, 265 bp, Glycine max
actcgagccgattcggctcgagatccgcctcacgagggtcaccaactgcacgtgcctttagcgggccgaagccccctactgatggtcggcaaacggacggcgggcgcacgcgtcgcttctagcccggattctgacttagaggcgttcagtcataatccaacgcacggtagcttcgcgccactggcttttcaaccaagcgcgatgaccaattgtgcgaatcaacggttcctctcgtactaggttgaattactattgcgacactgtc

SEQ ID NO: 200840 - DNA, 269 bp, Glycine max
gaaatttcagccaatatcgaaaaacaagaagccccatcaataataatcatcgaaggaatttgaaaggtcgaaacttgagcatctgggatcgcgaaattggggtttttggttaaaagggtattatcttcggaactgattgatggcaaacctgtacgtgaaggcggtgccaccggcggatctgaacaggaacacggagtggttcacgtaccctggcgtttggaccacatacatcctcatccttttcttttcttggatcctcgtactctccg

SEQ ID NO: 200841 - DNA, 262 bp, Glycine max
gcaggcaaggaagactatagtgaaaattcttagtaaactcctagaggaaagaagagcatcacatgaaacctaccatgacatgcttggttgcttgatgggaagagatgaaagtagatacaaactaagtgatgaagaaatcattgatctagtgattacaattacgtattctggttatgaaactgtttcaactacatcaatgatggcagtgaagtacctccatgaccatcccaaagctcttgaagaactcagaaaagagcattgg

SEQ ID NO: 200842 - DNA, 261 bp, Glycine max
taacttaatcgatcatcacttcacttcattaatacatcatggcagacgagacccagaacaagtatgagagctctgaggttgaggtccaggatcgtggtgtttttgactttctcggtaagaaaaaggatgaagaagacaagcctcatcctcaggaggaggtcatcgccaccgagtttcaaaaagtcactgtctcagaccaaggagagaacaagcacagcctcttagaaaagttcaccgatctgacagcagctctagctcttc

SEQ ID NO: 200843 - DNA, 259 bp, Glycine max; identical to SEQ ID NO: 137250

SEQ ID NO: 200844 - DNA, 265 bp, Glycine max
tcgaccgcaaaagagaaaaaaacaaaaatgctgagaatcgctgctagcgcgaagacaattgttcgaacggggtcgttggaggcgccaccattggggattagggttctgcctcggctctaccacgagagggtggtggaccactacgataacccccgcaacgttggatccttcgacaagaacgaccccaccgtcggaacgggtcttgtcggagcacccgcgtgtggtgacgtcatgaaactccagattaaggttgatgacaaaacgg

SEQ ID NO: 200845 - DNA, 258 bp, Glycine max
ttagcatcgccatgatccggcgtcggaacctcgacgctaccgtcgttaaccccaccgaccaagtactcgtgtccaagcacatgctcgaggcttctcttatggggtttgtgctgtaccctgtctttgatgatagatagattgcaccattacatccgagaacttaggttactaaggaaggccatggaggctgctaagaaacagagtcggagtttcgaggatggtaaaagtgtcagtgcagcagagcacaaggcgttgttg

SEQ ID NO: 200846 - DNA, 263 bp, Glycine max
cgaagagaatggctcccaagggtttaatctttttggctgtgttatgcttctcagcactgtcactgagtcgttgtcttgcggaggataatggacttgttatgaacttctacaaggaatcatgccctcaggctgaagacatcatcagagaacaagtcaagcttctctacaagcgccacaagaacactgctttctcctggctcagaaacatcttccatgactgtgctgttcagagttgtgatgcttcactgttgctggactccaca

SEQ ID NO: 200847 - DNA, 265 bp, Glycine max
ctttcttccaacctctcaagtccaacctacccctttttcttctcacaccaacttcaccgtcttcttcctcgatcatgtctcacttcaagggcaagtaccatgatgagcttattgtcaatgctgcttacattggcactcctggaaagggtattcttgctgctgatgagtcaacagggacaattggcaagcgtttggccagcatcagtgtagagaatgttgaatccaacaggcgtgctcttagggagctgcttttcaccgctcccgg

SEQ ID NO: 200848 - DNA, 255 bp, Glycine max
ctcgagccgctcgagccgattcggctcgaggcagaactctgcttattcggattccgatcgcatgcgccgtacaccatggtgaacgttccgaaaacaaagactgacatactgcaagagtaaggagtgcaggaagcacacgctgcacaaggttacccaatacaagaagggtaaggatagcattgctgcccaaggaaaacgccgttatgatcgcaaacaatccggttatggtggacaaactagccctcttccacaaga

SEQ ID NO: 200849 - DNA, 255 bp, Glycine max
cagcaacattctgttcggggattttgcaacagcttgactatggattggtacagtgtcaggctttggttttggcaccaacaagggagcttgcacaacagattgagaaggttatgcgagctctaggtgattaccttggtgtcaaggttcatgcttgtgttggtgggaccagtgttcgtgaggatcagcgcattctccaagctggtgtccatactgttattggcactcctggacgtgtgtttgacatgctacgaagac

SEQ ID NO: 200850 - DNA, 277 bp, Glycine max
ctttcttcttcttcttctttctgtgttgacggtggcgttgatctgattagaatctgggatccgatcacagccatggcaggggcagcctctgatctgttcctcatcgacatcaaaggccgcgtcctcatctggcgcgactaccgcggagatgtctccgccctcgacgccgaacgctatcttcaccaaactcatcgacaaaccggcagatccgcaagctcaagatccggttgtgcacgacaacggcgtgacctgacatgttcatccaacacagcaacgt

SEQ ID NO: 200851 - DNA, 278 bp, Glycine max
gtcctatcaggtgttgatgttggggctggctggcaatctctagtagcatgcatcaacattgtgtgatactatctagttggattaccggcaaggataatattgggatttaaacttggtcttggagcagagggtatttggtcagggatgattgcaggcatagttttgcagactacaatccttataatcgtcacttcaatacgaaactggaaaaaagaggctgaagaagcagaaagccgcgtgagaaagtggggaggagcaatttcatatgatcaatgatt

SEQ ID NO: 200852 - DNA, 280 bp, Glycine max
ggagtctccaagatcctcatcatagcaggagcaggttacaccggcaccgtactcatcaaaaacggaagactctcggatttaatcggcgagcttcagttgctggtggaagggattgggaaaatctggggagcatgctgaaggtgaaggtgaatatgctgatgcaatagctgctcaggtgcgtcgcctggcgaatgaagttcggcagctagcatcaaacaggccaatcacagtactgaatgggggttctgaacaaagtaatttatcatcccttgtcgttcca

SEQ ID NO: 200853 - DNA, 282 bp, Glycine max
acagcactaaaggaagcccttcactacgccgattaagcatgtcaggcagaaaagaaacggttttggaccttgcaaagtttgtagacaaaggcgttcaagttaagcctactggtggaagacaagtgacagggactctgaaagggtatgatcaattgcttaaccttgtcctagatgaagctgtagagtttttaagagatcctgatgatcctctcaaaactactgaccagaccagaaatcttggcttaattgtttgtagaggaactgctgtgatgcttgtgtccc

SEQ ID NO: 200854 - DNA, 281 bp, Glycine max
taggcactgatcacttcacacagtaacttggacaccaactcactctctcaccagcaacacaaaatccaatggcgccgtctttcgcaatcaacggtgggttccccggcaccagaatcactcctccttccgtcaccggccgcttcgctgccgtctactgctaggtccaatatatctgcatcgaccacgatctccctctcccctccgttctcaaaaaccctttcatcatcgtcgacggtccccaaagctccgccgccggcaaccctgaggagatcgcgaactgt

SEQ ID NO: 200855 - DNA, 284 bp, Glycine max
atgaaacagagcgagctagagagagagagagagagaaagagaagagagagaagcagcgatttcatcacatgggtagagttcacggatctctcgcacgtgcgggtaaagtgagaggacaaactcccaaagtggacgacaaagacaagaagaaaaagccacgcggacgcgctcacaagagaatgcaatacaaccgccgattcgtcaccgccgtggtgggattcggaaagaagcgtggaccaaactcctcggagaagtgagggaggcgtgttgaagatcatggtttt

SEQ ID NO: 200856 - DNA, 280 bp, Glycine max
ctttcttccaacctctcaagtccaacctacccctttttcttctcccaccaacttcaccgtcttcttcctcgatcatgtctcacttcaagggcaagtaccatgatgagcttattgtcaatgctgcttacattggcactcctggaaagggtattcttgctgctgatgagtcaacagggacaattggcaagcgtttggccagcatcagtgtagagaatgttgaatccaacaggcgtgctcttagggagctgcttttcaccgctcccggtgctcttaaatatct

SEQ ID NO: 200857 - DNA, 280 bp, Glycine max
aaacacttcaacaatctactctatacccgatttacaagatgagttcatttagccagaatccctatgttttagttctgttcctcgttctcactgtgtggatataccgtgtaatgtctcgcgggctcattacatctgagagacatgagaaatggatggcacaatatggtaaggtttacaaggatgctgcagagaaggagaaacgtttccaagtattcaaaaacaatgtgcagttcattgagtcattcaatgctgctggggacaacctttcaaccttagcatt

SEQ ID NO: 200858 - DNA, 284 bp, Glycine max
gttcattctctttgcgcagttccctacctctcctttcaagatgcagatcttcgtcaagaccctcaccggaaagaccatcacccttgaggtggaaagctctgacaccatcgacaacgtcaaggccaagatccaggacaaggaaggaattcccccggatcagcaacgtctcatcttcgccggaaagcagctcgaggacggccgtaccctcgccgactacaacatccagaaggagtcaacccttcaccttgtccttcgtctccgtggtggcatgcagatcttcgtca

SEQ ID NO: 200859 - DNA, 276 bp, Glycine max
  unsure (1)..(276): unsure at all n locations
ttcaacttcaagcgttcaaatgggancaactacaacaccccttgtattggttcttctattttgcatgcatgtttctgttttaagagcagagtacttgacgtacagagaaccgaaaccagcaactgaatgttagaatcaagaacttgctgaagcgaatgacccaggaggagaagataggccaaatggtgcagattgaacgaagtgttgccaccccacaagtgatgaagaagtacttcattgggagtgtgctgagtgggggagagagtgttccagcca

SEQ ID NO: 200860 - DNA, 282 bp, Glycine max
caaaatttagaaacaaaaacatgttggtgaaggtgtacggtccaacctatggagcccccaagagggtgctggtgtgtctgattgagaaggaaattgagtttgaaacagtacatattgatctcttcaagggagagaataaggaacctgagttcctaaagctgcagccatttggatcacttcatgttattcaagatggtgattatactctctatgaatctcgtgcaataatcagatactttgcagagaagtataaagaccaagggacagacttgttgggaaaga

SEQ ID NO: 200861 - DNA, 286 bp, Glycine max
ttcggctcgatcaaggaagggaaagacatttgtttctctctagagagtctccgctgaactttttggtttcttgaagatgtcgttactctccgatcttatcaaccttaacctctccggcatcaccgataaggtgatcgccgagtacatatgggttggtggatctggcatggatatgaggagcaaagcaaggactctctcgggactggttaatgacccttccaagcttcccaagtggaactatgatggttccagcactggtcaagctcctggacaagatagtgaagtg

SEQ ID NO: 200862 - DNA, 287 bp, Glycine max
atcctgccagtagtcatatgcttgtatcaaagattaagccatgcatgtgtaagtatgaactaattcagactgtgaaactgcgaatggctcattaaatcagttatagtttgtttgatggtatctactactcggataaccgtagtaattctagagctaatacgtgcaacaaaccccgacttctggaagggatgcatttattagataaaaggtcaacacaggctctgcatgttgctttgatgattcatgataactcgtcggatcgcacggcctttgtgccggcgacgcat

SEQ ID NO: 200863 - DNA, 291 bp, Glycine max
actcgagccgattcggctcgaggagagaattaagattttataattaaacttttttggggtgtaattaaaagagaagctagcacaaaaaaatgggttcagcatccgaaagtgtttgcgttacaggagcttctggtttcatcgggtcatggcttgtcatgagactcatcgagcgtggctacaccgttcgagccaccgtacgcgacccagtaaacatgaagaaggtgaagcatttggtggaactaccaggcgcaaagagcaaactgtctctgtggaaggctgatcttgctgaag

SEQ ID NO: 200864 - DNA, 275 bp, Glycine max
gtgaaaatgagttcaggaggaaagcaggggggcttcgtttcgtaccaacacgtcttcgtaatgaggcccggggagcgtttggacaacttcgagccgtcgtgggtgatgacggcagcgcggccgatgggacccgccgctggcagaggcaggtataaaacgggcgttcgaaacgggtcggaggctccgggagagtgtcgggcttccgatcgggcgggtcttcgtttcgccgttcctccgctgcatccagaccgccggggaactcatggcgtgtttct

SEQ ID NO: 200865 - DNA, 275 bp, Glycine max
gttcacagaatgagaatgatccaaataatacaactatttttgttggtaatttggatcctaatgtcactgatgatcatctgaggcaagttttcagccagtatggagaattagtgcatgtgaagattccagcaggcaagcgatgtgggtttgtccaattcgcagacaggagctgtgccgaagaggcacttcgggtgttgaatgggaccctgttgggtggtcaaaatgttcgtctttcatggggcagcagtccttcaaacaaacaggctcaggcagat

SEQ ID NO: 200866 - DNA, 288 bp, Glycine max
gcttaaactttcatagtcatagctcacaatctgcttaggctttggcttcagagtttgtgtaaccaacttcacctttccttccttccttcattcttccgatttcgaagatggctgaagcagaggatgccgtacgacgccgtaatgcggtcgccgagtatcgacagaaacttctccagcacaaggaattggaatccagagtccgatccgtcagggagaatttgcgagcttcaaagaaagagttcaataaaacagaagatgatttgaagtctcttcaaagtgttgggcaga

SEQ ID NO: 200867 - DNA, 278 bp, Glycine max
acgaattttggctctctctctctctctccatacttagtccgttctacctctcacaccattctcaatgaccaaaaataacggcaatatcgacgtgataaatctcagattccgacataatgaagattatcgcgcagacctagtaaatgctctcaagagcaagattacgagtctggctggggctcattctgatgttctggagatctatcccccaatgtcaggaagcgtgttggatctcttagagagattcagggtaaacagatgaaatagaggcagattct

SEQ ID NO: 200868 - DNA, 280 bp, Glycine max
tgttagtgctcttacaaccccgtaccgtctctgcatctctgcaatccacagcagagaatgcctttcaagaggtacgttgagatcgggagggatggtcaaatcaactacggcaaggaatatggaaggatcgtcgtcaatcgtcgagtcattgaccagaacagagcacttgtcgatgcccctgatatggtgaggtcccaagtcaatttcaaaaggctttcccttaccgacatcaagattgacatcaagagggtcactaagaagaaagatcttgtcaaagcca

SEQ ID NO: 200869 - DNA, 279 bp, Glycine max
gagagagagaagttttcagtttcagaaagaaagcaaaagcaatagcaatgggttggatcggtgagactgttgattccatcaaatctcttcagatccgccaggtcctcacccaggctgtgagcctaggcatgattgttacgtctgcactgataatatggaaggcattgatgtgcgttactggcagtgaatctcccgttgttgttgttctttctggaagcatggaacccggattcaagcggggagacatcttgttcttgcacatgagtagagatcctattc

SEQ ID NO: 200870 - DNA, 277 bp, Glycine max
ggagacatggtataagagtgactctccacagcttgccaatacgactattgccaaggcagtgggagactggttttatggtcgaagttctttccgtcacgtggattgcaattatccttgcaacccttcttgccagaaccgtgtttttgatctaaaagaccaccctggaatatagacttgtttgatcaaatatatatcattcctataaaccagacttattggttaactggttattgaatatgagaataaggtttataagttacaaagctagcaaaataag

SEQ ID NO: 200871 - DNA, 274 bp, Glycine max
tgagattgacgcgggggttgatttggaagaaacccagctagcgtaattcctcgcaacccctaacttggacttcagaggatcatcatgggcagtcacaatgctttggctgccactttcggacttataggtaacatcatttctgtgatggtgtacttggctccggtgccaacgttttaccggatatacaacaagaaatgcacggacggtttccactcgctgccatacttgttgtcattgatgagttctatgatttggttatactacgccttcctca

SEQ ID NO: 200872 - DNA, 265 bp, Glycine max
gagaacacagttgatcacagaaaacttacgatgattacccccatttcagatcgttttatagcaactgaaacatttagtgacctgaaggtcaccagcatcataccgctaaatgggggtaatcctcctaagtattctcagagaacacagttgatcacagagaactaccaaattgtgtgatcgtttttcctctcgacactgggcttttatgacagttttgcatttacattcgtgattcatttatcaaagggcttttatttgccatgtt

SEQ ID NO: 200873 - DNA, 273 bp, Glycine max
cgatattgatgcgggggttgatttggaagaaacccagctaaggtaattcctcagaacccctaacttaaccttcaaaggatcatcatgggcagtcacaatgctttggctgcaactttcggaatattaggtaacatcatttctgtgatggtgtacttggctccggtgccaacgttttaccggatatacaaaaagaaatgcacggacggtttccagtcgctgccatacttgttgtcattaatgagttctatgctttggttatactacgccttcctc

SEQ ID NO: 200874 - DNA, 280 bp, Glycine max
gcgaaagactttaggtttggaattgggaattaaggttgttcgcgtcacgaagatgatcgaagtggtgttgaacgatcgattggggaagaaggtgcgcgtgaagtgcaacgacgatgacaccatcggcgacctgaagaagctggtggcggctcagacgggcacaagagccgacaagatccgcatccagaagtggtacaccatatacaaggatcacatcactctcaaggattacgagatccacgacggcatgggtctcgagctctgctacaactaaacacaa

SEQ ID NO: 200875 - DNA, 279 bp, Glycine max
aggtgatggaaggaccaacactatcatcactgctagcagaaatgttgttgatggtagcaccaccttccactctgccaccgtcgctgtggtgggtgcaaatttcatggcccgggacataacattccaaaacacagcgggccagtcaaagcaacaagccgtggccctaagggttggtggggacctctcagcattcttcaattgtgacttcctagcattccaagacaccctttatgtgcacaacaatcgccaattcttcgtcaagtgcctgattactggcac

SEQ ID NO: 200876 - DNA, 278 bp, Glycine max
catgggtacggtggctccaagagttgaaagcttggcgagcagcgggataaagtgtatcccgaaggcatacgtgaggcttcaagaagagctcaagagcatagggaacgtgtttgaggaggattagaaggaagggctacaggttccgacaattgacttgagagagatagattcggaggacgaggttgttcgagggaaatgtcgtgagaagctgaagaaagcggcggaggagtggggtgtgatgcacttggtgaaccatgggatccccgatgagctgatag

SEQ ID NO: 200877 - DNA, 281 bp, Glycine max
gagtttgattgccaaaagtatggaagacctgacaaacagtacctcaaatacgcttggaaacctgattcatgtgccatacccaggttcgatggtgcggctttcatgaatcagttggaggggtaagaagataatgtttgtgggtgactcactgagtctcaacatgtgggaatcactgtcctgtatgattcacgcgtcggtgccaaatgccaagaccggctttttgagaaaagaatcactgtccactgtgaccttccaggactatggagtaactatacagctat

SEQ ID NO: 200878 - DNA, 277 bp, Glycine max
cgacattcattcatctatggctacacttattgctcccagcaagcagtctccacaagaagacgctgaggctctcagaaaggcttatgaaggatgggggaatgatgagaacactgtcatagtaatattgggtcatagaactgtttatcagaggtagcaaatacagagagtcatatgaggaattttccaggaggatcttgtgaaacgcctagagtctgagatcaaaggagactttgagaaagccgtgtaccgatggatactagaacctgcagatcgtgat

SEQ ID NO: 200879 - DNA, 277 bp, Glycine max
gtcactgctttgtttagatcagaaccagatcgtgttctcttcttccattggcaaacatggcagctcaaatgagcaagaagagaaagtttgtggcggatggagtgttcttcgccgaactgaacgaagttctgacacgtgagttggcggaggacggttactccggcgtggaggttagggttacgccgatgcgcaccgagattatcatcagagacaccagaacccaagccgttctcggtgagaagggaaggagaattagggaacttacctcagtggtgca

SEQ ID NO: 200880 - DNA, 272 bp, Glycine max
ctctgcctgtatgagtgaaaaaaccttctcttttacttctctcaagtctcgagcgatttcatcatggctccagagaaggacaggctccaccaccttgcctccaagaccggcaaatctggcggtggcaagcagaagaagaagaagtcgagcaagggagagcacaaagagaaggtgaatacaatggtgctgtttgatcagggcacctatgataagctccattctgaagctcccagattcaagcatctcaatacttcgcttctttctgatcgttt

SEQ ID NO: 200881 - DNA, 272 bp, Glycine max
  unsure (1)..(272): unsure at all n locations
aacttntgctacttcctactccaaccgcacttntgntccgcanttatcngngcacggtcacgatcgngcatcaanggtttggaagcattgccagtatggtagacagcagtgcctctgcagcagacnacgatgttgaactcagttgccgttaacgaccctttcatcaccacngnttacatgacntacatgnttaaatacgncagtgttctggncactggaagnatcacgatgtcaccgttnaagacgagnngacncttctcntcggngcnaag

SEQ ID NO: 200882 - DNA, 265 bp, Glycine max
tcccaattaagctttcaagagacaaactgctttgaagaatggggtccaaggttgttgcatccgttgcacttctcctctccatcaacattcttttcatttccatggttagctccacagccactacgatccaaagccccagccttctcacgtcactgctcttattgcacggcctggttgtccggatctgagtatttgcctcaatattttaggcgggtctctaggaaccgtggatgattgttgtgccctcatcggtggtcttggtgac

SEQ ID NO: 200883 - DNA, 245 bp, Glycine max
caaattagttcattctctttgcgcagttccctacctctcctttcaagatgcaggtcttcgtcaagacgctcgccggaaagcacatcacacttgaggtgaaaacgtctgcaaccatcgagaacgtcaagcgcaagatccgacgaacggaaggaattccaccggatcagcaacgtctcatctccgccggaatgcagctcgacgacagacgtacactcggcgacatacaagatcaagacggagtcaac

SEQ ID NO: 200884 - DNA, 239 bp, Glycine max
tgactcaagagtgaacaaaaaaaaatgatgggtacccttaaggtgtccaacagtagtttatacatattttcgaagttcctagtaatttgtatggtgatgatgatatctttggttgattcaagttattccttgtgtgattttgaggcaatcttcaattttggtgattcgaattcagatacgggtgggtttcatacaagctttcctgcacagcctgctccctatggaatgacttacttcaa

SEQ ID NO: 200885 - DNA, 238 bp, Glycine max
gtgtcactttgttgggattgatattttcactgccaagaagcttgaagatattgtgccctcttctcacaactgtgatgttccccatgtgaatcgttctgattaccagttgattgacattgctgaggatggatttcttagcttgcttactgaaaatgggaacaccaaggatgacctgaagcttcctactgatgagagtttgcttactcagataaaggatgggtttgctgagggtaaggac

SEQ ID NO: 200886 - DNA, 238 bp, Glycine max
ctctaagacccttctctttggtgagaagcccgtcaccgtttttggaatcaggaaccctgaggaaattccatggggtgaggttggtgctgattatgttgttgagtcaactggtgtattcactgacaaggacaaggctgctgctcacttgaagggtggtgccaagaaggttgtctcctctgccccaagcaaagatgcacccatgtttgttgttggtgttaacgagaaggagtacaagcca

SEQ ID NO: 200887 - DNA, 242 bp, Glycine max
ctagctagccacaatgcagatattcgtgaaaaccctaacggggaagacgataaccctagaggtagagtcatcggacacaatcgacaatgtgaaggcgaagatccaggacaaggagggcatcccgccggaccagcagcgcctgatcttcgccggtaagcagctggaggacggccgcaccctcgccgactacaacatccagaaggagtccacgcttcacctcgtcctccgcctccgcggcggcg

SEQ ID NO: 200888 - DNA, 243 bp, Glycine max
catgattccataattgaatcaattacatactggatccaagctaaaggaatgttatggtaaaacttcgtttgaaacgatgtggtaaaaagcaacgtgcgacttgaaagacatgattagattagctgtggattcttacatccgccattttttctagtatatagaaatgaacatgctcttgactcgacatcgtttgttactgttccactagaacttattgttttggggacgggaaagcagttgatg

SEQ ID NO: 200889 - DNA, 239 bp, Glycine max
ttcgagcgattcggctcgggtgaggacttttgagacacagtttggatccttgtctcagtatggcatgaaacatatgaggtcctttgcaaacatctgcaatgtagggataaagaatgagcaaatggctgaggcctctgcacaagcttgtgtctctattccttccaatccttggagttctctgcaaaggggtttcagtgcataataattcctgtaatgtgcaccagtaaagaccaaagtat

SEQ ID NO: 200890 - DNA, 243 bp, Glycine max
ttcttggttacactgaagatgatgtggtctccaccgactttgtgggcgatagcagatcaagtatttttgatgcaaaggctggaattgcattgaataagaactttgtgaagctgtctcttggtatgacaacgagtggggatacagctcacgtgtcattgacctgcttgtattcgttgccaagaagtctttttaaggttgtactgaaaaaaaagtagctgtctagacatatgtgctggtgtctag

SEQ ID NO: 200891 - DNA, 248 bp, Glycine max
tgctgaggttcctgcaacagaacaaccagccgctgaggctcctgccccagaatcaaccaccgaagcaccaaaggaagaaaccaccgaggcaccaacagaaacagtagaaaaaacaactacagaagtagccccagaggagcctaaagaagttccagttgagaccgaggaggtggtggcaaaggagacagaggaagagaagccagcagaagagaaatcagaggagaaaactgaagaagtgaaagaagaag

SEQ ID NO: 200892 - DNA, 229 bp, Glycine max
tgaactagtcaaaacaaaaaaaaatataaaaaaagatatattatagcaactgaactattgtgaagcataaaagaacaaaaatcttatttagttgtaaagcaataaaaatatacagataaatgaagaggtgaaagaaagagagaaaaaaaatcaatgatatagaattctaatatgtaaaggtctatgggttatctcataaaaggtagtgtaataaagcatcaatctaaat

SEQ ID NO: 200893 - DNA, 240 bp, Glycine max
tctaagggaaaaatgacagaggagcaatccaaaaaggtggctgatactgagagttttccctctaatcctgcacctgaacctgttgttgttccaaaggaggatgtggcagaggagaaatctgtaattccacaaccctctccctctcctgctgatgagtccaaagctcttgtcatagttgagaagactagtgaagttgctgaagagaaaccgattgaggggtctgtgaaccgagatgctgtg

SEQ ID NO: 200894 - DNA, 240 bp, Glycine max
tctaataccagactgagcaggggggggaaatcggcattgtcctacactgtgactcatttgagccgttgagcaattccacagcagataaattggctactgaaagagcacaatcattcagcattaattggatcttggatccaatcttatttggtaagtacccaaaagagatggagatgattctaggaaccaccttacctaaattttccagtaatgacaaagcaaaactgaggcaaggactgg

SEQ ID NO: 200895 - DNA, 236 bp, Glycine max
cggctcgagtggacctgaagttccattccaccctggaagagaggacaagcctgagccaccatcagagggtcgcttgcccgatgccactaagggttctgaccatttgagagatgtgtttggcaaagctatggggcttactgaccaagatatcgttgctctatctgggggtcacactattggagctgcacacaaggagcgttctggatttgagggtccctggacctctaatcctctta

SEQ ID NO: 200896 - DNA, 238 bp, Glycine max
ctcgagcgggaagaggaaccctagctagggtttggaagaagctgatccgagaagatggtgcagcgtctcacctaccgcaaacgccacagctatgctaccaaatccaaccagcacagagtcgtcaagactcccggtggcaagcttgtttatcagaccacgaagaagagggccagtcggacccaagtgccctgtcactggaaagaggattcaagggattccacatttaaggccagcagag

SEQ ID NO: 200897 - DNA, 237 bp, Glycine max
tgggatcttctccctccaaagacaatcaaagatcccgaggctaaaaaaccagaagattgggatgacaaagaatttattcctgatcccgaggataagaaaccagaggggtatgatgacatcccaaaagagctcccagatcctgaagccaagaagcctgaagattgggatgatgaggaagatggtgagtggacaccccctaccattgccaaccctgattacaagggcccatggaaggca

SEQ ID NO: 200898 - DNA, 246 bp, Glycine max
aggcgaggagaaagatggaggggtaggagcaggatgtgtcgttgggagcgaacaagttccccgagagacagccgattgggacggcggcgcagagccaagacgacggcaaggactaccaggagccggcgccggcgccgctggttgacccgacggagtttacgtcatggtcgttttacagagcagggatagcagagtttgtggccacttttctgtttctctacatcaccgtcttaaccgttatgggag

SEQ ID NO: 200899 - DNA, 244 bp, Glycine max
tttgaggccaggcaagccccactcaaccaccacacctctcctcgttcacgctacccctttctgctcttcttctacctttcaagttttaaaagtataaagatggcagagacattcctatttacctccgaaccggtgaacgagggacaccctgacaagctctgcgaccaaatctccgatgctgtcctcgacgcttgcctcgagcaggacccagacagcaaagttgcctgcgaaacatgcaccaaaa

SEQ ID NO: 200900 - DNA, 236 bp, Glycine max
cgcaacaaaaagaaagaatcccaggcgaggagaaagatggaggggaaggagcaggatgtgtcgttgggagcgaacaagttccccgagagacagccgattgggacggcggcgcagagccaagacgacggcaaggactaccaggagccggcgccggcgccgctggttgacccgacggagtttacgtcatggtcgttttacagagcagggatagcagagtttgtggccactttctgttt

SEQ ID NO: 200901 - DNA, 233 bp, Glycine max
tgggatctactccctccaaagacaatcaaagatcccgaggctaaaaaaccagaagattgggatgacaatgaatttattcctgatcccgaggataagaaaccagaggggtatgatgacatcccaaaagagttcccagatgcctgaagccaagaagcctgaagattgggatgatgacgaagatggtgagtggacacccccaatcattgccaaccctgattacaagggcccatgga

SEQ ID NO: 200902 - DNA, 241 bp, Glycine max
tacaaaggttgctgtaggagataagatattgaagtagtgctaagtgcctaacacctgcagtgaacaatggcctctgcatacagcatctcttctcaagtcttcacttgttcttgacaagtctgagtgggtgaagggacaaacacttcgccaaccttctgctgcatcagttgtgagatgcaaccccaccaccccatcaggcctacaccatcagagctggttcctatgctgatgagctcgttaa

SEQ ID NO: 200903 - DNA, 259 bp, Glycine max
acaaaattcagcacaaacaatgtgaatctaatatttacaatactgaaaatgtacacagttgttggacaaagccaaaaactatattacgaagaaagtacacaaacatgcccaagacccaaggcgagtgtcaccgacgtggatttcaaacgcataaccacaacagcgtcaaatacttggctaaggtctctgaatccaacccataaaccactacccattcccatttatagatacagatatccctacaaaagtgactggcagg

SEQ ID NO: 200904 - DNA, 243 bp, Glycine max
gtgagaagaagagggggtcagagtgagatagagaaagagagaattcgtaaaccctaatttcggaaagatcggcgatgactgcctccaaggatcgcgagatattcgtctacatcgccaaactcgccgaccaggccgagcgttacgaagagatggtggaatcaatgaagaacgttgcgaatctcgacgttgaactgacggtggaggagcggaatttgctttctgttgggtacaagatgtgattgg

SEQ ID NO: 200905 - DNA, 238 bp, Glycine max
tttgggtctgttgagatttttttcagcagacattgtccaatctggtatggctatggtggtgtattgaaattgttggaacgattttcctacattaactcggtcgtatatccctggacttccctcccattgcttgtctactgtactctaccagccatatgccttctgactggaaaatttatcgtacccgagattagcaactatgccagtcttgtgttcatggccctcttcatatccattg

SEQ ID NO: 200906 - DNA, 235 bp, Glycine max
ggcgtccgaattgtagtctggagaagcgtcctcagtggcggaccgggcccaagtcccctggaagggggcgccagagagggtgagagccccgtcgtgcccggaccctgtcgcaccacgaggcgctgtcggcgagtcgggttgtttgggaatgcagccccaatcgggcggtaaattccgtccaaggctaaatactggcgagagaccgatagcgaacaagtaccgcgagggaaagatg

SEQ ID NO: 200907 - DNA, 237 bp, Glycine max
ctcaccctcctcttcacacattttctgagacatctaacaaacattctcgttcacactttcagattgtgtgaagatgggggcgggtggccgaactgatgttcctcctgccaacaggaagtcagaggttgaccctttgaagcgggtgccatttgaaaaacctccatttagtctcagccaaatcaagaaggtcattccacctcaacgcttccaccgttctgttttccgatcattctccta

SEQ ID NO: 200908 - DNA, 247 bp, Glycine max
gtacacttacaaagtctgcccctataaacaggcttctcaggaggagggctattccaacacccgtttggggagctgggacaaatttgaggattcatacagagtaatggtgttttctaatggtgataaatgctggaatggtcctgataggagtttgaaggtcaagctaagatgtgggttgaaaaacgagattactgatgtagatgaaccaagccgttgcgaatatgtagcagtattatctaccccagcc

SEQ ID NO: 200909 - DNA, 233 bp, Glycine max
ttgctttcttcctcctcattaaggcgctactctctctctctctttctttttctttgttaggtttggtgacacttagttagaaatagcgtgcgaagagggtggggagaagatttagtgttgtggccatggcggagtctgagaagagtactgtgcttgttacgggagccggtggtcgcacaggacaaatagtttacaaaaaattaaaagagaggccaaaccaatatgtggctaga

SEQ ID NO: 200910 - DNA, 234 bp, Glycine max
ccgcgacctctacgccgcaactaaaaaagccggcgaggccatcgcgcatacctacaaacgtatctatggactctccctcaccggattgcgcttcttcactgtttacgggccctggggaaggcccgacatggcttactttttcttcactaagtccatcctccagggaaagcccattgacgtgtaccagacgcaggacgaaagagaagtggcgcgcgacttcacttacatcgacga

SEQ ID NO: 200911 - DNA, 228 bp, Glycine max
attgttccccaagtttaaatctctgtttgcggctgcgattggatctggcactcagttgtttacccttacggtgttcatattcatattggctcttgttggtgtgttttatccgtacaatcgaggggcactgtttactgcactggttatcatatatgcacttacttcggggattactggatacaccgcaacttcattctattagtcgttggaaggaacaaatgggttaag

SEQ ID NO: 200912 - DNA, 240 bp, Glycine max
gtctacactcctgctggagaacctattcccactaacaagaggcacgctgactgccaaggttttcagccatacctgatgttgttgctgaagtgccatggtacggtattgaacaagaatacaccttgtagacgaaagatatccaatggcctcttgggtggcctgttggtggtttccctggacctcagggtccatactactgtggtgttggcgctgacaaggcttttggccgtgacttgttga

SEQ ID NO: 200913 - DNA, 245 bp, Glycine max
ctaagctcgggagcaacaatgttgatgctgtttccacagaagtgacaaaaaaagataatgagttacaacagtatacaatggcaccaggggttaagaggttgggtgaggacaaggctagtgttgtgtgtcacaaggagaattacccttatgcagtgttttattgccacaaatcagaaaccacaaaagcctattctgtcccattggagggtgctgatggaagcagggtcaaagcagttgcagtgtgc

SEQ ID NO: 200914 - DNA, 235 bp, Glycine max
ttagcatcgccaagatccggcgtcggaacctcgacgctcccgtcgttaaccccaccgaccaagtactcgtgtccaagcacatgctcgaggcttctcttatggggtttgtactgttcctgtctttgatgatagatagattgcaccattacatccgagaacttaggttactaaggaaggccatggaggctgctaagaaacagagtcggagtttcgaggatggtaaaagtgtcagtgc

SEQ ID NO: 200915 - DNA, 212 bp, Glycine max
gtgggaggagcggcattaaaaatgcagatcttcgtgaaaaccctaacggggaagaccataaccctcgaggtcgaaagcagcgacaccattgacaatgtcaaggctaagattcaagacaaggtaggcatccctccggatcagcagcgtttgattttcgctggaaagctacttgaagatggaaggaccttggtcgattacaacatccagaagga

SEQ ID NO: 200916 - DNA, 242 bp, Glycine max
gtccaagcagacgccgccaatctcatttgcggtgctaaaacccagtctaatccagaaaatacggtgggagttctcacgatggcggggaagggcgttcgtgttttggtgacccctaccagtgatttgggcaagatcttagcttgcatgcatggactagaaataggtggtgagatgaacctagctgctggcattcaggttgcgcaattggctcttaagcatcggcagaacaagaagcagcagca

SEQ ID NO: 200917 - DNA, 255 bp, Glycine max
ctgttgttgagtattctaatgttgggagaggaatgacggcggagcccaaatgcaagcgcgagatgagtgcatgtacttgtgcaatgttcatcgtatggaattgcagaagtaaagtcacagtcacagaaggtatctggtttgtttgtttttggagattcattggttgaagtaggcaacaataacttcctaaacaccatagcaagggcaaattactttccttacggcatcgacttcggcaggggttccactggccga

SEQ ID NO: 200918 - DNA, 257 bp, Glycine max
cttctctgcttcttgtttttggatgctgggaaaccgaactactatttgtcctttgattttttttgattgaaagatgggtcaagcactaggttgctatcaagttgatcagtcaaatgtggctatcaaggagcattttggaaaatttgatgatgtcctagaacctggatgtcattgcctgccttggtgtcttgggtaccagattgctggtagtttgtcactgcgtgtgcagcaacttgatgttcgatgtgagacgaaaa

SEQ ID NO: 200919 - DNA, 257 bp, Glycine max
gttctcttggtctaccctgtaaatggaggaggagcgacagagaggcagagggcacagactattgctgatgccatcaccattacaaggccacataacaccatttctccacctcggtgacatcctcttctcaaagggcttctccatcaccattctccacaccatcttcaactccccaaacccttcttcctaccctcacttcaccttccacgccatccccgacggcttatcagacacagaagcttcaacactcgacgccg

SEQ ID NO: 200920 - DNA, 253 bp, Glycine max
attaattgcaagaatggcacttcgttgcttggtgatgtccctttctgttctcttcactcttggtcttgcgagagaaagccatgccagagacgaagatttttggcatgctgtttggccaaacactcccattccaagttcattgcgagaacttctaaagcctggccctgcaagtgttgaaatcgatgatcaccctatgcaaattgaagaaacacagtacccgaaaaccttcttctatacagaagaccttcatcca

SEQ ID NO: 200921 - DNA, 255 bp, Glycine max
gaaagagtctaactagaatttattttctctctttcataacctagtgagactctgtgtcagagtttgtgaagtgaatcccataatacatgaagaaaggaaacttgggacttggtctcaaactctcagttcctgtgtctgatcaatctaattttgccaggttcctgactgaaagtgggacttttaaggatggggatctgcttgtcaacagggatggagttcgaattgtctctcagaatgatgtcgaagctccacctc

SEQ ID NO: 200922 - DNA, 252 bp, Glycine max
cggggttccaaaatttccacgacgaggcaccgcaatggacgaaccgaacgaagcacaagacaacagagaactctacgcgctcttgaatttgtctccagaagcttccgatgaagaaattcgcagagcgtatcgtcaatgggcgcaacctatcatcccgataaataccaagctcctcacatgaaggatattgctacggagaactttcagcgattatgcgaacgtatgcagattcttccagatccaaataaaagg

SEQ ID NO: 200923 - DNA, 261 bp, Glycine max
gaataatcgagacacagatcatagtgatcattttttaatttctcagatttatccgacgtcgctgcagatccaccaaccgttatggctgccttcagcggtgatgaaacggcaccgtttttcggcttccttggcgccgcagctgccctcgtcttctcctgtatgggagctgcctatggcacagcgaagagtggcgtgggcgtggcttccatgggtgtaatgagacctgagctggtgatgaagtcgattgttcctgttgtcatg

SEQ ID NO: 200924 - DNA, 249 bp, Glycine max
acgaaccgtagataacgccgcgtttggttgttaagttgttccgtttcagccatggtggagaacaatctcttcgaggatatctttagggtcgaaaaattaaaccccgatgacaaaaaattattcgataaagtcactcgcattgaagcaagaagtgaaaagtttgacatgtttatgcacctggacattaattctgaggtatatccattaaaggtgggtcagaagtttgctcttgtgcttgtttcatcgctt

SEQ ID NO: 200925 - DNA, 259 bp, Glycine max
aaaagaccaatatccaagactctgacttaccagacccaggagacaaccctagaatcgagcttcgttcgggacgaggaggagcgtcccaaggttgcctacaacgaattcagcgacgagatcccagtgatttctcttgccggaatcgacgaggtggatggacgcagaagagagatttgtgagaagatcgtggaggcttgcgagaattggggtatattccaggttgttgatcacggtgtggatcaacaactcgtggccgaga

SEQ ID NO: 200926 - DNA, 252 bp, Glycine max
aactgaaacggaggatcattttcccatacttctagctacatcttagattagagttaagagagagattgggagaatgagttactccaggatattgaactctctattgttagtagtgttattggttacatgtgcaagttgggaggacccttatagattctacacttggaatgtcacctatggagacatctatcctcttgggatgaaacaacagggaatattgataaacgggcagtttccaagggcacagatcga

SEQ ID NO: 200927 - DNA, 260 bp, Glycine max
cacacccttagtcgcctgaaaacgattgttgttgcagggcaaacacaaagatccgggtcgacccgtcgcagatccgatcacaaataagaaagatgaatattttcaggttagccggagacatgacccatttggccagcgtcctcgtcctcctcctcaagatccacaccatcaaatcctgcgccggtgtctcattgaaaactcaagaactctatgcactcgtttttgcttgtcgctacttagatatctttacttattacgta

SEQ ID NO: 200928 - DNA, 254 bp, Glycine max
agccatggaaaataaaaaaattatagagtattgggttgtgtctatactttgcatgcttttatcgggtcattggatctctgttcaagctgcccctgcaccctctctcatcacacaacttcctgacactaacgccaatttcccatccaagcactattccggatatataagtattgatggaaatactgaaagtgggaagaacctgttctactacttcgttagttcagaaagaagtccagagaaggacccagttgtgc

SEQ ID NO: 200929 - DNA, 254 bp, Glycine max
ctgaactctcagtcgcttctcgaaccctactttcttccgcggtgattgcatttgaattcctgtaatggcgattgataatatttttaaaaatgaagctagtgaagaaaaaggagagcgtgccagaatggcttcttttgttggagccatggctattgctgacttagtgaagacaaccttggggccaaagggaatggataaaattttgcagtcaacaggtagaggacgtgaagttactgtcacgaatgatggcgcta

SEQ ID NO: 200930 - DNA, 252 bp, Glycine max
gaattccagtgttatgaccaaaacatgctcagctttctcaagcaacatgctgaagcatctggaaatcctctgtgggggcttggtggtcctcatgatgcacctatctatgaccagcccccatacaatggcttcatcaatgatggggcttcttgggagtctacttatggggacttcttcctctcttggtattccaatcagctcatagctcatggagactgcctcctttcattagcatcttcaacttttggtgac

SEQ ID NO: 200931 - DNA, 251 bp, Glycine max
ctccaccatttaccatccttacctagcagaattttctccaatggaaagagccgcggttcgtgcatatttacacagcagggccgcaagggtattaatcaggatgccatgattgtgtgggaagatttcatgtccgaagatactatcttttgtggtgtctttgatggccatggtccacacggtcatctagtagcgcgcaaagtgagggatgcattgccaattaagctaatttcatctttgcattctaatgaatc

SEQ ID NO: 200932 - DNA, 263 bp, Glycine max
ctttgtgccggcgacgcatcattcaaatttctgccctatcaacattcgatggtaggatagtggcctaccatggtggtgacgggtgacggagaattagggttcgattccggagagggagcctgagaaacggctaccacatccaaggaaggcagcaggcgcgcaaattacccaatcctgacacggggaggtagtgacaataaataacaataccgggctcattgagtctggtaattggaatgagtacaatctaaatcccttaacga

SEQ ID NO: 200933 - DNA, 252 bp, Glycine max
gcgagaacatgagaggagagagaaagtagctgatcctccatggcctccaccaaggaacgcgaaaactttgtctacaccgccaagctcgccgaacaagccgaacgctatgaagaaatggtggaagcaatgaagaatgtggcgaactgaacgtggaattgacggtcgaggagcggaaccttctgtcggtagggtacaagaacgtggtgggtgctcgtagggcttcgtggaggattctatcgtcgattgaacaga

SEQ ID NO: 200934 - DNA, 240 bp, Glycine max
cttgaactcaaggagatggctctgggaagaggcagtgcagtggttctactactttgcttcttgctgcttcactctcagatggctcgtgctgccacctacacagttggagattctgggggttggacctttaacactgttgcctggcccaaaggaaagctctttcgggctggtgacacacttgctttcaattatagccctgggactcacaatgtggtggccgtaaacaaggctggatatgat

SEQ ID NO: 200935 - DNA, 276 bp, Glycine max
tagctcgcggttcggctccgcggcatcctgtacttagatgctgggaaagcgaactactttttgtcctttgattttttttgattgaaagatgggtcaagcactaggttgctatcaagttgatcagtcaaatgtggctatcaaggagcattttggaaaatttgatgatgtcctagaacctggatgtcattgcctgccttggtgtcttgggtaccagattgctggtagtttgtacatgcgtgtgcagcaacttgatgttcgatgtgagacgaaaaccaa

SEQ ID NO: 200936 - DNA, 258 bp, Glycine max
ggcaccaacagccaagactctgacttacctggcccaggagaaaaccctagaatcgagcttcgttcgggacgaggaggagcgtcccaaggttgcctacaacgaattcagcgacgagatcccagtgatttctcttgccggaatcgacgaggtggatggacgcagaagagagatttgtgagaagatcgtggaggcttgcgagaattggggtatattccaggttgttgatcacggtgtggatcaacaactcgtggccgagat

SEQ ID NO: 200937 - DNA, 253 bp, Glycine max
cacatccttagtcgctgaagagattgttgttgagggaatcacacaatcgggtcgaccgccgcagatccgatacaaataagatagtatacatatcttcaggttagccggagacatgacccatttggccagcgtcctcgtcctcctcctcaagatccacaccatcaaatcctgcgccggtgtctcattgaaaactcaagaactctatgcactcgtttttgcttgtcgctacttagatatctttacttattacgta

SEQ ID NO: 200938 - DNA, 258 bp, Glycine max
ttcctgatgcaacaactgaggagctaagagcatatgatgatgaatgtgctatttgtagagaaccaatggccaaggctaaaaggctaaactgcaatcatctcttccatcttgcatgtttgagatcttggttggatcaaggcctggctgagatgtatacttgtccaacatgccgaaagccactttttgcgggtgtgcctggaaatgaaacaaactctgatgcggggacgatatctagtgatgagcaacttgcacggcaaa

SEQ ID NO: 200939 - DNA, 254 bp, Glycine max
gaagatttctagtgacttcaacatgatgatggatcagaaaatctacacatgcgagcatccccaatgcccttacagcgaagttcgccttggtttccatgataggtctgctagggacaatcatcaattgaattgtgcatatagaaacagttctgcagattatggtggtggtcccaatttccatgctactgaggttaagccagtcatattcccccagtcctttgttcaacccaacactacagctcagtctgcaagtt

SEQ ID NO: 200940 - DNA, 251 bp, Glycine max
  unsure (1)..(251): unsure at all n locations
tgaaaggagagcaagaattagaagatgaagaaagcttctcgcgtgctatgctgctttgcacntccgttgtggtttccatggcgctgcaatcggcaacggagctgggcgtatttgacgtgttgcaagaagcgggggctaagctctctgcgaaagagatagcatccaagctttcctgcgacaacaaccctgaagcagactcaatgctggatcgccttctagcccttctagcctctcactccattcttaactgt

SEQ ID NO: 200941 - DNA, 250 bp, Glycine max
gtgaagagcgaagagaatggctcccaagggtttaatctttttggctgtgttatgcttctcagcactgtcactgagtcgttgtcttgcggaggataatggacttgttatgaacttctacaaggaatcatgccctcaggctgaagacatcatcaaagaacaagtcaagcttctctacaagcgccacaagaacactgctttctcctggctcagaaacatcttccatgactgtgctgttcagagttgtgatgct

SEQ ID NO: 200942 - DNA, 250 bp, Glycine max
gtcgcaggcgcagagtagagcagcacagaagagggaaaactgtaccgccatcgtagaagaaaacaaccatggtgcacgtctccttttacaggaactatgggaagacattcaagaagccgcgtcgtccgtacgagaaggagcgtctcgacgcggagttgaagctggttggtgagtacgggcttcggtgcaagagagagctgtggagggtgcagtacgcgctcagccgcatccgcaacaacgcgcggaacct

SEQ ID NO: 200943 - DNA, 268 bp, Glycine max
ggaagtcggctcgagacgaaccgtagataacgccgcgtttggttgttaagttgttccgtttcagccatggtggagaacaatctcttcgaggatatctttagggtcgaaaaattaaaccccgatgacaaaaaattattcgataaagtcactcgcattgaagcaagaagtgaaaagtttgacatgtttatgcacctggacattaattctgaggtatatccattaaaggtgggtcagaagtttgctcttgtgctggtttcatcgcttaatc

SEQ ID NO: 200944 - DNA, 260 bp, Glycine max
  unsure (1)..(260): unsure at all n locations
ctcaacttctgctacccactctcttcttccaagtccaaccacgctncctctcnnanagtcatgggcaagntcaagattcggaatcaacggatttggaagaattggccgtttggttgccagantcnctctgcaaagagacgatgtggagctcgttgccgttaacgaccctttcattaccaccgattacatnacatacatgttaaatacnanagtgttcacngacacttggaagcatcacgatgtcaccgttnaggacgagt

SEQ ID NO: 200945 - DNA, 255 bp, Glycine max
atccgcctcacgagggtcaccaacggcacgcaccttttgagggccgaggccccctacggctggtcggcaaacggacggcgggcgcacgcgtcgcttctagcccggattctgacttacaggcgttcagtcataatccaacgcacggtagcttcgcgccactggcttttcaaccaagcgcgatgaccaattgtgcgaatcaacggttcctctcgtactaggttgaattactattgcgacactgtcatcagtagggta

SEQ ID NO: 200946 - DNA, 261 bp, Glycine max
atccaatccaaatttataaaagtagaactccaagtataattagcaccacttccattctcacactacttactctaattctctctctgacggtttccgctgttctctttcaagttccaagaaatgtcaattataacacgcagaggcatccgttacatgccaagactagatgcagcaaaagtatctgctgctttgctagaaaaaggccaaaatcgtgtcatagatgcttcacttacacttattcgagaaagagcaaagcttaag

SEQ ID NO: 200947 - DNA, 249 bp, Glycine max
cttatatctatatttcagttcattttgttctccaataatttcttctgctactttagagaccttgctgcaaaggttctctcttagcatggtaacaatgggtttgaaagcactttttgtttggtgcataatatggttggcgtttgcacagttgtcactaggaggaagagtgaggcattacaagtttgatgtggagtacatgatcagaaagccagattgcttggaacacgttgtgatgggaatcaacggcca

SEQ ID NO: 200948 - DNA, 249 bp, Glycine max
gcagaggcagggagatagagcgcaaaattctacgtctccttcacggcggcaaaacccgcagccacctcaccgaaatccatggtcacttcctccgccatggcctccagcaatccaatcaaatcctcgcccacttcgtctccgtttgcgcctccctccgcagagtcccttacgccacgcgcctcttcgcccacacccacaaccccaacatcctcctcttcaacgccatcatcaaagcccattctctacacc

SEQ ID NO: 200949 - DNA, 249 bp, Glycine max
cattcagtgaaacactagctagggtattgggagctctcgttgtttcggagttagggaccttacgcagccatggccactgctacgaatgccgccgccgccccaccacgccagctctcccagaaggaagctgacatccagatgatgttggccgccgacgtccacctcggcaccaagaactgcgacttccaaatggaacgttacatcttcaagcgccgcaacgacgggatttacattattaaccttgggaag

SEQ ID NO: 200950 - DNA, 249 bp, Glycine max
tcgaccgcaatacagtacactacaataatgctgagaatcgctcgctagcgcgaagacaattgttcgaacggggtcgttggatgcgccaccattggggattagggttctgcctcggctctaccacgagagggtggtggaccactacgataagccccgcaacgttggatccttcgacaagaacgaccccaccgtcggaacgggtcttgtcggagcacccgcgtgtggtgacgtcatgatactccagattaa

SEQ ID NO: 200951 - DNA, 259 bp, Glycine max
gctcgtcactccttgctcttagccctcctcctcttcgccgccgtagccaccgccgcgatggcgtggcgcgtccgacgccgacgacatcctgatccgtcaggtggtgccagtgtggcgaacgaagaggaggacaacctgctgaacgccgagcaccacttcacgagcttcaaggccaagttcgccaagacctacgccaccaaggaggagcacgatcatcgcttcggcgtcttcaagtccaacctccgcagagccaggctgc

SEQ ID NO: 200952 - DNA, 259 bp, Glycine max
cggagaaagacacgatgcaggaagcgacgaaggtgataataatcggtgccggaacttctggtatcgccaccgccggttgcttaacgaagcaatcaataccttacataatgctcgagagagaagactgtttcgcttcgctgtggcagaaatacacctacgatcgtctccaccttcatttgaggaagcaagtttgcgagttaccgcacttaccgtttcccaagtcttaccctcactacgtgcctcggaagcagttcataga

SEQ ID NO: 200953 - DNA, 249 bp, Glycine max
tttcattccaaagcgttattccttcttcttcttcctctccattctcttcgctcttcgatcctcgtccgggggctgctccgaataccaccaccaccacgcgccgatggccacgataggaggcttacgcgactcccaaggctctcagaacagcgtccaaaccgaggccctcgctcggttcgccgtcgatgaacacaacaagaagcagaattcacttctggagttttctagggtggtgaggacacaggaaca

SEQ ID NO: 200954 - DNA, 262 bp, Glycine max
aagagagtgagaaaagaaggaagaagaagaagaagagatggcaaatgaactacccgtcaaagcttttggttgggctgcttcagacacttctggcacccttgccccttttcatttctccagaagggaaaatggcgtcgatgacgtcactctcaagattctcttctgcggggtttgccactctgatctccacactctcaaaaacgactggggtttcaccacctaccctgtcgttcctgggcatgaaattgttggtgttgtgaca

SEQ ID NO: 200955 - DNA, 251 bp, Glycine max
cggctcgaggtttgtaactttgtcttttgcttgcgaatctgaatcgaataataatcaatcaatcatcatgtcgtcggcgaagaagatcacactgaagagttcggacggcgaggctttcgaggtggacgaggcggtggcgctggagtctcagacgataaagcacatgatcgaggacgactgcgccgacagcggcatccctctgccgaacgtgacgagcaagatcctggcgaaggtgatcgagtactgcaaga

SEQ ID NO: 200956 - DNA, 250 bp, Glycine max
tagaaagtttgccctagccaatatcctcttggtccttctcttgaacttgagcactttgctcaatgttcttgcttgtccctattgcccttacccttctcccaagcctccaaaaaagcctcccgttgtgaaaccaccggttcacaaaccaccaaaaccatgtacaccacccaagtcatctccaaaaccaccccatgtacaccctccctatgttccaaaacctcctcactaccctaaaccaccagttcatcca

SEQ ID NO: 200957 - DNA, 249 bp, Glycine max
gttggaacatcatggcttgcgcgcaacagtggcggatgcacgtttctgcaagccattggaccgttcccttattcgcagccttgcccaatcgacatcatgcaccacctggtcataagctctctgcataaatgatgagtaaattgcacaaaaaggcttaaggccttcacaagccagaccagccgcaaatgtaacagcatgctgttctgctatccccacatcaaagcatcttgttgggaaacggcgaaggaa

SEQ ID NO: 200958 - DNA, 244 bp, Glycine max
gtgatcatagcaaggtatatgagaactttcccatctgcagatccagcttggttctatcttcatgttggttgccaggtatctgcttacgccattggggttgctggctggggaactggcatgaaacttggaagcgaatcagtggggattcaatatagaagtcatcgctatattggaattgccctcttttgttttgcaacactacagatttttgcattgttcctgaggccagtgaaggatcacaagt

SEQ ID NO: 200959 - DNA, 248 bp, Glycine max
gtgaactcgtgtggggtgtggtagtgtggcagcgacacgtatcaacttcaataatcgcatcgcagaagcagtttccggtgcatctcatcgtctccgaaaatgaacgacgcagatgtctcgaagcaaatccagcagatggtgcggttgctccgccaggaagctgaggaaaaggccaacgagatctctgtctccgccgaagaggaattcaatatcgagaagctgcagttggtcgaagccgacaagaagaa

SEQ ID NO: 200960 - DNA, 249 bp, Glycine max
gccaagtgaaagtgagataaaataaaaatcaaagagcataatgtcagggatcattcacaagattggggagacccttcatgtgggagggcacaagaaggaggaggagcataagggtgagcaccatgctggagaatacaaaggggagcaccatggtgaacacagtagtgagtacaaaggagagcatcatggttgacacaaagctggagagtaccatggtgagcacaagccagagcacaaagaggggttcct

SEQ ID NO: 200961 - DNA, 247 bp, Glycine max
caaattcattttaatcctaattctgcacttcttgatcattcgatttttctcctcaagatgcagatattcgtaaaaactttgaccggcaagaccatcacccttgaggtggaatcctccgacaccattgacaacgtaaaagctaagattcaagacaaggaagggatcccacctgaccagcagagacttatctttgcgggtaaacaacttgaggatggtcgcacccttgccgattacaacatccaaaagg

SEQ ID NO: 200962 - DNA, 249 bp, Glycine max
atcgagcgattcggctcagatttatccattcaccacagagtactcttcaatggcccaacctcaaccagagtcccacgaccaccaatggctcacacgagccattgctcaaaatcccaaagctccaccaaaacggcgacgtttccgcaaccgctccctttctccgcgtcaagaagctctccgacaaggccgttttgccctctagggcttcccctctctccgccggttacgatctctctagcgcggtggaga

SEQ ID NO: 200963 - DNA, 248 bp, Glycine max
gtggggtgctcatggtggaggtgccttttcagggaaggaccctaccaaggttgacagaagtggtgcctatatcgtgaggcaggctgcaaagagtgttgtggcaaatggccttgccagaaggtgcattgtccaagtttcctatgccattggtgtccctgagcccttgtcagtgtttgtggacacttatggaactgggaagattcctgacaaggagattcttcaaattgtgaaggagaatttcgacttca

SEQ ID NO: 200964 - DNA, 247 bp, Glycine max
gttttatttggctttgattttcttctgcaaccttatctactgcaaagctttgattactgagtctaacttaccctgccacagtttgccttgtttacctggatcatcggttataatgttttctctcaatttggtcatcaagagctctgtttttaactggtctttgatcaaggatggccataaaggcaattgagttgttgaaaggaagcggaaaccatgaagagatatttgaagttcttgcagcagtggc

SEQ ID NO: 200965 - DNA, 248 bp, Glycine max
ccgaagcagccatggggatcgatctcaaggccggaggtaagagcaaaaagaccaaaagaacagcacccaagtccaatgatatctatctcaagctcttggtcaagctttatcgcttccttgttcggagaactggcagcaacttcaatgctgttatacttaagagatagttcatgagcaaggttaacaaacccccattgtctttgtcaaggttgattaagtatacgaaggggaaggaagataagattgca

SEQ ID NO: 200966 - DNA, 248 bp, Glycine max
ctggagcgtcgtcgtttcgttagggcacaaaaccccttttcggatcggtggagcaaggcctcgccggcgagattcccgaggctgttcaatcaccgatcgagcaccggcgaaaagcggcgaagatgaaggttttcgtgaagactctcaagggcacgcacttcgagatttgagtgaacccttcggacacgctttctgaagtgaagaaaaatatagaaactgttcatggtgcagatgtctatcctgctgca

SEQ ID NO: 200967 - DNA, 250 bp, Glycine max
gcgctcgctaaccccatgttaaaggtccactatcttcttcatttaagcttttgctagttattgggttgcttgtgtgttccattttatttgctgttgcggcaataatcaaagcccgggctttgaagaaggccagtgaagctcgggcatggaaattaaccgcgttacagcgcttggacttcactgttgatgatgttttggattgcttgaaggaggacaacataatagggaaagggggtgctggcattgtata

SEQ ID NO: 200968 - DNA, 259 bp, Glycine max
gcaacatgaacctggctgatgccatggccagggcaaaggtgtttgacatcgatttgcagaagcagttgaggccttacatggaatccatggttccactccccggaatctatgacccggatttcattgctgccaaccaagaggagcgtgccaacaacgtgatcaagggcacaaagcaagagcaagttcagcaaatcatcaaagacatcaaggcgtttaaggaagccaccaaagtggacaaggtggttgtcctgtggactgc

SEQ ID NO: 200969 - DNA, 255 bp, Glycine max
gacggtgtttgggtttcacagacagacacacactcggttctgccttcacaaaacaattatcgccatcccctttttctcctaagaaaagccatggctaagggtcccggtctctactctgacatcggcatgaaagccagggatctgctgttcaaggactaccacagtgaccagaagttcaccatcaccacctactcacccactggagttgctataacagcatcaggaaccaggaaaagtgaactgtttgtggctgat

SEQ ID NO: 200970 - DNA, 249 bp, Glycine max
  unsure (1)..(249): unsure at all n locations
gtcttcataaacgcctttcttctccgtttccgtttcctcgatcgaattcgctttttgatctgcgaaaatgagagagtgcatctcgatcttcattggtcaggctggtatccatgtcggaaatgcttgctgggagctgctctgcctcgagcacggtagcgggcacgatgggcaaatgccaagtgacaagacagttggcggtagtgatgatgctttcaatactttcttcagcgagnacggtgctggaaagca

SEQ ID NO: 200971 - DNA, 248 bp, Glycine max
ctcccccagtaacaacacaacataacattcagagaaaaacaaaactatcatacccacatggatttgcaatgaaagtgagagagtccaattatgcgaacgctttgtgatgcttgtgagagcgccgcggctatagttttctgcgccgctgatgaggctgcactttgtcgtgcctgtgatgagaaggttcacatgtgcaacaagctagctagtaggcatgtgagggttggtcttgctagtccaagtgatgt

SEQ ID NO: 200972 - DNA, 243 bp, Glycine max
ttttgattctgataaccccactcaccggtatcgttatcttgattcgtcatcaaatcagtggcttgtaagacctgttttagaaactcatggatgggatcatgatgtgggttatgaagggttgaatgtagaaagattgttcgttgtcaaggaaaagattcctttatctttctccggtcaggttactaaagataaaaaggatgctaatgttcagatggaaatgtccagttcagttaagcatgggaa

SEQ ID NO: 200973 - DNA, 247 bp, Glycine max
gacggtgtctgggtttcacagacagacacacactcggttctgccttcacacaacaattatcgctatcccctttttctcctaagaaaagccatggctaagggtcccggcctctactctgacatcggcacgaaagccagggatctgctgtacaaggactaccacagtgaccagaagttcaccatcaccacctactcacccactggagttgctataacagcatcaggaaccaggaaaagtgaactgtttg

SEQ ID NO: 200974 - DNA, 255 bp, Glycine max
ctcaatgggttcttcttctattacaacatcgccctcaaccatgaccatggctgcgatcgtgctcctgttcacggtctttgccgtttcctccgccctagacatgtcgataatctcgtacgacagcgcccacgcggacaaggccaccacgttgcgcaccgaggaggagctgatgtccatgtacgagcagtggctcgtgaagcacgggaaggtgtacaacgcgctcggcgagaaggagaagcgcttccagatcttcaa

SEQ ID NO: 200975 - DNA, 252 bp, Glycine max
ctaatcactctagctgttgcaaatttctactatttttcaatggcttctgcagatgttgagttccgttgctttgttggtgggcttgcttgggtcaccggcaacgatgccctcgagaaagccttttcaatctacggcgacatcgttgaatcgaaggttatcaacgaccgtgagactggaaggtccagaggattcggatttgtgaccttcgcctcagagcagtcaatgaaagatgcgatcgcaggaatgaacggc

SEQ ID NO: 200976 - DNA, 253 bp, Glycine max
aaggatagaagaagaagaagcgttctttcggagagttcgaagatgtcgggcgttactaacaacaacgatcaagatcagaagccaaccgaacagggagcacacatcaaccttaaggttaaggggcaggatgggaatgaagtttttttcaggatcaagagaagcactcaattgaagaagcttatgaatgcttactgtgaccgacagtcggtggatttcaactccattgcttttctgtttgatggacgccgcctcc

SEQ ID NO: 200977 - DNA, 251 bp, Glycine max
ctcgagccgtggaattgaaattcacttcgaaatcgctgcagcgtcaatcgcgtaagtgcgagaaggaggagaaatcggagaagctgaaggtgaagaaggcgatcgagaaaggcaacatggacggagctcgaatctacgcggagaacgcgatccgtaagcgcacggagcagaggaactacctccgcctggcctcgcgcctcgacgccgtggtcgcccgcctcgacacgcaggcgaagatgacgacgatcagc

SEQ ID NO: 200978 - DNA, 245 bp, Glycine max
cgggggccaacgccctcgacctattctcaaactttaaataggtaggacggtgcggctgctctgttgagccgcgccatggaatcgagagctccaagtgggccatttttggtaagcagaactggcgatgcgggatgaaccggaagctgggttacggtgcccaactgcgcgctaacctagaccccacaaagggtgttggtcgattaagacagcaggacggtggtcatggaagtcgaaatccgctaagg

SEQ ID NO: 200979 - DNA, 248 bp, Glycine max; identical to SEQ ID NO: 200971

SEQ ID NO: 200980 - DNA, 244 bp, Glycine max
ctcatctgcttcccctagcaaccttcttcttacttctctccgcatcttatctccagattgctggggcgtaagcacaaccgttgactagtctcaagcttaactctcatattcttcaggagtctactgctaaagagattaatgaaaatcccgaggcaggatgggaggctgctataaatcctcgtttctccaattatacagttgaacaatttaagcgccttcttggagtcaaaccaatgcctaagaa

SEQ ID NO: 200981 - DNA, 243 bp, Glycine max
tcggtggtagatgatgaatgggaaacagtggggccgaagaataaatctgctgttacaaggactcaaagctttctcccatcagaattaagtggtatttttggaggacaacttagaagtttggtgagagctaaaggaaatagagcttctgctactgttcaaccatatctcttgctccatcttgacatctatcctgatgctgtccacacaacatacgatcccgttgcactgttttctgcaccagag

SEQ ID NO: 200982 - DNA, 244 bp, Glycine max
gctggaactattgactggtcggaagccacttgacagtttgcgggttcgatcggagcagtcacttgtgaggtgggctacaccccaactccatgatatagatgccttggccaaaatggttgatcctactttgaacggcatgtatcctgcaaagtcactgtcacgctttgctgatatcattgccctctgtgttcagccggaacccgaatttcgacctccgatgtctgaggtggtgcaagcattggtt

SEQ ID NO: 200983 - DNA, 246 bp, Glycine max
gcttggtccatgatcctcacattagcctatggtcgtacattcattgtggagggaaatcatgttgacaaacttaagctgcaaagttgggcaatacctaagtacagtcaacaatactttattagatcacaaaaaatgcccatcaacaaaatgattgaggaaacaatattggacgcagacaaaaaaggcataaaagtgttgagtttaggtcttttgaatcaaggagaagatcttaacagttatggaggg

SEQ ID NO: 200984 - DNA, 250 bp, Glycine max
gaaaggatggtgtgaagaagaagggttgaacctggaggctactgagctgaggcttgggttgccagggtgtgagtcaccagagagggagggtgtgtttaagagtgtggtggtgtctggggccaagaggggtttctctgatgccattgatggaaactggaatggtggaggatctgaaaaagatgccgctgccttgttttctccaacgtcaaggggtgctgttagtgttagtgttagtgctgccaagtctctc

SEQ ID NO: 200985 - DNA, 242 bp, Glycine max
gatgttctgagagcatcacttgccggctcaaagcaactgattaatttgctgttaagcaatcatccagagaacttcttgaatccagtgatcagggagtggagttacaatactttggaccacaagaaagtggtgattgtttcagaaaagttgagggatccttccgatcggctctttggaacctttggtagtcgtggggcgaggcagaatcccaaaaggaaatcattggatacattgataaaaag

SEQ ID NO: 200986 - DNA, 245 bp, Glycine max
gttttcttaaaatttcttccttgccactgccagtgtgtcaccaccatggccaccgtcacaacccaagcctccgccgcgattttccggccatgtgcctcgaaatcgaggtttctgaccggctcttccggtaaactcaaccgggaagtgactatgaggccaatggggtgccctccttctgcctctttcaaggttgaagccaagaagggagagtggttacctggcttggcctccccaacttacctcaa

SEQ ID NO: 200987 - DNA, 244 bp, Glycine max
catgactgtgctgttcagagttgtgatgcttcactgttgctggactccacaagaaggagcttgtctgagaaggaaacagatagaagctttgggttgagaaatttcaggtacattgagaccatcaaagaagctttggaaagagaatgccctggagttgtttcatgtgctgatatcctcgttctctctgccagagatggcattgtttcgctaggaggtccccatatccctcttaagactggaagaa

SEQ ID NO: 200988 - DNA, 246 bp, Glycine max
agaatcgtaagctatgggaaagtcttacccaactgtgagtgctgattaccagaaggccgttgagaaggcgaagaagaagctcagaggcttcatcgctgagaagagatgcgctcctctaatgctccgtttggcatggcactctgctggaacctttgacaagggcacgaagaccggtggacccttcggaaccatcaagcaccctgccgaactggctcacagcgctaacaacggtcttgacatcgctgt

SEQ ID NO: 200989 - DNA, 263 bp, Glycine max
ctttagtgttttctcttgtcacataaaagtcatctaagaagaattacaagatcatcatcacaataacaagatgagttcaggaattagagcatggagtgtggcagcaagtgttggaattgtggaggccttgaaagaccaaggcatatgcaggtggaatcatgccttaagatcagctcaacaccatctcaaaaaccatgttggctcattctctcaggctaacaagctttcttcttctgctatgatatccacaacactaaaacatg

SEQ ID NO: 200990 - DNA, 257 bp, Glycine max
ctctcccctacttccaaaacccttcttcacttctccagttcccatatgctgcaacagctacctcatattgttccgaatggaatgatattgccgggtgatacccttgcttaacgatgaagatgtcactggttcaacttcgacctctcttgacaaggcgagggttcagcacaagctctgagaaccttgttgcttctgtgctctttgagagactgccagtggtcattcccaaaattgaccctgtagtttatgcatttcaa

SEQ ID NO: 200991 - DNA, 254 bp, Glycine max
cctccacccatccacaaacgaacacacactttgattgagaatggggcgtgttcgcacaaagacagtgaagaagtcctacgcggcaagtgatcgagaggtactactctcgcatgacgctggacttccacacgaacaagaaggttctggaagaggtggccatcattccctccaagaggctccgcaacaagatcgcgggattctccacccacctcatgaagcggatccagaagggtcccgtacgtggaatctccctc

SEQ ID NO: 200992 - DNA, 261 bp, Glycine max
gagaacttcaactgagggtgagagtgacacaaatctagggagcactactctaaaagttctattagattcttcaaaacatgaccatgcatcgcgagtcttgggcttttgtcttcggcgttatgggcaacatcatctcctttggagtgttccttgctccattgccaaccttttaccaaatctacaagaagaaatccactgaagggttccagtcacttccttatgttgttgcactgttcagtgcaatgctttggatttactatg

SEQ ID NO: 200993 - DNA, 258 bp, Glycine max
attctaacgcgctgcacacgttgtctcaatccaattttcgcgctattttcgtaatgcattaattgccggtgtcaggacaccattatttcttctcaatgcagcttatgatacttggcagatatgaaaccagtcttgctccagcatctgctgactaccattggacttggtatgaatgcagaaaaaattatgcacgttgcagtgcaccacagatacagtatcttcaaggttttcgaaatcagatgcttagatctacaagag

SEQ ID NO: 200994 - DNA, 259 bp, Glycine max
ctagagcccaacttagaagggctcactgtagatgaggcaattcaacacaagagattgttcctactagattctcatgacccaatcatgccatatttgaggcgaataaatgcaacctccacaaaggcttatgctcccagaaccatccttttcctgaacaatgacggaactttaaggccacttgccatagagttgagtttgccacatcctcagggagatcaatctggtgcttttagtcaagtttttctgcctgcagatgaag

SEQ ID NO: 200995 - DNA, 257 bp, Glycine max
tatcgagccgaatcggctcgagaaacgacattcattcatctatggatacccttattgctcccagcaagcagcctccccaagaagacgctgaggctctcagaaaggtttttgaaggatgggggactgatgagaaaactgtcatagtaatattgggtcatagaactgtttatcagaggcagcaaatcagaagagtctatgaggaaattttccaggaggatcttgtgaaacgcctagagtctgagatcaaaggagacttt

SEQ ID NO: 200996 - DNA, 254 bp, Glycine max
gtttgcgtttttatcacagaggaattaacatattaatagcaagcatggcagtcacactctacgaccttagctcttcctctgggttgaagaaacttgatgagtaccttctcccacgcagttacatcaccgggtaccaagctacaaaggatgatcttactgtttatgcagctttgccaactgctccatcagatgaatatggaaatgtttccaggtggtacaagcacattgatgctttgttgagaatctctggtgtt

SEQ ID NO: 200997 - DNA, 258 bp, Glycine max
gtcacgtccgtgtcgtactggtttctgaacatcaggcttttgctattgggtctcgctctcaagctgctaagacatatttggtacgcaggtttgagaatttcgtgggttcttcgagagaagatctgatcaaagatgcacttattgcaactagggagtccttgcaaggtgaaaaactcaggagttctgtgtgcacaattgctgtggttggagttggtgagcctttccacattttggatccagaaactgttcaacagttga

SEQ ID NO: 200998 - DNA, 257 bp, Glycine max
ctttagccgaggtcaggaggagcactagctaagttcacaatttcaaaatggctaggggactaaagaagtctttgaaaaggctcaatgctcctaagcattggatgcttgacaaactgggtggtgcatttgcgcctaaaccctcatctggaccacacaaatcgagggagtgcctccccctcattcttattctgcgaaaccggctgaagtatgctctgacataccgtgaaatcattgctattctgatgcagcgccatgtt

SEQ ID NO: 200999 - DNA, 254 bp, Glycine max
gagactgccagtggtcattcccaaaattgaccctgtagtttatgcatttcaagaattctcgtttcgatggcgacaacaatatcaacgcagatatcctgatgaatttctagacaaatctgatgctaggggtaaaggtgattatcagattgactatgtgccagcaccaagagtcactgaagctgacaaaaacaatgatcgaaggtcattacaaagagctcttgatagaagactctaccttctcctctatggtaatg

SEQ ID NO: 201000 - DNA, 258 bp, Glycine max
attgaggagacccttcatgtgggaggccacaagaaggaggaggagcacaagggtgagcagcatgatggtggagaatacaaaggggagcatcatggtgaacacagtactgagtacaaaggagagcatcatgttggtgagcacaagccggagcaccatggaggagaagagcacaaagaggggttcctagacaagatcaaggacaagatccacggcgaagagggtggcgccaccgccgagggcgagatgaagaagaagaag

SEQ ID NO: 201001 - DNA, 253 bp, Glycine max
tctttatcttagggaatcttcatttatatgtgtatttttttataaaaaaaataatttgcaggagtacaaggttaaagtgatgcatgataggaacgtgtatctagttgacgttgtcagagaggatataggcagggtcttgaagcttgatttaatacaaggaagcaatctgtgggaagggactgatatgctcatctttaacacatggcactggtggtaccgtagaggacccactcaaccatgggattttgtcgaa

SEQ ID NO: 201002 - DNA, 255 bp, Glycine max
ataggtactactgtgaaagctgctgtggttgatcttgatctcgtcctaaagaaacttgaagacgctggtttttcacatgacagattctatcatccattgtgattgggctttgtttggtctcatgatgcctttcgtgaaactagctccaaaagttacttttaagaagcctattggcagtgttagtgtttctggccacaaatttgtagggtgtcccatgccttgtggtgtgcagataacaagattggagtatgtaaa

SEQ ID NO: 201003 - DNA, 258 bp, Glycine max
cgcagaaggagagggttcggatcctctaccgccgcgccctcaaagacactctcaactgggccgtacatcgccacctcttctacgacgtcgcttcaaacctccgcgaaaggttcgaggagaacagacacgtggaagaccctgataccattgacaggctcataacggatgctgaagcttcctacaacaagtggcgctatcccgatccctatattgttccttgggctcctggtggttccaagtttactcgcaacccaactc

SEQ ID NO: 201004 - DNA, 269 bp, Glycine max
cggctcgaggctgaattctatgaaccttctgctttacatggctccaatggctgtggttttccttcttccagaaacacttataaactgaagagaatgtggttggcatcacgttggctcttgccagagatgattccaagatcatttggtatctgctgtttaattcgtcacttgcatattttgctcaacctgaccaactttttgcgtcataaacataccagtgctctgacccttcagggaagtccttattatttaatatttatccaaattgg

SEQ ID NO: 201005 - DNA, 258 bp, Glycine max
gttttctacgattattcatagtgaggcaatagtagcagcaattcacactggtctttgcttctcgttactcatttctcacctaactttctattcttctcagtctcagatcagaaccttagccatggcagcgttccagaagatcaaggtcgccaaccccatcgtcgagatggacggagatgaaatgactagggttatctggaagtcaatcaaggacaagctcattttgcccttcttggagttggacatcaagtattatga

SEQ ID NO: 201006 - DNA, 238 bp, Glycine max
ggccgccctttttttttttttttagatagaagagaatcttaaaattccaattccatataataaaaacttcagtgcccttaataaaataggcaatttggaaaacacttgagaaaatggaaggccaaactaaaacggcccagtacatccacaattcataacagccatgaatgcctaaaatcccagtaccaaagagtttttagcaacaaacaccttctcccttcaaaaagttatggaggag

SEQ ID NO: 201007 - DNA, 257 bp, Glycine max
ctgtgacatttgtgctgctagttcatatatttgcggctgacaccgagaaggaaagcaggaaaaaaacaaaaaggagcagatgggtagctcaggtttctcatggaaattggcggatcatccaaagcttccaaagggtaagactgtggctgttgtggtattggatggttggggagaggccacacccaatgagtacaactgcatccacaaggctgaaacaccctgcatggattcacttaaaaagggtgctcctgaacggt

SEQ ID NO: 201008 - DNA, 257 bp, Glycine max
cttcctccctggaagcaaaataagagtcaccgctacgacgccgttcgtgcttttttgaggtgccacagtcatgtttgggcgtggtggaccaaggaggagtgacaactccaaatattatgatattctcggggtttccaaaaatgccagtgaagatgaaatcaagaaggcctatagaaaggctgctatgaagaaccatccagataagggaggagatcctgaaaagttcaaggagttaggtcaagcatatgaagttttaa

SEQ ID NO: 201009 - DNA, 266 bp, Glycine max
gctcgaagtcggtaatacatactattcttttctttactttctccgatcgcatcgctcgcaaccacaatcacttcataacctagaagaactctcttgaaggtcatcattcacggtgacagcggggtggggaagacgtctttgatgaaccagtatgtgaataagaagtttagtaatcagtacaaggcaaccattggagcggattttttaaccaaagaagtgcaatttgaagataggcttttcaccttacagatttgggatacagctgg

SEQ ID NO: 201010 - DNA, 258 bp, Glycine max
ccaggcaagctccactcaaccaccacactactcctcgttcacgctacccctttctgctcttcttctacctttcaagttttaaaagtataaagatggcagagacattcctatttacctcagagtcggtgaacgagggacaccctgacaagctctgcgaccaaatctccgatgctgtcctcgacgcttgcctcgagcaggacccagacagcaaagttgcctgcgaaacatgcaccataaccaacttggtcatggtcttcg

SEQ ID NO: 201011 - DNA, 119 bp, Glycine max
gcgcgagattcaatctctcttctctctctgtccgaagatggcttcacgcaggttcgtatcgtctctgattcgatcctcccttcgtagatctcaatcgaaaccctcgatttccgcataag

SEQ ID NO: 201012 - DNA, 257 bp, Glycine max
  unsure (1)..(257): unsure at all n locations
ctgaaaacattggctgttgccgacaatgtgcgttgcattgctttcattatcactttaacgtgggccgttgaagctcgaattccggggatttactctggtggtgcatggcaaagtgctcacgccaccttctacggaggatccggcgcttccggcaccatggnngcagcatatnngtatgggaagctgtacagccangggtacggtgtgaatagggcggcattgagcacggcgctcttcaacagcgggcttagctgcgg

SEQ ID NO: 201013 - DNA, 251 bp, Glycine max
gggccgaatagctcgctatcttgctaacaaatgttcaattgcttcacggattgactgctactctgaaaggggtactactacttttggggagaaactccgtgagcaagttgaggagcgacttgatttttatgacaagggagttgcccctcgtaagaacatagatgtcatgaagtctgctattgaaagtgttgaaaccgaatatacagcgatggaaacagaagcaccagttgaagtttcaggcaagaaagcca

SEQ ID NO: 201014 - DNA, 254 bp, Glycine max
tccgaatcagagaggaaaattatggactcctcttgtgtttgctatccaatacttccttatcatgaagccaataaaaggactgatcgagaaggacattgcaaatgagagaaagccaacatgggagagacgtgatgccgctttccggaagagagatttatattagctgtgcacttctgtgcccatgaaattccatggatgcttagcttcctttgctagcacattcgtttacttttgtctgttctacgaatgaactt

SEQ ID NO: 201015 - DNA, 248 bp, Glycine max
cttaaatcagttttggtttttcatccccaaaaggaagcaattaaaattatgggagccaacttttccactttcgagtttgtagaaaaatcatcacactcatcgctggtcctcaccttccattccactgctaaatggaaggctcactttgatgcctccaaagaaacaaacaagctgatggtcatcgacttcactgctacgtggtgtggaccttgcaaatacatggacccattatcacagaattgctgcaa

SEQ ID NO: 201016 - DNA, 257 bp, Glycine max
actcttaatttctctctgccttgctcatttacacacctctccaacctttcactttcagctttatttgaatccctctctctcctttccaaatggccagcgttgaggttgcacatcaaacaccaacaacagttccagaaaatgaaacaaccgaggtaatcaagacccaggaaacaaccccggaaccagtaccagccactgaggctcctgcaacagaacaagcagcagctgaggttcctgctcaagaagaacaacaagca

SEQ ID NO: 201017 - DNA, 256 bp, Glycine max
aaggattctacccgccgctcgatgggaattgcgcttcaaggcgtctcgtagggctaatccgcctcacgagggtcaccaacggcacgttcctttggggggccgaggccccctactgctggtcggcaaacggacggcgggcgcacgcgtcgcttctaacccggattctgacttagaggcgttcagtcataatccaacgcacggtagcttcgcgccactggcttttcaactcagcgcgatgaccaattgtgcgaatcaa

SEQ ID NO: 201018 - DNA, 254 bp, Glycine max
gtacgaatatcttgttgtttggagcgatccgagaaaaactctgtaaacatgttggtttaccaggacctccttacaggtgatgagcttctctctgactccttccgttacaaggaaattgagaatggaatgctgtgggaagttgaggggaagtgggttgttaaaggtgcagttgatgtagacattggtgcaaacccttctgctgagggtggaggagaagatgagggagttgatgatgcagctgttaaggttgttga

SEQ ID NO: 201019 - DNA, 252 bp, Glycine max
acgcaatgtgatttctgcccagtgctctgaatgtcaaagtgttgaaattcaaccaagcgcgggtaaacggcgggagtaactatgactctcttaaggtagccaaatgcctcgtcatctaattagtgacgcgcatgaatggattaacgagattcccactgtccctgtctactatccagcgaaaccacagccaagggaacgggcttggcggaatcagcggggaaagaagaccctgttgagcttgactctagtccg

SEQ ID NO: 201020 - DNA, 254 bp, Glycine max
cggctcgagaaaaaaatgggttcagcatccgaaagtgtttgcgttacaggagcttctggtttcatcgggtcatggcttgtcatgagatacatcgagcgtggctacaccgttcgagccaccgtacgcgacccagtaaacatgaagaaggtgaagcatttggtgctactaccaggcgcaaagagcaaactgtctctgtggaaggctgatcttactgaagagggaagctttgatgaagccattaaaggctgcaccgg

SEQ ID NO: 201021 - DNA, 239 bp, Glycine max
gaagaaacttaatcgatcatcacttcacttcactaatacatcatggcagacgagacccagaacaagtatgagagctctgaggttgaggtccaggatcgtggtgtttttgactttctcggtaagaaaaaggatgaagaagacaagcctcatcctcaggaggtggtcatcgccaccgagtttcaaaacgtcactgtctcagaccaaggagagaacaagcacagcctcttagaaaagcttca

SEQ ID NO: 201022 - DNA, 264 bp, Glycine max
agcttggttcatacaaagttcttgtattgagtagctggtatatggccaaggagtgtttcactgtccatgacaaagcattttctaccagaccctgtgttgcagcctcaaagctaatgggctacaactatgccatgtttggcttcactccttatggtccttattggcgtgagataaggaaattaactactattcagcttctatctaaccaccggcttgaactgctgaagaacacaagaacatctgagtcagaagttgcaataagag

SEQ ID NO: 201023 - DNA, 263 bp, Glycine max
aggagccaaattggtattatcgcacttattgattctcttggtctctccttttgtcaagaacaaagtattttctttgatggagggagatcaacatggctctaattactcttttccacctggctttagatttcacccttccgatgaagaactcatagttcattacttggaaaacaaagtcagttcacgtccacttccagcttgcattattgctgaaattgatctctataagtataacccgtgggagctaccgaataagtccttgt

SEQ ID NO: 201024 - DNA, 265 bp, Glycine max
ctcatgtattactctcactgcagagactgtatgaggtgccatgcgaggcttggaaacattctcccagctcgcatggggacaccccatgcacgttccagtgggtgtgcacgtttgtgactccccactctatgcccaccgcggtgtcatggtggacaccgcgaggaactattatcccgtgaaggacttattgaggacagtgaaagccttgagcatgaacaagctcaacgtgcttcacttgcacctcacggatgcagaatctttccct

SEQ ID NO: 201025 - DNA, 265 bp, Glycine max
actgccagtagtcatatgcttgtctcaaagattaagccatgcatgtgtaagtatgaactaattcagactgtgaaactgcgaatggctcattaaatcagttatagtttgtttgatggtatctactactcggataaccgtagtaattctagagctaatacgtgcaacaaaccccgacttctggaagggatgcatttattagataaaaggtcaacacaggctctgcctgttgctttgatgattcatgataactcgtcggatcgcacgg

SEQ ID NO: 201026 - DNA, 260 bp, Glycine max
agtcacaagtgagtatgcaaagcgactgagggggcttgcgaccaagatattggaggcactctctattggattggggttggaaggacggaggttggagaaggaagttggtgggatggaagagcttctacttcaattgaagatcaactactaccctatttgtccccagccagaacttgctctgggagttgaagcccacactgatgtgagttcactcactttcctccttcacaacatggtgggatgtctgcagctattctacg

SEQ ID NO: 201027 - DNA, 261 bp, Glycine max
ctttcattttccctcactttctcgctcgccaaacgcccctctctatcctccaatggccgaccagctcaccgacgaccagatcgccgagttcaaggaggccttcagcctcttcgacaaggacggcgatggttgtattactactaaggaacttgggactgtgatgcggtcactagggcaaaacccaactgaggcagaactgcaggatatgattaatgaggttgatgctgatggcaatggaaccatcgacttcccagagttcct

SEQ ID NO: 201028 - DNA, 262 bp, Glycine max
tgttcaacaagtgagactcagattactccaacccatgtatctgatgaagaggcaaaccttttcgccatgcaactagccagctgctcagtactccctatggttctcaaatcagctcttgagcttgatctgttggaaatcatagccaaggctggccctggtgttcacctttccccctccgacattgcttctcggctcccaacacacaaccctgatgcaccagttatgttggaccgtatattgcgcctcttggcttgctacaata

SEQ ID NO: 201029 - DNA, 268 bp, Glycine max
  unsure (1)..(268): unsure at all n locations
ttcggctcaagcttnttctaagtgtagtagaggagatgaacagagccaaccctctcttcttcttcatcttcaatacctttataacatttatagtttcattcttaatcgttggtgaaaatgngcatcgagaattggaaggtagagagtgctaatgtgaagtacaccgagactgagattcagtccgtgtacaactacgaagccaccgaacttgttcacgcgaacaggaatggcacctatcagtggattgtcaaacccaaatccgtcaact

SEQ ID NO: 201030 - DNA, 265 bp, Glycine max
  unsure (1)..(265): unsure at all n locations
tagcataaacacacacacacacatgtncttntgtccanatctctagtctcctaaaaccctaattcgtagtgaatatgagtgaaatcttgcacatccagggagggctatgcggtaaccagatcggagcgaagttctgggaggtgatatgcgacgagcacggcatcgaccacaccggatagtacatctgcgactccgagctccaattggagcgcatcaatgtttattacaatgaagccagcggcggaaggtacgttccacgcgccgt

SEQ ID NO: 201031 - DNA, 271 bp, Glycine max
  unsure (1)..(271): unsure at all n locations
ctactgatgcctttttgggcacccagttttccaccattctgagtacataantacatcatatgacatcaaatgagggggggcttatggcaacttgtgcaatcaatcactcgctgtcttgcccagggtgataagaaaggctgttgctcgtaggtattttgcctcaaatgctgagctgaaaaagacagtcgtttatgacttccatgttgctaatggaaggaagatggtgccatttgctggatggagcatgccaattcaatataaggactcaatt

SEQ ID NO: 201032 - DNA, 254 bp, Glycine max
gctaccttgtcgatggcatatgctgctgctagatttgttgaatcgtctcttcgcgcacttgatggagatggagatgtgttcgagtgctcatttgtggaatcaaacttgactgaccttccattctttgcttcaagggtgaaacttggtaggacaggagttgaggctttaattccatctgacctccaagggttgactgactatgagcagaaggctttggaagcacttaagcctgaactcaaggccagcatagagaa

SEQ ID NO: 201033 - DNA, 261 bp, Glycine max
ctagcattggagggaaagttggtgcttctgttagtcctaaaagagttattgtggcagttgctgctgcaccaaagaagtcatggatccccgctgtaaaaggtggtgggagtttcatagacccagaatggcttgatggctcgctaccaggtgactatggttttgacccactaggactaggaaaggacccggcattcctgaaatggtatagagaagctgaactcattcatgggaggtgggcaatggctgcagttgtaggcatct

SEQ ID NO: 201034 - DNA, 262 bp, Glycine max
aagcagaattttaataggaagaagaaaggagaaatagggtttgtagagatgcaagggcaaggcgttgatgaagtgaacattgaagagttggcctcgaatctttccctctacaaagatcaactgaaccaggttaggcaactcttgaacgatgacccttcaaattctgaatatgctgacatggagagggaactttccgaggtcattgctttgactgaggaactccttgcaactgcaaagcagaatgaaatccctgctcctccta

SEQ ID NO: 201035 - DNA, 261 bp, Glycine max
taggaagagaatggctcccaagggtttaatctttttgtatgtgttatgcatctcagcattgtcactgagtcgttgtcttgcggaggataatggacttgttatgaacttctacaaggaatcatgccctcaggctgaagacatcatcatagaacaagtcaagcttctctacaagcgccacaagaacactgctttctcctggctcagaaacatcttccatgactgtgctgttcagagttgtgatgcttcactgttgctggactc

SEQ ID NO: 201036 - DNA, 257 bp, Glycine max
ttcgcattgcacaagcactctctctttcccttaccctttttcaggtttcaacgctccaactatccatggcaaaccgctggctcagacccgaggtgtatccactgttcgctgcggttggtgctgctgttgggatctgtggattccaactggttcgtaatatctgcatcaaccctgaagtcagggtgaacaaggagggaaggaaggcaggagttttggagaactttgctgagggagagaagtatgccgagcacttcctg

SEQ ID NO: 201037 - DNA, 255 bp, Glycine max
gcaggcaaggaagactatagtgaaaattattagtaaactcctagaggaaagaagagcatcacatgaaacctaccatgacatgcttggttgcttgatgggaagagatgaaagtagatacaaactaagtgatgaagaaatcattgatctagtgattacaattacgtattctggttatgaaactgtttcaactacatcaatgatggcagtgaagtacctccatgaccatcccaaagctcttgaagaactcagaaaaga

SEQ ID NO: 201038 - DNA, 252 bp, Glycine max
aaacttaatcgatcatcacttcacttcactaatacatcatggcagacgagtcccagaacaagtatgagagctctgaggttgaggtccaggatcgtggtgtttttgactttctcggtaagaaaaaggatgaagaagacaagcctcatcctcaggaggaggtcatcgccaccgagtttcaaaaagtcactgtctcagaccaaggagagaacaagcacagcctcttagaaaagcttcaccgatctgacagcagct

SEQ ID NO: 201039 - DNA, 254 bp, Glycine max
tgttatccctggtatttttgtagcattggctttgcgatttgatgtgtccagaggaaaacagccccagtatttcaagagtgcatttgtaggatacactgttggcttggtccttacaattgttgtgatgaactggtttcaggctgcacagccggctcttttgtatattgtaccttctgtaattgggtttttggctgctcattgcttatggaatggtgatgtcaaacagttgttggagttcgatgagtcaaagactg

SEQ ID NO: 201040 - DNA, 272 bp, Glycine max
taccgctcgaaattcaattcaatctgcctcgatcatggagaggaaaacatttgggtttttgttcttgctcctccttgtcttagcttctgatgtgacggtgaagagagcagaggcgaaagattgcttgacaatgaggcacgggttccagggtagatgcttattcgacaggcaatgtgcacatgtgtgcaggagcgatggtttcatcggtggtcagtgccgaggccctcttcgcaaatgcttttgcagcaggccatgttgatcgaaattactac

SEQ ID NO: 201041 - DNA, 259 bp, Glycine max
gtgagactcagattactccaacccatgtatctgatgaagaggcaaaccttttcgccatgcaactagccagttcctcagtactccctatggttctcaaatcagctcttgagcttgatctgttggaaatcatagccaaggctggccctggtgttcacctttccccctccgacattgcttctcggctcccaacacacaaccctgatgcacccgttatgttggaccgtatattgcgcctcttggcttgctacaatatcctctc

SEQ ID NO: 201042 - DNA, 254 bp, Glycine max
  unsure (1)..(254): unsure at all n locations
aacaacttctgctacttcctantccaacngcactaangctnccgcaattatcatgggcaaggtcaagatcggaatcaacggatttggaagaattggccgtttggtagccagagtggctctgcagagagacgatgttgaactcgntgccgttnacgaccctttcatcaccaccgattacangacanacatgtttaaatacgacagtgttcatggacactggaagcatcacgatgtcaccgttaaggacgagaaga

SEQ ID NO: 201043 - DNA, 249 bp, Glycine max
gagaatcctcacccattttcttcgtagccaaacactctgaaattctcagttatgtcgtggcaagcgtatgtggatgatcacctactgtgtgaaatcgaaggtaaccacctcactcacgccgctatcatcggccaagacggaagcgtttgggctcagagcaccaacttccctcagttcaaacctgaggaaataactgccatcaataatgactttaatgagcctggatcacttgctccaactggattgtat

SEQ ID NO: 201044 - DNA, 250 bp, Glycine max
  unsure (1)..(250): unsure at all n locations
ggctttctgacaagcccctcaggctaccccttcaggatgtgttcctatatctggttttgagggagacaacatgattgagaggtccacacaccataagagntccaanggtccnactctgctagatgtacttgaccatatctctgagctcaagaggctctctgacaatcccctcaggctaccccttcaggatgtgtacaagattggaggaattggagctgtgcctgtgggacgggttgagactggtgtcttg

SEQ ID NO: 201045 - DNA, 253 bp, Glycine max
tatcgagccgaatcggctcgagcaaacctcttcgttctctcgattcactccatttcttccaaactggccaaagacccagttcgcgttctcgtcactggagccgcagggcaaattggatatgctcttgtccctatgattgctaggggagtgatgctgggtcctgaccagcccgtgatcctccacatgcttgacattcctccagcagcagagtccttgaatggggttaaaatggaattggtggatgctgcattcc

SEQ ID NO: 201046 - DNA, 254 bp, Glycine max
atcacgggacaacaagaagtagtccagcagccgaggcggccgaattcgcaccctctccgatctgaaccgtccctccgccgattcctacagcgactccgatagaactcaggagtattacaccggcggcgaaaagagtggaatgcttgtccaggatccttcaaagggaaatgatgtggatgaaattttcaatcaagctaggcaacttggggctgttgaaaggcctcttgatcagcttcaggagcctccaaggtcaa

SEQ ID NO: 201047 - DNA, 251 bp, Glycine max
ctggccaaatgtgattgtgcagtttgaagatttccaaagcaaatgggcatttaagttattacagcggtatagaaatacctacagaatgttcaatgacgatgtgcagggaacagctggagttgcaattgctggacttctaggtgctgtacgggcgcaaggaagaccaatgattgacttcccaaagcagaagattgttgttgctggtgctggaagtgctggaattggggttcttaatgcagcgagaaaaacaa

SEQ ID NO: 201048 - DNA, 249 bp, Glycine max
caaagcacaaagcaaagctcatccttgagttaaaaaatggcagcagcttcttccatggctctctcatccccatccttggctggcaaggccgtgaagctgggcccatcagccccagaagtgggaagggtgagcatgaggaagaccgtcaccaagcaggtctcctcaggaagcccatggtacggcccagaccgagtcaagtacttgggcccattctctggcgagcccccgtcctacctaaccggtgagttc

SEQ ID NO: 201049 - DNA, 259 bp, Glycine max
aaagccctcactatatcgcatactctcaggaacttccatggctactccacatgtttcagggcttgcatgcagtgtcaaaagaaaaaaccccacttggagtgcctccgcaatcaaatctgccatcatgacttcagcaattcaaatgacaatttgaagggtcccataacaacggattcagggttgatagccacaccttatgactatggagcaggggcaattacaacatctgaaccattgcaaccggggctagtttatgaaa

SEQ ID NO: 201050 - DNA, 258 bp, Glycine max
aacaagagcacaacagaacagagggagcacacaatctttcttcattcttttcgtgaaacaaaagaaaactgaaattaggttttcatgtcgggcatggagaggcttcagaggatgttcgctggtgcaggtggagcgctggtcatcccccaccggattctcccaccctcgattcctccgagcaggtctacatctcctcactcgcccttctcaaaatgctcaaacacggaagagctggagtaccgatggaagtgatgggtc

SEQ ID NO: 201051 - DNA, 258 bp, Glycine max
catccatttcttcgatctggagctctccgctttcaaagctgtcacatttccgattcgggatggacaaatacgagctcttcaaggatataggatctgggaatttcggtgtggccaggctcatgcgtcacaaagacaccaagagcttgttgccatgaaatacattgaacggggtcacaagattgatgagaatgttgcgagggaaatcataaaccatagaagtcttcggcaccctaatattattcggttcaaggaggtggt

SEQ ID NO: 201052 - DNA, 256 bp, Glycine max
caaagacgccgtcgccgccggctacgcctccgccgacgacgccgctcctcagaactccgggcgccaccgcgagcgcgaggaaaggaggagttccgtggacggaggaagaacacaagttgtttttggttggattgcaaaagtagggaaaggtgattggagaggaatctccaaaaactacgtcaaaacgcgaactccgacgcaggttgccagccatgctcagaagtactttctccgacgaagcaacctcaatcgccgt

SEQ ID NO: 201053 - DNA, 262 bp, Glycine max
cttttctaacatggctgctgggactggactcctttgcagagattttggatggagatgtgtacaagtactatgctgatggagaatggaagaaatcctgcttctgggaaaagtgttgccatcatcaaccccactaccagaaaactcaatacaaagttcaagcttgttcacaagaggaggttaacaaggtcatggacttggcaaaatctgcccaaaagttatgggcaaagaccccactatggaaacgtgctgaacttcttcacaa

SEQ ID NO: 201054 - DNA, 257 bp, Glycine max
taaacctccaaagggtgttctcctttacgggcctcctggtactggtaaaacattgttagccagggctattgccagtaatatagatgctaacttcctaaaggttgtttccagtgccataattgacaagtacattggagaagtgccaggttaatcagagagatgtttggttatgcacgtgatcaccagccgtgcatcatttttatggatgagatcgatgccattggaggtcgccgtttcagtgagggaacaagtgcaga

SEQ ID NO: 201055 - DNA, 255 bp, Glycine max
tcgagcgtttctggcaaggtgtatgatgtcacccctttcatggaggatcatcccgacggtgatgaggtcttgttatctgcaacagggaaagatgcaaccaatgattttgaagatgttggacacagtgattctgctaagatatgatggaaaaatactacattggtgagattgattcatcaactgtaccactaaaacgtacctacattccacctcagcaagctcagtacaatcctgacaagactccagaatttgtga

SEQ ID NO: 201056 - DNA, 256 bp, Glycine max
caagtgttgagtttcaaggagaacgagaagaaaacgttcaccgtcacgttttcgtcatcgggttcgccacagcatacagaaaacgcttttggaagggtagaatggtccgatgggaagcacctggttggatccccaatctcggttaattggggttgaaacttgaaaaaggttgatgcaaattgcaaggttcatcactcactcgaagaggggtgtgtcttgattggctagtgattatagtatttaatatgttactatt

SEQ ID NO: 201057 - DNA, 256 bp, Glycine max
atcgagcgattcggctcgagcgaagagaatggctcccaagggacttaatctttttggcactgttatgcttctcagcacacgtcactgagtcgttgtcttgcggaggataatggacttgttatgaacttctacaaggatcatgccctcaggctgaagacatcatcaaagaacaagtcaagcttctctacaagcgccacaagaacactgctttctcctggctcagaaacatcttccatgactgtgctgttcagagttg

SEQ ID NO: 201058 - DNA, 255 bp, Glycine max
cggaaagggttgaggagacagggcggtggctggagaagtactgcaagaggtttggagtcacatttgagtacaattgccttgcacaaaaatgggaaactataagacttgaagacctcaaaattgataggagtgaagtactgtggttaactgtttgtacagattgaagaacctatccgatgaaaccgtgactgccaactgtccaagagatgctttgctgaggttgatcaggaggatcaatccaaacatcttcatgca

SEQ ID NO: 201059 - DNA, 254 bp, Glycine max
ggcttgcatcttctcagttgtgaagatgtacacatcaaggaagaaaatccacaaggataaggatgctgaaccaactgagtttgaagagtcagttggacaggcattgtttgatctggaaaataccaaccaggagcttaaagtgatctgaaggatttatacataaactcagctgtgcaagttgatgtttctgggaaccgcaaggctgttgttattcatgtcccttacagattaaggaaaggtttccgtaagattca

SEQ ID NO: 201060 - DNA, 256 bp, Glycine max
gaaagatgcagatattcgtgaaaaccctaaccgggaagaccatcacccttgaggtggagtcaagcgacaccattgacaatgtcaaagccaagattcaggacaaagaagggattcctccggatcagcagaggttgatcttcgccggtaaacagctggaagatggccgtaccctcgctgattataacatccaaaaagagtcaacattgcatcttgttttaaggcttcgtggtggtattattgagccatctttgatggc

SEQ ID NO: 201061 - DNA, 251 bp, Glycine max
ggcttggttaagggaaaccaccggagccgtagcgaaagcgagtcttcacagggcaattgtcactgcttatggacccgaacctgggtgatctatccatgaccaggatgaagcttgggtgaaactaagtggaggtccgaccgactgatgttgaagaatcagcggatgagttgtggttaggggtgaaatgccactcgaacccagagctagctggttctccccgaaatgcgttgaggcgcacagttgactagaca

SEQ ID NO: 201062 - DNA, 254 bp, Glycine max
ctttcaacgaacacatagctgctcttagaaggttaggggtgcaaggcgtggagattcgaaagccagagcagcttaacacaattagttccctcattatccctggtggagaaagcaccaccatggctaagctcgccggtatcacaacctgtttcctgctttgcgagagtttgtacaaatgggaaagcctgtttggggaacctgtgcagggcttatattcttggcaaataaagctataggacagaagactggtggtc

SEQ ID NO: 201063 - DNA, 257 bp, Glycine max
  unsure (1)..(257): unsure at all n locations
aganataccacttctnttgccaattcacagctgatctatttgccatgaaccacacagatttcattatacancagtaccttccaggagattgctggaancaaggacactgttggacagtacgaatctcacacagccttcacccntcctggactctaccgcgttgtgcatggtattgatgtctttgatccaaaattcaacattgtctcccctggagctgatcaaaccatttacttcccccacactgaaaccagcccgta

SEQ ID NO: 201064 - DNA, 253 bp, Glycine max
tcagtttcgcaatgcctcgtaagcgctttcaggagccgcaacccaaaacaggtctacaacatacccaggatttcctgaggaaaatagggttggggaaggagaactactacttctggaagcagattggaaaggcttgctttgcacctatgcagtgatcggggcagtgtgggtgtacaacgagacctcaccactgggttggtggacactgaagccaaagccaaaggaagagcttgagctggctcatttgtacgag

SEQ ID NO: 201065 - DNA, 253 bp, Glycine max
cttttacaatccaatggagaccttcgaggggctgaggagtactttcttcgtgctactatggcagatcctaatgaaggtgaaatcttgatgcagtatgcgaagctggtgtgggaaaaccatcatgacaaggataggcaatggtctattttgaacgtgcagttcaagctgctcctcaagacagcaatgttcttgcagcatatactacttttctctggaatattgaagatgatgagaatgaagatggaaaacatga

SEQ ID NO: 201066 - DNA, 253 bp, Glycine max
gaaatttcaggtacattgagaccatcaaagaagctttggaaagggaatgcctcggagttgtttcctgtgctgatatcctcgttctctctgccagagatggcattgtttcgctaggaggtccccatatccctctaaaacaggaagaagggatggtagaaggagcagagccgatgtggtagagcagttcctcccagaccacaatgaatccatttctgcagttcttgacaagtttggtgccatgggaattgacacc

SEQ ID NO: 201067 - DNA, 251 bp, Glycine max
cgaagagaacatcgttagcatcccctgccccgtgccgggatgcaggggactactggaggctgatgattgccgtgaaattctcgcgcctcgcgtcttcgatcggtggggaaaagccttatgcgaggctgtgattctgctgaagaaaaattctattgtccctttgcggattgttctgttatgttgattagagggatcgaggaaaacaatatcagagaagctgagtgtcctaactgtaggaggcttttctgtgc

SEQ ID NO: 201068 - DNA, 251 bp, Glycine max
gtttctgtctctgtgtttgcggctgaggattccgaacgagcgaccttcttcgtttctcgcaaagtttaagtcatcatgggtaaggaaaagactcacatcaacattgtcgtcattggacatgtcgactctgggaatcaactaccactggtcatttgatctacaagcttggaggtattgacaagcgtgtgattgagaggttcgagaaggaggctgctgagatgaacaagaggtcattcaagtatgcctgggtg

SEQ ID NO: 201069 - DNA, 251 bp, Glycine max
agaaataatcaccaatggcaattgaacacgaagacgatctcaaagacgagaagaaccctcgacccctcgacgaggatgacatcgccctcctcaaaacctacggtttgggaccttattccacaagcataaaaactcggagaaggaaatcaaagatatggccaagaaagtgaatgacttatgtggtatcaaggagtctgatactggattagcagcaccaagccagtgggatcttgtttctgataagcaaatga

SEQ ID NO: 201070 - DNA, 255 bp, Glycine max
ctctcatccagatcttgcaaaaaaaaaaaaacacaatggcagcaagggctcccactccacgcgaagagttcgtgtacatggcgaatctggcggagcaggccgagcgctacgaggagatggtggagttcatggaaatgtctcggcttccgccgagagcgaggagctgaccgtggaggagcgcaacctcctctccgtcgcctacaagaacgtaatcggcgctagccgcgcctcctggcgcatcatctcctccattgg

SEQ ID NO: 201071 - DNA, 250 bp, Glycine max
tgatggcttgcagacagttgtgggcttcaagagctgcttcctacctcaggatctccgtgtttcacagaagcttctctaacgttttgaatgatctgaagtatgctgattctcatgagtgggtgaaggttgatggaattctgcaactgttggcataactgatcatgcccaagatcatttgggtgaggttgtgtatgttgaattgcctgaagtgggagccaccgtgacacaaggagaaggttttggtgcagct

SEQ ID NO: 201072 - DNA, 248 bp, Glycine max
gttagggtttgtaactttgtcttttgcttgcgaatctgaatcgaataataatcaatcaatcatcatgtcgtcggcgaagaagatctcactgaagagttcggacggcgaggctttcgaggtggacgaggcggggcgctggagtctcagacgataaagcacatgatcgaggacgactgcgccgacagcggcatccctctgccgaacgtgacgagcaagatcctggcgaaggtgatcgagtactgcaagaa

SEQ ID NO: 201073 - DNA, 250 bp, Glycine max
cttgtctgagaaggaaacagatagaagctttgggttgagaaatttcaggtacattgagaccatcaaagaagctttggaaagggaatgcccaggagttgtttcctgtgctgatatcctcgttctctctgccaggatggcattgtttcgctaggaggtccccatatccctcttaaaacaggaagaagggatggtagaaggagcagagccgatgtggtagagcagttcctcccagaccacaatgaatccattt

SEQ ID NO: 201074 - DNA, 252 bp, Glycine max
  unsure (1)..(252): unsure at all n locations
gnaagaagttcaattctttactcaaactttgtgttcactctttctcttttttggtgttagttcggtgaatcatggagaacccaatcgacggtggcgagttcgtgtacctttccgggttcggcaaccacttccctccgaggccctcgccggagctctgccggtggcgcagaacagccccctcgtctgcccgtacggcctctacgccgaggcaaatctctggcacctccttcacctcccctcgcaaccggcaac

SEQ ID NO: 201075 - DNA, 227 bp, Glycine max
gctccctgctggctgttggtgctgtccatcaacatctagtgaaaacacttgagcgtactagagttgccttagtaatagaatctgctgagccacgtgaagtgcaccatttcttcacacttgttggcttttggctgatgctatatgtccatatttggctgtagaggcaatttggcgactacaggttgatggaaagatcccaccaaaaacaaatggtgaattccacacaa

SEQ ID NO: 201076 - DNA, 248 bp, Glycine max
gaaagaacgaggcggacgacgagaagcgggagtggtgttcaaggaggacgggcaggagtacgcgcaggtgctccggatgctggggaacgggcggtgcgaggcgatgtgcatcgacgggacgaagaggctctgccacatccgcgggaagatgcacaagaaggtgtggatcgccgccggagacatcatcctggttggactcagggactaccaggacgacaaggctgacgtcatcctcaagtacatgcccg

SEQ ID NO: 201077 - DNA, 247 bp, Glycine max
gagcaaattaactacacattcctctgtttttgctcccctgttaaaccaagaaacttccaatggcaccccatgcatcttcttttgctcttgttcttgtcatttttctctttgttgaaatgcacttccacgggccactgctgactatggcggctggcagggtggtcatgctaccttctatggtggtggtgatgcttctggcacaatgggaggtgcatgtggctatgggaatttgtacagtcagggatat

SEQ ID NO: 201078 - DNA, 249 bp, Glycine max
ccgcgtaacacgacacttgccccattcccttatatataactcacaattagacaaaccaagcacacctcactcataccttccgcggccaaacagagctcaaacccaacacaccacactcttgcactcaatcatggcggaaccttcctcctcgaagcccgccgtccctctcctgaaggacgagctggacatcgtgatcccgacgatccgcaacctcgacttcctcgagatgtggcggcccttcttcgagcc

SEQ ID NO: 201079 - DNA, 248 bp, Glycine max
aattaagcactctaaaacatatctttatttccttgtctacatatatcttgaaaaactcaatcatggctagtgtttcttcggtttcagctccatttagaaggcttgaggggaaggtggcgattatcactggggtgcgagtggtctaggtgcagccactgcaagactcttctctaagcatggagcacatgtagtcatagctgatattcaagacgacttgggtctctctgttgccaaagagttagaatccg

SEQ ID NO: 201080 - DNA, 244 bp, Glycine max
ttttacttcccctatggctcgtcactccttgctcttagccctcctcctcttcgccgccgtggccaccgccgcgatggcgtggcgcgtccgacgccgacgacatcctgatccgtcaggtggtgccagagttggcgaacgagagaggaggacaacctgctgaacgccgagcaccacttcgcgagcttcaaggccatttccgccaagacctacgccaccaaggaggagcacgatcatcgcttcggcg

SEQ ID NO: 201081 - DNA, 247 bp, Glycine max
ctcgagccgctcgagccgtcaatttctaattagggtttcgcttagagtaaccaataaccatgggagtctacacctttgtcgtccgcaaatccggcagcgaatggagcgccaagcaacattccggcgactcgaggcctccgccgattccaccttcgatctccaacggaagctcgtgcaagccgctctcgccgttgattcctccggtggagttcagtcctctttctctcccgtgtctcctacctccgct

SEQ ID NO: 201082 - DNA, 249 bp, Glycine max
ttctcagtctctgtgtttgcggctgaggattccgaacgagtgaccttcttcgtttctcgcaaagtttaagtaatcatgggtaaggaaaaggttcacatcaacattgtcgtcattggacatgtcgactctggaagtcaactaccactggtcacttgatctacaagcttggaggtattgacaagcgtgtgattgagaggttcgagaaggaggctgccgagatgaacaagaggtcattcaagtatgcctggg

SEQ ID NO: 201083 - DNA, 262 bp, Glycine max
ggattagaaatttttcccaaagctgatcgagaagccagccaggccagaaggagttgaagaatgggaagggggaagatcgaaatcaaaagaatcgagaacacaacaaatcggcaagtgaccttctgcaagagaagaaatgggcttctgaagaaagcttatgagctgtcagtgctgtgtgatgctgaagtttccctcatcgtcttctccagccgtggccgtctctatgagtattccaacaacaacataagatcaaccatagaga

SEQ ID NO: 201084 - DNA, 258 bp, Glycine max
gttcctccgctcaacaactataataacatctttctctctccgaacagatcacactatggccacctcaagcgccaaatcagtccatgatttcaccgttaaagatgccaagggaaatgatattaatcttggtgactacaaaggaaaggtccttatcattgtcaatgttgcctcacaatgtggcttgactaattcaaattacactgagctcagtcagttgtatgagaaatacaaacagaaaggtctggaaattctggcatt

SEQ ID NO: 201085 - DNA, 255 bp, Glycine max
agcgaagagaatggctcccaagggtttaatctttttggctgtgttatgcttctcagcactgtcactgagtcgttgtcttgcggaggataatggacttgttatgaacttctacaaggaatcatgccctcaggctgaagacatcatcaaagaacaagtcaagcttctctacaagcgccacaagaacactgctttctcctggctcagaaacatcttccatgactgtgctgttcagagttgtgatgcttcactgttgct

SEQ ID NO: 201086 - DNA, 265 bp, Glycine max
agttgttcgagatggcacgtacgaagcaaactgctcgtaagtccacaggaggaaaggcacctaggaagcagctcgcaaccaaggctgcacgtaagtctgcaccaactactggtggtgtgaagaagccacatcgttatcgtcctggtaccgttgctcttcgtgagattaggaaataccagaagagtaccgagcttttgatcaggaagctccccttccagaggctggttcgtgaaattgctcaggacttcaagactgatctgcgttt

SEQ ID NO: 201087 - DNA, 261 bp, Glycine max
gaaaacagaagaaaacaaaatggaagacacagtttctgcgttgaggtctttgatggtttctcactctccgccgctggatgccttagtggtgccctctgaagattatcacctgagcgaatatgtgtctgcacgagacaagcgccgcgaattcgtttccggcttcactggaagtgccggcttggcacttataacaaagaaagaagcactgctgtggacggatggacggtattttttgcaggctgagaaagaacttagtgctgg

SEQ ID NO: 201088 - DNA, 256 bp, Glycine max
ttttggaatcaggaaccctgaggaaattccatggggtgaggttggtgctgattatgttgttgagtcaactggtgtattcactgacaaggacaaggctgctgctcacttgaagggtggtgccaagaaggttgtcatctctgccccaagcaaagatgcacccatgtttgttgttggtgttaacgagaaggagtacaagccagagcttgacattgtttccaatgctagctgcactaccaattgtcttgctcccctcgcc

SEQ ID NO: 201089 - DNA, 253 bp, Glycine max
  unsure (1)..(253): unsure at all n locations
ctcttcttctcttgcggctagggttttagcgcagntcttctagatttaaggaagatgggtaaggaaaaggttcacatcagtattgtggtcattggccatgtcgactctgggaaatccactaccactggtcacctgatttacaagcttggaggcattgacaagcgtgttattgagaggtttgagaaggaagctgctgagatgaacaagaggtctttcaagtatgcctgggtgctggacaaacttaaggctgagc

SEQ ID NO: 201090 - DNA, 255 bp, Glycine max
tctcgagcgattcggctgagaacacatcaaactattagcaacttagcaccttctacaactttgtaatcgttcaagagttgtgaactgtgaagaatgagttcaacaagccgtgcttggacttggagcgtggcagcaagtgttggagtggtggaggccttgaaggaccagggtatatgcaggtggaacagtgtgatgagatcagcacaacaacatgctaaacataatatgaggtctttgtctcaaaccaagaagttt

SEQ ID NO: 201091 - DNA, 254 bp, Glycine max
agaagcccatacttgtgggagatagatggcacgcttgtcactgctcattttcgcgttctgcgccgtcgccgtcgccgtcgccgtcgcgggctcctccttcgatgatgccaaccctatccgtttagcgtcggacttggagtcgcaggtgctggacgtgatcggacagagccgccacgctctctccttcgcccgcttcgctcgccgccacggcaagcgctaccgttccgtcgacgagatccgcaaccgcttccgga

SEQ ID NO: 201092 - DNA, 254 bp, Glycine max
cacacacacacactctccccgaggtttgagagggtactggcatccaaaaaatgggttctaaaactaatgcttcgggccatagagcacgaaggccgctgtcaatatttgctgtgcttggtctttgctgtttcttttatcttttgggagcatggcaaagaagtggatctgggaagggagataaccttgcattgaaagttaataacctgatgactgactgcactgttttacccaatttgagttttgaatctcatcac

SEQ ID NO: 201093 - DNA, 257 bp, Glycine max
cactcactcactcacaccgttccatttctcaacaacttctgctacttcctactccaaccgcacttctgctccgcaattatcatgggcaaggtcaagatcggaatcaacggatttggaagaattggccgtttggtagccagagtggctctgcagagagacgatgttgaactcgttgccgttaacgaccctttcatcaccaccgattacatgacatacatgtttaaatacgacagtgttcatggacactggaagcatca

SEQ ID NO: 201094 - DNA, 263 bp, Glycine max
gaagatgaaaggagagcaagaattagaagatgaagaaagcttctcgcgtgctatgctgctttgcacgctccgttgtggtttccatggcgctgcaatcggcaacggagctgggcgtatttgacgtgttgcaagaagcgggggctaagctctctgcgaaagagatagcatccaagctttcctgcgacaacaaccctgaagcagactcaatgctggatcgccttctagcccttctagcctctcactccattcttaactgttctctc

SEQ ID NO: 201095 - DNA, 260 bp, Glycine max
ttgtttgttgttgtaactcgttcttcttcttttgttgttctgtgtttgtgtttgtttttttctctcacctgaaaatgtcttgctgcggtggtaactgtggttgcggaagctcctgcaagtgcggcaacggctgcggaggctgcaagatgtacccagacttgagctacactgagtcaaccaccaccgagaccttggtcatgggagtggcacctgttaaggctcaatttgagggtgctgaaatgggtgtgcccgctgagaac

SEQ ID NO: 201096 - DNA, 258 bp, Glycine max
taaacactcatctatgactacctttccctcccctccttcaccatcttcttcttcttcaattccttctccaagatctagcatgttttactatgctggaagtgaagatcactctgaggagcctcacttcctccaagcttgttttctttgcagaaaaccactcggccaaaaccgtgacatcttcatgtacagagggaacacaccattttgtagcaaagagtgcagacaggaacaaatagagattgatgagtcaaaggagaa

SEQ ID NO: 201097 - DNA, 251 bp, Glycine max
atgaaactccaactccactattgaagtacagaaaagaagaattggaaaatctaagaggagatggaaaaggagagcgcaaggactatgataggatctatgattatgatgtctataatgatttgggtaacccagacaagagcaatgatctagctcgtcctgttcttggagggtctagtgcctatccatatcctcgcaggggaagaactggtagaaaaccaacaacaaaagactctaagagtgagtcaccatcc

SEQ ID NO: 201098 - DNA, 254 bp, Glycine max
catcaccatcttcttagcagtgaggtgaagtgaggtgactgcaatggcttctgcttgtgtgaccttgaaatccaatacccatttagcaaactctgagaagggctttctaggagaaagaataaaaggtggcttcaacaacagtgccttggtaatgaatcagttggctatacgttctagaagccacaagagggtgaaacatggtgttggtgttgtatctgctgttctcacttcaaacaatgccaaagaatcactga

SEQ ID NO: 201099 - DNA, 258 bp, Glycine max
gttcaagagaattctatattatcaggttgctcttgtttatgttcttacaagattggttctcaacgtttcacaggcataccttgctttctttgtcatcaatgacctacaaatggcccaatcagccaaagctttggttcctgctctcatatacatctgcagctttgttgtgtctatagcattacaggagattgcatggactggccgaatgcttaaggcctactactctgctggatgcattctttggattttttgtggtgc

SEQ ID NO: 201100 - DNA, 251 bp, Glycine max
aattgggtatgctcttgtccctatgattgctaggggagtgatgttgggtcctgaccagcccgtgatcctccacatgcttgacattcctccggcagcagagtcattgaatggggttaaaatggaattggtggatgctgcattccctcttcttaaaggtgttgttgccacaactgatgtggttgaggcatgcactggggtcaatattgccgtgatggttggtggattcccaagaaaagaaggtatggagagga

SEQ ID NO: 201101 - DNA, 249 bp, Glycine max
cgaatatcttgttgtttggagcgatccgagaaaaactctgtaaacatgttggtttaccaggacctccttacaggtgatgagcttctctctgactccttccgttacaaggaaattgagaatggaatgctgtgggaagttgaggggaagtgggttgttaaaggagcagttgatgtagacattggtgcaaacccttctgctgagggtggaggagaagatgagggagttgatgatgcagctgttaaggttgtt

SEQ ID NO: 201102 - DNA, 249 bp, Glycine max
ggggcctcttccccgggcgtcgaacagtcaactcagaactggtacggacaaggggaatccgactgtttaattaaaacaaagcattgcgatggtccctgcggatgttgacgcaatgtgatttctgcccagtgctctgaatgtcaaagtgaagaaattcaaccaagcgcgggtaaacggcgggagtaactatgactctcttaaggtagccaaatgcctcgtcatctaattagtgacgcgcatgaatggatt

SEQ ID NO: 201103 - DNA, 251 bp, Glycine max
gggtcaaagaagtagcacctggaagccctgaatattcagcctgtgatatggggtacctcaattcagttttgtcctcttcaagccaggttcatgctgcagaagattcacctgtcagtggagggggcctcagtcagaatggaaaattcagctatgggtatgctagctcccctggcaagagatcttcaatggaagatttttatgagacaaaaattgatggtgttgatggtgaaattgttggcctttttggagtt

SEQ ID NO: 201104 - DNA, 259 bp, Glycine max
ctctctctctagggtttgatcagactcaagggtttaagccatgggaaaaaggaaggcaaaggcaaagcctcctccaaagaagcgaatggataagctcgataccgtcttcagctgccctttctgcaatcatggcagcagcgtcgaatgccgccttgacatgaagaacttgataggggaagctatttgcgggatatgccaagagagctttagcactaccatcacagctttatcagagccaatagacatatacagtgagtgg

SEQ ID NO: 201105 - DNA, 253 bp, Glycine max
gtggacaacattggcaacccaacaatggtcttcttatgactaatgatatctcgggcgtcaaccttgaagaagcagtaccttgcattgccctctcaaaaaatgactcatacgttatgtctgcctgtggtggaaaggtttctctatttaacatgatgacattcaaggtaatgacaacattcatgccgccgcctcctgcttctaccttcctagctttccatccccaggataacaacattattgccattgggatgga

SEQ ID NO: 201106 - DNA, 253 bp, Glycine max
ctccgcactccgtcttcatcaatcagcatcaccaccgctccaacacaggggaaaatgagggagatccttcacgttcagggagggcaatgcgggaaccagatcggttcgaagttctgggaagtggtgtgcgacgagcacggcatagatccgacggggaagtacgtcggaaactcagatctacaactcgagcgcgtgaacgtgtactacaacgaagcttcctgcgggcggtttgtcccacgcgcagtgctgatgg

SEQ ID NO: 201107 - DNA, 248 bp, Glycine max
gagcgaagagaatggctcccaagggtttaatctttttggctgtgttatgcttctcagcactgtcactgagtcgttgtcttgcggaggataatggacttgttatgaacttctacaaggaatcatgccctcaggctgaagacatcatcaaagaacaagtcaagcttctctacaagcgccacaagaacactgctttctcctggctcagaaacatcttccatgactgtgctgttcagagttgtgatgcttca

SEQ ID NO: 201108 - DNA, 249 bp, Glycine max
gggagtcagagaaaccctaggtaagaagaaaagatgccggctggtcatggtttgagatcccgcaccagagattccttctctcgtcctttcaggaagaagggaaccatcgccctcaccacatacctgagaacctaccacgtcggcgactatgttgacgtcaaggttaacggtgccgttcacaagggaatgccccacaaattctaccatggccgcaccggacgcgtctggaatgtcaccaaacgtgctgtt

SEQ ID NO: 201109 - DNA, 249 bp, Glycine max
ctcgagccgctcgagccgaatcggctcgaggagattgaggcgggggttgatttggaagaacacccagctacggtaattcctcgcaacccctaactcaaccttcaaaggatcatcatgggcagtcacaatgctttggctgccactttcggaatattaggtaacatcatttctgtgatggtgtacttggctccggtgccaacgttttaccggatatacaaaaagaaatgcacggacggtttccactcgctg

SEQ ID NO: 201110 - DNA, 239 bp, Glycine max
gagtgggtggattgagagaactgtgcaagctttggaacttcttcaaagtctggtacttcaatggctactgaagaggttaataaacttcaatcacttcctccttaccctgagatgatagtgaaagcacttgaagccctgaatgaggctgatggatcgagtaaatcagcgatatcaaagtacatagaaaccacctacggtgagttgccagatgaaactgttttggggagtcacctgaacaa

SEQ ID NO: 201111 - DNA, 255 bp, Glycine max
cggatctcttcttcagtggtggaagctactagaacactagtttgttgagcactgcgatgaggaagtggacggttgcttccgctctccttcttctctctctcctctttctctttgcagatcaaggtcgaaagtttcaggcgaatgccgagggagattccgacgagcttgtagatcctccgaaggtggaggacaagatcggtgctgtgcctcatggcctttccaccgattcagatgtcgtcaagagggagtcggagt

SEQ ID NO: 201112 - DNA, 254 bp, Glycine max
tgtcattgttgtattgcatgggcgagttgaggatgttgaaattgatgaagaggtggatgttataatttcagaatggatgggctatatgcttctatatgagagcatgcttggaagtgttattaatgctagagatcgttggctcaaacctggtggtcttattcttccttcaagtgcaacgttgtacatggctcctgtcacacatacggacagatacagtgacagtgttgacttctggcgcaattttatggaattga

SEQ ID NO: 201113 - DNA, 257 bp, Glycine max
ctttattccttttgtaatttcattcattcttaatctttgtgcaaaataatgttcatcgagaattttaaggttgagtgtcctaatgtgaagtacaccgagactgagattcagtccgtgtacaactacgaaaccaccgaacttgttcacgagaacaggaatggcacctatcagtggattgtcaaacccaaatctgtcaaatacgaatttaaaaccaacatccatgttcctaaattaggggtaatgcttgtgggttgggg

SEQ ID NO: 201114 - DNA, 250 bp, Glycine max
ctttcttcctcttcctcagtagtgcgattttcgattctcttctactgcaactatgcctaaccctaaggtcttcttcgacatgaccatcggcggtcaacctgccggccgcatcgtgatggagctctacgccgacgtgactccgagcaccgccgagaacttccgcgcgctctgcaccggcgagaagggcgccgggcggagcggcaagcccctccactacaaaggctcgtccttccaccgcgtgatcccgaac

SEQ ID NO: 201115 - DNA, 249 bp, Glycine max
ctcgagccgggaatatgctatggaggccattgggaatgctggtactgcaatagggatcttgtcaaaagatggggtagttctggttggtgagaagaaagtcacatccaagctgctgcaaacctcaacttccaccgagaaaatgtacaagattgatgatcatgttgcatgtgccgtggctggaattatgtctgatgctaacatcctaatcaatactgctagagttcaggcacagcgctacacgtatgctta

SEQ ID NO: 201116 - DNA, 243 bp, Glycine max
gtttctgatgttccttgttctgcacatagcttggcttgtagcatcatcggatctccgagctggcttttactcaaaaacatgtccaaaagcggaagtcatagtccgagatgtgatgaagaaagcccttatgagggaagccagaagtgttgcctctgtcatgcgcttccagttccatgattgctttgtgaatgggtgtgatgggtctatgttgcttgatgacacagcaacgatgcttggggagaa

SEQ ID NO: 201117 - DNA, 244 bp, Glycine max
gtggatacctaggcacccagagacgaggaagggcgtagtaagcgacgaaatgcttcggggagttgaaaataagcgtagatccggggattcccgatataggtcaacctttcgaactgctgctgaatccacgggcaggcaagagacaacctggtgaactgaaacatcttagtagccagaggaaaagaaagcaaaagcgattcccgtagtagcggcgagcgaaatgggagcagcctaaaccgtgaaa

SEQ ID NO: 201118 - DNA, 249 bp, Glycine max
gggatctgaatggcgacgagaaatcgcactctgcttttcagaaagcacagagatgcgttgaagagtgttcgaattccctcattctcttcggcgccgtccaccgcttccggcgccggcggtggccccgtcatcgaattggccaccacttcatttctcaattccaatcgctcttacactccgatcagtaccgatgatcccggcaattcaaggggtccaaatgcaattactgtggggctacctccggtgtgg

SEQ ID NO: 201119 - DNA, 255 bp, Glycine max
aagcttcacaattcacattcccaccaacggaaccatggcctccgtgtacagctgtacggagtgcggatccaacctgaatcttaactccgctcatgcctaccctccagacttctacttcgaagccggcaacaagggctccgtctccttctccgccgtaggaccccaccaagttcaagttcgagaaggaggacaagcttcgccccttcttcgaaaccgtcaactactggggaatccagaggaagaggaccaagatca

SEQ ID NO: 201120 - DNA, 250 bp, Glycine max
  unsure (1)..(250): unsure at all n locations
anaaagcacaagctcaagcgtcttgtgcagtcaccaaactctttcttcatggatgttaagtgccagggctgcttcaacataacaactgtgtntagccactctcagactgttgtggtttgcggaaactgccagactgtgttgtgccaaccaacaggcggacgggcaaggttaaccgaagggtgctcttttaggaagaagggagattgaatggtttgttaaccagacttttctttgtcaatgattgaaaatt

SEQ ID NO: 201121 - DNA, 248 bp, Glycine max
atctattattcttctactttttggttcttatttcctttgccttcacaaccattatagtacaaaaaataagaaagaaacccaagaaaactgatgacacaacttgtaaaataccccatggtcctagaaagctacctattataggaaatatatacaatctgctatgctctcaaccccatagaaaattaagagacctggccataaaatatggacccgtgatgcatcttcaacttggacaggtttcaactatt

SEQ ID NO: 201122 - DNA, 245 bp, Glycine max
agatttgtgatgggtcctgttcaattgcttaagctttatggcattccctatgtgatttttgttatgtggttggatttggtgacttatttgcatcaccatggccatgtagacaagttaccttggtatcgtggagaggaatggagcttccttaggggtggccttacaactattgatcgtgactatggatggatcaacaacattcaccatgacatttgaacccatgtcattcatcacctctttcctca

SEQ ID NO: 201123 - DNA, 246 bp, Glycine max
tgcttataacttttttctctttctctcaattcaattaccttctcccctacgaatctcttctccacgtatcggagactttggggaacaagatgaatgcgatcgcgttgtgcttgttagtgtcgaccctgttggtttctgcggtgtattgtgcaccgaatgctgggctccgtaggattgggctgaagaagattaaattggaccctaaaaacaggcttgctgctcgagttgggtccaaggatgttgatt

SEQ ID NO: 201124 - DNA, 244 bp, Glycine max
gcgatttagaagtgagagaagatggggttgtcgttcacgaagctgttcagcaggttgtttgcgaagaaggaaatgaggattctgatggtaggtctcgatgctgctggtaagacaaccatcttgtacaagctcaagcttggagaaatcgtcaccactatccccaccatcggatttaatgttgagactgtggagtacaagaacatcagcttcactgtgtgggatgttggtggtcaggacaagatcc

SEQ ID NO: 201125 - DNA, 246 bp, Glycine max
aaaagacccaaatgaaccaaccggtttctcattccagttctgcaacataactgcagattctgatcttataccttctgttggaaccgcacaaacgtacctggggagaccctggaagagttactcacgaaccgttttcatgcaatcgtacatgagtgaggtgataggggcagaagggtggttggagtggaatggaaactttgcattggacacattgtactatgctgagtacatgaacactggagcagg

SEQ ID NO: 201126 - DNA, 252 bp, Glycine max
tgcagcagccacacttcttcgccgtttcagctgaagagccatccgcaggtaagcaatggttaagcataataatgttatccccaatgggcacttccggaaacactggcaaaactatgtgaagacttggtttaatcaaccagcccgaaagaccagaagacggttggctcggcagaagaaggctgtcaagattttccccaggcctactgctggatctctcaggcctattgttcatggccagactctgaaatacaa

SEQ ID NO: 201127 - DNA, 249 bp, Glycine max
gcatcaccgcaagtccacaacatggctgccactgccgctgcaggcatagcttccttgttttcttcttctattaacagtgtcaaatgtcttcgttcctccaagaactgctccattatagacccccttataaccacagtgccctcaaaccgtggcatgtttgtgtcacacttggtggaacctttgtccattgggggtgccattaattcgcacaagttgtgggggcctagaatttctgctgctgttgcacaa

SEQ ID NO: 201128 - DNA, 249 bp, Glycine max
agaaaagtcaaagacaatgtcagggatcattcacaagattgaggagacccttcatgtgggaggccacaagaaggaggaggagcacaagggtgagcagcaccatggtggagaatacaaaggggagcatcatggtgaacacagtactgaatacaaaggagagcatcatgttggtgagcacaagccggagcaccatggaggagaagagcacaaagaggggttcctagacaagatcaaggacaagatccacgg

SEQ ID NO: 201129 - DNA, 245 bp, Glycine max
tctctcctctcattttcatttctacatccctggctctgttccgtcgatgacgatggcgtttagggtgcgaaaccctgacctccgctttctcattcttctctctctcttgtccatcacttccgccaaggtcttcttcgaggagcgtttcgatgacggatggggaaatcgttgggttaaatcagattggaaaaaagatgagaacctggctggggagtggaaccacacctctggccaatggaatggag

SEQ ID NO: 201130 - DNA, 244 bp, Glycine max
cctctctctatctctcacacacactttctctctctctctctctcacccagatcttgtagcaatggcgagcgctcccactccacgcgaagagttcgtgtacatggcgaagctggcggagcaggccgagcgctacgaggagatggtggagttcatggagaaggtctccgcctccgccgagagcgaggagctgaccgtggaggagcgtaacctcttctccgtcgcctacaagaacgtgatcggcgct

SEQ ID NO: 201131 - DNA, 245 bp, Glycine max
ctcgctttctctctccccgcgatggagaaagccgagagctccgcctccacatcggagccagactccgacgagaaccaccaccgccacccgacgaaccaccacatcaaccctccctccggcctcatcccctccgtcgccgagcaccactcctacctcgtcggctccgggcaatgctcctcactcctcgcccagcgcgtccaagcgccgcccgacgccgtctggtccgtcgtccgccgcttcgacaa

SEQ ID NO: 201132 - DNA, 245 bp, Glycine max
tgcgattcatcgacgaccacaactcccaagaggaccgaacctacaagctcggactgaaccggttcgcggatctcaccaacgaggagtacagggccaagtacttgggaaccaagatcgatcccaaccggaggctcggcaagaccccgagcaaccgatacgcgccacgtgtcggcgacaaactacctgaatcggttgattggaggaaggaaggtgctgttcctccagtcaaagaccaaggaggctgt

SEQ ID NO: 201133 - DNA, 248 bp, Glycine max
ctctactcttctttcactttccatttccattttcattttttctggttcactttctcgatggcctccgagaaccccaccgccgacgacgccgtcaacggcttcaatcggccggaaatgttctcggaaaacctcgccggcaccgtcgacgcctacgaccgccacgtgttcctctgctacaagagtcacctgtcctggcccccgcgcatcgaggcctccgacgccgatcccttccccaagcgcgtcgccgc

SEQ ID NO: 201134 - DNA, 249 bp, Glycine max
ctcgagccgagcaattcaaaatgacaatttgaagggtcccataacaacggattcagggtacatagccacaccttatgactatggagcaggggcaattacaacatctgaaccattgcaaccggggctagtttatgaaaccaacaacgttgactacttgaactatttgtgttacaatggacttaacataaccatgataaaggtcatctccggaactgtccccgagaatttcaattgtcccaaggattcgag

SEQ ID NO: 201135 - DNA, 249 bp, Glycine max
actcgagccgattcggctcgagacgagattgaggcgggggttgatctggaagaaacccagataaggtaattcctcgcaacacctaactaaaccttcaaaggatcatcatgggcagtcacaatgctttggctgccactttcggaatattaggtaacatcatttctgtgatggtgtacttggctccggtgccaacgttttaccggatatacaaaaagaaatgcacggacggtttccactcgctgccatact

SEQ ID NO: 201136 - DNA, 243 bp, Glycine max
  unsure (1)..(243): unsure at all n locations
gcaattacacggttcaatgaaaagtcggtgataaacaaacgaagtctctgcaaaacgcgatcgattcttctgtcgagagatgaagctcactgcactgaattctacggttcgccgcgctctgctcaatggccggaaccaaaacggtaaccgcctcggttcagcggcgctgatgccgtatgcggcggcggaaacgaggctcctctgcgccggaggcgnaacggatggttcttctactggaagagg

SEQ ID NO: 201137 - DNA, 244 bp, Glycine max
cggctcgagtttccattctcttcaacctaacgcagcatcgctatactcttcattccatggctttgcccaatcagcaaaccgtggattaccctagtttcaaactcgttatcgtcggtgatggtggcacaggaaagacaacctttgtgaaaaggcatctcaccggagaattcgagaagaaatatgagccaaccatcggtgtggaggttcacccattggattttttcacaaactgtggaaagattcg

SEQ ID NO: 201138 - DNA, 250 bp, Glycine max
tgctggaaaggagggtgtttcagctctgacattcttgccgcaattgaaagggcaatattggacaacgtgaatgttctttctttatctctcggtggtggcatttctgattattacagagacagtgtcgctattggagctttttcagcgatggagaaagggattttggtttcatgctccgctgggaactcgggtccgggtccctacagtctctccaatgtggctccatggatcactaccgtaggcgctggta

SEQ ID NO: 201139 - DNA, 248 bp, Glycine max
tcttaatttctctctgccttgctcatttacacacctctccaacctttcactttcagctttatttgaatccctctctctcctttccaaatggccagcgttgaggttgcacatcaaacaccaacaacagttccagaaaatgaaacaaccgaggtaatcaagacccaggaaacaaccccggaaccagtaccagccactgaggctcctgcaacagaacaagcagcagctgaggttcctgctcaagaagaaca

SEQ ID NO: 201140 - DNA, 165 bp, Glycine max
  unsure (1)..(165): unsure at all n locations
cgaaaactccttatggtcaccttcaaaaccagtcaaccaacgtgatgctgatctcatcatttttgggataagtccgaaagctcctgagttncctcagaaatgagtcgacaatttgagcatgatctgatgagtagcacaggaactatggagcttattgatgaaggt

SEQ ID NO: 201141 - DNA, 246 bp, Glycine max
  unsure (1)..(246): unsure at all n locations
aatttccattacgtcccctctttccgcttttgaacgttttctctgtgtgtctcgctagggcaaaaaccatgaacatcttcaggctcgccggtgacatgacccatcttttcagcattctcgtcctcctcctcaaaatctacgacattanatcatgttcagggatttctcgcaagactcaagagctgtacgcgattgtgttcgtggcacgctatttggatctgttcacggacttcatatccgtttaca

SEQ ID NO: 201142 - DNA, 244 bp, Glycine max
aaacaaaccccgacttctggaagggatgcatttattagataaaaggtcaacacaggctctgcctgttgctttgatgattcatgataactcgtcggatcgcacggcctttgtgccggcgacgcatcattcaaatttctgccctatcaactttcgatggtaggatagtggcctaccatggttgtgacgggtgacggagaattagggttcgattccggagagggagcctgagaaacggctaccacat

SEQ ID NO: 201143 - DNA, 242 bp, Glycine max
gaacgctgctgccgaaacccttcccgatccctaaggtaagtgagtaatcggtggttgagaatggtgagagaaggcgaagggtaggaaggaggaggtggttaccagagagtacaccattaacctccacaagcgcctccatggctgcacatttaagaagaaagctcctaaagctattaaggagataaggaaatttgcccaaaaggccatggggaccaatgatgtgagggtggatgtgaagttga

SEQ ID NO: 201144 - DNA, 243 bp, Glycine max
gtgtatttccctacctctcccttcaagatgcagatattcgtcaagaccctcaccggcaagaccatcacccttgaggtggaaagctctgacaccatcgacaacgtcaaggccaagatccaggacaaggaaggaatccccccggaccagcaacgtctcattttcgccggaaagcaacttgaggacggccgtacccttgctgactacaacattcagaaggagagtactcttcacctcgtcctccgt

SEQ ID NO: 201145 - DNA, 241 bp, Glycine max
ttctacacatccctagctctgtcgttccgtcgttgacgatggcgtttcgggtgcgaaccctgacctccgctctctctttcttctctctctcttgtccatcgcttccgccaatgtcttcttcgaagagcgtttcgatgacgggtgggaaaatcgatgggttaaatcagattggaaaaaagatgagaacgtggctggggagtggaaccacacctctggtcaatggaatggagacgctaatgac

SEQ ID NO: 201146 - DNA, 244 bp, Glycine max
cttgaaaaaactgctcatgatgattaccggaaacttgcctctgcaatctatcttcaagtgagcactattagtcaggctcttatatttgtaactcgatctcgaggttggtcttatgttgagcgtcctggtttattgctggtgtttgcttttgttgttgctcaactgattgccactttgattgcagtatatgccaattggagctttgctgcaattgaaggaatcggttggggttgggctggtgtta

SEQ ID NO: 201147 - DNA, 246 bp, Glycine max
ttttgaagctggtatttccaaggatggacagactcgtgaacatgctctgctttcattcacccttggtgtgaaacagatgatttgcagctgtaacaaaatggatgctactacacccaagtattccaaggccaggtatgatgaaattgtgaaggaagtctcttcctacttgaagaaagtaggatacaaccctgacaagattccttttgttcctatctctggttttgagggagacaacatgattgagag

SEQ ID NO: 201148 - DNA, 243 bp, Glycine max
cagagaatggctcctcggtctagcagcaaggacgcccaagaccttttccgcgctctttggtctgcttatgctacaacccccactaatctcaagatcattgatctctatgtcatctatgccgtattcaccgctttcatccaggttgtttacatggctttggttggatcatttccatttaactccttcctatcaggagtactttcttgtgtaggaactgctgttcttgctgtttgtctcaggatc

SEQ ID NO: 201149 - DNA, 246 bp, Glycine max
aaaaaaacatcatttgaaccaagtgaagttgagttacaagcttataaaatgggtttttcttggataagagggaagtgcattggtaagggcgcgtttggcaccgtcagcgtcgcgcttcgcaaacgcgacgatcaaactcaaaatttcgcggtgaagtccgtggatttaaaaacgggtctcccgggtcagctcgaagcgttggagaatgagattcggattctccggcgcatgtcatctccgcacgtg

SEQ ID NO: 201150 - DNA, 245 bp, Glycine max
ctgctgaaacacgccacactcttcttaccatgggcctcctcgatcacttgtgggatgacaccgtcgccggtcctcgcccggagaacggccttggcaagctccgaaagcaccacaccttcgctttccgatctgcctccggcaaggaatcagacagcggaagcgtgaaatcgtacggtgaagatttgccggaggatgcggtgagagtgacgcgaagtatcatgatcgtgaaaccacctggtggtaac

SEQ ID NO: 201151 - DNA, 243 bp, Glycine max
gttactatctataattaattaaattcctcgtggaatattgaagaagccatgtctacagctgggcaggtcatcaagtgcagagctgcggtggcatgggaagcagggaagccactgtcaatagaaaccatagaagtggcaccaccccagaaaggtgaagtgcgtttgaggatcctcttcaactccctttgccgtagtgatgtttattggtgggatgctaaggaccagactcctctgtttcctcgt

SEQ ID NO: 201152 - DNA, 246 bp, Glycine max
cttcttctcatcctcacaaatacaattatacaaacacatattcattctcctcacataccaaaattaaattatttttcttgttattttccctttgctaacggaaagccatgaaattcgggaagagcctgagcagccagatcgagaaaaccctgccagagtggcgcgacaagttcctctctaacaaggagctcaagaagaagctcaagcaattcgaccctcccgcccccgcctccgccgccgatgaac

SEQ ID NO: 201153 - DNA, 242 bp, Glycine max
gccgtttcagctgaagagccatccgcaggtaagcaatggttaagcataataatgttatccccaatgggcacttccggaaacactggcaaaactatgtgaagacttggtttaatcaaccagcccgaaagaccagaagacggttggctcggcagaagaaggctgtcaagattttccccaggcctactgctggatctctcaggcctattgttcatggccagactctgaaatacaacatgaaagtc

SEQ ID NO: 201154 - DNA, 243 bp, Glycine max
aggcactcctaaaagctgtggcaaatcaaccagtttcagtttatattgatgcaggagcaattgctttcaaattttactcaagtgggatttttgaagcaagaaattgtggaactcatctagaccatgctgttgcagttgttggttatggtaaacttcgtgatggtacaaagtattggctagtaaaaaattcatggagcactggcatggggtgagaaagggtacatgaggatcaagcgagacata

SEQ ID NO: 201155 - DNA, 239 bp, Glycine max
gtcccaccacttggttttcataacccattctccatctcagaatggagaatgcgagaataagccagtggttgatccttctggtgtgtgcgctgctgttgctgatatcagaagcttcttatgtgccaatcactaacgttcagaacgcggtagcaaaaggagctgtttgtttggatgggagtccaccagcttatcattttgataggggatttggatcagggattaacaattggttggttgca

SEQ ID NO: 201156 - DNA, 243 bp, Glycine max
actacctacccatgggaaagattgccctagccaatgtcctcttggtccttctcttgaacttgagcactttgctcaatgttcttgcttgtacctattgcccttacccatctcccaagcctcctccaaaaaagcctcccattgtgaaaccaccagttcacaaacaaccaaaaccatgtccaccacccaagtcatctccaaaaccaccccatgtacacccaccctatgtcccaaaacctcctcact

SEQ ID NO: 201157 - DNA, 246 bp, Glycine max
acgaaatatggcttcaactcatctgcttcccctagcaaccttcttcttacttctctccgcttcttatctccagattgctggggcggaagcacaaccgttgactagtctcaagcttaactctcatattcttcaggagtctactgctaaagagattaatgaaaatcccgaggcaggatgggaggctgctataaatcctcgtttctccaattatacagttgaacaatttaagcgccttcttggagtcaa

SEQ ID NO: 201158 - DNA, 242 bp, Glycine max
gttattatcaaataattaattaaattcctcgtggaatcttgttgaagccatgtctacagctggtcaggtcatcaagtgcagagctgcggtggcatgggaagcagggaagccactatcgatagaaaccatagaagtggcaccaccccagaaaggtgaagtgcgtttgaagatcctcttcaactccctttgccgtacagatgtttactggtgggatgctaagggccagactccgctgtttcctc

SEQ ID NO: 201159 - DNA, 239 bp, Glycine max
ctacttgaagtatgataactgtgagaataacaatataagccccaaagaaaggtaccctccaatgagtgaagctttggcaaacactggaagaccaattttcttctctttgtgtgaatggggatcagaagatccagcaacttgggccaaaagtgtgggaaatagttggagaacaacaggagacattgaagataagtgggaaagtatgatatctcgtgcagatctaaatgacaaatgggctt

SEQ ID NO: 201160 - DNA, 242 bp, Glycine max
ggttggttctgttgcggttaatcttggtcagattactctctctaacaaccagctttctggggctctgtctccctccattggtaacttctccagcgtgcagaagctccttcttgatggcaacatgttcaccggtcggatacctacacagattgggaggttgcaacagctttctaagattgattttagtggcaacaagttctcgggtcctattgcgcctgagatcagtcagtgtaagctgttaa

SEQ ID NO: 201161 - DNA, 245 bp, Glycine max
aacgaagattcctgcggaatccgcgtcaccggcatgcaattctcctacgacgtgcagcaaccgccgctcttcctcgacttcaacctcaacgtctctcccggatcccgctgcctcctcgtcggtgccaatggatccggaaagacgactttgctgaagattctggcggggaagcacatggttggaggtagagacgttgtgcgcgtcttgagtggttccgcttttcacgacactcagctcgtttgtag

SEQ ID NO: 201162 - DNA, 279 bp, Glycine max
tcccttgcaatgcagatgcctatcagtcctcagcacttccttcccaaggggcattccggcctgaacttacccaaattatgagtcaattggttcagttcctcaactcaaacggttcgccatttgttgttaatatatacccctttcttagcctttataacaatggagatttcccccaagagtatgctttcttcgagggaactactacatgctgtccaagatggttccaatgtttacaccaatgcatttgagggaactatgacactttagttgcagccctca

SEQ ID NO: 201163 - DNA, 277 bp, Glycine max
caagaagaagggtctctattctctaatttacctctgcagggcttgaaaccatgactttggtagagagagttgtggttttgtttatagtgatgacaattgtgaaggtttcatatgcagctgtatacaaggttggcgactctgctggttggactacccttggcaccatagactacagattataggctgctaccaagaacttccaaattggtgacactatcatattcgagtacaatgccaattccacaatgtgatgcgaatgacgcatgccatgtacaag

SEQ ID NO: 201164 - DNA, 272 bp, Glycine max
taagattttataatttaacttttttggggtgtgattaaaagagaagctagctaaaaaaaatgggttcagcatccgaaagtgtttgcgttacaggagcttctggtttcatcgggtcatggcttgtcatgagactcatcgagcgtggctacaccgttcgagccaccgtacgcgacccagtaaacatgaagaaggtgaagcatttggtggaactaccaggcgcaaagagcaaactgtctctgtggaaggctgatcttgctgaagagggaactttg

SEQ ID NO: 201165 - DNA, 277 bp, Glycine max
ctcgagcgctcgcatgaagcggattcttgttgattacatgttgaggatgtcatactatgacactgcagtgaaacttgccaaaagcagcaacttgcaggatcttgttgatattgatgtattccaagaagcaaaaaaggttattgatgctttgcaaaataaggatgttgcacccgccctagcatggtgtgctgataacaaatcaaggctgaagaagtctaagagcaaaatggaattccagttgagacttcaagagttcatagaattagtaagagctgag

SEQ ID NO: 201166 - DNA, 273 bp, Glycine max
gagtgagtgagtgagcaagagtgaagagcgaagagaatggctcccaaaggtttaatcctttttggctgtgttatgcttctcagcactgacactgagtcgttgtcttgcggaggataatggacttgttcatgaacttctacaaggaatcatgacctcaggctgaaaacctcatcaaagagcaagtcaagcttctctacacgcgccacaagaacactgatttctcctggctcagaacatcttccatgactgagctgttcaagttgtaatgcttca

SEQ ID NO: 201167 - DNA, 271 bp, Glycine max
gaagggttggttggtcccattccataggaagagatcaaagagaagagaaaagatgtttgagccgcagcagctatacactcgagcgaagaccgaggaattcgacctcgaatcaggggaaaccctctacccagggctgagcgtcggcgagaaccagctccgatggggcttcatccgcaaggtctacggcatcctctccgcccagatcgtcctcaccaccctcgtctctgtcaccaccgttttctatactccaatcaatgacctcctcaagggc

SEQ ID NO: 201168 - DNA, 274 bp, Glycine max
ggctgaagatctttttgtagagcacattttgtcccttactgaagccttatgtggcttccaatttgtgctgactcacttggatggccgtcagcttcttattaaatcaaatcctggggaagttgtcaagcctgattcatacaaggctataaatgatgagggaatgcccatgtatcagaggtcattcatgaaggggaagctttacattcacttcactgtggagttcccagattccctaaaccctgaccaggttaaggccttggaagctgttctgcca

SEQ ID NO: 201169 - DNA, 290 bp, Glycine max
ctagggttatcatttctccatttccattttctctctcacttttcaagaatcgtaagctatgggaaagtcttacccaactgtgagtgctgattaccagaaggccgttgagaaggcgaagaagaagctcagaggcttcatcgctgagaagagatgcgctcctctaatgctccgtttggcatggcactctgctggaacctttgacaagggcacgaagaccggtggacccttcggaaccatcaagcaccctgccgaactggctcacagcgctaacaacggtcttgacatcgctg

SEQ ID NO: 201170 - DNA, 277 bp, Glycine max
ttcactctcaactttactcctcttcaatcagttgcatattctttgctattccaatggccactgttgaggttgtgtcagccaaggttgccctcccagaggacacaaaagaggcatcattgaaggttgacgaggagaagaacacagaagatgttgttgagactccaacaccagaaactgtggtcactgagcaaaccaaggaggaaagtactgaggccccacgacctgcagcttcagaagacaagccctcagttgaagttcagactaaagaggtggcaga

SEQ ID NO: 201171 - DNA, 274 bp, Glycine max
cttttctcatgacctcttcttcttcttcttcttaatatataatataaatataaacattcttttgatattgttcctgagttgaacaagttcgtggaattttgcacctttttaggtcataatcctttcaaaattccgtgcttcggcttgacatcgatttctctgcacttcccaaagaattggttgtgcagtccttgttttcagacaccgtctttaagttactgtcgacgtttgagttctataatgcccagtgattcttctgtaatctccaatggac

SEQ ID NO: 201172 - DNA, 278 bp, Glycine max
ctctctctttttcccaattttcgaatctctctcctccatggacccaacttcgatccctccccctccggccaccaccgtccccttcactgtcgaacccagcaatcacgtgacccccgccgacaacaccaacaccaaccaccctccttacgatgagatgatatacacagcaatcggggctctgatcgagaaagatggttcgagcaagcgagccataggaaagtacatggaacacgtgtacaaggaccttccacccacccactctgctcaagatgactcac

SEQ ID NO: 201173 - DNA, 272 bp, Glycine max
caaaatggccaaatcaatcaaattctttgagttgaacacaggggccaagattccttctcttgggttagggacttggcaagctgaacctggtgttgtagctgaagctctcaccacagccattcaggttggatacaggcatattgactgtgctagtgcgtataagaatcaagcagagattggttctgctcttaagaagctttttgatgatggtgtggtgaagcgtgaggacttatggatcacttccaaactctggtgttcagatcatgcaccag

SEQ ID NO: 201174 - DNA, 269 bp, Glycine max
cggatctgaatggcgacgagaaatcgcactctgcttttcagaaagcacagagatgcgttgaagagtgttcgaattccctcatactcttcggcgccgtccaccgcttccggcgccggctgtggccccgtcatcgaattggccaccacttcatttctcaattccaatcgctcttacactccgatcagtaccgatgatcccgtcaattcaaggggtccaaatgcaattactgtggggctacctccggtgtacgtggctttatcagcagaaat

SEQ ID NO: 201175 - DNA, 272 bp, Glycine max
ctttgtgttcactctttctcttttttggtgttagttcggtgaatcatggagaacccaatcgacggtggcgagttcgtgtacctttccgggttcggcaaccacttctcctccgaggccctcgccggagctctgccggtggcgcagaacagccccctcgtctgcccgtacggcctctacgccgagcaaatctctggcacctccttcacctcccctcgcaaccgcaacctcttcagttggttttatcggatcaagccatcggtgactcacgaacc

SEQ ID NO: 201176 - DNA, 271 bp, Glycine max
cacgagattgaggcgggggttgatttggaagaaacccagctaaggtaattcctcgcaacccctaactaaaccttcaaaggatcatcatgggcagtcacaatgctttggctgccactttcggaatattaggtaacatcatttctgtgatggtgtacttggctccggtgccaacgttttaccggatatacaaaaagaaatgcacggacggtttccactcgctgccatacttgttgtcattaatgagttctatgctttggttatactacgcctt

SEQ ID NO: 201177 - DNA, 272 bp, Glycine max
gaaagattttatccaattgacattttaaaaatgactgggataaacttaagacttcaattattgatcttgaataagtaaacaatttaattggattggtcgaatggtatcaataaaatggagtactaactcccattacttatttattattgaattaaccgatcaacttgctttgttatcgaacatttctttttgatttcaaaaattttccggaaaaaatttgaatctatttttatatgcgaatcaatcctactacttctggtcctgaggtttct

SEQ ID NO: 201178 - DNA, 273 bp, Glycine max
ctgtattttgtttttcttttaaatttttctttaaatttctcaattgatcaaagatcttcagcaaaccggtcaagtttgtgtagtttggccagatgggaggtgggtttagagtgctacacttagttagaccttttctctcgttcctacctgaagttcagactgctgataggaaagtgccatttagagagaaggtcatatatactgtgatctctctgttcattttccttgtttgcagtcagcttcctctgtatggaatacactcaacaacaggtg

SEQ ID NO: 201179 - DNA, 273 bp, Glycine max
ctttctccgagaacaaaaaaaaaaacgtgattcgctcttctcatcgaataaaccacaaaaccaacaaacgagaagaggagtgagagaagatggggttgtcgttcacgaagctgttcagcaggttgtttgcgaagaaggaaatgaggattctgatggtaggtctcgatgctgctggtaagacaaccatcttgtacaagctcaagcttggagaaatcgtcaccaccatccccaccatcggatttaatgttgagactgtggagtacaagaacatca

SEQ ID NO: 201180 - DNA, 123 bp, Glycine max
ttatctttctctcttctctctccccgcccaaaccctaactccctaccctattccgctttctctcatccatcatgaaaggaggaaagtccaagaccgaatctaagagagccgatgccaaacttg

SEQ ID NO: 201181 - DNA, 272 bp, Glycine max
tacgcatcgagcgtggagaaagagaaggatgatgaggttaaggtggagtgtactcgtaatggtcacgttcgctgtttctctgttttggcttggacccctgcaagtcaaagcctctaattctgtttccgccttcgttcaaaacgccatgtactccaacagaatcgccgttttctcctaatcctattgcccctactgtttgcgcgccaaacgcttgcttgctgaactcaatgacaaaccttttagtggtggagctcgatttgcgagatgatggg

SEQ ID NO: 201182 - DNA, 262 bp, Glycine max
gaacgctgctgccgaaacccttccggaaccctaaggtaagtgagtaatcagtggttgagaatggtgcagaaggcgaagggtagaaaggaggaggtggttacacgtgagtacaccattaacctccacaaacgcctccatggctgcacatttacgaagaaagctcctaaagctattaaggagataaggaaatttgcccagaaggccatggggaccaatgatgtgagggtggatgtgaagttggacaagtatgtctggagccagg

SEQ ID NO: 201183 - DNA, 268 bp, Glycine max
ctctgctcatgcctctagggttatcatatctccatttccatttcctctcactcagtttccaagaatcttaagctatgggaaagtcttacccaaccgtgagcgctgattaccagaaggccgttgagaaggcgaagaagaagctcagaggcttcatcgctgagaagagatgcgctcctctaatgctccgtttggcatggcactctgctggaacttacgacgtgagctcgaagaccggtggtccctatcggaaccataaagcacccctccg

SEQ ID NO: 201184 - DNA, 269 bp, Glycine max
ctacccacttcgccttctccgtttctcactagactcacatcgcgcctccatttcgctgcattccctctgcgttctccaacgaggaaactcatgtcgcacactcttgcacgtggacatcttggtctcacacacccttctaatatcgatacccccaagatctcttttggtgctaaggatgttgatgtgacggaatggaaaggggacattctggcagtgggtgttacggaaaaagatttggctaaagatgcaaactcgaagtttgggaatgt

SEQ ID NO: 201185 - DNA, 271 bp, Glycine max
cagttgcggagtcaatcgaaatcggcggagatggttgccatgaggtttcaccagtaccaggtggtgggaagggctcttcctaccgaatccgatgagcatcctaagatctaccgcatgaaactctgggccaccaacgaggtccgtgccaaatccaagttctggtattttttgagaaaattgaagaaggttaagaaaagctatggacaagtgctagccatcaatgagatttttgagaagaatcctaccaagattaagaattatggaatttggc

SEQ ID NO: 201186 - DNA, 272 bp, Glycine max
gatggcttcacgcaggttcgtatcttctctgattcgatcctcccttcgtagatctcaatcgaaaccctcgatttccgcatccgcatcgagatcacacatcatccaaccgtgcctctccgcacggttacttgctgaaccgcgtcgccgaatacgctaccgcggcggcggctgctaccgctcctccctctgctccgcctccgggcaagaaggcggttagcggcggcgggaagatcaccgatgagttcaccgggaagggctcgatcgggcaggtc

SEQ ID NO: 201187 - DNA, 278 bp, Glycine max
  unsure (1)..(278): unsure at all n locations
gcacccncttcttcttttacgtncattctgtgttcatantgaggntcttctgaagaaatggcaaatncacccnttgacacactctcactctttccgcgagaggtttgatgnaactctcactggtcacaggaatgaaattttggcccttttgtcaaggcttgangccaagggcaagggaatcctgcaacaccaccaggtggttgcagagtttgaagaaatccctgaggagagcagaaagaaactccaaggtggtgtctttggagaagttttgagatcta

SEQ ID NO: 201188 - DNA, 265 bp, Glycine max
tctcgagccgaatcggctcgaggccatataatttttatttatttattataatgtccgggaacatccacaagattgaggagaccctccatgtaggcaggcacaagaaataggaccccaaaggagtacaccatagtgagcactaaggtgtacacaaaggattacgaccatggtgagcacataggtgaaccccctggagtacgacaccatgggacgcacaacgagggacttgagttataagatccaggacaagatccctggtgctggc

SEQ ID NO: 201189 - DNA, 270 bp, Glycine max
cgagattcccactgtccctgtctactatccagcgaaaccacagccaagggaacgggcttggcggaatcagcggggaaagaagaccctgttgaggctgactctagtccgactttgtgaaatgacttgagaggtgtaggataagtgggagctggaaacagcgcaagtgaaataccactacttttaacgttattttacttattccgtgaatcggaagcggggcactgcccctctttttggacccaaggtcggcttcggccggtcgatccgggc

SEQ ID NO: 201190 - DNA, 267 bp, Glycine max
gaattctccagagagaagaagaaacttaatcgatcatcacttcacttcactaatacatcatggcagacgagacccagaacaagtatgagagctctgaggttgaggtccaggatcgtggtgtttttgactttctcggtaagaaaaaggatgaagaagacaagcctcatcctcaggaggaggtcatcgccaccgagtttcaaaaagtcactgtctcagaccaaggagagaacaagcacagcctcttagaaaagcttcaccgatctgaca

SEQ ID NO: 201191 - DNA, 284 bp, Glycine max
cttcggctcgaggaagaaggcatggaaagtgggtgttctgactgcagttatcaagcacatgtctcctgatatcgccaaaatttgcaagctcgtgaggcagtccaaatgccttcaagataagatgacagccaaggaaagtgcaacctggcttgcaatcatcaatcaagaggaggacttggcacgcgagctttaccctgattattgcccctcattaactacttctggaggaagtggatctatggtcatcaatgattgcaatgaatacgatgttgcagggggtgatg

SEQ ID NO: 201192 - DNA, 264 bp, Glycine max
tttctccagagagaagaagaaacttaatcgatcatcacttcacttcactaatacatcatggcagacgagacccagaacaagtatgagagctctgaggttgaggtccaggatcgtggtgtttttgactttctcggtaagaaaaaggatgaagaagacaagcctcatcctcaggaggaggtcatcgccaccgagtttcaaaaagtccatgtctcagaccaaggagagaacaagcacagcctcttagaaaagcttcaccgatctgac

SEQ ID NO: 201193 - DNA, 161 bp, Glycine max
atgaatatggcttccttaagctcctcattagtgctgctccttgcagctctaattctatcccctcaagttcttgctgactatgagatgcccccaatttacaagccacctgtttacacaccgccagtttataagctcagcgttgactaaccagcagtgtacaa

SEQ ID NO: 201194 - DNA, 266 bp, Glycine max
cttgaatctcagaattctctaaaagagatctttttctgctctttgaagaaagaagggtctttgcttgattttggagatgtctctgctctcagatctcatcaaccttaacctctccgataccaccgagaaggtgatcgcagagtacatatggatcggtggatcaggaatggacctgaggagcaaagcaaggactctcccaggaccagttagcgacccttcagagcttcccaagtggaactatgatggttccagcacaggtcaagctc

SEQ ID NO: 201195 - DNA, 263 bp, Glycine max
ctccttttagcaagttaacaacacttttgtcttcgttccattatctagttctcaattctcttacacctttgcctctgaaagaaatgggtagtcttgaagcggaaagaacaacagtaggattggcagcaagagacccttcagggattctctccccatacacctacaatctaagaaacacaggccctgatgatgtttacattaaagttcactactgtggaatttgccattctgatctccaccagattaaaaatgatcttggcatg

SEQ ID NO: 201196 - DNA, 265 bp, Glycine max
gagaaatagagagagaacttcaagtgagggtgagagtgacacaaatctagagagagcactagtactctaaaagtctattatattcttcaaaatatgaccatgcatcgcgagtcttgggcttttgtcttcggcgttatgggcaacatcatctcctttggagtgttccttgctccattgccaaccttttaccaaatctacaagaagaaatccactgaaggtttccagtcacttccttatgttgttgcactgttcagtgcaatgcttt

SEQ ID NO: 201197 - DNA, 266 bp, Glycine max
gaattagattcatcatcaagatgtcgtctctgatagcagaagatgtgaagagcagatcagaggtgtaccacggggacgaaatgtgccaagtgaagtccaaggagcttctcaaggaaatcgccctccccaacggccttcttcccctcaaggacatggaggagtgcggctacgacagacaaaccggcttcgtctggctcaaacaaaagaagagttacacccacaagttcgacaagatcggaaagcttgtctcctacgcgcccgaggta

SEQ ID NO: 201198 - DNA, 264 bp, Glycine max
gcttatctcaaccgctacaagcactccttggaagaagatgttgcagctcatacctctggccatctacgccagcttttagtggggttggtgacctcatataggtatgttggtgatgagatcaatccaaaattggcacgaactgaggctgaaattcttcatgatgctgtgaaagagaagaagggtagctatgaagagaccattagggtcttgaccacaaggagcaggacccaacttgttgcaactttacaccgctacagagagatc

SEQ ID NO: 201199 - DNA, 267 bp, Glycine max
cggctcgagtgaagattttatttttctttctttctttggaagataaagaatgggttctaagtccgaaaccgtttgcgttactggggcttctggttacatcggatcatggcttgtcatgagactcatcgagcgtggctataccgttcgagccaccgtactcgacccagctgatatgagggaggtgaagcatttgctggatctgccaggtgcagagagcaagctgtctctgtggaaggcagaacttacagaagagggaagctttgatga

SEQ ID NO: 201200 - DNA, 267 bp, Glycine max
gagccgtagcagcagcggaagctctagcttgggcagcgaatcacaatggcgagaggattgaagaagcatttgaagaggcttaatgccccaaagcattggatgcttgacaaactgggtggtgcatttgctcctaagccctcatctggaccacacaaatccagggaatgcctgccactcatactcattttgcgaaaccggctgaagtatgctctgacataccgtgaagtcattgctattctgatgcagcgacatgtccttgttgatggc

SEQ ID NO: 201201 - DNA, 259 bp, Glycine max
ctcgaagacccaccaacgcacgaaagccgggatctttcagaaaatggattcctattcgaagggtgcataaccgcatggataagctcacactaacccgtcaatttgggatccaattcggttccttaggaggtatcgggaaggaattttggaatgtaataatatcgattcatacagatacagaagaaagggttctctattgattcaaacgctctacctacgagatagggatagagaaagaggaaaaaaccgaggatttcac

SEQ ID NO: 201202 - DNA, 264 bp, Glycine max
ggccaggcaagccccactcaaccaccacacctctcctcgttcacgctacccctttctgctcttcttctacctttcaagttttaaaagtataaagatggcagagacattcctatttacctcagagtcggtgaacgagggacaccctgacaagctctgcgaccaaatctccgatgctgtcctcgacgcttgcctcgagcaggacccagacagcaaagttgcctgcgaaacatgcaccatcaccaacttggtcatggtcttcggaga

SEQ ID NO: 201203 - DNA, 266 bp, Glycine max
tcacaaccactcttaatttctctctgccttactcatttacacacctctccaacctttcactttcagctttatttgaatccctctctctcctttccaaatggtcagcgttgaggttgcacatcaaacaccaacaacagttccagaaaatgaaacaaccgaggtaatcaagacccaggaaacaaccccggaaccagtaccagccactgaggctcctgcaacagaacaagcagcagctgaggttcctgctcaagaagaacaacaagcaa

SEQ ID NO: 201204 - DNA, 265 bp, Glycine max
gttagggtttagtacttccaaaagctctgcgaagtcggaaaaaaagttggtttgttggtcggtagcgaaagatagatgtcgatcttcgagtacaacgggagtgccctagtggctatggtggggaagaactgcttcgccatcgcgagcgatcggagactcggtgttcagccccagaccaccgccaccgatttccagaggatttccaaaatccacgacaagctgttcatcggcctctcggcctcgccaccgacgcccagaccctcta

SEQ ID NO: 201205 - DNA, 268 bp, Glycine max
  unsure (1)..(268): unsure at all n locations
ccccttcaccccttcttcttttacgttcattctgttttcatagtgaggatcttctgaagaaatggcaaatgcaccctttgacacactctcactctttccgcgagaggtttgatgaaactctcactggtcacaggaatgaaattttggccctnttgtcaaggcttgangccaagggcaagggaatcntgcaacaccaccaggtggttgcagagtttgnngaatccctnaaggaggagcaggaagaaactccaaggtggtgtntttggag

SEQ ID NO: 201206 - DNA, 248 bp, Glycine max
ccgcgaagagaatggctcccaagggtttaatctttttggctgtgttatgcttctcagcactgtcactgagtcgttgtcttgcggaggataatggacttgttatgaacttctacaaggaatcatgccctcaggctgaagacatcatcaaagaacaagtcaagcttctctacaagcgccacaagaacactgctttctcctggctcagaaacatcttccatgactgtgctgttcagagttgtgatgcttca

SEQ ID NO: 201207 - DNA, 244 bp, Glycine max
ggctgaatctctgaaagattacgaggaggattttgaaaatcctgaaaagaagcccagaaggaacaagtacgctttcgcatgtgctattttggcttcaatgacttccatcctactaggttaccctattggagtgatgagtggagcagcactgtacatacaaagagatctcaaggtatcggttgtgcaaatggaaatcctgaacggtatcataaacctctactctcccgtcggttctttcatcgcc

SEQ ID NO: 201208 - DNA, 248 bp, Glycine max
gatcgagatcattacaaccttctttctttcaggttcttgatcagtgtcaaaaccaaaagggtggttgcaaattgcaatggctaagcatgatgttgagggtggttccttcgctgcaaaggactaccatgatcctcctccagcaccattgattgatgctgaggaactcacacagtggtccttctacagggctttgattgctgagttcatagccacaatgcacttcctttacatcacagtgctcactgtga

SEQ ID NO: 201209 - DNA, 243 bp, Glycine max
ccgagcttcacaaagatgaatcgggaaaaattgatgaagatggccggttcggttagaactgggggaaagggcaccgtgagaagaaagaagaaggctgtccacaagacaacaaccacagatgacaaaaggcttcagagcaccctgaagagaataggggtgaatgccatcccggctattgaggaggtcaatatctttaaggatgacgtattatccagtttctaaatcccaaagttcaagcatcca

SEQ ID NO: 201210 - DNA, 239 bp, Glycine max
aacgaaaaggccaagcaaagaactccgtagcaagaagttgaatgaacgatgatgggtgctgattgaagcatgagaagccaagaaatccaaggagcatacatgcagttcactccaacatgatgtgagaactcctccttcaccatgtccaagtgaaagatgcacttgagcacgtaaagtaaagacaaagtagtggcagtgagcagtgccacacaccaaagtagtagaaacgcaatggaagg

SEQ ID NO: 201211 - DNA, 236 bp, Glycine max
caagactcgagtgaacaaaaaaaaaatgatgggtacccttaaggtgtccaacagtagtttatacatattttcgaagttcctagtaatttgtatggtgatgatgatatctttggttgattcaagttattccttgtgtgattttgaggcaatcttcaattttggtgattcgaattcagatacgggtgggtttcatacaagctttcctgcacagcctgctccctatggaatgacttact

SEQ ID NO: 201212 - DNA, 235 bp, Glycine max
gcttcttctagatttaaggaagatgggtaaggaaaaggttcacatcagtattgtggtcattggccatgtcgactctgggaaatccactaccactggtcacctgatttacaagcttggaggcattgacaagcgtgttattgagaggtttgagaaggaagctgctgagatgaacaagaggtctttcaagtatgcctgggtgctggacaaacttaaggctgagcgtgaaagaggaatc

SEQ ID NO: 201213 - DNA, 245 bp, Glycine max
ctttcttggaactttgttactctcacacatgtctcgctccgtgcctttggtttcaaccatttttatcttgcttctgcttctggtggccactgagatgatggggccaacaatggtggcagaagcaagaacttgtgagtctcagagccaccgtttcaaggggccatgtttgagtgacaccaactgtggctctgtttgccgaaccgaacgtttcactggaggacactgccgtggcttccgtcgcagat

SEQ ID NO: 201214 - DNA, 245 bp, Glycine max
  unsure (1)..(245): unsure at all n locations
agaaagcacaagctcaagcgtcttgtnccagtcaccaaactctttcttcatggatgttaagtgccagggctgcttcaacataacaactgtgtttagccactctcagactgttgtggtttgcggaaactgccagactgtgttgtgccaaccaacaggcggacgggcaaggttaaccgaaggtggctcttttaggaagaagggagattgaatggtttgttaaccagacttttctttgtcaatgattg

SEQ ID NO: 201215 - DNA, 243 bp, Glycine max
aagttttcaaggagggatagaatgtgtggggaacagaaagatggggcagaacagaagggctttaagcgtgatcaatcaggatctggtggcggaagggagaccttacccttgtgttgttaacaagagggcattggcagaaaaacacaatgtttgtgagaagaagcaggcggatccggggcatcgacccatcacaaggaggtttgctgcacaaattgctagcacacagaaaaatcgtgcagaggg

SEQ ID NO: 201216 - DNA, 240 bp, Glycine max
gttacttcttctctggttgattcggatctagagtcttcagtttctcctcgttgttcttcgctttcctgttttcaatttcgattctttcgttaatttaataagatgtttgggagggcaccgaagaagagcgataatacgaggtactacgaaatcctcggcgtctccaagaacgcttcgcaggatgatctgaagaaggcttacaagaaagccgccattaagaatcaccccgacaagggcggt

SEQ ID NO: 201217 - DNA, 239 bp, Glycine max
tttcatcaggtttattccttttcttttggttcaattttgctgaatggagagtgcaagaatcagcaaatggttaaatcttctagtttgtgtactgctattgcttaaggcagaaggatctcttgttccattgactttggtgaagaatgcagaatcaaaaggagctgtttgtttggatggaagcaccccagcataccactttgacaacggatttgaagaagggattaagaactggattgttc

SEQ ID NO: 201218 - DNA, 237 bp, Glycine max
gaattttgtttggaaataattgaggactacgttgttacggtcccaaagaacaacccttctagcaagtaaacccgagttcccttctctctctttacgattacattgctctctctcactctgttcgcattcaatctttcgcttctgaatctccaacaatggtgctcgaggcgactatgatctgtatagacaattcggaatggatgcgtaacggggattactctccttctcgatttcaag

SEQ ID NO: 201219 - DNA, 237 bp, Glycine max
acaacacctcagacagacatcatggaggcaggttacaatcctcgtaccgtcgaagaggtctttagggatttcaagggtcgcagagctgctttgattaaagccctcaccaccgatgttgaagagttctaccagcagtgcgatcccgagaaggaaaatctttgcctttatggatttccaagtgagcagtgggaagtcaatctgccagctgaggaggtgccccctgagcttccagagcca

SEQ ID NO: 201220 - DNA, 234 bp, Glycine max
tgatgttgatgatcctcaaactacaaatctttatgttggaaatctctcacccaaggttgatgaaaattttcttctccgtacttttggaagatttggacctattgctagtgtgaagattatgtggccaaggacagaggaggagagaaggcggcaaagaaactgtggatttgtagctttcatgaacagagctgatggacaggcagcgaaagatgaaatgcaaggagttgtggttta

SEQ ID NO: 201221 - DNA, 240 bp, Glycine max
atcaccaacagtgcattcgagccatcatctatgatggccaagtgtgatccccgccatggcaaatacatggcgtgctatctcatgtacagaggtgacgtagtgcctaaagatgttaatgcagctgttggaattatcaagaccaagcgcactattcaatttgttgactggtgccccaccgggttcaagtgtggaatcaattaccagcctccgactgttgttccaggtggtgatcttgccaag

SEQ ID NO: 201222 - DNA, 239 bp, Glycine max
ctccgccacttctgaatctattgaatcaacaatcatgtcggacgaagagcaccatttcgagtccaaggccgacgccggagcctccaaaacctaccctcagcaagccggtaccatccgcaagaacggctacatcgtcatcaaaggccgcccctgcaaggttgtggaagtttcgacttccaaaactggaaagcacggtcacgctaagtgtcactttgttggaattgatattttcactgcca

SEQ ID NO: 201223 - DNA, 238 bp, Glycine max
cggctcgaggcctctacataggatccctgggaggatcttcctcaatggctcatcccaagttgcatccttgttcactcaacaagggaagaagggtaccaaccaggatgccatggttgtttgggagaacttttgttctagacaagatactattttctgtggagtttttgatggccacggtccatatggtcacatggttgcgaaaagagtgagggattctcttcctctaaaactgaatgtc

SEQ ID NO: 201224 - DNA, 231 bp, Glycine max
aattaattaaattcctcgtggaatattgaagaagccatgtctacagctgggcaggtcatcaagtgcagagctgcggtggcatgggaagcagggaagccactgtcaatagaaaccatagaagtggcaccaccccagaaaggtgaagtgcgtttgaggatcctcttcaactccctttgccgtagtgatgtttattggtgggatgctaaggaccagactcctctgtttcctcgt

SEQ ID NO: 201225 - DNA, 235 bp, Glycine max
  unsure (1)..(235): unsure at all n locations
ttattcttctactttttggttcttaattcctttgccttcacaaccattatagtaaaanaaataagaaagaaacccaagaaaactgatgacacaacttgtaaaataccccatggtcctagaaagctacctattataggaaatatatacaatctgctatgctctcaaccccatagaaaattaagagaactggccataaaatatggacccgtgatgcatcttcaacttaggacaggtt

SEQ ID NO: 201226 - DNA, 232 bp, Glycine max
acgagattgaggcgggggttgatttggaagaaacccagctaaggtaattcctcgcaacccctaactaaaccttcaaaggatcatcatgggcagtcacaatgctttggctgccactttcggaatattaggtaacatcatttatgtgatggtgtacttggctccggtgccaacgttttaccggatatacaaaaagaaatgcacggacggtttccactcgctgccatacttgttg

SEQ ID NO: 201227 - DNA, 233 bp, Glycine max
gtgacacacaagttggaggttacagaggagagcattcctgctttccagagagctggaaccattattgcaaggaaagaccggtttcggcgaagttccactcagatggcaaatgatccctacactctggttgtagctctgaatagttcccaagcagctgagggtgaactctacatagatgatggcagcagctttaattttctgcaagggggctatatccatagacgatttatttt

SEQ ID NO: 201228 - DNA, 241 bp, Glycine max
gcgggcgcacgcgtcgcttctagcccggattctgacttagaggcgttcagtcataatccaacgcacggtagcttcgcgccactggcttttcaaccaagcgcgatgaccaattgagcgaatcaacggttcctctcgtactaggttgaattactattgcgacactgtcatcagtagggtaaaactaacctgtctcacgacggtctaaacccagctcacgttccctattggtgggtgaacaatc

SEQ ID NO: 201229 - DNA, 240 bp, Glycine max
ctcggagccgtgctgaggttattgctgatattgctctttgcccatttgaggctgtgaaggtccgtgtccaaactcagccaggttttgcaaggggtttgtctgatgggctcccaaaatttgtcagatccgaaggaaccttagggctgtacaagggattagtgcctctatggggacgacagattccatacacaatgatgaagtttgcttcgtttgagaccattgtagagctgatctataagc

SEQ ID NO: 201230 - DNA, 236 bp, Glycine max
ctccgtttcaacaccaaacaccaagcgaaacctgaattaagcctcatcttcttcatcgaatcgaaacaacctcgtccgtgctaaggaaactcaacgacagagactgcaacaatgtacgtagatcacgcgttctcgatttcggacgaggatatcatgatgggaacctcgtacaccgtcaacaacaaaccccccatcaaggagattgccctcgccgtttccctcctcgtttgcggcgt

SEQ ID NO: 201231 - DNA, 231 bp, Glycine max
gctcattaaatcagttatagtttgtttgatggtatcttctactcggataaccgtagtaattctagagctaatacgtgcaacaaaccccgacttctggaagggatgcatttattagataaaaggtcaacacaggctctgcctgttgctttgatgattcatgataactcgtcggatcgcacggcctttgtgccggcgacgcatcattcaaatttctgccctatcaactttcga

SEQ ID NO: 201232 - DNA, 230 bp, Glycine max
acgagattgaggcgggggttgatttggaagaaacccagctaaggtaattcctcgcaacccctaactaaaccttcaaaggatcatcatgggcagtcacaatgctttggctgccactttcggaatattaggtaacatcatttctgtgatggtgtacttggctccggtgccaacgttttaccggatatacaaaaagaaatgcacggacggtttccactcgctgccatacttgt

SEQ ID NO: 201233 - DNA, 231 bp, Glycine max
aaagacttctccactttcttcttcactgaaatagtatataagggccaacatagccacccaaaaccgcagtctactagaagaacaaactctcaatcaattcatcaaccttcttcgtcttgcacaaactcagggataactgatcattcagtggtgactctaggaaatccacaaatggatcatttctccatacaagaagattcttcagcttctgttggagaggaagagtttgag

SEQ ID NO: 201234 - DNA, 228 bp, Glycine max
ttttctcttctctgtctaaggggtgccctgagatcacattgaacaatggtgaaggctgtggccgttcttggcagcagtgagggtgtcactggaactattcacttcgttcaggagggaagtggtccaaccaccgtaactggatctcttgctggtcttaagcctggtctccatggtttccatgtccatgccttgggggacactaccaatggttgcctctcaactggatca

SEQ ID NO: 201235 - DNA, 232 bp, Glycine max
ctcttttatctctctcttgcaaaacctaattttcatttcttccctcaaatttcaaaatgcgtgagatccttcacatccagggtggccaatgcggcaaccagatcggcgccaagttctgggaggtggtttgcgcggacacgggatcgaccctaccggaaggtacggtggggactcggagttgcagctcgagaggatcaatgtctactacaacgaggccagttgcggtcggttc

SEQ ID NO: 201236 - DNA, 242 bp, Glycine max
cttcactgaataaaagagtgaatccatatccagtgtatgaacctggaagtgcaagatgggacgaaaaaaaagaagatggatggaaagatagaatggatgactggaaattgcagcaaggcaatttggggcctgaaccggatgaagatccagatgcagccatgttagatgaagcaaggcaaccactgtcaaggaaagtgccaatagcatccagcaaaatcaatccatatagaatggtgattgtg

SEQ ID NO: 201237 - DNA, 239 bp, Glycine max
atatgcttatatcaaagattaagccatgcatgtgtaagtatgaactaattcagactgtgaaactgcgaatggctcattaaatcagttatagtttgtttgatggtatcttctactcggataaccgtagtaattctagagctaatacgtgcaacaaaccccgacttctggaagggatgcatttattagataaaaggtcaacacaggctctgcctgttgctttgatgattcatgataactcg

SEQ ID NO: 201238 - DNA, 230 bp, Glycine max
ttttcttctttccttcacattttctctctcaccattctcttcttcttctccctttcttagattctcccttttttctctttaccctccgccatggctgaggataaggagatgtcttcctctgtcaccaatggcgatgattctctcactggccacatcatatctacaactattggaggcaaaaatggggaacccatacagactattagttacatggctgaacgggttgtagg

SEQ ID NO: 201239 - DNA, 229 bp, Glycine max
ctcggagccgtgctgaggttattgctgatattgctctttgcccatttgaggctgtgaaggtccgtgtccaaactcagccaggttttgcaaggggtttgtctgatgggctcccaaaatttgtcagatccgaaggaaccttagggctgtacaagggattagtgcctctatggggacgacagattccatacacaatgatgaagtttgcttcgtttgagaccattgtagagct

SEQ ID NO: 201240 - DNA, 246 bp, Glycine max
ttcggcacgaggtcgaattcgaaatctgatctccaacgattgatctcggtagaggctagtgcactctccaatctgcaaaaatgcctctcagactcgaaaacaagcgcaacttgcgcaaagatcagagagagtgaaatgtgtggatctgcatccaacagagccatggattctggcgagtttatactctggaactgtctgcatctggaactaccaatctcagaccatggccaaatcttttgaggttac

SEQ ID NO: 201241 - DNA, 231 bp, Glycine max
cttctttcaacctaacccatcgttcgcacggagccgtggtggttctggctctgtccttttttcctttctctcgttaccagaaccagaagaaccatttgtggccaacatggatttggaccagtggatctccaaggtcaaagagggccagcatcttcttgaagacgagcttcaacttctctgcgaatatgtaaaagagatccttatcgaggagtccaatgtgcagcctgtcaa

SEQ ID NO: 201242 - DNA, 230 bp, Glycine max
gctcattaaatcagttatagtttgtttgatggtatcttctactcggataaccgtagtaattctagagctaatacgtgcaacaaaccccgacttctggaagggatgcatttattagataaaaggtcaacacaggctctgcctgttgctttgatgattcatgataactcgtcggatcgcacggcctttgtgccggcgacgcatcattcaaatttctgccctatcaactttcg

SEQ ID NO: 201243 - DNA, 231 bp, Glycine max
gttctttcctcacttcaaacttgacaaaaatggcaacagaattggcatcatctcccaattgggttccaagcgcagcacatgtttggcagcctttgccgccctccttctcctcttcctccgcggtctccgccgccgccgatacaacctccccccaggcccaaagccctggcccatcataggcaacctaaacttaattgggtcccttccacatcggtcgatccacacgcttag

SEQ ID NO: 201244 - DNA, 230 bp, Glycine max
taagcggtgagatttgcgaatctgagaaatggcggattcttctcgggaggagaacgtttacatggcgaaattggcggacaggccgagcgttacgaggagatggttgagttcatggagaaggttgcaaagactgtggaggttgaggagttgacggtggaggagaggaatctcctctctgtggcttacaagaacgtgattggtgcgaggagggcttcgtggaggatcatatc

SEQ ID NO: 201245 - DNA, 229 bp, Glycine max
agcgaagagaatggctcccaagggtttaatctttttggctgtgttatgcttctcagcactgtcactgagtcgttgtcttgcggaggataatggacttgttatgaacttctacaaggaatcatgccctcaggctgaagacatcatcaaagaacaagtcaagcttctctacaagcgccacaagaacactgctttctcctggctcagaaacatcttccatgactgtgctgtt

SEQ ID NO: 201246 - DNA, 225 bp, Glycine max
ttcccctctctctcttcctttgccttgtctccgtgtgaaagatcacaactccaccgtcaccgatttccaaggtttcttggtgctgctggtgtattatacatgcttacatctgcatgtgctggttgagttatttgctggtctaacttaaccatactgtctattttgactcctgagattgctagtgagtcatggggcatagacatttatatagctcatctccaatgt

SEQ ID NO: 201247 - DNA, 274 bp, Glycine max
caaccaagcccatggtggttgaaactttctctgagtatcctccccttggtcgttttgctgtgagggacatgcgtcagaccgtagctgttggagtcatcaagagtgttgagaagaaagaccccaccggagccaaggtcacaagggctgccgccaagaagaagtgattgcattttggcaattttgctagcacatgtgatcatcaacgtggtttcaaaaaaacttgttcctttacagtagtttatctttgcagagtcttaggtgtttgttttaccag

SEQ ID NO: 201248 - DNA, 263 bp, Glycine max
cgcaacaaaaagaaagaatcccaggcgaggagaaagatggaggggaaggagcaggatgtgtcgttgggagcgaacaagttccccgagagacagccgattgggacggcggcgcagagccaagacgacggcaaggactaccaggagccggcgccggcgccgctggttgacccgacggagtttacgtcatggtcgttttacagagcagggatagcagagtttgtggccacttttctgtttctctacatcaccgtcttaaccgttat

SEQ ID NO: 201249 - DNA, 260 bp, Glycine max
ggattctacccgccgctcgatgggaattgcgcttcaaggcgtctcgtagggctaatccgcctcacgagggtcaccaacggcacgtgcctttggggggccgaggccccctactgctggtcggcaaacggacggcgggcgcacgcgtcgcttctagcccggattctgacttagaggcgttcagtcataatccaacgcacggtagcttcgcgccactggcttttcaaccaagcgcgatgacgcattgtgcgaatcaacggttc

SEQ ID NO: 201250 - DNA, 259 bp, Glycine max
agcgtgcttctttatgaccagaagactgtacaactttttcccaagtggtgagggatcagacccagcaattagacaaaacttcctccctcggctaaaggcaaggtgccctcagaatggagatgttaatattcgcctagctattgatgaagggagtgagcagaaatttgacataaacattttgaagaacataagggaaggttttgctgtgctagaatctgatgccagactcaatgatgacatagccaccaagaatgtcatt

SEQ ID NO: 201251 - DNA, 264 bp, Glycine max
gtcgtcgcaatgggacgtgtgatccgtgcgcagcgtaagggagcaggctcggtcttcaagtcccacacgcaccaccgcaagggccctgcacgcttccggagcctggacttcggggagcgcaacggctacctcaagggcgtggtcaccgacgtcatccatgaccctggccgcggcgcgccgctcgccaaggtcgccttccgccaccctttcagatacaagaagcagaacgagctcttcattgccgccgagggcctctacaccggt

SEQ ID NO: 201252 - DNA, 264 bp, Glycine max
ccgttcccggcgactccggccaccgttggatttcaattggttcttgtttttgaacggtggagtaaagaggcatggctgacaaagaggaagagtcggcaatgccaagggacgcgaagattgtgaagtctttgctgaaatcaatgggcgtagaagactacgaaccgcgcgtcattcacaagtttctagagctatggtatcgctacgttgtcgatgtgttaaccgatgcacaagtctattcagagcatgctggaaaatctgcaattg

SEQ ID NO: 201253 - DNA, 264 bp, Glycine max
acgagattgaggcgggggttgatttggaagaaacccagctaaggtaattcctcgcaacccctaactatgccttcaaaggatcatcatgggcagtcacaatgctttggctgccactttcggaatattaggtaacatcatttctgtgatggtgtacttggctccggtgccaacgttttaccggatatacaaaaagaaatgcacggacggtttccactcgctgccatacttgttgtcattaatgagttctatgctttggttatacta

SEQ ID NO: 201254 - DNA, 259 bp, Glycine max
cttcaatttcaattcttttattcttcttttaattttcaggatctctggtccctcccgcgcctcttctcagagtcgcttaatttacagtctttacgcgaatcctttacgagctcgagctgtgacagaacggagtcggagcaatgccgcgacgagtcggcggcgatggttctgaaattcgtggcggtggcgtcgattctggtcgccggattcgggggagtctcgattccgctggtcgggaagtcgcggcggtttcttcgac

SEQ ID NO: 201255 - DNA, 261 bp, Glycine max
gagcgaagagaatggctcccaagggtttaatctttttggctgtgttatgcttctcagcactgtcactgagtcgttgtcttgcggaggataatggacttgttatgaacttctacaaggaatcatgccctcaggctgaagacatcatcaaagaacaagtcaagcttctctacaagcgccacaagaacactgctttactcctggctcagaaacatcttccatgactgtgctgttcagagttgtgatgcttcactgttgctggac

SEQ ID NO: 201256 - DNA, 269 bp, Glycine max
cccaaaaccaccagttgttaaaccaccctattgcccgaagccaccagttgtgaaccctccctatgtcccaaaaccaccagttgtgccagttacaccaccatatgttccaaaaccaccaattgtgaaccctccttatgtcccaaaaccacctgttgtcccagttagaccaccatatatcccaaaaccaccagttgtgccagttacaccaccttatgtgccaaaaccacccattgtttatccacctgtagtaccaacaccaccaattgtga

SEQ ID NO: 201257 - DNA, 263 bp, Glycine max
cacaagccaagtgaaagtgagaaaaaataaaaatcaaagagcataatgtcagggatcattcacaaggctggggagacccttcatgtgggagggcacaagaaggaggaggagcataagggtgagcaccatgctggagaatacaaaggggagcaccatggtgaacacagtagtgagtacaaaggagagcatcatggtgaacacaaagctggagagtaccatggtgagcacaagccagagcacaaagaggggttcctagacaaagt

SEQ ID NO: 201258 - DNA, 252 bp, Glycine max
cttctcttgcggctagggttttagcgcagcttcttctagatttaaggaagatgggttaggcaacggttcacatcagtattgcggttattggccatgttgactctgggaagtccactaccactggccacctgatctacaagcttagaggcattgacaagcgtgttattgagagatttgtgaacgaagctactgagatgaacaagaggtctttcaagtatgcctgggtgcttcataagcttaaggctgagcgtg

SEQ ID NO: 201259 - DNA, 259 bp, Glycine max
cggctcgagctcgagccgttcgagtttcacagcgaagtcgtaggagggtttcaaaagatggagaacatacagagcttatggcaattgggcgatgaactccgtggacactcaaaagcatcggaggatcacaaatggttaatggttgcttcgaaattggcggaacagacaagattgaagggggagcgtgtgaacaaccttgatctttcaaagggccccattgaaacaaggtcaagggataaatttgggttccaggaagaga

SEQ ID NO: 201260 - DNA, 261 bp, Glycine max
  unsure (1)..(261): unsure at all n locations
gccacgaaaatattcatcacacagggttttgntttattattccaatttttggttttcccttttgttggatattagagtgtgtaagaaagannagagagagnaatgggaaggggaagagtgganttgaagagaattgagaacaagatcaacaggcaagtnacctttgcaaaacgaaggaacgggcttttgaagnnagcttacgagctttccgttctttntgatnccgaggttgctctcatcatcttctccaatagaggnana

SEQ ID NO: 201261 - DNA, 269 bp, Glycine max
tcattcattcgttcttcttctttcaccaacaacaaagaaaacagagaaactttcatttcatatattttcatcatcgcagcaaaggaatcaatcaatcaaaaaccatggcaggcttcagtggcgacgaaaccgctcctttcttcggcttcctcagtgccgctgcggccctcgtcttctcctgtatgggagcggcgtacggaacggcaaagagtggggtgggggtggcgtcgatgggcgtgatgaggccggagctggtgatgaagtcgatc

SEQ ID NO: 201262 - DNA, 265 bp, Glycine max
cacggcaccctcttcctcttccttacgcctcctcaatctcgcaaagatggaaggaagtgagatcagtgagcaagtagtaggggaggatttgggagcaaagaagaaagtttttgtagctggagccactggtagcactggcaaaagaatcgttgagcagttactggcaaagggttttgctgttaaggctggggttagagacatcgacaaggccaagacaaccctttcctctgccaacccatctcttcaaattgtgaaagctgatgtc

SEQ ID NO: 201263 - DNA, 265 bp, Glycine max
ctttcttttcttaatttctctctattagtctgcatgctctgcaaactgagcatggctcctctcgcattttccttcttcttcatccttatcacattcttttcttcatcatctgaagcgggatccgttggaataaactatggaagggttgcgaacgacctacctacaccagcgaaagtggtggagcttctgaaggcacaaggtctgaaccgtgtgaagctctacgacaccgacgccaccgtcttaaccgcgtttgcaaactcgggaa

SEQ ID NO: 201264 - DNA, 263 bp, Glycine max
ggttgacgccttcgataaagagaggttcgcggaatctaagaaggagctcgatgccttgctttctgatgaatccttggcaaatgttccatttcttgtgctaggcaacaagattgacatcccttacgcagcttcagaagacgagctacgatatcatctaggcctgaccaatttcaccacaggcaaaggaaagattaatctcacagactccaaccttcgatcccttgaagtgttcatgtgcagcattgtgcgcaagatggggtatg

SEQ ID NO: 201265 - DNA, 258 bp, Glycine max
gtgaagacggaagagaatggctcccaagggtttaatctttttggctgtgctatgcttctcagcactgtcactgatgcgttgtcttgcggaggataatggacttgttatgaacttctacaaggaatcatgccctcaggctgaagacatcatcaaagaacaagtgcagcttctctacaagcgccacaagatcactgctttctcctggctcagaaacatcttccatgactgtgctgttcagagttgtgatgcttcactgtt

SEQ ID NO: 201266 - DNA, 253 bp, Glycine max
tcgagcgaatcggctcgacggctcgagggagaaaggaggaaggatgagtagttcatcaaggccggtgccgaggagagcgagtccatggggagtcaccggagagaatcatcctgaacccaaagctcaccgctgcaatgaccgtgtcgaggacgttattcaggcttgctttgagggaaacccattcaagactgttccgggacctttcaagctcttctggcagtgcatgtgttccaaacccggtgaggaaccaaca

SEQ ID NO: 201267 - DNA, 262 bp, Glycine max
  unsure (1)..(262): unsure at all n locations
cccccctctcttttttgcgttcattctgttttcctgttgaagtctttccctagccaatggccaccgatcgtttgacccgggttcacagtctccgtgagaggcngatgaaaccctcactgccaacaggaatgaaattttggcccttctgtcaaggatcgaagccaagggcaagggcatcctgcaacaccaccaggtcattgctgagtttgaggaaatccctgaggagaacagacagaagctcactgatggtgcctttggagaa

SEQ ID NO: 201268 - DNA, 260 bp, Glycine max
gcagctttgatcaataggtgggttggtatggaaaagaagatcatgaatagcagcatagcgaaaaaatggcgacaactcagtgggcaagatcatgggaagggtctgatagaccctctggacattgatcttcgccgctacatcattcactacggcgaaatggctcaagcggcatacgatgctttcaacacggagacagcattaaagtacgctggaagcagcagatacgccaaaaagagtttcttctccaaaggtggtttggt

SEQ ID NO: 201269 - DNA, 258 bp, Glycine max
  unsure (1)..(258): unsure at all n locations
atttattaggttgggtcttcaaactggagcttcatgagcagaagcgacggggcagtgtgggacacaagcagggtaccccaaggtgcattgcaatttaggttagtggtaacggcagggtatgatggcaagtggatttgggcaaagaaggtcctacctgctgattggaaaaatggacttatatatgnagctggccttcagataacagacattgcacaagagggttgctccccctgcgacgatggaacctggtcatgattc

SEQ ID NO: 201270 - DNA, 256 bp, Glycine max
ctcttcttcgtctcaaacctcttcgttccttcgattcattccatatcttccaaaatggccaaagacccagttcgcgttctcgtcactggagccgcagggcaaattggatatgctcttgtccctatgattgctaggggagtgatgctgggtcctgaccagcccgtgatcctccacatgcttgacattcctccagcagcagagtcgttgaatggggttaaaatggaattggtggatgctgcattccctcttcttaaag

SEQ ID NO: 201271 - DNA, 258 bp, Glycine max
gtttcgggggaagagatccagcagcaatggtgtacgtcaaggctcagaaatcaaaagcctacttcaagagatatcaagtcaagttcaagagaagaagagagggaaaaaccgattaccgtgccaggattcggttgattaatcaggacaagaacaaatataacactccgaaataccgatttgtggttcgctttagcaacaaggacattgttgcacaaataatatctgctagcattgccggcgatttagttcttgctacag

SEQ ID NO: 201272 - DNA, 268 bp, Glycine max
aaggattctacccgccgctcgatgggaattgcgcttcaaggcgtctcgtagggctaatccgcctcacgagggtcaccaacggcacgtgcctttggggggccgaggccccctactgctggtcggcaaacggacggcgggcgcacgcgtcgcttctagcccggattctgacttagaggcgttcagtcataatccaacgcacggtagcttcgcgccactggcttttctaccaagcgcgatgaccaattgtgcgaatcaacggttcctctcg

SEQ ID NO: 201273 - DNA, 264 bp, Glycine max
cttcaaaccgccttcggtttgcaagcaaccgcaagagttgttgtacatactttgaaacagtgaacttgtccattcttggagcctgccaacacgtctcagaagttgctgcataccgtcttatatttcacgactcaagctctctgttgtatgacagcctctatgttggtggtgtgggtagaggtgagataagagcagcattgagaatcctcaagcagaatctcacactaatgactacaattctcacagatagagctcaaccattgg

SEQ ID NO: 201274 - DNA, 261 bp, Glycine max
cttcataaacgcctttcttctctgtttccgtttcctcgttcgaattcgctttttgatctgcgaaaatgagagagtgcatctcgatccacattggtcaggctggtatccaggtcggaaatgcttgctgggagctctactgcctcgagcacggcatcgggcccgatgggcaaatgccaagtgacaagacagttggcggtggtgatgatgctttcaatactttcttcagcgagactggtgctggaaagcacgtgccacgtgcag

SEQ ID NO: 201275 - DNA, 256 bp, Glycine max
caatcggatcgtttcctctgcggagtcagaaatccatggatccctacaagaatcggccatcaagcgccttcaattctcccttctggactactaattccggtgctcccatctggaacaacaactcatcgctgactgttggatctagaggtccaattctgctggaagattaccatctggtggagaagcttgcaaactttgacagggaacggatccccgaacgtgttgtccatgctcgtggagctagcgcaaagggttt

SEQ ID NO: 201276 - DNA, 286 bp, Glycine max
cggctcgagggcgcagtttgccttcgtttgagctctgttctgttctgtgcctccacaaaccaaaccaggcacaagtaatactgtgtaatccaacaaactgaagtatagctaggtgaaaggaagtagtcaagtacaagagaatggcgaagtcattgagatcgaagagggagaagaggctgagggctattcggagggagattgttgaacctttctatgacaagaaagaagctgctaagcttgctgcccaagaggctgcccttgccgctactaagctggaggttccttc

SEQ ID NO: 201277 - DNA, 286 bp, Glycine max
gatctaaattatcggaagccgataagcatattgaccaaactccacctgatgctcgggtgcggtatctaaaagatcagctcatccaggttagggtatacctttcccttcaggcagtaaggaacaatccccatctcactcgagagcttcgattacgggtaaaggaagtctcacgaacactgggagatgcaagcaaagattctgatttgcccaggaatgcaaatgagagaatgaaggcaatggagcaaacattgatgaaaggaaggcaaattcaaaatgattgtgctgc

SEQ ID NO: 201278 - DNA, 285 bp, Glycine max
ttgttattcattattcattctcagcttcttttcttctggggggcaaaaggggtcacttttcagatccgagattgagctcctttacccatcatcatcatggagctcctcgggtacctgaatcagggtcacccttctagaggaacaacacttgttattactctttcattggtgctttcgacacttgtgtccttctccactttcacacatgccttctcatcttctgcgtttccggaactgaatcctataaaacctaggcactcacgtcttctcaggagtgccgtgcaa

SEQ ID NO: 201279 - DNA, 287 bp, Glycine max
cagatatcaagtgattcgcataaattcaaagggactgcgtgacggttgcaagtggttggaaatgtttgaagatgtgagggcaatcatattttgtgtttccctgagtgactacgaccaggtgtggcctacttgtactggtcagcttcgtaacaaactgctggcaagcaaagatctttttgagagtctggtgaagcatccttgtttcaaagataccccatttgtgcttctcctaaataaatatgatgtctttgaagacaagataaacaaagttcctttgtcaatttgtg

SEQ ID NO: 201280 - DNA, 288 bp, Glycine max
ccctcttcatcttgttctatctgtgacgagcatcatggcctcaagagcagtgttattgttggctatgtgtgtgcttccggcgatggttgtggccattcgcccagcaaagaaccctttttgcgtgaagggtcgtgtctactgtgacccttgccgtgctggttttgagacctcagctaccacctatattgctggtgctgagattatgttgcaatgcaagagcagggttagcaacgaggttgtgtacacgaagaaggggtacaccgactcaaccggagcatacacaatgta

SEQ ID NO: 201281 - DNA, 286 bp, Glycine max
agaagaagtggttccaagggaccgccgatgctgtaagacaatttatatgggtttttgaggatgccaagaacaagaatgttgagcatatattgatactttctggtgatcatctttaccgaattgactacatgaactttgtacagagacatgttgacacaaatgctgatatcacagtttcatgtgtacccatggatgacagtcgggcatcagactatggactgatgaaaattgacaaaacaggacggattatacagtttgcagaaaaacctaagggatcagatctaaa

SEQ ID NO: 201282 - DNA, 290 bp, Glycine max
gcacaagcaggaaatgcacccaaagttactactgaaggctgcaccagtaccttgacccgaactgatgctggcatctgtcggatgtaccaatggcttcttccaaggagaggaaacaagaacagcagcaagtatcaccaaaagagactcagagcaagcaaatttgtagaagtcgaaccaaggttcaaatgcaaggtgttgcagtgggtcgtgctgtcgatttgaccatgttggatggatatgatcaacttatgaatgaattggaggagatgtttgacatgaagggacaactt

SEQ ID NO: 201283 - DNA, 283 bp, Glycine max
cggaaccattgagggagaaattgaaggagaagggtatcgaatcgctgtttcccattcaggccatgaccttcgacaccgttctcgatgattctgatttggttggccgtgctcgcactggtcagtgtaaaactctggcatttgtgttgcccatattagagactttaataaatggtccagcaaaatctgcgagaaagactggctacgggaggactccgagtgttctcgtgcttctacctactagggaattggcttgccaggtgcatgctgatattgaagtgtatgg

SEQ ID NO: 201284 - DNA, 283 bp, Glycine max
cgcttggtccttcggtggcatgatcttcgccctcgttatatgcaccgctggcatctcagggggacacataaacccggcggtgacatttgggctgtttttggcgaggaagttgtcgttgcccagggcgattttctacatcgtgatgcaatgcttgggtgctatttgtggcgctggcgtggtgaagggtttcgaggggaaaacaaaatacggtgcgttgaatggtggtgccaactttgttgcccctggttacaccaagggtgatggtcttggtgctgagattgtt

SEQ ID NO: 201285 - DNA, 286 bp, Glycine max
  unsure (1)..(286): unsure at all n locations
agaacacaacgaataggcaagttaccttctgcaaacnccgtaacggattgctgaagaaggcttatgaattgtctgttctgtgtgatgctgaggttgctcttgttgtcttctcaagccgtggacgcctctatgagtatgccaacaacagtgttagagggactatcgaaaggtacaagaaagcatgtgctgcttccacaaatgcagaatctgtctctgaagctaatacacagttctatcagcaggaagcgtccanattaaaaagacaaatcagagacattcagantct

SEQ ID NO: 201286 - DNA, 287 bp, Glycine max
cacatatagtgcagattcataagctttcaaccatggaggatccaaatcaagctcaagaagggtcttctcagaagaaaatgggaagatagaagattgaaatcaaacggatcgagaacatcaccaataggcaagtcaccttctgcaagctccgcaacggtttgctgaagaaagcttatgaattatcagttctgtgtgatgcggaagttgcccttgttgtcttctcaacccgtggccgtttgtatgagtatgccaacaacagtgttagggccaccattgaaaggtacaag

SEQ ID NO: 201287 - DNA, 287 bp, Glycine max
acgctctctctctccttctcgctctttcagctttgacttttgttggaaactaacgcctaatcaaaatggtgaagtttacagctgaagagctacgtcgtattatggtctataagcataatatccgtaatatgtctgtcgttggtcatgttgatcacggaaaatcaaccctcactgattgtcttgtggctgctgctggtattattgctcaagaagttgccggtgatgtccgtatgactgatacccgtgcagatgaagctgagggtggtattaccatcaagtctacaggt

SEQ ID NO: 201288 - DNA, 285 bp, Glycine max
tattagtcagatccttctgctgtgcgtcttctcgttcctctcgcccacaatccgatatcaagactgacacctaaggccagggattgttctcggcttcttcagattcctgaaatggcgtctgttccagctttagccaagtacaagctcgtcttcttgggtgagcagtccgtggtcaggagcagcatcatcactcgcttcatctaggacaaattcggtaacacctatcaggctccaattggtattcattatctgtcgaaaactatgtatctcgaagatcgaactgtt

SEQ ID NO: 201289 - DNA, 283 bp, Glycine max
aaaccctactcattctccatacctcaacgaagaggttaaagagacggcaacactttgctgtccgccttgaccgagcagagcttcgtcttggccctcgattttgccctaaagtactctcagtcacaacagacaccgtcgtcgtcgtcgtcgtcatcaatggcaccgaagcagaccaaggctgagaagaagatcgcttacgatgcgaagctgtgcgacctaatggaggagtacggccagatcctcgttgtgaactccgataacgtgggatcgaaccagctccaga

SEQ ID NO: 201290 - DNA, 282 bp, Glycine max
  unsure (1)..(282): unsure at all n locations
tgtgaacacgtaactctctcaaatcaactggatccgagtcacaaccgtcttgaaattaagaccaactgggtcattgatcacaatctcagttagtagcacaacatcangtagcnagtgaaaaagaaaggtatatttgatcagggatatggcaactcgaagatatgagtttggaaggatgaatgaggctagccacccagactccatcagagctgccttggctgaattcctctccagttgcatctttgtctttgctggagaaggctctgcccttgctttgcgaca

SEQ ID NO: 201291 - DNA, 248 bp, Glycine max
cttaaaagactctcttttctctgtctgaactctgaagcaaaacaacattaccagattagttctagtaattcagtgctgctagaagatggaaactagtgaatggcatatcgagcgaagatctagcttcggctctgaatcccccttagcaagagaggcaggaaatgtgcctgaaactgggtcactctctattgtggtgcttggtgcttctggtgatcttgctaagaagaagacatttcctgcacttttcc

SEQ ID NO: 201292 - DNA, 170 bp, Glycine max
ttctcgagtcgaatcggctcgagctgctcgagcaaggagagcgtgccaacaaggtgatcatcggcaccaatcatgagcaagttgagctgatcatcaatgacatgaaggcgtttaaggaggctgccactgtggcctaggtggttgtcctgaggactgctaccagagagagg

SEQ ID NO: 201293 - DNA, 264 bp, Glycine max
ctcgacgacgttgtatagcagtccttcttcttctttctgtgttgacggtggcgttgatctgattggaattcaggatcaatggcaggggcagcctctgctctgttcctcctcgacatcaaagtctgcgtcctcgtctggcgcgactaccgcggcgacgtctccgccctcgacgccgaccgcttcttcaccaaactcatcgtaatacaggccgatccgctagctcaagattcggttgtgcacgacaacggcgtgacctgcatgttc

SEQ ID NO: 201294 - DNA, 281 bp, Glycine max
aagaagcacaatttctctttctctctttttttgtgtgtccaaaatggctcctagttctgctcacaacaatgggttctatgtgcttatgctagttgggatagtggttagcactatggttgctacctgtgctggtagcttctaccaagactttgatctaacatggggtggtgaccgtgctaagatattcaatggtggccagcttctatcactttccctagacaaagtctctggctctggcttcaaatcaaagaaagaatacctatttgggaggattgatatgc

SEQ ID NO: 201295 - DNA, 285 bp, Glycine max
ctcaaaatctccaaactcgcgatcctcctcgttttgttcgcttcagtctgcaacgtcgctatgtcggactccaccgccaaacccctcgaccagcacgccaccacgggctctgaccctactgcgccagcggttcacatcgtgtacaccgagagaccacagaacgaggagcctgaggcctaccacatcagaaccctcacttcagtccttggcagtgaggaggctgcaaaggaagctttgttgtatagttacaagtctgcagccagtgggttctcagctaagcttact

SEQ ID NO: 201296 - DNA, 260 bp, Glycine max
tcggaattaactcgaactcgagcgctcgagccgatgaatgtcacagtaacattcctccttatttgtatgcatgcttgactgatctgtatgaatgaaataaaggagacattatatccgtttccttaaaaaaaaaaaaaaaaaaaaaaaaaaaaaaaaaaaaaaaaaaaaaaaaaaaaaaaaaaaaaaaaaaaaaaaaaaaaaaaaaaaaaaaaaaaaaaaaaaaaaaaaagaaataaaaaaagaatggaagtagtgggggt

SEQ ID NO: 201297 - DNA, 282 bp, Glycine max
attctctctgtgtatttccctacctctcccttcaagatgcagatcttcgtcaagacgctcaccggcaagaccatcacccttgaggtggaaagctctgacaccatcgacaacgtcaaggccaagatccaggacaaggaaggaatccccccggaccagcaacgtctcattttcgccggaaagcaacttgaggacggccgtacccttgctgactacaacattcagaaggagagtatcttcacctcgtcctccgtctccgtggtggcatgcagatcttcgttaaga

SEQ ID NO: 201298 - DNA, 289 bp, Glycine max
ccagtatgacacggacgtgacgacatggagcccggcggggaggctgttccaggtggagtacgcgatggaggcggtgaagcagggctcggctgcgatagggctccgatccaagacccacgtggtcctcgcatgcgtcaacaaggctaactccgaactttcatcgcaccagaagaagatcttcaaggtcgacaaccacatcggcgtcgccatcgccggcctcaccgccgacggccgcgtcctctcccgctacatgcgatccgagtgcatcaactatgactacacctacgag

SEQ ID NO: 201299 - DNA, 282 bp, Glycine max
  unsure (1)..(282): unsure at all n locations
catnttctagcttccaaaccctaacactcctcttcctcttcgatcatcacctctccacaatgccgccgaagttcgacccctcccagatagtcgacgtcttcgtccgcgttaccggcggcgaagtcggcgcggcgagttccctggccccgaagatcggtcccaccggtctctcccccaagaagatcggagaagacatcgccaaagaaaccgccaaggactggaagggcctccgcgtcaccgtcaagctcaccgttcagaatcgtcaggcgaaggtcacggtgg

SEQ ID NO: 201300 - DNA, 284 bp, Glycine max
aagcaagattctaagagagattttgctgctctttgaagaagggtgattgcttgattttggagatgtcgctgctctcagatctcatcaaccttaacctctcagacactactgagaaggtgatcgcagagtacatatggatcggtggatcaggaatggacctgaggagcaaagcaaggactctcccaggaccagttagcgacccttcaaagcttcccaagtggaactatgatggttccagcacaggccaagctcctggagaagacagtgaagtgattatataccca

SEQ ID NO: 201301 - DNA, 280 bp, Glycine max
accttcttccttttcatcaggtttattccttttcttttggttcaattttgctgaatggagagtgcaagaatcagcaaatggttaaatcttctagtttgtgtactgctattgcttaaggcagaaggatctcttgttccattgactttggtgaagaatgcagaatcaaaaggagctgtttgtttggatggaagccccccagcataccactttgacaacggatttgaagaagggattaagaactggattgttcacattgagggaggaggatggtgcaacaatg

SEQ ID NO: 201302 - DNA, 279 bp, Glycine max
attgtttgttgttgtaactcgttcttcttcttttgttgttctgtgtttgtgtttgttttttctctcacctgaaaatgtcttgctgcggtggtaactgtggttgcggtagctcctgcaagtgcggcaacggctgcggaggctgcaagatgtacccagacttgagctacactgagtcaaccaccaccgagaccttggtcatgggagtggcacctgttaaggctcaatttgagggtgctgaaatgggtgtgcccgctgagaacgatggctgcaaatgtggac

SEQ ID NO: 201303 - DNA, 280 bp, Glycine max
agcctatccatatcctcgcaggggaagaactggtagaaaaccaacaacaaaagactctaagagtgagtcaccatccagcagcacctacatcccaagagatgagaactttggtcacttgaagtcatcagatttccttacatatggaataaaatccatagctcaaaccgttttacctacatttcaatctgcatttggtttaaatgccgagtttgataggtttgacgacgtgcgtggactctttgaaggtggaattcactgcctacagatgcactcagtaaaa

SEQ ID NO: 201304 - DNA, 286 bp, Glycine max
agaatggctcccaagggtttaatctttttggctgtgttatgcttctcagcactgtcactgagtcgttgtcttgcggaggataatggacttgttatgaacttctacaaggaatcatgccctcaggctgaagacatcatcaaagaacaagtcaagcttctctacaagcgccacaagaacactgctttctcctggctcagaaacatcttccatgactgtgctgttcagagttgtgatgcttcactgttgctggactccacaagaaggagcttgtctgagaaggaaacag

SEQ ID NO: 201305 - DNA, 288 bp, Glycine max
gtctctctttgacggtggtgctgtcagcattgacctcagcttgagcagtaaaacatcatcagcactactacggtaccatggctgtgctgcaatctttcgtttcggtccacccagattctcacttccccatacagaacctcccttacggagtcttcaagccccaatccgcttcgcctcgtcgtcccggcgtcgccatcggcgacttcgtcctcgacctctccggaatatcttccgctggtctcttcgacggtcctctcgtcaaaaactccgatgcttttctccagccta

SEQ ID NO: 201306 - DNA, 281 bp, Glycine max
gaagagaatggctcccaagggtttaatctttttggctgtgttatgcttctcagcactgtcactgagtcgttgtcttgcggaggataatggacttgttatgaacttctacaaggaatcatgccctcaggctgaagacatcatcaaagaacaagtcaagcttctctacaagcgccacaagaacactgctttctcctggctcagaaacatcttccatgactgtgctgttcagagttgtgatgcttcactgttgctggactccacaagaaggagcttgtctgaga

SEQ ID NO: 201307 - DNA, 281 bp, Glycine max
ctttcactcaccagtcaccacctctgaactctctctctcatctataagtcaacatggctcatcatgaagattcaagtgcatggaattcgagtaaacctcaccctaagctcaatgaaagaattctgtcttctctgtcacggagaactgttgctgctcacccctggcacgacttagagattgggccaggagctccagcagttttcaactgtgtggttgaaattggcaaaggaagtaaggttaagtatgagctggacaagacaagtggacttataaaggttgat

SEQ ID NO: 201308 - DNA, 282 bp, Glycine max
gtgcacactccttctctaccataagagaggatgaggaaagggagcaactcgcaaaggacatttcaaaggattggagttctgtctttgaacgtagcattaacactctctttctcactgaaatggttcgaggactaatgctgactctgaaatacttctttgaaacaaaagttacaatcaattatccatttgagaaaggccctttgagccctcgtttccgtggtgaacatgcactccggcgatatccaacaggggaggaacgttgtattgcttgcaaactttgtg

SEQ ID NO: 201309 - DNA, 280 bp, Glycine max
ccgcttctacctcgctaccatgatcattcctgagaagaaccgcaaggagatctgcaaatacctcttccaagagggagtttgctttgcgaagaaggacttcaatttggcgaagaccctgagattgacgtgccgaatctgcaggtgattaagctgatgcagagtttcaagtctcgcgagtatgtgagggagacttttgcttggatgcactataactggttcctcaccaacgatggaatcgagtttctcagaacttagcttaaccttccttccgaaattgtcc

SEQ ID NO: 201310 - DNA, 276 bp, Glycine max
cgagatggctcccaagggtttaatctttttggctgtgttatgcttctcagcactgtcactgagtcgttgtcttgcggaggataatggacttgttatgaacttctacaaggaatcatgccctcaggctgaagacatcatcaaagaacaagtcaagcttctctacaagcgccacaagaacactgctttctcctggctcagaaacatcttccatgactgtgctgttcagagttgtgatgcttcactgttgctggactcacaagaaggagcttgtctgag

SEQ ID NO: 201311 - DNA, 281 bp, Glycine max
ctctaactcaatctctctctctctctctctctgaattttctcctctctccgattccttttattaattggagtttactcgctccttttcctttccctgaaaacatttcctcgtcgtattgatgtcggaaaagggccggccacttccaaaatttggtgaatgggatgtcaatgatccaacctcagctgaggggttcacagtgatttttaataaggccagggatgagaaaaagacaggtggtaacccagattcaccaggagagactgccactgatcctcatagc

SEQ ID NO: 201312 - DNA, 168 bp, Glycine max
tacagacctgctaatgataatttcacttttgtggatgaaaactccttatggtcaccttcaaaaccagtcaaccaacgtgatgctgatctcatccatttttgggataagttccgcaaagctcctgagggttctctcaggaaaaatacagctcagaaacaagttttggaa

SEQ ID NO: 201313 - DNA, 296 bp, Glycine max
catagcccgagattcttcttcacttgtacatcatcatcatcaacaacaacaacagcattagcagcaacttcttcagtattggagtggcgcgttgaatctaagtccaagaggaatgttaacaaggttggggccagatggaaggccattgtttagtcctccaacacagcgcataaacacaacaaaactctataggggagtgaggcaacgccattggggcaaatgggtcgctgaaatccgtcttccacgaaacagaacgcctgtctggctaggcacatttgacacggccgaagacgccg

SEQ ID NO: 201314 - DNA, 286 bp, Glycine max
tattacttcatacttctcgatggatgagagtaaaacagttcacatagctgtagttcccagcgcaggcttcagccacctgatcccaatcctcgagttctccaagcgcttagtgaacctccaccctcacttgcatgtcacatgcataatccccacacatggtccacccccaagtgcctcaaaatccatccttgaaacccttccctcccaaaacatcacctccactttcctccccccagttgacctgcctcaagaccttgacacagtttcccaaatccaactcacagtc

SEQ ID NO: 201315 - DNA, 282 bp, Glycine max
agcgggctcattacatctgagagacatgagaaatggatggcacaatatggtaaggtttacaaggatgctgcagagaaggagaaacgtttccaagtattcaaaaacaatgtgcagttcattgagtcattcaatgctgctggggacaaacctttcaaccttagcattaaccaatttgcggaccttcatgatgaagaatttaaggctttactaaacaatgttcagaaaaaggcaagtagggtggagacagcaacagaaacatcgtttaggtatgagaatgtaact

SEQ ID NO: 201316 - DNA, 281 bp, Glycine max
gttgaaagcttggcgagcagtgggataaagtgtatcccgaaggaatacgtgaggcctgaaaaagagttgaagagcatagggaacgtgttcgaggaggaaaagaaggaagggccagaggttcccacaattgacttgagagagatagattcggaggacgaggttgtccgaggcaagtgtcgccagaagctgaagaaagcggcggaggaatggggtgtgatgaacttggtgaaccatgggatccaggatgagctgatagagcgagtgaagaaagcaggggaaga

SEQ ID NO: 201317 - DNA, 284 bp, Glycine max
gcctgaacctgttaggaacaacccacctcacggtactcggcgctaccaggatcagatggtcccaagtattacttcttcccatgtgagagtggaagaggaagaaacatcttcagaccttcgaaactcggctgcagacagcagagccgaagtgcctataaatgtaaccacacaacaaaatgcaagagagacagtgaatcaaggggtgttactgaatacaaatagaaacactcgagtacagaataatcctacaacgtggctgagaaatgcagctgaagattccacag

SEQ ID NO: 201318 - DNA, 285 bp, Glycine max
aattagcttcaccatggactcattgttacttctaaaagaaattgccacttccattttgatcttcttgatcactcgtctctccattcaaacattcctctaaagctatcgccagaaactcccaccggggccaaaagggtggccagttgtgggtgcactccctctcatgggaagcatgcctcatgtcaccttagcaaagatggcaaaaaaatatggacctataatgtacctcaaaatgggcactaacaacatggttgtggcctctactccagctgctgctcgtgcctt

SEQ ID NO: 201319 - DNA, 289 bp, Glycine max
gtggacaggggcccaacgacaaggggctctcccgcaagcacgtcgttgagggaaccaaggcctccttgaaacgcctcgacatggaatacgtggatgttctctactgtcaccgcccggattcctctactcccatagaggaaaccgtgagggccatgaaccatgttattgataggggctgggccttctactggggcactagcgagtggtcggctcagcagatcaccgaggcgtgggctgtggctcagagattggaccttgttgggcctattgttgaacagcctgagtataa

SEQ ID NO: 201320 - DNA, 276 bp, Glycine max
cactcttcagttctcgttgttgttcttcgctttcctgaaactagggttttcaatttcgattcattcgttaataattaaagatgtttgggagggcaccgaagaagagcgataatacgaggtactacgaaatcctcggcgtctcgaagaacgcttcgcaggatgatctgaagaaggcttacaagaaagccgccatcaagaatcaccctgacaagggcggtgatcccgagaagtttaaagagctggcacaagcatatgaggttctgagtgaccctgaga

SEQ ID NO: 201321 - DNA, 281 bp, Glycine max
atgggcttctgaagaaagcttatgagctgtcagtgctgtgtgatgcagaagttgccctcatcgtcttctccagccgtggccgtctctatgagtattccaacaacaacataagaacaacaatagagaggtacaaaaaggcatgttctgatcactcaagcgcgagcactaccacagaaatcaatgctcagtattatcaacaagaatctgcaaagctgcgacagcaaatacagatgctgcaaaattctaacaggcacctgatgggtgatgccttaagcacactg

SEQ ID NO: 201322 - DNA, 278 bp, Glycine max
caaatctcaatcctgatagaatagatgaggataaactgttcaacttgttctccatttatgggaacattgtcagaattaaacttctccgaaataagccagatcatgcacttatccagatgggagatggtttccaagctgaattggcagtacattttctgaagggagccatgttgtttggaaagcgattggaggtcaactattcgaagcatgcgaacataacccaaggtgctgatacacatgagtatgtcaattcaaatctcaatcgattcaatcgtaat

SEQ ID NO: 201323 - DNA, 185 bp, Glycine max
ttgaatacatcacccagtgcctcatcaaacctggtgggaaattcaggcagatgttgattttttctattgaggaaggaaccatatggtggcatgctcatagtgactgggcaagagccactgtccatggagctatctatatttatccaagaaagggtgaatcctacccttttcccacacctgatgaa

SEQ ID NO: 201324 - DNA, 282 bp, Glycine max
gttttgcagtgatggcactgtccaaccgcgtccgatcgggaatctctctcttcaccaaatccacgttcctcacttccgagcgatccactctccaacgattcctcgttgccccttccatttccttcgcctccagaaattacgccaacgtgccggggcaaaaggaaaacaaagttaaggtccctctggctttgtttggaggttcaggaaactatgcctctgctttgtatattgcatctgtgaaagctaatgcagtggcaaaggttgagtctgagcttctgcaat

SEQ ID NO: 201325 - DNA, 279 bp, Glycine max
gctattcaatttcctccctctcctcttcctcaacatcttcattcaaacaatttcagcccaagtagcaccagcaccagcgggccccaccaacatcacccaagttcttgagaaagcaggccaattcacaaccttcatcaaacttctcaaggcctcacaaatagctgatagaatcaattcgcagctcaacaactcaaaccaaggcctaaccgtatttgcacccactgataatgcattctcaagcctcaaagcagggacactaaactccataaactcacaaga

SEQ ID NO: 201326 - DNA, 281 bp, Glycine max
gagaaaagttagggttcacaacttttccttttccttttgcttgcgaatctgaatcaaataatcaatcatccattcattattcatcatgtcgtcggcgaagaaaatcacgctgaagagttcggacggcgaggctttcgaggtggaggaggcggtggcgctggagtcgcagacgataaagcacatgatcgaggacgactgcgccgacagcggcatccctctgccgaacgtgacgagcaagatcctggcgaaggttatcgagtactgcaagaagcacgtcgagg

SEQ ID NO: 201327 - DNA, 267 bp, Glycine max
  unsure (1)..(267): unsure at all n locations
tgttggtaaagaaagagaagaaaagagtggaatcgaagacgaagacgaagatggaggacgcatcagcatcaaagttcatcccacaccaaatcggaggaggtccanaacgacgtgcttcgatttggtatccatggagtcaagagcgacatcgttggttcacaccctcttcaatcttcactccaatctacaaggagaatggatgaagcgatgaagaagcaatgcaaagttaacctgtacggaactgcttttcccctgaagaggagcttg

SEQ ID NO: 201328 - DNA, 231 bp, Glycine max
tctaaagctagtaagtagtaagtagtaagccactatcgtttctctctaacagcaaaaaagttctaacctcaccaaacccacactaccatgggctatgagaatcgcgagcttcacgtattattcttccccttcccagctaatgggcacataataccaagcattgacttagccagagtctttgcttcaagaggaatcaaaaccaccgtagtcaccactcccctcaacgttcca

SEQ ID NO: 201329 - DNA, 275 bp, Glycine max
ccggccaccgcagttgggcagaaagccggtgacgctattaagaagtatttggtttccgatgcgaaaccgacggtgaagattttttttgagggaaccaaggtggggattcagccatcgccggtggttgctgcgtttagctcaagaggtcccaactcgatcacgccacagatcctgaagccagatctcatcgcgccaggtgtcaacatcctagcggggtggtctaaagccgtggggcccaccgggttgcccgttgataacaggcgcgtggatttcaa

SEQ ID NO: 201330 - DNA, 275 bp, Glycine max
gcgggtacggtttcgacttgtttcttcttcgtgtttcttctttctctccttcttccttttcagatctccgctgaggaatcctcggagaaggagttcgtactcacattggatcactctaactttcacgacactgtcagcaagcacgatttcatcgtcgtcgagttctacgccccatggtgtggtcactgtaagaagcttgctccggagtatgagaaagctgcttctatcttgagtagtcatgatcctcctattgttttggctaaagtagatgccaa

SEQ ID NO: 201331 - DNA, 280 bp, Glycine max
tatgaattgcctgacggacaggtcattacaataggttctgagagattccgttgcccagaagtactgttccagccttctctaattggtatggaagctactggaattcatgaaacgacgtacaactccatcatgaaatgtgatgttgatattagaaaggatctgtatggaaacatcgtgcttagtggagggtctactatgtttccgggaattgctgatcgtatgagcaaggaaattggtgctcttgcacccagcagcatgaaaatcaaggtggttgcacctc

SEQ ID NO: 201332 - DNA, 288 bp, Glycine max
  unsure (1)..(288): unsure at all n locations
ctcagattcagcaattttctattttcttctctcatggcttcagattccaaaaaggatttccctgctgatgacaaagctggaacagcagagaataaagcatccaaagatgaaacgtcatctaaagattctccagcagcacaaagagcaactacagctacttctggacctgcaactggttttccaggcaacccttttgcattctctgcaatgtctggcctgctcaatgatccaagtatcaaggaattggctgaacagatagcanaagatccatcattcaaccagatggct

SEQ ID NO: 201333 - DNA, 284 bp, Glycine max
tcaggagcaagaatagagggggatgctgttactttggattttgtgaaaaaaatgatagaagatttcaagaatcagaaattcttacataaacggtatgcattccagattgtattgcaaacaagagagatgttgcaagctttgccttctcttgttgacatacatgttcctgatggcaaacattttactgtttgtggtgatgttcatggtcagtactatgatcttctgaatatttttgagcttaatgggcttccttcagaagagaatccgtatctatttaatggtga

SEQ ID NO: 201334 - DNA, 275 bp, Glycine max
tgaatctcagaattctctaaaagagatctttttctgctctttgaagaaagaagggtctttgcttgattttggagatgtctctgctctcagatctcatcaaccttaacctttccgataccaccgagaaggtgatcgcagagtacatatggatcggtggatcaggaatggacctgaggagcaaagcaaggactctcccaggaccagttagcgacccttcagagcttcccaagtggaactatgatggttccagcacaggtcaagctcctggtgaagac

SEQ ID NO: 201335 - DNA, 273 bp, Glycine max
ctgaaatcgaagaactcctttacagctcagtggagaatgaagaacacatatgtgtgctgaaggaccgcagcaagccaattatcttcaccatggcaaggttggatcgagtgaagaacatcacaggacttgtggagtggtacggtaagaacgcgaactgagggagctggtgaaccttgtggttgttgctggagacaggaggaaggagtcaaaggacttggaagaaaaggccgagatgaagaagatgtacggcctgatcgagacctacaagttgaa

SEQ ID NO: 201336 - DNA, 275 bp, Glycine max
catcaagttactatctataattaattaaattcctcgtggaatattgacaaagccatgtctacagctgggcaggtcatcaagtgcagagctgcggtggcatgggaagcagggaagccactgtcaatagaaaccatagaagtggcaccaccccagaaaggtgaagtgcgtttgaggatcctcttcaactccctttgccgtagtgatgtttattggtgggatgctaaggaccagactcctctgtttcctcgtatcttaggccacgaagcttcagggat

SEQ ID NO: 201337 - DNA, 276 bp, Glycine max
gacgaaaccctaggttttagtgagtggcgaaaatggcggtgattttttcaagtgcaataccaggaggggcagcaccagcagcaatcgagcaagtgcagtgcttcgggcggaagaagacggcggtggcagtgacctactgcaagcgcggccgaggcctcattaagatcaacggctgcccgatcgagctggtggagccggagatcctccgcttcaaggccttcgagccaatcctcctcctcggtcgccaccgcttcgccggcgtggacatgcgcatcc

SEQ ID NO: 201338 - DNA, 275 bp, Glycine max
  unsure (1)..(275): unsure at all n locations
gagaaaccctagggtttggaagaagctgatcggagaagatggtgcagcgtctcacctaccgcaagcgccacagctatgccaccaaatccaaccagcacagagtcgtcaagactcccggtggcaagcttgtttatcagaccacgaagaagagggccagcggacccaagtgccctgtcactggaaagaggnattcagggattccacatttaaggccaacagaatataagagatcaaggttacccaaaaaccgaaggactgtgaaccgtgcatatggt

SEQ ID NO: 201339 - DNA, 277 bp, Glycine max
gaggatcctgataaactcaatgagaagctaaaggctgtccaaaaagaaagagaagaaaagctagcaaaaattttgagggattatcttggtcaatatgtccggggtgacaaaaaaggattcttccaacgtgcagaatcagaagcaagacggctttctcgtgctgcatttggagtagatatgttacataccatcggctacatatattcaagacaggcagcacaagaactaggtaaaaaagccatttatctaggagtgccatttctggctgaatgggtac

SEQ ID NO: 201340 - DNA, 278 bp, Glycine max
cgcgcatagtgtggtaccagcagcagagcttgtatacgtcgccgcttcagcgtagaacatgatcattcccgagaagaaccgtaaagagatctgcaaatacctcttccaagagggagtttgctttgcgaagaaggacttcaatctggcgaacacccggagattgatgtgccgaatctgcaggtgataaagctgatgcagagcttcaaatccagagagtacgtgagggaaacatttgcgtggatgcactattactggttcctcaccaacgatggaattga

SEQ ID NO: 201341 - DNA, 273 bp, Glycine max
ggcttatggtggatacctaggcacccagagacgaggaagggcgtagtaagcgacgaaatgcttcggggagttgaaaataagcgtagatccggggattcccgatataggtcaacctttcgaactgctgctgaatccacgggcaggcaagagacaacctggtgaactgaaacatcttagtagccagaggaaaagaaagcaaaagcgattcccgtagtagcggcgagcgaaatgggagcagcctaaaccgtgaaaacggggttgtgggagagctat

SEQ ID NO: 201342 - DNA, 267 bp, Glycine max
aagggtgaagccttaaaccttaacactgtcagtggtagttcctccgtggaatgggtacaaggatcattattggctaaacagcaacctttggcatggtacaagacaacttttagcacaccagcaggcaacgatccgttagctctggacatgattagcatgggaaagggtcaggcatggataaacggtcgaagcattggacgccattggcctggatatatagcacgcggtaactgtggggattgttattatgctggaacttacactgat

SEQ ID NO: 201343 - DNA, 272 bp, Glycine max
caccgatcaaagaagaaacaaccgcaacagatctccgtttctcgccaaacaaacacaaaatggctgccttcagcggcgacgaaaccgcacctttctttggcttcctcggagccgccgctgccctcgttttttcctgtatgggagcggcgtacggaaccgcgaagagcggcgtcggggttgcgtcgatgggcgtgatgaggccggagctggtgatgaaatcgatcgtgccggttgtgatggctggtgtgttgggtatctacggtttgatcatt

SEQ ID NO: 201344 - DNA, 270 bp, Glycine max
atcaaaacattcccaataacaataatatacacatcttcaattaagctccttctcctatagccatggctctttctaagcttataattgcttcccttcttgcgtcgcttctccttcttcatttcgttgatgctgatcaatcggcacatgcacaaacgcaggggtctcttcttcagcagatagattgtaacggagcatgtgctgcgaggtgccgtttatcatctcgtccacgcctctgccaaagagcttgtggaacttgttgtagacgctgta

SEQ ID NO: 201345 - DNA, 273 bp, Glycine max
gtagctgctgctgttgatgctgctttacaggctatttccaatgtttctgtttcctctgaattgcaagattctttattaaaggctggtgttttatggtaccttttgccgctgctgcttcagtatgattctactgctgaagagtctgatgcaacagaatcgcatggtgttggttctagtgttcaaattgccataaacatgcatgccatatatgcatccttggctttgtcaaggctcagtggcttgtgcagtgatgagagtgcaacaccttacaat

SEQ ID NO: 201346 - DNA, 278 bp, Glycine max
ctcgtcactccttgctcttagccctcctcctcttcgccgccgtggccaccgccgcgatggcggtggccgcgtccgacgccgacgacatcctgatccgtcaggtggtgccagatgttggcgaagccgaagaggaggacaaccagctgaacgccgagcaccacttcgacgtgcttcaaggccaagttcgccaagacctacgccaccaaggaggagcacgatcatcgcttcggcgtcttcaagtccaacctccgcagagccaggctgcacgctaagctcga

SEQ ID NO: 201347 - DNA, 269 bp, Glycine max
aaaattcttccaccaagttatgggtttccttgtgttgcttcttttctccctcttaggtctctcttctagttccagcatatcaactcatcgttccatattggaccttgacctaaccaagtttaccacacagaaacaggtgtcttcactgttccaactatggaagagtgagcatggacgtgcctaccataaccacgaagaagaggcaaagagacttgagattttcaagaataacttgaactatatcagggacatgaatgcaaacagaaaat

SEQ ID NO: 201348 - DNA, 272 bp, Glycine max
gaaaggagaagatcgaaggcgaatccgaggctgagcaatcccccgaagcatttgaggggggagcaggttgcagctgggtggccgccgtggctcactgcagtgtgtggggaagcactcagcggctggattccgcgaaaggccgacacctttgagaaaattgataagattgggcaaggaacttatagtaatgtgtacaaagctaaagacatgatgacaggtaaaattgttgccctaaagaaggttcgatttgacaatttggaacctgagagtgt

SEQ ID NO: 201349 - DNA, 270 bp, Glycine max
gagagaaagagaagtgtgtagttggtgaagtttttgagaagaatatggaacgaagtggcggaatggtaacggggtcgcatgaaaggaacgaacttgttagagttagacacggttctgacagtgggtctaaacccttgaagaatttaaatggtcagatttgtcaaatatgtggtgacaccattggattaacggctactggtgacctctttgttgcttgtcatgagtgtggcttcccactttgtcattcttgttacgagtatgagctgaaaa

SEQ ID NO: 201350 - DNA, 273 bp, Glycine max
ggaactcatttttccccattttgtgaaattcaattccaagggtttccattttccatttcaatgtcttcccattcgcacaaaggcacctccttctacggcgatgccgccccttatcgatccagagaagggcttagcactcgatccgttgcatcctccgatgatatccaattgctcatcgatcccggcatcgacttcgacgacgaaatcaccggtcttcgtggccaagttaaaaaattgaaaaatgttgctgaagagataggttcagaagtcaag

SEQ ID NO: 201351 - DNA, 275 bp, Glycine max
caagcctgaaaataaaatagagatgctgcctccttgctggcgatcgttcgggaagaaacagtaatgctactgacatgggaaagaaggggagttggttttctgcaatcaaaagagttttcacacaccactccaaaaggaaggattcagataataacaaaggcacaaaagagaagaagaaaagtctaggaaaactaaagcatggagaggccaattcattcatccccctcttcagagagccaagtagcattgagaaaatctttggggactttgaaagg

SEQ ID NO: 201352 - DNA, 254 bp, Glycine max
caaaatttgaaatagaaataatctgtgctgtggtagtggaagcatcgagaacatcgcagcgatggcgagagtgggtagaatgaagttgggttcacaaggcatggaggtgtctttgcagggacttgggtgcatgggcatgtctgcgttctatggtcctcccaagcctgaccccgatatgattgctctcatccaccacgctgttcaaactggtgtcacttttcttgacacttctgacgtctatggtcctcacacca

SEQ ID NO: 201353 - DNA, 284 bp, Glycine max
acgacattcattcatctatggctacccttattgctcccagcaaccactctccccaagaagacgctgaggctctcagaaaggcttttgaaggatgggggactgatgagaaaactgtcatagtaatattgggtcatagaactgtttatcagaggcagcaaatcagaagagtctatgaggaaattttccaggaggatcttgtgaaacgcctagagtctgagatcaaaggagactttgagaaagccgtgtaccgatgggatactagacctgcagatcgtgatgctgtt

SEQ ID NO: 201354 - DNA, 291 bp, Glycine max
tccgttaacgctctccaatacaaaataaccactcactgaatattcggtcgaagatgtccgccgccgaagaagctacagttcccgccgtcgaaaagccggtggaggaggtgaaggcgccgaagcttgccaaggagaagaaacctaaggctccgaaggcaaagaagccgaaacaggccaaaactgcttctcatcctccatatctccagatgattaaggacgctttgattgctctgaacgagaaaggaggatcgagtccatatgcgatacgaagtacatggaggagaagcacaa

SEQ ID NO: 201355 - DNA, 287 bp, Glycine max
aaccactcttaatttctctctgccttgctcatttacacacctctccaacctttcactttcagctttatttgaatccctctctctcctttccaaatggccagcgttgaggttgcacatcaaacaccaacaacagttccagaaaatgaaacaaccgaggtaatcaagacccaggaaacaaccccggaaccagtaccagccactgaggctcctgcaacagaacaagcagcagctgaggttcctgctcaagaagaacaacaagcaactgaggttcctgccccagaatcaac

SEQ ID NO: 201356 - DNA, 280 bp, Glycine max
ggactctatggcataactgatgctggccttctcccccttttggagaattgtgaggctggacttgtcaatgtaaacctcactggttgctggaacttgacagataatatagtttcagccttggccaggctacatggtggaaccctcgaagtactaaatcttgatggatgctggaaaattactgatgcaagcttggttgcaattgcaaacaacttcctagtgcttaatgatctagatgtgtcaaagtgtgcaatcaccgatgccggtgtagctgttctctcaa

SEQ ID NO: 201357 - DNA, 282 bp, Glycine max
agtaagcattatagtaaaaaaaggacattcattcatctatggctacccttattgctcccagcaaccactctcctcaagaagatgctgaagctctcagaaaggcttttgaaggatggggaactgatgagaacactgtcatagtaattttgggtcatagaactgtgtatcagaggcagcaaatcagaagagtttatgaggaaatttaccaggaggatcttgtgaagcgcctagagtctgagatcaaaggagactttgagaaagccgtgtaccgatggatactgg

SEQ ID NO: 201358 - DNA, 277 bp, Glycine max
gaaattatatgaggagctatataatgatgatgaagtctgctatgtgtgctgtggtggttgtagcacttcttcttctggcggaggtggggcccatggctgaggctgtgacatgcaccccaacagagttgagtccgtgtcttccagcaatcacttccgctgctaaaccttccaatgcttgttgcacgtagctgaagcagcttaaaccatgcttatgtggctacctctaaaacgctagcttgaagcagtatgttaactctcctattgcccgaaaaaccgt

SEQ ID NO: 201359 - DNA, 276 bp, Glycine max
ctcgatgggaattgcgcttcaaggcgtctcgtagggctaatccgcctcacgagggtcaccaacggcacgtgcctttggggggccgaggccccctactgctggtcggcaaacggacggcgggcgcacgcgtcgcttctagcccggattctgacttagaggcgttcagtcataatccaacgcacgggcgcttcgcgccactggcttttcaaccaagcgcgatgaccaattgtgcgaatcaacggttcctctcgtactaggttgaattactattgcgac

SEQ ID NO: 201360 - DNA, 274 bp, Glycine max
ctggagctgagctgagaaaacccccaaccccaacctcaaccttaacctctcctcactttcttttcaaccagaactatgattaagctttttaaagtaaaggaaaaacagagagaactggcagaaaatgcgagtggcggaccacccgttaagaagcaaagtgccggcgagttgcgtcttcacaaagatataagcgagctgaatctaccaaaatcatgtaccatgcaattccccaatggcaaagatgacctgatgaactttgaagtttcaattcgac

SEQ ID NO: 201361 - DNA, 278 bp, Glycine max
attcagttcaaagcggagaaaccatcatcagaaaggatttcctcacaaacgaataaatgaagatagtgagaagaagtcatcagatgttgctaggcgccttgaatagaatgttgaatgcttatcttgtggtgcaaatgtcttgattactcttggtaacaagggttggagagattctggggcccatgttgtactagagctgtttgaccacaatgagtggaggctctctgtgaaacttttaggaattactaggtattcatacaaagcacatcagtttctgc

SEQ ID NO: 201362 - DNA, 297 bp, Glycine max
cggctcgagagcggccatcatcggagtgaaaggtgaatcggtgcagagaactccagcgcggcagagaggacagttagcgtgcgagcgaagcacgcgtcgatgcagtccacgtggacagtgtgtgaacaaacgggaagcgttcttacgtaatcctcgtcttcgaattcgagcaagcaaacggcgcagtcgtagcgagactcatcaaaacgcgcgtcgtatttcgctgtataaagcgagaacgggattgttttaataaccgtttcgtccaaaccgtagggggagaacacgtgcggtccg

SEQ ID NO: 201363 - DNA, 280 bp, Glycine max
tttgcagttataatgctgtgtgttggaattcctaccgagtggtctgttgtggaggatctaccagaaggacctgctgttgaaattggtgagaacaaagatgcaatggatggttggtttagacttgagagagtttctgatgatgaattcaataactataagcttgtgttctgtccacagcaagctgaggatgacaaatgtggggatattgggattagtattgatcatgatgatggaaccaggcgtttggtggtgtctaagaacaaaccgttagtggttcagt

SEQ ID NO: 201364 - DNA, 261 bp, Glycine max
ggtagtgtagagaggccttggaagaattcagatgctagacttgtgcttgaagatggttcaatttggagagcaaaatcgtttggtgcttcagggacccaagttggcgaggttgttttcaatacatcattgacagggtatcaagaaattttgactgatcctagttatgctggccagtttgtgctcatgacaaacccacatattgggaatactggcataaattttgatgatgaggaatcaatacagtgtttccttgctggactt

SEQ ID NO: 201365 - DNA, 274 bp, Glycine max
cagaaattatcgaaggtgatagtaccagacaagtggaaagacgaggccagcaatactacagagggtggtggccgccagatcaacgagaacaagcttctctccaagaaacacagatggaccccttacggacacactaagtgcaccatttacaagcagcaagtgcaccagaatgctaagtactgccacacctgtgcttactctaaaggagtttgtgccatgtgtggctagcaagttcttcgatcaccaagttttacgagcaaagcaatgtgtaatg

SEQ ID NO: 201366 - DNA, 276 bp, Glycine max
atttcccttcctctcccttctcgatgcatactatcgtcaagaccctcaccggcaagaccatcacccttgaggtgtaaagctcagacaccatcgacaacgtcaatgccaagatcctggacaaggaaggaatccccccggaccagcaacgtctcattttcgccggaaagcaacttgaggacggccgtacccttgctgactacaacattcagaaggagtgtactcttcacctcgtcctccgtctccgtggtggcatgcagatcttcgttaagaccctca

SEQ ID NO: 201367 - DNA, 276 bp, Glycine max
gagaaattatcgaaggtgatagtaccagacaagtggaaagaaggggccagcaatactaccgagggtggtggccgcaagatcaacgagaacaagcttctctccaagaaaaacagatggaccccttacggaaacactaagtgcaccatttgcaagcagcaagtgcaccagaatgctaagtactgccacacctgtgcttactctaaaggagtttgtgcaatgtgtggcaagcaagttcttgataccaagttttacaagcaaagcaatgtgtaatggata

SEQ ID NO: 201368 - DNA, 275 bp, Glycine max
aaaatcttgtgatcactcagttacaagagagaaaattgaaggaagagctataacaccgagaaagcaaaatggcaagtctactatgtcaagggaagagttcgtggcctgaggttgtgggaacaaacggggtggtagcagtggagaagattgagagagagaatgataatgttcgtgcaagattggtgggagaaggatctatggtgacaatggacttttggtgcaacgagtttgggtttgggtcgacaaaattggggtggtcactcgtgtgccaaaga

SEQ ID NO: 201369 - DNA, 270 bp, Glycine max
  unsure (1)..(270): unsure at all n locations
gttacctcttngttttgggtgcaagttatctggaaaactgcgcaatggtgttacagcaactgacttggttctaactgtgacacaaatacttaggaaccatggtgttgtagggacatttgttgcattttatggtgatggtatgggtgagttgtcattagctgacagggccactattgccaacatgtctccagaatatggtgcaaccatgggcttcttccctgtagatcacgttacattgcaatacctcaaattaactggacgcagtgatgc

SEQ ID NO: 201370 - DNA, 273 bp, Glycine max
cttcctcagtagtgtcatttacgcttctcttctctgcagcaactatgcctaaccctaaggtcttcttcgacatgaccatcggcggtcaatctgctggccgcatcgtgatggagctctacgccgacgtcactccctgcaccgccgagaacttccgcgcgctttgcaccggcgagaagggcgtatggcggagcggcaagcccctccactacaagggctcgtccttccaccgcgtgatcccgagtttcatgtgtcagggtggcgacttcaccgccg

SEQ ID NO: 201371 - DNA, 273 bp, Glycine max
gtcatttgcaaggcagagaccaagggctgtgtgcatcttaacaggaactgggacaatttcttcagtcactctgcgccaacccgcttctactagcatcagtgttacatatgagggccgatttcaaatattatgcttgtctggttcttacttggttgctgaagaaggtggacctcacaatagaacgggtggcatgagtgtttccctttctagtcctgatggtcatatcattggtggtggtgttactaggcttgttgctgcaagcccagtgcaggt

SEQ ID NO: 201372 - DNA, 287 bp, Glycine max
ttctttcctcacttcaaacttgctcaaaatggcaacagaattggcatcatctcccaattgggttccaagcgcaccacatgtttggcagcctttgccgccctccttctcctcttcctccgcggtctccgccgccgccgatacaacctccccccaggcccaaagccctggcccatcataggcaacctaaacttaattgggtcccttccacatcggtcgatccacacgcttagcaaaaaatacgggcccatcatgcacgtatggttcgggtcgagctccgtggtggtggg

SEQ ID NO: 201373 - DNA, 277 bp, Glycine max
taggtaaataaatgacattcactcatctatggctaaccttgttgctctcagcaaccactctcctcaagaatatgatgaagctctcagataggcttttgaagtatggggaactgatgagaacactgtcatagtaattttgggtcatagaactgtgtatcagaggcagcaaatcagaagagtttatgaggaaatttaccaggtggatcttgtgaagcgcctagagtctgagatcaaaggagactttgagaaagccgtgtaccgatggatactggaacct

SEQ ID NO: 201374 - DNA, 276 bp, Glycine max
atgatttctctctctgcgttgccatgatggtaccaacggagccatgcacgtcatcctcattggcgagggacccaaccatcgtgattcacccgaggcgcgagcccttacgagcacggcctacttgccaatcctgcgcttcatcttctctgacccggcgcaaaccctaattccgttgaagcagaagcttctcgagttatcctccaatcagcgagtctactcggcggcaatctccgagtcactgcatatctccattgagcacgccaggctcgtactcga

SEQ ID NO: 201375 - DNA, 269 bp, Glycine max
cgaagagattggctcccaagggtttaatctttttggctgtgttatgcttctcagcactgtcactgagtcgttgtcttgcggatgataatggacttgttatgaacttctacaaggaatcatgccttcaggctgaagacatcattaaagaacaagtcaagcttctctacaagcgccacaaaatcactgctttctactggtatcgaaacatcttccatgatgtagctgttctgagttgtgatgcttcactgttgctggactccacaagaagg

SEQ ID NO: 201376 - DNA, 268 bp, Glycine max
  unsure (1)..(268): unsure at all n locations
ctcaacttctgctacccactctcttcttccaagtccaaccacgcttttctcnacagtcatgggcaaggtcaagatcggaatcaacggatttggaagaattggccgtttggttgccagagtcgctctgcaaagagacgatgtggagctcgttgccgttaacgaccctttcattaccaccgattacatgacatacatgtttaaatacgacagtgttcacggacactgggaagcatcacgatgtcaccgttaaggacgagaagaccttctc

SEQ ID NO: 201377 - DNA, 280 bp, Glycine max
ggaaagggaagccaaagcgaaaccctaaccctaacggagagatggcggacacttggcatcgatattcgggacggagaaggacagggtgaactgtccgttctacttcaagatcggcgcgtgcaggcacggcgaccggtgctcccggcttcacacgaagcccacaattagcccaacgttggttctgtcgaacatgtaccagaggcccgacatgaacatgaacatcatcaccaaccccgatcagccccagccccaatctctcgaccccgataaggtccaggat

SEQ ID NO: 201378 - DNA, 272 bp, Glycine max
ctttctttacaattccttctctcaataattctcctctgtttttcacaaagcaacatggctgcatacagagaacccatgaacatgaacatgagcgacagagccccggtttctccgcagcaaccacactctccgtggcattccccggttccgtacttgttcggagggttagcggcgatgttgggtctcatagccttcgctctattgatccttgcatgttcctactggaagctctcagggtacctcgaagggaacggggaaacagaacgggacct

SEQ ID NO: 201379 - DNA, 267 bp, Glycine max
gtgcagcaggaagaagcaataatggcgccgaagataacacgtaaggttagcagaaaccccgaattgataaggggaatcggaaagtactcgaggtctcaaatgtaccacaagaggggcatttgggctatcaaggccaaaaactgtggcgttttacctcgccacggccctaaacccaaacctgaaactcccgctgaaaaaccacccaaattttaccctgctgacgatgtcaagaaaccccttgtcaacaagcacaaacccaaacccgcg

SEQ ID NO: 201380 - DNA, 271 bp, Glycine max
atgctattcttcgtggccatattgatttcacatcagatccttggccttccatatcgagtagtgccaaagatctggtcaagaagatgttacgagctgaccccaaacaaaggctctcagcagttgaagtccttgatcatccttggatgagagaagatggagcatctgataagcctctagatgttgctgttttatccagaatgaaacaattcagggcaatgaacaagctaaagaaagttgctctgaaggttattgctgaaaacctttctgaaga

SEQ ID NO: 201381 - DNA, 264 bp, Glycine max
ggacttatccttctttctgcaactccaaaatgggttccaaaggggcacaaaatctagcactctcttcagccttgttgctccttttggtcggttttgcaacctcagacatcaatcaagacaaagcagaatgtacggataaacttcttggtctagctggttgtctttcctatgttggtggcgaagcaaagtccccaccatggattgttgctctggtatcaaagaggttattaacaagagcaagaggtgcctctgcatcctcatcaa

SEQ ID NO: 201382 - DNA, 268 bp, Glycine max
gagaaccttattaaatatggtatccattctcttacctattggattgttgatagaattttttccttggaacctgggaaaaaattctatcaacaatccgataggtaagagaatggttcccaggttccaaggaaatttaccagtaaaattgaagggaagatgaactatgaagattttgtttattttatacttgccgaacgctataagtcatccgaacctagtctcgaatactggttcaaatgcattgatttggatggaaatggagtgctga

SEQ ID NO: 201383 - DNA, 270 bp, Glycine max
agcagatggacaaaacaagaataggagttctggtgggatcaggaatgggaggtataacggctttctcgaatggtgtggaagctcttgtacaaaagggatataagaaaattactccatttttcattccctactccatcaccaacatgggttctgccttgttggctatagacacaggcctaatgggctccaattattcaatttccactgcttgtgcaacggcaaattactgcttttgtgcggctgctaatcacattagaaaaggcgaacaga

SEQ ID NO: 201384 - DNA, 263 bp, Glycine max
atctcgagcgattcgtccgaggttgagatttttttcagcagacaatgtccaatctggtatagctatggtggtggattgaaattgttggaacgattttcctacattaactcggtcgtatatccctggacttccctcccattgcttgtctactgtactctaccagccatatgccttctgactggaaaatttatcgtacccgagattagcaactatgccagtcttgtgttcatggccctcttcatatccattgcagcaactggcat

SEQ ID NO: 201385 - DNA, 261 bp, Glycine max
caagaagcagaattcgcttctggagtttgctagggtggttagggcacaggaacaggttgttgctggtaccctgcatcaccttactcttgaggctattgaggctggtgagaagaagctctatgaagccaaggtgtgggtgaaaccatggctgaatttcaaagaactccaagagttcaagcctgctggtgatgcaccatcgtttacctctgctgatcttggtgtcaaaaaggatggtcaccaaccaggatggcaatctgtgcc

SEQ ID NO: 201386 - DNA, 269 bp, Glycine max
taaacatgaaaattctctttgaaaagcttctttctcaatttcctcaagtcattccttggtcttttgccatagttataatctctcttcatgttagttcggtgagtctaccaaactatgaaagtatcccagcagtgattgtgtttggggactctatagtggatacgggtaacaataactacatcaccaccatagcaaaatgcaattttctaccatatggtagagattttggtggaggaaatcaaccaactgggaggttcagcaatggttta

SEQ ID NO: 201387 - DNA, 272 bp, Glycine max
tgaaaaagcataaagtatggcttcgacggtagcgtaccttgctcggcgcgcggcgcagaaggagagtgttcggatcctctaccgccgcgccctcaaagacactctcaactgggccgtacatcgccacctcttctacgacgacgcttcaaacctccgcgaaaggttcgaggagaacagacacgtggaagaccctgataccattgacaggctcataacggatgctgaagcttcctacaacaagtggcgccatcccgatccctatattgttcctt

SEQ ID NO: 201388 - DNA, 267 bp, Glycine max
caaccatgaagaagttcgacggtttcgaggtgcgagatctgactgtacctgagatcaaacagattgcagggagagctggtagatatgggtcaaattttcctgtaggagaagtaacatgcatggatgaagaggatctacccttgctccattcatctttgaattctccatcacccattttagagcgtgctggcatacttcctacctttgatctgatgtatatgtattcacgattacatccaagaaatggtttctatcaaatactggcgc

SEQ ID NO: 201389 - DNA, 266 bp, Glycine max
cgtctgtgtaacaaacacttcaacaatctactctatacccgatttacaagatgagttcatttagccaaaatccctatgttttagttctgttcctcgttctcactgtgtggatatcccgtgtaatgtctcgcgggctcattacatctgagagacatgagaaatggatggcacaatatggtaaggtttacaaggatgctgcagagaaggagaaacgtttccaagtattcaaaaacaatgtgcagttcattgagtcattcaatgctgct

SEQ ID NO: 201390 - DNA, 263 bp, Glycine max
ctcgagccgctcattttcaagctgtttggtgtaaagatgggacaagtgcttggttgtgttcaagtgaagcagtcaactgtagccgtcaaggaatgtttcgggaagtacgatgatgttcttcaacctggttgccattttgtgccatggtgtcttggctgcggtgtggctggtgtcctttctacgcgtgtcatgcagctaagtcttcgttgtgaaactaagacaaaggacaatgtgtttgttaatgtggttgcctcaatccaata

SEQ ID NO: 201391 - DNA, 264 bp, Glycine max
aacaagatcaagtatagctgtaaaggtggatggaaatggagggacacttctaagccaaacccaaatacaattgttggtgccatggttgccggtcctgacaagcatgatggcttccatgatgttcgtacaaactacaattacacagagccaacacttgctggaaatgccggtttagttgctgcactagtggcattgtcaggcgacaaaggcacatctattgacaaaaataccattttctctgctgttcccccaatgtttcctaca

SEQ ID NO: 201392 - DNA, 254 bp, Glycine max
tttccaattagggtttcgcttagagtacccaattaccatgggagtcttcacctttgtcgttcgcaaatccggcgccgaatggagcgccaagcaacattccggcgacatcgaggcctccgccgactccacctacgatctccaaaggaagctcgtgcaagccgctctcgccgttgattcctccggtggagtccagtcctccttctctcccgtgtctcctacctccgctgtgttccaggtgatagtgggtggtgctg

SEQ ID NO: 201393 - DNA, 269 bp, Glycine max
gaaagccaaggtgaatttcccggatgagccttcaggcgctgctgcttcctcaaaacgcctcaaggtgaatccagaggctcagccaatgaaggaaaatctgaacaccgtgaagccgaaaatgaaccagatgttcaattttggtcacaatctggagggctactacagcccaatagatcaggtggaacagaaaccactggttaaccagtatgttaaccctgccccgttccctggaaacggagttcaagtctcacctgttactccatctgctg

SEQ ID NO: 201394 - DNA, 276 bp, Glycine max
tgacactgtaggaagagatatagaagatgtgtatagaggaagtaacaaaggaatattgaaggatgtggagcttcttaggcaaataaccgaggcatcacgtggagcaatcactgcctttgtggagcgtactaccaataatatgggccaagttgttgatgtagctgataagcttagctcaatccttggatttggcataaacgagccatggatacagtacttgtcaaacaccaaattttaccgagctgatagggaaaaacttagaaccttgtttgtgtt

SEQ ID NO: 201395 - DNA, 283 bp, Glycine max
gtcccattgattccgaagagaaaagaaaagatgtttgagccacaacagctatacactcgcgcgaagaccgaggaattcgacctcgaatcaggagaaaccctctacccagggctgagcgtcggcgagaaccagctccgatggggtttcatccgcaaggtctacggcatcctctccgcgcagatcgtcctcaccaccctcgtctccgtcaccaccgttttctatactccaatcaatgacctcctcaagggcaattccaccctcctcctcatcctcctcttccttc

SEQ ID NO: 201396 - DNA, 293 bp, Glycine max
tctgaattcggctcgtgatacatttgttcagaaatggttcattcttagcctctacaacatgtgggtaatgttgcagggagtgaagatcaagcttattttgatccaagtgctccaccatccttcatgattgcaaatatcagagcagcaattccaaaacattgctgggagaagtacacattgagatctctgagttattgtctgagggatgtgttggtagtgactgcattggtagctgcagcaatcggcgtcaatagctggttcttctggtcactctattggccttcacaaggcac

SEQ ID NO: 201397 - DNA, 277 bp, Glycine max
cttcttctttatctgaattgtttttggttactgtacagagtaatggggaggttgtttgtggtgaatctggaaggaaagatctatagctgcaaacactgccatacccatcttgcgctttacgatgacatctactccaggacattccattgcagacatgggaaagcttatctcttcaataatgttgtgaatgtttctgttggcgaaatggaggacagaccgatgatgactgggttacatacggtggctgacattttctgtgtgggttgtggatcgattg

SEQ ID NO: 201398 - DNA, 277 bp, Glycine max
caattttcttcgtctgtgtaacaaacacttcaacaatctactctatacccgatttacaagatgagttcatttagccaaaatccctatgttttagttctgttcctcgttctcactgtgtggatatcccgtgtaatgtctcgcgggctcattacatctgagagacatgagaaatggatggcacaatatggtaaggtttacaaggatgctgcagagaaggagaaacgtttccaagtattcaaaaacaatgtgcagttcattgagtcattcaatgctgctg

SEQ ID NO: 201399 - DNA, 280 bp, Glycine max
tagcaaacaaccttctttctttttctgtgagcctttctgtcaggttcttaacttgatcagtgtgcagtgtccaaatcataagggtagttgcaaattgcaatggctaagcatgatgttgagggtggttccttctctgcaaaggactaccatgatcctcctccagcaccgttgattgatgctgaggaactcacacagtggtccttctacagggctttgattgctgagttcattgccacaatgctcttcctttacatcacagtgctcactgtgattggttaca

SEQ ID NO: 201400 - DNA, 277 bp, Glycine max
gttctttcttctcttaggtttccgcaagatctgcaaaccatggcttccaggaaattcgacaaccctcactccggcgacggcgccagtccaggcaaaatcttcatcggagggttagccaaagacaccaccctagagacgttcgtgaagtactttgagaagttcggggagataacggactccgttataatgaaagaccgtcacacgggtcggccaaggggattcggcttcatcacctacgccgatccctccgtcgttgaccaagtcattcaggagaacc

SEQ ID NO: 201401 - DNA, 281 bp, Glycine max
actttcttcaccgttcgctctttctttctcccctacacaaaacatggctttgcccaatcagcaaaccggtcgttaccccagcttcaagcttgtcatcgtcggcgacggtggcacaggaaagacaaccttcgtgaagaggcatctcactggtgaattcgagaagaaatatgaaccgaccattggtgtggaggttcatccgttggattttttcacgaactgtggaaagattcgcttctattgttgggatactgctgggcaagagaagtttggtggcctcagag

SEQ ID NO: 201402 - DNA, 280 bp, Glycine max
actttctgtcgcacaaataactctaaactaagcacttccatacacaaattttctctcccagaagaaatattttcatttcatttcgagtaaaagtaaaacacagttcctgatccatggcatctcgccgccgcatgttgttgaaggtcataatcctcggagacagcggggttggtaaaacatcactgatgaatcagtatgtgaatcgtaaatttagtaatcagtataaggcaaccatcggcgcagattttcttaccaatcaagttcaatttgaagataggtt

SEQ ID NO: 201403 - DNA, 278 bp, Glycine max
gttggtggttgaagaagggtaccttttcaaagaagagactcacttcacagtgctcaaaacctctctcttcttcaacggtgatggcttcgctgtctacgattgcaaaggccaactcgttttccgcttcgactcctacggtccccgcgcgcgtgacaaggacgagctcgttctcatggatccccatggccgttctcttctcactctccgccgaaagaaaccgagtcttcatcaacgctgggtaggcttcataggggagagaacggagggtcataaaccca

SEQ ID NO: 201404 - DNA, 267 bp, Glycine max
acatattaagagatttctgccatgagcagaatatcaagtacttttatgatattaaggatcttagtaattttaaggtaaatccagactataagggtgtttgccatgttgctcttgctcaggaaggtcattgtaggccaggagaggttctcttaggtactgattctcacacttgtactgctggagcatttggtcaatttgctacagggattggtaatactgatgccggctttgtgctgggaactgggaaacttctgctccaggtgcccc

SEQ ID NO: 201405 - DNA, 278 bp, Glycine max
ccgagaacaaaaaaaaaaacgtgattcgctcttctcttctaataaaccacaaaaccaacaaacgagaagaggagtgagagaagatggggttgtcgttcacgaagctgttcagcaggttgtttgcgaagaaggaaaggaggattctgatggtaggtctcgatgctgctggtaagacaaccatcttgtacaagctcaagcttggagaaatcgtcaccaccatccccaccatcggatttaatgttgagactgtggagtacaagaacatcagcttcactgtg

SEQ ID NO: 201406 - DNA, 278 bp, Glycine max
gagtgagtgagcaagagtgaagagcgaagagaatggctcccaagggtttaatctttttggctgtgttatgcttctcagcactgtcactgagtcgttgtcttgcggaggataatggacttgttatgaacttctacaaggaatcatgccctcaggctgaagacatcatcaaagaacaagtcaagcttctctacaagcgccacaagaacactgctttctcctggctcagaaacatcttccatgactgtgctgttcagagttgtgatgcttcactgttgctg

SEQ ID NO: 201407 - DNA, 275 bp, Glycine max
aagaaattaagagagttttttttgttcctcactgaccaagccatatcgatgagaaccaaactttctttagctatctttttcttttttcttttagccttattttcaaacctagcctttggcaaatgtaaagaaaccgaggtagaagaagaagaccctgagctcgtaacatgctaacaccaatgccaacagccacagcaatacactgagggtgacaagcgggtatgcttgcaaagatgtgacaggtatcatcgtatgaagcaagagcgagagataca

SEQ ID NO: 201408 - DNA, 278 bp, Glycine max
cttcctctttgttttctgatctatggcttccaaggagttctctggtctttgctccttggctccttcactatctgagagcattttgtgcactactgggttgaaaatgtatatgctggagagcaaaggaggtgccatagcatgcatgttcttgtctcttttcttcttggggacatggcctgctcttttgactatgttagagaggcgtggtcgtcttcctcagcatacctaccttgattactcaatcaccaatttcttggctgctttactcattgctttta

SEQ ID NO: 201409 - DNA, 281 bp, Glycine max
ttaacctcttcttcttccactttcattccaaagcagttattccttcttcttcttcctctccattctcttcgctcttcgatcctcgtccgggggctgctccgaataccaccaccaccacgcgccgatggccacgataggaggcttacgcgactcccaaggctctcagaacagcgtccaaaccgaggccctcgctcggttcgccgtcgatgaacacaacaagaagcagaattcacttctggagttttctagggtggtgaggacacaggaacaggttgttgcgg

SEQ ID NO: 201410 - DNA, 276 bp, Glycine max
taaacacttcaacaatctactctatacccgatttacaagatgagttcatttagccagaatccctatgttttagttctgttcctcgttctcactgtgtggatatcccgtgtaatgtctcgcgggctcattacatctgagagacatgagaaatggatggcacaatatggtaaggtttacaaggatgctgcagagaaggagaaacgtttccaagtattcaaaaacaatgtgcagttcattgagtcattcaatgctgctggggacaaacctttcaacctt

SEQ ID NO: 201411 - DNA, 273 bp, Glycine max
ggctcccaaggggttaatctttgtggctgtgtgatgcttctcagcactgtcactgagtcgttgtcttgcggaggataatggacttgttatgaactgctacaaggaatcatgccctcaggctgaagacatcatcaaagaacaagtcaagcttctctacaagcgccacaagaacactgctttctcctggctcagaaacatcttccatgactgtgctgttcagagttgtgatgcttcactgttgctggactccacaagaaggagcttgtctgagaa

SEQ ID NO: 201412 - DNA, 275 bp, Glycine max
atttcattcattcttaatctttgtgaaaaataatgttcatcgagaattttaaggttgagtgtcctaatgtgaagtacaccgagactgagattcagtccgtgtacaactacgaaaccaccgaacttgttcacgagaacaggaatggcacctatcagtggattgtcaaacccaaatctgtcaaatacgaatttaaaaccaacatccatgttcctaaattaggggtaatgcttgtgggttggggtggaaacaacggctcaaccctcaccggtggtgtt

SEQ ID NO: 201413 - DNA, 276 bp, Glycine max
caaatttctcattctcccatttcctctcagaaccctcgatcactcccacgcgctcctatatcctctccttcaccgtcgctctctccaacgatcacaacaacatcgtcatcccatggcaaacgccgcatctggtatggcagtccatgatgactgcaagttaaggtttttggagctgaagacaaagaggacacaccgtttcatagtttttaagattgaggagcagcagaagcaggtcattgtggagaagcttggtgagccagcccaaggctatgaaga

SEQ ID NO: 201414 - DNA, 276 bp, Glycine max
  unsure (1)..(276): unsure at all n locations
cnacaacacactnttntaagtgattcgttcgcagaaacatggcatcttcgttgctatccgcagcttcgcacgctgtctcaccctctngttctcngtccaccacgcacaaggganagnccatncttggaggcaacactttgagatttcacaaaggacccaattccttctctagttcaaggtctanaggtcggatctctatggctgttgcagtnaatgtatctcggtntgaaggcatacctatggctccncctgatccaattctcggattttccgagg

SEQ ID NO: 201415 - DNA, 279 bp, Glycine max
aagagaatggctcccaagggtttaatctttgtggctgtgttatgcttctcagcactgtcactgagtcgttgtcttgcggaggataatggacttgttatgaacttctacaaggaatcatgccctcaggctgaagacatcatcagagaacaagtcaagcttctctacaagcgccacaagaacactgctttctcctggctcagaaacatcttccatgactgtggctgttcagagttgtgatgcttcactgttgctggactccacaagaaggagcttgtctga

SEQ ID NO: 201416 - DNA, 276 bp, Glycine max
gctgtttggtgtaaagatgggacaagtgcttggttgtgttcaagtgaagcagtcaactgtagccgtcaaggaatgtttcgggaagtacgatgatgttcttcaacctggttgccattttgtgccatggtgtcttggctgcggtgtggctggtgtcctttctacgcgtgtcatgcagctaagtcttcgttgtgaaactaagacaaaggacaatgtgtttgttaatgtggttgcctcaatccaatatcgagcattggcagaaaaggcatcagatgctta

SEQ ID NO: 201417 - DNA, 274 bp, Glycine max
acgagattgaggcgggggttgatttggaagaaacccagctaaggtaattcctcgcaacccctaacttaaccttcaaaggatcatcatgggcagtcacaatgctttggctgccactttcggaatattaggtaacatcatttctgtgatggtgtacttggctccggtgccaacgttttaccggatatacaaaaagaaatgcacggacggtttccactcgctgccatacttgttgtcattaatgagttctatgctttggttatactacgccttcctc

SEQ ID NO: 201418 - DNA, 272 bp, Glycine max
tcacaacaacacacaacatattattaagacacaccccaaaccaaaccacttcacacagaacacatatccattggtgaaggagtatcatgggtgaacaattagggctactaaaagtcatggttgtgcaagggaaaaggttggtgatccgggatttcaagaccagtgatccttatgtagtactcaaactagggaatcagactgcaaagaccaaggtaattaatagctgcttgaatcctgtttggaatgaagagctgaatttcactctgacagaa

SEQ ID NO: 201419 - DNA, 275 bp, Glycine max
gctggatatccagaggttcctgagtaatgcagattatcagcattttgagtttcaacatttcccttcttcctatctcagactggccgcacatcgtgttgctcaacactatggtatgcaaacaatggttcaagataatggcttagatggccagggaaccagaattatggtaagaaagatggcggaaagcaggtatcccatggttcgcttatctgaaatacctgctaaacagttggaaaatgataaacctgagaagataaaaattgccataaggccta

SEQ ID NO: 201420 - DNA, 273 bp, Glycine max
caagatctcctcacaggtgtaagctctgcatctggtgctagtggatatgatcctctaacttctaaaatagcatcagcattgtcattgtcagatcaactggacacgttccgggagtacaaaaacaagataatggaaatagttggagaaaacagaacggcaacaataatatcaaaaagcatatacatcttgtgcacaggaagtaatgacattaccaatacttactttgttagaggaggagaatatgacattcaagcatacacagacttaatggct

SEQ ID NO: 201421 - DNA, 226 bp, Glycine max
aatcttttgggcttttgtattgttcgcagcacggtgcactgattcgttgtcttgcggtggataattgactggttatgacactcgacaaggaatcatgcttgcaggcttaagacatcatcaaagaataagtcaagcttctctacaagcgctacaagatcactgctttctccttgctcagaaacatcttccatgactgtgctgtatcgagttgttgtgcttcactgtt

SEQ ID NO: 201422 - DNA, 274 bp, Glycine max
gttattgttgtgcagcatcattgagaaagccaaaaggaagtgccaatctgcattccgcggagtgcgcaaacgcagctggggacgctacgtctctgagataaggctcccgggccagaaaacacgcatatggctcggctccttcggctcgcctgagatggcggctcgcgcttatgactccgctgctttcttcctcaaaggaacatctgtcactcttaatttccccgacctcgtacactccctgcctcgacctctctcatcttcccggaggacatac

SEQ ID NO: 201423 - DNA, 272 bp, Glycine max
cctatggctcgtcactccttgctcttagccctcctcctcttcgccgctgtggccaccgccgcgatggcggtagccgcgttccgacgccgacgacatcctgatccgtcaggtggtgccagatgttggcgaagcgaagaggaggacaacctgctgaacgccgagcaccacttcgcgagcttcaaggccaagttcgccaagacctacgccaccaaggaggagcacgatcatcgcttcggcgtcttcaagtccaacctccgcagagccaggctgca

SEQ ID NO: 201424 - DNA, 270 bp, Glycine max
gtgaaaaacaaaaaaaatgatgggtacccttaaggtgtccaacagtagtttatacatattttcgaagttcctagtaatttgtatggtgatgatatcttctgtggttgattcaagttattccttgtgtgattttgaggcaatcttcaatttcggggattcaaattcggatacgggtgggtttcatacaagctttccagcacaacctggtccctatggaatgacttacttcaaaaaaccagtggggcgtgcttctgatggaaggctcattgt

SEQ ID NO: 201425 - DNA, 272 bp, Glycine max
tgtttctacccgccgctcgatgggaattgcgcttcaaggcgtctcgtatggctaatccgcctcacgagggtcaccaacggcactttcctttggggggccgaggccccctactgctggtcggcaaacggacggcgggcgcacgcgtcgcttctagcccggattctgacttagaggcgttcagtcataatccaacgcacggtagcttcgcgccactggctcttcaaccaagcgcgatgaccaattgtgcgaatcaacggttcctctcgtactat

SEQ ID NO: 201426 - DNA, 272 bp, Glycine max
tctacccttttcttcactctgctgttctcacaaaagtgttggttgaacttgattctttcgtcatccatttaattgggaaccagcgaaagcacgatgggagatgtggcaaaggacctaacagctgggactgttggaggggcagcacaactgatagttggacacccatttgacaccatcaaggtcaagcttcagagccagccaacaccactccccggccagcttcccaagtattctggtgcaattgatgctgtcaagcagacggtggcagctga

SEQ ID NO: 201427 - DNA, 271 bp, Glycine max
gtagacgaacactatcatggcttcttcactcagaatctcaagacttatctctcgctccttttcttctacttctttcttttcacgaggtgggaatggtttccttggttcaagacaaagtaaattcagcacttctgctgccattgaggaagaacctattaaaccatcaatacaagtagaacacacccaactcttaattgatggaaaatttgtagatgctgcttctggtaaaactttgcaaactttagatcctaggacaggtgaagtgattgct

SEQ ID NO: 201428 - DNA, 276 bp, Glycine max
taactgtacacatttttaagtttctaacagtcatttgtttcaggtactggatgagaatgcaaaggggaaactctctcaattttgcctaattccggcagaaaatattgttactctttatgatgttcccaacatctggcacattcctttgcttttaagagatcagaaggctcacgaagcaatgtttaaagtgctgaaccttcatggtgtagctaaagagcccaatttagaggaatggacttgcagagctgaatctagtgatttgctttatgaaccagt

SEQ ID NO: 201429 - DNA, 277 bp, Glycine max
gacgaatatcatgttcttgggtgatggaaggaccaacactatcatcactgctagcagaaatgttgttgatggtagcaccaccttccactctgccaccgtcgctgtggtgggtgcaaatttcttggcccgggacataacattccaaaacacagcgggcccatcaaagcaccaagccgtggccctaagggttggtggggacctctcagcattcttcaattgtgacttcctagcattccaagacaccctttatgtgcacaacaatcgccaattcttcgtc

SEQ ID NO: 201430 - DNA, 270 bp, Glycine max
cattgagagagtaagagaaatgggagaacgaaaaggaatcccaatggctttggggctcttggcgatgatcctcttcttcattgcttcctcttcctctcacctcgttcgcgcttccgatgacgccgacgacgcgatcttctacgagtcgttcgacgaggattttgatggacggtggattgtatccgacaaggaggattacaatggtgtctggaagcatgccaagagtgatgggcatgatgattatggacttcttgttagtgaacaagccag

SEQ ID NO: 201431 - DNA, 273 bp, Glycine max
gcagcagcaaccactctctcctcttccctttccaaaccctcctctcttactttccaaacccactctttccccataaccctacccactccccctcgcgccgccgccaaaccccctcttctcgtcttctccaaaaacccaatttccgacatcgtctcctccaccttctcacgcgccgaagaaggcgcgtgggacgacgagaagccgcgcgaggagtgcggcgtggtcggcatatacggcgaccctgaggcctcgcgcctctgctaccttgccctc

SEQ ID NO: 201432 - DNA, 270 bp, Glycine max
cttgattccaagatggttctgctagcgacgctctgagatgacgttcgttgctggccctcaacctgaacgtagccttggcaagctcagaaaactcaccatcctcaaaactattgatgaaggagacagtaggaagctggagcagacgttctcgatgccgtcgagaccgacaaccccgctgactcccacgactcgaacgacaccgggatccgagcgtaaagctgacaacgattggaggagcgtcttccatccttggagcaactccgccacaaa

SEQ ID NO: 201433 - DNA, 271 bp, Glycine max
cttgcttccaagatggttctgctagagaagctctgggatgacgtcgttgctggccctcaacctgagcgtggccttggcaagctcagaaaactcaccaccctcaaaactattgatgaaggagacagtagcaagctgcagaagacgttgtcgatgccgtcgacaccgacaaccccgatgactcccacgactccaacgacaccgggatccgcgcgtaaagctgacaacgtttggaggagcgtcttccatcctgggagcaactccgccacaaaga

SEQ ID NO: 201434 - DNA, 272 bp, Glycine max
gcttcgacccattgggccttgctgatgacccagaggcttttgctgagcttaaggtgaaggaactcaagaacggacgattggccatgttctctatgtttggcttctttgttcaggccattgtcaccggaaagggtccattggagaacctcgccgatcaccttgctgaccctgtcaacaacaacgcctgggcctatgccaccaacttcgtccccggaaagtgagcgtcaaagaacgaaatgacttttgagagtttttagatttgtgtttggtga

SEQ ID NO: 201435 - DNA, 272 bp, Glycine max
gtaagacaagagaggataagttgctggagacaattgtaacatcaggaggtgttcgcctgcaacctactcgagatgccattcaagttttcctaacagaagctgcaaagttggatgcactggctttatctcacgcccttgagctgaagctccaatctccaatttggcaggttcgcatgaaagctgtttgtgtccttgaggccatccttagaaagaaggacgatgatcatttttcaccagtggattcttacttcaccgaaaataaagatgtggtg

SEQ ID NO: 201436 - DNA, 273 bp, Glycine max
gggtttgggtttctcttcctcccttggagaaaaagaagagccaccgctgcgacgccgttcgtgcatttttgaggtgccgctgtcatgtttgggcgtggtggaccaaggaggagtgataactccaaatattatgatattctcgggatttccaaaaatgccagtgaagatgaaatcaagaaggcctatagaaaggcggctatgaagaaccatccagataagggaggagatcctgaaaagtttaaggagttaggtcaagcatatgaagttttaagt

SEQ ID NO: 201437 - DNA, 276 bp, Glycine max
attaacgtgaaatcaggtctacgaaaatcaccttttggacacctgatttcagttctttttcttctcaataattattatttgtatttgtaaacacacactatcaaagcaaatggggtgctcattctccgggttgaacgcactttacgactccgtgaacggcggaggtgatgtttggatcaacgagaaccgtttccgcatcgtgcgccagctcggagaaggtggcttcgcctacgtctacctcgtcaaggaggctcccgacgactccgccgccgctgg

SEQ ID NO: 201438 - DNA, 302 bp, Glycine max
gttgaagaaagcataaaacaaatatatgagttggtttctattgaaacgaggttaatttctttgtttgtgatgaaaatgttgagagcagattcaagatgccagagaaatcaataccaaaggatgcagcttttcagataataaacgatgagttgatgttggatggtgcaccaaggctcaacttggcttcgtttgtgaccacttggatggagcctgagtgtgacaagctcataatggcttcacttaacaaaaactatgttgatatggatgagtatcctgtcaccactgagctccagaaccgttgt

SEQ ID NO: 201439 - DNA, 296 bp, Glycine max
cgaagagaatggctcccaagggtttaatctttttggctgtgttatgcttctcagcactgtcactgagtcgttgtcttgcggaggataatggacttgttatgaacttctacaaggaatcatgccctcaggctgaagacatcatcaaagaacaagtcaagcttctctacaagcgccacaagaacacggctttctcctggctcagaaacatcttccatgactgtgctgttcagagttgtgatgcttcactgttgctggactccacaagaaggagcttgtctgagaaggaaacagataga

SEQ ID NO: 201440 - DNA, 294 bp, Glycine max
  unsure (1)..(294): unsure at all n locations
gcgtttcaaggaggagcttgttgagggaagttcaaacggcaactttgtgcttgagttggactttgaaccgtttaatgnatccttccctcgcccaactctgaacaagtccattggaaatggcgtcgagttcctcaaccgccacctttcggccaagctcttccatgacaaggagaacgnccagncactgcttgagttcctcaggcttcacagttataagggaaagaccatgatgttgaatgacaaagttcaaagcctggattctctccacatngnttgagaaaagcagaagagtat

SEQ ID NO: 201441 - DNA, 300 bp, Glycine max
aatgaatccatttctgcagttcttgacaagtttggtgccatgggaattgacacccccggcgtagttgcattgcttggagcacacagtgttggtcgaacccattgtgtgaagttggtgcaccgtttgtacccagagattgatccagctctgaaccctgaccacgtccctcacattctgaagaagtgccctgatgccattccagaccctaaggccgtgcagtacgtgagaaacgaccgtggcacccccatgattctagacaacaattactacagaaatatattggacaacaagggcttgttg

SEQ ID NO: 201442 - DNA, 300 bp, Glycine max
tgtgggtccaaccaagcctaataaaccgctagggcttggtggtgttgaattgttgcagactggacctgatgctgctcctaaagcggcgggtgaaagcggtgcaggaactccacttgagaacttgttggtgaagaaaactgacatgaggggtcctgagatgtatatctcggaggagattagtgccgagttcagggaatcgttgcttgctagggtaggtttgatgggtgttgtttacctcagaactttgccacccaaaaccactggtgataaggaaactgaattttcattccaaattgaggg

SEQ ID NO: 201443 - DNA, 304 bp, Glycine max
  unsure (1)..(304): unsure at all n locations
ggcggcctgagacggcggagtggctgaagaagattcggcggaagattcacgcgaatccggagctggcgttcgaggaaatcgagacgagtggtttgataagagaagagttggatctgatggaagttagttatcgataccctctagccaagaccggtattcgagcctggatcgtgnaggggggtccgccttttgttgcgatcagagctgacatggccgcacttccaatccaggaagctgtggaatgggagtacaaatctaaagttgccggcaaaatgcatgcttgtgggcccgacgcacatgtggc

SEQ ID NO: 201444 - DNA, 302 bp, Glycine max
caaacaaccacaagtgttcttcctctgtaaacacacaaactctgttcctatttcagagtactgtccctttacctcgtacacatcaaacaatggaaggagatgggtattgtgggagtttctttcagaggtgcaagccttacatagccatgatttctctgcaattcgggtttgcgggtatgaacataatcaccaaggtttccctcaaccgtgggatgagccactatgtgcttgtggtttatagacacgcctttgctactgcagctattgctccttttgctattgttctagagaggaaagtgagg

SEQ ID NO: 201445 - DNA, 297 bp, Glycine max
gtgcggtaggctcatccgagaccggaagcagcaatggggatcgatctcaaggccggaggtaaaagcaaaaaaaccaaaagaacagcacccaagtccaatgatatctatcttaagctcttggtcaagctttatcgcttccttgttcggagaactggcagcaaattcaatgccgttatactcaagagattgttcatgagcaaggttaacaagcccccattgtctttgtcaaggttgattaagtataccaaggggaaggaagataagattgctgtggtggtgggcaatataaccgatgat

SEQ ID NO: 201446 - DNA, 297 bp, Glycine max
cacaataacaatcatcaccctctcttctttcctttctttctttctttcttcccatggatatccaacaacaactgttgaagttcaggtaccacatcggaggggcactcctcgtgtccctttcgatcttctcagtgctttttctcgctccgaggttcctcaacatcctcgcctatttctggccactgttcctctccaccgcgccttttctcgccctcgttctcttcttcgccaagacgcaaacttcgcccaactccgacgcttccattcccaaacccgccgaggagctcctcgacttcg

SEQ ID NO: 201447 - DNA, 295 bp, Glycine max
gagaaaagcgtgaatcatgtcggacgaagagcatcacttcgattctcaggcggatgcgggagcgtccaagacgtatcctcagcaggctggtaccattcgcaagaatggctacatcgtcatcaaatccaggccttgcaaggttgtagaggtctctacgtcaaagacaggcaagcatggacatgcaaagtgtcactttgttgcaattgatatttttaatgggaaaaagcttgaagatattgttccatcatcccacaactgtgatgttccacatgtgaatcgcactgactatcagctt

SEQ ID NO: 201448 - DNA, 297 bp, Glycine max
atttgagttcaggcaagccctactcaaccaccacactgctcctcgttcaagctacccctttctgctcttcttctacctttcaagttttaaaagtataaagatggcagagacattcctatttacctcagagtcggtgaacgagggacaccctgacaagctctgcgaccaaatctccgatgctgtcctcgacgcttgcctcgagcaggacccagacagcaaagttgcctgcgaaacatgcaccaaaaccaacttggtcatggtcttcggagacatcacgaccaaggccaacgttgacta

SEQ ID NO: 201449 - DNA, 295 bp, Glycine max
ggcaccaacagccaagactctgacttacctggcccaggagaaaaccctagaatcgagcttcgttcgggacgaggaggagcgtcccaaggttgcctacaacgaattcagcgacgagatcccagtgatttctcttgccggaatcgacgaggtggatggacgcagaagagagatttgtgagaagatcgtggaggcttgcgagaattggggtatattccaggttgttgatcacggtgtggatcaacaactcgtggccgagatgacccgtctcgccaaagagttctttgctttgccaccg

SEQ ID NO: 201450 - DNA, 291 bp, Glycine max
cagttagccccaaatctggggttagggtttcctctgcgtcgatggcttcgaattcgatcgacggcgacgcgttacggggtcgggactgtgcataaacgacgtgttaagggacgacgagctgcgttccattctggggcgagtggagagcgagaaggacaaggaaacgttcgggttggtctgcaagcgatggcttcggttgcagagcacggaaaggaagaaactcgccgcacgtgcgggtccccacatgctccgaaaaatggccgataggttcacacgcttagtcgaactgga

SEQ ID NO: 201451 - DNA, 298 bp, Glycine max
caaacccctaagcaactgctttatgattgtgctaggatactttcagaaggaaatgaacaggaagccacatctatgataaacaagctccggcaaatggtctcaattcagggtgatccttctcagagaattgcagcttacatggtggaaggacttgcagctcgtgtcgctacatccggaaaatgcatctatcaagcattgagatgcaaggaacctccttctaacgatcgcttagcagcaatgcaaatactatttgaggtctgcccgtgttttaaatttggatacatcgcggcaaatggtg

SEQ ID NO: 201452 - DNA, 298 bp, Glycine max
cggctcgagcgaaactatccttgtttttgaccttggaggcggtacctttgatgtctccgtgctcgaggttggcgatggagtctttgaggtcctctctacttcaggtgatacctacttgggtggtgatgactttgataagagaattgttgattggctggcttctaacttcaagagggatgaaggcatagaccttttgaaagataaacaagctcttcagcgtctcactgagacagccgagaaagcaaagatggagctctcaacattgactcaaactaacatcagtttgccattcataact

SEQ ID NO: 201453 - DNA, 302 bp, Glycine max
aagcactatagtaaaaaaaggacattcattcatctatggctacccttattgctcccagcaaccactctccccaagaagatgctgaagctctcagaaaggcttttgaaggatggggaactgatgagaacactgtcatagtaattttgggtcatagaactgtgtatcagaggcagcaaatcagaagagtttatgaggaaatttaccaggaggatcttgtgaagcgcctagagtctgagatcaaaggagactttgagaaagccgtgtaccgatggatactggaacctgcagatcgtgatgctgtt

SEQ ID NO: 201454 - DNA, 298 bp, Glycine max
attgtgcatgaaagtatagcaacagaatttgtgaatagacttgtgcaatgggccaaaaacatcaaaatttcagatccctttgaagaaggttgtaggctaggtcctattgttagtgaacgacagtataaaaaagtgttgaattgtatctcaactgctaagagtgagggtgcaacaattttgattggagggtctcgcccagagcatttgaaaaaggggtactttgttgaaccaaccatcataactgatgtgactacctcgatgcaaatttggagagaagaagtttttggacctgtgctat

SEQ ID NO: 201455 - DNA, 299 bp, Glycine max
tatgcttccttaagctccttagtgctgctccttgcagctctaattctatgccctcaagttcttgcatactatgagaattgcccagtgtacaagcctcccactgagaaaccaccagtttataagcccccagttgagaagcctcctgtttacaaacctccagttgaaaaccctccagtttataagcctccagtagagaagccaccagtgtacaagccaccagtagataaaccaccagtgtacaagcccccagttgataaacctccagtgtacaagcccccagttgagaaaccaccagtgta

SEQ ID NO: 201456 - DNA, 293 bp, Glycine max
gaaaaaacgacattcattcatctatggctacccttattgctcccagcaaccactctccccaagaagacgctgaggctctcagaaaggcttttgaaggatgggggactgatgagaaaactgtcatagtaatattgggtcatagaactgtttatcagaggcagcaaatcagaagagtctatgaggaaattttccaggaggatcttgtgaaacgcctagagtctgagatcaaaggagactttgagaaagccgtgtaccgatggatactagaacctgcagatcgtgatgctgttttg

SEQ ID NO: 201457 - DNA, 293 bp, Glycine max
gtcattacattgcgtcaatccctccttaagcagacttctcgtgttgctcttgaggagatcaaactcaagtttatcgatacctcttcaaagtttgggcatggtcgcttccagaccacacaggagatgcagaagttctttggacgcctcaaagcataattatgttaattggatggaaatgctggaattctatttggttgccatcacttataaactttgtagtgtttctgttttgatattatggattctcgggtagtgagttttttttctccttaagttggccaaacttttgtttc

SEQ ID NO: 201458 - DNA, 292 bp, Glycine max
ccaatatagcccaagccctatacaaccaaaccctaacacacacccatttgattcagtttccatggctagcctcaaggttgcatttttggctgcagtgctctgcatggttgtggtgagtgcacccatggcacatgcagctatcacgtgcgggcaggtgacgaatagcctgatcatttgcatcggttacctccagaacggaggaacgccgccgtcgggatgctgcaacggagtgaagagcctcaatgccgccgccaagaccaccgccgaccgccagacggcgtgcaactgcctc

SEQ ID NO: 201459 - DNA, 292 bp, Glycine max
gccagaatcgccctgtagactgtacactgagactggttttaaagcaacgccacttgttccagccatgcctcctcatgagacccaacaacctctgttatcggaggagcaagaagagacagcctacgattcctcggagaaggttgtggtggtcggaatcgacgagcacgacggcgacttggaggcgccgccgttctcatggcggaagctgtggctcttcaccgggcccgggtttctgatgagcatcgcttttctggatcccgggaacctcgagggggatcttcagtccggtgcc

SEQ ID NO: 201460 - DNA, 299 bp, Glycine max
attgaatctcagaattctctaaaagagatctttttctgctctttgaagaaagaagggtctttgcttgattttggagatgtctctgctctcagatctcatcaaccttaacctctccgataccaccgagaaggtgatcgcagagtacatatggatcggtggatcaggaatggacctgaggagcaaagcaaggactctcccaggaccagttagcgacccttcagagcttcccaagtggaactatgatggttccagcacaggtcaagctcctggtgaagacagtgaagtgattttatacccac

SEQ ID NO: 201461 - DNA, 300 bp, Glycine max
cttcaaaacactcataacacaaagcacaaagcaaagctcatccttgagttaaaaaatggcagcagcttcttccatggctctctcatccccatccttggctggcaaggccgtgaagctgggcccatcagccccagaagtgggaagggtgagcatgaggaagaccgtcaccaagcaggtctcctcaggaagcccatggtacggcccagaccgagtcaagtacttgggcccattctctggcgagcccccgtcctacctaaccggtgagttcccaggcgactacggctgggacactgctgggct

SEQ ID NO: 201462 - DNA, 298 bp, Glycine max
cactcaccctcattaccaacacgaaagcatagccaaaaccttttttcgaagtctctgattttcctaatggctccggcaaaggcagagaagaagccggcggagaagaagccagcggcggagaaggcaccggcggagaagaagccgaaggcgaagaagaagatctcgaaggaaggagggagcgagaagaagaagaagcgcacgaagaagagcgtggagacctacaagatctacatcttcaaggtcctcaagcaggttcaccccgacattggtatttccagcaaggccatgggcatcatga

SEQ ID NO: 201463 - DNA, 293 bp, Glycine max
  unsure (1)..(293): unsure at all n locations
ccccctctcttttttgcgttcattctgttttcctgnngaagtctttccctagccnatggccaccgatcgtntgacccgggttcacagtctccgtgagaggcttgatgaaaccctcactgccaacaggaatgnaattttggcccttctgtcaaggatcgaagccaagggcaagggcatcctgcaacaccaccaggtcattgctgagtttgaggaaatccctgaggagaacagacagaagctcactgatggtgcctttggagaagtctgagatctacacaggaagccatagtttt

SEQ ID NO: 201464 - DNA, 292 bp, Glycine max
cgattttggctcctcgtgactctccaaatactgatggcattgatccggattcaagttcaaatgtgtgcatagaggattcatacacatctactggagatgatcttgtggctgtgaagagtggatgggatgaatatgggattgcttatggccgtcctagctctgacatcacgatccggcgcataactggatcgtctccatttgctgggattgctattggcagtgaaacctctggtggggtggagaatgtacttgctgagcacatcaacctttacaacatgggaattggtatcca

SEQ ID NO: 201465 - DNA, 291 bp, Glycine max
ctcatgaagaacgctagctatatgcttaacacatgcaagtcgaacgttgttttcggggagctgggcagaaggcaaagaggctcctagcgtgaaggttgcttgtctcgcccaggaggtgggaacagttgaaaacaaagtggcgaacgggtgcgtaatgcgtgggaatctgccgaacagttcgggccaaatcctgaagaaagctaaaaagcgctgtttgatgagcctgcgtagtattaggtagttggtcaggtaaaggctgaccaagccatgcatgcttagctggtcttttcg

SEQ ID NO: 201466 - DNA, 293 bp, Glycine max
gatattagggtttttgagtgcggtgcggcgatcctagcactctcttctgcagctttcgccgacagcttcattcaccatggctgagcaaaccgagaaggcttttttgaaacaaccaaaagtgtttctcagctcgaagaaaactgggaagggaaagagacccggaaagggtgggaaccgcttttggaaatccattgggcttggatttaagactcccagggaagccatcgaaggaacctacattgacaagaagtgccccttcactggcaatgtttccatccgtggccgtatcttgg

SEQ ID NO: 201467 - DNA, 293 bp, Glycine max
gaagcactcaaaagtaaacactcaaaacacttggtattaatttgttcttcttattcttcaatttgttgtgcctctagttcttgtttctaagctaagaatatgtctggggtttgggttttcaagaacggtgtggtgaggctggtggagaaccctggctcagagcgcaaggtgttggttcacactgcaagcaacgaaatcatcacttcctatgcagtgttggagcacaagcttagctcactggggtgggagcgttactatgatgaccctgatttgcttcagttccacaaacgctc

SEQ ID NO: 201468 - DNA, 297 bp, Glycine max
aaaggattgaccatgcaagcttcttgcttgcacttcaaatggcagttgaagcaaggaatccatattttaggttgggttacaacagcttgggtgcatttgcaaccattaaccatctccactttcaggcatattacttggctcttccttttccaattgagaaggcccctactaagaaaattgccaagttaagcggtggtgtgataatatctaaactgttaaactatccagtcagaggccttgtctttgagggcggtcatacactagaggatttagcaaatgctgtttcagaagcctgca

SEQ ID NO: 201469 - DNA, 300 bp, Glycine max
  unsure (1)..(300): unsure at all n locations
ccagaaaccatgcttctccgaaccgctgctgcttctgcttcgtccctctccctcttcagcccgaacgccgaacctccccgatcggttcccgctcgtggattggtggttcgcgcacaanaggatccacgaaccaccgcgcctcgaccggagtgatttttgaaccgttcgaagaggtgaagaaggagctcgatctcgttcccaccgttccgcaagcttctctcgcgcgccaaaaatacgttgacgaatctgagtccgccgttaacgaacaaatcaatgtggagtataacgtttcgtacgttt

SEQ ID NO: 201470 - DNA, 298 bp, Glycine max
ttctgtctcactgagagaaactctctctctctctctctctctctctctagaaaccctattgcacgttttgcaatcgaactcgacaatggccaacagcaacctccctcgaagaatcatcaaggaaacgcagcgtttgctcagtgagccagcacctggtattagtgcctccccctctgaagagaatatgcgatatttcaatgtgatgatccttgggcctacccagtcgccttatgaaggaggcgttttcaagttagaactatttttgccagaagaatatccaatggctgctccaaaggtt

SEQ ID NO: 201471 - DNA, 293 bp, Glycine max
gtcaggcggggctaccgctgagtttaagcatatcaataagcggaggaaaagaaactaacaaggattcccttagtaacggcgagcgaaccgggaaaagcccaccatgaaaatcggtcgccctcggcgtccgaattgtagtctggagaagcgtcctcagtggcggaccgggcccaagtcccctggaagggggcgccagagagggtgagagccccgtcgtgcccggaccctgtcgcaccacgaggcgctgtcggcgagtcgggttgtttgggaatgcagccccaatcgggcggtaa

SEQ ID NO: 201472 - DNA, 292 bp, Glycine max
gttttgagttcacccatcacagttttcttcttcttcttcttcttgtgcatggcaactgaaccgagtgagagcacacaaaggaacacccttgtcgttagaaagccatgttttggcctcccaacaggttgccctcaatgcctctctgcttacatttttctcaagctctctcaagttcccttgaacttggattaccaccctaactaccctgattctgatcagattccttactttgaggatggtgattctgtgacatacaataatgagaaggaggggatcattgagtgcttgaaaa

SEQ ID NO: 201473 - DNA, 289 bp, Glycine max
gcgaaacggcatcgcattcgatgagtgatgcgaaggaaagaagtgggttttgcgtgtggccagatgcgagacaactttgcttaaggaaaggtcttctgtatggatttatgcgattattttcaataccattaaaaacattgcgcggagctagtcggtcgttgagagtggatcaattttgcagtgtagtgaatctatcttcctcattgcagatagaattggttccatgtcttagggacaattatgcatatcttttacacgatgtggatacggggacagttggtgttgttga

SEQ ID NO: 201474 - DNA, 290 bp, Glycine max
aattaattaagcactctaaaacatatctttatttccttgtctacatatatcttgaaaaactcaatcatggctagtgtttcttcggtttcagctccatttagaaggcttgaggggaaggtggcgattatcactggtggtgcgagtggtctaggtgcagccactgcaagactcttctctaagcatggagcacatgtagtcatagctgatattcaagacgacttgggtctctctgttgccaaagagttagaatccgcttcctatgtccattgcgatgtcacaaacgaaaacga

SEQ ID NO: 201475 - DNA, 295 bp, Glycine max
ctgcagcatccatggcttcttcattgggtcgaagaagaacccacgctcccaaagcatcctccacccttaacgacgacttttcctgcgaggactgcggcggtgcccactccccttccaagcttattctctgcgacaaatgcgaccgtggctaccacctcttctgcctccgtccaattcttccctctgttcccaaaggctcttggttctgcccctcttgctccaatcacaaacccaagtctttcccccttgtccagaccaaaatcatcgacttctttcgaatccaacgctcccctga

SEQ ID NO: 201476 - DNA, 291 bp, Glycine max
gcaaggttgcctgtgaaacctgcaccaagaccaacatggtgatggttttcggagagatcacaaccaaggccaacgtggactatgagaagattgtgcgtgacacatgcaggaacattggttttgtctctgatgatgttggtcttgatgctgacaactgcaaggtcctcgtcaacattgagcaacagagtcctgatattgctcaaggtgtgcacggccacctcacaaagaggcctgaggagattggtgctggtgaccaaggtcatatgttcggctatgccactgacgagactc

SEQ ID NO: 201477 - DNA, 293 bp, Glycine max
ctcaaagtttggcttgtgcctttgtgtgctcatttttcactaaacaccaacccaaaccttatacacaaacattcttaattttgatatttttgtttatatattctaggtttttgttaattaattatattaagcatcatgtgaaccccacaatccaataacttgccaccagggtttaggttccaccctacagatgattttctcattcttcactacctaaggaagaaggttgcctccattcctttgccagttgccatcattgctgaggttgatatctacaagtttgatccatggga

SEQ ID NO: 201478 - DNA, 293 bp, Glycine max
ctcgagccgctcgagccgcccgcatgtgccgtagcagttgagctgaaaccgagaagaagaagatggagatgtatcagatctggagcaggagaatagcgttgggagcgttcgcgtttgttctgcttttcctatcggcctcagcagacgacgtcgttgtgctctctgaagataacttcgagaaggaagttggtcaggacagaggagctctcgttgagttctatgctccttggtgtggacactgcaaaaagcttgctccagaatatgaaaagcttggtagcagcttcaagaaagcc

SEQ ID NO: 201479 - DNA, 297 bp, Glycine max
caaatttataaaccggttcatcgtataaatgaattaaaaaagaactaataaccaacgcatcgcttcggattatctagatctaaagaactagtcaaaacaaaaaaaaatataaaaaaagatatattatagcaactgaactattgtgaagcataaaagaacaaaaatcttatttagttgtaaagcaataaaaatatacagataaatgaaaaggtgaaagaaagagagaaaaaaaatcaatgatatagaattctaatatgtaaaggtctatgggttatctcataacaggtagtgtaataa

SEQ ID NO: 201480 - DNA, 295 bp, Glycine max
gggtatcttcgcttcttctattcactctgttacggtgcaacctagcagctctccaaatccaatggcttcagagaagatactttcgaacccaatgagggagataaaagtgcagaagctcgtcctcaatatctctgttcgcgagagtggagatcgtctcaccagagccgccaaggtgttggaacaacttagtggtgaaaccccagtgttttccagagcaaggtacactgttcgttccgatcggattagcagaaatgagaagattgcatgctatgtcactgtcagaggtgacaaggca

SEQ ID NO: 201481 - DNA, 292 bp, Glycine max
cggctcgagatgaaattcactccagggcatcatcattgtataatctcatagatattcacagcaaagctgttgcatctatagtgaacaaggcagagccattagaagcaaccttaattcatgcacctattcggaaggattcccttgtttgtgttggtgttaaaaggcagaatcagtgtgaaagtagtagctgttttgatgctgggcggacatctgttgtaccttcagaagattcattcccatcaaaacttgaccataattctaacaaaaccccatgtccaaagggtgcatcaga

SEQ ID NO: 201482 - DNA, 282 bp, Glycine max
cgcttcttctattcactctgttacggtgcaacctagcagcctccaaatccaatggcttcagagaagaaactttcgaacccaatgagggagataaaagtgcagaagctcgtcctcaatatctctgttggcgagagtggagatcgtctcaccagagccgccaaggtgttggaacaacttagtggccaaaccccagtgttttccaaagcaaggtacactgttcgttcctttgggattagaagaaatgagaagattgcatgctatgtcactgtcagaggtgacaag

SEQ ID NO: 201483 - DNA, 290 bp, Glycine max
actcgagccgaatcggctcgaggtaccttggaagttgacgctgtcattggcgctgacggggcgcattctagagtcgccaagtatattgatgccggtgattatgagtatgccatcgcttttcaggagagggtaaaaatcccggatgataagatggtgtattacgagaaccttgcggagatgtacgtgggcgatgatgtttctccagatttctacgggtgggtgtttccaaaatgtgaccatgtggctgtaggcactggaactgtgacacacaagggggacatcaagaagtt

SEQ ID NO: 201484 - DNA, 293 bp, Glycine max
aatctttttggctgtgttatgcttctcagcactgtcactgagtcgttgtcttgcggaggataatggacttgttatgaacttctacaaggaatcatgccctcaggctgaagacatcatcaaagaacaagtcaagcttctctacaagcgccacaagaacactgctttctcctggctcagaaacatcttccatgactgtgctgttcagagttgtgatgcttcactgttgctggactccacaagaaggagcttgtctgagaaggaaacagatagaagctttgggttgagaaatttca

SEQ ID NO: 201485 - DNA, 287 bp, Glycine max
gcaagcaaaaagaaagaatcccaggcgaggagaaagatggaggggaaggagcaggatgtgtcgttgggagcgaacaagttccccgagagacagccgattgggacggcggcgcagagccaagacgacggcaaggactaccaggagccggcgccggcgccgctggttgacccgacggagtttacgtcatggtcgttttacagagcagggatagcagagtttgtggccacttttctgtttctctacatcaccgtcttaaccgttatgggagtcgccggggctaagtctaa

SEQ ID NO: 201486 - DNA, 285 bp, Glycine max
gacaagggaacgcactccaggaaaagaaaatgagtctggtgtgaaggaatatggtgaaaaccttgtcggtttacgggtcaaagtttggtggcctaaggatcgtgagttttacataggtgttattgattcttttgattctgccagaaagaagcacaaggttttgtatgatgatggtgatgaagaaacattaaatcttgtgaaggaaaaatggaaggtcattgaagctgactcagatgcagatgaggaagaacgaagtgattgtgcagatcttgatgtttccactga

SEQ ID NO: 201487 - DNA, 282 bp, Glycine max
gtttcgctaggaggtccccatatccctcttaaaacaggaagaagggatggtagaaggagcagagccgatgtggtagagcagttcctcccagaccacaatgaatccatttctgcagttcttgacaagtttggtgccatgggaattgacacccccggcgtagttgcattgcttggagcacacagtgttggtcgaacccattgtgtgaagttggtgcaccgtttgtacccagagattgatccagctctgaagcctgaccacgtcactcacattctgaagaagtgc

SEQ ID NO: 201488 - DNA, 280 bp, Glycine max
gaaaagagaagtcctcgttggtgtttgtaagagcatataaataacatagtcctcctcctttgtttttccacatcacatcgcagagagagagagagatccatcgatcaattaatttccaatggccgatcagctcaccgacgaacagatctctgagttcaaggaagcctttagcctcttcgacaaggacggcgatggttgtattaccaccaaggaacttgggactgtgatgcggtcgcttgggcagaacccaactgaggctgagctgcaggacatgataaat

SEQ ID NO: 201489 - DNA, 288 bp, Glycine max
ctcgagccgctcactcttccctcttttctttctttcatccccaaatcaaaacctaaattcccaccttcaactttctcccccaaatcgaccaccaccactgtcaagcccattcatttatattttattcgtatatatacatacagagagtgagtgagagagagagtgggaagaatggattcggatcaaggcaagcttttcatcggtgggatttcatgggatacgacggaggacaagctcaaggagcatttcggtaactacggcgacgttttgagcacttccgtcatgcgg

SEQ ID NO: 201490 - DNA, 288 bp, Glycine max
ctgatcgctccctgagagagctcgtcgcggcggttgcagaagaagattgcaagatgaagttcaacatcgcgaatcccaccactggatgccagaagaagctcgagatcgacgacgatctgaaactgcgagcattttgggacaagaggatctcacaggaggtcatcggagatgcactcggtgaggaatttaagggctatgtcttcaaaattaccggaggttgtgacaaacaaggatttccaatgaagcagggagtgctgactcctggtcgtgttagacttttgcttcaca

SEQ ID NO: 201491 - DNA, 288 bp, Glycine max
attcattctcatctttctctcttctctctccacccaaaccctaactcccgaccctgttcccctctcgtatccgtcatgaaaggaggaaagtccaagaccgaatctaagagagccgatcccaaacttgctgtgaataagaagggagccgccaccaaggctaggaaacccgccggcaaggggaaggcagcgaaagaccctaacaagccaaagaggcctccaagtgctttcttcgttttcatggaggagttcaggaaggtattcaacaaagaacatcctgaaaacaaagca

SEQ ID NO: 201492 - DNA, 285 bp, Glycine max
ggtttgggtttctcttcctcccttggagaaaaagaagagccaccgctgcgacgccgttcgtgcatttttgaggtgccgctgtcatgtttgggcgtggtggaccaaggaggagtgataactccaaatattatgatattctcgggatttccaaaaatgccagtgaagatgaaatcaagaaggcctatagaaaggcggctatgaagaaccatccagataagggaggagatcctgaaaagtttaaggagttaggtcaagcatatgaagttttaagtgatcctgagaaga

SEQ ID NO: 201493 - DNA, 285 bp, Glycine max
cacgtctctctctctctctcgccatggctatggctatgcaaagcggaatcggagtctccaagatcctcatcatagcaggagcaggttacaccggcaccgtcctcatcaaaaacggaaaactctcggatttaatcggcgagcttcagttgctggtgaagggattggaaaaatctggggagcatgctgaaggtgaaggtgaatatgctgatgccatagctgctcaggtgcgtcgcctggcgaatgaagttcggcagctagcatcaaacaggccaatcacagtactga

SEQ ID NO: 201494 - DNA, 285 bp, Glycine max
cgagaaactctaacgaaagagcgagaaagcgaagacagccatggcgtcgtttcttcaatcgtttctggatccgaagaagaactggttcgccgctcagcacatgaaatccctctccaaacgcctccgcaaatatgggctccgatacgacgatttgtacgatccttactacgatctggatgtgaaggaggcgctgaatcggcttccgaaagatgtggtggacgctcgccacgcgcgtcttaaacgcgccatcgatctttccatgaagcacgagtacctccctgacaa

SEQ ID NO: 201495 - DNA, 283 bp, Glycine max
gcgggaaacaatggcaattcccatgttgagggctgcaatgatttctcattctcaatctcaaccactcattcattccatatctgctatttattaaaccgctaagaggaggaagagagtggtgttctcttcttcttcttcagaacttaaccctgtaattcggtcagaggtatcattttgtgttgggacttgcctcattccacatccaataaaggtttacacaggtggggaagatgctttctttgtgagcaactataatgggggagttattgctgttgccgatggt

SEQ ID NO: 201496 - DNA, 287 bp, Glycine max
cgatgacatgacagagagagtagttttcgtgaccgtatggacaacgtgcttcgatgctctcgtcagagccatcgattccgacaacgttaaaaaggccttgtttgcaaaagggtacactcaccttctcattcaaatgggtcgtggatcctatcttcctactaagtctgaaggagatgattgttcgttggctgtagactacttcactttttcttccagtattgcagaccatctcagatcagcttctctagtcattagccacgcaggatcaggtagcatatttgagacct

SEQ ID NO: 201497 - DNA, 281 bp, Glycine max
gaaatatattggacaacaagggcttgttgatagtggatcaccaactagccaatgacaagaggaccaagccttatgtgaagaaaatggccaagagccaggactatttcttcaaggagttttctagagccattactttgctctctgagaacaaccctctcactggcacaaagggtgagatcagaaagcagtgcaatgctgccaacaagcaccatgaggagccttaattgcttcccgcttaatttgggccttgaattttcttccccttctctatgtggaagaaa

SEQ ID NO: 201498 - DNA, 282 bp, Glycine max
cttatatatagctatcacccctctccaaagcagcattgtaacagagaaagaaacatttgagcaaaaatggttcaagcacagcctctacaacatgttggtaatggtgcagggaaagaagatcaagcttattttgatccaagtgctccaccacccttcaagattgcaaatatcagagcagcaattccaaaacattgctgggagaagaacacattgagatctctgagttatgttctgagggatgtgttggtagtgactgcattggtagctgcagcaatcggcttc

SEQ ID NO: 201499 - DNA, 285 bp, Glycine max
aatcaagcccaagaataggagaatcatgggtgctggaggccctgatgatgaggacaacaacaggtggccaccgtggctgaagcctctgctagaagaaagtttctttgttcaatgcaagcttcacgctgattcgcacaagagcgagtgcaacatgtactgcttggattgtatgaacggtgctctctgctctctctgcctcgcttaccataaagatcatcgtgctattcagataaggaggtcctcataccatgatgtgattagggtgaatgagattcagaaggtgtt

SEQ ID NO: 201500 - DNA, 282 bp, Glycine max
aacaaatcaaatctctctctcaatctagccttctttctttttttcaatttccaaatcacgaaactcaagaagatggagaaagcgatcaacagacagaagattttgcttcatcatctcaacccttcatcatccacccaccccaacgaatcatcctccctccatgcttcagcatgtgtggcgggtcatagcgctgcttatcaaaggacatcgacattcggggacgatgttgtgatcgtggctgcttatcggactgctcattgcaaagcctaaacgaggtggttt

SEQ ID NO: 201501 - DNA, 285 bp, Glycine max
ggctcgaggagagagttagagaaagagagagagagagaggttaggctatggctgatgagagcgtcgttgagtcccctgtgaagaggcagagagatgatgatgaagaaaatgcggtctctgtatccatggttgtggagggtggcaaagtccctctgagtaacggtttatgctctgtgattcctgggtggttctctgaaattacgtcaatgtggcctggagaggctctctccatgaaggtggacaaggttttgtttcaaggagagtctgaataacagagtgtcatgg

SEQ ID NO: 201502 - DNA, 287 bp, Glycine max
aaacaaatcccagggagccaccaaccatggcttccaagctctgcgactcatgcaaatcagccactgctaccttgtactgacgccccgacgcggccttcctctgcggcgcctgtgactctaaggttcatgccgccaacaagctcgcatcgcgccacccgcgcgtcgtgctctgcgaggtgtgcgagcaggcgcccgcgcatgtgacctgtaaagccgacgccgccgcgctctgccttgcctgcgctcgcgatatccactccgccaaccccctcgccagccgccacgag

SEQ ID NO: 201503 - DNA, 284 bp, Glycine max
gcgaagagaatggctcccaagggtttaatctttttggctgtgttatgcttctcagcactgtcactgagtcgttgtcttgcggaggataatggacttgttatgaacttctacaaggaatcatgccctcaggctgaagacatcatcaaagaacaagtcaagcttctctacaagcgccacaagaacactgctttctcctggctcagaaacatcttccatgactgtgctgttcagagttgtgatgcttcactgttgctggactccacaagaaggagcttgtctgagaa

SEQ ID NO: 201504 - DNA, 285 bp, Glycine max
ccctcgagccgattcggctcgagcaaccactcttaatttctctctgccttgctcatttacacaactctccagcctttcactttaggctttatttgaatccctctctctcctttccaaatggccagcgttgaggttgcacatcaaacaccaacaacagttccagacaatgaaacatccgagctaatcaagacccaggaaacaaccccggaaccagtaccagccactgaggctcctgcaacagaacaagcagcagctgaggttcctgctcaagaagaacaacaagca

SEQ ID NO: 201505 - DNA, 284 bp, Glycine max
gcgtaacagcggctaccctaacctcgtcttcctctctactaatttcagctatggccgacgaagctgtggttgttccagatcccacccagatcgatgtcaagctctttaaccgctggagcttcgaggatattgaggttactgacatttcactggctgattacattggagttgcggcatccaagcacgccacatatgttcctcacaccgccggaaggtactccgtgaagcggttcaggaaggcgcagtgccccattgttgagaggctcaccaactctctcatgatg

SEQ ID NO: 201506 - DNA, 284 bp, Glycine max
tggagatcctgcttttcctggaggattgccgggtgttcctcccggtgcgcgatttgatccatatggacctcccggtgttcctggttttgaacccaacagatttgcaaggaatcctaggaggccaggatatgacactcatccagattggcaacattttcggagagatgctgattcagactacatatagtcgtaatacggacaagttgtcttaagtcaatttaccaaaaacaacttgagcaaatactagttatatggacaaattgttctccatgcgtattttcttt

SEQ ID NO: 201507 - DNA, 284 bp, Glycine max
gtaggtgctcaaccctagtaagccgcaatggtgaagtactcaagggagcctgacaatccaactaagtcttgcaaggctagaggcgccgaccttagggttcattttaagaacacaagggaaactgcctttgcaatcaggaagttgcccttggtcaaggctaaaaggtacttggaagatgttcttgcccacaagcaggcaattccattcagacgtttttgtcgaggtgttggaaggacagcccaggctaagaatagacactctaatggccaaggacggtggcctgt

SEQ ID NO: 201508 - DNA, 282 bp, Glycine max
cggctcgagcggctcgagaaattttctctgaagaagaagcaacaatgtctggtcgcggaaagggaggcaagggactgggaaagggtggagcgaagaggcatcgcaaggtgctccgcgacaacatccagggaatcacgaaacccgcgattcggaggctagccagaagaggcggcgtgaaaagaatcagcggcttgatctacgaggaaaccatgggtgtgctcaagatcttcctcgagaacgtcattcgcgacgccgtcacctacaccgagcacgctaggagaa

SEQ ID NO: 201509 - DNA, 279 bp, Glycine max
ctttgctattccaatggccactgttgaggttgtgtcagccaaggttgccctcccagaggacacaaaagaggcatcattgaaggttgacgaggagaagaacacagaagaagttgttgagactccaacaccagaaactgtggtcactgagcaaaccaaggaggaaagtactgaggccccacgacctgcagcttcagaagacaagccctcggttgaagttcagactaaagaggtggcagaggaagttgtgtctgagaccatcacacaagagccaacagttga

SEQ ID NO: 201510 - DNA, 281 bp, Glycine max
accattcccattgtcaatagcttcagcagtaaccagaatactttcttttccaactttagagtttcaatgataaaaatgggtaatattggagtgctgactggggatgaaggagaaattcgcttgcaatgtaattttgtgaatggagactcgtttggattagctagtgtggcgtccaaagatgctaaacaaaagcttgttgctcaatctaaataaaccaataattaatggggatgtgcatgctagctagcatgtaaaggcaaattaggttgtaaacctctttg

SEQ ID NO: 201511 - DNA, 278 bp, Glycine max
ctcactcgcaagcaaaaagaaagaatcccaggcgaggagaaagatggaggggaaggagcaggatgtgtcgttgggagcgaacaagttccccgagagacagccgattgggacggcggcgcagagccaagacgacggcaaggactaccaggagccggcgccggcgccgctggttgacccgacggagtttacgtcatggtcgttttacagagcagggatagcagagtttgtggccacttttctgtttctctacatcaccgtcttaaccgttatgggagtcg

SEQ ID NO: 201512 - DNA, 276 bp, Glycine max
ctaatatcatactcagaaagagagagagagtgagatagagaggatggaaaaactaattttcagtggtctaattgtgcttgtggggttattaaccacagaaatcaaagtagcatctgcaatttggctgcgagctcatgcaactttctatggtggaagtgatgcctcaggaacaatgggtggggcatgtgggtatggaaatttgtacactgatggttatggaataaaaacagctgccttgagtactgctttgtttaatgatggcaagtcatgcggtgg

SEQ ID NO: 201513 - DNA, 278 bp, Glycine max
gacaaaacgcaccatccaatttgttgattggtgtcccactgggttcaagtgtggcataaattatcagcctccaacagttgttccagggggagatcttgccaaggtgcaaagagcagtgtgcatgatctccaactccactagtgttgctgaggttttctcacgcattgaccacaaatttgaccttatgtatgccaagagagcgtttgtgcactggtatgttggtgagggcatggaagagggtgagttctctgaggctcgtgaagatcttgctgcccttg

SEQ ID NO: 201514 - DNA, 256 bp, Glycine max
  unsure (1)..(256): unsure at all n locations
cacgagtacaagccagagcttgatactatttccaatgctagctgnncaaccaactgccttgntccacttgctaaggttattaatgacaggtttggcattgttgagggtttgatgaccactgttcattccatcactgccacccagaagactgttgatgggccatcagccaaagactggagaggtggaagagctgcttcatttaacatcattcctagcagcactggagctgccaaggctgttggaaaagtccttcctg

SEQ ID NO: 201515 - DNA, 282 bp, Glycine max
aatttgtgaagtcagtccaaacttcagtttcaaagatgcctcgtggaacgcttgaagttgttctgatcagcgccaaaggaatcgatgacaatgattttctctccagcattgatccttatgtgattctcacatacagggcacaggagaaaaagagcactgtgcaagaagatgctggatccaagccacaatggaatgagagctttcttttcactgtctctgacagtgcatctgaacttaatctaaagataatggataaagacaactttagtcaagatgattgtc

SEQ ID NO: 201516 - DNA, 277 bp, Glycine max
atctgtgccattcatttcttctagccatggacgagactctcatacagcggttagaatcggcggtgttgcgcttggagtcgctatcctctggactccacccctccgcttcacactccggcggcgcccacgctcccgatgcggcgctcgatccctccgtcgtcgccttcgccgatctgatccgccagtacgtcggtagggtttccggcgctgcagaggttatcggcggacaggtcttgggtgtcaccaaactggtgcaggaagctttcaatgttcagaa

SEQ ID NO: 201517 - DNA, 278 bp, Glycine max
atcctctcgaggccatcgatcccgagatcgccgacataatcgaactcgaaaaggcgcgtcaatggaaggggttcgaacttataccttcggaaaatttcacgtcgctgtcggtgatgcaagcagttggatcggtgatgacgaataaatacagtgaaggatatcctggtgctagatactatggaggaaacgaatacattgacatggctgagaccttgtgtcagaagcgtgcacttgaagcttttcagctggatccagcaaaatggggagtcaatgtgcat

SEQ ID NO: 201518 - DNA, 277 bp, Glycine max
gtttgggtttctcttcctcccttggagaaaaagaagagccaccgctgcgacgccgttcgtgcatttttgaggtgccgctgtcatgtttgggcgtggtggaccaaggaggagtgataactccaaatattatgatattctcgggatttccaaaaatgccagtgaagatgaaatcaagaaggcctatagaaaggcggctatgaagaaccatccagataagggaggagatcctgaaaagtttaaggagttaggtcaagcatatgaagtcttaagtgatcct

SEQ ID NO: 201519 - DNA, 277 bp, Glycine max
agaatggctcccaagggtttaatctttttggctgtgttatgcttctcagcactgtcactgagtcgttgtcttgcggaggataatggacttgttatgaacttctacaaggaatcatgccctcaggctgaagacatcatcaaagaacaagtcaagcttctctacaagcgccacaagaacactgctttctcctggctcagaaacatcttccatgactgtgctgttcagagttgtgatgcttcactgttgctggactccacaagaaggagcttgtctgaga

SEQ ID NO: 201520 - DNA, 305 bp, Glycine max
acgcgtacggctcgacgaactacacaattcaattcaatctgcctcgatcatggagaggaaaacatttgggtttctgttcttgctcctccttgtcttagcttctgatgtgacggtgaagagagcagaggcgaaagattgcttgacaaggaggcacgggttccagggtagatgcttattcgacaggcaatgtgcacatgtgtgcaggagcgatggtttcatcggtggtcagtgccgatgccctcttcgcaaatgcttttgcagcaggccatgttgatcgaaattactactgccaaagaggccatgaa

SEQ ID NO: 201521 - DNA, 288 bp, Glycine max
cgttcgctcttcctctcccagacaaacacatggctttgcccaatcagcaaaccgtcgattaccccagcttcaagctcgtcatcgtcggtgacggtggcacaggaaagacaaccttcgtgaaaaggcatctcactggtgaattcgagaagaaatatgaaccgaccattggtgtggaggttcatccgttggattttttcactaactgcggaaagattcgattctattgttgggatactgctgggcaagagaagtttggcggcctcagagatggatattatatccatgggc

SEQ ID NO: 201522 - DNA, 303 bp, Glycine max
cggaattcggctagagcgaagagaatggctcccaagggtttaatcttatcggctgtgttatgcttctcagcactgtcactgagtcgttgtcttgcggcggataatggacttgttatgaacttctacaaggaatcatgccatcaggcagaagacatcatcacagaacaagtcaagcttctctacaagcgccacaagaacactgctttcatccggctcagaaacatcttccatgaatgtgctgttcaaagttgtgatgcttcactgttgctggtactcagaagaaggagctgaagtgagaatgaa

SEQ ID NO: 201523 - DNA, 290 bp, Glycine max
ctttccctctctactcttctttcactttccatttccatttccattttttctggttcactttctcgatggcctccgagaaccccaccgccgacgacgccgtcaacggcttcaatcggccggaaatgttctcggaaaacctcgccggcaccgtcgacgcctacgaccgccacgtgttcctctgctacaagagtcacctgtcctggcccccgcgcatcgaggcctccgacgccgatcccttccccaagcgcgtcgccgccaccttcaaagcccgcaagaacgacttgcccctc

SEQ ID NO: 201524 - DNA, 284 bp, Glycine max
  unsure (1)..(284): unsure at all n locations
cgatacgntacaagtaccgcgagggaaagatgaaaaggactttgaaaagagagtcaaagagtgcttgaaattgtcgggagggaagcggatgggggccggcgatgtgtcccggtcggatgtggaacggtgagagccggtccgccgatcgactcgggacattgaccgacgcggattgcgatggtggttcaagcccgggctgttgatatgctcgtggagacgtcatcatcgcgattgtggatggcagcgcgcgcgggtcctctgaagcccggtgtcgacaccgtgga

SEQ ID NO: 201525 - DNA, 280 bp, Glycine max
atcgagcgaatcggctcgagggctcgagatcaaagtatgggacatgctcttgcccagaaatacggtggctctgctgatcacaatacagtgtttccagagaggcagggaaagtggaaagcaacaacacaatcaagagagtttttaaaatccataaaacgatactatagcaatgcttacacagatggtgaaaaacaagatgcaataaacttgtttttaggttacttccaaccacaggaagggaaacctgctctctgggagctggattcagattattatctcc

SEQ ID NO: 201526 - DNA, 290 bp, Glycine max
gcaaattctaatcttcgcaaatcaacaacgtctctctctgttactctgaaaactgacttcaagttagtgtaactagctgccaagttgtgatggcattggtctctggaagaagttctgctctgaacccaaatgcacctatgttcatacctgctgcacttcgtcaggtggaggatttttcacctcaatggtgggatcttgtgaaatcttcaacatggtttcgtgattattggttgagccaacataaggaggaagaatttgaagaagttgccaatgactctactaatgatgat

SEQ ID NO: 201527 - DNA, 290 bp, Glycine max
ggaatggtggtggtagtgccaggtgtctgtctgaggagaaaatagaataaaaagctatgaaattttggcacaaggtctgattgtagaattgaagtagatgactggggggggtatcactatgcaatcgacgcctcgaagctcaggatacttggatttgtatccagagcggaagatgtcctttttcaaaaatccttacattctcggactggctgctgtcgccggcatcggtggtctcctcttcggctacgacactggtgtgatatcaggggctcttttatacattaaggatg

SEQ ID NO: 201528 - DNA, 291 bp, Glycine max
ctaactaaagccgagcagcgagagagagaaaccctagcaaaaatgccggctggtcacggtttgagatcccgcaccagagattccttctctcgtcccttcaggaagaagggtaccatcgccctcaccacatacctcagaacctaccacgtcggcgattatgtcgacgtcaaggttaacggcgccgtccacaagggaatgccacacaagttctaccatggccgcaccggtcgcgtctggaatgtcaccaaacgtgctgttggggtcgaagtcaacaagcaggtcggcaacaga

SEQ ID NO: 201529 - DNA, 249 bp, Glycine max
aattcaacattgtctcccctggagctgatcaaaccatttacttcccccacactgaaaccagccgtaggttgacatccttccaccctgaaatcgaagaactcctttacagctcagtggagaatgaagaacacatatgtgtgctgaaggaccgcagcaagccaattatcttcaccatggcaaggttggatcgagtgaagaacatcacaggacttgtggagtggtacggtaagaacgcgaactgagggagct

SEQ ID NO: 201530 - DNA, 281 bp, Glycine max
atggctcccaagggtttaatctttttggctgtgttatgcttctcagcactgtcactgagtcgttgtcttgcggtagataatggacttgttatgaacttctacaaggaatcatgccctcaggctgaagacatcatcaaagaacaagtcaagcttctctacaagcgccacaagaacactgctttctcctggctcagaaacatcttccatgactgtgctgttcagagttgtgatgcttcactgttgctggactccacaagaaggagcttgtctgagaaggaaac

SEQ ID NO: 201531 - DNA, 270 bp, Glycine max
aaaaaagcgtccaagttcagtaaagcttttaaaacaccacttctttaaacaagcacgtttcagcagatatctagctcgcaccattttagaaggccttgctcctttaggagatcggtttagattgctgaaggctaaacaggcagatttattggtgcagaccacggctctttacgaggataaggatcaattatctcagaaagactatattcgagcgattagtgcatggacttttaacctggaggatttgaaaagtcaagctgctcttattca

SEQ ID NO: 201532 - DNA, 285 bp, Glycine max
gaagcagttgatctggtcaaaactgtttttgcatctgcaactgagagagatatatacactggagataaggttgaaatcgtcgtcctaaatgccagtggtattcgtcgtgaatacatggacctaaggaaagattaatgctttacagaaatttactgttggagataccagacttggattgagaatgtttgaaatgcttctagaattttaaatgacatagtgggtttttcacatgaggtgaaattaaaaatagcgtttccagtgaaattgctttgaacaagtactagt

SEQ ID NO: 201533 - DNA, 287 bp, Glycine max
ggaaaggttaactaagaagcaatacttcaatggccacccttgttgttcataaccaaacttcttctgctcaagatgctgaggctctccaacaggctttcaaaggatggggggctgatgacaaggccattatagcaatactgggtcacagaaatgttcatcagaggcaagaaatcagaaaagcttatgaggagatttaccaagaggatctcatcaaacgccttgagtccgagatctctggtgactttgagagagctatgtaccggtggatgttgcagcctgcggatcgt

SEQ ID NO: 201534 - DNA, 287 bp, Glycine max
ctcagcccctcggagggtttcattgaagagttcagaagcaggacaccaacacttaggtttggcagcatgtgtggcagtaaacaacctcaacatgaatgttgttgtgtgtgtctcacaaagtttgaaccagaatctgagataaactgtttatcatgtggccatatttttcacaaagtgtgcatggagaagtggttggactattggaacattacatgcccactttgcaggacttccttgatgcctgaagatgatgcatcttgcttttggtaaaaaaacatgtacatata

SEQ ID NO: 201535 - DNA, 291 bp, Glycine max
tttgggattagaaatttttcccaaagctgatcgagaagccagccaggccagagttgaagaagaatgggaagggggaagattcgaaattcaaaaggattgagaacacaacaaatcggcaagtgaccttctgcaagagaagaaatgggcttctgaagaaagcttatgagctgtcagtgctgtgtgatgcagaagttgccctcatcgtcttctccagccgtggccgtctctatgagtattccaacaacaacataagatcaacatagagaggtacaaaaaggcatgttctgatca

SEQ ID NO: 201536 - DNA, 287 bp, Glycine max
cacaccaccccttctttcttatcatcaggtttattcctagtctctttgttctatttcgctgcattgagagtgtaagaatcagcaaatggttaaatcttctagtttgtgtactgctattgcttaaggcagatggatctcttgttccattgactttggtgaataatgcagaatcataaggagctgttgtttggatggaagccccccagcataccactttgtacaaggatttgaagaagggattaagaactggattgttcacattgagggaggaggatggtgcaacaatg

SEQ ID NO: 201537 - DNA, 292 bp, Glycine max
catgcacccgcgattcctacgatcccttcccatggtctcttctctgcaccctcgccgtaccttctagaaccttccctcagatctcaattccccttccgctttctcctttcatggaaatggcttccactccccgcaccgtcgaagagatcttcaaggactacaccgcccgcagaaccgccatcgttcgcgctctctctcaagatgtggatgaattctacggactctgcgatccagataaggagaacttgtgcctctatggacatccgaatgaaacatgggaggtgactttgcc

SEQ ID NO: 201538 - DNA, 294 bp, Glycine max
cgtagatagccgatgtgcttgtcttagtgcgccagtcattcgtgttcctcaagtcaagctttgtagtgagcagatataatggctgttgaaaggtccggaattgccaaagatgttacggaattgattggtaaaaccccattagtatatctaaataaacttgcggatggttgtgttgcccgggttgctgctaaactggagttgatggagccatgttctagtgtgaaggacaggattgggtatagtatgattgctgatgcagaagagaagggacttatcacacctggaaagagtgtc

SEQ ID NO: 201539 - DNA, 286 bp, Glycine max
gttcctttacgcaaaccacggaagctgccaggtgaagtaatttcagaaaaatatgctctagaatatggaactgattgcttggagttgcatgttggtgctgcccagcccggtgaacgggccataataattgatgacttggtggccacaggtggaactctgtcagcaggagtaaaacttctagaacgtgttggggctgaagtggtggaatgtgcttgtgtcattggtgtgcctgatgtcaaggggcagtgcaggagtattggaaagccactttatgttcttgttgagc

SEQ ID NO: 201540 - DNA, 286 bp, Glycine max
ggcttatggtggatacctaggcacccagagacgaggaagggcgtagtaagcgacgaaatgcttcggggagttgaaaataagcgtagatccggggattcccgatataggtcaacctttcgaactgctgctgaatccacgggcaggcaagagacaacctggtgaactgaaacatcttagtagccagaggaaaagaaagcaaaagcgattcccgtagtagcggcgagcgaaatgggagcagcctaaaccgtgaaaacggggttgtgggagagctatacaagtgtcgtgc

SEQ ID NO: 201541 - DNA, 282 bp, Glycine max
gagacaaggcaaaggttagttgccccagtgtctgtggagcttgaaggggatcagtacgaggaatatgtcaaaactgagctttattacaaaaagcatttgctccggacacctcattgttcccttctgctgtctaactatgcacagtttctcttccttgtccttcatgatattgatggggcagaagagtactacaagcgatcagtgctagcggaatcaccggaagctgaggcattcagtcgctacgccgacttcttgttgatggtaagaaaggatgtttgggca

SEQ ID NO: 201542 - DNA, 286 bp, Glycine max
  unsure (1)..(286): unsure at all n locations
actcgnagctctcgagccgattcggctcgagaacacagaagcagaaggaggagaagcagaaagaggagacacaagcaatggcgccgaagaagccccgaaccacgtcgaggaaccctgatttggtcaggggaattggcaaatattcgaggtcgcagatgtaccacaagaggggcatctgggccatcaaggccaaaaacggcggtgttttgcccctccacgatcccaagcccaaacccgaggccccggcccagaagccgcccaagttctacccggccgatgacgtgaa

SEQ ID NO: 201543 - DNA, 284 bp, Glycine max
gaatggctcccaagggtttaatctttttggctgtgttatgcttctcagcactgtcactgagtcgttgtcttgcggaggataatggacttgttatgaacttctacaaggaatcatgccctcaggctgaagacatcatcaaagaacaagtcaagcttctctacaagcgccacaagaacactgctttctcctggctcagaaacatcttccatgactgtgctgttcagagttgtgatgcttcactgttgctggactccacaagaaggagcttgtctgagaaggaaaca

SEQ ID NO: 201544 - DNA, 283 bp, Glycine max
ggaatcttgagaaatggcaggggacagcaagagcaagattctgttcatctgagggactggttacatcggaaaattcatcgtggaagccagcgccaaagctggccacccaactttccttttggtgagggagtccactctctccaaccccgcaaaatcacccctcatcgacaatttcaaaggcctcggtgtcaatcttgttttaggagatctatacgatcaccaaagtttggtgagtgctataaagcaggtcgatgtggtaatttctactgtaggacacctgcag

SEQ ID NO: 201545 - DNA, 283 bp, Glycine max
cacaaaaggagcatcgagtaggtttcctactcccttctcatcgttggtaagatgagtgccatgaaattttgccgtgaatgcaataacattctgtaccctaaggaagacagagaccagaaagttcttctcttcgcttgccgcaactgcgaccatcaggaggttgctgataacttctgtgtgtataggaatgagatacatcactctgttggagagcgcactcaggtgttgcaggatgtcgctgcagatccaacgcttcctcgaaccaagtctgttcgctgcagtc

SEQ ID NO: 201546 - DNA, 275 bp, Glycine max
gtaagcaagcaaaaccctagcggcgcctgctttctttgttcgtgttttgcatcaggatggagtctcaggtgaagcacgcacttgttgtcaaagttatgggtcgtactggatccagaggacaagtgacccaggttagagtgaagtttttggatgatcagaaccgtcacatcatgaggaatgtgaaaggacctgtgagagaaggagacattctcaccctactcgagtctgaaagggaagcaagaagattgcgctagatggtctcttttttttggctt

SEQ ID NO: 201547 - DNA, 278 bp, Glycine max
gagaatggctcccaagggtttaatctttttggctgtgttatgcttctcagcactgtcactgagtcgttgtcttgcggaggataatggacttgttatgaacttctacaaggaatcatgccctcaggctgaagacatcatcaaagaacaagtcaagcttctctacaagcgccacaagaacactgctttctcctggctcagaaacatcttccatgactgtgctgttcagagttgtgatgcttcactgttgctggactccacaagaaggagcttgtctgaga

SEQ ID NO: 201548 - DNA, 291 bp, Glycine max
tgcggagagagaaattgagtttccgagataaccagttttctctttgattcatcaatggcaactgcgaggaccgtgaaggatgtttcgcctcacgatttcgtgaaggcttatgcttcccacctcaagcgttccggcaagatggagcttcctgagtggaccgatattgtaaaaacagcaaaatttaaggagttggctccatatgatcctgactggtactacattagggctgcctcaatggcaagaaagatctatttgagaggtggtcttggtgttggtgctttccagaggatc

SEQ ID NO: 201549 - DNA, 281 bp, Glycine max
caacaactggtggtgtgaagaagcctcatcgttatcgccctggaactgttgctcttcgtgagattaggaaataccagaagagcactgagctcctaatcaggaagcttcctttccagaggttggttcgtgaaattgcccaggatttcaagactgatctgcgtttccagagccatgctgtgcttgcattgcaagaggctgctgaggcataccttgttgggctctttgaggacactaacttgtgtgccattcacgccaagcgtgtgactattatgcccaaggat

SEQ ID NO: 201550 - DNA, 285 bp, Glycine max
actcgagccgaatcggctcgagctcactgcgcatcacacacaaacaaacactcccattctctcactctctctctctctccgacacaagcgagaccgagcgatccgaccctaatctcgcgatgctccgccgcgcaacctcctccctcctcaccggcgcctcccgccgccgcctctcctccgacgtgccggcgacccccgccgcggattccgccttcgcggaggcgtggaagaaagtgagccccaacatcgacccgccgaagacgccgctggcgtacatgaagcccc

SEQ ID NO: 201551 - DNA, 281 bp, Glycine max
ctcgagccgtggatagtgagattagcaactatgtagatgaatatgatgtcactcttgatgtttgtttgtcatcagtaaatcaacaggcttatgtgctgaatcaactgcaagagacacagaagatagatgtttgtatcggtgataaaacaactacatacttgaacactaaagaagtccaagaagctctgcatgctaatcttgttggagtcgccaaatggtcaacttgcagctcagttctgcattatgattatcagaatctagaaataccaacaattcctatt

SEQ ID NO: 201552 - DNA, 281 bp, Glycine max
tgcccgcttccgattcacggaataagtaaaataacgttaaaagtaatggtatttcactttcgctgtttccagctcccacttatcctacacctctcaagtcatttcacaaagtcggactagagtcaagctcaacagggtcttctttccccgctgattccgccaagcccgttcccttggctgtggtttcgctggatagtagacagggacagtgggaatctcgttaatccattcatgcgcgtcactaatacgatgacgaggcatttggctaccttaagagagtc

SEQ ID NO: 201553 - DNA, 278 bp, Glycine max
aacaagacaacccagagagcgcgtcttaataaacgctcttctctgaaaacccccatttcttttcttctttcttcttctctttcgcttcttcgatcttcgatcttcgtcgctgaaaatgagagagtgcatttcaatccacatcggccatgcctatattcaggttggaaacgcctgctgggagctttactgcctcgaacacggcattcagcctgatgggcagatgccaagtgacaagaccgttggtggaggtgatgatgctttcaacaccttcttcagtg

SEQ ID NO: 201554 - DNA, 281 bp, Glycine max
gagcggcaactggattcatctctcaagcaagtgaggtccacaaagactcagttcatgctggaccagttagctgatcttcagaataaggagcatatgctggtagaagcaaacagatctttgaccatgaagctggaagaaatcaattcaagaaaccagtataggcaaacatgggaagctggtgagcaaagtatgtcatatggtacacaaaatgctcactcccaaggctttttccagcctttggagtgcaaccccacattgcagataggttctgactacaggta

SEQ ID NO: 201555 - DNA, 281 bp, Glycine max
tgagaatggagtttcaagggttaccggaaggttgcattgctagtatactctctcgcactacgccggcggacgtgtgtaggttttcagtcgtatcaaagattttccgttcggccgctgaatcgtacgctgtgtggaaacgttttctcccttccgattaccattccatcatttcccagtctccttcgcctctcaactatccttccaagaaggagctctatctcgctctctcggatcgccctatcatcatcgatcagggtaaaaagagctttcaattggagaaa

SEQ ID NO: 201556 - DNA, 283 bp, Glycine max
ctcgagccgtttttggggattggtttccagccaaagtggggaatcaaagacatacctataatgtcaaagggaagatacgacatcatgaggaactacatgcctaaagttggctctcttgggcttgacatgatgttcaggacatgcactgtgcaggtcaatctggactttagttctgaagctgacatgatcaagaaatttcgtgcaggccttgctttgcagccgatagcaacggctctttttgcaaattcaccctttaaagagggaaagccaaatggttttgtca

SEQ ID NO: 201557 - DNA, 286 bp, Glycine max
aaatcgttgtcaatttcgcctctttctttctcaactcccttagattctctccatcgggtcttcaaaacatgcggatgagctgcaatggatgtcgagttctcagaaaaggttgcagtgaaaattgcagcatcagaccctgtttacaatggatcaaaagcccagaatctcaagccaatgctactgtgtttcttgccaagttctacggccgtgctggtctaatgaacctggttaacgcaggccccgaacatcttcgtccagcgatctttcgttcgttgttgtacgaggc

SEQ ID NO: 201558 - DNA, 275 bp, Glycine max
gtggtttcccttgatgaagaacaaattgctgcaaacctagtaaagaatggccctcttgcagttgctatcaatgcagtttttatgcagacatatgttggtggcgtctcatgcccatacatctgtgggaagcatttggatcatggggttcttctagttggttatggtgaaggtgcatatgctcccattcgttttaagaacaaaccttactggatcattaagaattcatggggcgatagctggggagagaatggatattacaagatctgcagaggtcg

SEQ ID NO: 201559 - DNA, 279 bp, Glycine max
gagagaacttcaagtgagggtgagagtgacacaaatctagagagagcactagtactctaaaagtctattatattcttcaaaatatgaccatgcatcgcgagtcttgggcttttgtcttcggcgttatgggcaacatcatctcctttggagtgttccttgctccattgccaaccttttaccaaatctacaagaagaaatccactgaaggtttccagtcacttccttatgttgttgcactgttcagtgcaatgctttggatttactatgctttcgtgaaaa

SEQ ID NO: 201560 - DNA, 279 bp, Glycine max
agcacttcttcttttcacactgccgctgcaacaatggcttcagagaagaaactttcgaacccagcgagggagataaaagtgcagaagctcgttctcaatatctctgttggcgagagtggagatcgtctcaccagagccgccaaggtgttggaacaacttagtggccaaaccccagtgttttccaaagcaaggtacactgttcgttcctttgggattagaagaaatgagaagattgcatgctatgtcactgtcagaggtgacaaggcaatgcagcttttg

SEQ ID NO: 201561 - DNA, 277 bp, Glycine max
ggtgagacagtaccctcaaataccaggtggagatccacggtgttatcctagcaccggttccgcggttttgcgtccattgaagaatcttcgagcacctaaagtggaggctgaggttttaatctgtggtggagccccgagaggagcttaccagaatgctttatcgggtaagtttgttccagcgttggaaacgtacgctcggattaaaataaccgacccgaacccgaaatgggatatagaaacaatgcccggtgctagagtcatgtagtgacatggtttt

SEQ ID NO: 201562 - DNA, 272 bp, Glycine max
cggcgacaccttctccatgctcggtcaggttgaccgatccatctcctgctacgaccaaggcctccagatccagatccaagccctcggtgacaccgatccccgcgtcggtgaaacttgccgatacttggcggaggcaaatgtgcaagcaatgcagtttgataaagcagaggagctgtgtaagaagacactggagattcatcgggcacatagtgaaccggcttcgcttgaggaagctgcagataggaggctcatggcgctgatttgcgaggcga

SEQ ID NO: 201563 - DNA, 277 bp, Glycine max
agcagctccaagacgccgtcgccaagaaagattcctccgccgtcgttaagctccagggcgccatcaagttcaacggcggaggtcacgtcaaccattctattttctggaaaaatctagctcctgttcgtgaaggaggtggtgaaccacccaagggttcactgggatgggccattgacacacattttggctcttttgaagcattagtacaaaaagttaatgcagaaggtgctgcactacaggggtctggatgggtgtggcttggtctggacaaagagtt

SEQ ID NO: 201564 - DNA, 283 bp, Glycine max
cttaacaacagcacaaagcgggttactgtctgttcaagctaccatctctctctctctttcttagtgcctccttgccagaagttaaaatggcccaagaaactttcctattcacatctgaatcagtgaacgaggggcaccctgacaagctctgtgaccagatctccgatgctgtgctcgatgcatgcttggagcaggaccctgacagcaaggttgcctgtgaaacctgcaccaagaccaacatggtgatggttttcggagagatcacaaccaaggccaacgtgga

SEQ ID NO: 201565 - DNA, 275 bp, Glycine max
ctcgagcgcattttcactcttgtttagagattgttcaagaggaacaaaccatggtagtgaaggtttacggtccccactgtgcttccacaaagcgggtgctggtttgtctggttgagaaggaagtcgaatttgatgttgtccctgttgatgtcactaagggggagcagaaggatcctgagtacctcaaattacagccctttggagttgttcctgtcatcaaagatggagctataccttatatgaatctcgtgctataataaggtattatgcagaaa

SEQ ID NO: 201566 - DNA, 273 bp, Glycine max
gagttgaagacgctcttaatgctacaaaggcagctgtagaggaaggtattgttgttggtggtggttgcactcttctgagacttgcatcaaaggtggatgcaatcaaggatagccttgataatgatgaagaaaaagttggagctgatattgtgaaaagagctcttagttaccctttgaaattaattgccaagaatgctggtgtcaatggtagtgttgtcagtgagaaggattgtccagtgactatccaagatatggatataatgctgccactgg

SEQ ID NO: 201567 - DNA, 274 bp, Glycine max
ctcagtagaccatggcctcattgggtgggttacaaaatctaagcggcatcaattttcttatcaaaaaagagggtccaaaagtcaatgcgaagttcgagctgaagccgccaccatatccactgaatggtttggagccggtgatgagccagcagacacttgagtttcattgggggaaacaccacaagacatatgtggaaaatccgaaaaaacaaattgttgggacagagctgatgggaaatcactagaagagattatagtgacatcatataataag

SEQ ID NO: 201568 - DNA, 274 bp, Glycine max
ggctccaagagttgaaagcttggcgagcagcgggataaagtgtatcccgaaggaatacgtgaggcctcaagaagagctcaagagcatagggaacgtgtttgaggaggaaaagaaggaagggctacaggttccgacaattgacttgagagagatagattcggaggacgaggttgttcgagggaaatgtcgtgagaagctgaagaaagcggcggaggagtggggtgtgatcacttggtgaaccatgggatccccgatgagctgatagagcgggtga

SEQ ID NO: 201569 - DNA, 272 bp, Glycine max
caaagagaagcattagcactaggagcagcaacaactagtctcagctgaaatggcctcttcagtgatggcatctgtggccctcaaacctgcccctttcactgttgagaagtcctcagtgagaggccttccctctctctcaaggaactcttcttcattcagagttgtggccagtggcaagaagatcaagactgacaaaccttatggaattaatggtggcatggctttgagggatggaactgatgcatctggcaggaaaggaaagggaaagggtg

SEQ ID NO: 201570 - DNA, 269 bp, Glycine max
ttcaattctgattgcaaccacgacactactccaccttccaacatgggcggtatcagccttgaggaaatcaaaaacgaaaacgtcgatctggaaaaaattccagtagaggaagtgtttgagtcgctgaaatgttcaagagcaggtttaacatcagacgaaggagccagccggcttcaagtttttggaccaaacaaattggaagagaaaaaggagagcaaactttgaagtttctgggtttcatgtggaaccccttatcatgggtcatggaa

SEQ ID NO: 201571 - DNA, 268 bp, Glycine max
ctcgagccgattcggctcgagttgtctggctaaccaaccctgaagctccttcttctccgagtcctcttcgatcatcgcttcagaatgccgccgaagttcgacccctcccagatcgtcgacgtcttcgtacgcgtcaccggcggtgaggtcggcgcggcgagttccctcgccccgaagatcggtcccctcggtctctcccccaagaagatcggagaagatatcgcaaggaaaccgccaaggactggaagggcctccgcgtcaccgtcaa

SEQ ID NO: 201572 - DNA, 267 bp, Glycine max
tatttctcagtctctgtgtttgcggctgaggattccgaacgagtgaccttcttcgtttctcgcaaagtttaagtaatcatgggtaaggaaaaggttcacatcaacattgtcgtcattggacatgtcgactctgggaagtcaactaccactggtcacttgatctacaagcttggaggtattgacaagcgtgtgattgagaggttcgagaaggaggctgccgagtgaacaagaggtcattcaagtatgcctgggtgctcgacaagctca

SEQ ID NO: 201573 - DNA, 268 bp, Glycine max
catttctacacatccctagctctgtcgttccgtcgttgacgatggcgtttcgggtgcgaagcctgacctccgctctctctttcttctctctctcttgtccatcgcttccgccaatgtcttcttcgaagagcgtttcgatgacgggtgggaaaatcgatgggttaaatcagattggaaaaaagatgagaacgtggctggggagtggaaccacacctctggtcatggaatggagacgctaatgacaaaggtattcaaaccagtgaggatt

SEQ ID NO: 201574 - DNA, 277 bp, Glycine max
aaatcactggagtctcggagcagtttgacaagctaccattaaccattttattttaatacgttgtttattttctaggcagcagaatgattaatgacttgctgtaaataagttactagccttcctcagtttgtttcaatttttatatttataaatcccatttgtttcaaaaaaaaaaaaaaaaaaaaaaatattaaagaaaaaaaaaaaaaaaaaaataaaaaaaaaaggggggccccccattttggacccttgcccccgggggattttttcggggggg

SEQ ID NO: 201575 - DNA, 269 bp, Glycine max
ggcagtgggcgtgccggtgagtggcgcatcgttctatggtctggcggcggggacggcaaggggtgggtcccctgagtcaaggttggcggtttacaaagtgtgtggggcttttgggtcatgtcctgggtcggccattcttgcggggtttgacgatgccattcacgacggagtggatatcttgtcgctgtcgctcggtggattcggtggaaccaaaaccgatttgacaccgacccgattgcgattggagcattccactccgtccagcgcgg

SEQ ID NO: 201576 - DNA, 268 bp, Glycine max
ggtggcggtggcggcggtggcatgagatcaaggttccctggtgggatgtttggtgatgatatgtttgcatcttttggggaaggaggaggaatacatatgagtcaaggtgcacctcggaaagctgctcccattgagaacaaattgccctgcactcttgaggagatatataaagggactacaaagaagatgaagatctctagagaaattgcagatgccagtggaaaaccatgccagtagaggaaatcttgaccattaatgtcaagcctgg

SEQ ID NO: 201577 - DNA, 266 bp, Glycine max
atcattatctctcgtctctgctactccttgtgcaaatcttaggagctgaggagcatcaatcgagagaaatatgtctggtatcgctcgtggacgccttgctgaggatcgaaagtcatggcgcaaaaaccatccacacggtttcgttgccaagcccgagactctacctgatggcaccgtaaatttgatggtctagcattgcactattcctggcaagaccgggactgttccgatggtggatatatcccactgacaatgcacttcagtga

SEQ ID NO: 201578 - DNA, 269 bp, Glycine max
gtttgatatgggagatgtacttattggcggtaaacccactggatattgtgctgatggctgttcagccattgcagactcagggacttctttgttggcaggtccaacgactgtaataactatgataaaccatgcaattggagcatctggagttatgagccaagaatgcaagactgttgttgcagagtatggacaaacaatattggatttgcttttgtctgaaacaagccgaagaagatctgttcccgaattggattgtgtgcttttgatgg

SEQ ID NO: 201579 - DNA, 269 bp, Glycine max
gtgcgagtcaacgggcgagtaaacccgtaaggcgcaaggaagctgattggtgggatccccctgtgggttgcaccgccgaccgaccctgatctgctgtgaagggttcgagtgagagcatacctgtcgggacccgaaagatggtgaactatgcctgagcggggcgaagcagaggaaactctggtggaggcccgcagcgatactgacgtgcaaatcgttcgtctgattgggtataggggcgaaagactaatcgaaccgtctagtagctggtt

SEQ ID NO: 201580 - DNA, 271 bp, Glycine max
ggcacgataaaagcgatacttctctaatgaattgtttctctaatcgatccaccaacattccattttcgtcatcatccggtaccgtgataattttcacagctacagcttcatctttatacatgccatggtaaagcctgctatgagcaccatgagcaaacctaacaccaacaaagagcttggagaggtcaacattccattcctcagctgtttccacagcagtaaccttctccctccatgatcaaagtactttgtccatcccaaatcctttcgg

SEQ ID NO: 201581 - DNA, 269 bp, Glycine max
gagaatggctcccaagggtttaatctttttggctgtgttatgcttctcagcactgtcactgagtcgttgtcttgcggaggataatggacttgttatgaacttctacaaggaatcatgccctcaggctgaagacatcatcaaagaacaagtcaagcttctctacaagcgccacaagaacactgctttctcctggctcagaaacatcttccatgactgtgctgttagagttgtgatgcttcactgttgctggactccacaagaaggagctt

SEQ ID NO: 201582 - DNA, 269 bp, Glycine max
cgggtttgacgttgttcacaatcactttctgcgcttcactcactcccttcgtgcggttttctttctttgtcgaactcgtgcgaaaatgcgtgagattcttcacatacagggagggcaatgcggaaaccagatcggagcgaagttctgggaggtggtgtgcgcggacacgggatcgattccacggggaggtaccagggggacaacgagttgcaactcgagcgagcaacgtctattacaatgaagcgagttgcggaaggttcgtgccgagg

SEQ ID NO: 201583 - DNA, 265 bp, Glycine max
ctttctctctcatgttgtagtatctcacttgtgtttttcattcgcttctgaaccacacaaacatcaccaccgaacaatgccgacggggttaccggcggcgaattccttagtggcgccggacgaagaggggtgggtgtgggggcagatcaaggcggaggcgcgccgcgacgccgagtcggagcctgctttggcgagctacctctactcgacgatcctctcgcatcgtcgctcgagcgttctctgtcttttcacctcggaaataagc

SEQ ID NO: 201584 - DNA, 267 bp, Glycine max
agaagtactgaaggtgtggtgatgggtgttccacaacctccacctccctctcaacatctctatccacaagaaattcagcttaaactttaccaagccttcatattctcaattcccatactcttttccatcattttggttcttttgttttacttgttctacctcaaaaggagggcttcttctctctcatcaccacctctccacatacttcccagtactactaatcacaaactacatatccttatccttcacaaccttgccgtttagatc

SEQ ID NO: 201585 - DNA, 264 bp, Glycine max
ttctcttctctgtccaactcaatcgattagtttagcttccgcggacagttcaggggtcatggctagggttttagttcagtctactggtatgcctggcctactgagtgggcaaaggcacgggaagcataagggatcaggaaaatcgaaaagatctgtcaaaatgatgagcaccttacgaatgcctgctttaagaatgtcgagtttctccggattacgtatcttaatcctatggattctctgtcgagaccacgccacacttttccg

SEQ ID NO: 201586 - DNA, 262 bp, Glycine max
gcagtagccgagattccgtgagttgcaaaaatgaagatcattctttccaccgagaccatgaacatcccggacggcgtgagcatcaaagttcatgccaaggtcatcgaagttgagggcccccgcggaaaattggtgcgagacttcaagcatttgaatctcgattttcagctcattactgacgaaaacggtaaaagaaagctgaaaatcgacgcgtggtttgttctcggaaaacatccgccgccattcgcaccgccttgagcca

SEQ ID NO: 201587 - DNA, 271 bp, Glycine max
aaacaaccttctttctttttctgtgagcctttctttcaggttcttaacttgatcagtgtgcagtgtccaaatcataagggtagttgcaaattgcaatggctaagcatgatgttgagggtggttccttctctgcaaaggactaccatgatcctcctccagcaccgttgattgatgctgaggaactcacacagtggtccttctacagggctttgattgctgagttcattgccacaatgctcttcctttacatcacagtgctcactgtgattgg

SEQ ID NO: 201588 - DNA, 269 bp, Glycine max
gaaagaactgacctcagcggcggcggcggcggcaacagaagaacaaccaccaccacacacaatgggtcgcgtgagaacaaaaacggtgaagaaatcctcccgccaggtgattgagcgttactactcgcgcatgaccctcgacttccacacaaacaaaaagcttctcgaagaagtggccatcatcccttccaagaggctgcggaacaagatcgcgggtttctccagcatctcatgaagcgcatccagaagggtcccgttcgcggcatctc

SEQ ID NO: 201589 - DNA, 269 bp, Glycine max
gttcaaaggtaaggtaggttaacactcttcttcatcgtcgtcgcaatgggacgtgtgatccgtgcgcagcgtaagggagcaggctcggtcttcaagtcccacacgcaccaccgcaagggccctgcacgcttccggagcctggacttcggggagcgcaacggctacctcaagggcgtggtcaccgacgtcatccatgaccctggccgcggcgcgccgctcgccaggtcgccttccgccaccctttcagatacaagaagcagaacgagctc

SEQ ID NO: 201590 - DNA, 260 bp, Glycine max
gtttctttcacttcacaaaaatgaaaaacatgaaattgtgttcggtgatgctatgcttatcactagcgttccttcttggggccacagcagaacaatgtggcacacaagctggtggagcgttatgcccaaatagattatgttgcagcaaatttgggtggtgtggtgacacagattcctactgtggagaaggttgccagagccaatgcaaatctgcaacacctcaacaccaactccaacaacacctagtagtggtggagata

SEQ ID NO: 201591 - DNA, 261 bp, Glycine max
gaaaaagaggcgcaagatgagtggtagggtttctgggaaggtgaagtggttcaatgatcagaaggggtttggattcataagccctgacgatggcagcgacgatctcttcgttcaccaatctcagatcaaatctgacggtttccgaagcctcgccgaaggagagtccgttgagttcgccattgaatctgaatctgacggacgcgcgaaggctgttgagtcactggccccgacggcgccaggatccagggaaccagacgaggc

SEQ ID NO: 201592 - DNA, 264 bp, Glycine max
gtttctcttcctcccttggagaaaaagaagagccaccgctgcgacgccgttcgtgcatttttgaggtgccgctgtcatgtttgggcgtggtggaccaaggaggagtgataactccaaatattatgatattctcgggatttccaaaaatgccagtgaagatgaaatcaagaaggcctatagaaaggcggctatgaagaaccatccagataagggaggagtcctgaaaagtttaaggagttaggtcaagcatatgaagttttaagt

SEQ ID NO: 201593 - DNA, 267 bp, Glycine max
tttctttttctgtgagcctttctttcaggttcttaacttgatcagtgtgcagtgtccaaatcataagggtagttgcaaattgcaatggctaagcatgatgttgagggtggttccttctctgcaaaggactaccatgatcctcctccagcaccgttgattgatgctgaggaactcacacagtggtccttctacagggctttgattgctgagttcattgccacatgctcttcctttacatcacagtgctcactgtgattggttacaaga

SEQ ID NO: 201594 - DNA, 265 bp, Glycine max
caaaatcctcgtgacagatctaatctaatcagccttttgggggtgtttcagacattgcatgcatatgggtggttgtgttggatgctataaaaggccttcactgagtcccacagtggatgtgccatcaaaagggttggcaacacaaagtaacgtagtgaggaaaccgagttcatcagaggatttttggaccaccagcacgcatgatatggacaacagcgcgttcagtcacaagggagcatctcttcagccagtctaacaaaccaag

SEQ ID NO: 201595 - DNA, 262 bp, Glycine max
ggagcacgtgttctccttcattgagtgcgacaaggaccgcggctcgatctccctcgtctgcacgtcctggtacgagatcgagcgctggtgtcgccggagagtcttcgtcggaaactgctacgcggtctctccggccaccgtcgtcaaccgcttccccaaggttagatccatcgccatcaaggggaagccgcacttcgccgacttcaatttggtccccagggttggggcgcttacgtgggcccctggatcaaggccatggccg

SEQ ID NO: 201596 - DNA, 260 bp, Glycine max
atatagcccaagccctatacaaccaaaccctaacacacacccatttgattcagtttccatggctagcctcaaggttgcatttttggctgcagtgctctgcatggttgtggtgagtgcacccatggcacatgcagctatcacgtgcgggcaggtgacgaatagcctgatcaattgcatcggttacctccagaacggaggaacgccgccgtcgggatctgcaacggagtgaagagcctcaatgccgccgccaagaccaccgc

SEQ ID NO: 201597 - DNA, 261 bp, Glycine max
tgaagatggtgcgctgctgtcggtgcttcgcctgagtctcattccgtttgcgcccactatcacaggttgtgctgaggcttaactggttcttgaagcatatttcagagttttatcagagaacaaatgggttatattgggactcacggtgttgcagctctgcacagatataaatatagtggagtagatcattcctatgtggccaaatatgtactacaaccttttggagtcgctttgttaattttttccccctatggatgcctc

SEQ ID NO: 201598 - DNA, 259 bp, Glycine max
aagagaattgctcccaagggtttaatctttttggctgtgttatgcttctcagcaatgtcactgagtcgttgtcatgcggaggataatagacttgttatgaacttctacaaagaatcatgccctcaggctaaagacatcatcaaagaacaagtcatgcttctctacaagcgccacaagaatactgctttctcctgactcagaaacatcttccatgactggctgttcatagttgtgatgcttcactgttgctggactccac

SEQ ID NO: 201599 - DNA, 258 bp, Glycine max
attgaggcgggggttgatttggaagaaacccagctaaggtaattcctcgcaacccctaactaaaccttcaaaggatcatcatgggcagtcacaatgctttggctgccactttcggaatattaggtaacatcatttctgtgatggtgtacttggctccggtgccaacgttttaccggatatacaaaaagaaatgcacggacggtttccactcgcgccatacttgttgtcattaatgagttctatgctttggttatacta

SEQ ID NO: 201600 - DNA, 257 bp, Glycine max
cgatacgaacaagtaccgcgagggaaagatgaaaaggactttgaaaagagagtcaaagagtgcttgaaattgtcgggagggaagcggatgggggccggcgatgtgtcccggtcggatgtggaacggtgagagccggtccgccgatcgactcgggacattgaccgacgcggattgcgatggtggcccaagcccgggctgttgatatgctcgtgagacgtcatcatcgcgattgtggatggcagcgcgcgcgggtcctc

SEQ ID NO: 201601 - DNA, 257 bp, Glycine max
cggctcgagctagttttctctaaccaaccatacagtactcctcactagctataccctggttaatccatggagaaagaagctgttggccttgaaatcactactgagctaaggttgggccttcccggtggggaattacctgacaagaacgagaagataaagaagagggtgttctccgagattcaagctcatgatgatgatgaaaacagttcctccgacaagaccgcaaaatccaaaccaagaatcaagtggtggggtgg

SEQ ID NO: 201602 - DNA, 279 bp, Glycine max
ccttcacttgcagaacttagttctctgttgcatcatcatcatcttcattagtgttagccctaaacttcaccttcaaccatgaccacagtgccaccacacagtgtccaagtgcacacaacaacacaccgctacgaagccggcgtcgtcccgccggctcgttttgaggcgccgcgttacgaagccggcatcaaggcgccctcttccatttaccattccgagagaggtccgacgacctctcaggttctcgcagttgtcgccggccttccggtcggcggcatc

SEQ ID NO: 201603 - DNA, 275 bp, Glycine max
gctctcagcaatacagggccttgagtgttccagagctgacacagcaaatgtgggattcaaagaacatgatgtgtgctgctgaccctcgacatggccgctacctcgctgcctcagccatgtttagaggcaagatgagcaccaaggaagtcgactaacagatgatcagtgtgcagtccgagaactcctcctagtttgttgagtggattcgtcacaacgtgaaatccacagtctgtgacattcccccgactggcttgaagatggcttcaacattcatt

SEQ ID NO: 201604 - DNA, 270 bp, Glycine max
ctgggactttatgtccataatgatgtcatgcttgcttttggtactccggagaaacaaatcttgattgaacctatatttgcccaatggatacaatctgctcatggtaaaacttcctatgggttcgatatacttttatcttcaacgaacagtccggcgttcaatgcagaacgaagcatatggttgcctggttggttaaacgctgttaatgagaatagtaattctctattcttaacaatagggcctggagacttcttggttcatcatgctatt

SEQ ID NO: 201605 - DNA, 262 bp, Glycine max
gagactggactagctgagttagggtgagttgcaggcagtatcatctctcctttgacgacaagatgagcatcccaattccccatcggcagttattcatagacggagactggaaagtccccgtcctcaagaatcggattcccatcatcaacccttccacccaacacatcatctgggatatcccagcagctactaaggaagacgttgatctcgctgtcgctgccgccaaagctgccctctcccgcaacaagggcgccgattgggc

SEQ ID NO: 201606 - DNA, 258 bp, Glycine max
cgcaacacaacaaaaaaagacaacccagagagcgcgtcttaataaacgctcttctctgaaaacccccatttcttttcttctttcttcttctctttcgcttcttcgatcttcgatcttcgtcgctgaaaatgagagagtgcatttcaatccacatcggccaggccgggattcaggttggaaacgcctgctgggagctttactgcctcgaacacggcattcagcctgatgggcagatgccaagtgacaagaccgttggtg

SEQ ID NO: 201607 - DNA, 274 bp, Glycine max
gtgaactttgcaactttgagcagaaaatctcacagtcgaaggaagaaataatcaccaatggcaattgaacacgaagacgatctcaaagacgagaagaaccctcgacccctcgacgaggatgacatcgccctcctcaaaacctacggtttgggaccttattccacaagcataaaaaagtcggagaaggaaatcaaagatatggccaagaaagtgaatgacttatgtggtatcaaggagtctgatactggattagcagcaccaagccagtgggatc

SEQ ID NO: 201608 - DNA, 272 bp, Glycine max
aaaggattctacccgccgctcgatgggaattgcgcttcaaggcgtctcgtagggctaatccgcctcacgagggtcaccaacggcacgtgcctttggtgggccgaggccccctactgctggtcggcaaacggacggcgggcgcacgcgtcgcttctagcccggattctgacttagaggcgttcagtcataatccaacgcacggtagcttcgcgccactggcttttctaccaagcgcgatgaccaattgtgcgaatcaacggttcctctcgtac

SEQ ID NO: 201609 - DNA, 269 bp, Glycine max
ctagactcttctttttctctaagtctaaggggtgccctgagatcactttgagcaatggtgaaggctgtggcagttcttggcagcagcgagggtgtcactggaactattttcttcactcaggagggaaatggtccaaccaccgtaactggatctcttgctggtcttaagcctggtctccatggcttccatgtccatgccttgggggacactaccaatggttgcctgtcaactggagcgcatttcaatcctaataacaacgagcacggtgc

SEQ ID NO: 201610 - DNA, 268 bp, Glycine max
  unsure (1)..(268): unsure at all n locations
ttgcagccaagacaagttgccatatggtttcagaatagaagggccagatggaaaaccaagcatttggagaaggaatatgaagtcctcaagaaacagtttgaagcagtcaaggccgataatgatgttcttaaggttgagaaccagaaactacaggcagagttacaagctgtaaaaagtagggattggtgtgaagctggaatgatgagccataagaaagaaactgagggttcatggagcaatggaagtgataacagtttagagattantc

SEQ ID NO: 201611 - DNA, 265 bp, Glycine max
tggcattcaggagcatatcgatttgggaatcaagtatgatccttcaactggtatttatggaatggacttctttgttgttctggagcgtcctggctatcgtgtgggacgtcgccgaaggtgcaagtcccgtgttggaatccagcaccgtgtcacaaaggaggatgctatgaagtggttccaggtgaaatatgagggagtgatccttaacaagtctcaggcgattgtttagttagactgagttcatttcaggggagtgtttttatca

SEQ ID NO: 201612 - DNA, 263 bp, Glycine max
  unsure (1)..(263): unsure at all n locations
tcttaactcaacttctgctacccactctcttcttccaagtccaaccacgcttttctctacagtcatgggcaaggtcaagatcggaatcaacggatttggaagaattggccgtttggttgccagantcgctctgcaaagagacgatgtggagctcgttgccgttaacgaccctttcattaccaccgattacatgacatncatgtttaaatacgacagtgttcacggacactggaagcatcacgatgtcaccgttaaggacgaga

SEQ ID NO: 201613 - DNA, 251 bp, Glycine max
catatgtgtcagttctatcaaggttctctaatggtgacagtgatccattgccacgttgcgttgttcttgacattgaaggaactactactcccatatcatttgtttccgaggttctcttcccatatgcccgtgataatgttgggaggcatctatctctagcatatgatacccccgagaccaaagctgatatcaagttgcttcgttcccaagttcaaagtgaccttgaacaagggattgcaggtgctgtgcct

SEQ ID NO: 201614 - DNA, 264 bp, Glycine max
tgcggcggacgcatgttcgccccgaccaagatctggcgccgctggcataggaagatcaacgtgaaccagaagcgctacgccgtcgtctccgccattgctgcctccgccattccttccctcgtcctcgcccgcggccaccgcatcgagtctgtcccggagctcccccttgtcgtcagcgactccgccgaaggagtcgagaagacaaaagaagcgatcaaagtcctcaagcagatcggagcattcccggacgccgaaaaggctaaa

SEQ ID NO: 201615 - DNA, 275 bp, Glycine max
tgtgtgatgtaggaaggtggcttgtaaattggtggattataggaaggggacttgtaagccaccttcctacaatccaccaggttacaaagcaccatcttataatccaccatcttacaagtcaccttcctataatccaccagcttataaagcaccagtttacaagtcaccttcctacaatccaccaggttacaaagcaccatcttctaatccaccagtttataagccaccttccactaattcacctgatagcaagccaccttcctacaatccaccag

SEQ ID NO: 201616 - DNA, 271 bp, Glycine max
attttcttcgtctgtgtaacaaacacttcaacaatctactctatacccgatttacaagatgagttcatttagccaaaatccctatgttttagttctgttcctcgttctcactgtgtggatatcccgtgtaatgtctcgcgggctcattacatctgagagacatgagaaatggatggcacaatatggtaaggtttacaaggatgctgcagagaaggagaaacgtttccaagtattcaaaaacaatgtgcagttcattgagtcattcaatgct

SEQ ID NO: 201617 - DNA, 268 bp, Glycine max
ctcggcacctcgaactcaacacactcttcgaaactctggatctgttcttctgcttctaagagacaacattctcttcttgaatctcaatctctcggaaactaaaccctaagaacagacaaagatggtttacaccatctcgggaattcgatttccggttcttccttcgctgcacaactcccgcttccgtggcgatcgcagaactgcgtctcttcccgtttttctcagaaacaactccttctctcgtaaaacccttgctctaaaatcttcc

SEQ ID NO: 201618 - DNA, 267 bp, Glycine max
cgtttgtggaggagatagcttgtggtgcatatcatgttgctgttttaacttcaaggactgaagtttacacttggggtaagggtgcaaatggccgtttaggccatggcgatacagacgatagaaataccccaacattagtagaagctctgaaagacaaagatgtcaaaagtattgcttgcggaactactttcactgcagctatttgtttgcataagtgggtatctggtgttgaccagtctatgtgttcaggctgtcgcatgccattta

SEQ ID NO: 201619 - DNA, 262 bp, Glycine max
actcgagcctattcggctcgagcgcatattgaggcgggggttgattacgaagaaacccagctaaggtaacatcatttctgtgatggtgtacttggctccggtgccaacgttttaccggatatacaaaaagaaatgcacggacggtttccactcgctgccatacctgttgtcattaatgagttctatgctttggttatactacgacctcctcaaaattcatgacgtcgttgttccccttattacgatcaactcgatcggatgt

SEQ ID NO: 201620 - DNA, 258 bp, Glycine max
tccacacccaacattctcacaagtcacagccaaacaccatttcattaattcttgcagaatattgcttagttttgttttatctgaatttggaaacagcttttgaatggctttttcaagagttgcactgctaatatgcacggtcgggtattttgtgattgcctctgccggcaatttccaccaagattttgatatcacatggggagatggtcgggctaagatactcaacaatggagagcttctcactctgtcacttgacaa

SEQ ID NO: 201621 - DNA, 253 bp, Glycine max
ggcgtctcgtagggctaatccgcctcacgagggtcaccaacggcacgtgcctttcgggggccgaggccccctactgctggtcggcaaacggacggcgggcgcacgcgtcgcttctagcccggattctgacttagaggcgttcagtcatactccaacgcacggtagcttcgcgccactggcttttcaaccaagcgcgatgaccaattgtgcgaatcaacggttcctctcgtactaggttgaattactattgcga

SEQ ID NO: 201622 - DNA, 255 bp, Glycine max
aatcaatcaaattctttgagttgaacacaggggccaagattccttctcttgggttagggacttggcaagctgaacctggtgttgtagctgaagctctcaccacagccattcaggttggatacaggcatattgactgtgctagtgcgtataagaatcaagcagagattggttctgctcttaagaagctttttgatgatggtgtggtgaagcgtgaggacttatggatcacttccaaactctggtgttcagatcatg

SEQ ID NO: 201623 - DNA, 260 bp, Glycine max
acaattttctagggtttatacaattttcgatggcttcttcagatgttgagtaccgttgctttgtcggtgggctcgcttgggccactgacgaccaagctctcgatagagccttctctcagtacggcgaaatcgttgaaacgaagattatcaacgatcgtgagactggaagatccaggggttttggatttgtgaccttcgcctcggagcagtccatgatagacgccatcgaagggatgaacggccagaaccttgacggccgt

SEQ ID NO: 201624 - DNA, 263 bp, Glycine max
atagaatctagaaagcatgcatgtgatgaagaaggtgtgtgggtttgcaatagtggtgatggcagcactttttctggtggagatgagtcccatggcagatgctgtgacttgtagccctgtggagttgagtccctgtttgggggcaatcacgtcctcttcaccagcatcgacaacttgttgccagaaggtgagggaacaaaggccatgcctctgtggttacctcaaaaaccctagtctgaggccatatgtcaactctcctggtt

SEQ ID NO: 201625 - DNA, 260 bp, Glycine max
cgcagtcgcaaccctaatcagaagaagcgcagcttcaagcgagtgacagccaccagccatgggtcgtatgcacagccgcggtaagggtatatcctcttctgctttgccctacaaaaggacacctcctagctggctcaagatctcttcgcaagatgtcgaagaaaatatctgcaagtttgcgaagaaaggtttgaccccgtctcagattggtgtcattctcagagattctcacggtattgctcaggtcaatagcgtcactg

SEQ ID NO: 201626 - DNA, 254 bp, Glycine max
cttgttcctctcgcccagaatccgagatcaaccccgacgaaggcaaggggtttttctcggcttcttcagatttctgaaatggcgcctgtttcagctttagccaagtacaagctcgtcttcctgggtgaccaatccgtgggcaaaaccagcatcatcactcgcttcatgtatgataaattcgataacacctatcaggctacaattggtattgattttctatcaaaaactatgtatcttgaagatcgaactgttcg

SEQ ID NO: 201627 - DNA, 255 bp, Glycine max
aatttctaattagggtttcgcttagagtaaccaataaccatgggagtcttcacctttgtcgtccgcaaatccggcagcgaatggagcgccaagcaacattccggcgacatcgaggcctccgccgattccaccttcgatctccaacggaagctcgtgcaagccgctctcgccgttgattcctccggtggagttcagtcctctttctctcccgtgtctcctacctccgctgtgttccaggtgatagtgggtggtgca

SEQ ID NO: 201628 - DNA, 264 bp, Glycine max
tcagctcgagctcgagccgttcggtgacgccactgcagtgttccaaaactgcttcctaagagtaaaaaaaggcttaccaaaccaaaagaacacaatcacagcacacggtagaaaagacccaaatgaaccaaccggtttctcattccagttctgcaacataactgcagattctgatcttataccttctgttggaaccgcacaaacgtacctggggagaccctggaagagttactcacgaaccgttttcatgcaatcgtacatgag

SEQ ID NO: 201629 - DNA, 269 bp, Glycine max
gctccttattcggatctatctcacaccctttctctcttttcttcttttctttcgttttcccttcgcaagtgagagatggcgcaaattctgcttcatgggactctccacgccaccgtcttcaaagttgataggctcaatgctggttgtggtggcggcaattttttcagcaagctcaagcaaaactttgaggagactgttggcatcggaaagggagttactaaactctatgcaaccattgatctggagaaagcaagagtaggaaggactag

SEQ ID NO: 201630 - DNA, 267 bp, Glycine max
aagagaatggctcccaagggtttaatctttttggctgtgttatgcttctcagcactgtcactgagtcgttgtcttgcggaggataatggacttgttatgaacttctacaaggaatcatgccctcaggctgaagacatcatcaaagaacaagtcaagcttctctacaagctccacaagaacactgctttctcctggctcagaaacatcttccatgactgtgctgttcagagttgtgatgcttcactgttgctggactccacaagaagg

SEQ ID NO: 201631 - DNA, 263 bp, Glycine max
gttgagtattctaattctaatgaggaacaggggtgtgtgggaagatgcaagcacagcaacagtgcttgtacttgtgctatgttcatcgtatggaattgcagaagtaaagtcacagtcacagaaggtatctggtttgtttgtttttggagattcattggttgaagtaggcaacaataacttcctaaacaccatagcaagggcaaattactttccttacggcatcgacttcggcaggggttccactggccgattttctaatggca

SEQ ID NO: 201632 - DNA, 263 bp, Glycine max
ctttcaagcgcaggaatggaggtcgcaacaaacacggccgcggccacgtcaagttcattcgatgctccaactgcggcaaatgctgccctaaggacaaggctatcaagaggtttctggtgaggaacattgttgaacaggctgcagtcagagatgtgcaggaggcttgtgtctacgaacaatacacgcttccgaagctgtatgtgaagatgcagtattgtgtttcctgtgctatccactctcatgttgtgagggttcgatcccgc

SEQ ID NO: 201633 - DNA, 255 bp, Glycine max
gaatcccaagagtggggagtatgttgaacaccatcttaagaatcccccttctgtcccgtctgacaaattatctcatgtgtacactgccattttgaagcctgacaatgagttgcaaattttgattgatggggaacagaagaagaaggtaaatttcttatctgctgatgattttgaaccccctcttatccctcccaagacaatcccagatcctgatgataaaaaacctgaggactgggatgagagagagaaaattcc

SEQ ID NO: 201634 - DNA, 251 bp, Glycine max
gccgaggtcacgaggagcactagctagtttcacaatttccaaatggctaggggattgaagaagcatctcaagaggctcaatgctcctaagcattggatgcttgacaaactgggtggtgcatttgcgcccaaaccctcatctggaccacacaaatctagggagtgccttcccctcatactcatcctacgaaaccggctaaagtatgctctgacttaccgtgaagtcatcgctattctgatgcagagacatgt

SEQ ID NO: 201635 - DNA, 258 bp, Glycine max
cactcactcactcactcactcgcaagcaaaaagaaagaatcccaggcgatgagaaagatggaggggaaggagcaggatgtgtcgttgggagcgaacaagttccccgagagacagccgattgggacggcggcgcagagccaagacgacggcaaggactaccaggagccggcgccggcgccgctggttgacccgacggagtttacgtcatggtcgttttacagagcagggatagcagagtttgtggccacttttctgttt

SEQ ID NO: 201636 - DNA, 264 bp, Glycine max
ctcggcccaaaattgttgggttcgcaaaggtggtgcttatactggagaggttagtgctgaaatgcttgttaatttgggaattccttgggttattattggtcactctgaacggaggcagcttttgaatgaatcaaatgagtttgtgggagataaagttgcctatgcacttcaacaaggtctgaaagttatagcatgcattggggaaactcttgaacagcgtgaagctggtacaacaacggctgttgttgctgagcaaacaaaagc

SEQ ID NO: 201637 - DNA, 249 bp, Glycine max
gcgaaggactttaggttgggatttgggaattagggttattcgcgtggcgaagatgattgaggtggttttgaacgatcgattggggaagaaggtgcgcgtgaagtgcaacgaccgatgataccatcggcgacctgaagaagcttgtggcggctcagactggcacaagagccgacaagatccgcatccagaagtggtacaccatctacaaggatcacatcactctcaaggattacgagatccatgacggca

SEQ ID NO: 201638 - DNA, 254 bp, Glycine max
gcaagccccactcaaccaccacacctctcctcgttcacgctacccctttctgctcttcttctacctttcaagttttaaaagtataaagatggcagagacattcctatttacctcagagtcggtgaacgagggacaccctgacaagctctgcgaccaaatctccgatgctgtcctcgacgcttgcctcgagcaggacccagacagcaaagttgcctgcgaaacatgcaccaaaaccaacttggtcatggtcttcg

SEQ ID NO: 201639 - DNA, 253 bp, Glycine max
ctgaaacactcagtagggtttgcggtttcagagtttgtgacgcacgcagccatggaggcagcaacgccgccgcagccccgccgcgccagctctcccagaaggaagccgacatccagatgatgttagccgccgacgtccacctcggcaccaaaaactgcgacttccaaatggaacgttacatcttcaagcgccgcaacgacgggatttacattattaaccttgggaagacatgggagaagctcagttagcagct

SEQ ID NO: 201640 - DNA, 256 bp, Glycine max
  unsure (1)..(256): unsure at all n locations
ctcacacactcttcccatgagttcgtttcgtaaacccttcgtggccattctctggngtgttctgtttctgggtctccatgaaggaacggaaccagagaagagcacatacattgtacacgtggcgaaatcggagatgccggagagcttcgagcaccacgcgctgtggtacgagtcgtcgctcaagaccgtgtctgactcggcggagattatgtacacctacgacaacgcgatccacggctacgcgacgaggctaacc

SEQ ID NO: 201641 - DNA, 267 bp, Glycine max
aaaaaaaaccctctctttctctctcttccaaaacctaattttcagtttttctcttcaaacaaattttcaaaatgcgtgagatccttcacatccagggtggccaatgcggcaaccagatcggcgccaagttctgggaggtggtttgcgcggacacgggatcgaccccactggaaggtacggtggggactcagagcttcagctcgagaggatcaatgtctactacaacgaagccagctgcggccggttcgtgccgcgcgcggttctcat

SEQ ID NO: 201642 - DNA, 266 bp, Glycine max
atccctcactcttgttcttcagtctcctcctattatccgccaccgtagccgccgccgaacggatcgacgatgaagacgaccttctgatccgtcaagtggtgccggatgcggaggaccaccacctgctcaacgcggagcaccacttctccgccttcaagacaaagttcggcaagacctacgccacgcaggaggagcacgaccaccgcttccgtatcttcaagaacaacttgctccgcgccaagtcacaccagaaattggatccctcc

SEQ ID NO: 201643 - DNA, 264 bp, Glycine max
cggctcgagggaaaatggccgatcagttatcgaagggagaggaattcgagaaaaaggctgtgaagaagctcagcggttggggcttgtttggctccaagtatgaagatgccgccgatctcttcgataaagccgccaattgcttcaagctcgccaaatcatgggacaaggctggagcgacatacctgaagttggcaagttgtcatttgaagttggaaagcaagcatgaagctgcacaggcccatgtcgatgctgcacattgctaca

SEQ ID NO: 201644 - DNA, 267 bp, Glycine max
ctcattttcaagctgtttggtgtaaagatgggacaagtgcttggttgtgttcaagtgaagcagtcaactgtagccgtcaaggaatgtttcgggaagtacgatgatgttcttcaacctggttgccattttgtgccatggtgtcttggctgcggtgtggctggtgtcctttctacgcgtgtcatgcagctaagtcttcgttgtgaaactaagacaaaggacaatgtgtttgttaatgtggttgcctcaatccaatatcgagcattggca

SEQ ID NO: 201645 - DNA, 266 bp, Glycine max
cggctcgagcgaccatattggtttcactttggtcttcttcaccctgttagggtttgcatcagattcccccaattcttgtttgattttgcgctttcactagtttttcttcgacatgactcaagatctcgagatgagggatcgctcaacgccttccaactctgtttctttgcctgctccatctactttgcagcatttgaaggagatagcgtctcttatcgagaccggttcgtactcgaaggaagttcgtagaattgctcgcgctgttc

SEQ ID NO: 201646 - DNA, 261 bp, Glycine max
gccgtccctggcgggatcccccagtcgtcaaggaagccgtccgctcctccgcatcaaagggcaagccgccgctctcggctggcaacaacaacaacggcggatgggataattgggacccggacgacggattcggatcggccaggggcggggcggatctcaggaggaaccagtccaccggcgatgtgaggggattcggaggcggcgggaacgtgtcgaggtcgaaatcgactcaggatatgtacacgcgggctgaattggaag

SEQ ID NO: 201647 - DNA, 263 bp, Glycine max
cgacaacaacatcaatcagtgctcctcaagcaaggaagacgctgacatgaataacaaccaccttcgctttgaagaggctgtcgacgagagttccaacctcgaccaatccatgtgcgacatcgaagaatccgatgataaaaccagcgccgactattacttcgattcctactctcattttggaattcacgaagagatgttgaaggacactgtgagaaccaagacatatcaaaatgttatttatcagaacaagtttttattcaaga

SEQ ID NO: 201648 - DNA, 263 bp, Glycine max
taatactttgaggtttggatggcattcaaggtcctgtttatgtgggtactggatgtgtcttcaacaggacagctttatttggttatgaacctcctcttaaacccaagcataaaaagcctgggttgttatcatcactctgtggtggaactcggaagaagagttcaaaatctagtaagaaaggatcagacaagaaaaaatctagcaagcatgttgacccaactgtgcccattttcaatttagaggatatagaagaaggagtagaa

SEQ ID NO: 201649 - DNA, 259 bp, Glycine max
gcagatcaaccatgagggtgaggttaacagggctcgctacatgccccagaaccctttcatcattgccaccaagaccgttagtgctgaggtttatgtatttgattatagcaagcatccctctaagccccctcttgatggtttctgtaaccctgatttaaggcttaggggtcataacactgaaggctatggcttgtcctggagtaagttcaagcagggccacttgcttagcggttctgatgatgctcagatttgcttgtgg

SEQ ID NO: 201650 - DNA, 260 bp, Glycine max
gccatcgcgagtctcaaggagtggcttgccgatcccgccattgcaaacaacgccacgctgaggctacgtcgccggtctcgtcttcctccatgaaaatgatttcaacgaagccctcaaacacaccaatgctggtggaaccatggacctgcacgcgttgaatgttcagatctttattaagatgcataggtcggattatgctgagaggcagcttcggatcatgcagcagattgatgaagatcacactctcactcaactcgcca

SEQ ID NO: 201651 - DNA, 258 bp, Glycine max
ggcagcacgcgcaaaaatggtgaagtttctgaaaccaaacaaagccgtcatcgtccttcagggacgctacgccggcaaaaaagccgtgatagtgcgaaccttcgatgaaggcacgcgcgaggcccctacgggcactgcttggtggcagggataaagaagtaccctgcgaaggtgatcaagaaggattcggccaagaagacggccaagaagtcgcgtgtgaaggcgttcgtgaagctcgtgaactaccagcacctcatg

SEQ ID NO: 201652 - DNA, 258 bp, Glycine max
gttggtgcaaagcatccttcgtttcaatttctctctctcagcgctttctgcaatcgaacctttcatctccaaagggatccacaggccgaaggagaaatggggctgacattcacaaagcttttcagtcggcttttcgcgaagaaggaaatgcgaattctgatggttggtcttgatgctgctggtaagaccactatcctgtacaagctcaagctcggagagatcgttaccacaattcctaccatcgggttcaatgttgag

SEQ ID NO: 201653 - DNA, 260 bp, Glycine max
ctgggttggtgttagatttgattttattttttttttgtagattgattaatttattggttgttgttgttgttaatccattgttcagagatagaaagagaaggaaaaaagggctattatggcaggaggaggagctccagctaaagcagatgagccacagccacatccaccaaaggatcagttaccaaatatttcttactgcattactagtcctcctccatggcctgaggccatacttctgggttttcaacattttcttgtga

SEQ ID NO: 201654 - DNA, 265 bp, Glycine max
ctatattccattacaaagaaccagtttggaatatattttcattccttctttgtttcttcactttcttccatacacataaccatataatatcagaccgttgtcctcaaagttggtatgtcatgtcaagggtgtgctggagctgtaaacagggttttggaaaaaatggaaggtgttgagtcatttgacattgatctgaaggagcagaaggtgacagtgaaaggaaatgtgcagccggacgaagttctgcaagccgtttccaaatccg

SEQ ID NO: 201655 - DNA, 262 bp, Glycine max
attgttcttctcttcctctcttcctctgactgtatgtcggcgataacgggcatccaggggcaatctcttgaggttacggtggtttcgtgttcgaagttgtaggtcatagaatggatttcaagacaagatccgtatgtttgtgttgagtattgcagattgaagtttcgaatcagagcctgcacagacggcggaataaaatcggtatttctagaggagttgatattgcccctgattgaaggtcttcgggagctcaatgtctttg

SEQ ID NO: 201656 - DNA, 261 bp, Glycine max
catgaacagaagcttgactgcggtggtggctacatgaagttgctcagtggtgatgttgatcagaagaaatttggtggggatactccttacagtattatgtttggcccagatatctgtggttacagtacaaagaaagtacacgctattcttacctacaatgacacaaaccacttgataaagaaggatgttccttgtgagactgaccaacttactcatgtttacacatttatcctccgtccggatgcaacctacagcatcctg

SEQ ID NO: 201657 - DNA, 260 bp, Glycine max
  unsure (1)..(260): unsure at all n locations
cccaaacgttcaaatccctacctgggacgcggacggaggaggagcactctccccgtcgatctcttccaatgctgacacgtgctcattattctcctccgaccatttccgaatgttccagttcaaggtgcggaactgtccacgtggcaggtcccacgactgnaccgagtgtccctacgcccaccccgccgagaaggctacgccgccgtgacccncgcaagtaccactactcaggcacctcctgccccgattaccggaagggg

SEQ ID NO: 201658 - DNA, 256 bp, Glycine max
  unsure (1)..(256): unsure at all n locations
ttcgcttcatggctggtctcatcgatctcaacaacgccaccgaggacgatgaaacgccgtcgtctggntcctcctccnccacagaaanctccaccgtctgccttgaactctggcacgcttgcgcgggtncaatgatttcattgcccaagaaagggagcgttgtacgtgtacttccctcagggacacttggagcaacacctccacgattttccgctccctgcctctgccaacatcccttcccatgtcttctgtngcg

SEQ ID NO: 201659 - DNA, 255 bp, Glycine max
cgaagagaatggctcccaagggtttaatctttttggctgtgttatgcttctcagcactgtcactgagtcgttgtcttgcggaggataatggacttgttatgaacttctacaaggaatcatgccctcaggctgaagacatcatcaaagaacaagtcaagcttctctacaagcgccacaagaacactgctttctcctggctcagaaacatcttccatgactgtgctgttcagagttgtgatgcttcactgttgctgg

SEQ ID NO: 201660 - DNA, 256 bp, Glycine max
caaagctgtaaatgatggtctttggctgcagatgcttcttagtcagagggtacaagaaattgctgctgatacatgcaaagtttgctccctcatgagtatggcttgcacttgtcagaagcaatttgcattttcacatggagcttctaccactggatcttacgcacaagaacataatcagaacattatgcctggcaatgcgggaaatatatatgttgctgaatcttctgcaggcgaaagaaatggccgttttagacct

SEQ ID NO: 201661 - DNA, 260 bp, Glycine max
tgtttgagagatcatgttgtgggaaaagttagatatgcatgtgagaagtggggcttctttcaggttataaatcatggaattccaactcatgttttggatgagatgatcaaaggaacttgcaggtttcaccaacaagatgcaaaggtgaggaaagagtactacactcgcgaagtaagccgaaaagttgcttatctttccaattatactctttttgaagacccttctgctgattggagggatacactgcattttccttggca

SEQ ID NO: 201662 - DNA, 259 bp, Glycine max
cagaactttgtttcccaatttccattgcctccgcttccacctcgcaaccatgatcatcccggagaagaaccgcaaggagatctgcaaatacctcttccaagagggagtttgcttcgcgaagaaggacttcaatttggccaagcaccctgagatcgacgtgccgaatctgcaggtgattaagctgatgcagagtttcaagtctcgcgagtacgtgagagaaacttttgcttggatgcactattactggttcctcaccaac

SEQ ID NO: 201663 - DNA, 257 bp, Glycine max
tctcgagccgattcggctcagggagcgctaggacggtgaaataaggcgagtgccagaagagtcacgccgcgaatgtgggagggtatgctgttgatggctgcagggagttcatggcgagtggcgccaccggagaaggaacaagtgctgctctcacttgtgccgcctgtggttgccacaggaacttccacaagagacaggaaaccgaagtggtgagtgagtgctcctcgcctacctccaatggaacttaatcagagcta

SEQ ID NO: 201664 - DNA, 254 bp, Glycine max
attttgctctttcttcaagccaacctcttcccaactctttgttcctttcttcctctcactctcaccatggttacagtaactgtaagatggcaaaaggagattttcaaagatgtagaacttgacactacccagtctccttatgtttttaaatgccaattgtatgatttgactggtgtgcctcccgaaagacaaaaaattatggtcaagggtggtcttttgaaggatgatgctgattggtcaacagtaggggtgaa

SEQ ID NO: 201665 - DNA, 251 bp, Glycine max
ctctaggatagatcacgtataattttgcgctttgctgatttattggagaaacacaatgatgaagttgcagccatagaaacatgggatagtggcaagacttatgaacaggctgcaaatgttgaaatacccatggtagtacgattgttccgatattatgcaggttgggcggataaaattcacggtctaacagttccagctgatggaccatatcatgtccaaactttgcatgaaccaattggtgtagcagggca

SEQ ID NO: 201666 - DNA, 253 bp, Glycine max
gaagagaatggctcccaagggtttaatctttttggctgtgttatgcttctcagcactgtcactgagtcgttgtcttgcggaggataatggacttgttatgaacttctacaaggaatcatgccctcaggctgaagacatcatcaaagaacaagtcaagcttctctacaagcgccacaagaacactgctttctcctggctcagaaacatcttccatgactgtgctgttcagagttgtgatgcttcactgttgctg

SEQ ID NO: 201667 - DNA, 255 bp, Glycine max
ggccacgaaaaaaagaaaacccagaaaaactctgaagaagagttcgttgctttctgcttcactgcgaagatgaacggaggcccatctggtttcacaaatgctcccgtcacaagggctttcatcatcacttcggcgcttttcacaatcttctttgggatccaaggccgtttcagcactctggggttgtcgtatcaggatatttttggaaagcttcgcctttggaagttgatcatttccatattttccttctcgtca

SEQ ID NO: 201668 - DNA, 257 bp, Glycine max
gagagagagaaactgagagaaattcgcaaaccctaatttcggaaagatcggcgatggctgcctccaaggatcgcgagaacttcgtctacatcgccaagctcgccgaacaggccgagcgatacgaagagatggtggaatcaatgaagaacgttgcgaatctcgacgttgaactgactgtggaggagcggaatttactttctgttgggtacaagaatgtgattggtgctcggagacatcgtggaggatcctgtcttcca

SEQ ID NO: 201669 - DNA, 260 bp, Glycine max
ctgtcaacacctgtctgtggcgcgcgagagagaaatcggagatgtcatcaaaccctaacgatcctcgtcagccctcggcggcgagaccctacgtggcgccgcagatttcgccgcaggaccttccgatcgactacgccggcttcatcgccgtcatatttggcgtcgccggcgtcatgttcaggtacaaactgagctcttggctggcgctcatattctgcgcgcaatccgtcgcgaacatgcggaatgtcgagaacgatctc

SEQ ID NO: 201670 - DNA, 258 bp, Glycine max; identical to SEQ ID NO: 138569

SEQ ID NO: 201671 - DNA, 259 bp, Glycine max
atcccaaacgttgaaatccctcactgggacgccgacggaggaggaccactctctaccgttcatctcttcttcttccaatgctgacaagtgctcattattattctcctccgaccatttccgaatgttccagttcaaggtccggatctgtccacgtggcaggtcccacgattggacggagtgtccctacgcccaccctgccgagaaggctcgccgccgtgacccccgcaagtaccactactccggcaccgcctgccccgat

SEQ ID NO: 201672 - DNA, 256 bp, Glycine max
aaaccagtcatgtcgcctgtgttagcgatgaagtagcaagttcatggctaaacaacgttgcagtcaggaaagcaattcatgctgaatcggaaaaagtggcgggtccgtgggaattatgtacgggaaggatagagtaccatcacaatgctggaagcatgattccttaccacaagaacctaaccaggctgggctataaggcacttattttcagtggcgaccatgatatgtgcgtgccatttaccggaagtgaggcttg

SEQ ID NO: 201673 - DNA, 257 bp, Glycine max
tgacttatcaagtaaagaacaatattatcccagtaagtaggattgatgatgctgttaaaagaatcttaagagtaaaatttgtcatgggcctatttgagaatccacttgctgatctaagcctagtgaatcaacttggtagtgaggagcatagacagatagcaagggaagccgtaaggaaatcacttgtgttgctaaagaatggtaaatctgctgagaaacctctgcttccccttcccaagaaagctgcaaagatactg

SEQ ID NO: 201674 - DNA, 253 bp, Glycine max
atggcaccaacagccaagactctgacttacctggcccaggagaaaaccctagaatcgagcttcgttcgggacgaggaggagcgtcccaaggttgcctacaacgaattcagcgacgagatcccagtgatttctcttgccggaatcgacgaggtggatggacgcagaagagagatttgtgagaagatcgtggaggcttgcgagaattggggtatattccaggttgttgatcacggtgtggatcaacaactcgtgg

SEQ ID NO: 201675 - DNA, 252 bp, Glycine max; identical to SEQ ID NO: 144335

SEQ ID NO: 201676 - DNA, 254 bp, Glycine max
  unsure (1)..(254): unsure at all n locations
ctttataccccccctctctttttttgcgttcattctgttttcctgttgaagtctttccctagccaatggccaccgatcgtttgacccgggttcacagtctccgtgagaggcttgatgaaaccctcactgccaacaggaatgaaattttggcccttctgtcaaggatcgaagccaagggcaagggcatcctgncaacaccaccaggttcattgctgagtttgaggaaatccctgaggagaacagacagaagctca

SEQ ID NO: 201677 - DNA, 248 bp, Glycine max
ctgccagtagtcatatgcttgtctcaaagattaagccatgcatgtgtaagtatgaactaattcagactgtgaaactgcgaatggctcattaaatcagttatagtttgtttgatggtatcttctactcggataaccgtagtaattctagagctaatacgtgcaacaaaccccgacttctggaagggatgcatttattagataaaaggtcaacacaggctctgcctgttgctttgatgattcatgataac

SEQ ID NO: 201678 - DNA, 251 bp, Glycine max
ctcgagccgaatcggctcgagcggctcgagctagatttgtgtcaagagaaagatcagattgccaagaaagtgcacactataatagacaaatttgctgaaaggggattgcgatctcttgcagttgcttatcaggaaattcctgaaaaatccaaggatagccctggaggtccttggactttttgtggtttgttgcctttgtttgatcctccaagacatgatagtgctgagaccatccgaagagcacttaacct

SEQ ID NO: 201679 - DNA, 248 bp, Glycine max
gaaacatggcttccttaagctccttagtgctgctccttgcagctctaattctatcccctcaagttcttgcaaactatgagaatcccccagtgtacaagcctcccactgagaaaccaccagtttataagccgccagttgagaagcctcctgtttacaaacctccagttgagaagcctccagtttataagcctccagtagagaagccaccagtgtacaagcccccagttgagaaacctccagtgtacaag

SEQ ID NO: 201680 - DNA, 253 bp, Glycine max
gcaagtctcaattaggcactgtctgcatttggggcatgaagagtgtgaacttagccatttgtcaatgcagcgaatatggaacccgtggttgcactttggcaaaatgcgcaccttttcaccacttgtgaactctgacaagcatatcacacactctgagtccaaacttggcaagtttagctcagctgagtaactcactgtggtgaaagtcttgagtgctttcttcttcactcctgtgttggcaactcttgctgct

SEQ ID NO: 201681 - DNA, 254 bp, Glycine max
gattggatgtggttgctccaaatttaactgagggaggaccccctcccattggtgccagattggccagacttgacagccttgtcagggatatcatcttgcagtttggtttccaggaagttggacacttgagggccataaagagcacagtgagagggtttcctaggccattgctggatctaagcacagcatcttttgccaaagtaatgaatagtgcatttgggcgacctctggttcctccctttgatccctatgct

SEQ ID NO: 201682 - DNA, 259 bp, Glycine max
atttccctacctctcccttcaagatgcagatcttcgtcaagacccttaccggcaagaccatcacgcttgaggtggaaagctctgacaccatcgacaacgtcaaggccaagatccaggacaaggaaggaatccccccggaccagcaacgtctcattttcgccggaaagcaacttgaggacggccgtacccttgctgactacaacattcagaaggagagtactcttcacctcgtcctccgtctccgtggtggcatgcagat

SEQ ID NO: 201683 - DNA, 253 bp, Glycine max
cttcatcaaggattgggttacttggaatcaggttttcttgctcgtcgacattatttgctgctgcgccatcattttccctattgtctggtccatcagatctctcagggaaacctccaagaccgatgggaaggccgcgagaaacctcgccaagttgaccctcttcaggcaattctacattgttgtcattgggtacttgtacttcacccgcattgtggtctttgctttgaagaccattgccgcttataagtaccag

SEQ ID NO: 201684 - DNA, 253 bp, Glycine max
gaagaattgaagaatttaagaggagatggaaaaggagagcgcaaagaacatgataggatctatgattatgatgtctacaatgatttgggcaatccagatcacggtgaaaattttgctcgcccaattcttggagggtctagcactcatccctaccctcgtaggggaagaactggtcgatatccaacaaggaaagatcagaattctgagaagccaggcgaagtttatgttccaagagatgaaaattttggtcact

SEQ ID NO: 201685 - DNA, 250 bp, Glycine max
gcgaagagaatggctcccaagggtttaatctttttggctgtgttatgcttctcagcactgtcactgagtcgttgtcttgcggaggataatggacttgttatgaacttctacaaggaatcatgccctcaggctgaagacatcatcaaagaacaagtcaagcttctctacaagcgccacaagaacactgctttctcctggctcagaaacatcttccatgactgtgctgttcagagttgtgatgcttcactgt

SEQ ID NO: 201686 - DNA, 248 bp, Glycine max
cggctcgagctaaaataaaaaaccctaacttctgaacctttcaccgcatcgccaccgattccctatctccactaatcaaagaaaagataatgagtagacgctcgagcagaactgtctacgttgggaatctactcggtgatatccgtgaaagagaagttgaagatttgtttctgaagtacggacacataacacacatcgacctaaaggttcccccaagaccacctggttatgcatttgtagagtttgaa

SEQ ID NO: 201687 - DNA, 153 bp, Glycine max
gcttggcacttataacaaagaaagaagcactgctgtggacggatggacggtattttttgcaggctgagaaagaacttagtgctgggtggaagctaatgcgaattggtgaagatcctgctgtagatatctggatggccgataatttgccaaaag

SEQ ID NO: 201688 - DNA, 156 bp, Glycine max
gaagttgtgagcatagctttcttcatcacttcatagtaagcactatagaaaaaacgacattcattcatctatggctacccttattgctcccagcaaccactctccccaagaagacgctgaggctctcagaaaggcttttgaaggatgggggactga

SEQ ID NO: 201689 - DNA, 154 bp, Glycine max
ggcagtttaatggcttggttgatgtttacaggaaaaccatcaagtctgatggtgttgctggcctttatcgtgggttcaacatctcatgtgttggaattatagtgtatcgtggtctttactttggaatgtatgattccctgaaaccagtagtttt

SEQ ID NO: 201690 - DNA, 155 bp, Glycine max
atcatcagcattcacataggtcaggccgggatccaggttggcaactcctgctgggaactctactgcctggaacatggcatccagcccgatggcatgatgccaagtgactcctccttcggtgtagcccacgacgccttcaacaccttcttcagcga

SEQ ID NO: 201691 - DNA, 153 bp, Glycine max
cggctcgagagaaaggaaggtacgctcagcgtgtcggtaccggtgctcccgtatacttggctgcagttctcgaatacctagctgccgaggtgcttgagttggctgggaatgccgcacgtgacaacaagaagaacaggattattccaagacacg

SEQ ID NO: 201692 - DNA, 155 bp, Glycine max
aagccttcctagaacgaaaaaaaaaagaagagcaattttccctcaccaaagaagaagaagcaaacaatggccgatcaacttaccgatgaacagatctccgagttcaaggaagccttcagcttgttcgacaaggacggcgatggttgcatcacaac

SEQ ID NO: 201693 - DNA, 148 bp, Glycine max
ctcgagccggtgatttcagtgagtgatcggtgttcacttgatctcatcataatcgtcagcgtcaattgaagaagatgccgatcagaaacatcgccgtcggaaggcctgaagaggcgactcaccccgacacgttgaaggcggctttggc

SEQ ID NO: 201694 - DNA, 151 bp, Glycine max
aaattctcattttcaagctgtttggtgtaaagatgggacaagtgcttggttgtgttcaagtgaagcagtcaactgtagccgtcaaggaatgtttcgggaagtacgatgatgttcttcaacctggttgccattttgtgccatggtgtcttgg

SEQ ID NO: 201695 - DNA, 149 bp, Glycine max
cctgcctctgttaaagtttgcattttttttgggtgggttgatagtactgtgcaagctttggaacttcttcacaagctgctacttcaatggccactgaagaggttaacaaacctcaatcgcttcctccataccctgagatgatagtgaaa

SEQ ID NO: 201696 - DNA, 150 bp, Glycine max
tctaacctacctctttttcttctctctcaacaacttcaccttcttcctcctcgatcatgtctcacttcaagggcaagtaccatgatgagcttatcgccaatgctgcgtacattggcactcctggaaagggtattcttgctgctgatgagt

SEQ ID NO: 201697 - DNA, 152 bp, Glycine max
caagctttgtagcagcttcaagaaagccaaatctgttttaatcggcaaggttgactgtgatgagcacaagagtttgtgcagcaaatatggagtctctgggtacccaacaattcagtggtttccaaaaggatctcttgaacccaaaaagtatg

SEQ ID NO: 201698 - DNA, 149 bp, Glycine max
gtgaaattagggttcatcgaggaggaagaagaagaagaagatgtcgtacctgttgcctcacttgcactctggatgggccgtcgatcaagcaatcctcgccgaagaggagcgtctcgtcgtcatccgtttcggccacgactgggacgaaa

SEQ ID NO: 201699 - DNA, 147 bp, Glycine max
gaagagaatggctcccaagggtttaatctttttggctgtgttatgcttctcagcactgtcactgagtcgttgtcttgcggaggataatggacttgttatgaacttctacaaggaatcatgccctcaggctgaagacatcatcaaaga

SEQ ID NO: 201700 - DNA, 148 bp, Glycine max
gagaatggctcccaagggtttaatctttttggctgtgttatgcttctcagcactgtcactgagtcgttgtcttgcggaggataatggacttgttatgaacttctacaaggaatcatgccctcaggctgaagacatcatcaaagaacaa

SEQ ID NO: 201701 - DNA, 149 bp, Glycine max
tgctcgtgcctctagggttatcatatctccatttccatttcctctctctcagtttccaagaatcttaagctatgggaaagtcttacccaaccgtgagcgctgattaccagaaggccgttgagaaggcgaagaagaagctcagaggcttc

SEQ ID NO: 201702 - DNA, 161 bp, Glycine max
cactattcattctcgtttccctttcgactgtgattgtttgttaactgaacttttcgagcaaaatgtctggacgtggaaaggggggcaagggtttgggaaagggaggagcgaaacgacaccgtaaggtgttgcgcgataacattcagggaatcaccaagcct

SEQ ID NO: 201703 - DNA, 148 bp, Glycine max
aaagatgagtttgaagaacaacatggtggtgctaaaggtgtgtttgttgcttcttttccttgtgggggttacagctgcacgcatggaactgagcttcttcaaaagtgatcagtcatcaagttatgatgatgatgagtattcaaaacca

SEQ ID NO: 201704 - DNA, 145 bp, Glycine max
gcgaacatcgcttgcaagaaggccgatgttgacatgaacaaaagggctggtgagttgagtgctgcagagttggatagtgtgatgactgtggtggcgaaccctaggcaattcaagatcccggattggtttttgaacaggaagaagg

SEQ ID NO: 201705 - DNA, 145 bp, Glycine max
tgcgactgagtgagtgaagatggcgtgcttgcacgaccacagttgcgaagaccatgactgttcctctaactggtctctctacaaacacatcgacctctccaaggtaactgctttgaatgaggcaaatccaggaagtgttaagtca

SEQ ID NO: 201706 - DNA, 144 bp, Glycine max
gggagacaggcaagatgcattcagcggttattttgaatggcgtaatgatttgggaattccaggagcattttacatcaaaaattttatgcaatctgaatttgacctcgtgagtgtcactcgtgaagacattccaaatcatggaac

SEQ ID NO: 201707 - DNA, 144 bp, Glycine max
cgaatagattatcctaagtctttgggaatagtgctgcaatggcttcaagtcaggaggaggtgacccttttgggagctactggaagcccatttgtgtgcagggttcatgttgccctcaagttgaagggagttcaatacaaatatg

SEQ ID NO: 201708 - DNA, 144 bp, Glycine max
agattttatccaattgaaattttaaaaatgactgggataaacttaagaattcaattattgaaattgaataagtaaacaatttaattggattggtcgaatggtatcaaaaaaatggagtactaactcccatttcttatttattat

SEQ ID NO: 201709 - DNA, 143 bp, Glycine max
gggagtcagagaaaccctaggtaagaagaaaagatgccggctggtcatggtttgagatcccgcaccagagattccttctctcgtcctttcaggaagaagggaaccatcgccctcaccacatacctgagaacctaccacgtcgg

SEQ ID NO: 201710 - DNA, 143 bp, Glycine max
cagaaatctgaaaacttcttgctccgttaacagacccaaaattccaatgccccctctcaaccctaaagacccctttctctccaagctcgcttccgtcgctgcttcttcccctgaaacgctcctcaacactcccaaaaactccg

SEQ ID NO: 201711 - DNA, 143 bp, Glycine max
cagagagagagagatccatcgatcaattaatttccaatggccgatcagctcaccgacgaacagatctctgagttcaaggaagcctttagcctcttcgacaaggacggcgatggttgtattaccaccaaggaacttgggactgt

SEQ ID NO: 201712 - DNA, 232 bp, Glycine max
ctcgagccgctcgagccgcaagttactatctataattaattaaattcctcgtggaatattgaagaagacatgtctacagctgggcaggtcatcaagtgcagagctgcggtggcatgcgaagcagggaagccactgtcaatagaaaccatagagtggcaccaccccagaaaggtgaagtgcgtttgaggatccgcttcaactccctttgccgtagtgatgtttattggtggga

SEQ ID NO: 201713 - DNA, 277 bp, Glycine max
ctctgctactctcctatctggcgcattaaatgttccaatgctttttactggccactcacttggccgagacaagttggaacaacttttaaagcaaggtcgactatcaaaggatgaaatcaacacaacttacaagattatgcgcaggattgagctgaggaattggcccttgatggttctgaaatagtcatcacaagcactaaacaggaaatagaagaacaatggcgcttgtatgatggttttgatcctgtattggagcgtaaactacgagcaaggatca

SEQ ID NO: 201714 - DNA, 280 bp, Glycine max
gccatggctaaccgaactgtcattgttgacaataatacctggaataacacacatattgctactgttggtactgccatgtcttccccagagaaggcagcttgggaaattttccactcattggatgtcaaatatgttcttgttgtctttggagactggttggctatcccagtgatgatatcaataagttcctgtggatggttcgtattggagggggtgtattccctcacataaaggaaccagattatttaagggacggtcaatatcggattgattccatggc

SEQ ID NO: 201715 - DNA, 280 bp, Glycine max
agaagaagtagaagatggagaagtatcagatctggagcaggagaatagcgttggcagcgtttgcatttgctctgctgttccaatcggcctcagcagacgacgtcgttgtgctctctgaagataacttcgagaaggaagttggtcaggacaaggagctctcgttgagttctatgctcctttgtgtggacactgcaaaaagcttgctccagaatatgaaaagcttggtagcagcttcaagaaagccaaatctgttttaattggcaaggttgactgtgatgag

SEQ ID NO: 201716 - DNA, 280 bp, Glycine max
ctttattctcccaattcaaaactctcactccgttagaagcaccaaatcctgatggcaccaaaggcagagaagaagccagcggagaagaagcccgcagaggagaagaagtccacggtgggagacaaggctccggcggagaagaagccaaggccggaaagaagcttccgaaggagggaggcgccggcggcaagggaagaagaagaagagaaacaagaagagcgtggagacatacaagatctacatcttcaaggttctgaagcaggttcaccctgacattggt

SEQ ID NO: 201717 - DNA, 282 bp, Glycine max
ctccattttccctctgtcttccccccctcctctacacaaaaatatattattagcatggagaaggtgaattttgtgaagaatggagagcttagattgcctccggggttccgtttccacccgactgatgaggagctggttctgcaatacttgagcgcaaggtcttctcctgccctttgccagcctctatcattcctgagcttcatgtttgcaagtctgatccttgggatttgccaggtgatttggagcaagagagatacttctttagcaccaaagtggccaaat

SEQ ID NO: 201718 - DNA, 281 bp, Glycine max
cttcgtctcactcgtgactcgtctctgtcccctctctgacaatctccgagtccttctcttttccgatggcttctacaaaggtcaacaatcgaggttcccctggatcaaaaaggtttcgaaacgacgcttcgcgtaaagatggagattggcctgtcctaattgtgggaacttaaacttttcttttagaactgtttgcaaccagggacactgtggtgccccaagaccatccctaactataactccaccagcccccattataagcccatatagaaacagtcatc

SEQ ID NO: 201719 - DNA, 157 bp, Glycine max
gaagacaagcctcatcctcaggaggaggtcatcgccaccgagtttcacaaagtcactgtctcagaccaaggagagaacaagcacagcctcttagaaaagcttcaccgatctgacagcagctctagctcttcaagtgaggaggaaggagagatggaga

SEQ ID NO: 201720 - DNA, 281 bp, Glycine max
gtgagaacaagaaaaagaggcgcaagatgagtggtagggtttctgggaaggtgaagtggttcaatgatcagaaggggtttggattcataagccctgacgatggcagcgacgatctcttcgttcaccaatctcagatcaaatctgacggttccgaagcctcgccgaaggagagtccgttgagttcgccattgaatctgaatctgacggacgcgcgaaggctgttgatgtcactggccccgacggcgccaggtccagggaaccagacgaggcggtgatggtgg

SEQ ID NO: 201721 - DNA, 278 bp, Glycine max
caattatctacagaaaggttgggtgcaaaagaactggaggcatcagatttagcatcaatgggagagactattttgaactagtgcttataagcaacgtgggaggagcaggggatatttcaagagtttggatcaaagggtccaaaatgagaactgggaaccaatgtcaagaaattggggatctaactggcagagcttaagctatctcaatggtcagagcttgtccttcagagtacaactcagcaatggaaggattcgcacagcttataatgtggcacctt

SEQ ID NO: 201722 - DNA, 278 bp, Glycine max
tcataccgttcgcaacacgatcactattctgcgacgatggtggcacattcgagttcttggggaagggcactcgtcgcgatctcgccctacaccttctccgccatcggcatcgccgtcgctatcggcgtctccgtcctcggcgccgccgggggatctacatcaccggaagcagcttgatcggcgctgcaatcagggctcctcgaatcacttccaaaaatctcattagtgtaatcttctgtgaagctgttgctatatatggtgttattgtggctattatt

SEQ ID NO: 201723 - DNA, 273 bp, Glycine max
gttgtaacaggaagataattggcgcgaggttttaccctaacccagaggagaaaacggcaagggatttcaacggacatgggactcacgtttcgtcgacggcagtgggcgtgccggtgagtggcgcatcgttctatggtctggcggcgggacggcaaggggtgggtcccctgagtcaaggttggcggtttacaaagtgtgtggggcttttgggtcatgtcctgggtcggccattcttgcggggtttgacgatgccattcacgacggagtggatat

SEQ ID NO: 201724 - DNA, 275 bp, Glycine max
aactgggccaaggggcactacacggagggcgccgagctcatcgactccgtccttgacgtcgtgcgcaaggaggccgagaactgcgactgcctccaggggttccaggtctgccactcgctcggcggaggaaccggctccgggatgggacgcttttgatttccaagatcagagacgagtaccctgacagaatgatgctcaccttctccgtttttccttcccccaaggtctctgatactgtggttgagccttataacgctactctttctgttcatcag

SEQ ID NO: 201725 - DNA, 275 bp, Glycine max
gcggctgatagagttctaaatcaacttttgactgaaatggatggcatgtctgccaaaaagactgtgttcataattggggcaactaacagacctgacatcattgacccagcacttcttcgaccaggccgtctggatcaattgatcttattcctctccctgatgaggattcccggcatcaaatctttaaagcctgcttgaggaagtcacctatcgcaaaaaatgttgatttgagagcattggctaggcacactcaagggttcagtggtgctgatatt

SEQ ID NO: 201726 - DNA, 249 bp, Glycine max
agtttccacagcttgccggtgtgcatctttctgctttgattccgtctgctagtgatgatgcaatcagccttattacatcactttgctcctgggatccctgcaagaggccaacagcttcagaggctcttcaacatcctttcttccaggttgcttttacattcctccatcccttcgcaacagagcagtagcaagaactcctccacctgctggaaccagaggagcactggatcatcaagatgtcaagatata

SEQ ID NO: 201727 - DNA, 273 bp, Glycine max
ccggaagatgatcaagtctttgtcattggaagcatcaggctcagatcggtttccagttattgatgttgcacgatgcacgccatctggtgatcttcgatttagaaatccaaaccttgaagagcttagatttgtctatgcattcagaaggccatttccctggtgcactccttacttcaggttgacagggaaagtggtccaaagtattcaacagtggtgtgttttgaaccttttatagagactgttgatgttcagtggcctccagaagtagccaag

SEQ ID NO: 201728 - DNA, 273 bp, Glycine max
ctcgcgggctcattacatctgagagacatgagaaatggatggcacaatatggtaaggtttacaaggatgctgcagagaaggagaaacgtttccaagtattcaaaaacaatgtgcagttcattgagtcattcaatgctgctgggacaaacctttcaaccttagcattaaccaatttgcggaccttcatgatgaagaatttaaggctttactaaacaatgttcagaaaaaggcaagtagggtggagacagcaacagaaacatcgtttaggtatga

SEQ ID NO: 201729 - DNA, 275 bp, Glycine max
ttcctcgcaacccctaactaaaccttcaaaggatcatcatgggcagtcacaatgctttggctgccactttcggaatattaggtaacatcatttctgtgatggtgtacttggctccggtgccaacgttttaccggatatacaaaagaaatgcacggacggtttccactcgctgccatacttgttgtcattaatgagttctatgctttggttatactacgccttcctcaaaattcatgacggcgttgttccccttattacgatcaactcgatcggat

SEQ ID NO: 201730 - DNA, 273 bp, Glycine max
tgaatctcaagattctaagagagattttgctgctctttgaagaagggtgtttgcttgattttggagatgtcgctgctctcagatctcatcaaccttaacctctcagacactactgagaaggtgatcgcagagtacatatggacggtggatcaggaatggacctgaggagcaaagcaaggactctcccaggaccagttagcgacccttcaaagcttcccaagtggaactatgatggttccagcacaggccaagctcctggagaagacagtgaat

SEQ ID NO: 201731 - DNA, 271 bp, Glycine max
caagttcaagcatcgataggaccaaaaaagtaaaacagagaaaggggagggacatatttgacatttcacaaccgcgttcttttctacggagcctcgaccaagaagaatcgcagtgagaagaagagggggtcagagtgagaaaagaatgagagaattcgtaaaccctaatttcggaaagatcggcgatgactgcctccaaggatcgcgagaacttcgtctacatcgccaaactcgccgagcaggccgagcgttacgaagagatggtggaatc

SEQ ID NO: 201732 - DNA, 271 bp, Glycine max
gaaatttcggaccctaaccgcgtgtgtatttaaaatcctcaaaagcggggaaaggaagattggattctgggactttgacgttgtttcaattgtggtcgtgtcggtgcccgatctcaaacgacgatgtcatctttatatagagagaatccaggaggtacaacaataaaccaagaggacgtcataatttgacaacgcagaagaagcaggagattaaggaagcctttgagttatttgatactgatggctcaggaactattgatgccaaagagct

SEQ ID NO: 201733 - DNA, 269 bp, Glycine max
tttaaacacagaaacaaaatcaccaccttcaaagtcttctctctcgagaatcatcgaataaaactagggtttccgatcgtcgtcgaggagaatgccgaagaacaagggaaagggaggaaagaaccggaagcgcgggaagacgaggcggacgacgagaagcgggagcttgtgttcaaggaggacggccaggagtacgcgcaggtgctccggatgctggggaacggccgctgcgaggcgatgtgcatcgacggcaccaagcgcctctgcca

SEQ ID NO: 201734 - DNA, 271 bp, Glycine max
cgatcccgatgaagaagaggatgtgctcagctacggcttaacgatcgcgtcgaaggggcaggagagattagtgaaagatctggacgcggttttggagaactgcagttgcttctccgtgcagagcgtttcggagaatgcgagaagaaaggggaggctctggatgggactgtggcgagggaggtttcgccgaaggatatggagtcggggaagaagaaggagatgatggaggagcggtgcgcggcgtattggaccacgttggcgcccaatgtgg

SEQ ID NO: 201735 - DNA, 272 bp, Glycine max
ctcgagccgctcgagccgattcggctcgagctcgatgcgaattcggctcgagctttttatacttcatcaacaacgatgctgcatcaccaacgagaggacctgaagcatttggataaagctagagttggggaagaaaaacttaaaaacatttagaagatcaaacattggactccaagattggttaatgacatccaagcatacagagccagatagctcatcaacatttgggtggaatattttgttcacaaagccaatagaaggggatttgtacg

SEQ ID NO: 201736 - DNA, 276 bp, Glycine max
attggatgcgagttattctcgcttcaaatcgtggaactgtcatggagcttggaatcactcccattgtgacttctgggctagtaatgcaacttctggctgggtcaaagatcattgaagtggacaacaatgtacgagaggatcgagcctgttaaacggggcacagaagctacttggtattttgatagctgttggtgaggcagttgcctatgttctttcggggatgtatggcagtgtggggcaacttggagtagggaatgccatcctcatcatcatcca

SEQ ID NO: 201737 - DNA, 273 bp, Glycine max
caaagacacagagtgcgttcgttgacgacaaacacacacaaacacacaacaaaagctcgccggaaaatctttctccggcgacctggaattccgacgaaggtagttgcggctccttcgtcccgaaactgaggccctcaaagtaaaactttggtggtggtgggtaggatctggcggtgtatgatgggatcttgcatatgcccgttggagactccggcgaggttgctttggaccacaagcttcttccgtcataagcttatgatcttctaataatta

SEQ ID NO: 201738 - DNA, 271 bp, Glycine max
ggagcttcctcatgctacttccgactatgatgagtttggatgcattgtttctcacaacaatgctgtaaatgattataacaaactgttgagggatacattgactcaaaccggagaaagtttagtagatgcttcccttattttgcggacacacactctgctctcttggagctctttcaccaccccacattctatggactaaagtataataccagaacatgttgtgggtatggaggcggtgtctacaactttaaccctaaaattttgtgcggcc

SEQ ID NO: 201739 - DNA, 265 bp, Glycine max
  unsure (1)..(265): unsure at all n locations
gtccagagtcccacagaagaaaaacaaaaccctcactgagcgctgctgctttgagagagagatggctccgaaccttgaatgtcgtatgtacgaagcgaagtacccggaggtggacatggcggtgatgatacaggtgaaaacatagcggacatggngggcgtacgtgtcgttgctggagtacaacaacatcgagggcatgatcttgttctcggagctctctcgccgtcgtattcggagtgtgagcagcctcatcaaggttggccgc

SEQ ID NO: 201740 - DNA, 268 bp, Glycine max
ctgctcgtgcctctagggttatcatatctccatttccatttcctctctctcagtttccaagaatcttaagctatgggaaagtcttacccaaccgtgagcgctgattaccagaaggccgttgagaaggcgaagaagaactcagaggcttcatcgctgagaagagatgcgctcctctaatgctccgtttggcatggcactctgctggaacttacgacgtgagctcgaagaccggtggtcccttcggaaccataaagcacccctccgaact

SEQ ID NO: 201741 - DNA, 269 bp, Glycine max
gaatgttcaggaatacaaaggtccccgtgaagcagatggcatcgttgactatttgaagaaacaaagtggtcctgcttcaactgaaattaaatctgctgatgaagctactgcttttattggtgaaaataaagttgctatgttggagttttcccgaaattttctggagaggagtttgacaacttttctgccttagcagagaagttgcgttctgattatgactttggtcacactctgaatgccaaactccttccaagaggagagtcatcagt

SEQ ID NO: 201742 - DNA, 271 bp, Glycine max
cggatctaactaagttatcgccatgaatcgccaccacgatcccaatcccttcgaagaagaagaagtcaatcctttttcgaatggcactactgctcctgcatcaaagtcacgtattccaccattagcatctgatccactggcttttgccataggcatgatgctacagttgatattcctttggatactacaaatgactccaagataaaaggtcaagagctagcagcttgggaagcagatttaaaacggagagagaaggaaataaaaagaagag

SEQ ID NO: 201743 - DNA, 305 bp, Glycine max
gagacctgagtgggacttgttgccccatgaagagagatcaaagatgaaagcaaggcaaggggtgccccatgtggctttggaggaaattgatgtgaaagatccttccacaatggaaagtgttccatctgatggcaaaacaatgggggaggtaatgtttagagggaatacagtgatgagtggatatttgagagatttgaaagcaacaaaagaagctttcaaagatgggtggtttcatagtggggatctagctgtgaaacattctgatggttacatagaaatcaaggacaggttgaaggacatagtag

SEQ ID NO: 201744 - DNA, 298 bp, Glycine max
tcggattgcacaatttcaccagcacttggctgagaagctagacttggaaatgtctgccctccagtatatgataaaagaataccctggaaacgaggaggagaggatgagagcagccattgggaaatttggactgtctggcaaagcgcaggtcatgcccaatgaggatttaatcggatgggaaaaggagccgtgtgaaatccgaatggtaagctaatagacagcctaaccggcaacttttggatgagcacacgaccatttggatatagaacctttgactcattggctgaggcattgaatg

SEQ ID NO: 201745 - DNA, 156 bp, Glycine max
cgaagagaatgcctcccaagggattaatctttttggctgtgttatgcttctcagcactgtcactgagtcgttgtcatgcggaggataatggacttgttatgaacttctacaaggaatcatgccctcaggctgaagacatcatcaaagaacaagtca

SEQ ID NO: 201746 - DNA, 302 bp, Glycine max
tgtgcgatagaattttctagagcgagagatttcggcgtaatgggtccaaacgcggcggcggcgaaacaagcggagaaactccgaattgacggcaacacttacttcaaaaaagaccgtttcggtgccgccatcgacgcttacaccgaggcgattacgctgtgccctaatgttccggtttattggacgaatcgcgcgctgtgccatctcaagcgcaatgattgggagagagtagaggaagattctcggaaggcaattcagttggacagcaattcagttaaggcccactatatgttggggcttgc

SEQ ID NO: 201747 - DNA, 308 bp, Glycine max
gctcgatgttattgagtattctaattctaatgaggaacaggggtgtgtgggaagatgcaagcacagcaacagtgcttgtacttgtgctatgttcatcgtatggaattgcagaagtaaagtcacagtcacagaaggtatctggtttgtatgtttttggagattcattggttgaagtaggcaacaataacttcctaaacaccatagcaagggcaaattactttccttacggcatcgactttaagcagggttccactggccgattttctaatggcaaatccctcattgacttcattggagacttgctgggc

SEQ ID NO: 201748 - DNA, 294 bp, Glycine max
cgcgtcgctccgcaccagtttcaccgcacgaatatcttgttgtttggagcgatccgagaaaaactctgtaaacatgttggtttaccaggacctccttacaggtgatgagcttctctctgactccttccgttacaagggaaattgagaatgggattgctgtggggaatttaaggggaagtgggttgttaaaggaccagttgatgtagacattggtgcaaacccttctgctgagggtggaggagaagatgagggagttgatgatgcagctgttaaggttgttgacattgttgacac

SEQ ID NO: 201749 - DNA, 305 bp, Glycine max
tgttaaccttcccattgtctatgccagcaacaaaggaagaggtgagctaccaactcgtcacctcccctctcgttccacttctgtctgttctttcattgtcaagtgtcggactctggtctttttggaacaagaaagtgttccgtgagtgagatttcccctctcttctttaatcttcccaaagctcactaatttagtgagagaggctctaatgctgctagcgacgggtagctactaggaagagtttacggtatgaaatttctcgactataaaatttcataagagaagaaagctgctagcagagggaa

SEQ ID NO: 201750 - DNA, 302 bp, Glycine max
ctctgcttcaacttgctccctcagaagcgaagaagaagccacagagaaccagtctcctactctctctcacccacaagaaaaatggcatctcacatcgttggatacccccgcatgggtcccaagagagagctcaagttcgctctcgagtctttctgggatggcaagagcagcgccgaggatttgcagaaggtggctgctgatctcaggtcatccatctggaagcagatggctggtgctgggatcaagtacatccccagcaacactttctcgttctatgaccagctgctcgacgccaccgccac

SEQ ID NO: 201751 - DNA, 304 bp, Glycine max
tttctctaaccaaccatacagtactcctcactagctataccctggttaatccatggagaaagaagctgttggccttgaaatcactactgagctaaggttgggccttcccggtggggaattacctgacaagaacgagaagataaagaagagggtgttctccgagattcaagctcatgatgatgatgaaaacagttcctccgaacaagaccgcaaaatccaaaccaagaatcaagtggtggggtggcctccggtgtgttcgtaccgcaagaagaacaccgtcaatgaaaccaaaatgtacgtcaaa

SEQ ID NO: 201752 - DNA, 132 bp, Glycine max
cttcacttcactaatacatcatggcagacgagacccagaacaagtatgagagctctgaggttgaggtccaggatcgtggtgtttttgactttctcggtaagaaaaaggatgaagaagacaagcctcatcctc

SEQ ID NO: 201753 - DNA, 209 bp, Glycine max
  unsure (1)..(209): unsure at all n locations
catttcaatccacatcggccaggccgggattcaggttggaaacgcctgctgggagctttactgcctcgaacacggcattcagcctgatgggcagatgcaagtgcaagacgttgtggagtgatgatgctttcaacactctcaggaactgngagaacactgccctcgatttgagtctgaccacggatgatgagtagatggcatcgcatatc

SEQ ID NO: 201754 - DNA, 303 bp, Glycine max
tggtatttccgtttccagagttggatcggcggctcaaattaaagccatgaaacaagtagctggtaaattaaaattggaattagcacaattcgcagaattagaagcttttgcccaattcgcttctgatctcgataaagctactcaaaatcaattagcaagaggtcaacgattgcgcgagttgcttaaacaatcccaatcagctcctcttaccgtggaagaacagataataactatttatactggaacgaatggttatcttgattcattagaaattggacaggtaaggaaatttcttgttgagtt

SEQ ID NO: 201755 - DNA, 157 bp, Glycine max
  unsure (1)..(157): unsure at all n locations
tatcgagccgattcggctcgagagagaaataagggacnaatggtgacgctgaaactgcagaaacgcctctccgcaagcgtgcacaagtgcggcagaggaaaggtttggcttgaccccaatgaagtcaacgaaatctccatggccaattctcggcaaa

SEQ ID NO: 201756 - DNA, 303 bp, Glycine max
  unsure (1)..(303): unsure at all n locations
aaactatattaatatgnagaagcncagttaaagaatgagcagcaggaaacacagaagtatgtgcaaagggagttagaaactcttaagttggctaaagagtcatttgctgcagaaatggagttggagaagtcaagcctagctgaaaaagctctaagtgagagaaaccaaatgcttctggattttgagctgcagaaaaaggaacttgaagctgttatgcataatcagttagagcagaaggaaaaagatttgatagagagaaagaagttatttgaggaaaaaagagagagtgaattaaacaatatt

SEQ ID NO: 201757 - DNA, 299 bp, Glycine max
tttccttcttcttcttccttccttcactcgtatatcacttccttcctcgtttcgttaaccttctaattcaatccattcctcacttccttttcaaccgaagcttttctccgataatcgcagagagaaagaataatggattggggaaacgtaaccgcggaggatctgatcgacgcgctccgcgaggtcgattggtcgtcgccgccgcgcccgctgtcggaattcttctcgcgattcactgttcccagatcttcctctaaatggaacagccgcctcaaatgcaacctctactactaccggac

SEQ ID NO: 201758 - DNA, 294 bp, Glycine max
tcgacgttgagtcatcccatggtgacatgttcacggaggaacagaatgagttgattgaatcggcggcggaaatgctttatggtatgattcatgctcgatatgtgttgaccagcaaaggaatggctgcaatgcttgacaaatacaagagctaatgattttggtagatgcccaagagtttactgctctggacagccctgccttccagttggtcaatcggacattcctaggtcaagtactgtgaaaatatactgccctaggtgtgaagatctttactatccgcgttccaagtatcaa

SEQ ID NO: 201759 - DNA, 297 bp, Glycine max
cgggtatctatctgagttgaggaagaagctggggattgtggagctagagcatttggtttatttggtttgtgatccaagagggtgggaggtatttgaccccaagaagaatagatggataacattacctaagataccttgtgatgagtgttttaatcatgcagacaaggagtccttggctgtggggagtgaaatgctggtttttggtcgggaattgatggattttgccatttggaagtacagcttgatttcttgcaattgggtgaagtgtaaggagatgaaccgtcctcgctgcttgtt

SEQ ID NO: 201760 - DNA, 298 bp, Glycine max
tcctccccttcctcctcgttctgtttcagtgattattaatgctggtgcgtgttgcggttgctgcagtggtgcgagcgggcacccgtaactgggcccggtgggcttcgagtggggcgtcgagcccaagcctttcgatatggcggcggaagaaggagatggggaaggaagggctggtggtggccaaagagctgaagaggttccggccggacccggtccggctagaccgcttcatccggtccagcgtctcccgcttgctcaagtccgacctcgtcgccgtcctggccgagttccagagaca

SEQ ID NO: 201761 - DNA, 296 bp, Glycine max
atctcccagagaaacaaagaaaagaagaaaatggctgtggccaacaatgtgctttgcattttcttcattatctccttaacatgtatggttcaagctcgaatcccaggggtttactctgctggtgcatggcaaagtgctcacgccaccttctacggaggctccgatgcttccggcaccatggggggctcgtgtgggtatggaaacctgtacagccagggttatggtgtgaacacggcggcattgagcacggcgctcttcaacagcgggcttagctgcggtgcgtgttttgagataaa

SEQ ID NO: 201762 - DNA, 143 bp, Glycine max
tctagtttgtgtactgctattgcttaaggcagaaggatctcttgttccattgactttggtgaagaatgcagaatcaaaaggagctgtttgtttggatggaagccccccagcataccactttgacaacggatttgaagaaggga

SEQ ID NO: 201763 - DNA, 147 bp, Glycine max
caagttactatctataattaattaaattcctcgtggaatattgaagaagccatgtctacagctgggcaggtcatcaagtgcagagctgcggtggcatgggaagcagggaagccactgtcaatagaaaccatagaagtggcaccaccc

SEQ ID NO: 201764 - DNA, 300 bp, Glycine max
agtagcggtggcggcggtggcatgagatcaaggttccctggtgggatgatggtgatgatatgtttgcatcttaatggggaagggggcaggaatacatatgagtcaaggtgcacctcggaaagctgctcccattgaggacaaattgccctgcactcttgaggagatatataaagggactacaaagaagatgaagatctctagagaaattgcagatgccagtggaaaaaccatgccagtagagccaagtatcagtgtataatgtcaagcctggctggaagaaaggaacaaagatcacattcc

SEQ ID NO: 201765 - DNA, 299 bp, Glycine max
gcactatagaaaaaacgacattcattcatctatggctacccttattgctcccagcaaccactctccccaagaagacgctgaggctctcagaaaggcttttgaaggatgggggactgatgagaaaactgtcatagtaatattgggtcatagaactgtttatcagaggcagcaaatcagaagagtctatgaggaaattttccaggaggatcttgtgaaacgcctagagtctgagatcaaaggagactttgagaaagccgtgtaccgatggatactagaacctgcagatcgtgatgctgttt

SEQ ID NO: 201766 - DNA, 297 bp, Glycine max
gtttcttctccttgtggactgtaagagctgaactaagagatggggttgtctttcaccaagctttttagccggctctttgctaagaaagagatgcgtattctcatggtaggtcttgatgctgctggtaagactaccatcttgtacaagctcaagctgggagaaattgtcacaaccattcccacaattggattcaatgtggagactgtggaatataagaatattagctttactgtatgggatgtgggtggccaagataagatccgtcctttatggagacactacttccaaaacactcag

SEQ ID NO: 201767 - DNA, 297 bp, Glycine max
  unsure (1)..(297): unsure at all n locations
aaaacagaagaaaacaaaatggaagacacagtttctgcgttgaggtctttgatggtttctcactctccgccgctggatgccttagtggtgccctctgaagattatcacctgagngaatatgtgtctgcacgagacaagcgccgcgaattcgtttccggcttcactggaagtgccggcttggcacttataacaaagaaagaagcactgctgtggacggatggacggtattttttgcaggctgagaaagaacttagtgctgggtggaagctaatgcgaattggtgaagatcctgctgta

SEQ ID NO: 201768 - DNA, 286 bp, Glycine max
aaacacttggtatcgattagatcttcttatcttcaattgatgtgcctctagttcttgtatctaagctacgaatatgtctggggatcgggatttcaagcacggtgtggtgaggatggtcgagaaccctggctcagagcgcaaggtgttcgttcacactgcaagcatcgaaatcatcacttcctatgcagtgttggagcacaagcttagctcactgcggtgggagcgttactatgatgaccctgatttgcttcagttccacatacgctccagcgtgcacctaatttct

SEQ ID NO: 201769 - DNA, 293 bp, Glycine max
agctgtttggacggtcacacgcagttgtattgtagaactgaacaagggtttctctttctctttctctgtctgcttcttcactttctctcgcttcaatcgaaaaaaatcatgggcagaaaattcttcgtcggtggcaactggaattgcaatgggacaatgaggaggtgaagaagattgttactactttaaatgaagctaaagtccctggagaagatgttgtagaagttgttgtgagccctccttttgtgttccttccttttgtaaaaagtttgctgcgccctgatttccatgtc

SEQ ID NO: 201770 - DNA, 296 bp, Glycine max
ctcgagccggtgttgtttgggatgcctatgaagcaacaaaggatgcacatggcctttgcattctaaccgagtgggatgagttcaagactctcgactaccagaggatatttgacaacatgcaaaaaaccagaattgttttttgatgggcagatacattgttggatgtgattaagttgcgtgagattggcttcatagttaactcaattggtaagcaactggatccatggctcaaagacatgcctgctttggcgtaaaatagatcattgatcaagtacactgcaataccagtcaaatgt

SEQ ID NO: 201771 - DNA, 191 bp, Glycine max
  unsure (1)..(191): unsure at all n locations
gcttcccctagcaaccttcttcttacttctctccgcttcttatctccagattgctggggcggaagcacaaccgttgactagtctcaagcttaactctcatattcttcaggagtctactgctanagagattaatgaaaatcccgaggcaggatgggaggctgctatanatcctcgtttctccaatttataca

SEQ ID NO: 201772 - DNA, 292 bp, Glycine max
tctcatggcgaatctagcacacttctccaagagagccctaagaagcgcacacgcgctcgcaaggcaccacgtgtagccgagctgctggcagcggaacggcttttgcgacggaggcggcgaaatcgatatccccgtcggcggatcgcgtgaagtgggactaccgagggcagaggaagataatcccgttagggcagtggctccccaaagtggccgtggatgcttacgtagcacccaacgtggtcctcgccggccaagtcaccgtctgggacggagcctccgtctggcccggttg

SEQ ID NO: 201773 - DNA, 272 bp, Glycine max
acgagattgaggcgggggttgatttggaagaaacccagctaaggtaattcctcgcaacccctaactaaaccttcaaaggatcatcatgggcagtcacaatgctttggctgccactttcggaatattaggtaacatcatttctgtgatggtgtacttggctccggtgccaacgttttaccggatatacaaaaagaaatgcacggacggtttccactcgctgccatacttgttgtcattaatgagttctatgctttggttatactacgccttcc

SEQ ID NO: 201774 - DNA, 272 bp, Glycine max
  unsure (1)..(272): unsure at all n locations
aaaccccctccagagaacaagaatcaaagaatggcaactatgactggtgtgagcctttcaagccccagggttttcttcaacgcatcaccctcaccgcaaaacacgtacgccgtaaagttcgcagttccactcagccaagggatgcgacttggtagtgtcaggttgggtcgggtgatgaggatccgacccgttcgcgcantnccagagcgcatttcggagaaggtggaggagagcataaagaacgcgcaggaggcgtgcgccggcgacccgac

SEQ ID NO: 201775 - DNA, 179 bp, Glycine max
gcagaccgtggaaaactgctagtaaaagctggagcttttgcttcgatcacatttgactatttcactgattagaacaggcaaagatgtctctcttgggttgaaaaaaaaaaaaaaaaaaagtaaaaaaaagaaaaaaaaaaaaaaaaaaaaaaaaaaaaaaaaaaaaaaagggggggggg

SEQ ID NO: 201776 - DNA, 268 bp, Glycine max
ctcgagccgctcgagccgctttcctgaaaaaaagaattttgaacctgcctctgttaaagactgcatttacttgggtgggttgatagtactgtgcaagctttggaacttcttcacaagctgctacttcaatggccactgaagaggttaacaaacctcaatcgcttcctccataccctgagatgatagtgaaagcacttgaagccttgaatgaggctgatggatcgaataaatcagcgatatcaaagtacatagaaaccacctacggtga

SEQ ID NO: 201777 - DNA, 268 bp, Glycine max
ggcttccttaagctccttagtgctgctccttgcagctctaattctatcccctcaagttcttgcaaactatgagaatcccccagtgtacaagcctcccactgagaaaccaccagtagataagcccccagttgagaagcctcctgtttacaaacctccagttgagaaacccccaatgtataagccgccagttgagaagccaccagtgtacaagcccccagttgagaaacctccagtgtactagcgtccagttgagaaaccaccagtgtac

SEQ ID NO: 201778 - DNA, 271 bp, Glycine max
ctcttctaacatggctactcacatcctctctcgcatcttcccaaaaccctatcccccttcctctcccgttctctctccaccgccccctctcctccctccctctcctctctctccttcctccgccgcatctccgttgccgccaacccctccctccaccgcgccctcctccccaactctccctccctccgcgccctctccacacgcgccactacctcctccctcaacgaccccacccctaactggtccaaccgtcccccgaaagaaaccatct

SEQ ID NO: 201779 - DNA, 267 bp, Glycine max
  unsure (1)..(267): unsure at all n locations
cactacaccgagattccccctaaacccgtttgcgttgttgtttgcgaagaaatggcgactaagaggagcgtgggaacgttgaaggagggtgatttgaaagggnagagggtgttcgtgagggtcgatctgaacgtgcctttggatgacaaccttaacatcaccgatgacactagagtccgtgctgctgttcccaccatcaagtacttaactggtcatggagccaaagtgatccttctagccacttgggacgtcctaaaggtgtaacac

SEQ ID NO: 201780 - DNA, 267 bp, Glycine max
ctggactagcacctgaggggtcacagttcgatgctcgtcaatatgattccaaaatgagtgacttactttcatctgatggacaggacttcttcacatcctatgacgaggtttatgatagttttgacgctatgggtttgcaggagaatcttctcaggggaatttacgcatacggttttgagaagccatcagccattcagcaaagggggatagttcccttctgcaagggacttgatgttattcaacaggctcaatctggaactgggaaga

SEQ ID NO: 201781 - DNA, 271 bp, Glycine max
ttccgaaccttgcattgtatctacccacttctcaaccaacaatggcaatggcaacccaagcctctctcttcaccccacccctctccggtctcaaacccagcgaccgagccaccgcgccatggaaacaatcctccacccactccttctccacctcgaagcccctcaagttctcgcgaacaatcagagcagcagccaccgaccagaccacagaggcaccggttgggttcaccccaccggaactggacccaaacaccccttccccgatcttcgg

SEQ ID NO: 201782 - DNA, 179 bp, Glycine max
gggagatagaaagagagagagatagagagagagagaaagacccttacccttctctatcgctcgctttcctttgacgcttctgacccttgctttgtctgcgtcttcctactttctttctttctttctctgtgtgtcgtaatggctctcccagactcttcttcccgtcgcaactccctgat

SEQ ID NO: 201783 - DNA, 272 bp, Glycine max
ggaagagagagggagattctttgtttgctaccttctctcggaaaaatggttacgttcaggtttcaccagtaccaggtggttgggagggctcttcccacggaagcagatcagcaccccaagatctaccgtatgaagctctgggccaccaacgaggttcgcgccaagtccaagttctggtattttctgaggaaactgaaaaaggtgaagaagagcaatggccaagtgcttgccatcaacgagatttttgagaagaacccaaccaaaattaagaa

SEQ ID NO: 201784 - DNA, 269 bp, Glycine max
  unsure (1)..(269): unsure at all n locations
gggttattcagttgggtcatctcttgtggaggaanacaagcttagccttgcaactacacttcttgaaaaggccaaggctaaaggggtttctttgttgcttccaactgatgttgtcatagcagacaagtttgctgctgatgctaacagcaagactgtgccggcatcaagcatcccagatgggtggatggggttggatattggtcctgattccatcaagacatttggtgaagcattggatacgactcagaccattatttggaatggaccaa

SEQ ID NO: 201785 - DNA, 271 bp, Glycine max
ccaagacctcctctccgccgccgcctccgacccccctctctccctccacaaactctccttctgctgccccggcctccgccacgccggcctcctgttcgacacctccgatttcggcctcgaacgcgacctcggccccggcaacttcaacgtcatcaccgatgattctccttcgaacaccactccaccaccaccaccaccaccaccacaacaacaacaacaacaacctcctcaatccgatgattgttcttcctcttgttggtccctttacgat

SEQ ID NO: 201786 - DNA, 269 bp, Glycine max
tgaaagtcatcaggaagaacttggtcaagaagtgcattgagatgttctttgaaattgctgagaacaaggaagactataacaagttttatgaagccttctctaagaatctgaaacttggtattcatgaggattctcagaacaagacaaaacttgctgaattgctcaggtatcactaccaccaagagtggtgatgagatgaccagcctcaaggactatgttaccaggatgaaggaagggcagaatgacatctactacattactggtgaaag

SEQ ID NO: 201787 - DNA, 267 bp, Glycine max
ggaagaaaccctcgactcctccttctccgacgttctccacatgcacttctacgagtcctgcccttacctcaaattcgcgcacttcaccgcgaatcaggctatcctcgaagcatttgccactgctgggagagtccacgtcatcgatttcggcctcagacaagggatgcagtggcctgcactcatgcaagcccttgcattgcggcccggcgggctcccgactttccgtctaaccggaatcggcccgccgcagcccgacaacaccgacgc

SEQ ID NO: 201788 - DNA, 268 bp, Glycine max
gaaaatcctcaattttctgagcagccaaacactctctctctgtctctcgaaaattctcagtttgcagagaaaatctgaatcatgtcgtggcaagcgtatgtcgacgatcaccttctgtgtgacatcgaaggtaaccacctcactcacgctgctatcatcggccaagacggcagcgtttgggctcagagtaccgacttccctcagttcaaacctgaggagataactgccatcatgaatgactttaatgagcctggatcacttgctccaa

SEQ ID NO: 201789 - DNA, 271 bp, Glycine max
acgttctcgagccgaatcggctcgagctcacagtcgcttctcgaaccctattttctaccgcggtgatagcatttgaattcctgtaatggcgattgataatatttttaaaaatgaagctagtgaagaaaaaggagagcgtgccagaatggcttcttttgttggagccatggctattgctgacttagtgaagacaaccttggggccaaagggaatggataaaattttgcagtcaacaggtagaggacgtgaagttactgtcacgaatgatggc

SEQ ID NO: 201790 - DNA, 174 bp, Glycine max
cttccacctcgccttcttctcccaatgccttccctccgcctgggcccactcggcgatcctcctcccgggtcaactcgcccgtgactcaccgcagagctgccccgcccctgaccccaacctctactacaagccagtcatcggaatcgtcagccatcccggcgacggcgcctccgg

SEQ ID NO: 201791 - DNA, 268 bp, Glycine max
gctttctaaattctccacccctccgttccactgcttcgtcgcaacacgttacaataatggcttcgaagaattctcaacaagacacgcgcttagcgagaatcgcctctgcaatccgagtcatccccgactttcctaagccaggaattttgtttcaggacataaccacgctgcttcttgatacaaaggctttcaaagacaccattgacttgtttgttgagaggtacagagatcaaaacatcaatgttgtcgcaggagttgaagctagagg

SEQ ID NO: 201792 - DNA, 263 bp, Glycine max
ccgatgcggacatgtaactgtggtcaataagaatgagaagaagagggccttctcgcaaattgatgatgaaaatagctcctccggcggcgaccggaaaatcaagaccaataagagtcaagtggtggggtggcctccggtgtgctcttaccggaagaagaacagcatgaacgaaggttcaaagatgtacgtgaaggttagcatggacggtgctcctttcttgcgcaaaatagctttgggtctccataaggggtactcagatttaa

SEQ ID NO: 201793 - DNA, 265 bp, Glycine max
cctttccgttcatttcctctgttttttcttcaaatccattgtttcgtggaaatcccgaaatttaaccatgcttctccgaaccgccgcctccgccgcttctgcttcgtccctctccctcttcagccctacctccgaacctctccgttcggttcccgctcgtggattggtggttcgcgccgcgaaaggatccacgaaccaccgcgccctaaccggcgtgatctttgatccgttcgaagaggtgaagtaggagctcgatctcgttccc

SEQ ID NO: 201794 - DNA, 281 bp, Glycine max
cttagtcttcttaatttcctcactcgcaagtcacaccaatggcaaagctattcaatttcctccctctcctcttcctcaacatcttcattcaaacaatttcagcccaagtagcaccagcaccagcgggccccaccaacatcacccaagttcttgagaaagcaggccaattcacaaccttcatcaaacttctcaaggcctcacaaatagctgatagaatcaattcgcagctcaacaactcaaaccaaggcctaaccgtatttgcacccactgataatgcattc

SEQ ID NO: 201795 - DNA, 268 bp, Glycine max
aacaaaatggaagacacagtttctgcgttgaggtctttgatggtttctcactctccgccgctggatgccttagtggtgccctctgaagattatcacctgagcgaatatgtgtctgcacgagacaagcgccgcgaattcgtttccggcttcactggaagtgccggcttggcacttataacaaagaaagaagcactgctgtggacggatggacggtattttttgcaggctgagaaagaacttagtgctgggtggaagctaatgcgaattg

SEQ ID NO: 201796 - DNA, 265 bp, Glycine max
gaatggctcccaagggtttaatctttttggctgtgttatgcttctcagcactgtcactgagtcgttgtcttgcggaggataatggacttgttatgaacttctacaaggaatcatgccctcaggctgaagacatcatcaaagaacaagtcaagcttctctacaagcgccacaagaacactgctttctcctggctcagaaacatcttccatgactgtgctgttcagagttgtgatgcttcactgttgctggactccacaagaaggag

SEQ ID NO: 201797 - DNA, 266 bp, Glycine max
tcttctttctgtgttgacggtggcgttgatctgattagaatctgggatccgatcacagccatggcaggggcagcctctgctctgttcctcctcgacatcaaaggccgcgtcctcatctggcgcgactaccgcggcgatgtctccgccctcgacgccgaacgcttcttcaccaaactcatcgaaaaacaggccgatccgcaagctcaagatccggttgtgcacgacaacggcgtgacctacatgttcatccaacacagcaacgtgta

SEQ ID NO: 201798 - DNA, 266 bp, Glycine max
gaaaaccttagcccaaccggatcttcacgattaggagatggctaagtcgaagaaccacaccgctcacaaccagtcctacaaggcccacaagaatggcatcaaaaagccaaagaggcaccgccacacttccaccaaagggatggatccaaagtttctgaggaaccaaaggtacgcgaggaagcataacaagaagagcggtgaaacagccacggaagaagagtaaagtgtcactctcaaatggggctattaggatttgatttgctatt

SEQ ID NO: 201799 - DNA, 264 bp, Glycine max
ctaaaactaaaactaaaaccccactcagtcttccagtgaaaaaagaaaggcagcgatggaagaagacttcgacatccccggcggcgaggaaatggatctcggcgaagacaaggtcggcgaggagcgggagatcggctcccgcggcctcaagaagaagctcctcaaagaaggtcaaggctgggaaacccccgaagtcggcgacgaagtccaagttcattacacggggactttgctcgacggaactaagtttgattcgagccgcga

SEQ ID NO: 201800 - DNA, 264 bp, Glycine max
caccaccccttcttccttttcatcaggtttattccttttcttttggttcaattttgctgaatggagagtgcaagaatcagcaaatggttaaatcttctagtttgtgtactgctattgcttaaggcagaaggatctcttgttccattgactttggtgaagaatgcagaatcaaaaggagctgtttgtttggatggaagccccccagcataccactttgacaacggatttgaagaagggattaagaactggattgttcacattgag

SEQ ID NO: 201801 - DNA, 264 bp, Glycine max
gaaggcattcaaggcaaaaggtggtgatgtgtcatggcacatccatgatgagagatctcttcttgctttgcagggtcctcttgctgctccagttcttcaacacctgacaaaagatgatttaagcaagatgtactttggggagttccgtgtgttggacatcaatggtgtgcagtgctttctcacacgaacagggtatactggggaagatggatttgagatatcaattccctcagagagtgcagtggatcttgccaaggcaattct

SEQ ID NO: 201802 - DNA, 267 bp, Glycine max
gctgctaaggctcttggatcattcaggagcaaccccgctatttgagtcaatttaatttcttcttcatgatgagttcaaaatgaagaggaaattataagaataataaaaatattgtcaataatggcaattgcttgtgcttttattgcaaccttttctttgatcctattatgtagattaaaggttcttttcaagacaagagccattggtaaataccctttagtattttcaagcactttcctttctttcagtgtgtgatattttctttta

SEQ ID NO: 201803 - DNA, 264 bp, Glycine max
gtaagcactatagtaaaaaaaggacattcattcatctatggctacccttattgctcccagcaaccactctccccaagaagatgctgaagctctcagaaaggcttttgaaggatggggaactgatgagaacactgtcatagtaattttgggtcatagaactgtgtatcagaggcagcaaatcagaagagtttatgaggacatttaccaggaggatcttgtgaagcgcctagagtctgagatcaaaggagactttgagaaagccgt

SEQ ID NO: 201804 - DNA, 239 bp, Glycine max
atatagcccaagccctatacaaccaaaccctaacacacacccatttgattcagtttccatggctagcctcaaggttgcatttttggctgcagtgctctgcatggttgtggtgagtgcacccatggcacatgcagctatcacgtgcgggcaggtgacgaatagcctgatcaattgcatcggttacctccagaacggaggaacgccgccgtcgggatgctgcaacggatgaagagcctcaa

SEQ ID NO: 201805 - DNA, 260 bp, Glycine max
aaagagctggcgcaacttatgaggttctgagtgaccctgagaagcgtgagatatatgatcagtatggtgaagatgcgcttaaggaaggaatgggtggtggcggtggccatgatccatttgatatcttttcatctttctttggcggtgggagtccctttggatcaggtggaagtagtcgaggtaggaggcagaggcgcggagaagacgtggttcaccctactcaaggtctctttggaggacctttatcttggaacttccaa

SEQ ID NO: 201806 - DNA, 244 bp, Glycine max
  unsure (1)..(244): unsure at all n locations
gcgagtnggcaaggctttcattactancatttaggtctggtgcagtgatgggtttccntacttnncagcnaatgntcttttggtgcnctacatnaccancaatctcttcaagctatattatggtgatgattgggaaggtcttntgaggctataactggttatggtttgggtggatcttccatggctctgtttggcngagttggtggtggtatctataccaaggctgctgatgttggtgctgatc

SEQ ID NO: 201807 - DNA, 263 bp, Glycine max
ctttttctctctgttttttgttctctcttcgcttaaaccctatcgttcttctcgttttcgccgattctcgccatgccgaaagctaaatccgacgccaaagccgccgatagcaggttgaagcggaagggcgctggtgctgggaggaagcaatcgaggaaagctgctaaggaccctaacaagccgaagagacctccaagcgctttcttcgttttcatgtccgagttcagagagcagttcaagaaggagcatcctaacaacaaatc

SEQ ID NO: 201808 - DNA, 263 bp, Glycine max
atcattttctctcttctctgcttcttcttgttcaaatcttaggagctgaggagaatcaatcgagagaaatatgtctggtatcgctcgtggacgccttgctgaggaacgaaagtcatggcgcaaaaaccatccacacggtttcgttgccaagcccgagactctacctgatggcaccgtaaatttgatggtctggcattgcactattcctggcaagaccgggactgattgggagggtggatatttcccactgacaatgcacttca

SEQ ID NO: 201809 - DNA, 262 bp, Glycine max
ctccaatggagtttcatagcattaccaagtttcacaatatcccacttgtgtcttcttctcttgtgattttatgtattgctaccactatactgaataaccctgcaatggccacaaagcaatattattgtgatttccctgccatctttaactttggtgcctcaaacgctgacactggtggcttggctgcttcattttttgttgctgcaccaaaatcaccaaatggagaaacctattttcatagacctgctggaaggttctctga

SEQ ID NO: 201810 - DNA, 263 bp, Glycine max
gttttgcgcaaagggtgtagcgaagattgtagcataagaccgtgtttgcaatggatcaagaacccggagtcgcaagctaatgccactgtgtttcttgctaagttctatggccgtgctggcctcatgaacctcatcaacgctggtcctgaaaaccttcgtcctgctatttttcgatccttgttatacgaggcatgcggtcgaattgttaacccaatttacgggtcagtgggtttgttatggtccgggagctggcagctctgtca

SEQ ID NO: 201811 - DNA, 261 bp, Glycine max
ctaaaggctgcactctcttttatccctcaaaaaccaaaaccctacatggcagagcgcggaggtggcgaccgtggcagcgaccgtggcggtttcggacgcggctttggtgggcgagggcgcggaggtgacaggggccgaggccggcgccgaggtccccgccgcgaggaagaggagaaatgggtcccagtgaccaaactgggccgcctggtgaaggagggaagaatccgaagccttgaacagatctacctccactcgctcccg

SEQ ID NO: 201812 - DNA, 266 bp, Glycine max
ccaatcgtttggcatatggcttccttaagctcctcaatagtgctgcaccttgcagctctaattctatcccctcaagttcttgctgactatgagaagccccaatttacaagccacctgtttacacaccgccagtttataagcccccagttgaaactccaccagtgtacaaacctccagtttacaagcctccagttgaaaaaccacctgtttataagcctccagtttataagccacccatttacaagcctccagtgtataaacctcca

SEQ ID NO: 201813 - DNA, 265 bp, Glycine max
ctcaaacattgtttgttgtaggaagaggaatcttgagaaatggacaggggacagcaagagcaagattctgttcatcggagggactggttacatcggaaaattcatcgtggaagccagcgccaaagctggccacccaactttccttttggtgagggagtccactctctccaaccccgcaaaatcacccctcatcgacaatttcaaaggcctcggtgtcaatcttgtttaggagatctatacgatcaccaaagtttggtgagtgcta

SEQ ID NO: 201814 - DNA, 261 bp, Glycine max
gctcaacgttctaaacaaacactcccacttcttctttggctcaatggaggtcctggatgttcatctcttggctatggagcaatgcaagaacttggaccttttcgagtaaacagtgatggtaaaacactccacagaaatatattttcttggaacaaagttgcaaatgttttattcctggagtcacctgctggagtaggattttcctattcaaacaaatcaaaagattatgatacgaatggagataagaaaacagctgcagac

SEQ ID NO: 201815 - DNA, 270 bp, Glycine max
gatctcctccgccgtcaaggaatcgatttcgcgcgtaacgccaccgacggcgtagagtccacgcgcttcgctgaactcatgatgtcttcgggactcgtctgcaacgattccgtgagctgggtgacgtttcacagcgcgtacgatttcggttacttggtgaagatcttgacgcgccgtaacttaccgacgcggttggaagaattcttgaaaaccgtgaaggtgttttttggggacaacgtttatgatgtcaagcacatgatgaggttctgt

SEQ ID NO: 201816 - DNA, 262 bp, Glycine max
aggcaccacagactttgcattttcaggaactcctgtggattgagtttcgctagcgttatttggagcgttgttaccttggtctaagcctatgctggttattagtgggattaaccgcggatcaaactgtggtcatcacatgttctactcaggggttgttgccggagctagggaagcgttgttatgtggtgtaccggcattatcaatatcattaaattggaagaaggatgaaagtcaggaaaacgatttcaaggatgctgtatca

SEQ ID NO: 201817 - DNA, 267 bp, Glycine max
ctgcacaacaattcgagattccaaccatcgatctcaattttcaaccttaacctctaagaatgtcttacgcttatctcttcaaatacatcatcatcggtgacaccggagttggaaagtcttgtcttctacttcaattcacggacaagcgctttcagcccgtccatgacttgaccatcggtgttgaatttggtgccaggatgatcacaattgataacaagccaatcaagttgcaaatatgggatacggctggtcaagaatcattcagat

SEQ ID NO: 201818 - DNA, 262 bp, Glycine max
ctccattttccctctgtcttccccccctcctctacacaaaaatatattattagcatggagaaggtgaattttgtgaagaatggagagcttagattgcctccggggttccgtttccacccgactgatgaggagctggttctgcaatacttgaagcgcaaggtcttctcctgccctttgccagcctctatcattcctgagcttcatgtttgcaagtctgatccttgggatttgccaggtgatttggagcaagagagatacttct

SEQ ID NO: 201819 - DNA, 257 bp, Glycine max
ctgaaattgagatgctctctcagttccgccaccgccatctagtatcattgattggatattgtgatgaaaggactgagatgatattgatatatgaatatatggagaagggaactctcaaaagccatttgtatggttcaggtttcccaagcttaagttggaaggagagacttgagatatgcattggagcagccagaggactgcattaccttcacactggctatgctaaggccgttattcaccgtgatgtgaaatctgca

SEQ ID NO: 201820 - DNA, 263 bp, Glycine max
ctttctgtctctctttagtctttctctttttctctctctccattccgtgttttcagctccggtaacctctccttctccgccgccgttgctatctccgctctgaccttccatccctcaacgccccacagatcttcaatttgattgcttgggtcaacaatttctgtcattctcaatcatggcaactagacttcagtttgaaaataattgtgaagttggagtcttctctaaactcaccaatgcttactgtttggttgcgattggag

SEQ ID NO: 201821 - DNA, 271 bp, Glycine max
atcagctttgatgatttatcacttgaagaaaagaaacggtttcacagagcaattgcttatggggaactgagcaagatgatcaaaccatgggatccatggtggtcaaagccttctgccagaaacatctgtctcagtaaggaaggaactcagcttgttcaacctcttccagatcaggaattgctagatgatgatattggaagtgatgaattcagcaaagttcctcttgggcctgaaactccacttcctcctctaagcaggcttagttccaagg

SEQ ID NO: 201822 - DNA, 273 bp, Glycine max
ggacaatctaagacttcggtgggatctaggttagcaaccagcgatctgggacttttctttctcccccacaccatacccagattcaaaaactcgctctgctctgctctgcaattccccttccgtttcgtttcgatctcaaaacatgttcttcttcgattggttctatggcattctagcttccctcggtctctggcagacagaagccaaaattctcttccttggtctcgataatgcagggaagatcacacttcttcacatgctcaaagacgagag

SEQ ID NO: 201823 - DNA, 253 bp, Glycine max
ctggctcagaaggaacgctagctatatgcttaacacatgcaagtcgaacgttgttttcggggagctgggcagaaggaaaagaggctcctagcgtgaaggttgcttgtctcgcccaggaggtgggaacagttgaaaacaaagtggcgaacgggtgcgtaatgcgtgggaatctgccgaacagttcgggccaaatcctgaagaaagctaaaaagcgctgtttgatgagcctgcgtagtattaggtagttggtcag

SEQ ID NO: 201824 - DNA, 252 bp, Glycine max; identical to SEQ ID NO: 147863

SEQ ID NO: 201825 - DNA, 257 bp, Glycine max
agctttctctcgcgttttccaattccccccaaatctcacgcctagggtttctatcgcaaaccctccctacctccaaccaggtcgcgtgcaaagggatttcgaagcttcggaagaaaaaaatgaaacctgttttctgtggaaacctggatttcgacgcgcgtcaatctgacgtggagaggctcttcagaagatacggcaaagttgatagagttgacatgaaatccgggtttgcttttgtctacatggaagatgaacgt

SEQ ID NO: 201826 - DNA, 262 bp, Glycine max
cgcagatgtctcgaagcaaatccagcagatggtgcggttcatccgccaggaagctgaggaaaaggccaacgagatctctgtctccgccgaagaggaattcaatatcgagaagctgcagttggtcgaagccgacaagaagaagatcaggcaagaatacgaacgcaaagagcgccaagttgaaattcgcaagaagattgagtactcaatgcagctgaatgcttctcggattaaagttcttcaagctcaagatgacgtgatcagt

SEQ ID NO: 201827 - DNA, 272 bp, Glycine max
  unsure (1)..(272): unsure at all n locations
ttgatccctttgatccaaagttcaacatcgtctctcccggtgccgacatgagcatatacttcccatacactgaaactgagcgtaggttaacagagttccaccccgacattgaagngcttctttacagctcagtggagaatgaagaacacatatgtgtattgaaggaccgcaacaagccgatcatcttcaccatggcaagacttgaccgtgtgaagaacatcacgggacttgtggagtggtatggcaagaatgcgcgcctccgcgagttggta

SEQ ID NO: 201828 - DNA, 264 bp, Glycine max
gcaagaactctttcatggaaatgaagtggaagaaggttcatagatacatagtcttcaagatcgatgagaagtcaaggcttgtcaccgttgataaggtgggaggtcccggcgagagctatggtgatctcgccgcctccttgcccgacgatgattgtagatatgccgtattcgactttgatttcgtcaccgtcgataactgccgcaagagcaagatcttcttcattgcatggtctccaacagcatcaaggataagagcaaagatgc

SEQ ID NO: 201829 - DNA, 263 bp, Glycine max
cttttctctctctctctctcgttcgtgttcttcgtcgcaaattacaaggaggatctctcttgcgttttctctaggttttcgctatggcgtcgaagcgaattttgaaggagcttaaggatttgcagaaggatcctccaacatcttgcagtgccggtcctgttgttgctgaagatatgttccattggcaagctacaattatgggtcctccagacagtccctatgcaggaggtgttttcctagtgaccattcatttccctccagat

SEQ ID NO: 201830 - DNA, 259 bp, Glycine max; identical to SEQ ID NO: 148587

SEQ ID NO: 201831 - DNA, 256 bp, Glycine max
atttcctctcagaaccctcgatcactcccacgcgctcctatatcctctccttcaccgtcgctctctccaacgatcacaacaacatcgtcatcccatggcaaacgccgcatctggtatggcagtccatgatgactgcaagttaaggtttttggagctgaagacaaagaggacacaccgtttcatagtttttaagattgaggagcagcagaagcaggtcattgtggagaagcttggtgagccagcccaaggctatgaa

SEQ ID NO: 201832 - DNA, 258 bp, Glycine max
gacgagtatggtcgtagtaagtgacgaaatgcttcggggagttgaaaataagcgtagatccggggattcccgatataggtcaacctttcgaactgctgctgaatccacgggcaggcaagagacaacctggtgaactgaaacatcttagtagccagaggaaaagaaagcaaaagcgattcccgtagtagcggcgagcgaaatgggagcagcctaaaccgtgaaaacggggttgtgggagagctatactagtgtcgtgct

SEQ ID NO: 201833 - DNA, 260 bp, Glycine max
ctcgagccgattttctgaagctgaagttagaaattggtgttttcaagtttttcaaggtctacgcttacatgcaccagcgtggatacttccatcgtgacctgaagcctgaaaacttgctggttaccaaggatttcatcaaaatcgctgattttggactagcccgagaaatcagttcacaaccaccctacactgagtatgtctccacacgatggtatcgtgctcctgaagtgctgcttcagtcttatatgtatacctctaaa

SEQ ID NO: 201834 - DNA, 266 bp, Glycine max
cttgtatactggaattaatacaaggcacttattgaagacaagcaagatggtcgaagagttttctggtatgtatttacaaccacacaaagctgttgtaggtgataatgcctttctccatgaaagtggcgttcaccaggctggattgttaaagcatagagctacatatgaaataatgtctcccgaagatattggtcatgaaaagtccagtggagttaatatggtactagggaagctaagtggacgccaagctttgaaaagtcgtctca

SEQ ID NO: 201835 - DNA, 273 bp, Glycine max
cttagccaacacaaccatcatggccacctctgctattcagcaatcagcattcactggtcaaactgctctgaagcagctcaatgagttcgtccgcaagaccggtggcgccggcaaaggtcgcactaacatgcgccgcaccgtcaagagtgctcctcagagcatttggtatggccctgaccgtcccaagtacttgggtccattctcggagcagattccatcatacctgaccggagaattccctggtgactacggatgggacactgctggattatc

SEQ ID NO: 201836 - DNA, 262 bp, Glycine max
agaaattgggcgtgtgggagttgttgaatcgggaagcaaaaaaaatgagaatccatcacatagcatgcctccaagacaattattcctatctgatcgtagacgagagcacgaaggaagccgcggcggtggacccggtcgaaccggagaaggttcttgaagttgccagctcgcactgcctcactctcaaattcgtcctcaccacccaccatcactgggatcatgctggtggaaacgacaagataaagcagctggtgccaggaat

SEQ ID NO: 201837 - DNA, 260 bp, Glycine max
cgacatcgtcgaagagcagtgtcacgtgaccttcacgggcttccccggtggctccgaggcgttcgagatggccgcaaaattctgttacggcgtcaagatcgacctgacgccgtccaatgtggcggcgctccggtgcgctggggagtttctcgaaatgaccgaggattactccgaggacaacctcgtttccaagacggagggctttctatcgcagcacgtgctcaagaacctcaaggactctgtcaacacgctgaaatcgt

SEQ ID NO: 201838 - DNA, 251 bp, Glycine max
gtgagacagagagaattgatatgggtgccggtctagatgcgtacctcttaatggatcttgtgcaattggactatgccgtgatgaacattacttcaaagcttgcaatagaatctggaatgagccctcttgaccttgttgcttatcgacaactctttgctactgtgtccattgctccctttgcttattggctcgagtggaatacgcttcccaggattacacagcgtcttatgattcagatattattttcgtcc

SEQ ID NO: 201839 - DNA, 253 bp, Glycine max
atcaaatttctcagatctatccgacgtcgtcgcagatccaccaaccgttatggctgccttcagcggtgatgaaacggctccgtttttcggcttccttggagccgcagctgccctcgtcttctcctgtatgggagctgcctatggcacagcaaagagtggtgtgggcgtggcttccatgggtgtgatgagacctgagctggtgatgaagtctattgtccctgttgtcatggctggagttttgggtatttatggc

SEQ ID NO: 201840 - DNA, 252 bp, Glycine max
attgcaatgatgatagctatctctgcaacttttatgattttcttcttgtgttcgccatcagtggctatactaatcaccaggttgccgctaccctcaccagtgacaggccctgagtccgtagcattcgaccggaacggtggagggccatatgtcggtgtttctgatggaagaattctcaaatatgctggtccaaccgagggcttcaaggaatatgctttcacttcaccaaacagaaacaagacaatctgtgat

SEQ ID NO: 201841 - DNA, 255 bp, Glycine max
ggctttctctcgcgttttccaattccccccaaatctcacgcttagggtttctatcgcaaaccctccctacctccaaccaggtcgcgtgcaaagggatttcgaagcttcggaagaaaaaaatgaaacctgttttctgtggaaacctggatttcgacgcgcgtcaatctgacgtggagaggctcttcagaagatacggcaaagttgatagagttgacatgaaatccgggtttgcttttgtctacatggaagatgaac

SEQ ID NO: 201842 - DNA, 258 bp, Glycine max
gatcggtggatcaggaatggacctgaggagcaaagcaaggactctcccaggaccagttagcgacccttcaaagcttcccaagtggaactatgatggttccatcacaggccaagctcctggagaagacagtgaagtgattatatacccacaagccattttcagggatccattcagaaggggcaacaatatcttggttatctgtgatacttacactccagctggagaacccattcccactaacaagaggcacgatgctgc

SEQ ID NO: 201843 - DNA, 257 bp, Glycine max
cttggctcgctccctctcggatcagatctgcgctctccgttttcagatcgcgttttgtttcaattcgacactttcctcgcttcaaagattaagcgaacaatatggttgtccttgctgcatccattgtgagcaaatctggcaaagtgctagtttctagacagtttgtggatatgactcgcataagaattgagggtcttctagcagcatttcccaagttggtagggactggaaaacagcacacgtatgttgaaactgag

SEQ ID NO: 201844 - DNA, 266 bp, Glycine max
gaaaggaggaaagatgagtagttcatcaaggccggtgccgaggagagagagtccatggggagtcaccggagagaatcatcctgaacccaaagctcaccgctgcaatgaccgtgtcgaggacgttattcaggcttgctttgagggaaacccattcaagactgttccgggacctttcaagctcttctggcagtgcatgtgttccaaacccggtgaggaaccaacagccccatttacttatctggatttggagcctctaaagagagaaa

SEQ ID NO: 201845 - DNA, 258 bp, Glycine max
caggcccaaaaccaaaaaaaagcctcgtctctcgtgccgattctccaggacaattcccttcacccaacctaattgcaattagtgtagaagatgagtacgttggatgcaacaagggctgaacttggtcttcttgttttatatttgggcaaggctgaagcaagggacaaaatatgcagggcaatacaatatggttccaaatttttgagtaacggggaacctggtactgctcagaatgtcgacaaaacaaccagcttggca

SEQ ID NO: 201846 - DNA, 255 bp, Glycine max
cttttgatttgtgaaaggaaagcaaacatgcttgatcaggtccaacaccctacaatcatggacaaggttgctggccagctccatctccgttctggtgtttctggtattaggagttatgaaggagcctactgccaccccacaatgtaccaaagaccctcttttgggaattactcgaatgctgcattgcagtatcctgtgatgccctcatgcaaagctactatggatttgtctgctgctgcaacaactgcctccccc

SEQ ID NO: 201847 - DNA, 260 bp, Glycine max
cacccttcttcacttcccttcacattgcagaagagatggctcttgtgaaaccaatttccaatgtcactcccaaatttggcagcagccccagaatgggatcacactccaaattcagcaccataataagaatgtctgccactgccaccccaccaccaccaccctccacctccacaaagccagctgcaagcaacaagaagggcaacatcaaggagaccctcttgactccaaggttctacaccactgactttgatgagatggag

SEQ ID NO: 201848 - DNA, 278 bp, Glycine max
cgagaacaataaaaaataaaaaaaaaatccgcgattagctcttctcttggaaaagtggaaaccagaattacgaacgaaagagaagagcgatttagaagtgatagaaaatggggttgccgttcacgaagctgttcagcaggttctttgcgaagaaggaaatgaggattctgatggaaggcctcgatgctgctggaaagacaaccatcttgtacaagctcaagcttggagaaatcgtcaccactatccccaccatcggatttaatgttgagactgtggag

SEQ ID NO: 201849 - DNA, 272 bp, Glycine max
ctagcgcttattctctcgcattccgtggagatctagtgctactgctgcaagacctcgctgaaaattagggtttcgattcggaggtagacgaagatgttcggaagggctccgaagaaaagcgacagcaccaggtactacgtaatcctcggcgtttccaagaacgcttcgccggatgacttaaagaaggcttacaagaaagccgccattaagaaccatcctgacaaaggcggggatcccgagaagtttaaagagcttgctcaagcctatgaggt

SEQ ID NO: 201850 - DNA, 271 bp, Glycine max
gcgcatcagagcttgtggaattcccgttgttgctgacaccaatcgattccaactacagagcttgcaccattccttacagattcccctccgataaccctcgcaagcccactcccaccgaaatctcttggattgatctcttcctcaactcaatcccctctttcaagaagcgtgcagagagtgatacttctgttcctgatgctgcagctaaagctgaaaaatttgctcaaagatatgctgatatacttgaagatttgaagaaagatcctgaaag

SEQ ID NO: 201851 - DNA, 265 bp, Glycine max
gtcgagaccagaggtagttgcgccgcctgagattttctacgacgatgccgaagctcgcaagtacacctcttcttcccgtattgttcaaattcaggcgacgctgtcagagagagctctcgaactacttgctttgcctgatgacagcgttcctaaattactccttgatatcggttgtggatcgggacttagcggtgagacactctccgagaatggacaccattggattgggcttgacatttcagcatcaatgcttaatgttgcggtg

SEQ ID NO: 201852 - DNA, 269 bp, Glycine max
gtcggcggtggcggtgcctgaccacgatgggaacaactccaactcgtcgggaatgacgatgaagggcgttcgaatctccggaagacccctttacctggacgtgcaggcaacatctccggtggacccgcgcgtgctcgacgcgatgctccctttctacctctctcgctacggaaaccctcactacccgcacccacttctacggctgggaatccgacgaggccgtggaacacgcgcgcgctcaggtagcgtccctcatcggcgcgtccccc

SEQ ID NO: 201853 - DNA, 264 bp, Glycine max
ttattatcaaataattaattaaattcctcgtggaatcttgttgaagccatgtctacagctggtcaggtcatcaagtgcagagctgcggtggcatgggaagcagggaagccactatcgatagaaaccatagaagtggcaccaccccagaaaggtgaagtgcgtttgaagatcctcttcaactccctttgccgtacagatgtttactggtgggatgctaagggccagactccgctgtttcctcgtatcttaggccacgaagcttcg

SEQ ID NO: 201854 - DNA, 265 bp, Glycine max
caagtccaacctacccctttttcttctcccaccaacttcaccgtcttcttcctcgatcatgtctcacttcaagggcaagtaccatgatgagcttattgtcaatgctgcttacattggcactcctggaaagggtattcttgctgctgatgagtcaacagggacaattggcaagcgtttggccagcatcagtgtagagaatgttgaatccaacaggcgtgctcttagggagctgcttttcaccgctcccggtgctcttaaatatctc

SEQ ID NO: 201855 - DNA, 268 bp, Glycine max
aatatagcccaagccctatacaaccaaaccctaacacacacccatttgattcagtttccatggctagcctcaaggttgcatttttggctgcagtgctctgcatggttgtggtgagtgcacccatggcacatgcagctatcacgtgcgggcaggtgacgaatagcctgatcaattgcatcggttacctccagaacggaggaacgccgccgtcgggatgctgcaacggagtgaagagcctcaatgccgccgccaagaccaccgccgaccg

SEQ ID NO: 201856 - DNA, 271 bp, Glycine max
  unsure (1)..(271): unsure at all n locations
cgacggtggcgagttcgtgtacctttccgggttcggcaaccacttctcctccgaggccctcgccggagctctgccggtggcgcagaacagccccctcgtctgcccgtacggcctctacgccgagcaaatctctggcacctccttcacctcccctcgcaaccgcaacctctncagttggttttatcggatcaagccatcggtgactcacgaaccgttcaagcctagggtacctggtaatggcagaattttgagtgagtttaacaactccaac

SEQ ID NO: 201857 - DNA, 271 bp, Glycine max
ctaccctccacttggtgctccgtctgcgcggtggtatgcaaatctttgtgaagacccttactgggaagaccattactttggaggtagagagctcagacacaattgacaatgtgaaggcaaagatccaagacaaggagggtatcccaccagaccaacagaggctcatttttgctggcaaacagcttgaagatggccgaaccttggctgattacaacatccaaaaagaatctaccctccacttggtgctccgtctgcgcggtggtatgcaaat

SEQ ID NO: 201858 - DNA, 269 bp, Glycine max
gcagcactgtaacctcaactcacctctcccaaatccgttccctctttcaaacctttttttttttcaccaaatcggcgatggcaacgacgtcggtggtgccggcgaaccggcgtcgcgcggcgaaccccgcggaggagatggacttcgagacgacggagggcgtgaaggccatcgcaagcttcgaggagatggggatcaaggacgatctgctccgcggaatctaccagtacggcttcgagaagccctccgccattcagcagcgggccgtc

SEQ ID NO: 201859 - DNA, 269 bp, Glycine max
cacggagaagctgatgaaccagatcatggaattgaaattcacttcgaaatcgctgcagcgtcaatcgcgtaagtgcgagaaggaggagaaatcggagaagctgaaggtgaagaaggcgatcgagaaaggcaacatggacggcgctcgaatctacgcggagaacgcgatccgtaagcgcacggagcagatgaactacctccgcctggcctcgcgcctcgacgccgtggtcgctagcctcgacacgcaggcgaagatgacgacgatcagca

SEQ ID NO: 201860 - DNA, 269 bp, Glycine max
ctttctctcttctctctccacccaaaccctaactcccgaccctgatcccctctcgtatccgtcatgaaaggaggaaagtccaagaccgaatctaagagagccgatcccaaacttgctgtgaataagaagggagccgccaccaaggctaggaaacccgccggcaaggggaaggcagcgaaagaccctaacaagccaaagaggcctccaagtgctttcttcgttttcatggaggagttcaggaaggtattcaacaaagaacatcctgaaaa

SEQ ID NO: 201861 - DNA, 263 bp, Glycine max
ctttttggctgtgttatgcttctcagcactgtcactgagtcgtagtcttgcggaggataatggacttgttatgaacttctacaaggaatcatgccctcaggctgaagacatcatcaaagaacaagtcaagcttctctacaagcgccacaagaacactgctttctcctggctcagaaacatcttccatgactgtgctgttcagagttgtgatgcttcactgttgctggactccacaagaaggagcttgtctgagaaggaaacag

SEQ ID NO: 201862 - DNA, 264 bp, Glycine max
ctcacaagagcttgcggggcccacgtgcggggatgatcttttaccggaagggccccaagccgccgaagaaggggcagccggagaacgcggtttatgatttcgaggacaagattaacttcgcggtgttcccttcgctgcagggtgggccccacaaccaccagatcggtgctctcgccgtggcgctgaagcaggccgcgtcgcccgggtttaaggcctacgcgaagacgttaaggcgaacgccgttgcgcttggaaaatacttgat

SEQ ID NO: 201863 - DNA, 278 bp, Glycine max
tgttggtttcatgatcgaatacgtgttgtggtttcaagtttctttgtgaaggtgctgcagcttccttggagatggggaatgaagtatttctgggacacccttttggatgcagatcttgagagtgatgctcttggttggcagtacatatctggcactctccctgatggtcgcgaatttgaccgaatagataatccacagtttgtgggctacaaatgtgacccaaatggagaatatgtgcgacgctggcttcctgaacttgctagattaccaactgaatg

SEQ ID NO: 201864 - DNA, 274 bp, Glycine max
tgccagatgcggcgagttttagcgacaagggtttcggtcctgttccatcgcgatggaaaggcacctgcatgacatcaaaagacttcaattcctcttgttgtaacaggaagataattggcgcgaggttttaccctaacccagaggagaaaacggcaagggatttcaacggacatgggactcacgtttcgtcgacggcagtgggcgtgccggtgagtggcgcatcgttctatggtctggcggcggggacggcaaggggtgggtcccctgagtcaag

SEQ ID NO: 201865 - DNA, 261 bp, Glycine max
gagaaaaacacccaaatcaaatattatcatggagcccagcttggatttgagactgggctttgtccccaaacccctttccctgtttttcggcgacgtttctgggaacagagacaagtgcgacaaagtggtcacactcgatggcttcgtgcagagattggaggaagagttgacaaaggtcgaggctttcaaacgcgagcttcctctctgcattctcctcctaaacgatgctatagcgagattgaaggaggaaaaagtgaagtg

SEQ ID NO: 201866 - DNA, 261 bp, Glycine max
ctcgagccgtgatgcttcactgttgctggactccacaagaaggagcttgtctgagaaggaaacagatagaagctttgggttgagaaatttcaggtacattgagaccatcaaagaagctttggaaagggaatgcccaggagttgtttcctgtgctgatatcctcgttctctctgccagagatggcattgtttcgctaggaggtccccatatccctcttaaaacaggaagaagggatggtagaaggagcagagccgatgtggt

SEQ ID NO: 201867 - DNA, 263 bp, Glycine max
ctatcctgctgcacagcaaatgcttattcatcaaggaaaagttctaaaggatggtactactttggaggaaaataaagtagctgaaaatagttttattgtaattatgttatcaaagactaagagttcatctggtgaaggatctactacttcaactgctccttcagttaaggcaagtgcaactcctacttcaacctctgtgtctgctgcgcctcaagctcctgcttcaactggagcaacgcctacacctgttactgccccagctg

SEQ ID NO: 201868 - DNA, 267 bp, Glycine max
  unsure (1)..(267): unsure at all n locations
ggaaaagttgatgaagatggccggttcggttagaactgggggaaagggtaccatgagaagaaagaagaaggctgtccacaagacaacaaccacagatgacaaaaggcttcagagcaccctgaagagaataggggtgaatgccatcccggctattgaggaggtcaatatctttaaggatgacgtagttatccagtttctaaatnccaaagttcaagcatccattgctgctaatacttgggttgtcagtggttctccacaaacaaagaa

SEQ ID NO: 201869 - DNA, 273 bp, Glycine max
ctaggctcaaaaaaatattttcttttccctcttttttattctgggttttctgattatacactctagcctaatgaataaccagtaatcagcttttttgtttattttttccccgaaagtgaaaatgaagagaatgatagcgttgggatttgagggttcagcaaacaagattggtgttggggtagtgaccttagatggcacaattctgtcaaacccacgccacacatacatcacccctcctggtcaaggctttcttcccagagagacagcacagca

SEQ ID NO: 201870 - DNA, 271 bp, Glycine max
caagaccaagccgaaggacggggaaagcggtggcggtggtgacggcgaggaccccgagcaggccaagctccgggccgggctcaactcggccatcataagggaaaagcccaacgtgaagtggaacgacgtcgcagggttggagagcgccaaacaggccttgcaggaggctgtgattttgcctgtgaagttccctcagttctttactgggaaaagacgaccctggagagctttcttgttgtatggacctcctggaacgggaaaatcatattta

SEQ ID NO: 201871 - DNA, 263 bp, Glycine max
ctcttcttctcttgcggctagggttttagcgcagttcttctagatttaaggaagatgggtaaggaaaaggttcacatcagtattgtggtcattggccatgtcgactctgggaaatccactaccactggtcacctgatttacaagcttggaggcattgacaagcgtgttattgagaggtttgagaaggaagctgctgagatgaacaagaggtctttcaagtatgcctgggtgctggacaaacttaaggctgagcgtgaaagagg

SEQ ID NO: 201872 - DNA, 265 bp, Glycine max
aaaaatacaccgaatcatctgtggatggaaacaagtatgcagcacttgcaagttcccttggacatttaacatgggaaaagcccttatattctgagtttcaacaattggcaagtgaaagtgagtatgctgcctggaccctagtcaacgggtatgcactaaaccatgttactatatccactcatcggctgaaaactcatttgaaggagataaaaaaactaaatcagtttattaaggatagtggattcagattgaattctgaaggagg

SEQ ID NO: 201873 - DNA, 267 bp, Glycine max
gtaacttcatctgggtttcaggaaaaaagaaaaaggaaaacaatgggttccgataatcaccagaacttggagttcttgaaggagatcggtttgggctcttccaacattggctcttacattaatggccagtggaaagccactggttcttctgtcacttctgttaatccttctaacaatcagagtatagctacaagtgaccgaagcaactttgcaagattttgaggaggggttgcgagcttgcagtgaagcagctaagacatggatgat

SEQ ID NO: 201874 - DNA, 254 bp, Glycine max
gttgattcggatctagagtcttcagtttctcctcgttgttcttcgctttcctgttttcaatttcgattctttcgttaatttaataagatgtttgggagggcaccgaagaagagcgataatacgaggtactacgaaatcctcggcgtctccaagaacgcttcgcaggatgatctgaagaaggcttacaagaaagccgccattaagaatcaccccgacaagggcggtgatcccgagaagtttaaagagctggcgca

SEQ ID NO: 201875 - DNA, 266 bp, Glycine max
aacgacaccactgaagcgaagaaaggggcgtacggttctgttgtggttggagatccgaattttgattatcgaatcgcaaaattctgaatcaatcaatcaatcaatcagtaatcagagccatcaacgactgcaatggtctgcgagaagtgtgagaagaaattatcgaaggtgatagtaccagacaagtggaaagaaggggccagcaatactaccgagggtggtggccgcaagatcaacgagaacaagcttctctccaagaaaaacag

SEQ ID NO: 201876 - DNA, 268 bp, Glycine max
ctctggcagcctcttggtaaggacacaattgaatacttcactctgcaagatctttgggactgctattatgaatggagcgcatatggtgctggtactcctgtgatgttggaggatggtgataccgtgactcagtactatgttccatatctatctgctatccaaatctacaccaacaagtctgttgtcgcttctcgcaatcggagagaggatagtgatggagttgaatttgaaagtgattcatggagtgaggatagttcaagtgataacc

SEQ ID NO: 201877 - DNA, 266 bp, Glycine max
gcatgcttagtttagacaggaactgtgacagtaataaaggtagtgtaaggggggattcactagagagtgctaaaactagtgttagtcggccaagtgatagcagtggcctcagcgatgacagcaactggagcaacattactggtagtgccaataaacctcacaaaggaaatgatcctaggtggaaggctatccttgccatccggttacgggatgggattttgggcatgagtcattttaggttactcaaacgactaggatgcggcgat

SEQ ID NO: 201878 - DNA, 262 bp, Glycine max
tcttagcggtgctgggcccatcagggagcggaaaatcgacgctccttcacgcgctcgcagggaggctccatggacccggcctcaccggaacaatcctcgcaaactccagcaaactcaccaaaccggttctccggcgaaccggtttcgtcacacaggacgatattctctaccctcacttgacggttcgcgagacgctcgtgttctgcgcgatgctgaggctcccgcgcgcgctcctgcgctcggagaaggtagcggcggcgga

SEQ ID NO: 201879 - DNA, 258 bp, Glycine max
tctgtgtttgcggctgaggattccgaacgagcgaccttcttcgtttctcgcaaagtttaagtcatcatgggtaaggaaaagactcacatcaacattgtcgtcattggacatgtcgactctgggaagtcaactaccactggtcatttgatctacaagcttggaggtattgacaagcgtgtgattgagaggttcgagaaggaggctgctgagatgaacaagaggtcattcaagtatgcctgggtgcttgacaagctcaag

SEQ ID NO: 201880 - DNA, 260 bp, Glycine max
agagtattatttcaaggcaggccatccaactactactggtgcttcaaatctcaagtacagaaatccaaaatatctgtcaatgctcaaccacctgagattctatcttccacaagtttatccaaagttggataagattctttttcttgatgatgacattgttgtccagaaggatttgactggattatgggctgtgaatcttaatggaaaagtaaatggtgctgttttaacatgcggagagagttttcaccgatttgacaagt

SEQ ID NO: 201881 - DNA, 259 bp, Glycine max
ctcgagccggggactcacgtttcgtcgacggcagtgggcgtgccggtgagtggcgcatcgttctatggtctggcggcggggacggcaaggggtgggtcccctgagtcaaggttggcggtttacaaagtgtgtggggcttttgggtcatgtcctgggtcggccattcttgcggggtttgacgatgccattcacgacggagtggatatcttgtcgctgtcgctcggtggattcggtggaaccaaaaccgatttgaccaccg

SEQ ID NO: 201882 - DNA, 270 bp, Glycine max
ctttcaaattctcattttcaagctgtttggtgtaaagatgggacaagtgcttggttgtgttcaagtgaagcagtcaactgtagccgtcaaggaatgtttcgggaagtacgatgatgttcttcaacctggttgccattttgtgccatggtgtcttggctgcggtgtggctggtgtcctttctacgcgtgtcatgcagctaagtcttcgttgtgaaactaagacaaaggacaatgtgtttgttaatgtggttgcctcaatccaatatcgagc

SEQ ID NO: 201883 - DNA, 265 bp, Glycine max
aatggctcccaagggtttaacctttctggctgtgttaatatgcgtttcagcactgtcactgagtccttctgttgcgggggaagggcaaaataatggccttgttatgaacttctacaaggaatcatgccctcaggctgaagacatcatcacagaacaagtcaagcttctctacaagcgccacaagaacactgctttctcctggctcaggaacatcttccatgactgtgctgttcagagttgtgatgcttcactgttgctggactcc

SEQ ID NO: 201884 - DNA, 262 bp, Glycine max
atcaagactcgagtgaacaaaaaaaaaatgatgggtacccttaaggtgtccaacagtagtttatacatattttcgaagttcctagtaatttgtatggtgatgatgatatctttggttgattcaagttattccttgtgtgattttgaggcaatcttcaattttggtgattcgaattcagatacgggtgggtttcatacaagctttcctgcacagcctgctccctatggaatgacttacttcaaaaaaccagtggggcgtgctt

SEQ ID NO: 201885 - DNA, 262 bp, Glycine max
gcaaaatcaaaatgtgggcaagcgccgcagaaggtggtgctccggaggtgactctggaaacttccatgggttctttcacctttgagctgtactacaagcatgcgccgaggacttgtaggaacttcattgaactgtctcgccgaggttactacgacaacgttaaattccataggatcattaaggacttcatagtacaaggtggggatcccactggaacaggaagaggaggagaatccatatatggtgcaaagtttgaagatga

SEQ ID NO: 201886 - DNA, 259 bp, Glycine max
cagctctcctctcactttcatttctacatccctggctctgttccgtcgatgacgatggcgtttagggtgcgaaaccctgacctccgctttctcattcttctctctctcttgtccatcacttccgccaaggtcttcttcgaggagcgtttcgatgacggatggggaaatcgttgggttaaatcagattggaaaaaagatgagaacctggctggggagtggaaccacacctctggccaatggaatggagacgctaacgaca

SEQ ID NO: 201887 - DNA, 265 bp, Glycine max
gtcacttttggggaagaggtcgagtttcacagcagcaatggtgtacgtcaaggctcagaaatcaaaagcctacttcaagagatatcaagtcaagttcaagagaagaagagagggaaaaaccgattaccgtgccaggattcggttgattaatcaggacaagaacaaatataacactccgaaataccgatttgttgttcgctttagcaacaaggacattgttgcacaaataatatctgctagcattgctggcgatattgttcttgct

SEQ ID NO: 201888 - DNA, 251 bp, Glycine max
cgagaacaaaaaaaaaaaaaaaaaaaatccgcgattcgctcttctcttggaaaggtgaaacccagaggtacgaacgaaagagaagagcgttttagaagtgagaaaagagggggttgccgtccacgaagctgttcagcaggttttttgcgaaaagggaattggggatcctgatggaaggccccgatgctcccggaaagacacccatcttgtacaagctcaagcttggagaaatcgtcaccattatccccacc

SEQ ID NO: 201889 - DNA, 255 bp, Glycine max
tgattttgataggacgaccctttggtatttggatcttcaagaaagagagacccttgggatttcgtcaccatgagtctcttcggtcttggaaacagaaaccaaaaaacatttcgtccaaaaaagagcgctccatctggaagtaagggtgctcaacttcaaaaacacatagatgccacgttgggtagtgggaacttgagggaggctgttaaactgccccctggtgaagatattaatgagtggctagctgtaaacact

SEQ ID NO: 201890 - DNA, 252 bp, Glycine max
tcttagcggtgctgggcccatcagggagcggaaaatcgacgctccttcacgcgctcgcagggaggctccatggacccggcctcaccggaacaatcctcgcaaactccagcaaactcaccaaaccggttctccggcgaaccggtttcgtcacacaggacgatattctctaccctcacttgacggttcgcgagacgctcgtgttctgcgcgatgctgaggctcccgcgcgcgctcctgcgctcggagaaggtag

SEQ ID NO: 201891 - DNA, 253 bp, Glycine max
ctcgagccgactgatcccaagaggaatgctagagattctcatgtgccggttttggctccacttccaattggctttgctgtgttcatggttcacttggcaaccatcccagtaacaggcactggcattaaccctgctaggagtctaggagctgctgtcatgtacaaccaacagaaggcctgggatgaccattggatcttttgggttggaccatttattggagcagccattgcagccttctaccaccaattcatct

SEQ ID NO: 201892 - DNA, 253 bp, Glycine max
ggactttaggttgggatttgggaattagggttattcgcgtggcgaagatgattgaggtggttttgaacgatcgattggggaagaaggtgcgcgtgaagtgcaacgacgatgataccatcggcgacctgaagaagcttgttgcggctcagactggcacaagagccgacaagatccgcatccagaagtggtacaccatctacaaggatcacatcactctcaaggattacgagatccatgacggcatgggtctcga

SEQ ID NO: 201893 - DNA, 256 bp, Glycine max
catcaagttactatctataattaattaaattcctcgtggaatattgaagaagccatgtctacagctgggcaggtcatcaagtgcagagctgcggtggcatgggaagcagggaagccactgtcaatagaaaccatagaagtggcaccaccccagaaaggtgaagtgcgtttgaggatcctcttcaactccctttgccgtagtgatgtttattggtgggatgctaaggaccagactcctctgtttcctcgtatcttag

SEQ ID NO: 201894 - DNA, 254 bp, Glycine max
gtgcaagaaagatgaagctcgagttcgcaaatgtgctacttctgtgccttgtccttagctcttctttcttggaaatctcaatggctggttctcctttctgtgactcaaagtgcgcgcagaggtgtgccaaagctggggttcaggacagatgcttgaggttttgcgggatctgctgcgagaagtgcaactgtgtcccatctgggacttacggaaacaaggacgagtgcccttgctacagggacatgaagaactcc

SEQ ID NO: 201895 - DNA, 254 bp, Glycine max
gcctgggctgtgtcggaactcgctgccaattaccctaagtgtcaggaccttttcgcccagcacaacatcataaggttactcgtcggtcaccttgctttcgaaaccgtcgaggaacacagtaagtacactattgtcagcaccaaacccacttccatccacgccgtcgtcatcgccaacaacaacgtcaagaaggaagatcattttcacgacaatgaaaagaaagcacgaatgcctcatcccttgggtgataatag

SEQ ID NO: 201896 - DNA, 256 bp, Glycine max
attctgcgtgaaggaagtgcgaacgagtgagcttggaaatggcggaggagcaagctgaattcaggatttacaattcgatgagtcagcagaaagagatcttcaaaaccaaagtccccggcaaggtttccatgtacgtttgcggagtcactgcctacgacttcagccatctcggtcacgctcgcgccgccgtttccttcgatatcctcttcaggtaccttaagcacttggactatgagattacatatgtgcggaattt

SEQ ID NO: 201897 - DNA, 257 bp, Glycine max
cttaaatatgtattcatcctattgggtgcagatgacaacggggtaaggtggaacatttgctctttattcgctgctgtgtaggcatgccaagtttaatttactccccaatcaacaagcagctgatgaggagttgtcatcctataaatatggtccctcttcacaggctgtagcctcttctccattgaagaggtttctagagaagcataaaaggttaagaacagccctgcttattgtggtattgtttggtgcttgcatgg

SEQ ID NO: 201898 - DNA, 252 bp, Glycine max
cggctcgagccatgcctaagagagtggaaggagttgttgccatgaagcagcactttgtgcttgtacatggcataggtggaggaagttggtgctggtacaaaatccggtgccttatggagaattcaggctgcaaggtctcatgcatagacctcaaaagtgctggaattgatcaatctgatgctgattccgtgctatcttttgatgattacaataaaccacttatggatttcatgtctgatttgcctgagaacg

SEQ ID NO: 201899 - DNA, 248 bp, Glycine max; identical to SEQ ID NO: 135566

SEQ ID NO: 201900 - DNA, 254 bp, Glycine max
caggttcaaaccggagcaaaaaaacttgttacgatggtttcttccgacaaggatccacgagaggaagtccttcaagcatggtacatggatgatagtgatgaagatcaaagactcccccaccacaaagaacccaaggagtttgtctcgttggaccaacttgctgaacttggagtccttagctggaaattagatgctgataaccatgaaaatgatccagagctgaaaaagattcgtgaagagcgtggctacaccta

SEQ ID NO: 201901 - DNA, 253 bp, Glycine max
cggctcgagggctttaaagtggcagcagcatcaagggttacttcctccaggaacgcagtttgatttgtttcgtggaacagctgctatgaaacaagatgtggatgacatgtatccaacaactctttctcacacgataaagtttgggacaaaaagtcatgcagaatgtgcttgcttttcaccagatgggcagtttcttgtatcatgctcagttgatgggtttattgaggtgtgggattacataagtggaaagctg

SEQ ID NO: 201902 - DNA, 257 bp, Glycine max
tatcgagccgaatcggctcgagctgtgacaaagctagtagctgaagctcttgagaggaacaaattacctggtgcaatattcacctctttctgtggaggtgctgacattggtcaggcaatagcaaaagacacccgcattcccctggtttcatttactggaagttcaaaggttggcttgatggtccagcaaacagttaatgagagatttggcaaatgcttgcttgagttaagtggtaacaatgcaataatagtcatgga

SEQ ID NO: 201903 - DNA, 255 bp, Glycine max
gatttaagaagaaccgcaagaagcgcggccacgtcagcgccggccacggccgtattggaaagcaccgcaagcaccccggcggccggggaaatgccggcggcatgcaccaccacaggatcctcttcgacaagtaccacccggggttcttcgggaaggtagggatgaggtactttcataagctccgcaacaaattctactcccccatcgtcaacatcgacaagctatggtctctgataccccaagacgcgaaggaca

SEQ ID NO: 201904 - DNA, 259 bp, Glycine max
tactcgagccgaatcggctcgaggttcctccgctcaacaactataataccatctttctctctccgaacagatcacactatggccacctcaagcgccaaatcagtccatgatttcaccgttaaagatgccaagggaaatgatattaatcttggtgactacaaaggaaaggtccttatcattgtcaatgttgcctcacaatgtggcttgactaattcaaattacactgagctcagtcagttgtatgagagatacaaacaga

SEQ ID NO: 201905 - DNA, 252 bp, Glycine max
gagatatcgaagatggctctgcccaaagctaaggagatcgtgtcgtccaattccgtcgtcgttttcagcaaaacctattgccctttctgcgtcgatgtgaagaagctcttcggtgacctcggtgccaattacaaggccatcgaactcgacactgaatccgatggaaaagagctccaagcagcattagttgagtggacggaccagcgaaccgtgcctaatgtgtttattggtggaaaccacattggtggctgt

SEQ ID NO: 201906 - DNA, 252 bp, Glycine max
gtcggagcaggcgtcggatagaagttttgggatgagaaacttcaagtacgtaaacaccatcaaagcagcggttgagaaagaatgccccttgacggtttcatgcgctgacattgttgctctttctgctagagatggcattgccttgttgggaggaccaagcattgaaatgaagacagggcgaaaggatagcaaagaaagctatgcaacggaggtggaagccttgattccaaaccacaatgattccatgtcctc

SEQ ID NO: 201907 - DNA, 253 bp, Glycine max
atcccaggcgaggagaaagatggaggggaaggagcaggatgtgtcgttgggagcgaacaagttccccgagagacagccgattgggacggcggcgcagagccaagacgacggcaaggactaccaggagccggcgccggcgccgctggttgacccgacggagtttacgtcatggtcgttttacagagcagggatagcagagtttgtggccacttttctgtttctctacatcaccgtcttaaccgttatgggagtc

SEQ ID NO: 201908 - DNA, 249 bp, Glycine max
attgtttgttgttgtaactcgttcttcttcttttgttgttctgtgtttgtgtttgttttttctctcacctgaaaatgtcttgctgcggtggtaactgtggttgcggaagctcctgcaagtgcggcaacggctgcggaggctgcaagatgtacccagacttgagctacactgagtcaaccaccaccgagaccttggtcatgggagtggcacctgttaaggctcaatttgagggtgctgaaatgggtgtgc

SEQ ID NO: 201909 - DNA, 248 bp, Glycine max
agaaaataagtgctggtgctacagtagtgggtgatagagttcgagaagtggaccaaaagtttcaggtttcagagaagaccaaatcagcatttgcagctgcagaacagacagtgagtaatgctggttctgccataatgaagaatcgctatgtgcttaccggggcatcctgggtaacaggtgcttttagtaaggtttctaaggcggctggtgaagtaggacagaagacgaaagagaaagtggagagtgca

SEQ ID NO: 201910 - DNA, 249 bp, Glycine max
cgatcgatccgtgggtttgagattcagacaattagcattcatttcgggtttcaataaagttgatgcatttaaaatcttagtgggtaggtttgggattgttgtgatttgggggaaaaatggattcaaccgctctccgacttgattcgtactggcggtcgcgattgatcgattcagctacgtccgatgaagataaagtcgcacccgtttacaaattggaggaaatctgcgaacttttgcgttcttcgcatg

SEQ ID NO: 201911 - DNA, 254 bp, Glycine max
accaccaccacctcgctctcttcttccctgcttcacaatttttattttaatgatactattttgttattgttaagacggcatcatcagggaaatggatcgggtgaagggtccatggagcccagaagaggacgaggctttgcggaggctggttcaggcccacgggcctcgaaactggtcggtgataagcaagtccgttccgggacgatccgggaaatcgtgccgcttacggtggtgcaaccagctcttcgccgcag

SEQ ID NO: 201912 - DNA, 253 bp, Glycine max
atggctcccaagggtttaatctttttggctgtgttatgcttctcagcactgtcactgagtcgttgtcttgcggaggataatggacttgttatgaacttctacaaggaatcatgccctcaggctgaagacatcatcaaagaacaagtcaagcttctctacaagcgccacaagaacactgctttctcctggctcagaaacatcttccatgactgtgctgttcagagttgtgatgcttcactgttgctggactcca

SEQ ID NO: 201913 - DNA, 252 bp, Glycine max
ggcttgtagcagcaaatccagtaaattatggtcggccatgtcagctatcttgtgtagaggctttatctgctgctttgacaatatgtggggaagaaaaaactgcaaatttgttgcttgacaagttcaaatggggccatgcttttatgtctctgaatggggaattactgagggcctactccaaatgccaaaatagtgctgaaattatatctgttcaaaatgcttggctgtcacaagagagtcagattccaaggg

SEQ ID NO: 201914 - DNA, 253 bp, Glycine max
caggcacagagaagatagggacaagtatgcagatcatcataggtacagagaccgggaggcagagcatgatgatgagtgggagaggggacgatcatcaaggatgcacagcaagtcacgattatcacaagaggaagaacaccattctaggccaagagatgctgattatgggaagaggcggaggcttacctctgaataactatgtttgctggctgttatttctctgaacacttccactgaggaaggaaacaacagt

SEQ ID NO: 201915 - DNA, 254 bp, Glycine max
tcaaattctcattttcaagctgtttggtgtaaagatgggtcaagtgcttggttgtgttcaagtgaagcagtcaactgtagccgtcaaggaatgtttcgggaagtacgatgatgttcttcaacctggttgccattttgtgccatggtgtcttcgctgcggtgtggctggtgtcctttctacgcgtgtcatgcagctaagtcttcgttgtgaaactaagacaaaggacaatgtgtttgttaatgtggttgcctcaa

SEQ ID NO: 201916 - DNA, 259 bp, Glycine max
gcttggctctagggcacttcgttgcttggtgatgtccctttctgttctcttcactcttggtcttgcgagagaaagccatgccagagacgaagatttttggcatgctgtttggccaaacactcccattccgagttcattgcgagatcttctaaagcctggccctgcaagtgttgaaatcggatgatcaccctatgcaaattgaagaaacacagtacccgaaaaccttcttctataaagaagaccttcatccaggcaaaac

SEQ ID NO: 201917 - DNA, 253 bp, Glycine max
aatttccatatcccaacggatcgcaatatagcaagtagcgaacatgatttcttccgtgtcctttccagcgtctcttcccgccgttaacttctccggcaacgccgtggcttctccgtcgtgccgcgtcaaatccaggcctatagttgccttcgccaccgccaccgccaccgcggaagctcgctcttactggacggagcaaccgagaccttcgtatctgaactcctcttgctcttcgctctacgaggttctcggc

SEQ ID NO: 201918 - DNA, 250 bp, Glycine max
cttctcagaagaaaatgggaagagggaagattgaaatcaaacggatcgagaacaccaccaataggcaagtcaccttctgcaagcgccgcaacggtttgctgaagaaagcttatgaattatcagttctgtgtgatgcggaagttgcccttgttgtcttctcaacccgtggccgtttgtatgagtatgccaacaacagtgttagggccaccattgaaaggtacaagaaggcaaatgctgctgcttcaaacgc

SEQ ID NO: 201919 - DNA, 249 bp, Glycine max
tatcgagccgattcggctcgagaaagaacctttactttgaagagagacttaatggcgagtagtgttattccactgttggccatgattattgtacaattgggctatgcagggatgaatattacctcaaagcttgcaatacaatctggcatgcaccctcttgttctcgttgcttatcgccaaatttttgcaactatttcccttgctcccttcgctttttggttagaacggaatacggctccccgaatgaca

SEQ ID NO: 201920 - DNA, 230 bp, Glycine max
ctcgagggtggagctgcttttgggttgtcagagactcctgaagatgctgacagagtggggcttgttagtgggaaggatactataatagatcgtagtatgcaagatgcttatgttaatgccattcgacgtgtgaaatatgtcatctatattggggatcagtatttccttggaagcagttgtgattggagtgctgatggcattaggcctgaagccatcgatgactttgcata

SEQ ID NO: 201921 - DNA, 249 bp, Glycine max
atctccttcctctctctctctgtctctctgtctcctccatggccatctccttcagtcccaaacaccctccttacgatgagatgatatacacagcaatcggagctctgaaggagagggatggttcgagcaagcgagccataggaaagtacatagaacaagtctacaaggaccttccacccactcaccctgctttgttgactcaccatctcaaccgattgaaatcctctgccctcctcgtcctcgtcaaga

SEQ ID NO: 201922 - DNA, 244 bp, Glycine max
cgaagaagccgtccccgtcctcgaacgcgccatcctggtccccgacgtcgaccgcggccccgatcacgccctcgcctcgttctccggctacatgcagctcggcgacaccttctccatgctcggtcaggttgaccgatccatctcctgctacgaccaaggcctccagatccagatccaagccctcggtgacaccgatccccgcgtcggtgaaacttgccgatacttggcggaggcaaatgtgcaa

SEQ ID NO: 201923 - DNA, 249 bp, Glycine max
gtttcttgtggttttggagtctgcagcaatgtggggttggatggtcggggaagcgcgtagggcagcgtgcaactggaactgggtttcgctccgaagcatgggtggcggtcccagaacctttcccggcggtgtgaacaagtggaagtggaagcgcatgcacgagaagctcgccagagacaaacagaacagactcatccaacaagagaagcagctctacccagctcgcattcgctcccacatccgctcctc

SEQ ID NO: 201924 - DNA, 251 bp, Glycine max
tgttgttgttgttggaagccaaaaccctagcagccggcgagaatggcagacgttgaggttgatgtggcggcggcggcggcggcggcggctgcagggcagccaaagaagagaacgttcaagaagttcagcttcaggggggtggatctggacgcgcttctggacatgtccactgacgaactcgtgaagatgttcagtgctcgcgcacgcagaaggttccagagaggtctcaccagaaagcccatggccttgat

SEQ ID NO: 201925 - DNA, 253 bp, Glycine max
ggaagaaccaccactaccttatccatttccactcctcaccaagccacaccatggcctcaaccaacgccctctcttcagcttccattctacgctctcccaaccgccagtctctgaccagaagagcgaaccacaacggaagagtaaattaccgtcaaccgaatagccgtttctccgtcaaagcctccgccaaagagattgcctttgaccagcattcccgctctgctatgcaggccggcattgacaagctcgccga

SEQ ID NO: 201926 - DNA, 252 bp, Glycine max
tggctgattgcactccaattcaaccaggtgccacgtgttacaatcctaacaccttggaggcacatgcttcctacgccttcaacagttactatcagaagaaggcacgtgcatccggcacgtgcgattttggtggcactgcttatgtcgtcactcagccccctaagtatggtaactgcgaattccccacaggatactgaatggaccacggagatggattgtttctggtgaagccttgatttggatttaactggg

SEQ ID NO: 201927 - DNA, 252 bp, Glycine max
ctcgagccgctcgagccgattcggctcgagctggggagtgtggtgaatgcacttattgtaaacctgaagagcgcaacctgtgtgagctactcaggatcaccactgacaggggtgttatgctgagtgatggaaaaacaaggttctccaaaaatggccaacccatttaccacttcgttggaacctccactttcagtgaatacactgttctccatgaaggatgtgtagccaagattaaccctaatgccccacttg

SEQ ID NO: 201928 - DNA, 253 bp, Glycine max
aagatcttcatattcatcaaactcatcaaaatgaatctttaccactcctccaccaccaccaccaccaccaccatcttcaccgtcatattcctcctccttgcaatattattcaatctcacaccccacaaggccaacggtgccacgtgtcaccctgaggaagaagcgggcctgttgggcttcaaatccggtatccgatccgatccgtccggcctgctcagtaactggatatcgggtacggactgctgcacatgga

SEQ ID NO: 201929 - DNA, 252 bp, Glycine max
ctcgagccgctcgagccgctggatctcttcaatgttgttgctgtcccagattttaacatgggagccatggacaacaagagcttgaatattttcaattcaaagcttgtattggcctctccagaaactgctactgatgcagactatgctgcaatattgggagttattggccatgagtatttccacaactggactggcaccagagtgacatgtcgcgactggttccagcttagcctgaaggaaggtctcactgtt

SEQ ID NO: 201930 - DNA, 247 bp, Glycine max
cacagaacagttgaagtgaatggcataaaaatgcatgttgcagagaaaggagagggtccagtggtgttgttcctccacggcttccctgagctctggtactcatggcgccatcagattctctctctcagctccctcggctaccgcgccgtcgctcccgatctccgtggctacggtgacaccgaagcaccaccttcaatcagcagctacaactgcttccacatagtgggtgatctcgttgcgcttattg

SEQ ID NO: 201931 - DNA, 254 bp, Glycine max
tatcgagccgaatcggctcgagcggctcgagctttcttgccagggctaggaaggctcttccagacatcttccaagggagttcaggtaatccaaactgctgaaaagagttatctctcagctccacaccatgcggaacttgtggaaacgcgatggggtggtagcactcacataactgttgaagaagtgaagaagaagataggtgatttacttagagaatatgtggatagtggtgacacattggaggcctgtagatg

SEQ ID NO: 201932 - DNA, 251 bp, Glycine max
aaggaatgcacccaacttcttaaaagctgcctgcattccgtcattcttccaattggaagcttacccattggcctttgtgtccatcgagctttgctgtttaaagtgttggctgacttaatcaatctaccatgccgtattgcaaagggctgcaagtattgtaggaaggatgtgggtgcctcatgtatagtgcaatttggttctgacagggagtatatgattgatttagttggaagacctggggcaacatgcca

SEQ ID NO: 201933 - DNA, 250 bp, Glycine max
cggctcgagaacctacctctttttcttctctctcaacaacttcaccttcttcctcctcgatcatgtctcacttcaagggcaagtaccatgatgagcttatcgccaatgctgcgtacattggcactcctggaaagggtattcttgctgctgatgagtcaacagggacaattggcaagcgtttggccagcatcagtgtagagaacattgaatccaacaggcgagctcttagggagctgcttttcactgctcc

SEQ ID NO: 201934 - DNA, 251 bp, Glycine max
ggcttgtagcagcaaatccagtaaattatggtcggccatgtcagctatcttgtgtagaggctttatctgctgctttgacaatatgtggggaagaaaaaactgcaaatttgttgcttgacaagttcaaatggggccatgcttttatgtctctgaatggggaattactgagggcctactccaaatgccaaaatagtgctgaaattatatctgttcaaaatgcttggctgtcacaagagagtcagattccaagg

SEQ ID NO: 201935 - DNA, 252 bp, Glycine max
ccggagagcaagagcttcgacgacaccggactcggacccgttccgagcacgtggaaaggcgcgtgcgagacgggaacgaatttcaccgcgtcgaactgcaacagaaagttgatcggagcaagattctttgctaaaggtgtagaagccatgcttggtccaattaacgaaaccgaggagtccagatccgcgcgcgacgacgacggccacggcacccacacgtccagcaccgccgctggatcagttgtttccggc

SEQ ID NO: 201936 - DNA, 252 bp, Glycine max
gaacgagaattagctactgctagagcagcatcagcagctggcacaatcatgacactatcctcatgggctacttccagtgttgaggaggttgcttcaacaggtcctgacattcgtttttttcaactttatgtgtttaaagacagaaatgtggttgctcagcttgtgagaagagctgaaagagctggtttcaaggcaattgcccttactgtcgacactccaattcttggtcgtagggaggctgacatcaaaaac

SEQ ID NO: 201937 - DNA, 255 bp, Glycine max
aacccactaagatggcttcctttgtatccttcctagtgctgcttcttgcagcccttatcctcatgcctcaagggcttgctacttactacaaaccaattaagaagccaccagtgtacaagcctccagtgtacaagccaccagtgtacaaaccaccggtttataagccaaaaccaccggtttacaagccgaaaccaccggtttacaagccaccatataagaagccaccatacaagaaaccaccgtatggaaagtacc

SEQ ID NO: 201938 - DNA, 271 bp, Glycine max
atctcgttgattcggatctagagtctttttttcactcttcagttctcgttgttgttcttcgcttacctgaaactagggttttcaatttcgattcattcgttaataattaaagatgtttgggagggcacgaagaagagcgataatacgaggtactacgaaatcattggcgtctcgaagaacgcttcgcaggatgatctgaagaaggcttacaagaaagccgccatcaagaatcaccctgacaagggcggtgatcccgagaagtttaaagagc

SEQ ID NO: 201939 - DNA, 270 bp, Glycine max
catcagaaagatttcagcacacatagctgccaatgttgctgctaacgcttatgaacttggcttggccactcgccttcctcaacctaaagatttagtgaagtttgcagagagctgtatgtataccccaggctacagaagctaccgatgaaaagtgataataataaataggcgcttttttctttttcatttatcatgatatcatttcattgtcaattttttaattttttaccttctttatgttcctgtcatgtttgttgtaagttatttgta

SEQ ID NO: 201940 - DNA, 263 bp, Glycine max
ctcttcttctcttgcggctagggttttagcgcacttcttctagatttaaggaagatgggtaaggaaaaggttcacatcagtattgtggtcattggccatgtcgactctgggaaatccactaccactggtcaactgatttacaagcttggaggcattgacaagcgtgttattgagaggtttgagaaggaagctgctgagatgaccaagaggtctttcaataatcccggggtgctggacaaccttaaggctgagcgtgaaagagg

SEQ ID NO: 201941 - DNA, 281 bp, Glycine max
ctcgcaagcaaaaagaaagaatcccaggcgaggagaaagatggaggggaaggagcaggatgtgtcgttgggagcgaacaagttccccgagagacagccgattgggacggcagcgcagagccaagacgacggcaaggactaccaggatccggcgccggcgccgctggcttaacccgacggagtttacgtcatggtcgttttacagagcagggatagcagagtttttggccacttttctgtttctctacatcaccgtcttaaccgttatgggagtcgccgggg

SEQ ID NO: 201942 - DNA, 280 bp, Glycine max
tttggcttggaactttcagcactgctgaagaagctgcaagagcttacgatgctgaagcaaggaggatccgtggcaagaaagccaaggtgaatttccctgatgagccttcaggcgctgcttcctcaaaacgtctcaaggcgaatccagaggctcagccaatgaagaaaaatctgaactctgtgaagccgaaaataaaccagatgttcaattttggtgacaatcttgagggctactacagccctatagatcaggtggaacagaaaccactggttaaccagta

SEQ ID NO: 201943 - DNA, 281 bp, Glycine max
cgaagagaatggctcccaagggtttaatctttttggctgtgttatgcttctcagcactgtcactgagtcgttgtcttgcggaggataatggacttgttatgaacttctacaaggaatcatgccctcaggctgaagacatcatcagagaacaagtcaagcttctctacaagcgtcacaagaacactgctgtctcctggctcagaaacatcttccatgactgtgctggtcagagttgtgatgcttcactgttgctggactcaacaagaaggagcttgtctgag

SEQ ID NO: 201944 - DNA, 271 bp, Glycine max
gcttggcggaatcagcggggaaagaagaccctgttgagcttgactctagtccgactttgtgaaatgacttgagaggtgtaggataagtgggagctggaaacagcgaaagtgaaataccactacttttaacgttattttacttattccgtgaatcggaagcggggcactgccctctttttggacccaaggtcggcttcggccggtcgatccgggcggaagacattgtcaggtggggagtttggctggggcggcacatctgttaaaagataac

SEQ ID NO: 201945 - DNA, 269 bp, Glycine max
gtatgcccttcagctactcctgcacaatatgctgtgttctactttggtctatacgtgattgcacttgggatcggtggtataaagtcatgtgtgccatcttttgggacaggtcaatttgatgatactgatccaaaggaaagggttaagaaggggtcgtttttcaattggtattacttttctatcaatctatgtgccattgtatcgagcagcatagttgtgtggattcaagactatgcaggattgggtcttcgatttggcattcctacttt

SEQ ID NO: 201946 - DNA, 272 bp, Glycine max
ttctgcagagacaatgtcagcagcaaacgcaaagaacaaatccccctccagcgagctccaccctccttacttcgagatgattgcggatgcgatatcgtccttgaaagaccgcacgggttcgagccagccagcgatagccaagttcatcgaggacaagcacagcaaagtgctccctcccaacttccggaaacttctctccgttcagttgaagaaactcgtcaaatcggagaagctttacaaggtcaaaaactcttacaaactttcttccgcca

SEQ ID NO: 201947 - DNA, 275 bp, Glycine max
caaaaaatttggtggatgaagtttggataaatcgcccaccggcagagataaatgctgttattgtacatcctgtgaaatttgcaggtcgctctgttgcagataagttgaaagatttgagaaaaaagcttgtacatgagcaaacccgtgggattagtttcacagcacttgatgaagttgcatggttgtataatattcgtggaagtgatgtgggctactgtcctgttgttcatgcatttgctattgtgacatccaattctgctttcatttatgtggac

SEQ ID NO: 201948 - DNA, 277 bp, Glycine max
ccgaaattctgcagaaaaaatgtcaaaagcaaacgcaaagaacaaatccccctccaacgagctccaccctccttacttcgagatgattgcggatgcgatatcgtccttgaaagaccgcacgggttcgagccagccagcgatagccaaagttcatcgagggacaagcacagcaaagtgctccctcccaacttccggaaacttctctccgttcagttgaagaaactcgtcaaatcggagaagctttacaaggtcaaaaactcttacaaactttcttccg

SEQ ID NO: 201949 - DNA, 274 bp, Glycine max
acagtgtggtgagaacgtaccctcaaataccaggtggagatccacggtgttatcctagcaccggttccgcggttttgcttcctttgaagaatcttcgagcacctaaagtggaggctgaggttttaatctgtggtggagccccgagaggagcttaccagaatgctttatcgggtaagtttgttccagcgttggaaacgtgcgctcggattaaaataaccgacccgaacccgaaatgggatatggaaacaatgcccggtgctagagtcatgagtga

SEQ ID NO: 201950 - DNA, 272 bp, Glycine max
gactaatcagagcaacccagattgtgatgcttggaataacgatccaacagttctgtgcttcaattgccaatcatgcaaggctggcttactgcaaaacctcaagactgattggaagagggtggctgttgttaacatcgtattccttgtcattcccattattgtcctattcataagggtgctgtggattcaaggacattgggagggaaaattggaagggtaatcctcttaagctaggattactccgtataattactagtgtgtagatgagtttg

SEQ ID NO: 201951 - DNA, 278 bp, Glycine max
tgcgatgggaatcgatcttaaggctgggggtaagagcaaaaagaccaaaagaacagcaccaaaatccaatgacatctacctcaaattacttgtcaagctttatcggttccttgttcgaaggactggcagcaatttcaatgctgttatactcaagcgcttgttcatgagcaaggttaacaagcctccaatttctttgtcaaggttaattaagtatacaaaggggaaggaggataaaattgctgtaatagtggggactgtaactgatgatatcagagtat

SEQ ID NO: 201952 - DNA, 266 bp, Glycine max
ctcacttgcatacgttcctttcactgtactttttgacacacacgtaacacattcatcagaggaagagagaatgagttcatcctcaggtcagagcagtggctatgatctctctttcaagatcttgttgatcggagattccggtgtgggaaaaagtagcctactagtcagctttatttcaagttctgttgaagatctttcccccaccattggtgttgattttaagatcaaaacgctcacagtgggtggcaagagattgaaattgacga

SEQ ID NO: 201953 - DNA, 276 bp, Glycine max
atggagacttggatcttaggccaccttctcaatcttccttcacagccggcgactacacgttcgccgatgttgagaatttggagcattgcgctaggtatctcaaccaatcgctcgtcacgtttggtttcccggcttctctcgatcctcttcgcaaatgaccccgtttcaattgcgaggacttgaaattgcatttacttcttgctccagcagagaaagcgcgacgttgaatttagagagtctgctaatgatcaaagacaacgactgttgtcctgacat

SEQ ID NO: 201954 - DNA, 242 bp, Glycine max
  unsure (1)..(242): unsure at all n locations
ggaaaactgattttgtgggtctctaatgttttgtactagtttgacccttcgtctttgttttgggtttcggagcatgacctggtttagttagttagaggtttttttagtttgtaatacttactgcgttactctcatttcntcatgattaaatcggagattctggaaaagttcagtagtcttaataaatattanatattnccatatagaaaanaaagnacngangaggacgnncccannagngg

SEQ ID NO: 201955 - DNA, 273 bp, Glycine max
accctctctctctctctctctcgatctatcatggctttgcccaatcagcaaaccgtggattaccctagtttcaaactcgtcatcgtcggtgacggcggtacaggaaagacaacgttcgtgaaaaggcatcttaccggtgaattcgagaaaaaatacgaaccgaccattggagtggaggttcacccattggatttcttcacaaactgcggaaagattcgcttctactgttgggatactgctggacaagagaagtttggtggcctcagagatgga

SEQ ID NO: 201956 - DNA, 275 bp, Glycine max
gtaggcgcaggcaccattgatcgtgacttcccctcacaggtgattctgggcgacggtcagagactctccggcgtgtcgctatacgccggagcagctttgaaggggaaaatgtatcaacttgtttacccagggaaatcagggattcttggagactcactctgcatggagaattctctagatccgaacatggtgaagggtaagatagtaatatgcgacagaggaagtagcccgagggtagcaaaggggttagtggtgaagaaagcagggggagtggg

SEQ ID NO: 201957 - DNA, 274 bp, Glycine max
attactgccaaacccaggcttcttgagcctgtctacctggttgaaatacaggctcctgaacaagctcttggtggaatctacagtgttcttaaccagaagcgtggacacgtgttcgaggaaatgcagaggccaggtaacccactatacaacatcaaggcatacctccctgtcatcgagtcctttggtttctcgagcacattgagggctgcaacatcaggccaggccttcccacaatgtgtgtttgatcactgggacatgatgtcttctgacccat

SEQ ID NO: 201958 - DNA, 270 bp, Glycine max
attactgccaaacccaggcttcttgagcctgtctacctggttgaaatacaggctcctgaacaagctcttggtggaatctacagtgttcttaaccagaagcgtggacacgtgttcgaggaaatgcagaggccaggtaccccactatacaacatcaaggcatacctccctgtcatcgagtcctttggtttctcgagcacattgagggctgcaacatcaggccaggccttcccacaatgtgtgtttgatcactgggacatgatgtcttctgac

SEQ ID NO: 201959 - DNA, 273 bp, Glycine max
gtcgccaagtctattgatgccggtgattatgagtatgccatcgcttttcaggagagggtaaaaatcccggatgataagatggtgtattacgagaaccttgcggagatgtacgtgggcgatgatgtttctccagatttctacgggtgggtgtttccaaaatgtgaccatgtggctgtaggcactggaactgtgacacacaaggggggacatcaagaagttccaactagcaacaaggaaaagagcagaggaaaagattttgggaggcaagatcat

SEQ ID NO: 201960 - DNA, 247 bp, Glycine max
atttacgcttctcttctctgcagcaactatgcctaaccctaaggtcttcttcgacatgaccatcggcggtcaatctgctggccgcatcgtgatggagctctacgccgacgtcactccccgcaccgccgagaacttccgcgcgctttgcaccggcgagaagggcgtacggcggagcggcaagcccccttcactaaaagggctcgtccttccagcgggtgatcccgagtttcatgtgtcagggtggcga

SEQ ID NO: 201961 - DNA, 291 bp, Glycine max
cgaagagaatggctcccaagggtttaatctttttggctgtgttatgcttctcagcactgtcactgagtcgttgtcttgcggaggataatggacttgttatgaacttctacaaggaatcatgccctcaggctgaagacatcatcaaagaacaagtcaagcttctctacaagcgccacaagaacactgctttctcctggctcagaaacatcttccatgactgtgctgttcagagttgtgatgcttcactgttgctggactccacaagaaggagcttgtctgagaaggaaacag

SEQ ID NO: 201962 - DNA, 276 bp, Glycine max
catttctccatttccattttctctctcacttttcaagaatcgtaagctatgggaaagtcttacccaactgtgagtgctgattaccagaaggccgttgagaaggcgaagaagaagctcagaggcttcatcgctgagaagagatgcgctcctctaatgctccgtttggcatggcactctgctggaacctttgacaagggcacgaagaccggtggacccttcggaaccatcaagcaccctgccgaactggctcacagcgctaacaacggtcttgacatc

SEQ ID NO: 201963 - DNA, 274 bp, Glycine max
gtgacctcacagatttcttgatgaaaatcttgactgagcgtggttattccttcaccacctcagccgagcgggaaattgtaagggatgtcaaagagaagctttcttacattggccttgactacgagcaagaactggagacagccaggaccagctcgtctgtggagaagagctatgagttgcctgatgggcaggtcatcaccattggcgatgagcgtttcagatgtccagaggttctgttccaaccatccatgattggaatggaagcttcaggcat

SEQ ID NO: 201964 - DNA, 270 bp, Glycine max
gtgacctcacagatttcttgatgaaaatcttgactgagcgtggttattccttcaccacctcagccgagcgggaaattgtaagggatgtgaaagaaaagctttcttacattgcccttgactacgagcaagaactggagacagccaagacaagctcgtctgtggagaagagctatgagttgcctgatgggcaggtcatcaccattggcgatgagcgtttcagatgtccagaggttctgttccaaccatccatgattggaatggaagcttcag

SEQ ID NO: 201965 - DNA, 275 bp, Glycine max
gcgaaatgccggtagggtatgtgcagattccggtaggggtggcggggccgttgttgttggatggattcgaatacactgtgccgatggccaccacggaagggtgccttgtggcgagtaccaacagagggtgcaaggccatctatgctttctggtggggcaagcagtggtggttttgaggggattgcatgtctaggggaacctgttgttaagattctccactgccaagagagctgaacagttgaagtttttcttgaaggatcctctcaattttgata

SEQ ID NO: 201966 - DNA, 268 bp, Glycine max
attttccttttgttgtcataggaaacaaaatagatattgatggtggaaacagcagagtggtgtcagaaaagaaggctcgggcttggtgtgcatcaaaacgaaatattccatattttgagacatctgccaaagaaggtattaatgttgaaagagcatccaatgcatagcacagatgcccctgaaaatggaagaagagaagaattatccctgcacgacacaattgatgttggaaacagcagtcagccacgggcaaagggtgtgagtgctg

SEQ ID NO: 201967 - DNA, 271 bp, Glycine max
gttgaaggtgtaaaggaatttgataccagatggattgggtgggctggtgtgaatgtgcctgatgatgttgggcagagagcattgacaaaagctttagctgaaatgcgatgcataccagtatttcttgatgaggagatagttaaccagtactataatggctactgcaacaacatcttatggcctctatttcattaccttgggcttccacaagaagatcgaccatctacaactcgtactttccaatcccaatttgatgcatataagaaggcaa

SEQ ID NO: 201968 - DNA, 271 bp, Glycine max
agttattatcaaataattaattaaattcctcgtggaatcttgttgaagccatgtctacagctggtcaggtcatcaagtgcagagctgcggtggcatgggaagcagggaagccactatcgatagaaaccatagaagtggcaccaccccagaaaggtgaagtgcgtttgaagatcctcttcaactccctttgccgtacagatgtttactggtgggatgctaagggccagactccgctgtttcctcgtatcttaggccacgaagcttcggggat

SEQ ID NO: 201969 - DNA, 260 bp, Glycine max
ttaaagacttgcttccaagatggttctgctagagaagctctgggatgacgttgttgctggccctcaacctgagcgtggccttggcaagctcagaaaactcaccaccctcaaaactattgatgaaggagacagtagcaagctgcagaagacgttgtcgatgccgtcgacaccgacaaccccgatgactcccacgactcaaacgacaccgggatccgcgcgtaaagctgacaacgtttggaggagcgtcttccatcctggga

SEQ ID NO: 201970 - DNA, 259 bp, Glycine max
tgggtacggtggctcccagagttgaaagcttggcgagcagtgggataaagtgtatcccgaaggaatacgtgaggcctgaaaaagagttgaagagcatagggaacgtgttcgaggaggaaaagaaggaagggccagaggttcccacaattgacttgagagagatagattcggaggacgaggttgtccgaggcaagtgtcgccagaagctgaagaaagcggcggaggaatggggtgtgatgaacttggtgaaccatgggat

SEQ ID NO: 201971 - DNA, 272 bp, Glycine max
cacctttgttcactcttcttctcttgcgtgctagggttttagcgcacttcttctagatttaaggaagatgggtaaggaaaaggttcacatcagtattgtggtcattggccatgtcgactctgggaaatccactaccactggtcacctgatttacaagcttggaggcattgacaagcgtgttattgagaggtttgagaacgaagctgctgagatgaccaagaggtctttcaagtatgcctgggtgctggacaaactgaaggctgagcgtgaaa

SEQ ID NO: 201972 - DNA, 271 bp, Glycine max
ttatcaaataattaattaaattcctcgtggaatcttgttgaagccatgtctacagctggtcaggtcatcaagtgcagagctgcggtggcatgggaagcagggaagccactatcgatagaaaccatagaagtggaacagcccagaaaggtgaagtgcgtttgaagatcctcttaaactccctttgccgtaaagatgtttacgggtgggatgctaagggcaagactcggttgtttcctcgtatcttaggcacgaagcttcggggattgtggag

SEQ ID NO: 201973 - DNA, 280 bp, Glycine max
  unsure (1)..(280): unsure at all n locations
aaccacccttcttcacttcccttcacattgcagaagagatgggctcttgtgaaaccaatttccaatgtcactcccaaatttggcagcagccccagaatgggatcacactnccanattccagcaccataataagaatgtctggcnactgnaacccnaccancnaccaccctgccacctccacaaagccagctgcaagcaacaagaagggcaacatcaaggagaccctcttgactccaaggttctacaccactgactttgatgagatggagaccctcttcaa

SEQ ID NO: 201974 - DNA, 273 bp, Glycine max
gaggggccgaggcccctactgctggtcggcaaacggacggcgggcgcacgcgtcgcttctagcccggattctgacttagaggcgttcagtcataatccaacgcacggtagcttcgcgccactggctttttcaacaaagcgcgatgaccaatttgtgcgaatcaacggttcctctcgtactaggttgaattactattgcgacactgtcatcagtagggtaaaactaacctgtctcacgacggtttaaacccagttaacgttcactattggtggg

SEQ ID NO: 201975 - DNA, 265 bp, Glycine max
ataagagcctgtcatgtggactctttttccttgagcttctgagtgctgttgagcctaggattgtcaattggaaccttgtcaccaagggtgaaagcaatgatgagaagaggttgaatgccacttatataatcagtgttgcacggaagctcggttgttccatatttttgttacctgaggatattatggaggttaatcagaagatgattctcactcttgcagccagtataatgtattggagcctgcaacaacagactgaggacatgga

SEQ ID NO: 201976 - DNA, 268 bp, Glycine max
  unsure (1)..(268): unsure at all n locations
cctcttagaaagaaaaaaacttaaatcaaaatacttaatagcatggcgatacatttatacaaaacttctaccccaagcacacgcaatggagccgtagacagtcaagtaaaatccaatccacgaaatcatttgatctatggacagcatcgttgtggtaaaggccgtnaatgcagaggaatcattaccgcaggcatagagggggaggtcataagcgtctataccgtaaaattgattttcgacggaatgaaaaaaacatatatggtagaat

SEQ ID NO: 201977 - DNA, 268 bp, Glycine max
ctgaaagcgaagaaagaaacagagttagagaattgaatgtgaatggggaatcagaagcagaagtggacgcaggacgaagaagacgctctcatagccggcgttgaaaagcacggccccggaaagtggaagaacattctcaaggatacccaattcgccccttttctcacttcccgttccaacatcgagctcaaggataaatggcgcaatttgagcgtcagcaacggtgctcaaggctccaaagaaaaatctagggttccaaagcctaaag

SEQ ID NO: 201978 - DNA, 267 bp, Glycine max
ctttgatcgttggtgtggagcgatggaacacggctcatacactgatcagagtaaatcaacatttagtctcgtagatgaggatcatacttttgcaaacgctgttagattcaccttaaatcaagacccaagagtgtcattttgtggctacagcattcctcatccttcagataatcgtgttaatatcagagtccagaccacaggcgatccatcacgcgaggtgttaaaagatgcatgtcaagatctgatgcttatgtgccagcatgttag

SEQ ID NO: 201979 - DNA, 269 bp, Glycine max
aaacgtgccaaatgtggttgtgttgtgtttctgtctctggaccctgttgtttcctcttgtgttctgtgcacccaacgatgggttgcgtaggattggacttaaaaaggtgaagttggacaccgatgacgttgtggggtttaaggaatttcggtcttcaattagaaagcatcaccttcagaacatccttggaggcgctgaggacaccgatgttgttgcgctgaagaattacttggatgctcagtattacggtgaaatagccattggtaccc

SEQ ID NO: 201980 - DNA, 276 bp, Glycine max
cgagacaccaacaacgctttagctctctctcttctctcgataaccgccatcaggatctggcactaacagatcgccgctgctacatctgaacccgatccagccaacagatctctccaattcaaatggagaatctaatctctttggtcaacaaaatccagagagcttgcaccgccttaggagaccacggcgaaaacagtgcattccccacactatgggactctctccccggcatcgccgtcgtcggaggccagagctcaggaaagtctccgtcttgga

SEQ ID NO: 201981 - DNA, 269 bp, Glycine max
gtgccatgggtgtataaaattggaagaacatctgaaattggcaaaggagataaagaaacacaaagaagaagtctatgctcttcagtttcaaatgtcagatgaagcacttaaacagatgcctgactttcagggccggattgatgttctgaagcaaattggatgcattgatgaagacctcgttgttcaaatgaaatggcgtgttgcttgtgagatgaattctggggaggaactgatatgtactgagtgcttgtttgagaaccaaatggatg

SEQ ID NO: 201982 - DNA, 268 bp, Glycine max
tggagctgctcgggaagcgcgaggaaggaggagcgaaaaacgacgccctcgagggacaggagaggctggacaggtggatgagagagtcggtggtggagatcgtgaagaatttgaaggaggcgccgctgctggtgctggtttttcccaaatcggcgacgatggcgacggagaagagggtggtggtggaggactggccggcggtgaaggagcggtgggaatccggcgagacgccggttccggagggattgatattcgtggaggagttgga

SEQ ID NO: 201983 - DNA, 270 bp, Glycine max
gaagaaagaagaaaaagaagcgaaactaaagtcagcattcgaaaaagatgagtagcatcggtacaggttacgatctatcggtcaccactttctcccctgatggccgcgttttccagatcgagtatgccagtaaagccgtcgacaaaagcgggactgttattgggatcaagtgcaaagatggggttgtgttgggcgttgagaagcttattccgtcgaaaatgatgcttccgggttccaatagaagaatacactccgttcatcgtcactctg

SEQ ID NO: 201984 - DNA, 262 bp, Glycine max
  unsure (1)..(262): unsure at all n locations
ctgggattctcaagtgccagtctcttgtttcaattgatgtttcttcaaatcagctgaatggaacacttccagaagatatttctgggttgaagtccattgtgaatctcaacatatcagggaattcgtttcagggttctattgtggatttgtttcaggganagttggaggttctggaccttagcagaaaccaatttcaaggtcacattccacaggtcgtagaggtttctacatcaaagacaggcaagcatggacatgcaaagtg

SEQ ID NO: 201985 - DNA, 269 bp, Glycine max
ggaacttccatggctactccacatgtttcagggcttgcatgcagtgtcaaaagaaaaaaccccacttggagtgcctccgcaatcaaatctgccatcatgacttcagcaattcaaaatgacaatttgaagggtcccataacaacggattcagggttgatagccacaccttatgactatggagcaggggcaattacaacatctgaaccattgcaaccggggctagtttatgaaaccaacaacgttgactacttgaactatttgtgttacaa

SEQ ID NO: 201986 - DNA, 264 bp, Glycine max
gcgaagagaatggctcccaagggtttaatctttttggctgtgttatgcttctcagcactgtcactgagtcgttgtcttgcggaggataatggacttgttatgaacttctacaaggaatcatgccctcaggctgaagacatcatcaaagaacaagtcaagcttctctacaagcgccacaagaacactgctttctcctggctcagaaacatcttccatgactgtgctgttcagagttgtgatgcttcactgttgctggactccaca

SEQ ID NO: 201987 - DNA, 268 bp, Glycine max
gaaaaaaaaaaacagcgccctagatttgctcttctttgcttcggaagaaagagaaaaacaaataacaatggcgttcgcttctttcctcggcagagttctcttcgcttccgtcttcatactctctgcttaccaagaatttaacgaatttggagttgatgggggacctgcagctaaagcactcagacctaagtttgatgcctttacacatcgagtgcattctcaagttggctttcaaattcctgagattgatctgaaatttttaattgcg

SEQ ID NO: 201988 - DNA, 263 bp, Glycine max
gaaggagaattagctactgctagagcagcatcagcagctggcacaatcatgacactatcctcatgggctacttccagtgttgaggaggttgcttcaacaggtcctgacattcgtttttttcaactttatgtgtttaaagacagaaatgtggttgctcagcttgtgagaagagctgaaagagctggtttcaaggcaattgcccttactgtcgacactccaattcttggtcgtaaggaggctgacatcaaaaacagatttacatt

SEQ ID NO: 201989 - DNA, 269 bp, Glycine max; identical to SEQ ID NO: 107832

SEQ ID NO: 201990 - DNA, 269 bp, Glycine max
aagcactatagaaaaaacgacattcattcatctatggctacccttattgctcccagcaaccactctccccaagaagacgctgaggctctcagaaaggcttttgaaggatgggggactgatgagaaaactgtcatagtaatattgggtcatagaactgtttatcagaggcagcaaatcagaagagtctatgaggaaattttccaggaggatcttgtgaaacgcctagagtctgagatcagaggagactttgagaaagccgtgtaccgatg

SEQ ID NO: 201991 - DNA, 186 bp, Glycine max
gtgcctctagggttatcatttctccatttccattttctctctcacttttcaagaatcgtaagctatgggaaagtcttacccaactgtgagtgctgattaccagaaggccgttgagaaggcgaagaagaagctcagaggcttcatcgctgagaagagatgcgctcctctaatgctccgtttggcatg

SEQ ID NO: 201992 - DNA, 261 bp, Glycine max
ctcgagccgaatcggctcgagagcaactggactgatgttgagtacttgagcactgcaaaagcacccacttggggttatcactgcctccaaagcactagcagagaaggcagcatggaaatttgctgaagaaaatcacattgatctcatcactgtgatacctactctcacaactggtccttctgtcactacagacatcccatcaagtgttggcatggcagcgtccctcataacaggcaatgatttcctcataaacgctctgaa

SEQ ID NO: 201993 - DNA, 264 bp, Glycine max
cttaatttctctctgccttgctcatttacacacctctccaacctctcactttcagctttatttgaatccctctctctcctttccaaatggccagcgttgaggttgcacatcaaacaccaacaacagttccagaaaatgaaacaaccgaggtaatcaagacccaggaaacaaccccggaaccagtaccagccacttaggctcctgcaacagaacaagcagcagctgaggttcctgctcaagaagaacaacaagcaactgaggttc

SEQ ID NO: 201994 - DNA, 261 bp, Glycine max
ggaatcaaggtaattgtggacctgcatgctgctccaggctcacaaaatggaagacctcacagtgcctcaagagatggatatctagaatgggatgattcatacatatctgacactgtggcagccatagactttctagctgaaagatatgctaacagttcaggtctagttgcaatagagctaatgaatgagcctcagggagttaatttggaaagccttaaaagctattatcaagcaggttatgatgctgtgaggaaacacact

SEQ ID NO: 201995 - DNA, 263 bp, Glycine max
agaagattctggtgaatgcgtagaaaaggaaaataaagaaattagcgtgaaaaatgttgggtgtgttcagcagctccatagtgtcgccgccggaggagctcgttgccgccggcagccgtacaccgtcgccgaagatgacggcggcggcgctgcggaagtggttcgaggagaagaacccctccgcagtgtcggtggaggtcggagagcatgtccagctcgcttatacccaccagaacgagtcgccgtttcagcgcagatccttt

SEQ ID NO: 201996 - DNA, 262 bp, Glycine max
cgcatctgaactctcagtcgcttctcgaaccctactttcttccgcggtgattgcatttgaattcctgtaatggcgattgataatatttttaaaaatgaagctagtgaagaaaaaggagagcgtgccagaatggcttcttttgttggagccatggctattgctgacttagtgaagacaaccttggggccaaagggaatggataaaattttgcagtcaacaggtagaggacgtgaagttactgtcacgaatgatggcgctacaa

SEQ ID NO: 201997 - DNA, 258 bp, Glycine max
cttttccatcagagcattatttgataccctctctgcagcaacgcatttttcctcattctcttaaacactttctcttttctccttcgtttgatctgcattaaaattgcataaatatataaaaaatgaagaagtttgtactcaagttagatttgcatgatgacaaggataagcagaaggccttgaaaacagtttcaactctttcaggaattgatgccatcgccatggatatgaaagagaagaaattaacagtgattggaa

SEQ ID NO: 201998 - DNA, 258 bp, Glycine max
ttgggagttaggttctgcacgctctgcttccagcgagtgttctttcttcgtttcaacaccttaatttgcacacgctgcttcttcagcttgagaaatggcacaagaaacctttctattcacatctgaatctgtaaacgagggtcaccccgacaagctgtgcgaccagatctctgatgcagtgctcgatgcgtgccttgaacaggaccctgacagcaaggttgcctgtgagacatgcaccaagaccaacatggtcatggt

SEQ ID NO: 201999 - DNA, 259 bp, Glycine max
gaagaaggtattgacgtcgatgatgaaaatgaaattggtgaaaacattactgcttctcctttgtgtgaaactcttctgttatgcagtgattggtgctcctcaaacttgtcctgctaacaatgaggataaatgcggcgattcagatgaatggaaaggggagtttttccctgacattcccaaaattaaatatgagggtccgtcaagtaagaatgtgctttcatttaaatggtataatgcagaggaggaaattcttgggaag

SEQ ID NO: 202000 - DNA, 259 bp, Glycine max
gccgttatgttgagctatatgcaaaggacgaggatgcatttttttcgagattatgctgaatcacataagaaactttcagagctaggctttgtgccaagttcaaagccgatttctattaaggatgggaccatactggcacaaggtgctgtaggagttgtagttactgccgcagtggtgatcatcagttacttgtatgaagttcgcaaaagagggaagtaaactggacttgttcatttcacttggctgttacgtttgcgtg

SEQ ID NO: 202001 - DNA, 227 bp, Glycine max
  unsure (1)..(227): unsure at all n locations
gttcacggtattgaanccatttgatccaaagntcaacattgtctctcccggngcagacatgggtatatacttcccatacactgaaactgagcgtaggttaacagaattccactctgacattgaagagcttctttacagctcagtggagaatgaggaacacatatgcgtattgaaggaccgcaacaaaccaataatcttcaccatggcaaggcttgaccgtgtgaaga

SEQ ID NO: 202002 - DNA, 255 bp, Glycine max
gagagatgctatttactttggccttgctcgtttatcactctcatggtgtagcaagaacatgaataacttggtcctatctcttgttcctaaattcgcaaaactgcaaactctaatcctccgtcaagacaagcctcaactagaggataatgctgttgagactattgcaaaatgctgtcatgaactgcagatcctggacctcagcaaaagtttcaagctaactgatcgttcactctatgagctcgcccttggttgtcg

SEQ ID NO: 202003 - DNA, 255 bp, Glycine max
gccaataatgcatacatattccctggatttggtctcggtttaataatgtctgggaccattcgagtgcatgatgacctgcttctggctgcctgtaagtgctcaagacacttgcgaacattaatttcaaacttatgtttgggacaggtgaaaataggatcatggtaggaatgaaatatacatttggaattaatacaatgtcatattatttgattttgatggaacagctgaggctttggctgcacaagtgagccaagt

SEQ ID NO: 202004 - DNA, 252 bp, Glycine max
gtccgttccagacgcgtggggcattgaccaggtgtttcccattatccccattcaccggttggaagaaaagccttcggtgaggggtattctctcggacttgacttgtgacagcgacggtaagattgacaagttcatcaacggagagtccagcttggcgcttcatgaaatggaaggaggaagttactatctgggaatgtttttgggtggggcttacgaggaggcgctcggtggagtccacaatttgttcggcgg

SEQ ID NO: 202005 - DNA, 258 bp, Glycine max
tgcgaagagaatggctcccaagggtttaatctttttggctgtgttatgcttctcagcactgtcactgagtcgttgtcttgcggaggataatggacttgttatgaacttctacaaggaatcatgccctcaggctgaagacatcatcaaagaacaagtcaagcttctctacaagcgccacaagaacactgctttctcctggctcagaaacatcttccatgactgtgctgttcagagttgtgatgcttcactgttgctgga

SEQ ID NO: 202006 - DNA, 256 bp, Glycine max
ctttgtacaacgaagacaaaactgttattgtcactgtaaatggggagatatacaatcacaagcaattgaggcagaaactgagttcccatcaatttcgaactggtagtgattgtgaagtgattgcccatctttatgaagaacatggagaagaatttgttaatatgctggatgggatgtttgcctttattcttcttgatactagggataaaagttttattgctgctcgtgatgctagcggcattacccctctatactt

SEQ ID NO: 202007 - DNA, 258 bp, Glycine max
ataggatgggaaggtccccttgctgtgagaaagcacacacaaacaaaggtgcatggaccaaagaagaagatcatcgcctcatttcttacattagagctcacggtgaaggctgctggcgctctctccccaaagccgccggccttctccgttgcggcaagagctgtcgtctccgctggatcaactatctccgccctgacctcaagcgcggcaatttctccctcgaagaagaccaactcatcatcaaactccacagcctcc

SEQ ID NO: 202008 - DNA, 257 bp, Glycine max
cgcttttgccatttcttctattttctgccattttaccactctctttctcagctcaaccccgcaacgctaagaagcccaaaaccccatattctgataataatcatcatcgcctttcctcctctgctgttttcaaacttcagggaaatgtgtaccctcttgggcattacacagtgtctctcaacattggctatccccccaagctttatgaccttgacattgactcgggtagtgaccttacttgggttcagtgtgatgca

SEQ ID NO: 202009 - DNA, 253 bp, Glycine max
cagctgtctgctgttagatctgtacccgcctagccattgatttggaaaagtccaacttcaaggatgagtaagcttcagagtgatgctctaagagaagctatctcaggaatcatggctgattccaaggaaaagaacaggaaatttgtggagaccattgaactccaaattgggttgaaaaattatgatccccagaaggacaagcgtttcagtggctctgttaagttgcctcatattcctcgccccaagatgaaga

SEQ ID NO: 202010 - DNA, 253 bp, Glycine max
ctgttctctctccccctccccgattcgttttgcccctttcgttgccctaatttcaaccatgcctcgccgtagctccggtggaagatctgcccgtcctgctcctcgtgcagcacctcgtcctgctccagttcaccatgctcctcctccagcccctgctcagagcggtggcggatctatgcttggtggcattggttcaaccatagctcaaggtatggcttttggcactggaagtgcagtggcacacagggctgtg

SEQ ID NO: 202011 - DNA, 256 bp, Glycine max
tcggttctttacttgttgggttgttctgatcttctctcatagcaatcaaatcacactcccatcttctcatctcgtaaaccctaaaccccgttttcagtgacatcgagatcgatcgaacatggatgaggagtacgatgtgatcgtgttgggcacgggtctcaaggagtgcattctcagcggtcttctctccgtcgatggcctcaaggttctgcacatggacaggaatgactattacggaggagaatccacttcgctc

SEQ ID NO: 202012 - DNA, 256 bp, Glycine max
caaaaacctagagcgaagagcgtgaaggcaccggccgccggccatgacattcaagcgcaggaacggaggtcgcaacaaacacggccgtggccatgtcaaattcatccgatgctccaactgcggcaaatgctgccccaaggacaaggccatcaagaggtttcttgtgaggaacattgttgaacaggctgcagtcagagatgtgcaggaagcctgtgtctatgaacaatacacgcttccgaaactatatgtgaagatg

SEQ ID NO: 202013 - DNA, 249 bp, Glycine max
gtttttgcagaattgtttgattgtgttgtttgttagatgcggttgtgtggagcttgcgcgccaagtgtttgacagaatgcctgaccgggatgttgtttcgtataactcgatgatcgttgggtatgtgaagtgtggggcggttgagagggcccgcgagttgtttgatggcatggaggagaggaatttgattacttggaattcgatgatcggagggtatgtgaagtgggaagagggggtggagtttgatag

SEQ ID NO: 202014 - DNA, 251 bp, Glycine max
cttttactacatattaacttgattagaaaaaagatgtgacctcagaagcaagctgaagaagccatgatgtcaagcctcactcaaacgatggagcgggaggagggagaggaagtgataggggagacctcaaattttagctttaaaaatgctctctggcatggtggttctgcctacgatgcttggttcagctgtgcctcaaatcaggttgctcaggttctgttgactctgccttactcattctctcagctggg

SEQ ID NO: 202015 - DNA, 250 bp, Glycine max
tatccctctaatcactctagctgttgcaaatttctactatttttcaatggcttctgcagatgttgagttccgttgctttgttggtgggcttgcttgggtcaccggcaacgatgccctcgagaaagccttttcaatctacggcgacatcgttgaatcgaaggttatcaacgaccgtgagactggaaggtccagaggattcggatttgtgaccttcgcctcagagcagtcaatgaaagatgcgatcgcagga

SEQ ID NO: 202016 - DNA, 250 bp, Glycine max
ctggcctaccttatgttgaacaaactataaccaatgctggaaattggttgattgggggtgacctagaggtcattgaaccaattcagtacaatgatggacttgatcattttcgtctatctccgacacaactccgtgcagagttcacaaggcgcaatgcggatgctgtgtttgccttccagctccggaatcctgttcacaatggccatgctttgctaatgactgacacccgaaagcgccttcttgagatggg

SEQ ID NO: 202017 - DNA, 254 bp, Glycine max
cacacacacacacaaattctcaaacccaaatcccaagtctcctaaaaccctaattcgcagtgaaaatgagagaaatcttgcacatccagggagggcaatgcggtaaccagatcggagcgaagttctgggaggtgatatgcgacgagcacggcatcgaccacaccggaaagtacagcggcgactccgagctccaattggagcgcatcaatgtttattacaatgaagccagcggcggaaggtacgttccacgcgcc

SEQ ID NO: 202018 - DNA, 255 bp, Glycine max
aaaaaaaccctagtaatgccgccgatggggaggaagcgaaaggtagcacccaaatcttctctatccaccgagccacctctcaagcagcaacaaccaaaacccgaaaatccccctcaagaatacgaagaagtcgaagaggaagttgaggaagaagaggtagaggaagaggtcgaagaggaagaagaagaagaagaggaggacgaggaagaagaggaggaggaagaagaagaagaagaagaaaacgacgtcgtcaaa

SEQ ID NO: 202019 - DNA, 250 bp, Glycine max
ctctagacttagattttgtgaatggctgaagtggaagagggacaggtcatcggcgtccacaccgttgatgagtggaagctgcaactccagaatgcaaaagactccaaaaaactgattgtggtggattttactgcttcctggtgtggtccatgccgttttatggccccagttcttgcagagattgcaaagaaaactcctgaattgatcttcctcaaagtggatgtggatgaagtgaggcctgttgctgagg

SEQ ID NO: 202020 - DNA, 254 bp, Glycine max
ctctctctctctctctctctctaactctcttctaaaacttaccaacacaacaaaatcgagtttccaataaagagttttgttgaaatggaaaacgttccggcggtgtgtaaggaagatgatcagatggatttgcctcccggatttcgattccacccgacggatgaactgctcataagccattacctctacaagaaggtcattgacaccaagttctgcgccagggcaattggagaagtggacctcaacaagtccga

SEQ ID NO: 202021 - DNA, 255 bp, Glycine max
cccgagttccgagttgcgagttgcagagagagcaatgagtcaggaatcgtttatatacagcttcgtggctcgggggacgatggtgttagccgagtacaccgagttcactgggaacttccctgcaattgcagctcagtgcctccagaaactaccctcttccaataacaagttcacctacaattgcgagcaccacaccttcaattttctcgtcgaagacggttacgcttactgtgttgttgccaaggaatctgttag

SEQ ID NO: 202022 - DNA, 252 bp, Glycine max
gcagcagccacccgtcggtgttcctcctccccaaggttacccaccgccggaatcttacggaaaggacgcgtaccctccgccagggtaccctccacagggaggataccctccgcaggcgtatccagcacaggggtaccctccaccctacgcgcctcctcagtacgctcagcctccgccgcaacaacaccagaattcatctggcccgggttgcttagaaggatgtttggctgctctctgctgctgacgcctgtt

SEQ ID NO: 202023 - DNA, 248 bp, Glycine max
aatttccatatcccaacggatcgcaatatagcaagtagcgaacatgatttcttccgtgtcctttccagcgtctcttcccgccgttaacttctccggcaacgccgtggcttctccgtcgtgccgcgtcaaatccaggcctatagttgccttcgccaccgccaccgccaccgcggaagctcgctcttcctggacggagcaaccgagaccttcgtatctgaactcctcttgctcttcgctctacgaggttc

SEQ ID NO: 202024 - DNA, 246 bp, Glycine max
  unsure (1)..(246): unsure at all n locations
agaaaacaaaatggaagacacagtttctgcgttgaggtctttgatggtttctcactctccgccgctggatgccttagtggtgccctctgaagattatcacctgagngaatatgtgtctgcacgagacaagcgccgcgaattcgtttccggcttcactggaagtgccggcttggcacttataacaaagaaagaagcactgctgtggacggatggacggtattttttgcaggctgagaaagaacttag

SEQ ID NO: 202025 - DNA, 248 bp, Glycine max; identical to SEQ ID NO: 173439

SEQ ID NO: 202026 - DNA, 252 bp, Glycine max
gaacgcgtaaaatgaacggtacccctccctcataaataaaatctactactaaacgctcttctcttctgcaatcaatttgcaaaccaaacacaacacaaggagaagaaccagatctctctttctcaaatcaccaagaatagttgaaaatggggctgtctttcacgaagctgttcagccggctctttgcgaagaaggagatgcgtattcttatggtgggtctcgacgccgccggtaagaccaccattctctaca

SEQ ID NO: 202027 - DNA, 251 bp, Glycine max
cgcaaaagagaaaaaaacaaaaatgctgagaatcgctgctagcgcgaagacaattgttcgaacggggtcgttggaggcgccaccattggggattagggttctgcctcggctctaccacgagagggtggtggaccactacgataacccccgcaacgttggatccttcgacaagaacgaccccaccgtcggaacgggtcttgtcggagcacccgcgtgtggtgacgtcatgaaactccagattaaggttgatg

SEQ ID NO: 202028 - DNA, 250 bp, Glycine max
acaaccgtgactacaaatatggcagccgtgatcgctatgctagtgacaggtatccaaccagtggagatcgattcgcaagtgatcgatatggcggtggctcagattacccgcaaaatggttatggcaaggaaagagggtatgaccggtatggtggtccacgaggaggtgctgataggtatggaagtggaatgggaggtcgtgatgaaggaaggagttataggggtagacctggtccatatgatcgcccaag

SEQ ID NO: 202029 - DNA, 253 bp, Glycine max
cggctcgagctctttgcgcagttccctacctctcctttcaagatgcagatcttcgtcaagaccctacaccggaaagaccatcacccttgaggtggaaagctctgacaccatcgacaacgtcaaggccaagatccaggacaaggaaggaattcccccggatcagcaacgtctcatcttcgccggaaagcagctcgaggacggccgtaccctcgccgactacaacatccagaaggagtcaacccttcaccttgtc

SEQ ID NO: 202030 - DNA, 249 bp, Glycine max
gttctttcatggttttcttctcatccaccatgtcagccttgcaatacctattattgggcatggatcacatagagactgccctcatcttggccctaatatgttttgttgcatcacttattgggttattagtggtgcagagagcaattcaaagctatggaagaccatccttaatagtattttcggttagcatagtgatgactttaagtattgttctaatgactagcttcggagtcattcgaacttggaaag

SEQ ID NO: 202031 - DNA, 245 bp, Glycine max
ctgcccgatactctgaacatggactatccttacaatgtaagcttcaagagcttagcatatttcctggttgcccctacattatgttaccagccaagctatcctcgcacaccttatattcgaaagggttggctgtttcgccaacttgtcaagctgataatatttacaggagttatgggatttataatagaacaatacattaatcccattgtacaaaattcacagcatcctctcaagggaaaccttct

SEQ ID NO: 202032 - DNA, 246 bp, Glycine max
aacttttcttcccttccctttcaccatggccgaatttctggatctcgaatcccaagacggcgtgcgaatgccgtggaacgtgatccctggcacgaagcaggacgcccaaaacgccgtcgtccccgtctccgccgtctacactcccataaagcacttcacctcgatgccgctcctcaactactcccctctccggtgccgcacttgccgctccgtcctcaaccccttctgcatcgtcgacttcgccgc

SEQ ID NO: 202033 - DNA, 275 bp, Glycine max
gagaaagcgaaacgcatagaatcgaaagaggggaaaagaaaaagaaaagttagggttagggattttgagagatggcatcgactaagaagatcaccctgaagagttcggacggtgaggccttcgaggtggaggaggcggtggcgctggagtcgcagacgatcaagcacatgatcgaggacgactgcgccgacagtggaatccctctccccaatgtcaccagcaagattctggcgaaggttatcgagtactgcaagaagcacgttgaggcgaacagt

SEQ ID NO: 202034 - DNA, 268 bp, Glycine max
cagacccgtgagcatgctcttcttgctttcaccctaggtgtgaagcagatgatctgttgctgtaacaagatggatgccactacccccaagtactctaaggctaggtatgatgaaatcgtgaaggaagtctcttcttacttgaagaaggttggttacaacccagacaagattccctttgttcccatctctggttttgagggtgacaacatgattgagaggtccaccaaccttgactggtacaagggaccaactctccttgaggctcttg

SEQ ID NO: 202035 - DNA, 273 bp, Glycine max
gtccggaaatcgttcctatcatcacttctcaaatctcgtaccctctcgttcgtgccgatcactaggtcacacttcatcaatggagggtagaggcaaaaccctaggatccagcgccgctaagaaggccacctcaaggagcagcaaagccggcctccaattccccgtcggtcgtatcgccaggttcctcaaggccggaaagtacgccgagcgcgtcggcgccggagcacccgtctacctcgccgccgttctcgaatatctcgctgctgaggtttt

SEQ ID NO: 202036 - DNA, 270 bp, Glycine max
gtcgctccgcaccagtttcaccgcacgaatatcttgttgtttggagcgatccgagaaaaactctgtaaacatgttggtttaccaggacctccttacaggtgatgagcttctctctgactccttccgttacaaggaaattgagaatggaatgctgtgggaagttgaggggaagtgggttgttaaaggagcagttgatgtagacattggtgcaaacccttctgctgagggtggaggagaagatgagggagttgatgatgcagctgttaaggt

SEQ ID NO: 202037 - DNA, 271 bp, Glycine max
cgacgccgaagtactagtgggtggtaaccgcgacgaacatcgggggcttggtctggtgagccaccccagcgacaggatgcagagggaacgcgaccagctcggttccatcgcagggacctcaagctgcggttattcaagcggaaaatcgaatctttgggaggaagaaggaggcatggacgagcttcttgcggtggtgggttacaaggttaggtcatcggacatggcggaagtggcgcagaagcttgagcgtctcgaagaagccatgggaaat

SEQ ID NO: 202038 - DNA, 268 bp, Glycine max
caaattctcattttcaagctgtttggtgtaaagatgggacaagtgcttggttgtgttcaagtgaagcagtcaactgtagccgtcaaggaatgtttcgggaagtacgatgatgttcttcaacctggttgccattttgtgccatggtgtcttggctgcggtgtggctggtgtcctttctacgcgtgtcatgcagctaagtcttcgttgtgaaactaagacaaaggacaatgtgtttgttaatgtggttgcctcaatccaatatcgagcat

SEQ ID NO: 202039 - DNA, 269 bp, Glycine max
gtcggcggtgacgaaaggaaagaagaagaagaagcgttctttcggagagttcgaagatgtcgggcgttaccaacaacaacgaggaagacaagaagccaaccgaacagggagcacacatcaaccttaaggttaaggggcaggatgggaatgaagtttttttcaggatcaagagaagcactcaattgaagaagcttatgaatgcttactgtgaccgacagtcggtggatttcaactccattgcttttctgtttgatggacgccgcctccga

SEQ ID NO: 202040 - DNA, 267 bp, Glycine max
tcaagatctgggatttggagagcaagagtatcgttgaggatttgaaggttgacctcaagactgaggctgatgccacctccggtggtggtaacgccaacaagaagaaggttatttattgcacaagtttgaactggagtgcggatggaagcactttgtttagtggctataccgatggtgtggtcagagtttgggctattggacgttattaggttaagctttttagtgttttcagatgcgaatctgtttttgagttttgggacaaagtta

SEQ ID NO: 202041 - DNA, 267 bp, Glycine max
ctgaagtacattcacaccgcaaatgtctatcatcgagatctgaagccaaagaatatactggcaaatgcaaactgtaagcttaaaatctgtgattttgggttagctagagttgcctttagtgacacaccaacaactatattttggacggattatgttgctacaaggtggtatagagctccagagctatgtggatcattttactcaaagtatacaccagcaattgatatatggagtataggttgcatctttgctgaagtactaacagga

SEQ ID NO: 202042 - DNA, 269 bp, Glycine max
gcagcgcattatagcacaccacacaaaaaagcaaaacagagagaacaactgttactcacacacgccatgggtaaatgaatggtttttgagcaacagcagttaaaagagaaaagggattcagcgaagatgacatctgttggtgtggcaccaacttcgggtttgagagaagccagtgggcatggagcagcagctgcggatagattgccagaggagatgaacgatatgaaaattagggatgatagagaaatggaagccacagttgttgatgg

SEQ ID NO: 202043 - DNA, 273 bp, Glycine max
ctctttttcttctctctcaacaacttcaccttcttcctcctcgatcatgtctcacttcaagggcaagtaccatgatgagcttatcgccaatgctgcgtacattggcactcctggaaagggtattcttgctgctgatgagtcaacagggacaattggcaagcgtttggccagcatcagtgtatagaacattgaatccaacaggcgagctcttagggagctgcttttcactgctcctggtgttcttcaatatctcagtggtgtcatcctctttga

SEQ ID NO: 202044 - DNA, 148 bp, Glycine max
gtggggaagccacagtactggagccattccattttcactctttgtaatactaatcttgctttggttctgcatatctgtaccccttaccattgttggtggctactttggagccaaggtaccccacattgagtatccagtccgaaccaac

SEQ ID NO: 202045 - DNA, 238 bp, Glycine max
atcgacacgtgcgtcggccaaaacagtcacgtgcgagactcggatattgcgaatctcccttacctccaggccatagtgaaagaagttctccggctgcacccaccaggcccgctactatcatgggctcgccttgcggtccatgatgtccatgcggacaaagtcctcgtgccagctggcacaacagcaatggttaacatgtgggccatttcgcatgactcgtccatctgggaagacccat

SEQ ID NO: 202046 - DNA, 282 bp, Glycine max
cgccgaagaaggttcatccaatccccgaagcccttcaccgcattgcaaccatgtcgaggagaaaggtcagagagccaaaggaagaaaacgtgactctgggcccagctgttagagatggtgaacatgtctttggcgtcgctcgcatctttgcctccttcaatgataccttcattcatgtcactgatttgtctgggagggaaacgcttgtccgcatcactggtggaatgaaggttaaggctgacagagatgaatcgtctccttatgctgctatgcttgcagctc

SEQ ID NO: 202047 - DNA, 265 bp, Glycine max
cccaagccctatacaaccaaaccctaacacacacccatttgattcagtttccatggctagcctcaaggttgcatttttggctgcagtgctctgcatggttgtggtgagtgcacccatggcacatgcagctatcacgtgcgggcaggtgacgaatagcctgatcaattgcatcggttacctccagaacggaggaacgccgccgtcgggatgctgcaacggagtgaagagcctcaatgccgccgccaagaccaccgccgaccgtcag

SEQ ID NO: 202048 - DNA, 268 bp, Glycine max
gatagcctcaactgaggggcttctctttgagagaatcgtatctcacaccaattagattccaattagattcaagagacatggccattaaccatgaaacttgggctttcgttttctgccttctaggcaacgtgatctcctttatggtgttcctcgctccattaccgactttttaccaaatctacaagaagaaatctacagaagagttccaatcactaccttatgttgttgcattgttcagttcaatgctttggatctattacgcactcgt

SEQ ID NO: 202049 - DNA, 264 bp, Glycine max
tcttaatttctctctgccttgctcatttacacacctctccaacctttcactttcagctttatttgaatccctctctttcctttccaaatggccagcgttgaggttgcacatcaaacaccaacaacagttccagaaaatgaaacaaccgaggtaatcaagacccaggaaacaaccccggaaccagtaccagccactgatgctcctgcaacagaacaagcagcagctgaggttcctgctcaagaagaacaacaagcaactgaggtt

SEQ ID NO: 202050 - DNA, 270 bp, Glycine max
ggaaacaactggttatgtattcttaagatgcgttatcacgggtaatggaggaaattcatatgcatatcttggacgaccgtggggccttttggaagggtggtctttgcatacacttacatggatcaatgtataaggcatgttggctgggataactgggggaaaatggagaatgaaagaagtgtttgcttttatgaatacaggtgttttggacctggttgctgtccatcaaaaagagtaacctggtgtagagaattgttggatgaagaagct

SEQ ID NO: 202051 - DNA, 270 bp, Glycine max
tagacacccaaatgtcatacgcatgtatgaggtaatggctagcaaaacaaagatatacattgtattggaatttgtgactggtggggagctgtttgataaaattgcacgcagtgggaggttgaaagaagatgaagcaagaaaatactttcaacagcttatatgtgctgtggattactgtcatagtagaggtgttttccatagagacttaaagcctgagaatttattgctggatgctaatggagtgcttaaagtatcagattttggattgag

SEQ ID NO: 202052 - DNA, 268 bp, Glycine max
cttcaccgttcgctctttctttctcccctacacaaaacatggctttgcccaatcagcaaaccgtcgattaccccagcttcaagcttgtcatcgtcggcgacggtggcacaggaaagacaaccttcgtgaagaggcatctcactggtgaattcgagaagaaatatgaaccgaccattggtgtggaggttcatccgttggattttttcacgaactgtggaaagattcgcttctattgttgggatactgctgggcaagagaagtttggtgg

SEQ ID NO: 202053 - DNA, 271 bp, Glycine max
atctgaatatgctccaacttatgaagacaaggatggggattggatgctggttggagatgttccatggaacatgtttgtgtcatcctgcaagagactgagaattatgaaagcatcagaagcaaaggggttgggttgtttttgaccaaaataaaaaaacaaagcaggaccatcatgcatgcccatatccaaaacatggagcaaagcaattttcagtgacgtcatccaagagaatttcttctgtttggaatatgcaagagctaggcacttggcc

SEQ ID NO: 202054 - DNA, 267 bp, Glycine max
agccgatagcgggtgctttggagattccacttctccctttctttctggttgagtatgggccccgtggactgttatccgtctcgtgtggacgatccggccgtgcgttctctagattcgctgccgttacggttccgattccgacctaccgacgaggtactcgtcaattactacctgcgacagaagatcaacggtaatggtcgcgaggtttgggttatccgagaaattgatgtctgcaaatgggagccttgggacatgcccggtttgtcg

SEQ ID NO: 202055 - DNA, 267 bp, Glycine max
gaggggccgaggcccctactgctggtcggcaaacggacggcgggcgcacgcgtcgcttctagcccggattctgacttagaggcgttcagtcataatccaacgcacggtagcttcgcgccactggcttttcaaccaagcgcgatgaccaattgtgcgaatcaacggttcctctcgtactaggttgaattactattgcgacactgtcatcagtagggtaaaactaacctgtctcacgacggtctaaacccagctcacgttccctattgg

SEQ ID NO: 202056 - DNA, 265 bp, Glycine max
agaactacaccatctatgcagtatctatcacaatccgtatagtgtttggcttcatgtttattgcactgatctggaaatttgacttctcacccttcatggttttgattattgccattctgaatgatggaacaatcatgacaatttcaaaggacagggttaagccatctcccttgcctgatagctggaaactgaatgaaatctttgctactggggttgtgcttggaggttacttggcactgatgactgttatattcttctgggcaat

SEQ ID NO: 202057 - DNA, 261 bp, Glycine max
atcaaatcaggagagcatgcatatgaacatgatgatgaagaaggtgtgtgggtttgcaatagtgatggtggcagtgcagcttctggtggaggtgagtcccaaggcagaggctgtgacttgtacccctgtggagctgagtccttgtttgggggcaataacttgctctcaaccaccatcaacaatttgttaccagaaggtgagggaacaaaggcaatgcctctgtggttacctcaaaaacccaagtctaaggccatatgccaa

SEQ ID NO: 202058 - DNA, 266 bp, Glycine max
ttctgcggtcacttgatctgccaaaggttaaaaagtctgctaaagggaaggttttgatgcaagctatgtatggagtaaaggtgcagacagtatttttatgcagtgtgtttgctgcggctttttcgggctctacaaagaatatgtcagatttggatgtggctgatgtatattcttgggctccaacctttaaaagtttgcaagatcttgtaaatggggaaattagagttagaagtgggcgatttactatattgaatgagttggaagta

SEQ ID NO: 202059 - DNA, 267 bp, Glycine max
ctactcaacacaaaaaatagtcttaattagttagtgtgtcaatttgtgcctcaaattgaaactagctatagatatggccagttcccttaataaccacctgtttgttgtagtatctattctttctctcttagccttttctagcaacgcacaactatctcccaccttctatgccaaaacttgccccaaccttcaaaccattgtgcgcagtgcaatgaggcaagctgttgctaaagaagccaggattggtgcctctattcttcgcttgtt

SEQ ID NO: 202060 - DNA, 263 bp, Glycine max
atgagtttcttcgatttcatcgtgttgatgatagggtcgctctttctgttcaaagctttcgattttactttctgtgtctccttcttctgcttcttttgattcccccaaatcttcagttttaaaaaccctaatctgctgccatgaggaagaagctcgatacccgtttccctgctgctcggataaagaagataatgcaggcagatgaggatgttggaaagatagcactggctgtgcctgttttagtttctaaagctctagaacta

SEQ ID NO: 202061 - DNA, 263 bp, Glycine max
ctcactcacaaacgcacactgaattcaaaaacatcgaaagagagaggcatggccgagcaaaccttcatcatgatcaagccagatggcgttcaaagaggccttattggcgagattattagcagatttgagaggaagggtttttacttgaaagggttgaaactcgttactgtggaccgtccttttgctgagaagcactatgctgatttgtctgcaaagcctttctttagtggtttggtggattacattgtctctggccctgttgt

SEQ ID NO: 202062 - DNA, 260 bp, Glycine max
ttcacctgagctttttgtgaggattccaaagcatggcttcccttgcagcatccactgctgctgcttcccttggcatgtcagaaatgcttggaaaccccatcaacctcagtggtgccacaaggccagctccatctgcctctagccctgcctccttcaagactgtggctcttttctccaaaaagaaggctgcacctccaaaaaaagctgcagctgctgctcctgccaatgatgagcttgccaagtggtatggtcctgacaga

SEQ ID NO: 202063 - DNA, 267 bp, Glycine max
agaatggctcccaagggtttaatctttttggctgtgttatgcttctcagcactgtcactgagtcgttgtcttgcggaggataatggacttgttatgaacttctacaaggaatcatgccctcaggctgaagacatcatcaaagaacaagtcaagcttctctacaagcgccacaagaacactgctttctcctggctcagaaacatcttccatgactgtgctgttcagagttgtgatgcttcactgttgctggactccacaagaaggagc

SEQ ID NO: 202064 - DNA, 280 bp, Glycine max
cgccgaagaaggttcatccaatccccgaagcccttcaccgcattgcaaccatgtcgaggagaaaggtcagagagccaaaggaagaaaacgtgactctgggcccagctgttagagatggtgaacatgtctttggcgtcgctcgcatctttgcctccttcaatgataccttcattcatgtcactgatttgtctgggagggaaacgcttgtccgcatcactggtggaatgaaggttaaggctgacagagatgaatcgtctccttatgctgctatgcttgcagc

SEQ ID NO: 202065 - DNA, 261 bp, Glycine max
gaaaatcctcacccattttcttcgtagccaaacactctgaaattctcagttatgtcgtggcaagcgtatgtggatgatcacctactgtgtgaaatcgaaggtaaccacctcactcacgccgctatcatcggccaagacggaagcgtttgggctcagagcaccaacttccctcagttcaaacctgaggaaataactgccatcaataatgactttaatgagcctggatcacttgctccaactggattgtatatcggtggcacc

SEQ ID NO: 202066 - DNA, 264 bp, Glycine max
tgaagtaaaggtgacagtggaaaatgggaaaacatttgttgcagacgccgctattgttgctgtacctcttggggtgctgaaggcaaagagcataaagtttgagccaaagctaccagactggaaagaagctgccatttctgatattggggttgggattgagaataaaataattttacactttaaaaatgttttctggcctaatgtagaattcttaggagtagttgcagagacatcttatggatgcagctactttcttaatctcca

SEQ ID NO: 202067 - DNA, 263 bp, Glycine max
aagcactatagaaaaaacgacattcattcatctatggctacccttattgctcccagcaaccactctccccaagaagacgctgaggctctcagaaaggcttttgaaggatgggggactgatgagaaaactgtcatagtaatattgggtcatagaactgtttatcagaggcagcaaatcagaagagtctatgaggaaattttccaggaggatcttgtgaaacgcctagagtctgagatcaaaggagactttgagaaagccgtgta

SEQ ID NO: 202068 - DNA, 263 bp, Glycine max
caacaatggacctccgtgaatcgataagcaaccaaaccgacgtggccctgagcatctcaaagctcctgttgtcgaaagaagctcgggacaagaacctcgtgtattcgccgctgtcgttgcacgttgttctgagcatcatcgccgctggctccaagggccccacactcgatcagcttctctccttcctccgatccaaatccaccgatcatctcaactccttcgcctctcagctcttcgccgtcgtgctctccgacgcctctccc

SEQ ID NO: 202069 - DNA, 261 bp, Glycine max
gcgggtggtgactgtatagtatagaataaaattgtgcccatagaaatagaatagtgacagacacactcgtgaatcgtgatttagcatttaccacaccaaaatcaatctgcggagtcagaaagccatggatccctacaagaatcggccatcaagcgccttcaattctcccttctggactacaaattccggtgctcccatctggaacaataactcatcgctgactgttggatctagaggtccaattctgctggaggattacca

SEQ ID NO: 202070 - DNA, 262 bp, Glycine max
aagaagcacaatttctctctttctttttgtgtccaaaatggctcctagttctactcacaatactgggttctatgtgcttatgctagttgggatagtgattagcactatggttgctacctgtgctggtagcttctaccaagactttgatctaacatggggtggtgaccgtgctaagatattcaatggtggccagcttctatctctttcccttgacaaagtctctggctctggcttcaaatcaaagaaagaatacctatttggg

SEQ ID NO: 202071 - DNA, 265 bp, Glycine max
gcaaagcatccttcgcttcaatctctgtctgtctctttgcgctttctgcaaaccgaacatttcatctccaaagggatcaacaggtcgaaggagaaatggggctgacattcacgaagcttttcagccggcttttcgcgaagaaggaaatgcgaattctgatggttggtcttgatgctgctggtaagaccactatcctctacaagctcaagctcggagagatcgttactacaattcctaccattgggttcagatgttgagactgtgg

SEQ ID NO: 202072 - DNA, 263 bp, Glycine max
gtgaagagcgaagagaatggctcccaagggtttaatctttttggctgtgttatgcttctcagcactgtcactgagtcgttgtcttgcggaggataatggacttgttatgaacttctacaaggaatcatgccctcaggctgaagacatcatcaaagaacaagtcaagcttctctacaagcgccacaagaacactgctttctcctggctcagaaacatcttccatgactgtgctgttcagagttgtgatgcttcactgttgctgg

SEQ ID NO: 202073 - DNA, 260 bp, Glycine max
ggactgggccacctttttgtgacaatgtttgtgacggggtttggtggtgtcatagttcttccggcaatcaccgacgttaccatggctgcactttgccctggccaagatcagtgtttccttgccatttacctctctggcttccaacaagctatggctggagtggggtcagtggtgatgacaccattaataggaaacttgtcggaccgatatggcagaaaagcgttgctcacacttcctctcactgtctctgtcattcctca

SEQ ID NO: 202074 - DNA, 261 bp, Glycine max; identical to SEQ ID NO: 148579

SEQ ID NO: 202075 - DNA, 258 bp, Glycine max
cagtacgtgagaaacgaccgtggcacccccatgattctagacaacaattactacagaaatatattggacaacaagggcttgttgatagtggatcaccaactagccaatgacaagaggaccaagccttatgtgaagaaaatggccaagagccaggactatttcttcaaggagttttctagagccattactttgctctctgagaacaaccctctcactggcacaaagggtgagatcagaaagcagtgcaatgctgccaac

SEQ ID NO: 202076 - DNA, 257 bp, Glycine max
ctctgctcgtgcctctagggttatcatatctccatttccatttcctctctctcagtttccaagaatcttaagctatgggaaagtcttacccaaccgtgagcgctgattaccagaaggccgttgagaaggcgaagaagaagctcagaggcttcatcgctgagaagagatgcgctcctctaatgctccgtttggcatggcactctgctggaacttacgacgtgagctcgaagaccggtggtcccttcggaaccataaag

SEQ ID NO: 202077 - DNA, 258 bp, Glycine max
  unsure (1)..(258): unsure at all n locations
ggaaagatgcagatattcgtgaaaaccctaaccgggaanacaatcacccttgaggtggagtcaagcgacaccattgacaatgtcaaagccaagattcaggacaaagaagggattcctccggatcagcagaggttgatcttcgccgggaaacagctggaggatggccgtaccctcgccgattacaacatccaaaaagagtcaacattgcatcttgttttgaggcttcgtggtggtattattgagccatctttgatggca

SEQ ID NO: 202078 - DNA, 139 bp, Glycine max
ataaaaaaggaatggttcacataccatttactaacatgacacatcacattgtaaaaatacttttacgcgagggttttgttgaaaacgtcagataacatagagagaacgacaaatattttttagttttaactctacggta

SEQ ID NO: 202079 - DNA, 254 bp, Glycine max
gaaaggtgttgttctcagatccatccatcagtggtgggcgatgttgttgttctcagatccagactgagggggtgaaggaaaatgaagtcgtcgaggcgtctgttgaggatcgggcttgtgtcggcgtggtactcgtcgaacattggggtgctgctcctgaacaagtacctccttagcaactatggcttcaagtaccctatcttcctcaccatgtgtcacatgaccgcttgctccctcttcagctacgtcgccat

SEQ ID NO: 202080 - DNA, 256 bp, Glycine max
tcccttcttctctcacggtttgagattataaagacttggtggcagggtaagctaaagttgcagagttgaggggaatacaagaagagaaggaggttgaggtactcagtaaagtattgatttgtgtgaatcggggggcttgatgccaatgttggatacagttgtatgtgctagaaacagtcaacagtggcttcataaggtgaaggtgactttctagtattggatagggccagagtccatgatgattatagatgtttga

SEQ ID NO: 202081 - DNA, 259 bp, Glycine max
gtcgaattcggaatctgatctccgacgattgatcccggtagaggctagtacactctccaatctgcaaaaatgcctctcagactcgaaatcaagcgcaagcttgcgcaaagatcagagagagtgacatgtgtggatctacatccaacagagccatggattctggctagtttatactctggaactgtctgtatctggaactaccagtctcagaccatggcaaaatcttttgaggttaccgcgttaccagttagatcggcca

SEQ ID NO: 202082 - DNA, 261 bp, Glycine max
gcaccaacagcatcggcggcgacagtcactctccgacaacaacacttccgcggcgaaaaatgtctctggtggcgaacgaggatttccagcacattctgcgtgtgctgaacaccaacgtggatgggaagcagaagataatgttcgctatgacctccatcaagggtattggaaggagattcgccaacatcgcttgcaagaaggccgatgttgacatgaacaaaagggctggtgagttgagtgctgcagagttggatagtgtga

SEQ ID NO: 202083 - DNA, 260 bp, Glycine max
aaatcctccagcctctcctccaaagtcccctgcggttcgttcggttattcttcgaaccgttgtctgaagtttacaactcaaaacttcaccgaacgcatttcattcaccaattcgtccaagtctcgtatcaatcaatcagcctatccgtcttgcggttggagagatcggaggggagagcagccatggcgcatcgagtagaccacgagtatgactatctgttcaagatcgttttgatcggagactcaggtgtaggcaaatcc

SEQ ID NO: 202084 - DNA, 216 bp, Glycine max
atactcacccattttcttcgtagccaaacactctgaaattctcagttatgtcgtggcaagcgtatgtggatgatcacctactgtgtgaaatcgaaggtaaccacctcactcacgccgctatcatcggccaagacggaagcgtttgggctcagagcaccaacttccctcagttcaaacctgaggaaataactgccatcaataatgactttaatgagc

SEQ ID NO: 202085 - DNA, 259 bp, Glycine max
ctagtttctgtctgaaagctattctccaccgtagccgcaagcttcgccgtttgaaacagtgcctcaaccatggcagaacaaacagagaaggcttttctgaagcaaccaaaagtgtttctatgctctaagaaaggtgggaagggaaagaggcctgggaaaggtgggaatcgcttttggaagtcaattgggcttggattcaagactcccagagatgccattgaaggaacatatattgacaagaagtgccccttcactggca

SEQ ID NO: 202086 - DNA, 256 bp, Glycine max
caagaagaaatccactgaaggtttccagtcacttccttatgttgttgcactgttcagtgcaatgctttggatttactatgctttcgtgaaaagggaaactgccctccttctcattaccattaacacatttggaattgttgtggagtcaatttacctttctatcttcctaatttatgccccaaggaagccaaggcttacaaccatcaagcttcttctcttactgaatgtgtttggattcggggccatgcttctatca

SEQ ID NO: 202087 - DNA, 254 bp, Glycine max
gtttgttgtaggaagaggaatcttgagaaatggcaggggacagcaagagcaagattctgttcatcggagggactggttacatcggaaaattcatcgtggaagccagcgccaaagctggccacccaactttccttttggtgagggagtccactctctccaaccccgcaaaatcacccctcatcgacaatttcaaaggcctcggtgtcaatcttgttttaggagatctatacgatcaccaaagtttggtgagtgct

SEQ ID NO: 202088 - DNA, 255 bp, Glycine max
ccattttctctctttctctttctctccgacctagcgagaccgagcgatccgatcctaaccccgcgatgctccgccgcgcaaccacctccctcatctccggcgcctcccgccgccgcctctccaccgacgtgccggcgacgccgcggcggattccgtcttcgcggaggcgtggaagaaagtgagccccaacatcgacccgccgaagacgccgctggcgtacatgaagccccgaccacccactccttcgactctccc

SEQ ID NO: 202089 - DNA, 252 bp, Glycine max
  unsure (1)..(252): unsure at all n locations
cacaacttgtagctgaggatattattactcagcaaaaattcatggaagttccaatcaagtatccggctanactcacccttagggtggttcttacttgtatcatggcggccaccggtgggttgatttttggctatgaccatggtgtttcaggtggagtgacctccatggattccttcctgaagaagttcttcccatctgtatatgaaaaggagtctaacgtgaagccttcttcaaaccagtactgcaaattca

SEQ ID NO: 202090 - DNA, 282 bp, Glycine max
acgtaagctcgggtcagcgatggcacagaagagattcatcatcgaggtcgagatggcgaaggaggcgagcgaaggaaggccttcgagaggacctgtctatcgtagcctcttcgccaaggatggattccctgctcctatccaaggtctcaatagttgctgggacgtttttcgattgtctgttgagaaatatccatcaaatccaatgcttggtcgccgggaaattgtggatgggaagccgggcaagtacaagtggctaacatacaaagaagtatatgaccaggt

SEQ ID NO: 202091 - DNA, 257 bp, Glycine max
tttctctcttctctctgcatcgcttcaggttcttctgaaaagatgtctcgcgtgtatgttggtaacttggattcacgagtcaccgagagagatctcgaagacgaattccgtgttttcggagttattcggagtgtttgggttgcacgtagaccacctggttatgcttttattgactttgatgaccgcagagatgcacaggatgctatccgtgaattggatggcaagaatggttggagggttgagctttctcacaactc

SEQ ID NO: 202092 - DNA, 265 bp, Glycine max
cttgtttctttctccgccccttttttgttgttccttcttctcgaccgtcgctttgtgatctctctctgcaaccatgtccgtcgagaaagagagagagacccaggtttacttggccaagcttgccgagcaggccgagagatacgaagaaatggttcagtgtatgaagaaagtagcaaaacttgatcttgatctgaatgtggaagaaaggacccttctctcagtgggatacaaaaatgtgattggtgcacgaagggcctcttggcgc

SEQ ID NO: 202093 - DNA, 234 bp, Glycine max
gacggcagtgagcgtgccggtgagtggcgcatcgttctatggtctggcggcggggacggcaacgagtgggtcccctgagtcaaggttgacggtttacgaagtgtgtggagcttttgggtcatgtcctgggtcggccattcttgcggggtttgacgatgccattcacgacggagtggatatcttgtcgctgtcactcggtggattcggtggaacggggaccgatttgaccaccga

SEQ ID NO: 202094 - DNA, 249 bp, Glycine max
ttttatctcagtcctgtgcatgtcagcagctgctatagtggagattgtgcgcctgaaggttgcaaaatagcatggacttgttgatgaacctgttcctgtaccccttaatatattttggcaaatccctcagtatttcttattgggggcagcagaagtattcacattcgtcgggcagcttgagttcttctatgaccaatctccagatgccatgcgtagtttatgtagtgctttgtcgctgttgactacttc

SEQ ID NO: 202095 - DNA, 249 bp, Glycine max
atttacagagtgaagattttatttttctttctttctttggaagataaagaatgggttctaagtccgaaaccgtttgcgttactggggcttctggttacatcggatcatggcttgtcatgagactcatcgagcgtggctataccgttcgagccaccgtactcgacccagctgatcatgagggaggtgaagcatttgctggatctgccaggtgcagagagcaagctgtctctgtggaaggcagaacttaca

SEQ ID NO: 202096 - DNA, 253 bp, Glycine max
atctggtccgagaggatgatcagccacactgggactgagacacggcccagactcctacgggaggcagcagtggggaattttccgcaatgggcgaaagctgacggagcaatgccgcgtgaaggtagaaggcctacgggtcatgaacttcttttcccggagaagaagcaatgacggtatccggggaataagcatcggctaactctgtgccagcagccgcggtaagacagaggatgcaagcgttatccggaatgat

SEQ ID NO: 202097 - DNA, 253 bp, Glycine max
ctaggcacccagagacgaggaagggcgtagtaagcgacgaaatgcttcggggagttgaaaataagcgtagatccggggattcccgatataggtcaacctttcgaactgctgctgaatccacgggcaggcaagagacaacctggtgaactgaaacatcttagtagccagaggaaaagaaagcaaaagcgattcccgtagtagcggcgagcgaaatgggagcagcctaaaccgtgaaaacggggttgtgggagag

SEQ ID NO: 202098 - DNA, 261 bp, Glycine max
gtgctcgaagtttcgaaagcatagctttcctcgcggcttccaccgcggctatgtcagaaatccttggaaaccccggtaacctcagatgcgcaaccaggttctgtccatcaccaactacacctgccaccttcaagaccgtcgaacttttctccaagaagaagccagctccacctccacagaaaaagcctgccgctgtatcccccgccaatgaggaactcgccaagtggtatggtcctgacagaaggatcttcttgcctgagg

SEQ ID NO: 202099 - DNA, 251 bp, Glycine max
cgtgagtcgagggtgttcaccacagtttacactcacgagagtacccattttctcttctcaatttctcaagtgtgccgagaaaatcatggtggacgcagcagaacgtagatacttggaggatgatgattcatctctcatgaaaactatcaagggcgcaacaactggtttagtggctggaactatctggggtactgtagttgccacctggtatgatgtcccccgtgtcgagagaaatgttgctcttccagggc

SEQ ID NO: 202100 - DNA, 251 bp, Glycine max
cacatttgcaaagtgttatttttctttttttctcatttgcactgcaaattgcaatggcttccaacaaggttattgccaccatcatggtgctttctctccttgcctactcaacatcattcaccaatgcatgtggcacatgccacccaaaacctaccccttctcctcctcctccatcaggaaagtgccctaaggacacattgaagctaggggtgtgtgcagatattctaggtcttgttactgttgttgttggc

SEQ ID NO: 202101 - DNA, 251 bp, Glycine max
cgcgtcgcttctagcccggattctgacttagaggcgttcagtcataatccaacgcacggtagcttcgcgccactggcttttcaaccaagcgcgatgaccaattgtgcgaatcaacggttcctctcgtactaggttgaattactattgcgacactgtcatcagtagggtaaaactaacctgtctcacgacggtctaaccccagctcacgttccctattggtgggtgaacaatccaacacttggtgaattctg

SEQ ID NO: 202102 - DNA, 253 bp, Glycine max
tttcgatcgtgactacgaacattgcaggaagaaagaaagacaggcgatggacctcggaacctatgacgtgccagaaggagtggacattctgggaagatacgatgcagagtttgcaaaaatcctcgcaaaagatgctttgaaattcgttgctgaactgcaacgtgagttccggaacgatatcaagcatgcattagagcgcagaagagaggcaaagaagaagtacaatgaagggtctcttccggggtttgatcct

SEQ ID NO: 202103 - DNA, 259 bp, Glycine max
gctcgagttaacatgggaaaagcccttatattctgagtttcaacaattggcaagtgaaagtgagtatgctgcctggaccctagtcaacgggtatgcactaaaccatgttactatatccactcatcggctgaaaactcatttgaaggagataaaaaaactaaatcagtttattaaggatagtggattcagattgaattctgaaggaggagtgctgaaagtgagccctgatggtcttctccagcaaagctcaactgtagca

SEQ ID NO: 202104 - DNA, 248 bp, Glycine max
gtttgtcttaaatggtgggcctgcgagatacttgttttgctagccggactttttccaaatccaaagttggagacatcagtcctatctatatgcttgacaatctctacattacatttcaccataccttatgggtttggggctgctgctagcactagagtttcgaatgaattaggagctgggaatccacaagcagttcgtgtggctgtttcagcaacgatgttccttgcagtcacagagggtctaattgt

SEQ ID NO: 202105 - DNA, 250 bp, Glycine max
gtaacaactcacctgccgaatcaactagccccgaaaatggatggcgctaaagcgcgcgacctatacccggccgtcggggcaaggaccaagccccgatgagtaggagggcgcgtggtcgctgcaaaacccagggcgcgagccagggcggagcggtcgtcggtgcagatcttggtggtagtagcaaatattcaaatgagaactttgaaggccgaagaggggaaaggttccatgtgaacggcacttgcacatg

SEQ ID NO: 202106 - DNA, 249 bp, Glycine max
gacaaaacatggggtacaattggtcttctatatactatgctaactatgatctctctgggtaccagcttgtgtctccaattgtgggactcctagcttacaatgctgatgaagatgcaaagtcaagcaacccttttcagcttgggattgtggctggagaaacgcctatgacaattgacttcaccaatgccacaaagatgaaccaagatggggtcaagcccttgtgtgctagctttgaaggtgatgggagaa

SEQ ID NO: 202107 - DNA, 250 bp, Glycine max
ctattatcatccgcagctgcttttattcgcaccgcaaacagtgagccatggccgtcggaaagaacaagcgcatctccaaggggaagaagggtggcaagaagaaggcagctgatccctttgccaagaaggattggtatgacattaaggctccttctgtttttcaagtgaaaaatgttggcaaaaccctcgtctctcgtactcagggtaccaagattgcttctgaaggactcaagcatagagtgtttgaggt

SEQ ID NO: 202108 - DNA, 268 bp, Glycine max
atctcgtcactctgcgcgagcgttacacgagggtgttcaccacagtttacactcacgagagtacccattttctcttctcaatttctcaagtgtgccgagaatatcatggtggacgcagcagaacgtagatacttggaggatgatgattcatctctcatgaaaactatcaagggcgcaacaactggtttagtggctggaactatctggggtactgtagttgccacctggtatgatgtcccccgtgtcgagagaaatgttgctcttccag

SEQ ID NO: 202109 - DNA, 245 bp, Glycine max
atctcttgagagcagttattgtagggccatacggaaccccttaccaagatggactctttttctttgattttcaccttccgccagaataccctgatgttccaccgtcagcatactatcattctggtggttggcggattaaccctaatttgtatgaagaagggaaggtttgccttagccttctaaatacatggacaggcagaggaaatgaagtatgggatcctaaatcttctagcatccttcaagtc

SEQ ID NO: 202110 - DNA, 249 bp, Glycine max
ggttgtccagacagaacacgtcacaaactacactttgtgtgagagagaaaatgcagagaaaatgcttaacctcagtgtgaaggccaatatcaacctcattcccaagcatcccaatgacacaaagtcagtagagcagttttgtagagactctgtgatcactatttggcactaccatggtgggtgccatgtggggaaggttgttaactctgagcataaggttcttggtgttgatagacttcgtgtggttga

SEQ ID NO: 202111 - DNA, 248 bp, Glycine max
atcctctttgcttctctcatcacaatttacactctcaatggctggaatctgctgtggtgttgttggagaaggtgacactccggctccactcgagcccactcctcgcccctccaggcgccggagtttggacatcttacctttaaaatatatcgccgacatgcccatgccgccgccggagggtttacgcaagcgtcccaagctcaacctcagggactgcgataacgcaattgaaaattgcgacgactcca

SEQ ID NO: 202112 - DNA, 246 bp, Glycine max
cttggatattacccgttgagagtactaccttcgaaaactgctattgcccctgttaatccaacatttttgcccaggtctgaagatgaaagggagatgtgttcaagaacaatttattgcacaaatattgacaagaagcttactcaagctgatgtcaaacacttctttgaatctatttgcggagaggttcaatggttgaggcttcttggagattaccatcattcaactcgaattgcttttgttgagttc

SEQ ID NO: 202113 - DNA, 267 bp, Glycine max
gctcggaattctgctcaagaaaacatttgcgaagtagactaagttcagatcatggtgcagttaaatgtcaactaacccgtcaacacagcttgagagcagcttacgcacagtacttgaagctgacagctagatttgtctctcttcaaaggacccaaatgaaccttcttggtagagacttgggcccactaaataccaaagatcttgagcagcttgagcggcaactggattcatctctcaagccagtgaggtccacaaagactacagttc

SEQ ID NO: 202114 - DNA, 252 bp, Glycine max
ggaagagcacgagcagaaggaggaacacgaatggcatcgcaaggaggaaaaacacggaggaaagggaagtgaagaggaacaagatgaacgtgaacacccacgcccacaccaacctcatcaaaaggaagaggaaaagcacgaatggcaacacaagcaggaaaagcaccaaggaaaggaaagtgaagaagaagaagaagaccaagacgaggatgaggagcaagacaaagagagccaagaaagtgaaggttctga

SEQ ID NO: 202115 - DNA, 281 bp, Glycine max
ctcgtctcgtaactaaccatggcagcgttccgatggaagagcttcgaggagaatgaggatcgcccagccaagcctcgtcattttggcgtcaccgagattcaaagcccccactgcactctcttctcccacaaccttcttcaggatatttttgaatctatgggagactatgtagatgggttaaagttttctcgagggtctcacagcaatgatgccaaagctactatccagcaaatcattgacatggcccatcagcatgacgtgtatgtaagaacgggtgattg

SEQ ID NO: 202116 - DNA, 274 bp, Glycine max
aaggattctacccgccgctcgatgggaattgcgcttcaaggcgtctcgtagggctaatccgcctcacgagggtcaccaacggcacgtacctttggggggccgaggccccctactgctggtcggcaaacggacggcgggcgcacgcgtcgcttctagcccggattctgacttagaggcgttcagtcataatccaacgcacggtagcttcgcgccactggctactcaaccaagcgcgatgaccaattgtgcgaatcaacggttcctctcgtactag

SEQ ID NO: 202117 - DNA, 284 bp, Glycine max
tctttttggttttcacatgccttttgattcctctagcagttgcagattggaacatactgaagctgcagacacaagatggattgaagatcagcctgaagaactattgtgaaagctggaggatgaatgtggagctgcacaacattagggacttccaagttgtgcctgaagagtgcactgaatacattggaaaatatgttaagtccacacagtacaaagtagactcacagagggcatctgaagagtgcttggtttaccttagcaccagctgtaatttgaagaaagat

SEQ ID NO: 202118 - DNA, 296 bp, Glycine max
  unsure (1)..(296): unsure at all n locations
gaagatccatagctaataagctaggttcagtagttagtgagtgatcgatatctggagatgggtcgaggcaagattgagataaagttgattgagaaccccaccaacaggcaagtcacttactccaagcgtaggaatggtatcttcaagaaagctcatgaactcagtgttctctgtgatgccaaggtttcacttatcatgttctctaaaaacaacaagatgcatgaatnaattagccctggcctcacgacaaaaaggatcattgatcagtatcagaagactttgggggatattgatct

SEQ ID NO: 202119 - DNA, 303 bp, Glycine max
tgaagagcgaagagaatggctcccaagggtttaatctttttggctgtgttatgcttctcagcactgtcactgagtcgttgtcttgcggaggataatggacttgttatgaacttctacaaggaatcatgccctcaggctgaagacatcatcaaagaacaagtcaagcttctctacaagcgccacaagaacactgctttctcctggctcagaaacatcttccatgactgtgctgttcagagttgtgatgcttcactgttgctggactccacaagaaggagcttgtctgagaaggaaacagataga

SEQ ID NO: 202120 - DNA, 294 bp, Glycine max
ctcgagccgcttggatatgatgcagccaaaggtgaatatgttgatatggttaaaactggaattattgatccattgaaggttattaggaccgccttggttgatgcagccagtgtgtcatctttgatgacaacaactgaagctgttgtgtctgaactcccgaaggacgataaagatgttcctgccatgggtggtggcatgggtggcatggattattaaggggctattttccctgatcaaccttgcttcctttaattggacgtagattggggtggtgtttcaccactattttgcctt

SEQ ID NO: 202121 - DNA, 294 bp, Glycine max
gctgcttattttgatttgaactttgaagttttgttattttgtgcaatggcagccaagagcaaaatcctagtccttggaggaacaggatacattggaaaattcatagttaaggcaagcgcagaagcaggacaccccacttttgccttagttagagagagcaccctttctcatcctgaaaaatctaaacttattgagagcttcaagacctccggagttactcttctttatggtgatctaactgatcatgaaagccttgttaaggctatcaagcaagttgatgttgtgatttctaca

SEQ ID NO: 202122 - DNA, 292 bp, Glycine max
tgctgcttattttgatttgaactttgaagttttgttattttgtgcaatggcagccaagagcaaaatcctagtccttggaggaacaggatacattggaaaattcatagttaaggcaagcgcagaagcaggacaccccacttttgcattagttagagagagcaccctttctcatcctgaaaaatctaaacttattgagagcttcaagacctccggagttactcttctttatggtgatctaactgatcatgaaagccatgttaaggctatcaagcaagttgatgttgtgatttct

SEQ ID NO: 202123 - DNA, 200 bp, Glycine max
  unsure (1)..(200): unsure at all n locations
caattccctaggggcttaatattctcccttcacttgtgcctagcctaatgtcatagtataatcattcattctcatctttctctcttctctctccacccagaccctaactcccgacccatgttccctctcgtatccgtcatgagaggagganagtccaagaccgaatctaagagagccgatcccaacttgctgtgaataag

SEQ ID NO: 202124 - DNA, 258 bp, Glycine max
cgaagagaatggctcccaagggtttaatctttttggctgtgttatgcttctcagcactgtcactgagtcgttgtcttgcggaggataatggacttgttatgaacttctacaaggaatcatgccctcaggctgaagacatcatcaaagaacaagtcaagcttctctacaagcgccacaagaacactgctttctcctggctcagaaacatcttccatgactgtgctgttcagagttgtgatgcttcactggtgcttgact

SEQ ID NO: 202125 - DNA, 293 bp, Glycine max
aaaatcaataccttagagaaaacaaaagcacagaatcgaaagaagagttcttttttgagagagattgggatggcttcgacgaagaagatcacactgaagagttcggacggcgaggccttcgaggtggaggaggcggtggcggtggagtcccagacgatcaagcacatgatcgaggacaactgcgccgacagcggaattcctctccccaatgttaccagcaagattctggccaaggttatcgagtattgcaagaagcacgttgaggccaattgcgctgatgagaagcccagtga

SEQ ID NO: 202126 - DNA, 294 bp, Glycine max
aacgtattgtttttctctctttccgcggcctagatctgagcagtttggaaaccctaactgctctcaccaacgacatcaccactctctccgatcaactacctctttcgtcgccctaagtcatggcaggaattgcacccgagggatcacagtttgatgctcgtcaatatgataccaagatgaatgagctgcttacgtccgatggtcaggatttcttcacatcctacgatgaggtttatgacagttttgatgctatgggcttgcaagagaatctcctgagaggcatttatgcatatg

SEQ ID NO: 202127 - DNA, 295 bp, Glycine max
cagagcgcaggcaaacaacttcttctctcagacatggcatctcaaggtttgtgaccttcgataaaaaatattcttcttttggactctgaagggaagcgtgtggcagtcaagtattactcagatgactggccaacaaacaatgcaaagttagcttttgagaagtttgtatttaccaagactgttaagacaaatgctcgtacagaagctgaggtaacactacttgagaacaatatcattatttacaaatttgtacaagacctgcatttttttgtcactggtggtgaagatgaaaatg

SEQ ID NO: 202128 - DNA, 294 bp, Glycine max
tcaacttcgcatttctctcgcatccactgaaccaagattcctatttccaaatgaccgctcctacttcttccagcctgttagtggctccaaaccccagcaaaagatggggcgaactcttcttccttctctacacccccttctggctcaccctttgtctcggcattgttattcccttcaatctttacgagaaattcacagagctggagtatttgctcatcggattggtctcggctgttcctgctttcgtcgttccattgctgctcgttggaaaggttgacagaagcatttcttgga

SEQ ID NO: 202129 - DNA, 300 bp, Glycine max
gttgaatcgcgtcgattaaggttttgagatttctaggctttcatctcagacagtgaaaaaatgatagatataagtacacttaatgctgcacagattactgtgctgggatctgccttttgtgctatgctttccatgcatttcacgtcgcagttactgtctcagcatctcttttattggaagaatccgaaagagcaaaaggctattatcattatcatcctcatggctccaatctatgcagctgtctcctttgtgggtctcatggatatcagaggaagcaaggagtttttcacctttttggag

SEQ ID NO: 202130 - DNA, 296 bp, Glycine max
ggtgcagcaaagacactgatgttgaaaacatgccatttactttgtccatgtttttaaccatcaatgctgttatgtggttcttctatggccttctcctcagggattattacgttgctcttccaaacacgcttgggtttgtcttcggcataattcagatggtgatgtatttgatgtacagaaacgccaccccagtggcactagaggagccagtgaaggctcaagaattgaatgggcacatcattgacgttgtgaagataggaacaatggaaccgaatcacggtggtgctgttggcaaa

SEQ ID NO: 202131 - DNA, 288 bp, Glycine max
tactcgagccgaatcggctcgagcggctcgaggcaagggataacatcacagagtttcgttgaatctgcactaagaccctacgcgcacatcttgcaactccaatcgacatagcagcaatgtctacgctcgaaattgaagctcgagatgtcatcaagattgtgcttcagttttgcaaataaaattcgttgcatcagacttttcagatgctgcagaacgaatgccaggtttctctgaacaccgttgacagcattgagacctttgttgctgatattaatagtggaaggtggg

SEQ ID NO: 202132 - DNA, 284 bp, Glycine max
cgagcggcgagtaacaatgtgcggcgacgccacgaactgggacgaagacgcatacagagaaaccgtactcagggagagggaaatccaaacccgaaccgttttccgaaccgcttgggccccaccctacacctctaacctcgacactctccttgtcgcctctagcgacggttccgtcgcatcctactccatctcttcctccgtcgtcgcctctaagctcaaaaatcaattcggttttgtcaatgccgatacagatgagttattggctgaaccaaattgcttcgttc

SEQ ID NO: 202133 - DNA, 292 bp, Glycine max
gagaaccccagggcacctttgtttgttgttgggactagcattggagctaatattctgataaaatatcttggtgaggatggtgagaatattcctgtagctggagctgtagctgtttgctctccttgggaccttttgataggagacagatttataacccgtaggcgtgtgcaaaagttttatgataaagcacttgcaattggacttcaaggttatgcaaaattacatcagcctcatttttctcgccttgctaattgggaagggatagaaaagtcaatttccattcgagattttg

SEQ ID NO: 202134 - DNA, 293 bp, Glycine max
aaagttagaagtaaagaagatcatggcttctctagcaaccttggctgctgttcaaccagctacgatcaatggccttgctggaagttccctctctggaactaagctatctttcaggccctctcgccacagtgtcaaatccaagaacttcaggagtggtgccgtggtagcaaagtatggtaacaagagtgtgtactctgatttcggagatctgggcaacactacagggcagtgggacttgtatggctcagatgcaccttcaccctacaaccctcttcagagcaagttcttcgaga

SEQ ID NO: 202135 - DNA, 294 bp, Glycine max
tttcctcaggatagctggagcccgcgggcgagttctatcgggtaaagccaatgattagaggcatcgggggcgcaacgcactcgacctattctcaaactttaaataggtaggacggtgcggctgctctgttgagccgcgccatggaatcgagagctccaagtgggccatttttggtaagcagaactggcgatgcgggatgaaccggaagctgggttacggtgcccaactgcgcgctaacctagaccccacaaagggtgttggtcgattaagacagcaggacggtggtcattgaag

SEQ ID NO: 202136 - DNA, 292 bp, Glycine max
ctcgagccggaaacagtaagaatgttggaatgagtcttgaagatgtaatcgaggaatgcaagctattctactttgcagggcaggaaaccacgtcagttttgcttgtttggacaatggtgttattgagtaggtaccctgattggcaagcacgtgcaagggaggaagcctttcaagtctttggataccaaaaaccagattttgatgggttaagtcgcctaaagattgtcaccatgattttgtacgaggttcttagattatacccaccgctaattgggatgaatcgattggttga

SEQ ID NO: 202137 - DNA, 296 bp, Glycine max
caccggcgtcatgggccagtccatgtgcgcccacctcatccgtgccggctacaccctcaccgtcttcaaccgcaccccctccaaggcccagcccctcctcgacctcggagcccacttcgccccctcccctcacgccgtcgccgccaactccgacgtcgtcttcaccatcgtcggctacccctccgacgtccgctccgtcctcctccacccctcctccggtgccctctccgccctccgccccggcggcgtcctcgtcgacatgacaacctccgagccctccctcgccaccgaaatcg

SEQ ID NO: 202138 - DNA, 291 bp, Glycine max
agacgccataagaaagagcaagtcgaaaagttcatctctccctctctctcacacatcccagccatgagcctcttcggtataggcagaaaccagagaacattccgcccgaaaaaaagtactccttctggaagtaagggagctcaacttagaaaacatattgatgccacgttgggtagtggaaatctgagggaagcagtaaagctacctcctggggaggatttaaatgagtggctagctgtcaacactgttgatttcttcaaccaggtgaatctgctttatggtacccttaca

SEQ ID NO: 202139 - DNA, 290 bp, Glycine max
gacagatgttgggcttgaagctattggaaggggttgtccaaatgtgcaaaacttgaagcttcgtaagagtgcttttctgtcagacaagggattagtatcatttgccagggctgctccatcagttgagagcctgcaattgcaagagtgccacagaattacccaaattgggctctttggtgtcttttttaactgtggtgcaaaattgaaggttcttactctgattagctgctatgggatcaaagatctcaatatggatttgccagcaatatctccttctgaatcaatttggt

SEQ ID NO: 202140 - DNA, 204 bp, Glycine max
atacaaccttctttctttttctgtgagcctttctttcaggttcttaacttgatcagtgtgcagtgtccaaatcataagggtagttgcaaattgcaatggctaagcatgatgttgagggtggttccttctctgcaaaggactaccatgatcctcctccagcaccgttgattgatgctgaggaactcacacagtggtccttctaca

SEQ ID NO: 202141 - DNA, 291 bp, Glycine max
ggataccgccggaaaatccgccgtcgacggcggtgatggtgttcaacgcctcgtcggcggaggaggctcagaggccggcggcgaaggcggctccggtgatcggaggagaacggagatcgatgtcggcggcgacggacgagacggttagcaaggcggcgctagggttccggctgagcgaggttgtcgtgtgtctgatttcgttttctgttatggccgcagataagacgcaaggttggagtggtgattcatttgatcgctataaagaatataggtattgtttatctgtgaatg

SEQ ID NO: 202142 - DNA, 287 bp, Glycine max
agagaatcggtgtggtggggagtggccaaatgggatcgggaatagcccaagtcgctgccatgcacggcatcgacgtttggcttcacgacctcgaccctcaagctctctccaaagcctcctcttccatctcttcctccatcaaccgtttcgtttccagaaaccacatctctcaggttgcgggtgctgatgctttgaaacgactgcgtctcacgacggatttggttagattacagctagcggatttgatcattgaggcgattgtggaatccggagatgtgaaaaagagt

SEQ ID NO: 202143 - DNA, 294 bp, Glycine max
cgatttcggaagggtcgtgttctctctctgcttcagcttcggcttcgagaagggtcgattgggtccccaagctgtttcttctctgtttctgacaaactttataacccttatcaaacatgagtggtcgcttttctcgcacaatttatgttggcaacctgccctctgatataagagagtcagaaattgaagatctattctacaagtatggccgtataatggatattgaattgaaggttcctccccgccctccatgttattgctttgttgagtttgataatgctcgagttgccgaag

SEQ ID NO: 202144 - DNA, 290 bp, Glycine max
agaagaagaagaagaagaaaattacaattgtagatcctgctgatgaacctgtggagaaattggctgagaagacagaaaacctctcagtttccgagggggttgtacatgcatttactggtttgaaaaagaagaagaagaagcctgttgaaatgggtaacttgaatgatgagagtggagatgcaattgaagatttggatgatcaccctgaagatgatgaaggagaaatggttgttccccaggctcgttatccttgggaagggagtgatcgtaattatgaatatgaggagctg

SEQ ID NO: 202145 - DNA, 171 bp, Glycine max
aagattttataatttaacttttttggggtgtgattaaaagagaagctagctaaaaaaaatgggttcagcatccgaaagtgtttgcgttacaggagcttctggtttcatcaggtcatggcttgtcatgagactcatcgagcgtggctacaccgttcgagccaccgtacgcga

SEQ ID NO: 202146 - DNA, 288 bp, Glycine max
cggctcgagattcattggaactggagaacatatggacgagtttgaactttttgatgttaagccatttgtcagtcgtctattaggaatgggcgactggtctgggtttatggacaaaattcatgaagtcgttcctatggatcaacaacctgaactgcttcagaagctgtcagaaggaaacttcaccttgaggattatgtatgagcagtttcagaacatacttaaaatgggtcctatcagccaggttttttctatgcttccacggtttagtgctgaattaatgccaaaagg

SEQ ID NO: 202147 - DNA, 201 bp, Glycine max
gtccctctttcttctcttccgccatcgttttctttgaaacgcacagcttcaatcaccgaccacaccacccatcaacgacatgcttcctctttcccttctcaagactgcccaaggccaccctatgttggtggaactgaaaaatggggagacatataacgggcatttggttaattgcgacacatggatgaacatccatctgcg

SEQ ID NO: 202148 - DNA, 290 bp, Glycine max
agcgtttgcggggaatctgttgttccatggaagaaagactcagactcagtgcattcgctcctacagtctgatcccaatggtgatagagcactcttcccgaggtgagagggcatacgacatcttctcgcgccttctgaaggagcgcattatctgcatcaacggacccatctccgacgacactgcccacgtcgtcgttgcgcagtcctcttcctcgaatccgaaaatccttccaaacccatcaacatgtacctcaattcccccggtggcgccgtcaccgcaggcttgctatt

SEQ ID NO: 202149 - DNA, 292 bp, Glycine max
gaactttgcaactttgagcagaaaatctcacagtcgaaggaagaaataatcaccaatggcatatgaacacgaagacgatctcaaagacgagaagaaccctcgacccctcgacgaggatgacatcgccctcctcaaaacctacggtttgggaccttattccacaagcataaaaaagacggagaaggaaatcaaagatatggccaagaaagtgaatgacttatgtggtatcaaggagtctgatactggattagcagcaccaagccagtgggatcttgtttctgataagcaaatg

SEQ ID NO: 202150 - DNA, 290 bp, Glycine max
  unsure (1)..(290): unsure at all n locations
gaaaaggttatgatggagtcactgatgtgcctccgaagggccggtgctgatatcatcctcacatattctgctctgcaagctgccagatgnttgtgtggagagaagaggtgaagttctctgattatgtagggcgttgttcatgtagaaggttnaagagtttataataccagtatctgctggantttggttattgtaaattgtttaagagggacatggaggtttgtgtatagagagacattcataataaaatattatggcctcgtttganttantatatntaaggacataat

SEQ ID NO: 202151 - DNA, 249 bp, Glycine max
gctagcagcactgtaacctcaactcacctctcgcaaatccgttccctctttcaaaccttttttcttttcaccaaatcggcgatggcaacgacgtcggtggtgccggcgaaccggcgtcgcgcggcgaaccccgcggaggagatggacttcgagaagacggagggcgtgaaagccatcgcaagctccgacgagatgtggatcaaggacgatctggtccgcggaatctaccagtacggcttcgagaagccc

SEQ ID NO: 202152 - DNA, 287 bp, Glycine max
atcaagttactatctataattaattaaattcctcgtggaatattgaagaagccatgtctacagctgggcaggtcatcaagtgcagagctgcggtggcatgggaagcagggaagccactgtcaatagaaaccatagaagtggcaccaccccagaaaggtgaagtgcgtttgaggatcctcttcaactccctttgccgtagtgatgtttattggtgggatgctaaggaccagactcctctgtttcctcgtatcttaggccacgaagcttcagggattgtggagagcgtg

SEQ ID NO: 202153 - DNA, 289 bp, Glycine max
acctcacggtgaggctggagaaggaagcctcatatgatgaaattaaaaatgctatcaaggaggaatcagagggcaagttgaagggaattcttggttacactgaagatgatgtggtctccaccgactttgttggtgataacagatcaagtatttttgatgcaaaggctggaattgcattgaataagaattttgtgaagcttgtctcttggtatgacaacgagtggggatacagttcacgtgtcattgacctgcttgtaatcgttgccaagaagtctttttaattaaggtg

SEQ ID NO: 202154 - DNA, 249 bp, Glycine max
ccaaaccctgctgcataggaagaaagcctaggctcacatgcgaactcgctacaggatgtcaatttggcttaaattctagagtgcccagagatgccattgaaggaacctatattgacaagaagtgccccttcactggcaatgtttccattcggggtcgtatcctagccggtacttgtcacagtgctaagatgacaaggaccattattgtgaggaggaattatcttcattttattaagacataccagagat

SEQ ID NO: 202155 - DNA, 262 bp, Glycine max
gggcatttcgctcttcactctaattgtcttgattggcactggctggtccttcctcaaacccttccttcaggataaggaaaagaaggttctcatcattgtcatcccccttcaagtcattgccaacattgctcaggtcgttattgacgagagtgggccctttggccatgactgggttacctggaagcagatcttcctccttgttgatgtcgtctgttgttgcgctgtgctcttccccattgtctggtccatcaagaacctccgt

SEQ ID NO: 202156 - DNA, 260 bp, Glycine max
cacctttgttcactcttcttctcttgcggctagggttttagcgcacttcttctagatttaaggaagatgggtaaggacaaggttcacatcagtattgtggtcattggccatgtcgactctgggaaatccactaccactggtcacctgatttacaagcttggaggcattgacaagcgtgttattgagaggtttgagaaggaagctgctgagatgaacaagaggtctttcaagtatgcctgggtgctggacaaacttaaggc

SEQ ID NO: 202157 - DNA, 258 bp, Glycine max
ctttctgtagccctcaatcaccggagagagagtgagtgcaaagccatcgtcttcttctcagacaagtagtttggtaaaagatggctgatgctgaggatattcaaccccttgtctgtgacaatggaactggaatggtgaaggcaggatttgctggtgatgatgctcctagggctgtgtttcccagtattgttggccgacctcgtcatactggtgttatggttgggatgggtcaaaaggatgcctatgtaggtgatgaag

SEQ ID NO: 202158 - DNA, 260 bp, Glycine max
tctcgagccgaatcggctcgagcgtttcctttcattttccctcaccatctcgctccccaaacgcccctctctctcctccaatggccgaccagctcaccgacgaccagatcgccgagttcaaggaggccttcagcctcttcgacaaggacggcgatggttgcattactaccaaggaacttgggactgttatgaggtcacttggtcaaaacccaactgaggcagaactgcaggatatgataaacgaggttgatgctgatggc

SEQ ID NO: 202159 - DNA, 269 bp, Glycine max
ggattcggctcgagcgcggcgggaagggaagaagaagaagagaaacaagaagagcgtggagacatacaagatctacatcttcaaggttctgaagcaggttcaccctgacattggtatctcaagcaaggccatgggaatcatgaacagcttcatcaacgacatcttcgagaagcttgcccaggaatcttctagacttgcccgctacaacaagaagcccaccatcacttcaagggaaattcagaccgcggtcaggcttgtgctgcccggtg

SEQ ID NO: 202160 - DNA, 261 bp, Glycine max
ctctcaaacaccaaacccaagtgattatgtgttccttcaaaacatggttcaatttgttcatcattttccttgcctcggctgcaacacccatcttctcattaacagattccccaaatcaactctccacaaactttctagaaattgccaagaaacctgaagtatttgattggatggtgaaaatcagaaggaagattcatgagaatccagaattgggttatgaggaatttgagaccagtaaactcattagagaggaattggata

SEQ ID NO: 202161 - DNA, 247 bp, Glycine max
actgaaccacaacacctctcctcgttcacgctacccctttctgctcttcttctacctttcaagttttaaaagtataaagatggcagagacattcctatttacctcagagtcggtgaacgagggacaccctgacaagctctgcgaccaaatctccgatgctgtcctcgacgcttgcctcgagcaggacccagacagcaaagttgcctgcgaaacatgcaccaaaaccaacttggtcatggtcttcgga

SEQ ID NO: 202162 - DNA, 258 bp, Glycine max
tggctcgtcactccttgctcttagccctcctcctcttcgccgctgtggccaccgccgcgatggcgtggcgcgtccgacgccgacgacatcctgatccgtcaggtggtgccagatgttggcgaagcgacagaggaggacaacctgctgaacgccgagcaccacttcgcgagcttcaaggccaagttcgccaagacctacgccaccaaggaggagcacgatcatcgcttcggcgtcttcaagtccaacctccgcagagcc

SEQ ID NO: 202163 - DNA, 260 bp, Glycine max
atcaccataaccatgtcaatggcaacaacatcccctcacaccgccctcttccaaaaccgcaccaaccctttcactctctcctccttcaaacccacatccatcaaatgctccacccaactccatacccaagccccgcccctcacccactcccaagatcgcgtcttcaacttcgccgccggtcccgccaccctcccggaaaacgtcctcctccgtgcccaatccgagctctacaactggcgcggatccggcatgagcgtcat

SEQ ID NO: 202164 - DNA, 259 bp, Glycine max
tcgctctatttctcagtctctgtgtttgcggctgaggattccgaacgagtgaccttcttcgtttctcgcaaagtttaagtactcatgggtaaggaaaaggttcacatcaacattgtcgtcattggacatgtcgactctgggaagtcaactaccactggtcacttgatctacaagcttggaggtattgacaagcgtgtgattgagaggttcgagaaggaggctgccgagatgaacaagaggtcattcaagtatgcctggg

SEQ ID NO: 202165 - DNA, 253 bp, Glycine max
tgaatctcagaattctctaaaagagatctttttctgctctttgaagaaagaagggtctttgcttgattttggagatgtctctgctctcagatctcatcaaccttaacctctccgataccaccgagaaggtgatcgcagagtacatatggatcggtggatcaggaatggacctgaggagcaaagcaaggactctcccaggaccagttagcgacccttcagagcttcccaagtggaactatgatggttccagcac

SEQ ID NO: 202166 - DNA, 253 bp, Glycine max
gtaatatgtctgtcattgctcatgttgatcacggaaaatcaaccctcactgattctcttgtggctgctgctggtattattgctcaagaagttgccggtgatgtccgtatgactgatacccgtgcagatgaagctgagcgtggtattaccatcaagtctacaggtatctcactctactatgaaatgactgatgaagctctcaagagttttaagggagagcgcaatgggaatgagtatcttatcaatctcattga

SEQ ID NO: 202167 - DNA, 259 bp, Glycine max
gagaatggctcccaagggtttaatctttttggctgtgttatgcttctcagcactgtcactgagtcgttgtcttgcggaggataatggacttgttatgaacttctacaaggaatcatgccctcaggctgaagacatcatcaaagaacaagtcaagcttctctacaagcgccacaagaacactgctttctcctggctcagaaacatcttccatgactgtgctgttcagagttgtgatgcttcactgttgctggactccaca

SEQ ID NO: 202168 - DNA, 258 bp, Glycine max
atcttcatggaattgtatctgtcgaatctgcaactctgctggaagaggaagaaattgaggttccagtttccaaagaaccagcaggagaaaataccaagatggaaactgatgaagctcctgccaatgttgctgcacctcctagcaccaatgacaatgatgttaacatgcaagatgctaattccaaggcaactgctgatgcccctgggtccgaaaatgggacccctgaggcaggagataagcctgtgcaaatggatactg

SEQ ID NO: 202169 - DNA, 255 bp, Glycine max
ggcatatggagatacgagatttcagaagaagcacagaagcagctatggctatcagggccaatggtatttgtgagtgtgtttcaatacagtttacaaatgatatctctcatgtttgtaggccatttggacgagttgcttctagctggtgtttctctggctacttcatttgtaaatgtcactggtttcagtgtgctgctaggtatgtcaagtgcacttgacacattttgtggtcaatcatatggagcacagcagtat

SEQ ID NO: 202170 - DNA, 256 bp, Glycine max
gagggagtcagagaaaccctaggtaagacgaaaagatgccggctggtcatggtttgagatcccgcaccagagattccttctctcgtcctttcaggaagaagggaaccatcgccctcaccacatacctgagaacctaccacgtcggcgactatgttgacgtcaaggttaacggtgccgttcacaagggaatgccccacaaattctaccatggccgcaccggacgcgtctggaatgtcaccaaacgtgctgttggcgt

SEQ ID NO: 202171 - DNA, 255 bp, Glycine max
cctcactcttgttcttcagtctcctcctattatccgccaccgtagccgccgccgaacggatcgacgatgaagacgaccttctgatccgtcaagtggtgccggatgcggaggaccaccacctgctcaacgcggagcaccacttctccgccttcaagacaaagttcggcaagacctacgccacgcaggaggagcacgaccaccgcttccgtatcttcaagaacaacttgctccgcgccaagtcacaccagaaattgg

SEQ ID NO: 202172 - DNA, 253 bp, Glycine max
gggcacactaaggcatccagcggtggagagtgagaaaccatcaaagacctcaacgcagaaactgtggacggatggacggtattttttgcaggctgagaaagaacttagtgctgggtggaagctaatgcgaattggtgaagatcctgctgtagatatctggatggccgataatttgccaaaagaagcatccgttggggttgatccctggtgcatttcaattgatactgctcaaagatgggagcgtgcttttgcc

SEQ ID NO: 202173 - DNA, 251 bp, Glycine max
cggctcgagaaaccctccaaccttagtttcaattctaaacttgttcaccctttattctctcctcttccaaacatcaaccatggcttcaataataaccttggtgacatccaccttgctctttctttctttcactttgtcatgtgctattgacacctccaccatcaccaactacaccgacaatgaggtcatgaccatgtacgaggagtggttggtgaagcaccaaaaggtgtacaatgggttgagagagaagg

SEQ ID NO: 202174 - DNA, 249 bp, Glycine max
ggcaaatgctggttaaggaggtttatgaggctctaagagcaagtcctcaatggaatgaaacgctttttgtcattacatatgatgaacatggtggattttttgatcatgtgaagaccccttttgtcaacattcctaatccagatgggaacaccggacctgctccctatttcttcaagtttgataggttaggggttcgggtgccaactattatggtctctccttggatcaagaaagggactgtgataagtg

SEQ ID NO: 202175 - DNA, 248 bp, Glycine max
acttgatcaagactcaagagtgaacaaaaaaaaatgatgggtacccttaaggtgtccaacagtagtttatacatattttcgaagttcctagtaatttgtatggtgatgatgatatctttggttgattcaagttattccttgtgtgattttgaggcaatcttcaattttggtgattcgaattcagatatgggtgggtttcatacaagctttcctgcacagcctgctccctatggaatgacttacttcaa

SEQ ID NO: 202176 - DNA, 248 bp, Glycine max
acgaatatcttgttgtttggagcgatccgagaaaaactctgtaaacatgttggtttaccaggacctccttacaggtgatgagcttctctctgactccttccgttacaaggaaattgagaatggaatgctgtgggaagttgaggggaagtgggttgttaaaggagcagttgatgtagacattggtgcaaacccttctgctgagggtggaggagaagatgagggagttgatgatgcagctgttaaggttg

SEQ ID NO: 202177 - DNA, 252 bp, Glycine max
caaaggtgaagctcaggctcaggattggagaggcagaccctccaaccctgccaaacacggtggaatgattcccgctgcttttgttcttgggttgcaagcttttgagataatggcaatagccgcagaggggaacaatctgataacctacgtgacgagtgagatgcacttccctttgtccaaggctgccaacctagtcactaactttgttgggaccatctttctcctacgccctcctcggcggctatctttccg

SEQ ID NO: 202178 - DNA, 250 bp, Glycine max
ctcgagccgcaccgcacgaatatcccgctgtcaggagcgatccgagaaaaactctgtaaacatgttggtttaccaggacctccttacaggtgatgagcttctctctgactccttccgttacaaggaaattgagaatggaatgctgtgggaagttgaggggaagtgggttgttaaaggtgcagctaatgtagaccatacagcaaagtcgtctgcgaaacatgcaccaaaaccaacttggtcatggtcttcg

SEQ ID NO: 202179 - DNA, 255 bp, Glycine max
ttctgagtggcgatcattaaaggttcaatgggatgaaccatcgtctattttgcgtcctgatagagtttctccatgggaattggagccacttgtgtctacccctcctacaaacccccagccatcccaaagaaacaagagatcgcggcctcccattctaccttcaacaatgcctgattcttctctgcaaggtgtatggaaatcaccagttgaatctgcaccattctcttattgtgaccatcaacatgggcgagatgt

SEQ ID NO: 202180 - DNA, 268 bp, Glycine max
ttggaatctaatggatactcatcccgaggaaaggagactatttgaccatgttacctgtaatatgtcagcttctgttgatgaagtcactgttcctggtgcccttgctctggatctgattgagcaggctgaagtggaagttgagagacttgatcagctgaaagccagcaggatgaaggaaattgctttcaagaagcaagcagagctcgaagagatatttgcccgtgctcatatagaagtagatccagatgctgcccgggagaagattatg

SEQ ID NO: 202181 - DNA, 250 bp, Glycine max
gtgtgggtttgcaatagtggtgatggcagcactttttctggtggagatgagtcccatggcagaggctgtgacttgtagccctgtggagttgagtccctgtttgggggcaatcacgtcctcttcaccaccatcgacaacttgttgccagaaggtgagggaacaaaggccatgcctctgtggttacctcaaaaaccctagtctgaggccatatgtcaactctcctggttccagaagggttgctagctcttgt

SEQ ID NO: 202182 - DNA, 247 bp, Glycine max
ggcaaggggtgggtcccctgagtcaaggttggcggtttacaaagtgtgtggggcttttgggtcatgtcctgggtcggccattcttgcggggtttgacgatgccattcacgacggagtggatatcttgtcgctgtcgctcggtggattcggtggaaccaaaaccgatttgaccaccgacccgattgcgattggagcattccactccgtccagcgcggcatcctggtggtctgcgccgccgggaacgac

SEQ ID NO: 202183 - DNA, 248 bp, Glycine max
atcttcatggaattgtatctgtcgaatctgcaactctgctggaagaggaagaaattgaggttccagtttccaaagaaccagcaggagaaaataccaagatggaaactgatgaagctcctgccaatgttgctgcacctcctagcaccaatgacaatgatgttaacatgcaagatgctaattccaaggcaactgctgatgcccctgggtccgaaaatgggacccctgaggcaggagataagcctgtgcaa

SEQ ID NO: 202184 - DNA, 177 bp, Glycine max
tatgtgaagttcctaaggctccaggttaaggtcctgagcatgagtagactgggaggagctggtgcagttgctcagcttgttgctgatgtacccctttctgcagtggatggggatcaggacatagaaggtgtatccaatgagcaagcctgggacaagtggtccaatgatggcacagaa

SEQ ID NO: 202185 - DNA, 249 bp, Glycine max
cacaggtgtagctcaggctcaggattggagaggcagaccctccaaccctgccaaacacggtggaatgattcccgctgcttttgttcttgggttgcaagcttttgagataatggcaatagccgcagtggggaacaatctgataacctacgtgacgagtgagatgcacttccctttgtccaaggctgccaacctagtcactaactttgttgggaccatctttctcctcgccctcctcggcggctatctttc

SEQ ID NO: 202186 - DNA, 247 bp, Glycine max
gaaaagaccatcaaagtttcacttcagccttatccggtttagggtttcggtttttgacccaacctttgacgtatcgaaaccttaagtttcggatcaggtctgagcaatctggttggtagaacctttggtcttagagagtcaagttttatgtctgaattagacgatcaaattcctactgccttcgatccttttgctgatgcaaatgctgatgactcgggtgctgggtcaaaggagtatgtgcatattc

SEQ ID NO: 202187 - DNA, 246 bp, Glycine max
tgaagagcgaatagaatggctcccaagggtttaatcattttggctgtgtgatgcttctcagcactgtcactgagtcgttgtcttgcggaggataatggacttgttatgaacttctacaaggtatcatgccctcaggcggaagacatcatcaaagaacaagtcaagcttctctacaagcgccacaagaacactgctttctcctggctcagaaacatcttccatgactgtgctgttcagagttgtgat

SEQ ID NO: 202188 - DNA, 242 bp, Glycine max
agggtgtttaccagtttgtagacaaatacggtgctaatgtcgatggttacagtcctatctacgacaccaaggactggtctccaaccggtgatgtctacgctggcggtacgactggcttggctatctgggctgtgactctacttggtcttttagctggtggtgcacttcttgtctacaacacaagtgctttggttcaatagactttgcaaatcgatgtttaagttataacatagtccatgtaa

SEQ ID NO: 202189 - DNA, 242 bp, Glycine max
ctcgagccgcgagattgaggcgggggttgatttggaagaaacccagctaaggtaattcctagcaacccctaacttaaccttcaaaggatcatcatgggcagtcacaatgctttggctgccactttcggaatattaggtaacatcatttctgtgatggtgtacttggctccggtgccaacgttttaccggatatacaaaaagaaatgcacggacggtttccactcgctgccatacttgttgtc

SEQ ID NO: 202190 - DNA, 248 bp, Glycine max
ccaaaccctgctgcataggaagaaaccctagcctctcaccctccctgcgacacgatgcagatcttcgtgaaaaacctaacgggtaagacgatcacccttgaggtggagtcttctgacaccatcgacaacgtgaaggccaagatccaggacaaggaaggcatccctccggaccagcagcgcctcatcttcgccggaaagcagctggaggacggccgcaccctcgccgactacaacatccagaaggagtc

SEQ ID NO: 202191 - DNA, 245 bp, Glycine max
agccaatcaaacactaaatcagttcacgatttcacagttaaagatgccaggggaaatgatgttaatctcgccgattacaaaggaaaggtccttctccttgtcaatgttgcctcacaatgcggcttgactaattcaaactacacagagcttaatcaattgtatgagaaatacaaagggaaaggacttgaaattctggcattcccgtgcaatcagtttggggctcaggagccaggaactaatgaaga

SEQ ID NO: 202192 - DNA, 242 bp, Glycine max
taattaattaaattcctcgtggaatattgaagaagccatgtctacagctgggcaggtcatcaagtgcagaactgcggtggcatgggaagcagggaagccactgtcaatagaaaccatagaagtgtgcacaccccagaaaggtgaagtgcgtttgaggatcctcttcaactccctttgccgtagtgatgtctattggtgggatgctaaggaccagactcctctgtttcctcgtatcttaggcc

SEQ ID NO: 202193 - DNA, 245 bp, Glycine max
agaatggctcccaagggtttaatctttttggctgtgttatgcttctcagcactgtcactgagtcgttgtcttgcggaggataatggacttgttatgaacttctacaaggaatcatgccctcaggctgaagacatcatcaaagaacaagtcaagcttctctacaagcgccacaagaacactgctttctcctggctcagaaacatcttccatgactgtgatgttcagagttgtgatgcttcactgtt

SEQ ID NO: 202194 - DNA, 243 bp, Glycine max
cgatcaaagatcagtgaccatgtatcttcagttttacataaacgataacggcgacaaagtctacaccactaagaaagagtcgccggtagggctacctacacaatctgctcatccagcccggttttcacccgatgataaatattcaagacagagagttcttctgaagaagcgttttggattattaccaacccagcagccacctccaaagtattgagtgatgtagaagctctaaattttaagtgt

SEQ ID NO: 202195 - DNA, 240 bp, Glycine max
ttcgcaccttcgaaaatcaattttctgtcttctctgcgtcttcttcctctatcaatcgttttccatggctcgtaccaagcaaaccgctcgcaaatccaccggtggaaaggctcctaggaagcaactcgccaccaaggctgcaaggaaatctgcaccgacaaccggtggagtcaagaagcctacatcgctatcgccctggaactgttgctcttcgtgagatccgaaaataccaaaagagca

SEQ ID NO: 202196 - DNA, 241 bp, Glycine max
gcgaaaagagattcgaatccaaggaagggaaaggaaagtaagagaagagaagaatggccgaagagggacaagtgattggtgtccacagcgtggaggagtgggaggaacatctcaagaagggacaagagtccaagaaattgattgtggtggattttactgcttcttggtgcggcccatgccgtttcattgccccaattcttgcggatatggctaaaaagttgccgaatgtcaccttcctcaa

SEQ ID NO: 202197 - DNA, 246 bp, Glycine max
  unsure (1)..(246): unsure at all n locations
ctcacaatttttattttttaatgatactattttgttattgttattgatggtatcatcatcgggaaaaagcagagaaatggatagggtgaagggtccatggagcccagaagaggacgaggccctgcgggcgctggttcaggcccacgggcctcgaaactggtcggtgataagcaagtccattccggggagatccgggaaacntgnccgcttacggtggtgcaaccagctttcgccgaaggtggccct

SEQ ID NO: 202198 - DNA, 271 bp, Glycine max
ggaactcaggtctcagttggaatgagatttggcatgatgtttgagactgaagaatcgggtaagcgcagatatatgggtacaatagttggtatcagtgatgtggatcctttaaggtggcctggctctaaatggcgcaatattcaggtggagtgggatgagccagggtgtggcgataaacagaatagagttagtgtgtgggagattgagactcctgaaagcctttttatcttccttctttgacttcaggtctaaaacggccattaccatctgg

SEQ ID NO: 202199 - DNA, 245 bp, Glycine max
atcgttaagctagtggcgatcggatccagctacagcatagagatcaaggaaggaaggaaggaagatgttgggtgttataaggcacaagagtattcgccctgccttctccgcaatcagacacttgtcttctgcagctaaagagattactgtcagggaggctctgaactccgcactcgatgaggaaatgtcagctgatcctaaagtgttcttgatgggtgaagaggttgggaatatcagggtgcata

SEQ ID NO: 202200 - DNA, 271 bp, Glycine max
agccaatcaaacactaaatcagttcacgatttcacagttaaagatgccaggggaaatgatgttaatctcgccgattacaaaggaaaggtccttctccttgtcaatgttgcctcacaatgcggcttgactaattcaaactacacagagcttaatcaattgtatgagaaatacagagggaaaggacttgaaattctggcattcccgtgcaatcagtttggggctcagggccaggaactaatgaagagattgtggagtttgcttgtactcgctt

SEQ ID NO: 202201 - DNA, 270 bp, Glycine max
catggcttcctcttccctctttctctcactctctctcaccctttgccttgtttcctctctctgctatgctcacaaatcttccttaaccctacctgtgacaaaagacgattcaacccaccaatacctaacaaccctctcttatggcacccctgttgagtctgcaaaattcgtgcttgatctcggaggctcaatcctctgggctgactgtgcatccagaaccaccccatttccacccttgccccaatcttccaccgttcaattcgctgcctc

SEQ ID NO: 202202 - DNA, 267 bp, Glycine max
gttacggtctacgaaaagggggctgaagttgtgagaatgtacaaaaccttgctaggaagtcaagggttccgaaaaggcatggatctttattttaagagacatgatggccaagctgtaacatgtgaagatttttttgccgccatgcgagatgcaaatgatgcagattttgcaaatttcttgctatggtattctcaagctgggacccctgttgtcatagtaaatactcttataatccagaagcacatactttttctttaaaatttagtc

SEQ ID NO: 202203 - DNA, 274 bp, Glycine max
gccaatggcggttccagtggcaccacccaccaacattgtggcccaaaacagtggcaagggaaagtaccaagaatgcctcaagaaccacggtgtctcaatcggcaaacacattatcgacggctgcatcgagttcctgccggggggtcaggagggcaccctggaagcgctaaaatgcgttgtgtgcaactgccaccgaaacttccatcgtaaggagacccacgacacctactcagtgccttccaccaccaccacccaccgctgccacccccagtgc

SEQ ID NO: 202204 - DNA, 148 bp, Glycine max
atcatcataaaccccctccagagaacaagaatcatagaatggcaactatgactggtgtgagcctttcaagccccagggttttcttcaacgcatcaccctcactgcaaaacacgtacgtcgtaaagttcgcagttccacacaacatagg

SEQ ID NO: 202205 - DNA, 246 bp, Glycine max
ggaaaagagaaaaaaatttctcagaagagtctccgctgaaagttttggtttcttgaagatgtcgttgctctccgatcttatcaaccttaacctctccgacatcaccgataaagtgatcgccgagtacatatgggtaggtggatctggcatggatatgaggagcaaagcaaggacactctcaggaccggttaaactcccatcgaagcgtcccaagtggaactatgatggttccacgatggtcaacct

SEQ ID NO: 202206 - DNA, 156 bp, Glycine max
cagttgcaggaaaaatggtttcgctgaaactgcagaagcggctcgccgcgagcgtgctcaagtgtggcagaggaaaggtttggcttgaccccaatgaagtcaacgaaatctccatggccaattctcgccaaaacataaggaagctggttaaggatg

SEQ ID NO: 202207 - DNA, 273 bp, Glycine max
ccggagcgatgagtgagagtgagaagcagaaggtaacggggaaggtgaagtggttcgatgaccagaacggttttggcttcataaccaccgacgacagcggcgaggaattcttcgtccaccagtcctccatccgatccgacggcttccgcagcctcgccctcggcgagtccgtcgagttccttattgactccgatcccgaacgccgcaccaaggccgtcgacgtcaccggcctgacgaatcgccagtccagggcacccgcggtggcggaggagg

SEQ ID NO: 202208 - DNA, 274 bp, Glycine max
ctcgggattttactctcacgagattagagattgaagatggtgtctgacgcgagcaagaagaaggctgcgcagaagaaggcggcggcagcggccaagagaggaggcaaagcagcagctgcttcgtcgaaaacgacgtcgtcggagaaggccgccgacaagcttgccaacggaattggggaaattcagatatccgatcgaacctgcaccggtgtcctctgctcgcatcctcttccagggatattaggatagaatctctgtcagttacttttcatgg

SEQ ID NO: 202209 - DNA, 126 bp, Glycine max
gaagagaatggctcccaagggtttaatctttttggctgtgttatgcttctcagcactgtcactgagtcgttgtcttgcggaggataatggacttgttatgaacttctacaaggaatcatgccctca

SEQ ID NO: 202210 - DNA, 271 bp, Glycine max
cgaagagaatggctcccaagggtttaatctttttggctgtgttatgcttctcagcactgtcactgagtcgttgtcttgcggaggataatggacttgttatgaacttctacaaggaatcatgccctcaggctgaagacatcatcaaagaacaagtcaagcttctctacaagcgccacaagaacactgctttctcctggctcagaaacatcttccatgactgtgctgtcagagttgtgatgcttcactgttgctggactccacaagaaggagc

SEQ ID NO: 202211 - DNA, 278 bp, Glycine max
cggctcgagctttgtcgcaaagagaagagatctgcctccttttttttatcaaatctatctcttcttcaagaatagttgaaaatggggctgtctttcaccaagttgttcagccgactgtttgccaagaaagagatgcgtatactgatggtgggtctcgatgctgcgggtaagaccaccattctgtacaagctcaagcttggagagattgtcaccaccattcccaccattgggttaatgtggaaactgtggaatataagaacatcagcttcactgtctgg

SEQ ID NO: 202212 - DNA, 277 bp, Glycine max
cccgtgatcaattttaagggttacatggttggaaatggtgtcacggacgaaatatttgacggcaatgctcttatcccatttgtgcacgggatgggcctcatatccgacactatctatgagaatttacaatcttcctgcaaaggaaactactacgatgcttactctttggacgaaaatgatgtgtgttacaagaacattgaaaaatttgacagggccattgatgggcttaactgtacaacatactagagccatgctaccatttccctggtgatgccac

SEQ ID NO: 202213 - DNA, 246 bp, Glycine max
gaagagaatggctcccaagggtttaatctttttggctgtgttatgcttctcagcactgtcactgagtcgttgtcttgcggaggataatggacttgttatgaacttctacaaggaatcatgccctcaggctgaagacatcatcaaagaacaagtcaagcttctctacaagcgccacaagaacactgctttctcccggctcggaaacatcttccatgactgtgctgttcagagtgtgatgcttcactg

SEQ ID NO: 202214 - DNA, 270 bp, Glycine max
gagattagcaactatgtagatgaatatgatgtcactcttgatgtttgtttgtcatcagtaaatcaacaggcttatgtgctgaatcaactgcaagagacacagaagatagatgtttgtatcggtgataaaacaactacatacttgaacactaaagaagtccaagaagctctgcatgctaatcttgttggagtcgccaaatggtcaacttgcagctcagttctgcattagattatcagaatctagaaataccaacaattcctattctagggt

SEQ ID NO: 202215 - DNA, 273 bp, Glycine max
ctctaactttcacacgcagcggcttcttcttccgttttcctgaatcggtgtgaacaatggcgacgtacgctgcgatgaaacccaccaagccagggttggaggagtcccaggaacagatccataagataaggatcaccctttcttccaagcacgtcaaaaacctcgagaaggtttgtgcggacttggttcgtggtgcaaaggacaagcgcctcagggttaagggacctgtaggatgcccactaaggttcttcacatcactaccaggaagtcccc

SEQ ID NO: 202216 - DNA, 271 bp, Glycine max
ctctgcgtctagggtttcttccttctgcaaccatcaatggcggcaatcacagctccccagcaccgatcctcgaagacggagtcctacgttgacaacaagcgcaaggatgacatccgccacgccaacatcgtggccgcacgctccgtcgccaacgcggttcgcaccagtctgggccccaagggcatggacaagatgatctccacctcctccgacgaggtcatcatcacaatgacggcgccaccatcctcaacaagatgcaggtcctccagcc

SEQ ID NO: 202217 - DNA, 267 bp, Glycine max
ctattccgctttctctcatccatcatgaaaggaggaaagtccaagaccgaatctaagagagccgatgccaaacttgctgtgaataagaagggcgccgccaccaagactaggaaacccgccggaaaggggaaggcagcgaaagatcctaacaagccaaagaggcccaaaagtgttttcggcgttttcatggaagtcttcaggaaggtgttcaacaaggaacatcccgacaacaaagcagtgtctgctgtgggcaaagctgctagagca

SEQ ID NO: 202218 - DNA, 257 bp, Glycine max
ctaatactaccatcttgtactactggtcggcaatcctctgtgatcttgaacctattgatgtaaacaacccaaacactgattatgcgatgcatcttgatcggccgccagcattcttgcgccaatatatccacaagttcaatgtcctggttctcaacacaggtcaccactggaatcggggaagctcacggctaatcgatgggtaatgcatgttggtggtgtgccaaatactgatagaagatagcagtgatttggggtgc

SEQ ID NO: 202219 - DNA, 278 bp, Glycine max
ctcgagccggaaaaattactcgatttttatttctccaaaatgatcaattttataagattgaatcgactaaaaaatgaaatgaatcatttcatattgatagtattgctatgcttagtgtgcgactcgttagttttttagaacggttccaatttaacaaatttataaaccggttcatcgtataaatgaattaaaaaagaactaataaccaacgcatcgcttcggattatctagactaaagaactagtcaaaacaaaaaagaatataaaaagagatatatt

SEQ ID NO: 202220 - DNA, 276 bp, Glycine max
gtcatcatccgcagctgctgttattcgcaccgcaaacaaacagtgagccatggccgtcggaaagaacaagcgcatctccaaagggaaaaagggtggcaagaagaaggcagctgatccctttgccaagaaggattggtatgacattaaggccccttctctttttcaagtgaaaaatgttggcaaaaccctcgtctctcgtacgcagggtaccaagattgcttctgaaggactaaacatagagtgtttgaggtctccttggctgatcttcaaggggat

SEQ ID NO: 202221 - DNA, 157 bp, Glycine max
gtagcctcagatgttttggctggaatcgaccaagccattgctgatggagttgatgtgatttccatctctatggggtttgatggtgttccactttatgaggacccgatagcaatagcttcttttgcagcaatggaaaaaggggtggtggtttcatctt

SEQ ID NO: 202222 - DNA, 268 bp, Glycine max
cttctccctctcacaaattcccagtcttgtactttctctctggcctcacatgcacggacgagaacttcattttcaagtcgggtgctcaacgcgccgcttccgctgagggagtggccttggttgcccccgacacttctccaagaggcttgaatgtggaaggagaagcagacagctgggaccttggagcaggtgcaggattttatctcaatgctacacaagagaaaggaagaattggcgcatgtatgactatgttgtcaaggagttgcca

SEQ ID NO: 202223 - DNA, 269 bp, Glycine max
  unsure (1)..(269): unsure at all n locations
cagccacaacaatctgaaggcaaagtgtggaatttgttcaagcttccctttcgccattcaacttcaactcctcacaatcacaatcaagtttccacctccaattctgtttcttcctttgccaaatcgctcctcccctcaccacgtcgtcttaagcttgatccttccaacaagctctacttcccntatgagccgggcaagcagggtaggagtgccatcaggattaaaacaccagcaaatccaacgtagcgctncaatttcaaacaaatgca

SEQ ID NO: 202224 - DNA, 262 bp, Glycine max
agcgaagagaatggctcccaagggtttaatctttttggctgtgttatgcttctcagcactgtcactgagtcgttgtcttgcggatgataatggacttgttatgaacttctacaaggaatcatgccctcaggctgaagacatcatcaaagaacaagtcaagcttctctacaagcgccacaagaatactgctttctcctggctcagaaacatcttccatgactttgcctgtcagagttgtgatgcgtcactgttgctggactcc

SEQ ID NO: 202225 - DNA, 276 bp, Glycine max
  unsure (1)..(276): unsure at all n locations
tgctgttgcaaaacttagggttgggcctttttttgaggttttcagcgcttctttctcacaatggttcttcagaatgatattgatttgctgaatcctccagctgagttggagaagagaaagcacaaactcaagcgtcttgttccagtcaccaaactccttcntccagggatgtnaagtgccagggatgcntnnancataacnacggggtttaacccaccnccaaacgttngcgggtgcggaaaannggccgannntgttttggggcaaacnanangg

SEQ ID NO: 202226 - DNA, 186 bp, Glycine max
gaaataatgtccgggatcatccacaagattgaggagaccctccatgtgggagggcacaagaaagaggagcacaaaggagaacaccatggtgagcacaaaggtgaacacaaaggagaacaccatggtgagcacaaaggtgaacacaaaggagaacaacaccatggggagcacaaggagggacttttg

SEQ ID NO: 202227 - DNA, 216 bp, Glycine max
gccgtttctgtgcttttactctgctaccttgtgacaatggtgagggttagtgtgttgaatgatgctcttaagagcatgtacaatgctgagaaacgggggaagcgccaggtcatgattaggccatcctcaaaagtgattataaaattccttttggtgatgcaaaagcatgggtacattggagagtttgagtacgttgatgatcacagagctggaaaa

SEQ ID NO: 202228 - DNA, 138 bp, Glycine max
gctgagagcgacagaaagtggagaagaaaaagatggagaaaatagagcacaaaacggtgaggacgaatggaataaacatgcacgtggcatccattgggtcaggcccagttgtactgttcctccacggcttcccggagc

SEQ ID NO: 202229 - DNA, 270 bp, Glycine max
atcaaagattaagccatgcatgtgtaagtatgaactaattcagactgtgaaactgcgaatggctcattaaatcagttatagtttgtttgatggtatctctactcggataaccgtagtaattctagagctaatacgtgcaacaaaccccgacttctggaagggatgcatttattagataaaaggtcaacacaggctctgcctgttgctttgatgattcatgataactcgtcggatcgcaggcctttgtgccggcgacgcatcattcaaatt

SEQ ID NO: 202230 - DNA, 269 bp, Glycine max
atcaacctacacttcctttttctttttcttctccttctcctctcctgacctttcttcttctcttctcctcccctctccctccctctatcctcatacgttgtttctttcttcttcctccgccgtgacctccttcccggtcgccacggccttcttcttctttcttcccctcagtcgcagtcacggtctccctccccctccgtcacggcctcctccccctacgccggcatgtgtatttttttttattttttatggtcagttgttgctactgg

SEQ ID NO: 202231 - DNA, 267 bp, Glycine max
gtttggacttggactttgaaggttatcatcatcatttatacatctcattattattataagaagttcatcagaaatattcaatggggagctttgaaactgaactgatgaatcttaaggccacagagttgaggttgggactgcccggctgtgatgaaactaatgagaaaagttcatccagtagtggatctgttgttagaagcaacaagagatcttcaccagaacccagtgtggaagagtccaggtgcaactctaatggttcttcagatt

SEQ ID NO: 202232 - DNA, 266 bp, Glycine max
aaagtatcgtgtggagaacttgtatgatggtcctcttgatgatcaatatgcttctgctatcagaaattgtgattctgaaggtcctctgatgctctatgtctccaagatgattccagcatctgataaggggagattttttgcctttggccgtgtattctctggcagggtttcaactggtttgaaggtgaggattatgggacctaattatgtccctggggagaaaaaggatttgtatgttaaaagtgtgcaacgaactgtcatttgga

SEQ ID NO: 202233 - DNA, 263 bp, Glycine max
agttgcatcaacaggctgatcagataatggaaaacatcatcaatgagcataaagaggcaaattcgaaagccaaggatgaccaaagtgaagcagaagaagatcttgtggatgttctcatacaatatgaggatgggagcaagaaggatttttccttagctagaaacaagatcaaggccataattctggacatttttgctgctggaggtgagacaacagcaacaaccatagattgggcaatggctgaaatggtaaagaatccaaca

SEQ ID NO: 202234 - DNA, 262 bp, Glycine max
aagaagacgatctgactcagacccgttatcttcattctactcaatcgatcctcactttttcttgtcaaattaggctagttgcaaagactactcaattagagggtgagaaaatgcagaaagaggctgaagttcagaaacttatggaagagaatgttaggttgagtgcactgcttgacaagaaagaggctcaacttcttgcattgaatgaacaatgcaaggtaatggccttgaacgcttcaaacatgtaaatgccaaagtttta

SEQ ID NO: 202235 - DNA, 261 bp, Glycine max
atcgagccggactgcgtcaactcgtatctccgcgatgacaactctgacatcgttgctactgataccatgaaaaacacagtgtatgcaaaagcaaaggaatgctcagacatactctctgctgaggactttgctattttgcttgataagcactttgtatcattttacaagaaggttactggtgctattgtgaatattgtggaaaaaccatgggagcgtgtcattgtggatggtcaacctcatgaacatggtttcaaacttggg

SEQ ID NO: 202236 - DNA, 267 bp, Glycine max
aacctacctctttttcttctctctcgactacttcaccttcttcctcctcgatcatgtctcacttcaagggcaagtaccatgatgagcttatcgccaatgctgcgtacattggcactcctggaaagggtattcttgctgctgatgagtcaacagggacaattggcaagcgtttggccagcatcagtgtagagatcattgaatccaacaggcgagctcttagggagctgcttttcactgctcctggtgttcttcaatatctcagtggtg

SEQ ID NO: 202237 - DNA, 274 bp, Glycine max
tcgggaacagagaaggagaaagagaatggacgccattgattctgtgttcgatccgttgagagaattcgcaaaggacagcgtgaggctcgtgaagcgctgccacaaacccgatcgcaaagaattctccaaggttgccgtgcgtaccgcaattggtttcgttgtgatgggattcgtgggtttcttcgtgaagcttattttcattccaattaacaacatcatcgtcggatctggttaggatgaagggtatcaaaatcgcctcaggaattcaggttgt

SEQ ID NO: 202238 - DNA, 270 bp, Glycine max
gttcccatcttctctctcgtaccaatcaaatcacacttttgtgttgtgttgggaaaccctaaaccccgttttcggtgagatcgagatcgatcgaacatggatgaggagtacgatgtgatcgtgttgggcacgggtctcaaggagtgcattctcagcggtcttctctccgtcgatggcctcaaggttctgcatatggataggaacgactattacggaggagaatccacttcgctcaatcttattcagctttggaagagattcaggggagat

SEQ ID NO: 202239 - DNA, 266 bp, Glycine max
atcgagccgctcgatccgcgcaacaaaaagaaagaatcccaggcgaggagaaagatggaggggaaggagcatgatgtgtcgttgggagcttacaagttccccgagagacagccgattgggacggcggcgcagagccaagacgacggcaaggactaccaggagccggcgccggcgccgctggttgacccgacggagtttacgtcatggtcgttttacagagcagggatagcagagtttgtggccacttttctgtttctctacatcac

SEQ ID NO: 202240 - DNA, 268 bp, Glycine max
tagcaagccccactcaaccaccacacctctcctcgttcacgctacccctttctgctcttcttctacctttcaagttttaaaagtataaagatggcagagacattcctatttacctcagagtcggtgaacgagggacaccctgacaagctctgcgaccaaatctccgatgctgtcctcgacgcttgcctcgagcaggacccagacagcaaagttgcctgcgaaacatgcaccaaaaccaacttggtcatggtcttcggagaaatcacga

SEQ ID NO: 202241 - DNA, 259 bp, Glycine max
cggctcgaggatgcatcttaatactcactgttgctgagatttagcccctgaaaatttgaaaatagaatataggatttaactgttccatgttttcttctgatctattttcaggatttatgatattaatgtacatttttgaaacttacttggatgtgcgacaacatagggccctcaaacttcctactcttccaaagactttagaaggtgttatcagccaagagaaatttgagaaatctagagcctatagtcttgataaaag

SEQ ID NO: 202242 - DNA, 265 bp, Glycine max
gagataatggctcccaagggtttaacctttctggctgtgttaatatgcgtttcagcactgtcactgagtccttctgttacgggggaagggcaaaataatggccttgttatgaacttctacaaggaatcatgccctcaggctgaagacatcatcacagaacaagtcaagcttctctacaagcgccataagaacactgctttctcctggctcaggaacatcttccatgactgtgctgttcagagttgtgatgcttcactgttgctgg

SEQ ID NO: 202243 - DNA, 270 bp, Glycine max
atcgagccgcgcgagggccgccaattggtgcttatgaactagcaaaagcagtagaagagcttagtgctggtgaaatactacttaattgcatcgattgtgacggtcaagggaaaggatttgatgtagatttaattaagttgatatcagatgctgtaagtatccctgtcatcgcaagtagtggtgccggtgctcctgaacacttgtctgaggtgttctataaaacaaatgcatcagcagcacttgctgctggcatttttcacaggaaagagg

SEQ ID NO: 202244 - DNA, 263 bp, Glycine max
ttataaccaaacactcttcttcatattcttcttcttcttcttgttcttgttctatctgtgacgagcatcatggcctcgagagcagtgctattgttggctatgtgtgtgcttccggccatggttgtggccattcgcccagcaaagaaccctttttgcgtgaagggtcgcgtctactgtgacccttgccgtgctggttttgagacctcagcaaccacctacattgccggtgctgagattatgttgcaatgcaagagcagggttag

SEQ ID NO: 202245 - DNA, 261 bp, Glycine max
ttgctcgaggatgcatcttaatactcactgttgctgagatttagcccctgaaaatttgaaaataaaatataggatttaactgttccatgttttcttctgatctattttcaggatttatgatattaatgtacatttttgaaacttacttggatgtgcgacaacatagggccctcaaacttcctactcttccaaagactttagaaggtgttatcagccaagagaaatttgagaaatctagagcctatagtcttgataaaaggt

SEQ ID NO: 202246 - DNA, 261 bp, Glycine max
ataagaagaagaagaagaaaattacaattgtagatcctgctgatgaacctgtggagaaattggctgagaagacagaaaacctctcagtttccgagggggttgagactgcatttactggtttgaaaaagaagaagaagaagcctgttgaaatgggtaacttgaatgatgagagtggagatgcagttgaagatttggatgatcaccctgaagatgatgaaggagaaatggttgttccccaggctcgttgatccttgggaaggg

SEQ ID NO: 202247 - DNA, 256 bp, Glycine max
aaaggattctacccgccgctcgaagggaattgcgcttcaaggcgtctcgtagggctaatccgcctcacgagggtcaccaacggcacgtgcctttggagggccgaggccccctactgctggtcggcaaacggacggcgggcgcacgcgtcgcttctagcccggattctgacttagaggcgttcagtcataatccaacgcacggtagcttcgcgccactggcttttcaaccaagcgcgatgaccaattgtgcgaatca

SEQ ID NO: 202248 - DNA, 272 bp, Glycine max
tatcgagccgaatcggctcgagaacagcacaaagcgggttactgtcacttcaagctaccatctactctctctctttcttagtggatccttgccagaagttaaaatggcccaagaaactttcctattcacatctgaatcagtgaacgaggggcaccctgacaagctctgtgaccagatctccgatgctgtgctcgatgcatgcttggagcaggaccctgacagcaaggttgtttgtgaaactggtacaagaccaacatggtgatggttttcgg

SEQ ID NO: 202249 - DNA, 263 bp, Glycine max
aaacataataaaacaaaatggaagacacagtttctgcgttgaggtctttgatggtttctcactctccgtcgctggatgccttagtggtgccctctgaagattatcacctgagcgaatatgtgtctgcacgagacaagcgccgcgaattcgtttccggcttcactggaagtgccggcatggcacttataacaaagaaagaagcactgctgtggacggatggacggtattttttgcaggctgagaaagaacttagtgctgggtgg

SEQ ID NO: 202250 - DNA, 266 bp, Glycine max
caaaagcaaaattgatgacttgtccaacctcctctacaagaactatggaacaactatggctggtttaagggcaattggatatgactttgaatatgatgaatatcacagttatgttcatgggagattaccttatgagaatttgaaaccagacccagttctgaggaaccttttgctgagcctgccctataggaaactgattttcacaaactcagacaaagtccatgctgttaaggcactaagcaagcttggattagaagactgctttg

SEQ ID NO: 202251 - DNA, 265 bp, Glycine max
ccaagtgcaggcgttctacttctccctatgcattgtttgtgctcttcttctgctttctacaagtccaggcgattctggaccctgccgatttcctcgctctgcaaaacattcgtaaggctctggaagacatgccaggttccgatttcttttccacttgggatttcacctcagacccatgcaacttcgccggcgtttactgcgactccgacaagatcattgcgctcaacctcggcgacccccggacgggctctcccggcctcaccgg

SEQ ID NO: 202252 - DNA, 153 bp, Glycine max
ttgaagagaatggctcccaagggtttaatctttttggctgtgtaatgcttctcagcactgtcactgagtcgttgacttgcggaggataatggacttgttatgaacttctacaaggaatcatgccctcaggctgaagacatcatcaaagaacaa

SEQ ID NO: 202253 - DNA, 257 bp, Glycine max
tcagaattctctaaaagagatctttttctgctctttgaagaaagaatggtctttgcttgattttggagatgtctctgctctcagatctcatcaaccttaacctctccgataccaccgagaaggtgatcgcagagtacatatggatcggtggatcaggaatggacctgaggagcaaagcaaggactctcccaggaccagttagcgacccttcagagcttcccaagtggaactatgatggttccagcacaggtcaagct

SEQ ID NO: 202254 - DNA, 270 bp, Glycine max
tacacacctcagaagaacagaacagaaccaccacataacagtgcttttcaaaggcggtttgagcaatggcgttcttaaataaaattggaaatctgctcaagaattctgctgtcaagcacatcaatcaggatttttcggcgtctaccccttcacttttccaagcaattagatccatgtcatctgcaaagcttttcgtcggaggtatttcttacagcactgatgatatgagtttgcgagagtcttttgctcgctatggagaagtaattgatg

SEQ ID NO: 202255 - DNA, 265 bp, Glycine max
atttgcttcttcgagtttcacagccaagtcgtaaaagggtttcaagggatggaaaacatgcagagcttctggcaattgggtgatgaactccgtgggcactcaaaagcatcggaggatcacaagtggttaatggttgcctcgaaactggccgaacagacaagattgaagggggagcgtgtgaaaaaccttgatctttcaaagggacccattgaaacaaggtcaagggataaatttgggttccaggaagagaacaaatttgattctc

SEQ ID NO: 202256 - DNA, 151 bp, Glycine max
atgccaagacaaagaagaataaccagtatcgcggaatccgtcagcacgcatggggaaagtgggctgctgagattcgcgacccaagatagggggttcgtgtttggactggaactttcagcactgctgaagaagctgcaagatgttgcgatgc

SEQ ID NO: 202257 - DNA, 257 bp, Glycine max
atctcccaacacagcctgagaactatctccatcgtattggtcgtagtgggaggttcggaaggaagggtgttgcgatcagctttgtcacaaaggatgacgagaaaatgctgtttgacatccagaagttttacaacgtgcaagttgaggagctgccttcaaatgttgctgagctcctttgatcaaattttgtcatccgtcgtattagatgaaattagtttgcgttttggaaactgttatgcaatgtttctcgctccccc

SEQ ID NO: 202258 - DNA, 256 bp, Glycine max
caacaatattatatttcatttcgtgttccttgcttcactctctctctcactgtcttccccgttattctctctccgagcttcactctcttcgcatctgccaaagggagtaaaatggggttctcctgccttctgggtcgtgttctctttgcctcccttttcatcctcactgcatggcagatgtttaatgaatttgatgccaatggtggacccatctcgaaagagttgattcccaaactcactgtggtgaagaaaaatt

SEQ ID NO: 202259 - DNA, 267 bp, Glycine max
aaaatatccattgcacctttctcttcctccgatggctgatatcacactcttgatcttaagtctcctcgtattctccgctagccgtagccaccgtcgaacgaatcaacgatgaagacaaccttctgatccgtcaaatggtgccggacgcggaggaccaccacatgctcaacgcggagcaccacttctccggcttcaagacaaagttcgccaagacctacgcaacgaaggaggagcacgaccaccgattccgtatcttcaagaacaatt

SEQ ID NO: 202260 - DNA, 267 bp, Glycine max
cagctcgagctttctctctcgctcgcaaacgcaaataataaaaaacaaggttttagccatggcatcgaagcggatcttgaaggaactcaaggatctccaaaaggatcctcctacctcatgcagcgccggtcctgttgctgaagacatgtttcactggcaagcaacaattatgggtcctccagacagtccttatgctggaggtgttttcctagtcactattcatttccctccagattatccctttaagccacccaaggttgcattcag

SEQ ID NO: 202261 - DNA, 264 bp, Glycine max
cggattacttcgttgacgagcagaagaagcttggaagcaccaagagcaccaacaacaataatgaacttaaatgcgctattgaccacattttggatgcccagagaaaaggcgagatcaacgaagacaacgtcctctacattgttgaaaacatcaacgatgctgcaattgaaacaactctatggtcgattgagtggggcattgctgagcttgtgaaccacccagagatccagcaaaagttaagggatgagattgacaaagttatag

SEQ ID NO: 202262 - DNA, 261 bp, Glycine max
gatgaccatagggctgggagaatcgtggttgaattgaatgggcggctgaataagtgtggggttattagccctcgctttgatgttggtgtcaaagagattgaaggttggactgcaagactactaccctcaagacagtttgggtatattgtcttgacaacctctgctggtatcatggatcatgaagaggataggagaaagaatgttggtggtaaagtgttgggtttctactactaggcttgcattttgtttgaggttcgctct

SEQ ID NO: 202263 - DNA, 258 bp, Glycine max
  unsure (1)..(258): unsure at all n locations
ggctggtctccagcgtattgaaganaagtacacatggcaaatttactctcagaggcttctcactctcaccggtgtctatggcttctggaagcatgtgtctaaccttgaccgccgtgagagccgccgctatctcgagatgttctatgctctcaagtaccgcaaattggctgagtctgtgccccttgctgctgagtaaactgaggataaagagttggataaagaaatggaggaaccggctttttctttcnccattggagt

SEQ ID NO: 202264 - DNA, 270 bp, Glycine max
ctttctcatcatgtcatcaaatcaagcatcccttaaccttaaccaagccaaatttgcccttccacacaatgtcgattacaagcaacaacaacaacaagcaacaacaactctagagattgaatctgatgaggacacctttgactactcaaaaagatctcaatggctccgcgccgctgttctgggagccaatgatgggttcgtctcaacagcatcaatcatgatgggtgttggagcagtgaagcatgacatcaaggccatgatcctatcagg

SEQ ID NO: 202265 - DNA, 255 bp, Glycine max
tacgatttggatcggaaattccgtggctgttgcagcttcaattggcatgattgcacatcatctatttggtgtctggaatgaagacaggcgactggccataagatatggggaggattttgaattagttaagagtcgaacaagtgttgtcccttttgcagcaatcctcgatggccgacaagagttaccaaaagatttctacaaggagtttgattcgactgccatacttgacagttactgcaataacgttaggtgctt

SEQ ID NO: 202266 - DNA, 270 bp, Glycine max
ccacgcctagggtttctatcgcaaaccctccctacctccaaccaggtcgcgtgcaaagggatttcgaagcttcggaagaaaaaaatgaaacctgatttctgtggaaacctggatttcgacgcgcgtcaatctgacgtggagaggctcttcagaagatacggcaaagttgatagagttgacatgaaatccgggtttgcttttgtctacatggaagatgaacgtgatgctgagtatgcaatcagaaggcttgatagaacagaatttggtaga

SEQ ID NO: 202267 - DNA, 263 bp, Glycine max
ttttcattggaagctatgtgatctggactgctgttgctggagttagatactcaattgagcaaataagaaaaaggagatcttcggttttgtttggccaattatggaagtggtgtggcattcttgtgaagagttctgcacttctgtctatatggatatttgttatcacagtgcttattgggcttctcttagagcttttggtcattgtgccaatgagagttccagtggatgaaagtccagtattcctcctttatgcacactgggca

SEQ ID NO: 202268 - DNA, 267 bp, Glycine max
tatgaaaatagagggtgatcatcatcatcacaaggatgaggacacaagtgtccctgttgagaaagttgaggttgttgaaacagcacatgctgaggaaaagaaggggttcctcgacaacgataaggagaagctaccagggcaccagaagaccgaggaggcaacagctactactcctcctcaacaaccacctgttgcatcattggagcatggtgaaggtgctcatcatgaaggagaggccaaggagaagaaaggtatattagaaaagat

SEQ ID NO: 202269 - DNA, 121 bp, Glycine max
tattctcaacattgtgaaggaaaactttgatttcaggcctggtatgatctccatcaaccttgatctcaagaggggtggaaataacaggtttttgaagactgctgcctatggacactttgga

SEQ ID NO: 202270 - DNA, 247 bp, Glycine max
ttgctgagagaaagaaaaattaggtttttgcatttcgggtcagaaatactcagacatgggaggtggcaatgcccagaagtcaaagatggctcgcgagaagaacctcgagaagcagatggctgccgctaagggaagccaattggattcaaacaagaaagccatgtctattcagtgcaaggtatgcatgcaaacatttatatgcaccacatcagaagttaagtgccaaggagcatgctggagccaaaca

SEQ ID NO: 202271 - DNA, 266 bp, Glycine max
aagttgatgtgtttttgaagctctaagaaaggtgggaagggaaagaggcctgggaaaggtgggaatcgcttttggaagtcaattgggcttggattcaagactcccagagatgccattgaaggaacctatattgacaagaagtgccccttcactggcaatgtttccattcggggtcgtatcctagccggtacttgtcacagtgctaagatgacaaggaccattattgtgaggaggaattatcttcattttattaagaaataccagag

SEQ ID NO: 202272 - DNA, 258 bp, Glycine max
aattcagcaagaaatcatggaaactccaatcaagtatccgggcagtctcacccttacggtggttctcacttgcatcatggcagccagtggagggttcatttttggttatgaccatggagtttcaagtggagtgacctctatggattccttcctgaagcaattcagtccgtctgtgtatgaaaaggagtctaacatgaagccttcttcaaccaagtactgcaaattcaacagtcagatactgacacctgttacatcttc

SEQ ID NO: 202273 - DNA, 243 bp, Glycine max
aatcgcctagggtttctatcgcaaaccctccctacctccaaccaggtcgcgtgcaaagggctttcaaagcttcggaagatcaaaatgtaacctgtactctgtggaaacctggatttcgacgcgcgtcaatccgacgtaggaagggtctttcagaagttacggcaaatttgatagagttgacatgaaatcggggtttgcttttgtctacatggaagatgaagtgatgcagagtatgaaatcaga

SEQ ID NO: 202274 - DNA, 111 bp, Glycine max
cctcctctcgaagctttcatcgttcaacatattctcaccatctcagtcatgggcctgctatcgtgaactagagccaccgtcctgagaaaatgttccaaaggaagctctggc

SEQ ID NO: 202275 - DNA, 259 bp, Glycine max
tatgaatggctcccaagggtttaatctttttggctgtgttatgcttctcagcactgtcactgagtcgttgtcttgcggaggataatggacttgttatgaacttctacaaggaatcatgccctcaggctgaagacatcatcaaagaacaagtcaagcttctctacaagcgccacaagaacactgctttctcctggctcagaaacatcttccatgactgtgctgttcagagttgtgatgcttcactgttgctggactccac

SEQ ID NO: 202276 - DNA, 265 bp, Glycine max
actcgagccgaatcggctcgaggttgctcctgctctagctgctggaacgtacagcaatattgacgccatctgaattggcatcaccgacctgtttggagctggctgaaatatgcagagaagttggccttcctccaggggtattaaacattgctactggattaggcaatgaagctggtgctcctttgtcatctcatcctgacgtagacaagatttcctttacaggaagctctgcaactggaagcaggattatgacagctgcagcaca

SEQ ID NO: 202277 - DNA, 257 bp, Glycine max
gttgcgttgtcggaaaatcaccctcacctgatcactgtggaagtctctaggtgatggccggttcagaacctgttagggcagagggagagactatggctgtggatgctgccccaaggaagccccggattctacttgcaccgagtacgactgttgctgctgtcaaatttgcaaatcttagtcactggttctctgaatgggcagatgtaagagcagtttccacaagtgcatctttgcatttcaatggtagagcagcaatg

SEQ ID NO: 202278 - DNA, 171 bp, Glycine max
tattcgtgcactgccacctttacatttgctcatgacaccccctcccgcatgcaccagtgttcctccccgcgtgagcttaaggttatcttttgtcattaatattagggaccaagtgctacagcttcttgtgttaagaagccgtttgggtcattgttaagtgactcgactctt

SEQ ID NO: 202279 - DNA, 311 bp, Glycine max
gaattcggctcatactcagcgattcggctcagaaaaaagagctcaaaaagtctatggttatcaaaatagactctcaaaaatcatgggaacaccacatctctcatgccaccaataaaaagtacccagttgtggttcatttctctgctttctggtgtgtgccttctatagttatgaatcctttctttcaagaattagcctccacctatgaagatgttttgtttctgacgttggatgtggatgaggttaaggaaattgcttccaagatggaaatcaaagccatgcccacctttctgttactgagtggagggact

SEQ ID NO: 202280 - DNA, 276 bp, Glycine max
gctcctcccttccagataggggctcaaggcagttgggtcgacccaattcagagaatggtggagggcaggacgccaagaatctgagggtcaagcttgttctcttaggtgattctggtgttggtaaaagctgtattgttctacgatttgttcgtggtcagtttgatccaacatctaaggtaactgttggagcttcttttttgtcgcaaacaatagctctgcaagactctacaacagtcaagtttgaaatatgggatactgctggtcaagagaggtatg

SEQ ID NO: 202281 - DNA, 273 bp, Glycine max
ctccacgcgcgcctggcggaggagattcgctccgccgtgagatgcgccggcggggagatcaccatggcggcgatggagaacatgccgctgatgaagtcggtggtgtacgaggcgttccgcatcgacccgccggtgccgttgcagttcgggagggcgaagagggacttgatcatcgagagccacgaccacgcatttcaggtgaaggaaggggaaatgctgttcggataccaaccgtttgcgacgaaggatcctaggatcttcgagagggccgag

SEQ ID NO: 202282 - DNA, 290 bp, Glycine max
cctaagttttcattcaatcatcactgatctaagatatgtctacatctgataagtcagaagtggtggaaaggggtgctaaggatgatgaaaagccaaaggaagaacatgagaagggtggatttcttgatacagtgaaggatttcattcaagacattggtgagaagattgagggagcagttgggtttgggaagccaactgcagatgtcactgggatacacattccatcaattaatcttgagaaggcagagctagttgttgatgttcttataaagaacccgaatccggtgcca

SEQ ID NO: 202283 - DNA, 275 bp, Glycine max
tctcgagccgctcgagccgaatcggctcaggaaaacacaaaagaaaaaaaatgggttattctctgtagacctgtctgattttgttatcacttgcttctgcttccttcgccgccaacccaagagcaccaattgatgtgccatttggcagaaactatgtgcctacctgggcctttgatcacatcaaatacctcaatggtggttctgagattcagcttcatcttgataaatacacaggtactggcttccaatcaaaagggtcctacttgtttggtcac

SEQ ID NO: 202284 - DNA, 274 bp, Glycine max
tgcgtcttcgtggtggtatgcagattttcgtgaagactcttacgggtaagactattaccctcgaggtggagagctctgacaccattgacaatgtgaacgccaagattcaggacaaggaaggcatcccaccggaccagcagaggctgatttttgctggcaagcagctcgaggatggaaggaccctcgctgactacaacatccagaaggaatcaacccttcacttggtcctcggtctccgtggggggttttaagcccgttgtgaaatgggggatgt

SEQ ID NO: 202285 - DNA, 253 bp, Glycine max
cagtggtgccttatcgctgtggttatcatcttcttcttcctctttcttagatctcttctttctctacgccgcacgccgaaaccatggccggaaaaggagagggtcctgctatcggaatcgatctcggaaccacctactcttgcgtcggtgtgtggcaacatgaccgcgttgaaatcatcgccaacgaccaagggaacagaaccacgccgtcttacgtcggattcactgacaccgagcgtctcatcggtgatgc

SEQ ID NO: 202286 - DNA, 301 bp, Glycine max
agaaaaccaagtcaagttctcactttgaagagaaaataacaacgtaaagatgtctgcatcaggaggcagaggaagccaagaggaagagaagaagccttctgatcaaggagcacatattaatctcaaagtcaagggccaggatggtaatgaggttttctttaggattaaaagaagcactcagctcaagaaacttatgaatgcatactgtgatcgtcaatctgtagattttaactcaattgctttcttgtttgatggaaggagactccgagctgaacagacccctgatgagctagagatggag

SEQ ID NO: 202287 - DNA, 283 bp, Glycine max
  unsure (1)..(283): unsure at all n locations
attctcctatccttttacataactctaaagtaagaaaaaatagagcaatntcacaacacaactcttagaattgtgagttaagtatgggaaggtccccttgctgtgagaaagctcacacaaacaaaggtgcatggactaaagaagaagatgacagactcatatcttatattcgagctcacggagaaggctgctggcgttcactccccaaagccgcgggtnttctccggtgcggaaagagcccccgnggnggnanaatcnccccccnnccnanaaganttttttt

SEQ ID NO: 202288 - DNA, 272 bp, Glycine max
ggaggatctttacttttctgcaattttaagcaacgaacaagagtataatccagatttctacaattggaatagagtcaaggttaggtactgtgatgggtcatcgtttactggtgatgtggaagaagttgatcaaacaaccaatttgcacttcagaggagcaaggattttttcagctgtaatggaagaattactagcaaaaggattggaaaaggctgaaaatgctattctctctggctgttcagctggaggactgactacaatattacactgtg

SEQ ID NO: 202289 - DNA, 271 bp, Glycine max
atggctcccaagggtttaatctttttggctgtgttatgcttctcagcactgtcactgagtcgttgtcttgcggaggataatggacttgttatgaacttctacaaggaatcatgccctcaggctgaagacatcatcaaagaacaagtcaagcttctctacaagcgccacaagaacactgctttctcctggctcagaaacatcttccatgactgtgctgttcagagttgtgatgcttcactgttgctggactccacaagaaggagcttgtctg

SEQ ID NO: 202290 - DNA, 281 bp, Glycine max
caattttcttcgtctgtgtaacaaacacttcaacaatctactctatacccgatttacaagatgagttcatttagccaaaatccctatgttttagttctgttcctcgttctcactgtgtggatatcccgtgtaatgtctcgcgggctcattacatctgagagacatgagaaatggatggcacaatatggtaaggtttacaaggatgctgcagagaaggagaaacgtttccaagtattcaaaaacaatgtgcagttcattgagtcattcaatgctgctgggga

SEQ ID NO: 202291 - DNA, 278 bp, Glycine max
cgcgttcttttctacggagcctcgaccaagaagaatcgcagtgagaagaagagggggtgagagtgagaaagagaaagagagaattcgtaaaccctaatttcggaaagatcggcgatgactgcctccaaggatcgcgagaacttcgtctacatcgccaaactcgccgagcaggccgagcgttacgaagagatggtggaatcaatgaagaacgttgcgaatctcgacgttgaactgacggtggaggagcggaatttgctttctgttgggtacaagaatgt

SEQ ID NO: 202292 - DNA, 273 bp, Glycine max
tagagcatttgttcggtccaaaaccctaatcagcgttgcttccaatcgcatctcgtcttcaggaccaacatcgttgaatccatggcaacccctttacttgtataggcagaagcaacaagaagcttcccactcctccagctgcaacagcggcaacaccccattcgggtcaccaactcgagtccagaagctaatagcctcccaatcagaccctcttctggccaaagaaatcttcgacttagcctctcgccaacccaagttccgccacacttactc

SEQ ID NO: 202293 - DNA, 271 bp, Glycine max
ctctgcgctctctctctctgtctcctacgattcgttttgccccttttgttgccctaatttcaaccatgcctcgccgtagctccggtggaagatctgcccgtcctgctcctcgggcagctcctcgtcctgctccagttcaccatgctcctcctccagcccctgctcagagtggtggtggatctatgcttggtggcattggttcaaccatagctcaaggtatggcttttggcaccggaagtgcagtggcacacagggctgtggatgcagtcat

SEQ ID NO: 202294 - DNA, 245 bp, Glycine max
tgcgtaaccatgcggataagaatatagtcatcattcttataggaaacaaaagtgatcttgagaaccagcgtcaagtacccacagaggatgcaaaagaatttgccgagaaagaaggcttatttttcctagagacctcagcactggaagcaactaacgttgaaacagctttcatgactgttttgacagaaatattcaacattatcaacaaggagaacctagctgctagtgataatccgggaaatgac

SEQ ID NO: 202295 - DNA, 280 bp, Glycine max
gagaaagtgaaagtgtctgagagtgtgtgtgtgacttatggagtccaattcagagttcgacgtgattatcatcggagctggcgtcatgggcagctccaccgcctaccacgccaccaaacgcggccttaaaacccttctcctggaacagttcgacttcctccaccactgtggctcctcccacggcgaatcccgcaccatccgcctcacctatccccaccactactactaccctttagtcatggactcttaccgcctctggcaagaggcgcaggcccaagtc

SEQ ID NO: 202296 - DNA, 286 bp, Glycine max
tctcgagccgattcggctcgagaaaaaagagctcaaaaagtctaacgttatcaaaatagactctcaaaaatcatgggaacaccacatctctcatgccaccaataaaaagtacccagttgtggttcatttctctgctttctggtgtgtgccttctatagttatgaatcctttctttcaagaattagcctccacctatgaagatgttttgtttctgacgttggatgtggatgaggttaaggaaattgcttccaagatggaaatcaaagccatgcccacctttctgtta

SEQ ID NO: 202297 - DNA, 257 bp, Glycine max
gaaaaaataaaatctggataaatgccaatacttattacgggtataaggatagaaattgaaataaataattctcgtggccccgaatcaaaaaaataagaatttggtgtattaaaaagcttgtatccatagaacatttgacgtaacatagataatgaataaataggagttaatatcattccaattgctgttacaaaagttattagtatttttgtgattaaaagatatttttggctagtaattatccccaataagactat

SEQ ID NO: 202298 - DNA, 253 bp, Glycine max
aaaatgtcgtcgttgataacagatttgctccgtcaaaccggcggcaccgccgtcatcgacggcggtctggcgacggagctggagcgccatggcgccgacctcaatgatcctctttggagcgccaagtgcctcttttccttccctcacctcattcgccaagtacaccttgattacctggaaaatggtgcagacattataatcacagcatcttaccaagccaccattcaagggtttaacgccagaggctattctg

SEQ ID NO: 202299 - DNA, 278 bp, Glycine max
cccaatcttcaccttcgcccacaacaaatcccattcctgcatctcctccttcagcatcgctgcaaactttactttccatttttgtccttcctccccgagaaaaaaatggcgaacgcagcatctggtatggccgtccatgatgactgcaagctaaagtttttggagctcaaggcgaagaggacgtaccggtttatcgtttttaagattgaggagaagcagaagcaagttattgtggagaagctgggtgagcctgcaaatggttatgatgatttcgctgc

SEQ ID NO: 202300 - DNA, 270 bp, Glycine max
gctccttcttctctaaacactcatctatgactacctttcgctcccctccttcaccatcttcttcttcttcaattccttctccaagatcgagcatgttttactatgctggaagtgaagatcactctgaggagcctcacttcctccaagcttgttttctttgcagaaaaccactcggccaaaaccgtgacatcttcatgtacagagggaacacaccattttgtagcaaagagtgcagacaggaacaaatagagattgatgagtcaaaggaga

SEQ ID NO: 202301 - DNA, 223 bp, Glycine max
ttttgatgcaacgctgtcaatgtagaaaggatctctatctacgaaggagcggaataaaacccttctctctgtgattaagagagatggcttcagatcggaaacttcacacttttgaagaggtggcaaagcacaaccagaccaaggattgctggctcatcatttcctggaaggtgtatgatgtcacccctttcatggaggatcatcccggaggtgatgaggtttt

SEQ ID NO: 202302 - DNA, 245 bp, Glycine max
gcgaagagaatggctcccaagggtttaatctttttggctgtgttatgcttctcagcactgtcactgagtcgttgtcttgcggaggataatggacttgttatgaacttctacaaggaatcatgccctcaggctgaagacatcatcaaagaacaagtcaagcttctctacaagcgccacaagaacactgctttctcctggctcagaaacatcttccatgactgtgctgttcagagttgatgcttcac

SEQ ID NO: 202303 - DNA, 240 bp, Glycine max
gagatcaaccttgcatcagggttagggaatggctgctatcttagctcggaaatcactccttgctcttcgtgcgcgccaattggctgtaagcggtcaagggctgcacagctcccaaaactatggccttcgattaagtgcacactcctactctaccaaaagagaggatgaagaaagggagcaactcgcaaaggaaatttcaaaggattggagttctgtttttgaacgtagcatcaacactct

SEQ ID NO: 202304 - DNA, 276 bp, Glycine max
cggctcgaggtaacttctccacagcgcagagcagagcaacgtttttttatttattattattattagaagaaatgggagttggaggcacactggagtacttgtctgatctaatgggcagtggccaccaccaccacaagaagaagaagaagcagttccaaaccgtggagctaaaggtgagaatggattgtgatggttgtgagcttaaggtcaagaacgctctctcctcactaagtggggtgaaatctgtggagataccccgaaagcagcatattgtga

SEQ ID NO: 202305 - DNA, 279 bp, Glycine max
cttcttgtttggtgccttctgttctggagctagcaaaacaacccatcatcgaagttccagaacgatatgttcatgccaatcaagatccacatattctttccaacacaatttctttaccacaagttcccatcatagacttgcatcaattgttgtctgaagatccaagtgaactagagaagctggaccatgcgtgcaaagaatggggtttctttcagcttataaaccatggagtggaccctccagtggtggaaaatatgaagataggtgtccaaaattctc

SEQ ID NO: 202306 - DNA, 276 bp, Glycine max
taaggctttgcatttcatttgagagagagagcgtcttacctttccattatcaaaatggctgtttcggctatcacaggagcgaggctaaccctagggatagggttggcgatacctctttcctctcccacgcgctctcgaaccgtcgcaatggccgtatccgtcgaccccaagaccgacaacaaactcactcttaccaagtccgaggaagctttcgctgctgccaaggagctgatgcctggaggtgtcaactccccagttcgtgccttcaaatccgtg

SEQ ID NO: 202307 - DNA, 270 bp, Glycine max
gcaagatggtgctttggaggacgtggaggctatatttgcagctcatgtatcccatgaacatccaactggtataattggctcaaggcctggacccctccttgcaggttgtggattcttcagagctgtcattagtggcaaaaagggtcttgctgccaatcctcaccgttctgttgatccagttttggctgcttcagctgcagttatcagcttacagggtattgtctcccgcgaacaaatccattggattctcaggttgtctctgtgacttcg

SEQ ID NO: 202308 - DNA, 275 bp, Glycine max
gaaagttttgaggctaaggtcgcagattttggacttgcaaaattttcatcagacacagacacccatgtttctacccgagtgatgggaacttttggatacatggctccagaatatgctgctagtgggaaactcactgaaaagtcagatgttttctcctttggtgttgtgcttttggagttgattactggacgaaaacctgttgataaaactcaaaccttcatagatgacagcatggttgaatgggcgaggctttactgatccagctttggaaatgg

SEQ ID NO: 202309 - DNA, 281 bp, Glycine max
ctcaaacattgtttgttgtaggaagaggaatcttgagaaatggcaggggacagcaagagcaagattctgttcatcggagggactggttacatcggaaaattcatcgtggaagccagcgccaaagctggccacccaactttccttttggtgagggagtccactctctccaaccccgcaaaatcacccctcatcgacaatttcaaaggcctcggtgtcaatcttgttttaggagatctatacgatcaccaaagtttggtgagtgctataaagcaggtcgatgt

SEQ ID NO: 202310 - DNA, 285 bp, Glycine max
ctttatctaaaaaaattcggtgagtttgtgaagacaaaaaatcactagctactcaaaaatggccacagtaggaaggaacgttgcagctcctttgctgtttcttaacttgatcatgtattttattgttcttggctttgctagttggtgcctcaacaggttcatcaatggccaaacttaccaccctagttttggtggaaatggtgcaaccatgtttttcttaaccttctccatactagcagctgttctgggcatcgtgtccaaacttttgggtgggaatcaatgagg

SEQ ID NO: 202311 - DNA, 271 bp, Glycine max
cctgagcttccattgtgctcactcatctcttacaacgaaaccctcttcatcttgttctatctgtgacgagcatcatggcctcaagagcagtgttattgttggctatgtgtgtgcttccggcgatggttgtggccattcgcccagcaaagaaccctttttgcgtgaagggtcgtgtctactgtgacccttgccgtgctggttttgagacctcagctaccacctacattgctggtgctgagattatgttgcaatgcaagagcagggttaccaa

SEQ ID NO: 202312 - DNA, 269 bp, Glycine max
tttgtacctgagttcaaggttaacaccaaataacacatatagtgcagattcataagctttcaaccatggaggatccaaatcaagctcaagaagggtcttctcagaagaaaatgggaagagggaagattgaaatcaaacggatcgagaacaccaccaataggcaagtcaccttctgcaagcgccgcaacggtttgctgaagaaagcttatgaattatcagttctgtgtgatgcggaagttgcccttgttgtcttctcaacccgtggccgt

SEQ ID NO: 202313 - DNA, 262 bp, Glycine max
cggattctccctgccactacaaattcccaacttcgcaaaccctaggcagcagcagcagcagcaacaacaacagcaacgaagaattcgaagagaaatcaaatcgaatctcatttgatctgtgtgtggttgcggcggcggcaatggcggagcacttggcatcgatattcgggacggagaaggacagggtgaactgcccgttctacttcaagatcggcgcgtgcaggcacggcgaccggtgctcgcgtctccacacgaagccgag

SEQ ID NO: 202314 - DNA, 265 bp, Glycine max
gttgggatctccatacgccggatctgctaaaatacgcttgatccatatgggcctcctcgaccacttgtgggacgacaccgtcgccggcccaaggccggaaaacggtctcggcaagctccgaaaacaccacaccttcactttccgacctagctccggcaaggaaacggagggcgggagcgtgagatcgtacggagacgaatcgtcggaggaagcgacgagagtgacgcgtagtatcatgatcgtgaaaccgcccgggtacagagtg

SEQ ID NO: 202315 - DNA, 271 bp, Glycine max
ctccgcaccagtttcaccgcacgaatatcttgttgtttggagcgatccgagaaaaactctgtaaacatgttggtttaccaggacctccttacaggtgatgagcttctctctgactccttccgttacaaggaaattgagaatggaatgctgtgggaagttgaggggaagtgggttgttaaaggagcagttgatgtagacattggtgcaaacccttctgctgagggtggaggagaagatgagggagttgatgatgcagctgttaaggttgttg

SEQ ID NO: 202316 - DNA, 283 bp, Glycine max
gtttggtatatcagtacccttggtctttgttggcagttacttgggttttaaaaagccagcaattgaagacccagtgaagactaataaaattcctaggcaggtacctgagcaggcgtggtatatgaaacctgtcttctcaattcttattggaggcattcttccatttggggcagtgttcatcgagctcttctttatcctgacatcaatatggctgaaccagttctattacatctttggcttccttttcatagtgtttgtgatcctattaatcacctgtgccgag

SEQ ID NO: 202317 - DNA, 266 bp, Glycine max
aactcgagcgaatcggctcgagaatggctcccaagggtttaatcactttggctgtgttatgcttctcagcactgtcactgagtcgttgtcttgcggaggataatggacttgttatgaacttctacaaggaatcatgccctcaggctgaagacatcatcaaagaacaagtcaagcttctctacaagcgccacaagaacactgctttctcctggctcagaaacatcttccatgactgtgctgttcagagttgtgatgcttcactgttg

SEQ ID NO: 202318 - DNA, 268 bp, Glycine max
cagctcgagcggttcgaacaagcagagcgaccttgaagagctatggctgtcggaaagaataagaggatttccaagggaaagaagggtggcaagaagaaagccgctgatccctttgccaagaaagactggtacgatatcaaggccccttccctcttccaggtcaagaatattggcaaaaccctcgtctctcgtacccagggaaccaagattgcatccgaagactcaaacatcgggtttttgaggtctcattggctgatctccaagggga

SEQ ID NO: 202319 - DNA, 269 bp, Glycine max
gttactatctataattaattaaattcctcgtggaatattgaagaagccatgtctacagctgggcaggtcatcaagtgcagagctgcggtggcatgggaagcagggaagccactgtcaatagaaaccatagaagtggcaccaccccagaaaggtgaagtgcgtttgaggatcctcttcaactccctttgccgtagtgatgtttattggtgggatgctaaggaccagactcctctgtttcctcgtatcttaggccacgaagcttcagggat

SEQ ID NO: 202320 - DNA, 262 bp, Glycine max
cacaacacggcactgagttattagtaattgtgttgtgttgtgttgagcagagagaaggatcaagaaaggataagaagaaagagggaatagggttagggttagggttagggttaggttgaggatgccgaagaacaagggaaagggaggtaagaacaggaagaggggaaagaacgaggcggacgacgagaagcgagagctggtgttcaaggaggacgggcagtatacgcgcaggtgctccggatgctgggtaacgggcggtgcg

SEQ ID NO: 202321 - DNA, 268 bp, Glycine max
gtcatcgctgccatacgtcaactcgcttcgatcctctcacgcttcggctctcccttggccaacttccgcctcagcaccgccatcgccgactgcctggacttgctcgacctctcctccgacgtcctctcctgggccctctcggcctctcagaaccccaaagggaagcataacagtacggggaacctgagttcggatttgaggacatggctaagtgcggcgcttgcgcatccagagacgtgcatggagggattcgaagggacaaacagca

SEQ ID NO: 202322 - DNA, 266 bp, Glycine max
aaaagagggtcgctagttacaaggtctatgctgttgaaggaaaactcaaaggctctctcaggaagagtttcaagtggttcaaggacaggtgcaacagagttgtctatggctggtagttattacaacaacaacaacaactatgggtgttttatataatgtaagaataataattttataatttatttggctttgtttatctatttgctgcacttagtgtttcttttctgtggctgctaaagtaccacataaagggtgtaatatggaag

SEQ ID NO: 202323 - DNA, 269 bp, Glycine max
actcgagccgaatcggctcgaggcttgtctcaaagattaagccatcaatgtgtaagtatgacctaattcagactgtgaaaactgcgaatggctcattaaatcagttatagtttgtttgatggtatctactactcggataaccgtagtaattctagagctaatacgtgcaacaaaccccgacttctggaagggatgcatttattagataaaaggttaacacaggctctgcctgttgctttgatgattcatgataactcgtcggatcgcac

SEQ ID NO: 202324 - DNA, 261 bp, Glycine max
attacttaatactgctaacaaccatagacacaaaagtgcatatacttcacaaccatgggaaccgagactccgacgagtggaaatcctattgcttcatggggagaaaaggttgctttcccagcagcagagattgataaaagaacaggggagcagaaggcaattgatgattggcttcccataacttcttcaaggaacgcaaaatggtggtactcagcttttcacaacgtcactgccatggttggagctggtgttctaagcctt

SEQ ID NO: 202325 - DNA, 272 bp, Glycine max
gcagcggcaggttgtcagaagcttctggaattgagcacgaagatcgtcgctgttggcagaaactacgctgctcatgccaaagaactaggcaacgccgttcccaaggagccggtgttgtttctgaaaccgacgtcgtcttacttgagtaacggcggaaccattcaaatcccacacaacgagggctctctgcatcacgaggttgagctcgctgtggtcatctccaagaaagcccgtgacgtctccgaatcctctgccatggattacgtcgccgg

SEQ ID NO: 202326 - DNA, 268 bp, Glycine max
gcattgggagatagaaagagagagagaaatagagagagagaaagacccttacccttctctatcgctcgctttcctttgacgcttctgacccttgctttgtctgcgtcttccttctttctttctttctttctctgtgtgtcgtaatggctctcccagactcttcttcccgtcgcaactccctgatcccctccttcatctactcctcttcctccaaaacgctccctctccaccacatgctcaacaccgcctccgctgccgccgccgccgc

SEQ ID NO: 202327 - DNA, 266 bp, Glycine max
gtttcctgtagcttgagaaatggcacaagaaacctttctattcacatctgaatctgtaaacgagggtcaccccgacaagctgtgcgaccagatctctgatgcagtgctcgatgcgtgccttgaacaggaccctgacagcaaggttgcctgtgagacatgcaccaagaccaacatggtcatggtctttggagagatcacaaccaaggccaacgtagactatgagaagattgtccgtgacacatgccgcgaaattggattcatctctg

SEQ ID NO: 202328 - DNA, 259 bp, Glycine max
ccttcaccaaccatttttaggcttctctcttcccccgatcgctactctttttcttctggacaattattgcttccgtcctcctgattcaatttggaattctgcctttgactgcagatttcggtgggttttaggttagcaacatgtcaatgagtgagcggaagactattgacctagaacagggatgggatttcatgcagaagggcatcaccaagctcaagaacattctagaaggcttgcccgagcctcaattcagctccga

SEQ ID NO: 202329 - DNA, 269 bp, Glycine max
caacttttcacacatgaccatgctacctcattcattaactatgattgcaacactaataatcatttttcttgcacaaacacttgtgggggtgagttcacttcctgaagctgataaaataaccaatttgccggggcagccacgggtcgaatttcagcaatattctggttatgtcaccgtggatgatcaaaatcaaagagctttgttttactactttgttgaggctgaagaaaacccttcttccaagccattagtcctatggttgaatggag

SEQ ID NO: 202330 - DNA, 272 bp, Glycine max
cttcaatggccaacgatcggggaagttaccgaagcataacaatgtgtcttggaggggaaactcggggatgcaagatgggaaatcttcggatcattctgctgcgattaaggatctggtgggagggtactatgatgcaggggatgctatcaagtttaactttcctgcttcgttttccattactatgttgagttggagtgtgattgagtacagtgcaaagtatgaggctgctggggagcttgatcatgtgaaggagattatcaagtggggtactg

SEQ ID NO: 202331 - DNA, 267 bp, Glycine max
ggatgctaagaaagttgcggcttctattttggaagatcctaataatgcaggccgagctgcgtacctagctgcaaggaaagagcagtctgcactcagggctgtgattaaatgcattgaagaatacaaacttgaggatgagttccctccagaaaatctgaagaagcgacttgaccagttagagaaggtgaagaccgagaaaaggaaaccagtggcagttcctgccaataagagaactagagcaagcaacggcaatggaggtccaatgcc

SEQ ID NO: 202332 - DNA, 266 bp, Glycine max
gcgcgatcgcgaatcccgatgagagtcgcatggtgggacactattggctgagggaccctaagcgtgcgcccaactcgttccttaaaacgcagattgagaacactctcgacgctgtttgcaagttcgctaacgacgtcgttagtggtaagattaagcctccttcgtctccggagggtcgatttactcaaatattgtctgtgggaattggaggttctgctcttggaccacagtttgttgcagaagcattggcacctgataatcctcca

SEQ ID NO: 202333 - DNA, 265 bp, Glycine max
gtagcagcaattcacactggtctttgcttctcgttactcatttctcacctaactttctattcttctcagtctcagatcagaaccttagccatggcagcgttccagaagatcaaggtcgccaaccccatcgtcgagatggacggagatgaaatgactagggttatctggaagtcaatcaaggacaagctcattttgcccttcttggagttggacatcaagtattatgacttaggccttccttaccgtgatgagaccgatgataaag

SEQ ID NO: 202334 - DNA, 266 bp, Glycine max
gtgaagagcgaagagaatggctcccaagggtttaatctttttggctgtgttatgcttctcagcactgtcactgagtcgttgtcttgcggaggataatggacttgttatgaacttctacaaggaatcatgccctcaggctgaagacatcatcaaagaacaagtcaagcttctctacaagcgccacaagaacactgctttctcctggctcagaaacatcttccatgactgtgctgttcagagttgtgatgcttcactgttgctggact

SEQ ID NO: 202335 - DNA, 268 bp, Glycine max
ctcagctcatagcattcttcttcttccaacgagaatcagtctttgtgttccaaatggctcgtacgaagcaaacagcaagaaagtccaccggaggaaaagctccaaggaagcagctcgccaccaaggcagcacgtaagtccgctccggcgacgggcggcgtgaagaagccccaccgtttcaggccggggacagtggctctgagggagattcggaagtaccagaagagcacggagcttctcataaggaagcttcctttccagaggctcgt

SEQ ID NO: 202336 - DNA, 264 bp, Glycine max
attacttaatactgctaacaaccatagacacaaaagtgcatatacttcacaaccatgggaaccgagactccgacgagtggaaatcctattgcttcagggggagaaaaggttgctttcccagcagcagagattgataaaagaacagcggagcagaaggcaattgatgattggcttcccataacttcttcaaggaacgcaaaatggtggtactcagcttttcacaacgtcactgccatggttggagctggtgttctaagccttcct

SEQ ID NO: 202337 - DNA, 261 bp, Glycine max
tcttcttattctccactaatagcttcttcttcggctacttgagaccttgctgcaaaggttctctcttagcttagtaacaatgggtttgaaagcactttttgtttggtgcattatatggttaggtttagcacatttgtcccttggaggaagagtgaggcactacaagtttgatgtggagtacatgatcagaaagccagattgcttggaacacgttgtgatgggaatcaacggccagtttccaggcccaactattagggctga

SEQ ID NO: 202338 - DNA, 262 bp, Glycine max
gaaatttaagtgaggagctagagaatgatgatgaagtctgctatgtgtgcagtggtggttgtagcacttcttcttctggcggaggtggggcccatggctgaggctgtgacatgcaccccaacagagttgagtccgtgtcttccagcaatcacttccggtgctaaaccttccaatgcttgttgcacgaagctgaagcagcaaaaaccatgcttatgtggctacctcaaaaacgctagcttgaagcagtatgttaactctccta

SEQ ID NO: 202339 - DNA, 262 bp, Glycine max
ctcagtctctgtgtttgcggctgaggattccgaacgagtgaccttcttcgtttctcgcaaagtttaagtaatcatgggtaaggaaaaggttcacatcaacattgtcgtcattggacatgtcgactctgggaagtcaactaccactggtcacttgatctacaagcttggaggtattgacaagcgtgtgattgagaggttcgagaaggaggctgccgagatgaacaagaggtcattcaagtatgcctgggtgctcgacaagctc

SEQ ID NO: 202340 - DNA, 233 bp, Glycine max
cacatttgttcactcttcttctcttgcggctagggtcagaccgcactgtcttctagacttgaagaaaatgggtaacgagaaggttcacatcagtattgtcgtcattgagccatgtcgactctggggaatccactaccactggtcacctgatttgcgagcttggaggcattgacaggcgtgtgattgagacgtttgagcaggaagctgctcagatgtacaagaggtctttcaag

SEQ ID NO: 202341 - DNA, 265 bp, Glycine max
cgcaaacctaattactgctattacgagacgacgcagatttagttcggattgttcgattgcgatggctaggaagatgcttatcgatggtgaagctgaattggctcaaggtggtggagaagaagtgtcgaattttgacttcgacttgtttattattggggctggaagtggtggcgttcgtgccgctagattttcatccaattttggagctaaggtggggatttgtgagcttccatttcatccaattagttcacgaacaattggaggg

SEQ ID NO: 202342 - DNA, 263 bp, Glycine max
gttggcgctaatctccaaagcggtgatattattattgggaagtgtgctgaatccggtgcagacaatagtgtaaagttaaagcacactgaaaggggttatgtgcaaaaggttgtgctgtcttcaaatgacgagggtaaaaattttgctgtggtttcattaagacaggttcgtagtccagttcttggagacaagttctccagtatgcatggtcaaaagggagttttgggatttctggagtctcaggaaaattttcctttcacaag

SEQ ID NO: 202343 - DNA, 269 bp, Glycine max
cattactctctcactttctccaatatggcttcttctcgaaatgagttttatgcacttatggtagtggtggtggttggctccatagtggcttcctgtggtgctaacttcaaccaagactttgatctaacttggggtgatcagcgtgctaagatattcaatggtggacagcttctatctctttccctggacaaagtctctggctctggcttccaatccaagaaagagtacttatttggaaggatcgatatgcagctcaagctcgttgctgg

SEQ ID NO: 202344 - DNA, 264 bp, Glycine max
ctcaaactttgtaacttcaaaacatactcctctgttctctctgtttctcttcaatcttcctgaaaaaacaaaaacacgaaaaatcatccaccctctcacattctctctctctctcctttcaactaatatggcaattgaaaaccaagacaacactgtcagagaaatcaagccaaagaacaggagaatcatgggtgctggaggccctgatgatgacgacaataggtggccaccgtggttgaagccactgctgaaagagagcttctt

SEQ ID NO: 202345 - DNA, 259 bp, Glycine max
gtgaagagcgaagagaatggctcccaagggtttaatctttttggctgtgttatgcttctcagcactgtcactgagtcgttgtcttgcggaggataatggacttgttatgaacttctacaaggaatcatgccctcaggctgaagacatcatcaaagaacaagtcaagcttctctacaagcgccacaagaacactgctttctcctggctcagaaacatcttccatgactgtgctgttcagagttgtgatgcttcactgttg

SEQ ID NO: 202346 - DNA, 261 bp, Glycine max
ctgcgtcgagacataaaggggtcaaaccttttaattgataaaaatgggatgcttaagattgcagattttggtcttgccaatttttatggtccagatcgtcaccggcctctcacaagccgggttgtgacactatggtacagagctcctgagttattgttaggtgacacagattatggagttggtgttgatctatggagtgctggatgtctcctggcagaaatgtttacaggaattccaatcatgcctggcagaaatgaggtt

SEQ ID NO: 202347 - DNA, 261 bp, Glycine max
gtacaggagtgatatctttggggagagaggaattttacttggtgctgttcatggagttgtggaatccttgtttaggagatacactgataatggaatgaacgaagatctggcctataagaatactgttgagtctataacagggattatatctaaaaccatctcaactaagggcatgctagctgtatacaatgctttatctgaagatgagaaaagggaatttgagaaggcttatagtgcttcttattatccttgcatggaaat

SEQ ID NO: 202348 - DNA, 263 bp, Glycine max
cctgattaaagatattgatacattgggcatcaaatatgaacaaattacatatacatcagattacttccctgagttgatggaaatggctgaaaaattaattcgcgagggtaaaacatatgttgatgacactccacgtgaacaaatgcaaaaagagagaatggatggcatagaatctaaatgcagaaataatatagtagaggagaatctaaaactgtggaaggaaatgattgcaggaacagagaggggattgcagtgttgtgtcc

SEQ ID NO: 202349 - DNA, 259 bp, Glycine max
gcaagaatggcacttcgttgcttggtgatgtccctttctgttctcttcactcttggtcttgcgagagaaagccatgccagagacgaagatttttggcatgctgtttggccaaacactcccattccaagttcattgcgagatcttctaaagcctggccctgcaagtgttgaaatcgatgatcaccctatgcaaattgaagaaacacagtacccgaaaaccttcttctataaagaagaccttcatccaggcaaaacaatga

SEQ ID NO: 202350 - DNA, 258 bp, Glycine max
gcactctaaaacatatctttatttccttgtctacatatatcttgaaaaactcaatcatggctagtgtttcttcggtttcagctccatttagaaggcttgaggggaaggtggcgattatcactggtggtgcgagtggtctaggtgcagccactgcaagactcttctctaagcatggagcacatgtagtcatagctgatattcaagacgacttgggtctctctgttgccaaagagttagaatccgcttcctatgtccatt

SEQ ID NO: 202351 - DNA, 259 bp, Glycine max
aatcgctcttcttccatcctttcctctcctctctccgcatttcccaagagcagatattagaagatggcagacgctgaggatattcaaccccttgtttgcgacaatggaacaggaatggttaaggcaggatttgcaggagatgatgccccacgtgctgtgtttcctagcattgttggtcgtcctcgtcacactggtgtgatggttggtatgggccagaaagatgcatatgttggtgatgaagcacagtctaaacgtggta

SEQ ID NO: 202352 - DNA, 253 bp, Glycine max
gagagaacttcaactgagggtgagagtgacacaaatctagggagcactactctaaaagttctattagattcttcaaaacatgaccatgcatcgcgagtcttgggcttttgtcttcggcgttatgggcaacatcatctcctttggagtgttccttgctccattgccaaccttttaccaaatctacaagaagaaatccactgaagggttccagtcacttccttatgttgttgcactgttcagtgcaatgctttgg

SEQ ID NO: 202353 - DNA, 258 bp, Glycine max
gttcctctcgcccagaatccgagatcaaccccgacgaaggcaaggggtttttctcggcttcttcagatttctgaaatggcgcctgtttcagctttagccaagtacaagctcgtcttcctgggtgaccaatccgtgggcaaaaccagcatcatcactcgcttcatgtatgataaattcgataacacctatcaggctacaattggtattgattttctatcaaaaactatgtatcttgaagatcgaactgttcgactgcag

SEQ ID NO: 202354 - DNA, 259 bp, Glycine max
cttctccttctctctctctttttcgcctcattccattttcatctatcaatggctccagtagcagcagcatcttcagattcaatcaagccaagagatgtttgcatcgttggtgttgcacgtacaccaatgggtggatttcttggtactctgtcatctctatctgccaccaagctaggctctatagctattgaagctgctcttaaaagggccaatgttgatccatcccttgtggaagaagtattttttgggaatgttctta

SEQ ID NO: 202355 - DNA, 258 bp, Glycine max
gaaaatgtcagtggtggttgtggttattggtgtcggtgtttgcactgtaactgatgtaaaagttaacctcaaaggtttcatgtgtgcctgtatagcagttttgtcaacatctttacagcaaatttcaataggttctcttcaaaagaaatattcaattggatcttttgaattgctgagtaaaactgctcccatccaagcgctttttcttcttattcttggtccatttgttgattactacctcagtggcaaattgataac

SEQ ID NO: 202356 - DNA, 263 bp, Glycine max
gtgatcggtgttcacttgatctcatcataatcgtcagcgtcaattgaagaagatgccgatcagaaacatcgccgtcggaaggcctgaagaggcgactcaccccgacacgttgaaggcggctttggctgagttcatctcaaccttcatcttcgtgttcgccggctcaggctccggcatcgcctacaacaagctcaccgacaacggcgctgccacccctgccggcctcatctccgcctccatcgcccatgcattcgccctcttcg

SEQ ID NO: 202357 - DNA, 266 bp, Glycine max
ggccaggcaagccccactcaaccaccacacctctcctcgttcacgctacccctttctgctcttcttctacctttcaagttttaaaagtataaagatggcagagacattcctatttacctcagagtcggtgaacgagggacaccctgacaagctctgcgaccaaatctccgatgctgtcctcgacgcttgcctcgagcaggacccagacagcaaagttgcctgcgaaacatgcaccataaccaacttggtcatggtcttcggagaaa

SEQ ID NO: 202358 - DNA, 261 bp, Glycine max
tctgaaaagtactagctagctagctagtacttctacactgtgaggtagcatcatgaggaagcgccaagtagttgtgagaagagaggagcctcaaaggagcgctaggacggtgaaatacggcgagtgccagaagaatcacgccgcgaatgtgggagggtatgctgttgatggctgcagggagttcatggcgagtggcgccaccggagaaggaacaagtgctgctctcacttgtgccgcctgtggttgccacaggaacttcca

SEQ ID NO: 202359 - DNA, 260 bp, Glycine max
tctcgagccgattcggctcgagggtgctgctatgttgacatttgaagctctggctgagacatcagaggttgctaggaaatgggttcctttcagcaagaaatataacattgaacctcgggcacctgagtggtattttgcacagaagattgactacttgaaagataaggttcaaccatcatttgtcaaagatcgtagagcaatgaagagagaatatgaagaatttaaaattcgcgtcaatggacttgttgcgaaggcacaaa

SEQ ID NO: 202360 - DNA, 259 bp, Glycine max
gttcaacttcaagcgttcaaatgggaacaactacaacaccccttgtgttggttcttctatttggctgccttgtttctgttttacaagcagaatacttgaagtacaaagacccgaaacagccactgaatgttagaatcaagaacttgctgaagcgaatgaccctggaggagaagataggccaaatggtgcagattgaacgaagtgttgccaccccacaagtggatgaagaagtacttcattgggagtgtgctgagtgggg

SEQ ID NO: 202361 - DNA, 242 bp, Glycine max
cctctctctatctctcacacacactttctctctctctctctctcacccagatcttgtagcaatggcgagcgctcccactccacgcgaagagttcgtgtacatggcgaactggcggacaggccgagcgctacgaggagatggtggagttcatggagaagtctccgctccgccgagagcgagactgaccgtggaggagcgtaactcctctcgtcgcctacaagaactgtcggcgctcgcgcgct

SEQ ID NO: 202362 - DNA, 254 bp, Glycine max
cggctcgagcttctcactcttcagatctctctcccttccttccatcccaaccacaaggttgctgagaagacataaaaaatggtgaagatttgctgcattggagctggctatgttggtggcccaaccatggctgtaattgccttgaagtgtcctgagatcgaggtggtcgtggtggacattgctgcaccgcgaatcaacgcgtggaacagcgaccacctcccgatatatgagcctggccttgatgatgtggtgaa

SEQ ID NO: 202363 - DNA, 255 bp, Glycine max
cgtgaatcatgtcggacgaagagcatcacttcgattctcaggcggatgcgggagcgtccaagacgtatcctcagcaggctggtaccattcgcaagaatggctacatcgtcatcaaatccaggccttgcaaggttgtagaggtctctacgtcaaagacaggcaagcatggacatgcaaagtgtcactttgttgcaattgatatttttaatgggaaaaagcttgaagatattgttccatcatcccacaactgtgatg

SEQ ID NO: 202364 - DNA, 257 bp, Glycine max
atttcattctctcctctatggtgttcaatgtagtacccaccatattagagatatctatggtagcaggtatattggcctacaaatttggagctccctttgcgctgattacttccttatctgttgctgcctatgttacttttacactgactatcacacagtggaggactaaattcaggaaagccatgaataaggcagataatgatgctagtacaagggttattgattcacttattaattatgagactgtgaaatatttt

SEQ ID NO: 202365 - DNA, 229 bp, Glycine max
gaaagttctctctctttgactcacaaccctattgcgtgctttgcaatcgaccccgcttatggccaacagtaacctccctcgaagaatcatcaaggaaacgcagcgtttgctcagtgagccagcgcctggaattagtgcgtccccttcggaggacaatatgcggtatttcaatgtgatgatccttggcccgactcagtcgccatatgaagggggatttttcaagttggaa

SEQ ID NO: 202366 - DNA, 262 bp, Glycine max
acttaatcgatcatcacttcacttcactaatacatcatggcagacgagacccagaacaagtatgagagctctgaggttgaggtccaggatcgtggtgtttttgactttctcggtaagaaaaaggatgaagaagacaagcctcatcctcaggaggaggtcatcgccaccgagtttcaaaaagtcactgtctcagaccaaggagagaacaagcacagcctcttagaaaagcttcaccgatctgacagcagctctagctcttcaa

SEQ ID NO: 202367 - DNA, 262 bp, Glycine max
aaaaaacagaacaacaatggcgacacttaaggttcctcagcctcttccccccgttgcagatgattgtgagcagctccgaaaagccttctcaggttggggaactaacgaggagctgattgtatcgatcttggctcataggaatgctgctcagaggaagcttatcagagaaacttatgcccagacctatggagaagatctcctcaaggccttggacaaagaactcacgagtgattttgagaggctggttcatctttggacactt

SEQ ID NO: 202368 - DNA, 263 bp, Glycine max
cggacccgttccgagcacgtggaaaggcgcgtgcgagacgggaacgaatttcaccgcgtcgaactgcaacagaaagtttatcggagcaagattctttgctaaaggtgtagaagccatgcttggtccaattaacgaaaccgaggagtccagatccgcgcgcgacgacgacggccacggcacccacacgtccagcaccgccgctggatcagttgtttccggcgcgagcctcctcggttacgcctccggaacagcgcgtgggatgg

SEQ ID NO: 202369 - DNA, 113 bp, Glycine max
gtggtactacaaagctactgcttgcaatcccacccatattgaaatttgctgaaatgctttccctcaatgttagatctgtgaattacaccaggggaagtttcatctttcccggg

SEQ ID NO: 202370 - DNA, 142 bp, Glycine max
tgtgtttgcggctgaggattccgaacgagcgaccttcttcgtttctcgcaaagtttaagtcatcatgggtaaggaaaagactcacatcaacattgtcgtcattggacatgtcgactctgggaagtcaactaccactggtcat

SEQ ID NO: 202371 - DNA, 212 bp, Glycine max
cgatggctaatccctcactcttgttcttcagtctcctcctattatccgccaccgtagccgccgccgaacggatcgacgatgaagacgaccttctgatccgtcaagtggtgccggatgcggaggaccaccacctgctcaacgcggagcaccacttctccgccttcaagacaaagttcggcaagacctacgccacgcaggaggagcacgaccac

SEQ ID NO: 202372 - DNA, 224 bp, Glycine max
ggcagctggtgctacttggatccagtttgatgaacctacccttgtgaaggatctcaacacccaccagttacaagcatttacacatgcctatgcagagctagagtcaagtttatctggttttaatgttctgattgagacatactttgctgatgtccctgctgaagcatacaaaacactcacctctttgaaggctgttactgcatatgggtttgatattgttcgtg

SEQ ID NO: 202373 - DNA, 214 bp, Glycine max
caacaacgtcgtccaagaccatgaccatggccatggccacgatcctgctcctgttcacggtcttcgcggtttcatcggccctagacatgtcgataatctcgtacgacaacgcccacgccgccacgtcgcgcacgagaagcagctgatgtccatgtacgagcagtggctagtaaagcacggcaaggtgtacaacgcgctcggagagaaggagaag

SEQ ID NO: 202374 - DNA, 162 bp, Glycine max
gtcgcttaggttcatctaagcaaatggaggatctttacttttctgcaattttaagcaacgaacaagagtataatccagatttctacaattggaatagagtcaaggttaggtactgtgatgggtcatcgtttactggtgatgtggaagaagttgatcaaacaa

SEQ ID NO: 202375 - DNA, 203 bp, Glycine max
gaactttaaagttttgttattttgtgcaatggcagcaaagagcaaaatcctagtcattggaggaacaggatacattggaaaattcatagttaaggcaagcgcagaaacaggacaccccacatttgtcttggttagagacaacaccctttctcatcctgaaaagtctaaacttgttgagagcttcaagagctttggagtaactc

SEQ ID NO: 202376 - DNA, 210 bp, Glycine max
cggctcgaggaaaagggaactggtaaaagtggaaagcctctccattacaaaggtagctcattccatagaattattcctagctttatgcttcaaggaggtgattttacacaaggaaatggaatgggtggagaatcaatttacggagagaagtttgctgatgagaacttcaagttaaagcatactggaccaggacttctatcaatggcaaat

SEQ ID NO: 202377 - DNA, 271 bp, Glycine max
attcattttggcatcgaggttgaatctcatgcgagagagaaaaaccataaccatgtctggaagaggaaagggaggcaagggtctcggaaagggaggagcgatacgacaccgtaaggttctgagggataacattcagggcataacgaagcccgcaattcgccgtctcgcgagacgtggcggcgtgaagcgtatcagtggtctcatctacgaagaaacccgcggtgttctcaagatcttcctcgagaacgtcattcgcgagatggtcacctac

SEQ ID NO: 202378 - DNA, 264 bp, Glycine max
cagaattcagcagtgaaattgaacttttggccaaaattgatcaccgaaacctggtgaagctactaggttatattgacaaaggaaacgaacgccttcttattacagagtttgtgccaaatggtacccttagagaacatttggatggtatgcgtggaaaaatcctagacttcaatcagcgccttgaaattgcaattgatgttgctcatggcttgacctatctgcatctgtatgccgaaaacaaattattcatcgagatgtgaaatc

SEQ ID NO: 202379 - DNA, 135 bp, Glycine max
cttcttctcttgcggctagggttttagcgcagttcttctagatttaaggaagatgggtaaggaaaaggttcacatcagtattgtggttattggccatgttgactctgggaagtccactaccactggccacctgat

SEQ ID NO: 202380 - DNA, 203 bp, Glycine max
tgctcgagccgattcggctcgagcaaaaagaaagaatcccaggcgaggagaaagatggaggggaaggagcaggatgtgtcgatgggagcgaacaagttccccgagagacagccgattgggacggcggcgcagagccaagacgacggcaaggactaccaggagccggcgccggcgccgctggttgacccgacggagtttacgtc

SEQ ID NO: 202381 - DNA, 267 bp, Glycine max
gaagaaattggagggggtgtgtgatcgggtcctcaggtgaagatctgaggctgttggtgtctcttttcttttctccgagttccaaagatgagcgcttctaggttcatcaagtgcgtcactgttggggatggtgctgtgggcaaaacctgtttgctaatttcctacaccagcaacactttccccacggattatgtgccgactgtttttgacaatttcagcgcaaatgtggttgtcaatgggagctttgtgaatctgggttggtgggat

SEQ ID NO: 202382 - DNA, 273 bp, Glycine max
caaggattctacccgccgctcgatgggaattgcgcttcaaggcgtctcgtagggctaatccgcctcacgagggtcaccaacggcacgtgcctttggggggccgaggccccctactgctggtcggcaaacggacggcgggcgcacgcgtcgcttctagcccggattctgacttagaggcgttcagtcataatccaacgcacggtagcttcgcgccactggctattcaaccaagcgcgatgaccaattgtgcgaatcaacggttcctctcgtact

SEQ ID NO: 202383 - DNA, 184 bp, Glycine max
ctctgacttattttaatttgaactttaaagttttgttattttgtgcaatggcagcaaagagcaaaatcctagtcattggaggaacaggatacattggaaaattcatagttaaggcaagcgcagaaacaggacaccccacatttgtcttggttagagacaacaccctttctcatcctgaaaagtc

SEQ ID NO: 202384 - DNA, 251 bp, Glycine max
cggctcgagcaccaattaagctttcaagagacaaactgctttgaaaaatgggatccaaggttgttgcatccgttgcccttctcctctccatcaacattcttttcatttccatggttagctccagcagccactacgatccacagccccaaccttctcacgtcactgctcttattacacgacctagttgtccggatctgagtatttgcctcaatattttaggcgggtctctaggcaccgtggatgattgttgt

SEQ ID NO: 202385 - DNA, 198 bp, Glycine max
gttgaaaacacaaaagacaaaaaatgggttcttctctgtggacctgtctgattttgttatcacttgcttctgcttccttcgccgccaacccaagagcaccaattgatgtgccatttggcagaaactatgtgcctacctgggcctttgatcacatcaaatacctcaatggtggtcctgagattcagcttcatcttgata

SEQ ID NO: 202386 - DNA, 227 bp, Glycine max
cggctcgagcacaaatcttagccgccattgatttttcctcttccatttctcttactttctcagcctttttcgattacccatttggttatttcgccctaatggctcttgctccatccaaagtttccaccttttctggtttttctcccaaacccagtgttgggggtgctcagaaaaacccaacttgctctgtttctctgagctttttgaatgagaaacttggaagcaga

SEQ ID NO: 202387 - DNA, 191 bp, Glycine max
ccaacttttaagttattattattattatgaacactattgtgttaacaatgctgccattttttctcttcctgttagtttggcttcctagggttacctgtggctggacggctgcacatgccacattctatggtggtgcagatgcttcagggaccatggggggagcatgcggctacgggaacttgtatcagcaa

SEQ ID NO: 202388 - DNA, 179 bp, Glycine max
gtactccaatcttcgttgtaaatgcagcctatgactcatggcagattcagaacatctttgtacctggctctgctgatcccagtgacagttggcatagctgcaagcttgatataagcaactgctcacctgatcaactaagtaaaatgcaagacttcaagtcggaattcgaaaaggctgtg

SEQ ID NO: 202389 - DNA, 130 bp, Glycine max
gtgcatttcaatccacatcggtcaggccggtattcaggtcggaaacgcctgctgggagctctactgcctcgaacacggcattcagcctgatgggcagatgccaagtgataagactgttggtggaggtgat

SEQ ID NO: 202390 - DNA, 137 bp, Glycine max
gggtttaatctttttggctgtgttatgcttctcagcactgtcactgagtcgttgtcttgcggaggataatggacttgttatgaacttctacaaggaatcatgccctcaggctgaagacatcatcaaagaacaagtca

SEQ ID NO: 202391 - DNA, 196 bp, Glycine max
actggaacgaatggttatcttgatcccttagaaattggacaggtaaggaaatttcttgttgagttacgtgcttacttaaacacgaataaacctcaattcaaagaaatcatatcttctaccaagacattcactggggaagcagaagtccttttgaaggaagctattcaagaacagatggaactctttttactacagg

SEQ ID NO: 202392 - DNA, 194 bp, Glycine max
aattctcgttggaacaaagttagatcttcgagaagataagcaatttcttaattcttctccctgtgttgtagttattggtactgcaccagggtgaagaattaagaaaactgattggtgctcctgcttacatcgagtgtagttcaaaaacacagcagaatgttagagctgcctttgacgctgccatcaaaggggtc

SEQ ID NO: 202393 - DNA, 211 bp, Glycine max
ctaagatggcttcctttgtatccttcctagtgctgcttcttgcagcccttatcctcatgcctcaagggcttgctacttactacaaaccaattaagaagccaccagtgtacaagcctccagtgtacaagccaccagtgtacaaaccaccggtttatgagccaaaaccaggggtttacaagccgaaaccacgggtttaaaagcccccttttag

SEQ ID NO: 202394 - DNA, 180 bp, Glycine max
gcctttttgggcacccagatttccaccattctctgtaacttcacacactatataacagaaaatgagggggggcttatggcaactcgggcaatcaatcactcgccgtcttgcccagggtgataagaaggctgttgctcgtaggtattttgcctcagatgttgagctgaaaaggacagtcgt

SEQ ID NO: 202395 - DNA, 265 bp, Glycine max
ctcgagccgcggctcgagagtctctcgaagcctctttctctctcttctagaagctatctgtcgtttggtgttactaagtctccaacaagcaaagtacatggttgatttggaaatccaggtccccaccccattcgacccgtttgccgaggcgagagaatcggatgcccccggagcaaaggagtatgtgcatattcgaattcagcagaggaatgggaagaagagtctgaccacagtgcaagggctgaagaaggagttcagctacgag

SEQ ID NO: 202396 - DNA, 176 bp, Glycine max
gaaagttctctctctttgactcacaaccctattgcgtgctttgcaatcgaccccgcttatggccaacagtaacctccctcgaagaatcatcaaggaaacgcagcgtttgctcagtgagccagcgcctggaattagtgcgtccccttcggaggacaatatgcggtatttcaatgtga

SEQ ID NO: 202397 - DNA, 173 bp, Glycine max
aaactttcgaaagattttatccaattgaacttttaacaatgactgggataaacttaagaattcaattattgaaattgcataagtacacaatttaattggattcgtcgaatggtatcacaaaaatggagtactaactcccatttcttatttatgatggaattaaccgatcaact

SEQ ID NO: 202398 - DNA, 270 bp, Glycine max
gggaagaggtcgagtttcacagcagcaatggtgtacgtcaaggctcagaaatcaaaagcctacttcaagagatatcaagtcaagttcaagagaagaagagagggaaaaaccgattaccgtgccaggattcggttgattaatcaggacaagaacaaatataacactccgaaataccgatttgttgttcgctttagcaacaaggacattgttgcacaaataatatctgctagcattgctggcgatatggttcttgctgcagcatatgcacat

SEQ ID NO: 202399 - DNA, 211 bp, Glycine max
tggcatctgtagaagagaagaccaagatatttcctgagatcattcctcatgctcgtgccttaatgactgatgtttttggcaattatgttatacaaaaattttttgagcatggtaccgaaagtcaaagaaaggaattagccaaccaacttacaggtcatgttttacctcttagtctgcaaatgtatggttgcagagtgattcaaaaggcctt

SEQ ID NO: 202400 - DNA, 196 bp, Glycine max
ctgcactcttcatcaagctccgctccaacacaggggaaaatgagggagatccttcacgtggcagggagggcaatgcgggaaccagatcggttccaagttctgggaagtggtgtacgacgagcacggcatagatccgacggggaagtacgtcggaaactcagatctgcaactcgagcgcgtgaacgtctactacaat

SEQ ID NO: 202401 - DNA, 280 bp, Glycine max
  unsure (1)..(280): unsure at all n locations
gaaattnttcccaaagctgatcnanaanccagccaggccagaaggagttgaagaatgggaagggggaagatcgaaatcaaaagaatcgagaacacaacnaatcngcaagtgaccttctgcaanagaaganatgggcttctgaagaaagcttatgagctgtcagtgctgtgtgatgctgaagtttccctcntcgtcttctccagccgtggccgtctctatgnagtantccaacaacanntnggnntcaccccttgnagaggacanaanaanntttcgttnt

SEQ ID NO: 202402 - DNA, 221 bp, Glycine max
atttcaatttccctaggggcttaatatctcccctcacttgtgcctagccttatgtcatagtattatcattcattctcatctttctctcttctctctccacccaaaccctaactcccgaccctgttcccctctcgtatccgtcatgaaaggaggaaagtccaagaccgaatctaagagagccgatcccaaacttgctgtgaataagaagggaagcggccacc

SEQ ID NO: 202403 - DNA, 158 bp, Glycine max
ctctgtctctgtacaattctcccttgtcttccctcgtagatcgaaatggaatattcttccatggcctccaagcggattctgaaggagctcaaggacctacagaaagaccctccaacctcttgcagtgccggtcccgtagcagaagatatgtttcattg

SEQ ID NO: 202404 - DNA, 208 bp, Glycine max
cgcaattttcatttttctctctcccttagtcaaagggattcatcgttcttcttcccaggttatttagaaaagcaaaatggtgaagatttgctgcattggtgctggatatgtggggggtcctactatggcagtcattgcacttaagtgcccatccattgaagtcgctgttgttgatatctctaaatcccgcattgcagcctggaacagc

SEQ ID NO: 202405 - DNA, 250 bp, Glycine max
cctatctcagattcattcagattctcccttcccctttttgatatttcttagaaaactcccaacttcgaatcaatatgaagaaagtggtgctaaaggtggaactccatgatgacaaaatcaagaaaaaggccatgaaggcagtatctggtatttcaggggtagagtcagtctcagtggacatgaaggaccagaaaatgactataattggggatgttgatcctgtaacattagttggaaagtttacaaaatt

SEQ ID NO: 202406 - DNA, 208 bp, Glycine max
cttgagataaatgatgaaaggtggaacaaagtggcaaatgtgctatacttggaatcaccagctggtagttggattctcttactctagcaatgaatctttttatgccttagtgacagatgaaatcacagctagggataatcttgttttcctacagcgttggttcactaaattccctgagtactcaaataacgacttcttcatttcaggg

SEQ ID NO: 202407 - DNA, 131 bp, Glycine max
tgtcaatggttgaccctttcttggtcgaggctcttgagattcctcggcaacgtgtcaccattttgcggatggagctggatatccagaggttcctgagtaattcagattatcagcatttcgagtttcaacat

SEQ ID NO: 202408 - DNA, 183 bp, Glycine max
ctaagtgcttattttaatctgaactttaaagttttattattttgtgcaatggcagcaaagagcaaaatcctagtcattggaggaacaggatacattggaaaattcatagttaaggcaagttcagaagcaggacaccccacatttgccttggttagagaaagcaccctttctcatcctgaaaaa

SEQ ID NO: 202409 - DNA, 234 bp, Glycine max
caagttgttaattttgagtatcgtactcctattttgcatgagccaactgctttaatagaagagaaatacaactgggatgagtttcgacttcagatgaggcttgctcattggctctttgcttcagacaagagccttaacatgttctcaagtaaggtatcgactaatgctcttgaagaggctagaagattttccttcaaaacatcatatatctctaaaagttgggaacacttgatg

SEQ ID NO: 202410 - DNA, 235 bp, Glycine max
cactcactctgcactcaccactgccacacttcaatcgcactaatggctgtcaccttctcagatctacacaccgaagagggcatcaaatccctcgatcaattcctttctgggaaaacctatatttctggggatcagttgacaaaggatgatattaaagtgtatgcagctgttgttgaaaagccaggggacacttttcctaatgctgccaagtggtacgatgcggtctctgctcaac

SEQ ID NO: 202411 - DNA, 263 bp, Glycine max
agcttcttaaaatttgctgcacagaggagagtgagaaggcaaggcaatggagatgacgagggtgaatgctaagagcaataactccaacgccaagactaatggcgtgaaagagaaagccaagaagatagtccgaattcaggtttccaaaaccaagaaacctttcttcttctacctcaatctcgctaagaaatacataaaacagggcaatgacgtcgagctctctgcattgggcatggctattccaactgttgaaatcatctcgg

SEQ ID NO: 202412 - DNA, 235 bp, Glycine max
tagggcgaatcatcggacccgaaatcggggaagaaggacttctcaaccgcgattctggaacgcaagaactctccgaaccggcttgtcgtggatgaggctgtcaacgacgacaactccgtggtcaccatgcatccccaaaccatggaaaagcttcagcttttccgaggggacactatcctcatgaagggtaagaaacggaaggataccatttgcattggtcttgctgatggaaact

SEQ ID NO: 202413 - DNA, 171 bp, Glycine max
taggcgaatccctctctctatctctcacacacactttctctctctctctctctcacccagatcttgtatcaatggcgatcgctcccactccacgcgaagagttcgtgtacatggcgaactgtgcggagcaggccgagcgctacgaggagatggtagagttcatggagaagg

SEQ ID NO: 202414 - DNA, 168 bp, Glycine max
acgacgtgagagagattgtgaagtagaaatcggtgcaagaaattctccactttatctaaaaaaattcggtgagtttgtgaagacataaaatcactagctactcaaaaatggccacagtaggaaggaacgttttcagctcctttgcggttccttaacttgatcagggat

SEQ ID NO: 202415 - DNA, 264 bp, Glycine max
gcatgttaatccaaaagtgtccaaatctggaagtccttgagacaaggaatgtaattggagacagagggttagaggttcttggtcgttgttgtaagaggctaaaaaggcttaggattgaaaggggtgatgatgatcaaggaatggaggatgaagaaggtactgtgtcccatagagggctaatcgccttttcacagggctgttcagagcttgaatacatggctgtttatgtgtccgataattaaaatgcatctcggagaaatatgg

SEQ ID NO: 202416 - DNA, 226 bp, Glycine max
cccagaacaagtatgagagctctgaggttgaggtccaggatcgtggtgtttttgactttctcggtaagaaaaaggatgaagaagacaagcctcatcctcaggaggaggtcatcgccaccgagtttcaaaaagtcactgtctcagaccaaggagagaacaagcacagcctcttagaaaggcttcacggatctgacagcaggtagaggcctcaaggtggggagtaaga

SEQ ID NO: 202417 - DNA, 214 bp, Glycine max
gaagaagtgccctgatgccattccagaccctaaggccgtgcagtacgtgagaaacgaccgtggcacccccatgattctagacaacaattactacagaaatatattggacaacaagggcttgttgatagtggatcaccaactagccaatgacaagaggaccaagccttatgtgaagaaaatggccaagagccaggactatttcctcaaaggattt

SEQ ID NO: 202418 - DNA, 225 bp, Glycine max
gcatcttgttcctccgctcaacaactataataacatctttctctctccgaacagatcaaactatggccacctcaagcgccaaatcagtccatgatttcaccgttaaagatgccaagggaaatgatattaatcttggtgactacaaaggaaaggtccttatcattgtcaatgttgcctcacaatgtggcttgactacttcaaattacactgagctcagtcagttgt

SEQ ID NO: 202419 - DNA, 264 bp, Glycine max
aatccctacacatccttaaatcagttttggtttttcatccccaaaaggaagcaattaaaattatgggagccaacttttccactttcgagtttgtagaaaaatcatcacactcatcgctggtcctcaccttccattccactgctaaatggaaggctcactttgatgcctccaaagaaacaaacaagctgatggtcatcgatttcactgctacgtggtgtggcccttgaaaatacatggccccaattatcaaagtttttgctgaaa

SEQ ID NO: 202420 - DNA, 238 bp, Glycine max
gccgtccctaatctgaaggctcccgccatctgcgatcggatttcatggctccaaagaaggacaaggctcccccaccttcatccaagcctgccaagtctggcggtggcaagcagaagaagaagaagtggagcaagggtaagcaaaaggaaaaggtgaataacatggtgctcttcgatcagggtactatgacaagctctctctgaggcacccaatacaagtcttatcttcctttctctga

SEQ ID NO: 202421 - DNA, 172 bp, Glycine max
gggtttaatctttttggctgtgttatgcttctcagcactgtcactgagtcgttgtcttgcggaggataatggacttgttatgaacttctacaaggaatcatgccctcaggctgaagacatcatcaaagaacaagtcaagcttctctacaagcgccacaagaacactgctttc

SEQ ID NO: 202422 - DNA, 274 bp, Glycine max
  unsure (1)..(274): unsure at all n locations
ctgcaaacgccgtaacgggttgctcaagaaggcttatgaattgtctgttctgtgtgatgctgaggttgctcttgttgtcttctcaagccgtggacgcctctatgagtatgccaacaacagtgttagaggaacgatcgataggtacaagaaagcatgtgctgcctccacaaatccagaatctgtgctctgaagctaatacacagttttatcagcaggaagcgtcccaaattaaaacgacnantcagagacattcagaatctaaacaggcacatcc

SEQ ID NO: 202423 - DNA, 240 bp, Glycine max
ataagagaagattttcatcagttgagttgagagaaggaaagggaaaatgggtaaggatctgagcgaggaacaagtgtcttccatgaaggaagccttctctctattcgacactgacggagacggtcggatcgctccgtcggagctggggatcctgatgaggtctcttggaggtaacccgacgcaggcccaactcgaagccatcttggctgaagagaacctcacggcgcccttcgaattccc

SEQ ID NO: 202424 - DNA, 235 bp, Glycine max
tctcaccctcattatcaacacgatatcatagccaaaaccttttttcgaagtctctgattttcctaatggctccggcaaaggcagagaataagccggcggagaataatccagctgcggataaggcatctgcggagaataagccgaaggcggagaagaagatctcgaaggaaggatggatcgagaagaagtagaagctcactaagaagagtgtggagacctacaagatctacatctt

SEQ ID NO: 202425 - DNA, 285 bp, Glycine max
aaggtgccagaaaagcccaaagaagaagcagaagaggaggcacccaagcccaaacccaagaatccccttgatcttctccctccaagtccgatgatactggatgagtggaaaagactctactcaaacactaaaaccaacttcagggaggttgctatcaaaggattttgggacatgtatgatcccgagggatactctctctggttttgtgattacaaatacaacgacgagaatactgtttcttttgtgacattgaacaaggttggtggatttcttcagcggatggat

SEQ ID NO: 202426 - DNA, 288 bp, Glycine max
ctcatctctctctcgccggcgtcgctacgaaggaaagcaatttactgtgaagaacaatgaggaagctaaagtttcatgaaaagaagcttttgaagaaggttaattttttggaatggaagagggaagggggtcacagagagaacctcattatgcaacgctaccatgttactggacgggacgattacaaaaaatattcaggtttatgccatatggttcagaagttagtaaacatattgaaacagatggacccaaaggatccttttcgggttgatatgactgataagcttt

SEQ ID NO: 202427 - DNA, 289 bp, Glycine max
gaactgtttaccccaagttggtcagtggaatatgatgaacaagaaaatgattaatggaatgactgttagccggtgggcatgcataaatttttcacggagcgtgcaagatagtgttgctcgtactttttgtaatgagcttgctcaaatgtgtcaagtatctggcatggaatttaatccagagcccgttatccccatctacaatgccaagcctgaacaggtggagaaagctttgaaacatgtttaccatgtggcagggagcaaaactaaatcaaaggaattggagcttttt

SEQ ID NO: 202428 - DNA, 286 bp, Glycine max
cttcaacgctcgcttagtacagcggaataacgaagcctcctcgtacttcttcttccgccctttctctctctagaaccgtacggtcgtttctttctctctcctcaaccggagacagcgtcgccttcttttctgaatctcgcggtgttgttagttctgcggcggttgtagttccggcggcgatgggacagcaatcgttgatctacagcttcgtcgctcgcggcaccgtgatcctagcggagtacaccgagttcaccggaaacttcaccagcgtggcggcgcagtgcct

SEQ ID NO: 202429 - DNA, 289 bp, Glycine max
cagaattctctaaaagagatctttttctgctctttgaagaaagaagggtctttgcatgattttggagatgtctctgctctcagatctcatcaaccttaacctctccgataccaccgagaaggtgatcgcagagtacatatggatcggtggatcaggaatggacctgaggagcaaagcaaggactctcccaggaccagttagcgacccttcagagcttcccaagtggaactatgatggttccagcacaggtcaagctcctggtgaagacagtgaagtgattttatcccca

SEQ ID NO: 202430 - DNA, 280 bp, Glycine max
cgaagagaatggctcccaagggtttaatctttttggctgtgttatgcttctcagcactgtcactgagtcgttgtcttgcggaggataatggacttgttatgaacttctacaaggaatcatgccctcaggctgaagacatcatcaaagaacaagtcaagcttctctacaagcgccacaagaacactgctttctcctggctcagaaacatcttccatgactgtgctgttcagagttgtgatgcttcactgttgctggactccacaagaaggagcttgtctga

SEQ ID NO: 202431 - DNA, 284 bp, Glycine max
cagaattctctaagagagatctttttctgctctttgaagaaagaatggtctttgctacgattttggagatgtctctgctctcagatctcagcaaccttaacctctccgataccaccgagaaggtgatcgcagagtacatatggatcggtggatcaggaatggacctgaggagcagatccaggactctcccaggaccagttagcgacccttcagagcttcccaagtggaactatgatggttccagcacaggtcaagctcctggtgaagacattgaagtgttttat

SEQ ID NO: 202432 - DNA, 284 bp, Glycine max
agagaagcgtcttaataaacgctcttctctgaaaaacctgatttcttctcttcttctcttctctttcgtttcgatcttcgatctctgaaaatgagagagtgcatttcaatccacatcggtcaggccggtattcaggtcggaaacgcctgctgggagctctactgcctcgaacacggcattcagcctgatgggcagatgccaagtgataagactgttggtggaggtgatgatgctttcaacaccttcttcagtgaaactggggctggaaagcacgtgcctcgtgc

SEQ ID NO: 202433 - DNA, 281 bp, Glycine max
tgacttgagaggtgtaggataagtgggagctggaaacagcgaaagtgaaataccactacttttaacgttattttacttattccgtgaatcggaagctgggcactgcccctctttttggacccaaggtcggcttcggccggtcgatccgggcggaagacattgtcaggtggggagtttggctggggcggcacatctgttaaaagataacgcaggtgtcctaagatgagctcaacgagaacagaaatctcgtgtggaacaaaagggtaaaagctcgtttgatt

SEQ ID NO: 202434 - DNA, 285 bp, Glycine max
  unsure (1)..(285): unsure at all n locations
tcgcgagcgagccacganaatattcatcacacagggttttggtttattattccaatttttggttttcccttttgttggatattagagtgtgtaagaaagagaagagagagaaatgggaaggggaagagtggagttgaagagaattgagaacaagatcaacaggcaagtgacctttgcaaaacgaaggaacgggcttttgaagaaagcttacgagctttccgttctttgtgatgccgaggttgctctcatcatcttctccaatagaggaaaactgtacgagttctg

SEQ ID NO: 202435 - DNA, 284 bp, Glycine max
gttacttattcagtagttcttctctctcgaattttcactcactttctgtgcatcaatggcggcgataagtctccggaaggggaacacgcggcttccgccggaggtgaaccgcgtgctgtacgttcggaaccttcccttcaacatcaccagcgaggagatgtacgacatctttggcaaatacggcgccattcgccagatccgcatcggcaccaacaaggacactcgcggaaccgctttcgtcgtctacgaggacatctacgacgccaaaaccgccgtcgaccacc

SEQ ID NO: 202436 - DNA, 288 bp, Glycine max
cacaaagaaagaatcccaggcgaggagaaagatggaggggaaggagcaggatgtgtcgttgggagcgaacaagttccccgagagacagccgattgggacggcggcgcagagccaagacgacggcaaggactaccaggagccggcgccggcgccgctggttgacccgacggagtttacgtcatggtcgttttacagagcagggatagcagagtttgtggccacttttctgtttctctacatcaccgtcttaaccgttatgggagtcgccggggctaagtctaagtgtag

SEQ ID NO: 202437 - DNA, 263 bp, Glycine max
cgtaaggacactcgcttagggtcatctaagcaaatggaggatatttacttttctggaattttaagcgatgagcaacagtttaatccatatttctacaattggaatagagtcaaggttaggtactgtgatgggtcatcgtttactggtgatgtggaagaagttgatccaacaaccaatttgcacttcagaggagcaaggatttgttcagctgtaagagtagaatgactatcaaaaggattggaaagggctgtaaatgtgattct

SEQ ID NO: 202438 - DNA, 224 bp, Glycine max
agggtcttctcataagaaaatgggaagacggaagattgagatcaaacggatcgagaacaccaccaataggcaagtcaccttctgcaagcgccgcgacggtttgcttaagaaagcttatgaattatcagttctgtgtgatgcggaagttgcccttgttgtcttctcaacccgtggccgtttgtatgagtatgccaacaacagtgtgagggccaccatttagaggt

SEQ ID NO: 202439 - DNA, 280 bp, Glycine max
caggtacaacatggttgaccaaggtcttcttaaggaaccagtattttcattttggttcaaccgcaatccagaggaagaggaagggggtgagattgttttcggtggtgttgatcctgctcactataagggaaagcacacttatgtgcctgtgaccagaaaaggatattggcaggttataatttttttaatacttaataatgctttctttttttacctttttctatatgttaatttttatttttgttttcagtttgatatgggagatgtacttattggcggt

SEQ ID NO: 202440 - DNA, 281 bp, Glycine max
tgcgaggattaagacgctttgttttttcttccccttctctatgtggaagaaatctgtaagatattatgcaaaaaataattaaggtgtttttctttaaatgggttggttgattggttcaatgaaccgatcaagaccacagcaggttcatggggatgcgaggattaagacgctttgttttttaatcttccgatgtcactcttgtttgttagtttgtttttttattttttatttcaataagtactgtgcaagtaggttagagttgggtagaagggcatgttcat

SEQ ID NO: 202441 - DNA, 278 bp, Glycine max
ctctagccgcggtactgcgcggagacaattttcccgcgtctggactacacggcggagcgaggtgcagacggtggtggcgaaagacgtgcacggcgagacctggaggttccggcacatctaccgagggacgccacgtaggcacttggtcgaccacagggttgagcagtttcgtgaaccagaagaaactcgtggctagggattccgttgtgtttctgagggctgagaatggtgatttgtgtgttaggattcggatggcaaagaagggagttagcggaggg

SEQ ID NO: 202442 - DNA, 282 bp, Glycine max
cggctccaagctccgcgtcgcgtaccaaggcgttcccggcgcgtactctgaagccgctgccggcaaggcctatccgaactgcgaggccattccgtgcgaccagttcgaggtggcgttccaggcggtggagctctggatcgccgatcgggcggttttaccggttgaaaactcactcggcggttcgatccaccggaactacgatctcctcctccgccaccgccttcacatagttggcgaggtccagctcccggtccatcactgcctcctcgctctccccggcgt

SEQ ID NO: 202443 - DNA, 282 bp, Glycine max
ctcaattgcattgcatctctttgcattgagaatgatgttctggttttcactgatgaagtttatgacaagttggcttttgatatggagcacatatcgatggcttctttgcctggaatgttcgaaaggacagtgacattgaactccttggggaagacattctccttaacaggatggaagattggttgggccatagcacccccacacttatcatggggagtgcgacaggcacacgctttcctcactttcgcaactgcccatccttttcagtgtgctgctgcagcg

SEQ ID NO: 202444 - DNA, 173 bp, Glycine max
cttctctatgtggaagaaatctgtaagatattatgcaaaaaataattaaggtgtttttctttaaatgggttggttgattggttcaatgaaccgatcaagaccacagcaggttcatggggatgcgaggattaagacgctttgttttttaatcttccgatgtcactcttgtttgt

SEQ ID NO: 202445 - DNA, 230 bp, Glycine max
ggtgaacaacgacgaccgatactcttacaaccttcaatctggcgatgccctaagagtccctgcaggaaccacatactatgtggttaaccctgacaacgacgagaatctcagaatgataacactcgccagacccgttaacaaacccggtagatttgagagtttcttcctatctagcactcaagctcaacagtcctacttgcaagggttcagcaagaatattctagaggcct

SEQ ID NO: 202446 - DNA, 241 bp, Glycine max
gtcgtcgttgataacagatttgctccgtcaaaccggcggcaccgccgtcatcgtacgcggtctgcgctacggagctggagcgccatggcgccgacctcaatgatcctctttggagcgccaagtgcctcttttccttccctcacctcattcgccaagtggcccgtgattacctggaaaatggtgcagacattgtaatcacagcatcttacaaaggcagcattcaagggtttaaggccaaggg

SEQ ID NO: 202447 - DNA, 277 bp, Glycine max
gcgcattatagcacaccacacaaaaaagcaaaacagagagaacaactgttactcacacacgccatgggtaaatgaatggtttttgagcaacagcagttaaaagagaaaagggattcagcgaagatgacatcggttggtgtggcaccaacttcgggtttgagagaagccagtgggcatggagcagcagctgcggatagattgccagaggagatgaacgatatgaaaattagtgatgatagagaaatggaagccacagttgttgatggcaacggaacga

SEQ ID NO: 202448 - DNA, 280 bp, Glycine max
cttttctctctcgttttttctcaaaaagttgcaagagttaaagcaaaaaccaaagtgagagagaaaatgatgaagccatcgatgctcagatctcttcactctgccgccacccgcggcgcctcccacctctcccgccgtggctacgcctccgagccggtgccggagcgcaaggtggccgttctaggtgccgccggcgggatcgggcaacccctctcccttctcatgaagctcaaccccctcgtttccagcctctccctctacgatatcgccggaactcccg

SEQ ID NO: 202449 - DNA, 280 bp, Glycine max
aaataacccaatgaatcatcatcctctgaattcaactcgctcgcacatgggaatcgattgatcaacatcgcccagatctacaactgccttcgactggacatcaactattattcattcgataggctgtctttacctccagtaacttcaaagtaatctctgtgccccagccatggctgcaccgtttttctcaacgccctttcagccttatgtttatcagagtccgcaagatgcaattataccttttcagattttagggggtgaagctcaagtggttcagata

SEQ ID NO: 202450 - DNA, 274 bp, Glycine max
atggggttagaagggaaggaaacgccgtcgtttatgagggattttctcgataagtgtggtggctgcgccgttattgacggtggttttgccactgaacttgaaaggcatggggcggacctcaatgacgaactctggagtgccaaatgccttattagctccccacatcttgtccgaagggttcacctagattacctcgatgcaggagcaaacataatattaacagcatcttatcaggccactattcaaggttttgaggccaaagggttctctagag

SEQ ID NO: 202451 - DNA, 282 bp, Glycine max
cgaaaatggatcagatattcaataaggtcggatcctattggttcaaccagaaagcctccagccagctcaattccgttggtgatgacatcaattcgatgacaaacagtattgaagggggaaccaaatggttggtcaacaaaataaaaggcaaaatgcaaaaggcattgccagagttactaaaggagtacgatctaccaataggaatctttcctcgtgatgcaacaaactatgagttcaatgaagagacaggaaagctcgttgttttcattcctcaagtatgtg

SEQ ID NO: 202452 - DNA, 209 bp, Glycine max
cccaaatcgttgaggagtggggaggtggtgccccaaccctgccattccccaccatggtttcccaaatcgttgaggatttgaaggttctggaagaagatttggatgcccacatgaattttggaggcaatggtggaaaattacaggggaattttagagtacaagaagataagaagcaccgtgccacgtatcaggctttgggtgattcagaa

SEQ ID NO: 202453 - DNA, 191 bp, Glycine max
aggtatctgccgatttctttgtcattgtcacaattgtgttgctttgcttgttcagtttaagtcacagtgaatgtaatttcaaggcaattttcaactttggggattcaaattcagatacaggtggtttttatgctgcttttcctggtgagtctggcccttatggaatgacttactttaagaaaccagcaggc

SEQ ID NO: 202454 - DNA, 276 bp, Glycine max
gcagcgcaaaaggaaatcacggaaaggtggatcgtattcaacactatctttattgaggaaggaactacgagaaggaaatttgcaatccctttttggcggatcttcatgtatagtgtcctcatctaatgcagatccactgttgtcatcatttatattgcctttagctaatgaacatgccagttctcagcctcacttacacactgagacaagatcatctaaaaaatgcttagatgagactgtgtcaacaagaaatgtggagacatcaaccttgtcagt

SEQ ID NO: 202455 - DNA, 199 bp, Glycine max
tgaagggttcgagtgagagcatacctgtcgggacccgaaagatggtgaactatgcctgagcggggcgaagcagaggaaactctggtggaggcccgcagcgatactgacgtgcaaatcgttcgtctgacttgggtataggggcgaaagactaatcgaaccgtctagtagctggttccctccgaagtttccctcaggatag

SEQ ID NO: 202456 - DNA, 272 bp, Glycine max
ctaactgaatattcgatcggagatgtctgccgccgccgaagaagctaacgctcccgccgtcgaaaagccggttgaggaggtgaaggcgccgaaccccgcgaaggagaagaaacctaaggctccgaaggaaaagaagccaaaacaggccaaaacagcttcacatcctccatattttcagatgattaaggaggctttgatcgctttgaacgagaaaggaggatcgagtccttatgcgatacgaagtacatggaggagaagccaaggcggtgctc

SEQ ID NO: 202457 - DNA, 277 bp, Glycine max
ctcgagccgttcttcttcgttgaatcgcgattgttctgtgcgagattaagaatatgagatatcgaaaatggcgttggctttcgacgagttcggaaggccgttcataatcctgaatgagcaggagcagaatagcagactccgaggattggacgctcagaaagccaacatctccgccggcaaagccgtggctcgcatcctccgaacctccctcggccccaaaggcatggacaagatgctccatagccccgacggcgacgtcaccatcacgaacgatgga

SEQ ID NO: 202458 - DNA, 188 bp, Glycine max
ctctcttatctttctcttgttaactaattaaaatgactctcacaaaggccttgttctttgtgaccgctctatgctgcacctctgccgcatatgctgcaaggtttgacatcacgaaccgatgctcataccctgtttgggccgcggctgtgcctggcggtggcatgaggctgaactcgggcaagtcatgg

SEQ ID NO: 202459 - DNA, 268 bp, Glycine max
gaagattttcatcagttgagttgagagaaggaaagggaaaatgggtaaggatctgagcgaggaacaagtgtcttccatgaaggaagccttctctctattcgacactgacggagacggtcggatcgctccgtcggagctggggatcctgatgaggtctctgggaggtaacccgacgcaggcccaactcaaagccatcgtggctgaagagaacctcacggcccccttcgacttcccccgattcctcgatctaatggccaaacacattaaa

SEQ ID NO: 202460 - DNA, 221 bp, Glycine max
ctctcacgcagtcgcagtgagtgaaaaggaaaaccctaattgcggtattctcagtgccttcgagagaaagaaaaaatggcagataatcttgttctccgtggcaccatgcgcgcccacaccgacgttgtgacggcgattgccactcccatcgacaactccgacatgatcgtcaccgcctcacgcgacaaatccatcatcctctggcatcttaccaaggagga

SEQ ID NO: 202461 - DNA, 220 bp, Glycine max
ccatggtagacctgggaatgtggttgatgaagtctccggtgttccagaccgggctgccgaaggatctcatcatggccgccacgaaggagacgttcttctcgcacttctgcgccggcgatgacgccgccgccgccggacggagcatcagcgcgctcaaggaggccggcttacatggcatgctggtatacgtgtgtgtaagacgctcatacaaaggatgggt

SEQ ID NO: 202462 - DNA, 270 bp, Glycine max
caccaacagccaagactctgacttacctggcccaggagaaaaccctagaatcgagcttcgttcgggacgaggaggagcgtcccaaggttgcctacaacgaattcagcgacgagatcccagtgatttctcttgccggaatcgacgaggtggatggacgcagaagagagatttgtgagaagatcgtggaggcttgcgagaattggggtatattccaggttgttgatcacggtgtggatcaacaactcgtggccgagatgacccgtctcgcca

SEQ ID NO: 202463 - DNA, 271 bp, Glycine max
ggaggtgatgcatcactatgaggtggatactgatgctgaggtgttggacttgcttgacaccgcttctagggagaaacaggtgactgtggtggcaaagctatactggggggatgcaagagagaaaattgtggaagctgttggggatttaaagcttgactctttggtcatgggtagcagaggattgggcgccatacagagggtattgctggggagtgtgactaattatgtcaccacaaatgcgagttgccctataacgattgtgaaagactct

SEQ ID NO: 202464 - DNA, 276 bp, Glycine max
ggaaaggttaactaagaagcaatacttcaatggccacccttgttgttcataaccaaacttcttctgctcaagatgctgaggctctccaacaggctttcaaaggatggggggctgatgacaaggccattatagcaatactgggtcacagaaatgttcatcagaggcaagaaatcagaaaagcttatgaggagatttaccaagaggatctcatcaaacgccttgagtccgagatctctggtgactttgagagagctatgtaccggtggatgttgcagc

SEQ ID NO: 202465 - DNA, 304 bp, Glycine max
aattcggctcgatggcagtcacaatgctttggctgccactttcggaatattaggtaacatcatttctgtgatggtgtacttggctccggtgccaacgttttaccggatatacaaaaagaaatgcacggacggtttccactcgctgccatacttgttgtcattaatgagttctatgctttggttatactacgccttcctcaaaattcatgacggcgttgttccccttattacgatcaactcgatcggatgtgtcatagagctcatctacattctcacctacattaaatatgcgcacaaggatgca

SEQ ID NO: 202466 - DNA, 288 bp, Glycine max
gcgcggcctctccgcctcgctcttccgcctcgacgcagcgggaaacggcggcgtcatcatcgactcgggcacctccgtgacccggctcacccgacccgcctacattgccctccgagacgccttccgcgtcggggcctcgcatctgaagcgtgcagcggagttctcgctcttcgacacgtgtttcgacctgtccgggctcacggaggtgaaggtgcccacggtggtgctgcatttccgaggtgccgacgtgtcattgccggcgacgaattacttgattccggtggataa

SEQ ID NO: 202467 - DNA, 286 bp, Glycine max
gtgttttgagactctgaggttgaagctgcattttttttaagggtggggatgggttctagttgtggttgtggtgtgacacttgttcttgttttctgcttatggggtgtgttgatctccctatcttctgctgctaggctcagtgcttcaaggcagaagcttgaggttgctaagcatttgaatcgcttgaacaagcctcctgttaagaccattcagagtccagatggggatacaatagactgtgtgcctatttcgaagcagcctgcatttgaccatcctttcctcaaag

SEQ ID NO: 202468 - DNA, 290 bp, Glycine max
gaagagaatggctcccaagggtttaatctttttggctgtgttatgcttctcagcactgtcactgagtcgttgtcttgcggaggataatggacttgttatgaacttctacaaggaatcatgccctcaggctgaagacatcatcaaagaacaagtcaagcttctctacaagcgccacaagaacactgctttctcctggctcagaaacatcttccatgactgtgctgttcagagttgtgatgcttcactgttgctggactccacaagaaggagcttgtctgagaaggaaacag

SEQ ID NO: 202469 - DNA, 290 bp, Glycine max
cacaacccatggccaccacctccgcattcctcctccttctactcctcctgctgctccacctcgccatcgccgctcacggcatcggcatcaactacggcacgctcggcgacaaccttccaccgcccgcggggtggcgaacttcctgaagacgaagacgaccatcgaccgcgtgaagatctacgacgtgaacccggacatcctgcgggccttcgccggcagcggcatctccgtgacggtgaccgcccccaacggcgacatcgccgccttaaccaaaatcgactcggcgaggc

SEQ ID NO: 202470 - DNA, 302 bp, Glycine max
gaattctgctcgagctataagtgtgagaagtgattggaaattgttggaacccaccctatcaacaaggagaagctgttttcgttcgtcgccactaacactaatcgtttcttcaatgccttacgagaaggaactcgccgctgcaaagaaagcagtcactctcgctgctcgtctctgccagaaagttcagaaggctcttctgcaatccgatgtgcactcaaagtcagacaaaagtcctgtcacagtggctgattatggttcacaagcattggtcagctttatacttgagagagaacttccttctg

SEQ ID NO: 202471 - DNA, 283 bp, Glycine max
  unsure (1)..(283): unsure at all n locations
acaaattgaatattagtggttaaggttgttggaggagctctaacaagagatatggagacacaaaattggttcgagagattgaagcctttcgcagctgtggtatcaatacagtttggatatgcagctatggatgttctatccaaggatgcaatgatcaaagggatgatctattatttgttctttgnttattgccatgctgttgcattctttgttatggcccctttggcatggttttttgacaagagagtaaggccaaagatgacattctcaattttcatgaaga

SEQ ID NO: 202472 - DNA, 287 bp, Glycine max
gtcgctttttactctctgcttttcctgtgcttctttcaatcggtgcgagggattttggaccccaacgatttcctcgctctgcaatcaattcggaaatcccttcacgatgttcccggttccaattttttctcctcctgggacttcaccgccgacccctgcaacttcgccggcgttttctgcgccgacgacaaagtcatcgcgctcaacctcggcgatcctagagccggttctcccggtctcaccggaaaacttgacccttccatttccaaactctccgctctcgcaga

SEQ ID NO: 202473 - DNA, 286 bp, Glycine max
ggaaagggaagccaaagcgaaaccctaaccctaacggagagatggcggacacttggcatcgatattcgggacggagaaggacagggtgaactgtccgttctacttcaagatcggcgcgtgcaggcacggcgaccggtgctcccggcttcacacgaagcccacaattagcccaacgttggttctgtcgaacatgtaccagaggcccgacatgaacatgaacatcatcaccaaccccgatcagccccagccccaatctctcgaccccgataaggtccaggatcacttc

SEQ ID NO: 202474 - DNA, 284 bp, Glycine max
cactcactcactcactcactcactcactcgcaagcaaaaagaaagaatcccaggcgaggagaaagatggaggggaaggagcaggatgtgtcgttgggagcgaacaagttccccgagagacagccgattgggacggcggcgcagagccaagacgacggcaaggactaccaggagccggcgccggcgccgctggttgacccgacggagtttacgtcatggtcgttttacagagcagggatagcagagtttgtggccacttttctgtttctctacatcaccgtctta

SEQ ID NO: 202475 - DNA, 285 bp, Glycine max
gcatgctgacacacactcactcactgtcccacctgagcttgttaccaaactagttaccgtcgtcggagccatccactgggtgggcaatcacttattcaaacttcacatctcatctcatctctctcgcatccactgaaccaagatccctattccaaaatggccgcttctgcttcttccagtccgtggctggctccaaaccccagcaaaagatggggcgaactcttcttccttctctacacccctttctggctcaccctttgtctcggcattgttattcccttcaat

SEQ ID NO: 202476 - DNA, 285 bp, Glycine max
atggccactcttcttcttcccacgctcctccttctcatacccttcgccaccctcgtctccgcccgccctcacctcgccggagactttctccgactgccctccgaaaccgataacgatgacaacgtccagggcacccgctgggccgtcctcctcgccggttccaatggctactggaattacagacatcaggctgatgtttgtcacgcctatcaaatactaaggaaaggtggcctgaaagaagaaaatattattgtttttatgtatgatgacattgcattcaatggg

SEQ ID NO: 202477 - DNA, 282 bp, Glycine max
ctcgagccgctcgagccgcagatcttcgttaagaccctcaccggcaagactataaccctagaagtcgagatctccgacaccatcgacaacgtcaaggctaagatccaggacaaggagggtatccccccagaccagcagaggctgatcttcgccggcaagcagctcgaggacggacgtacccttgctgactacaacatccagaaggagtcaactctccacttggtgttgcgtcttcgtggtggtatgcagatcttcgtcaagacccttacgggtaagactatt

SEQ ID NO: 202478 - DNA, 282 bp, Glycine max
aggctcgagagaatggctcccaagggtttaatctttttggctgtgttatgcttctcagcactgtcactgagtcgttgtcttgcggaggataatggacttgttatgaacttctacaaggaatcatgccctcaggctgaagacatcatcaaagaacaagtcaagcttctctacaagcgccacaagaacactgctttctcctggctcagaaacatcttccatgactgtgctgttcagagttgtgatgcttcactgttgctggactccacaagaaggagcttgtct

SEQ ID NO: 202479 - DNA, 283 bp, Glycine max
attgataattcaatgggaaagtacgaaaaagagcttaatctcgaggctacagagttgagattggggttgcctggaagcgatgagcctgggaaacgttctattgttagaagcaataagagatcttcaacagaagcaagcgaggaagagtgcataagcaagggcaacatgaattctaatggttctgatatcacaagtgatgaccaagacaaccttgtgccacctgcaaaagcacaagtagtgggatggccaccggttcgatcatataggaagaatactctacaac

SEQ ID NO: 202480 - DNA, 280 bp, Glycine max
gcgaagagaatggctcccaagggtttaatctttttggctgtgttatgcttctcagcactgtcactgagtcgttgtcttgcggaggataatggacttgttatgaacttctacaaggaatcatgccctcaggctgaagacatcatcaaagaacaagtcaagcttctctacaagcgccacaagaacactgctttctcctggctcagaaacatcttccatgactgtgctgttcagagttgtgatgcttcactgttgctggactccacaagaaggagcttgtctg

SEQ ID NO: 202481 - DNA, 281 bp, Glycine max
ctcgagccgctcgagccgattcggctcgagcttgaaccttcacaaaagccagccaaaaaaaacgctccaaatttcttgcaccaagtggcattccttcttgtgctctcaactgcggtttccagtggctatgcttgggttggtgtgaactggggaaccatggcgacgcaccagcttcaacccgagaaggtggtgaagatgctgaaggaaaacgggttcagaaaactgaagctgtttgatgcagacgagttcattatgacggctctgatggggaccgatatcga

SEQ ID NO: 202482 - DNA, 282 bp, Glycine max
cgagattttcttcacttccgtcgtatagttcaatctcctttcgttcctcacttttagggtttacaatttctccgatggcgcccgatcctaatcgcgccggcaccagcgccagcgccaacgccgccaaagacgacgccgttaccaagaagaaggtcgaaaacgaagatctgtccgatgaggatttggctttgaagcaacagctggagttgtacgtggagagggttcaggatcctgaccagggattgcagaaggttgcactcgagagcatgaggcaagaaattc

SEQ ID NO: 202483 - DNA, 283 bp, Glycine max
aacacttgttattactctttcattggtgctttcgacacttgtgtccttctccactttcacacatgccttctcttcttctgcgtttccggaactgaatcctataaaacctaggcactcacgtcttctcaggagtgccgtgcaacatgaaactcctacatcacagctttctgaaatatggtcacctctggaaagccaaggatggaaaccttatgttgaatcaaataagccaacattaccagagaagtccgagggatatatccaggtctttcttgatggaggtttg

SEQ ID NO: 202484 - DNA, 278 bp, Glycine max
cttattcaggaatttggagagtattgatatatcaaggtaggataaaccagtagccaaggaagatatggagttttctatgattttcattgttagcaacattatgctgcttttcagttcagcatttgccaaaactgctagtcctccctctctgagcccaactccagcaccagccccggcaccagacttcgtgaacctcactgagttactcagtgttgctggtccgtttcacaccttccttggataccttgagtccactaaagtgattgacactttccaaa

SEQ ID NO: 202485 - DNA, 275 bp, Glycine max
attcaagcttgggaggaagattgggagtggatcgtttggagagctttacttaggtgttaatgtgcaaagtggggaggaagtggctgtgaagctggaatctgtgaagaccaagcacccacagcttcactatgaatcaaaactatatatgcttcttcaagggggaactggtataccccatctaaaatggttcggagttgagggtgactacaatgtcatggttattgatctccttgggccaagtcttgaagacttgtttaactattgcaatagaaaat

SEQ ID NO: 202486 - DNA, 278 bp, Glycine max
cacaggctcaccgtggaggatcccgtcacggttgagtacataacgcggtacattgctgggctccagcagaagtacacgcagagcggcggcgtgcgaccctttgggctttcgactctcattgtcgggtttgatccctacactggctcgccctccttgtaccagacggatccctctggcaccttctcggcgtggaaggcgaacgccaccgggaggaactcgaattcgattagggagttcctcgagaagaactataaggacacctctggccaggagactgt

SEQ ID NO: 202487 - DNA, 279 bp, Glycine max
attttattcgtctgtgtaacaaacacttcaacaatctactctatacccgatttacaagatgagttcatttagccaaaatccctatgttttagttctgttcctcgttctcactgtgtggatatcccgtgtaatgtctcgcgggctcattacatctgagagacatgagaaatggatggcacaatatggtaaggtttacaaggatgctgcagagaaggagaaacgtttccaagtattcaaaaacaatgtgcagttcattgagtcattcaatgctgctgggga

SEQ ID NO: 202488 - DNA, 277 bp, Glycine max
cattgatgaagatgctggtgaagcagatgctgacatgcctcctcttgaggacgctgatgcagatgctgagggtagcaagatggaagaagttgattaaatctgacttaattgcctgttacgtttttagaaacaatgattggagaaacagtctttttactatgttttatgttttttgaattttcgaaatttaggaacgttggctagttaggtgccgtatgtagtagtttctttatggtaaatttgtgtccgctccctggccaatgaatttgtgctttct

SEQ ID NO: 202489 - DNA, 279 bp, Glycine max
gacaaaggagattcagaactcatcgcgcacaatcaagtcgacaccaccaccaacaactcttactagaggacgattctcaaagctctcttccagaaaatggtgagggcgaggaagaggaggaggaactcacggaacctaaaataaagcttgctatgtgggattttgggcaatgcgatgccaaaaagtgcactggacgcaagctttcaagattgggcatgctaaaagagttacgtgtgagtaatggttttgggggcattgttttaagtccggctggaaatc

SEQ ID NO: 202490 - DNA, 273 bp, Glycine max
aaaaaggggttagggtttgttcttgtgatcgaagctaagcgaagcaaaatgggtggatcagtgagggacgtgaagtcgaagggcgaggtcgacgaggtggtggcgagttgctctccggttatcctccacttctgggcgtcgtggtgcgaacattccaagcacatggaccaactcttctctcacctttccactgatttccccaactgccgcttcttaagggtcgaggccgaagagcaacccgagatttctgaggctgactccgtctccgctgtt

SEQ ID NO: 202491 - DNA, 274 bp, Glycine max
atatagcccaagccctatacaaccaaaccctaacacacacccatttgattcagtttccatggctagcctcaaggttgcattttttgctgcagtgctctgcatggttgtggtgagtgcacccatggcacatgcagctatcacgtgcgggcaggtgacgagtagcctggccaattgcatcggttacctccagaagggaggaacgccgtcgtcgggatgctgcaacggagtgaagagcctcaatgccgccgccaagaccaccgccgaccgccagacg

SEQ ID NO: 202492 - DNA, 289 bp, Glycine max
ggaattcgtctcgaggatttgtatagcctcccaaaccttctccttacagagatggtagtgaattatctactcgagatttgcaaaaaatggttcaagctttgccccaatacactgaacaagtggaaaagatctcacttcatgtagagatagctggaaagattaacaaaattatcagagaaacggaccttcgagagcttggacagttggaacaagatcttgtttttggggatgctggagccaaggaagttattaactttttaagaacaaagcagaacacgtctcctgaata

SEQ ID NO: 202493 - DNA, 275 bp, Glycine max
attttatccaattgaaattttaaaaatgactgggataaacttaagaattcaattattgaaattgaataagtaaacaatttaattggattggtcgaatggtatcaaaaaaatggagtactaactcccatttcttatttattattgaattaaccgatcaacttgctttgttatcgaacatttctttttgatttcaaaaattttccggaaaaaatttgaatctatttttatatgcgaatcaatcctactacttctggtcctgaggtttctgcgcttga

SEQ ID NO: 202494 - DNA, 276 bp, Glycine max
cttagctttgattctctgttctctgttttgttctgtttcgcgtattgtcttcatacaggaacttgaacaatgaagaatgcaaagggcaagggagcagcaagggcctcaaaagaatcactgaagcccgttgatgaccgaaaggttggaaagcggaaggcttccggtaagcctgggagaagtagtgcaccaaagaaggagaagaaggccaagaaagaccccaacaagcctaaaagaccacccagtgctttctttgtgttccttgaggagttcaggaag

SEQ ID NO: 202495 - DNA, 272 bp, Glycine max
tactcgagccgaatcggctcgagggcgaaagactttaggtttggaattaggaattagggttgttcgcgtcacgaagatgatcgacgtggtgttgaacgatcgattggggaagaaggtgcgcgtgaagtgcaacgacgatgacaccatcggcgacctgaagaagctggtggcggctcagacgggcacaagagccgacaagatccgcatccagaagtggtacaccatatacaaggatcacatcactctcaaggattacgagatccacgacggca

SEQ ID NO: 202496 - DNA, 273 bp, Glycine max
tctgactcctatagtttcctctgctaattccatatccccgttttccttcactcttgaaccccgattcatttccaccagcacaagaagcatggctgcaatatcaataccttctcacatgaaagcttggacatactctgagtatggaaaatccaaggaagttctcaagtttaatcagagtgtggctttgcctgaggtgaaggaagaccaggtcctcatcaaggtcgctgctgcttcccttaaccccattgatcataagagaatggaaggctattt

SEQ ID NO: 202497 - DNA, 270 bp, Glycine max
ctcaaatctcttcgttccttcgattcgttccatttcttccaaaatggccaaagacccagttcgcgttctcgtcactggagctgcagggcaaattgggtatgctcttgtccctatgattgctaggggagtgatgttgggtcctgaccagcccgtgatcctccacatgcttgacattcctccggcagcagagtcattgaatggggttaaaatggaattggtggatgctgcattccctcttcttaaaggtgttgttgccacaactgatgtggt

SEQ ID NO: 202498 - DNA, 270 bp, Glycine max
caaattctcattttcaagctgtttggtgtaaagatgggacaagtgcttggttgtgttcaagtgaagcagtcaactgtagccgtcaaggaatgtttcgggaagtacgatgatgttcttcaacctggttgccattttgtgccatggtgtcttggctgcggtgtggctggtgtcctttctacgcgtgtcatgcagctaagtcttcgttgtgaaactaagacaaaggacaatgtgtttgttaatgtggttgcctcaatccaatatcgagcattg

SEQ ID NO: 202499 - DNA, 273 bp, Glycine max
gttactatctataattaattaaattcctcgtggaatattgaagaagccatgtctacagctgggcaggtcatcaagtgcagagctgcggtggcatgggaagcagggaagccactgtcaatagaaaccatagaagtggcaccaccccagaaaggtgaagtgcgtttgaggatcctcttcaactccctttgccgtagtgatgtttattggtgggatgctaaggaccagactcctctgtttcctcgtatcttaggccacgaagcttcaggattgtgg

SEQ ID NO: 202500 - DNA, 270 bp, Glycine max
tttctctcttccaatatttgcaatggcagaaacacaaacccagagaccctgttcaagcgtcctcgattctctgggggaagaaatcgtgagaatcatcgcacccgtttcaatatgcatgttcctggtcgtaatcctggtctcaactctcaacaccgattcttctctcttcgacgcatcgatgagcatggtcaccatcgcgtacaacgaaacaacctcggaccccacctgggacaagttcctaggagcccttctgaactccttagccttcgt

SEQ ID NO: 202501 - DNA, 268 bp, Glycine max
aaaaaattgaatggccatggaaaataaaaaaattatagagtattgggttgtgtctatactttgcatgcttttgtcgggtcattggatctctgttcaagctgcccctgcaccctctctcatcacacaactccctggctttaacgccaatttcccatccaagcactattccggatatataagtattgatggaaatactgaaagtgggaagaacctgttctactacttcgttagttcagaaagaagtccagagaaggacccagttgtgcta

SEQ ID NO: 202502 - DNA, 266 bp, Glycine max
gtttcgctaggaggtccccatatccctcttaaaacaggaagaagggatggtagaaggagcagagccgatgtggtagagcagttcctcccagaccacaatgaatccatttctgcagttcttgacaagtttggtgccatgggaattgacacccccggcgtagttgcattgcttggagcacacagtgttggtcgaacccattgtgtgaagttggtgcaccgtttgtacccagagattgatccagctctgaaccctgaccacgtccctca

SEQ ID NO: 202503 - DNA, 267 bp, Glycine max
ggccaggcaagccccactcaaccaccacacctctcctcgttcacgctacccctttctgctcttcttctacctttcaagttttaaaagtataaagatggcagagacattcctatttacctcagagtcggtgaacgagggacaccctgacaagctctgcgaccaaatctccgatgctgtcctcgacgcttgcctcgagcaggacccagacagcaaagttgcctgcgaaacatgcaccagaaccaacttggtcatggtcttcggagaaat

SEQ ID NO: 202504 - DNA, 269 bp, Glycine max
tcctttcctgttcatacttgtttcttcaatttcatttcttttattacttttactctttgcattccaaatggccactgttgaggttgcacaacaaacaccaacatctgtgacagaaaatgaagcaaccgaggtaaccaagattgaggaaactaccccagaacaaccagctacccaggttactaccaccgaagaaccataggaagaaaccaccaaagaagcaaaagaggaagaagaagccccagttgagactaatgaggcaacagaagtga

SEQ ID NO: 202505 - DNA, 269 bp, Glycine max
aatctctctcctccatggacccaacttcgatccctacccctccggccaccaccgtccccttcactgtcgaacccagcaatcacgtgacccccgccgacaacaccaacaccaaccaccctccttacgatgagatgatatacacagcaatcggggctctgaaggagaaagatggttcgagcaagcgagccataggaaagtacatggaacaagtgtacaaggaccttccacccacccactctgctttgttgactcaccatctcaaccgattg

SEQ ID NO: 202506 - DNA, 271 bp, Glycine max
caatttttctctcaaccggcccaatttagcataagcccagcatggccaccgcaacagcagcagccacctcgtccttcatggggacgcgcctcctggaggcccattccggggcggggcgggtgcaggcccggttcgggtttggcaagaagaaagccgccgccccgaagaaagtttccagggggtcgggctctagctccgataggcccctgtggtatccgggcgccaaggcgcccgagtacctggatgggagccttgtcggagactacgggtt

SEQ ID NO: 202507 - DNA, 269 bp, Glycine max
cgagttcaccattacgagatggctaagtcgaagaaccacaccgctcacaaccagtcctacaaggcccacaagaatggcatcaaaaagccaaagaggcaccgccacacttccaccaaagggatggatccaaagtttctgaggaaccaaaggtacgcgaggaagcataacaagaagagcggtgaaacagccacggaagaagagtaaagtgtcactctcaaatggggctattaggatttgatttgctattcaagtcccatatgttttgtgtc

SEQ ID NO: 202508 - DNA, 263 bp, Glycine max
tctcaagccgaatcggctcgagggcagaatgcgtgacagacttggactcaggctgccgcgtaccgaaacagcgcggcggcaacacacttaaaagtgatttccatctgtacaatttttgttaccagcgtgatgggcgtgtcaacacccgtcatgctggcacgatattttcaaggaaaatctctgtatgatattgccttcttattgatcaaatgctttgctgctggtgtaattcttgccacctcattggtccacgtgttacctga

SEQ ID NO: 202509 - DNA, 261 bp, Glycine max
cagaattctctaaaagagatctttttctgctctttgaagaaagaagggtctttgcctgattttggagatgtctctgctctcagatctcatcaaccttaacctcaccgataccaccgagaaggtgatcgcagagtacatatggatcggtggatcaggaatggacctgaggagcaaagcaaggactctcccaggaccagttagcgacccttcagagcttcccaagtggaactatgatggttccagcacaggtcaagctcctgg

SEQ ID NO: 202510 - DNA, 257 bp, Glycine max
ggcagtttgtttttgtagactgtttcatcttgtaaatgcctacactggaatcgtgatatcatgtagaataaggctagtcttgcatattgttttgaatttacaatttacaagcatcatccatacataggattatgtttccgtgaaacggtcattctaaagacgtgcttgaaacaaataggtctacatcaaagttcatatagcttaagttttatttgaaggattttgatatttgctatgctctaattatggtgcagcta

SEQ ID NO: 202511 - DNA, 258 bp, Glycine max
ctacttctactacttcaccctttctttctctcagactctcacttccaatggcttattcttctccctccgttattaaggatgccaaggtgcttatggttggcgctggcggaattggctgcgagcttctcaagaccctcgctctctccggtttccctgacattcacatcattgacatggacaccatagaagtcagtaacctgaacagacaatttttatttcgacaaaatggaaatttggagaaaaaatatgaatctgatg

SEQ ID NO: 202512 - DNA, 263 bp, Glycine max
ataaccaaacactcttcttcatattcttcttcttcttcttgttcttgttctatctgtgacgagcatcatggcctcgagagcagtgctattgttggctatgtgtgtgcttccggccatggttgtggccattcgcccagcaaagaaccctttttgcgtgaagggtcgcgtctactgtgacccttgccgtgctggttttgagacctcagcaaccacctacattgccggtgctgagattatgttgcaatgcaagagcagggttagca

SEQ ID NO: 202513 - DNA, 262 bp, Glycine max
atttgatgatgagaaatcactacttatgtcacaaatgagcctcgagaaaaggtttggtcagtctgctgtctttgttgcctctacactcatggagaatggtggcgttcctcagtctgcaactccagaaactcttcttaaggaagctattcatgttatcagttgtggttacgaggataaatcagaatggggaagtgagataggatggatctatggttctgtcacagaagatattcttactggattcaagatgcatgcccgaggt

SEQ ID NO: 202514 - DNA, 260 bp, Glycine max
gttcatctactctgagccgcataacttcccggaatcgtgcatacctacgttcaatatgtcgctggtggcaaacgaggatttccagcacatacttcgtgttttgaacacgaacgtagatgggaagcagaagataatgttcgctcttacctcaatcaaaggtattgggaggcgattttctaacatttgctgcaagaaggctgatgttgacatgaacaaaagagctggtgaactgagtgctgctgagttggatagtgtgatga

SEQ ID NO: 202515 - DNA, 260 bp, Glycine max
ccattaccggcgaacgaaatcggtgacagaaaagcaacaagcaatctcgatccccaaatcgtgaaatccgatgacgaccgctgcaagacccacatgggcacctgctaaaggtggcaacgaacaaggtggtactcgaattttcggtccctcacaaaagtactcttctagggacatcgcatcgcacaccactctcaagcccaggaaggaagggcaggacacacaggatgaattaaagagaagaaacctacgtgatgaactgg

SEQ ID NO: 202516 - DNA, 269 bp, Glycine max
ttttggagagaaccaaagagaaaggcatggtttttccttcatgggcaccccaaattcaaatccttagccacagttcagttggagggttcttgactcactgtggttggaattcgatccttgagagtgtgctaaagggtgtgccattcatcacatggccactgtttgcggagagaaaatgaatgcgattttgctatgtgagtgtctcaaagtgggagtgaggccaagagttggtgaaaatggtttggtggaaagggctgaaattgtgacgg

SEQ ID NO: 202517 - DNA, 257 bp, Glycine max
cgcaagaaaaagaaagaatcccaggcgaggagaaagatggaggggaaggagcaggatgtgtcgttgggagcgaacaagttccccgagagacagccgattgggacggcggcgcagagccaagacgacggcaaggactaccaggagccggcgccggcgccgctggttgacccgacggagtttacgtcatggtcgttttacagagcagggatagcagagtttgtggccacttttctgtatctctacatcaccgtcttaac

SEQ ID NO: 202518 - DNA, 258 bp, Glycine max
attttgctgaatggagagtgcaagactcagcaaatggttaaatcttctagtttgtgtactgctattgcttaaggcagaaggatctcttgttccattgactttggtgaagaatgcagaatcaaaaggagctgtttgtttggatggaagccccccagcataccactttgacaacggatttgaagaagggattaagaactggattgttcacattgagggaggaggatggtgcaacaatgtagagagttgcctttaccgtaa

SEQ ID NO: 202519 - DNA, 266 bp, Glycine max
caagttactatctataattaattaaattcctcgtggaatattgaagaagccatgtctacagctgggcaggtcatcaagtgcagagctgcggtggcatgggaagcagggaagccactgtcaatagaaagcatagaagtggcaccaccccagaaaggtgaagtgcgtttgaggatcctcttcaactccctatgccgtagtgatgtttattggtgggatgctaaggaccagactcctctgtctcctcgtatcttaggccacgaagcttc

SEQ ID NO: 202520 - DNA, 269 bp, Glycine max
gtggattttctgatgggtggagtgtctgctgctgtgtcaaagacagctgctgctccaattgaacgagtcaaattgcttatccaaaatcaggatgaaatgatcaaaagtggtcggttatctgagccatacaagggcattggtgattgttttgctcgaaccatgaaggatgagggtgtgattgctcttagcaggggcaatactgctaatgttatcagatatttccctactcaggctctgaactttgcctttaaggattacttcaagagact

SEQ ID NO: 202521 - DNA, 263 bp, Glycine max
ggcagttggtttttgtagactgtttcatcttgtaaatgcctacactggaatcgtgatatcatgtagaataaggctagtcttgcatattgttttgaatttacaatttacaagcatcatccatacataggattatgtttccgtgaaacggtcattctaaagacgtgcttgaaacaaataggtctacatcaaagttcatatagcttaagttttatttgaaggattttgatatttgctatgctctaattatggtgcagctagtaaca

SEQ ID NO: 202522 - DNA, 259 bp, Glycine max
cctccatggcggatgatctccaaaataaaaatctcaatctgtttacttagctcttgatttttattttggagatcatccaccatggaggccttagccaaggcaatctgtacagtcttctcagcttcaataagtgctgcttctttagatttggtcagacggtctaaagctttgttatcatcttgaagttttgctatctcttgccgcgcaagcttaagttcagcctccagaggagcaagaatggcctctataggaggcatgt

SEQ ID NO: 202523 - DNA, 254 bp, Glycine max
atcgtattggtaggttgaaaaacaaagagtgtgtgttgttgttgtgtggtttggttttcacttttgttcatcgtttgcgagacacacaggagagaagagatggcgacgagggtggtggcggaacagaagccgaagacgaagattgtgtgcacgctggggcccgcatcgcgctctgtcccaatgatcgagaagctactgcgggcgggcatgaacgtggctcgcttcaacttctcccatgggtcccacgagtacca

SEQ ID NO: 202524 - DNA, 255 bp, Glycine max
tgctccgcaccagtttcaccgcacgaatatcttgttgtttggagcgatccgagaaaaactctgtaaacatgttggtttaccaggacctccttacaggtgatgagcttctctctgactccttccgttacaaggaaattgagaatggaatgctgtgggaagttgaggggaagtgggttgttaaaggagcagttgatgtagacattggtgcaaacccttctgctgagggtggaggagaagatgagggagttgatgatg

SEQ ID NO: 202525 - DNA, 254 bp, Glycine max
ctcgcaagcaaaaagaaagaatcccaggcgaggagaaagatggaggggaaggagcaggatgtgtcgttgggagcgaacaagttccccgagagacagccaattgggacggcggcgcagagccaagacgacggcaaggactaccaggagccggcgccggcgccgctggttgacccgacggagtttacgtcatggtcgttttacagagcagggatagcagagtttgtggccacttttctgtttctctacatcactgt

SEQ ID NO: 202526 - DNA, 256 bp, Glycine max
caccctagcccctcttctcttcattcttcactcaggaaacaagcataatggccttctgtaataaggttggaaatgtcttgaggcagggtgctgctcgcagcacacaagcacctgtttcatccatgcttaattacattcgctgcatgtcttcaagcaagctttttattggaggcctttcatatggagttgacgatcagtctcttaaggatgcattttctggctttggagatgtggttgatgcaaaagttataactga

SEQ ID NO: 202527 - DNA, 259 bp, Glycine max
ggagaccagtgatgatcttatccgtcatatgcaagaacaattcagagaaaaagctcgcaaatctgagtcaatctattatgcagcaacagatgttgtaatcctgagattcatgattgaggtgtgttgggcaccgatgttagtcgctttcagtgttcctcttgatcgaagtgatgatgaggttgtaatatctctgtgtcttgaaggcttccgctatgctattcatgttacttctgtaatgtcgatgaagactcatagagat

SEQ ID NO: 202528 - DNA, 260 bp, Glycine max
ctttgaaattgctgagaacaaggaagactataacaagttttatgacgccttctctaagaatctgaaacttggtattcatgaggattctcagaacaagacaaaacttgctgaattgctcaggtatcactccaccaagagtggtgatgagatgaccagcctcaaggactatgttaccaggatgaaggaagggcagaatgacatctactacattactggtgaaagcaagaaagctgttgagaattcccctttccttgaaaagc

SEQ ID NO: 202529 - DNA, 256 bp, Glycine max
caaattctcattttcaagctgtttggtgtaaagatgggacaagtgcttggttgtgttcaagtgaagcagtcaactgtagccgtcaaggaatgtttcgggaagtacgatgatgttcttcaacctggttgccattttgtgccatggtgtcttggctgcggtgtggctggtgtcctttctacgcgtgtcatgcagctaagtcttcgttgtgaaactaagacaaaggacaatgtgtttgttaatgtggttgcctcaatcc

SEQ ID NO: 202530 - DNA, 255 bp, Glycine max
  unsure (1)..(255): unsure at all n locations
gaaacattctaaaacanaggacccagttttacatttttttttgttcctgagttccaatggctcttcaggctgcttccttggtttctgcttctttttctattgctaaagagggaaagtctggtgtatctctcagggacaccacaatgtttggtgtttcattgtcggatactctcaaatctgacttcatgctctccctcatcgacttgcaaaagggaattccaacaaaaatttggccctttgagggttcagtcagtg

SEQ ID NO: 202531 - DNA, 253 bp, Glycine max
ctcgagccgtaaaaataccgggatcaccgtaacgagtgactcttcttccttcttcttctacttcttttgtttctatttttttctgcgtaggcaaagagagagagagaaaagcgtgaatcatgtcggacgaagagcatcacttcgattctcaggcggatgcgggagcgtccaagacgtatcctcagcaggctggtaccattcgcaagaatggctacatcgtcatcaaatccaggccttgcaaggttgtagaggt

SEQ ID NO: 202532 - DNA, 254 bp, Glycine max
cacccactaagatggcttcctttgtatccttcctagtgctgcttcttgcagcccttatcctcatgcctcaagggcttgctacttactacaaaccaattaagaagccaccagtgtacaagcctccagtgtacaagccaccagtgtacaaaccaccggtttataagccaaaaccaccggtttacaagccgaaaccaccggtttacaagccaccatataagaagccaccatacaagaaaccaccttatggaaagtac

SEQ ID NO: 202533 - DNA, 253 bp, Glycine max
cggctcgaggaagccatgaataaagtggtagacgttttgagtgtagcaccaattttggaatcagaagagttaccaactcaaacatcgcttcccctcaccttctttgatatactatggttaaggttaccacctgttcaacgcatcttcttctatgaatttcctcacccaacccatctcttctttgatacccttcttcccaaactcaaacactctctttctcttgcacttgcctactttttccctcttgctggac

SEQ ID NO: 202534 - DNA, 258 bp, Glycine max
attctttactgtcacatggtggaaccaagaatgaagactgttggagaaaaaactgaatgccctcatagcctggtgcctatgagaaaggccttcaatggcacttttatagccgcaggaggttatgaccgccaagatgggatcaacgctgtagctgaaaacagggctgatcttgttgcttatggccgttggttcttggctaatccagatttgccaaaaagatttgctctcaatgcccctctcaacaagtatcaccgggag

SEQ ID NO: 202535 - DNA, 264 bp, Glycine max
gtgattgaaaatgcacttccccttccagggattgagcatgttggaggggatatgttcgcaaaagttccacagggtgacaccataatactaaaggctgtatgccacaattggtcagacgaaaaatgcatagaatttctgaggaattgtcacaaagcattgtctccaaatgggaaggtgattgtggtggagttcatattgccagaagaacccgaaccaactgaagaatcccagcttgtttccactcttgacaacctcatgtttatc

SEQ ID NO: 202536 - DNA, 254 bp, Glycine max
gtgcatcatttgcagccacatgatcaatttattatattcgcatctgatggactctgggagcaccttagcaatcaagaagcagttgatatagttcaaaacagtccccgcagtggaagcgctaggaggctggtaaaagctgcgcttcaagaagctgcaaagaagagagaaatgagatattcagatttaaagaaaattgatcgcggagttcgtcgtcatttccatgatgataccacggtgattgttgtgtatcttga

SEQ ID NO: 202537 - DNA, 251 bp, Glycine max
aaaaagatgagcgacggaggaaaacgacaaggtggaagagcgttgccgccgccgccaagaggccctccgcctcctcccccctctcgccctcgcctcgaacccgtcgatcgcgaaaagacatgtccgttactgctgcgagtgttcactaagattgggagtcaccattccatggaagactttgccgtcagaggcaaagagcccaaagacgaggttcagatttacacctggaaggacgctactctccgagaact

SEQ ID NO: 202538 - DNA, 254 bp, Glycine max
gaggagccatttgggagttaggttctgcacgctctgcttccagcgagtgttctttcttcgtttcaacaccttaatttgcacacgctgcttcttcagcttgagaaatggcacaagaaacctttctattcacatctgaatctgtaaacgagggtcaccccgacaagctgtgcgaccagatctctgatgcagtgctcgatgcgtgccttgaacaggaccctgacagcaaggttgcctgtgagacatgcaccaagacc

SEQ ID NO: 202539 - DNA, 236 bp, Glycine max
ggctcgagagctaatgaaaagaagcgtcctactgttcttacgagagctaggattttctggcagccaaaggtatgctgcaacatggactggagataatctttctacatgggagcatcttcacatgagtatctccatggtacttcagctgggacttagtggtcagccactttcaggtcctgatattggtggatttgctggaaatgcaacacctagactttttggaaggtggatgggtg

SEQ ID NO: 202540 - DNA, 252 bp, Glycine max
gtcagagaaaccctaggtaagaagaaaagatgccggctggtcatggtttgagatcccgcaccagagattccttctctcgtcctttcaggaagaagggaaccatcgccctcaccacatacctgagaacctaccacgtcggcgactatgttgacgtcaaggttaacggtgccgttcacaagggaatgccccacaaattctaccatggccgcaccggacgcgtctggaatgtcaccaaacgtgctgttggcgtcg

SEQ ID NO: 202541 - DNA, 252 bp, Glycine max
gtgaaatccgccggagcgttggggatggtgctgtccaacaccgccgctaacggcgaggagctagtggcggatgctcatttattaccggccaccgcagttgggcagaaagccggtgacgctattaagaagtatttggtttccgatgcgaaaccgacggtgaagattttttttgagggaaccaaggtggggattcagccatcgccggtggttgctgcgtttagctcaagaggtcccaactcgatcactccacag

SEQ ID NO: 202542 - DNA, 250 bp, Glycine max
gcaacggctgcggaggctgcaagatgtacccagacttgagctacaccgagtcaaccaccaccgagaccttggtcatgggagtggcaccagttaaggctcaattcgagagtgctgaaatgggtgttcccgctgagaacgatggctgcaaatgtggagctaactgcacctgcaacccctgcactcgcaagtgaggtgttggagagctaaagcttcaagcagaaatggcccttagaaataatgataaaaacta

SEQ ID NO: 202543 - DNA, 245 bp, Glycine max
gcaaaggattctacccgccgctcgatgggaattgcgcttcaaggcgtctcgtagggctaatccgcctcacgagggtcaccaacggcacgtgcctttcgggggccgaggccccctactgctggtaggcaaacggacggcgggcgcacgcgtcgcttctagcccggattctgacttagaggcgttcagtcataatccaacgcacggtagcttcgcgccactggcttttcaacgcagcgcgatgacca

SEQ ID NO: 202544 - DNA, 247 bp, Glycine max
attttctctcttcttcttctttctccttttccttattcacattagatcagactatggatcgcccaacactatcatcattattttcatacctactaacacttcatctatcattatcaggggtaatttcaacaacattcactctagttaacaaatgtgactacaccgtgtggccgggaattctttccaatgcgggtgttcctcctctttcaaccaccggcttggttctccaaaccggcgcctccaccac

SEQ ID NO: 202545 - DNA, 249 bp, Glycine max
ttaacatatacaaattctctgtgttgtgttgtgtacttgtgttaattgtgttgttgttgtaggaaatttaagtgaagagagaatgatgatgaagtctgctatgtgtgcattggtgcttgtggcactggttgtggttgaagtggggcccatggctgaggctgcggtgacttgcaacccaacacagttgactccttgtcttccggcaattaattcaggttctgcaccttcgagtgcttgttgccagaagct

SEQ ID NO: 202546 - DNA, 252 bp, Glycine max
cacaaccttaaacctttctttcttgtaaactttattgattgattctgagaatagaactaagagggtatagacatggctagcgcaattgcagcttcttttttggttctgcttctggctttccccactgtatttggagctgaccatgaagttggtgacactagtggatgggccctcggagttaattacaacacctgggcctctgggaaaactttcacagttggtgacactttgggtaagtctcttcatgttctt

SEQ ID NO: 202547 - DNA, 221 bp, Glycine max
tgatatgaaactacgggatagatggaggaagtttgctatcatggctgggttggtgctagaaggatgacaatttgatgctcgtcaatatgatgctaagatgaatgagttacttggaactgatgggcaagatttttttacttcgagtgatgaagtttgtgatagctttgatgctatgggattgcaggagaatcttctgaggggtatttatgcatatggttttg

SEQ ID NO: 202548 - DNA, 269 bp, Glycine max
ggaaggttggtgtgacactactgtcatactgcactgcttataacttttttctctttctctcaattcaattgccttctcccctgcgaatctcttctccacgtatcggagaatctggggaacaagatgaatgcgatcgcgttgtgcttgttagtgtcgaccctgttggtttctgcggtgtattgtgcaccgaatgctgggctccgtaggattgggctgaagaagattaaattggaccctaaaaacaggcttgctgctcgagttgggtccaa

SEQ ID NO: 202549 - DNA, 278 bp, Glycine max
acatacggctcgaggctgtctcatcgaacgacgtcgctttggtgtcctcggagatggagaagttcctgtgcgagttgttgctggattcctcgcagccaatttccgagcgtttcagagcgctcttctctctccgcaacctcaaaggccccgtccctcgcaacgcccttatttgcgccacaagggattcgtcgaatttgttggcgcacgaagctgcatttgcgttgggtcaaatgcaggatttggaagccatccctgctttggcctcagttctcaatgat

SEQ ID NO: 202550 - DNA, 262 bp, Glycine max
cagtttcaccgcacgaatatcttgttgtttggagcgatccgagaaaaactctgtaaacatgttggtttaccaggacctccttacaggtgatgagcttctctctgactccttccgttacaaggaaattgagaatggaatgctgtgggaagttgaggggaagtgggttgttaaaggagcagttgatgtagacattggtgcaaacccttctgctgagggtggaggagaagatgagggagttgatgatgcagctgttaaggttgtt

SEQ ID NO: 202551 - DNA, 261 bp, Glycine max
ctgatctccgtctagttccttctctgaccgttttccatggtgaatcttcctttcatcgtctgaaaaatcttgaaaaaagtgatcggcgtggtaatcttagttaacactaggtctttcgttttcttccaccctctctctctcttggtcgttgttggttctgctctgaacgaggtgtgatatattcggcaacggatcgggatcgagggattgatattgttgtttttttcccgtgattacttgctattttcagctcctgttttg

SEQ ID NO: 202552 - DNA, 248 bp, Glycine max
gctcaacacaggcattagctgattatgctactctcatcattgatttgaagaagaatttgtcagcaactgattctcctgttgtggttttcggaggatcctatggaggaatgttggctgcttggttcaggatgaagtatccacacgttgcaattggagctctagcatcctcagctccaattctccatttcatgggtttggtttcgccagatatcttcaacaacatcatcacacaagatttcaggagcgag

SEQ ID NO: 202553 - DNA, 259 bp, Glycine max
acactttccaatacaataatcactaactgaatattcgatcggagatgtctgccgccgccgaagaagctaacgctcccgccgtcgaaaagccggttgaggaggtgaaggcgccgaaccccgcgaaggagaagaaacctaaggctccgaagaaaagaagccaaaacaggccaaaacagcgtcacatcctccacattttcagatgattaaggaggctttgatcgcgttgaacgagaaaggaggatcgagtccttatgcgata

SEQ ID NO: 202554 - DNA, 258 bp, Glycine max
gtgactcgttcttcttcgtcgttatcttcttcttttgttgtttgtgtgtttgttttttctctcacctgaaaatgtcttgctgcggtggtaactgtggttgcggaagcgcctgcaagtgcggcaacggctgcggaggctgcaagatgtacccagacttgagctacaccgagtcaaccaccaccgagaccttggtcatgggagtggcaccagttaaggctcaattcgagagtgctgaaatgggtgttcccgctgagaacg

SEQ ID NO: 202555 - DNA, 260 bp, Glycine max
cactattgaataggcaatgtaaaatgcagtagtttaatctgagaaagattatgcaggtgtgatcgtatattgtggctaggcaaaggaataaaacaactacaatatggacgtgcagaaattaagctctcggatcatagaccagttagttcagccttcttggttgaagttgaagtattcgaccatcgcaagctaaagagagctctaaatttcactagggcagcagtacacccagagatcttccttgatgaagatggagaaat

SEQ ID NO: 202556 - DNA, 255 bp, Glycine max
gtttctttctggaagcttcacttcggcatccatggcgtcgttcgaagaagctcctcccggaaactccaagaacggcgagaagatcttcaagaccaagtgcgctcagtgccacaccgtggacaaaggtgccggtcacaaacaaggacccaatctgaatggtttgtttggaaggcaatctggcacaactcctggatattcctattctactgctaacaaaaacatggctgtgatttgggaggaaaagaccttgtatga

SEQ ID NO: 202557 - DNA, 124 bp, Glycine max
aaactcttgaaacatgttggtttaccaggacctccttacaggtgatgagcttctctctgactccttccgttacaaggaaattgagaatggaatgctgtgggaagttgaggggaagtgggttgtt

SEQ ID NO: 202558 - DNA, 260 bp, Glycine max
cttctcagaagaaaatgggaagagggaagattgaaatcaaacggatcgagaacaccaccaataggcaagtacaccttctgcaagcgccgcaacggtttgctgaaaaaagcttatgaattatcagttctgtgtgatgctgaagttgcccttgttgtcttctcaacccgtggccgtttgtatgagtatgccaacaacagtgttagggccactattgagaggtacaagaaggcaaatgctgctgcttcaaacgcagaatccgt

SEQ ID NO: 202559 - DNA, 256 bp, Glycine max
agaaattaatggaggcatcacccagtactctggattggagaggcagaccatccaaccctgccaaacacggtggcatgattccggctgcttatgttcttaggttgcaagcatttgagataatcgccaatagcggcagtgggaaacaatctgataacttatgtggccaatgacatgcacttccctgtgtccaaggctgccgacctagtcactaactcagttgggaccatctttctcctctctctcctcggcggctatc

SEQ ID NO: 202560 - DNA, 254 bp, Glycine max
caccccttcttccttttcatcaggtttattccttttcttttggttcaattttgctgaatggagagtgcaagaatcagcaaatggttaaatcttctagtttgtgtactgctattgcttaaggcagaaggatctcttgttccattgactttggtgaagaatgcagaatcaaaaggagctgtttgtttggatggaagccccccagcataccactttgacaacggatttgaagaagggattaagaactggattgttca

SEQ ID NO: 202561 - DNA, 247 bp, Glycine max
cggctcgagatccatttattgaaagcaactatggtgtccactcccggcagtttgaagttggtgttttggattggtttgcccgattgtgggaactggagaaaaatgagtactggggctatataacaaactgtggtacagaaggcaatctccatggcatcctagttgggagagaggtctttccagatgggattttgtatgcttcacgggagtcacattattctgtgtttaaagctgctcgaatgtacag

SEQ ID NO: 202562 - DNA, 259 bp, Glycine max
gaaccaaatagctcattagtgagtttttgagttcgtgtgtcctttctttgtgtgttgcaaggttacaagatggaggatcaaaatgcatcatctaatggattgggcaaggtgttccacaaggttaagccctaccttgctatgatgtcccttcagtttggctactccggaatgtacatcatcaccatggtttctttcaagcatggcatgagccattgggtactctccgtgtaccgtcatatagttgccactctcatcatgg

SEQ ID NO: 202563 - DNA, 255 bp, Glycine max
gaactgccaagaatgggcaatttgtgaaggtttctggggttgttacctgtggtaatgttccattggagtcctcctttcaaaaagttcctagatgtgtatatacttctacaagcttgtttgaatatcgagggtgggattcaaaagccgccaacccgaagcatcgtcgttttacatggggactcagagcagctgagaggcatgtggtggacttctacatttctgatttccaatctggattgagagcattggttaaaa

SEQ ID NO: 202564 - DNA, 260 bp, Glycine max
gttaaaggaagcgaaagaaagattgatcaaattatcgcagaggaattgaagatgggttggagagggatactgggttttgaatatggtatagttcaggccccattaggccctgatatctctgctcccccacttgttgctgcagttgccaatgctggtgctcttggacttcttagggcccctgattgggaatcgccggattacttgagggaactcataaagacgactaggaccttaactgataaacccttcggggttggcgt

SEQ ID NO: 202565 - DNA, 264 bp, Glycine max
gaaacatctatgtctctaacgtgaccttggctaatgtagatattgctattacgttcactggtttatatggggagcatccagatgatgcttataacccaaatgctctacctgtaatagaaaagattacaatcaaggatgtggtaggagaaaatatcaaaactgcaggtcttatagagggtatagaaggtgacaattttgtcaacatttgcctatcaaacatcatccttaatgtgacctcaaactatccatggaactgctcctacg

SEQ ID NO: 202566 - DNA, 260 bp, Glycine max
atcgtgacgaaattaacccaacagcacacagcactttccccaaatcaaatcatcgaaaccctaactcgcgattcccgatcgaaaccctaactcgcgatggcgatcttgctgggcgaaattcttcaatcgctggagctgtggctgaagctgatcaagaacccgcagcctcagccctacgtgaaccctaatctggaccccgttttgctggtgcccggtgtcggaggctccatgctgcacgccgttgacgaatccgaagaagt

SEQ ID NO: 202567 - DNA, 256 bp, Glycine max; identical to SEQ ID NO: 191039

SEQ ID NO: 202568 - DNA, 255 bp, Glycine max
gcaacttggtcatccatagggatggcaaatcggtccatctttcactcgatgagagaacaggttcaggatttgtgtcgcatgatctttaccttcacgggtatttcagcgcttctattaagttgccttctgattacactgcaggagttgttgttgccttctatatgtcaaatggtgacatgttccagaataaccatgatgaaatcgactttgagtttttggggaacattagaggcaaagactggaggattcagacca

SEQ ID NO: 202569 - DNA, 255 bp, Glycine max
gagaatggctcccaagggtttaatctttttggctgtgttatgcttctcagcactgtcactgagttgttgtcttgcggaggataatggacttgttatgaacttctacaaggaatcatgccctcaggctgaagacatcatcaaagaacaagtcaagcttctctacaagcgccacaagaacactgctttctcctggctcagaaacatcttccatgactgtgctgttcagagttgtgatgcttcactgttgctggactc

SEQ ID NO: 202570 - DNA, 138 bp, Glycine max
  unsure (1)..(138): unsure at all n locations
tcatcataaaccccctccagagaacaagaatcatcagaatggcaactatgactggtgtgagcctntcaagccccagggttttcttcancgcatcaccctcaccgcaaaacacgtacgccgtaaagttcgcagttccac

SEQ ID NO: 202571 - DNA, 257 bp, Glycine max
cacaattcaattttgagcacttaccaacaccacttccaatggcttcatatcatgaagaagaagtgaggctattgggcaagtgggccagcccatttagcaacagagtagaccttgctctcaagctcaagggtgttccctacaaatactccgaggaagatcttgctaacaagagtgctgatcttctcaagtacaaccccgttcacaagaaggttccggttttggtccacaatgggaacccattgcccgagtcactcatc

SEQ ID NO: 202572 - DNA, 255 bp, Glycine max
ttttgattttattgatgaagccaaaagactcggtggaggtgttttggttcattgttttgctggaagatcaaggagtgtgactatagttgtggcatatctgatgaagactcgaggaatgagtttttttgaagctctgaaacatgtgaagagtatacgaccagcagcaggtcccaatcagggtttcatttgtcagctggaggactttgaaaagtctcttcaaggtgccaataaattgcattagtcttatttacaatt

SEQ ID NO: 202573 - DNA, 238 bp, Glycine max
atgcacttttctttcttttctcttcttcttctatccataatttcaattccatttgctctctggaccgagtcaggcggcggcgaatcggcatgactcggcgctgctcccactgcaccaacaacggccacaactcccggacatgcccgtcgcggggagggggcggcgtcaagctgttcggggtgaggctgacggatggatcaatcataaagaagagcgctagcatggggaaccttaacct

SEQ ID NO: 202574 - DNA, 253 bp, Glycine max
agatattagggtttttgagtgcggtgcggcgatcctagcactctcttctgcagctttcgccgacagcttcattcaccatggctgagcaaaccgagaaggcttttttgaaacaaccaaaagtgtttctcagctcgaagaaaactgggaagggaaagagacccggaaagggtgggaaccgcttttggaaatccattgggcttggatttaagactcccagggaagccatcgaaggaacctacattgacaagaagtg

SEQ ID NO: 202575 - DNA, 255 bp, Glycine max
gtggtgccttatcgctgtggttatcatcttcttcttcctctttcttagatctcttctttctctacgccgcacgccgaaaccatggccggaaaaggagagggtcctgctatcggaatcgatctcggaaccacctactcttgcgtcggtgtgtggcaacatgaccgcgttgaaatcatcgccaacgaccaagggaacagaaccacgccgtcttacgtcggattcactgacaccgagcgtctcatcggtgatgcggcc

SEQ ID NO: 202576 - DNA, 263 bp, Glycine max
gagaaaaaaaaatggatgtagagaaagccttccacatgactggaggagttggcaaaactagctatgccaagaattcctcactacagaagaaggaatctgataaagtgaagcacataatcatacaaacagttgaggagctctaccttgcaaccactccaaagagcataggcattgctgatttgggcaactcctctggaccaaacaccctatcaatcatcaaagatatctttcaggccatccaaggcataagccacaggatcatg

SEQ ID NO: 202577 - DNA, 255 bp, Glycine max; identical to SEQ ID NO: 151347

SEQ ID NO: 202578 - DNA, 253 bp, Glycine max
ctctcttgtatatgggaaggagaatgcaaggtggaattggtgttggtggcagtggtggcggcaagggtgcccgtggaatattcaacataggaaaagcaccagttactaaagtagacaaaaatgccaaaaacaagatctattttaaagatgttgctggctgtgatgaggcaaagcaagaaattatggagtttgtccacttcctcaagaacccaaagaaatatgaagaacttggtgcaaaaattccaaaaggtgc

SEQ ID NO: 202579 - DNA, 246 bp, Glycine max
gttagagacagagagagagagaaacaaaaccctaattggtgagtggcgaaaatggcgcagcggcggcggcagcagcagcaacaggagcagcagtaatcgagcaagtgcagtgcttcgggcggaagaagacagcggtggcagtgacctactgcaagcgtggtcgaggcctcatcaagatcaatggctgcccgatcgagctggtggagccggagatcctccgtttcaaggccttcgagcaatctcctc

SEQ ID NO: 202580 - DNA, 252 bp, Glycine max
gagaatggctcccaagggtttaatctttttggctgtgttatgcttctcagcactgtcactgagtcgttgtcttgcggaggataatggacttgttatgaacttctacaaggaatcatgccctcaggctgaagacatcatcaaagaacaagtcaagcttctctacaagcgccacaagaacactgcttcctccgggttcagaaacatcttccatgactgtgctgttcagagttgtgatgcttcactgttgctgga

SEQ ID NO: 202581 - DNA, 214 bp, Glycine max
caaaactcattgttgtgctgacacgtggcgggtctacagccaagttagttgccaagtataggccagcggttccaatattgtcggtggtggttccagtgttgagcacggactcatttgattggacctgcagtgatgagacgccagcaaggcacagcctgatatacaggggcttgattcctatactgggcgagggatctgcaaaggctaccgatgc

SEQ ID NO: 202582 - DNA, 253 bp, Glycine max
cggctcgagaccgcacgaatatcttgttgtttggagcgatccgagaaaaactctgtaaacatgttggtttaccaggacctccttacaggtgatgagcttctctctgactccttccgttacaaggaaattgagaatggaatgctgtgggaagttgaggggaagtgggttgttaaaggagcagttgatgtagacattggtgcaaacccttctgctgagggtggaggagaagatgagggagttgatgatgcagctg

SEQ ID NO: 202583 - DNA, 255 bp, Glycine max
accaagacgaggatgaggagcaagacaaagagagccaagaaagtgaaggttctgagtctcaaagagaaccacgaagacataagaataagaacccttttcacttcaactctaaaaggttccaaactctcttcaaaaaccaatatggccacgttcgcgtcctccagaggttcaacaaacgctcccaacagcttcagaatctccgagactaccgcattttggagttcaactccaaacccaacacccttcttctccccc

SEQ ID NO: 202584 - DNA, 253 bp, Glycine max
ctcgagccgatcactctcaactttactcctcttcaatcagttgcatattctttgctattccaatggccactgttgaggttgtgtcagccaaggttgccctcccagaggacacaaaagaggcatcattgaaggttgacgaggagaagaacacagaagaagttgttgagactccaacaccagaaactgtggtcactgagcaaaccaaggaggaaagtactgaggccccacgacctgcagcttcagaagacaagcc

SEQ ID NO: 202585 - DNA, 253 bp, Glycine max
aagaaataccaagcaaggtgttacaagaacttccttcagcggcaaatggaactggtcataaccatacatcaggagcttctatcagtggcagtgcaccggctgctaaggcacaggttgttggttggcctcctataagatcatttaggaaaaactcattggccaccacttcaaagaataatgatgaagtagatggaaaaccgggtgcagcagcactctttgtgaaggtcagcatggatggtgctccctatctgag

SEQ ID NO: 202586 - DNA, 252 bp, Glycine max
ctcatatcctcaatcaccccccctcgcactcgctcttcccttcctctggtggcgacaatgtcgactcctgctaggaagaggctgatgaaagacttcaagatgctgcaacatgatccgcctgcagggatcagtggtgccccccaggataacaacataatgctgtggaatgctgtcacacttggacctgatgatactccatgggatggaggcacgttcaagttgacactccaatttactgaggactatccaaat

SEQ ID NO: 202587 - DNA, 252 bp, Glycine max
acgcttaacctctctcattccccatttcctcacctccttcaaccgctgctaaattctagggttccgaaatggacgctggcggaaagatcaagaagggcgccggaggtagaaagggcggcggcccaaagaagaagccggtttcaaggtccgtcaaagccggtctccaattccccgtcggaagaattggccgttatttgaagaaaggaaggtacgctcagcgtgtcggtaccggtgctcccgtatacttggctg

SEQ ID NO: 202588 - DNA, 256 bp, Glycine max
ccagaagacaccatactactatcacgccccaccacctcctcacccttaccctcaccctcaccctcacccttgccctcaccctcaccctcacccccatcctcaccctcacccacatccacaccctcaccctccctacgtttacgcctccccaccacctcctcctaagaagccatacaagtacccatctccgccacctcctgtccatcactaccctcaccctcaccctcccttcgtccattactctcctccaccatct

SEQ ID NO: 202589 - DNA, 262 bp, Glycine max
gcctgacatagagaagaagaagagagagtgatggagtgcgtattcggattggtgggtaatgggtttgcgatcgtggtggctgattcatcggcggtgcacagcatcctcgtccacaagtccaacgaggacaagatcatgctcctcgattcccacaaactcattgccggtagcggcgagcccggagacagggttcagttcacagagtacattcagaagaacgtcgccttgtatcagttccgtaacggcatccctcttaccaccg

SEQ ID NO: 202590 - DNA, 257 bp, Glycine max
aattatgttccatatatgtatgatttaaacaaattctgcccttataatacagttctgtttgatcatagtgatccatcaatcaatactgtgttgacagcaccaactgataaacctggagtggcattgcttgattttgtcattttcccacccagatggctggttgctgagcatactttccggcctccatattatcatcgcaattgcatgagtgaatttatgggcctcattcatggtggttatgaggccaaggctgatgg

SEQ ID NO: 202591 - DNA, 255 bp, Glycine max
tcgacatcctattggagcattccaatattttgacaaggatggtagtggctacattacagttgatgaacttcaacaagcttgtgcagaacataacatgactgatgcttttcttgaagatattattagagaagttgatcaagataatgatggaaggattgattatggtgaatttgctgccatactgcaaaaaggcaacgctggaattggtaggaggactatgcgcaacagtctgaatttaagcatgagagatgcacc

SEQ ID NO: 202592 - DNA, 249 bp, Glycine max
gcgattcttgcttcaagttccagaaatgggtgtggctcaaaacattcccgatgcggaggagggaaccttggagattggaatggaatacagaactgtttctggagttgctgggccattggtcattcttgataaagttaagggacccaagtttcaagagattgttaacattcgcttaggagatggtactactcggcgtggacaagtgctagaagttgatggtgaaaaggctgttgttcaggtctttgaggg

SEQ ID NO: 202593 - DNA, 248 bp, Glycine max
ggagagcaagagcttcgacgacaccggactcggacccgttccgagcacgtggaaaggcgcgtgcgagacgggaacgagtttcaccgcgtcgaactgcaacagaaagttgatcggagcaagattcttggctaaaggtgtagaagccatgcttggtccaattaacgaaaccgaggagtccagatccgcgcgcgacgacgacggccacggcacccacacgtccagcaccgccgctggatcagttgtttccg

SEQ ID NO: 202594 - DNA, 246 bp, Glycine max
gttgttggaagcccgtactatgttgcaccagaggtcttgcgtaagcattatggtcctgaagcagacgtgtggagtgctggtgttattttgtacatcttattaagtggggtgccaccattttgggctgaaacagagcaggggattttccgacagattttgctaggaagactagatttccagtctgagccatggcctagcatttcagacagtgccaaagatctaattcgaaaaatgcttgatcggaat

SEQ ID NO: 202595 - DNA, 249 bp, Glycine max
gaaaaataaagagaaagagaaagagaagtgcgtggctgtgacaagccctgtgagtggcgaagacagcgatgataagcaacgccctgcctttccctcggtcagattctcttcccgcaacgcttcttccaaatacgatttcgtcaaggtgaaggtgtggttgggtgataatgcggatcactactacgttctctccagatttttgctcagcagaatgctaacggtaaccaagattccaaaccacgtagctat

SEQ ID NO: 202596 - DNA, 251 bp, Glycine max
ggaaatcgttcctatcatcacttctcaaatctcgaaccctctcgttcgtgccgatcactaggtcacacttcatcaatggcgggtagaggcaaaaccctaggatccagcgccgctaagaaggccacctcaaggagcagcaaagccggcctccaattccccgtcggtcgtatcgccaggttcctcaaggccggaaagtacgccgagcgcgtcggcgccggagcccccgtctacctcgccgccgttctcgaata

SEQ ID NO: 202597 - DNA, 249 bp, Glycine max
cacaactccactcttagctgccattggtttttcttcttccatttctcttcctttctaagcttttttcgattacccatttggagattctgtcctaatggctcttgctcctttcaaagtttcctccttttccgggttttctcccaaacccagtgttggggatgctctgaaaaacccaacttgctctgtttctctgagctttgcgaatgtgaaacttggaagcagaaaccttagggtttgtgcctcaactgt

SEQ ID NO: 202598 - DNA, 245 bp, Glycine max
caacatttacattactctctcactttctccaatatggcttcttctcgaaatgagttttatgcacttatgctagtggtggtggttggctccatagtggcttcctgtggtgctaacttcaaccaagactttgatctaacttggggtgatcagcgtgctaagatattcaatggtggtcagcttctatctctttccctggacaaagtctctggctctggcttccaatccaagaaagagtacttatttgg

SEQ ID NO: 202599 - DNA, 244 bp, Glycine max
gcaatctgaaccttaaggctactgagctgagactggggcttccgggattgcagtctcccgaacgagattcagatctttgcttgagaagttcaattcagtttgatgaaaaaccactgtttcctttgcatcctgctactgatgatcaccattcctcatcaaagcctgctgttttgggtaacaaaagagggttctcagatgtcatgagtggattcgccgaggagaaattgcttgttagttctgaggt

SEQ ID NO: 202600 - DNA, 242 bp, Glycine max
cgaagttcttaaaatttgctgcacagaggagagtgagaaggcaaggcaatggagatgacgagggtgaatgctaagagcaataactccaacgccaagactaatggcgtgaaagagaaagccaagaagatagtccgaattcaggtttccaaaaccaagaaacctttcttcttctacctcaatctcgctaagaaatacataaaacagggcaatgacgtcgagctctctgcattgggcatggctat

SEQ ID NO: 202601 - DNA, 244 bp, Glycine max
gttgagtattctaattctaatgaggaacaggggtgtgtgggaagatgcaagcacagcaacagtgcttgtacttgtgctatgttcatcgtatggaattgcagaagtaaagtcacagtcacagaaggtatctggtttgtttgtttttggagattcattggttgaagtaggcaacaataacttcctaaacaccatagcaagggcaaattactttccttacggcatcgacttcggcaggggttccact

SEQ ID NO: 202602 - DNA, 247 bp, Glycine max
gcaattaatgccgtgtgcactcaccttggatgtgtcgtgccatggaatcaagcagagaacaagttcatctgcccttgccatggatctcagtacaatgaccaaggaagagttgtgagaggacctgctcccttgtctctggcattagcacattgtgatatagatgatgggaaggtggtgtatgttccttgggttgaaacagatttcagaacaggtgatgctccatggtgggcttagactccttaaagcc

SEQ ID NO: 202603 - DNA, 251 bp, Glycine max
ggcttcttcgtcttcagaatcggcggtgtcggagcgaagaggaataccaggggctcagttcgtagaggatgtccaaacttacctcactcaatcgggtctcgatgttggttcagccctggcttttctccaagagagacttcagcagtacaaggtagtagaaatgaagcttcttgctcagcaaagggatcttcaggcaaagataccagatattgaaaagtgcttagacgttgttgctacattgaaagctaaga

SEQ ID NO: 202604 - DNA, 245 bp, Glycine max
ctgaagaaggaattaccatctttgttcctaaggacagtgccttcaatgctgtaaagaaaactgtcctatccaacctcacctctgaccagctaaagcaagtgatcctcttccatgccttgccacatttctattctcttgctgagttcacaagccttagccaaaccagctctactcccacatttgccggaggggattacactttgaatttcactgatgattctgggacagtgcacattagttcagga

SEQ ID NO: 202605 - DNA, 242 bp, Glycine max
cacacacacactctctttccatgggtccgtttcgtaaacccttccttgcatttctctcggttgttctatttctgggtctctatgaggcagcagcagaacagactcagactcacaagagtacttacattgtacacgtggcgaaatcggagatgcccgagagcttcgagcaccacgctgtgtggtatgagtcgtcactgaagaccgtgtctgactcggcggagatgatttacacctacgacaac

SEQ ID NO: 202606 - DNA, 242 bp, Glycine max
gttccctacacttgttactcaccaggaaactcttgagtcaaaggttaacgagtccaaggccatggttaaatttcaacttaagaaggtgctctgcatgggagtagctgtggggaatgttagtatggaggaaaagcaaatcttccaaaatgttcaactgagtgttaatttccttgtctctttgttgaaaaagaactggcaaaatgtcaggtgcttgtatctgaagagtacaatggggaaatctt

SEQ ID NO: 202607 - DNA, 240 bp, Glycine max
tgtttgttgttgtaactcgttcttcttcttttgttgttctgtgtttgtgtttgttttttctctcacctgaaaatgtcttgctgcggtggtaactgtggttgcggaagctcctgcaagtgcggcaacggctgcggaggctgcaagatgtacccagacttgagctacactgagtcaaccaccaccgagaccttggtcatgggagtggcacctgttaaggctcaatttgagggtgctgaaatg

SEQ ID NO: 202608 - DNA, 242 bp, Glycine max
  unsure (1)..(242): unsure at all n locations
cctcgagccgaatcggctcgagcgntgaaagacagatatggtgatctctatactgaagagaaactggccattagtggaattcacactcatgctggtcctgggggctatctccagtatgttgtgtacattgtaacttctcttggatttgtgcaccagtcctttgatgtcattgtcaatggcattgagaaatgcattatccaggcccatgaaaatctccgcccaggatcaatatttatcaataa

SEQ ID NO: 202609 - DNA, 241 bp, Glycine max
cccaaatcgttgaggagtggggaggcggtgccccaaccctgccattccccaccatggtttcccaaatcgttgaggatttgaaggttctggaagaagatttggatgcccacatgaattttggaggcaatggtggaaaattacaggggaattttagagtacaagaagataagaagcaccgtgccacgtatcaggctttgggtgattcagaaaagaagctccagttttattcggctagacagat

SEQ ID NO: 202610 - DNA, 245 bp, Glycine max
caccccttcttcttttacgttcattctgttttcatagtgaggatcttctgaagaaatggcaaatcaccctttgacacactctcactctttccgcgagaggtttgatgaaactctcactggtcacaggaatgaaattttggcccttttgtcaaggcttgaagccaagggcaagggaatcctgcaacaccaccaggtggttgcagagtttgaagaaatccctgaggagagcagaaagaaactccaag

SEQ ID NO: 202611 - DNA, 245 bp, Glycine max
cgagcgcgacgccgacatcaacctctccctccccggcgacgccttcgacctcgtcgtccgtgccaagaccgccctcgagctctcctgccccaacaccgtctcctgctccgacatcctctccgccgcgacggccgaacctccctcgcctccgccgtatcctcccacctccccaccccctccatgcccatctctcaaatcacccaactcttcgccaaacgcggcttcaccgtcgaagaattcgtcgc

SEQ ID NO: 202612 - DNA, 245 bp, Glycine max
caagacgccatattactaccactctccacccccaccttcacctcctccaccttataagaagccatattactaccactcgccaccaccacctccaccaaagaagaagccatactactatcactctccaccaccaccttcacctcctcctaagaagccatacaagtacccatctccgccacctcctgtccatcactaccctcaccctcaccctcccttcgtccattactctcctccaccatctccta

SEQ ID NO: 202613 - DNA, 240 bp, Glycine max
caccgcacgaatatcttgttgtttggagcgatccgagaaaaactctgtaaacatgttggtttaccaggacctccttacaggtgatgagcttctctctgactccttccgttacaaggaaattgagaatggaatgctgtgggaagttgaggggaagtgggttgttaaaggagcagttgatgtagacattggtgcaaacccttctgctgagggtggaggagaagatgagggagttgatgatgc

SEQ ID NO: 202614 - DNA, 240 bp, Glycine max
ggatacgggtacccacctcaggcggctggttacggatatccacaacatcaatcaggttatggatatccgcaacagcctggatatgggtacccacctcaggctcagaaaccaaagaagaacaaatttggaatgggattgggagctggattgcttggtggtgccttgggtggcatgttgattggagatacggtatctgatgctgctgattatgatgcgggctacgatgctggctttgatgat

SEQ ID NO: 202615 - DNA, 240 bp, Glycine max
  unsure (1)..(240): unsure at all n locations
cgttcattctgttttcctgttnaagtctttccctagccaatggccaccgatcgtttgacccgggttcacagtctccgtgagaggcttgatgaaaccctcactgccaacaggaatgaaattttggcccttctgtcaaggatcgaagccaagggcaagggcatcctgcaacaccaccaggtcattgctgagtttgaggaaatccctgaggagaacagacagaagctcactgatggtgccttt

SEQ ID NO: 202616 - DNA, 239 bp, Glycine max
ggaagcacttgatcaagactcgagtgaacaaaaaaaaaatgatgggtacccttaaggtgtccaacagtagtttatacatattttcgaagttcctagtaatttgtatggtgatgatgatatctttggttgattcaagttattccttgtgtgattttgaggcaatcttcaattttggtgattcgaattcagatacgggtgggtttcatacaagctttcctgcacagcctgctccctatgga

SEQ ID NO: 202617 - DNA, 240 bp, Glycine max
gtgtggcttacaccatatgtatggggtgaagagagttcttggaatcaatggaggatataggggcttctatgctcgcaatacaattactttaacccctaaaagtgtgaatgatatacataagcgtgggggaactgtccttggaacatcacgaggtggacatgacaccaaaaagatagttgacagtattcaagatcggggaatcaatcaggtttatataattggaggagatggaactcagaa

SEQ ID NO: 202618 - DNA, 240 bp, Glycine max
gcgctctttgttttgtctctcttattcttctcattcttaatggggagttccgagagtcagcttcaagtaggtttctactccaacacatgtcctcaagttgactccattatccgtgccgttgttagagacgccgttctctctgaccccaatatggcggctgtcttactcagacttcattttcacgattgctttgctcagggatgtgatggttcaattctgattgagaatggtccacaatcg

SEQ ID NO: 202619 - DNA, 240 bp, Glycine max
atctttggttgattcaagttattccttgtgtgattttgaggcaatcttcaattttggtgattcgaattcagatacgggtgggtttcatacaagctttcctgcacagcctgctccctatggaatgacttacttcaaaaaaccagtggggcgtgcttctgatggaaggcttattgttgattttctcgctcagggtcttggattgccatatttgagcccatatctgcaatcaattggatcaga

SEQ ID NO: 202620 - DNA, 243 bp, Glycine max
tcgtaccgtcgcactctgtgttttcagcgccgtctccgatctccgacaatggcgacccaaatgagcaagaagagaaagttcgtagctgatggagtgttcttcgctgaactgaacgaggttctgacaagagagttggccgaggacggttactccggcgtggaagttagggttacgccgatgcgcaccgaaatcataattagagccaccagaacccaagctgttctcggtgagaagggaaggaga

SEQ ID NO: 202621 - DNA, 239 bp, Glycine max
gggtgcaacaggtttgaagatgactcgccaccaaaagaggaagattgatgagacacatgtagagggacatgaggagcttgatgctgccagtttgcgagaacatgaggaatttaccacagtgaaaaatatagctactattgagcttggaagatatgagattgagacatggtacttctccccattcccaccagaatacaatgactgtttgaagctgtacttttgtgagttttgcctcaatt

SEQ ID NO: 202622 - DNA, 237 bp, Glycine max
ggattctacccgccgctcgatgggaattgcgcttcaaggcgtctcgtagggctaatccgcctcacgagggtcaccaacggcacgtgcctttggggggccgaggccccctactgctggtcggcaaacggacggcgggcgcacgcgtcgcttctagcccggattctgacttagaggcgttcagtcataatccaacgcacggtagcttcgcgccactggcttttcaaccaagcgcgatga

SEQ ID NO: 202623 - DNA, 238 bp, Glycine max
gaagagtccatattctacagacatgtagtgcctaggtgtgtttggaagatccagagatggcttcaaattggtcaagagaagaagatgacagaagcttgtaaaacacttgatcaattcatacatgcacgcatagcatctaagagagaggagctaagcaagtacaacgaaaatgaaatgggtgaagctcatcatgttgacttgttaacagctttgatgagagaaggaaaagcacatgacg

SEQ ID NO: 202624 - DNA, 239 bp, Glycine max
catccgtgttcttgagcatatattcagggaagatgcctacttgtctaagctccctgtttccattataaactcttggtatcaacgagaaggttatattaagtcaatggctaacttaattcagaaagagctccagagtttttctgaaccaaaagaggtaatgatatttttcagtgcccatggtgtacctgtcagttacgttgaggaagctggggatccataccgagaccaaatggaggagt

SEQ ID NO: 202625 - DNA, 237 bp, Glycine max
ctgagacacctggaccctaatcgcgaatcgtcgaagaaggctctcgagcataagaaagagattgcaaagcgtctcggtcgccccctcattcagactaacccttacgaggatgtaatagcctgtgacattataaatcctgatcacattgatgtggagttcaactctatcgggggactggagacaatcaagcaagctttgtttgagcttgttattctgcctctaaaaagaccagacttg

SEQ ID NO: 202626 - DNA, 242 bp, Glycine max
gccaatcagatattcccaaattccaccctcgcaccctggaacggggattccgattccgacaccaccgccaccaacgcccccgtggtggcgatggccgatgccgaggccgaggctgtggtggaacaagaagaggaacagaaaaaaatggaagaagtggaagagaaagatgatgatgaggaggatgagggggaggaggaggaggaggaggaggaacaggagaaggagaagagattggtgtggtg

SEQ ID NO: 202627 - DNA, 238 bp, Glycine max
gtttcacagcgaagtcgtaggagggtttcaaaagatggagaacatgcagagcttctggcaattgggcgatgaactccgtggacactcaaaagcatcggaggatcacaaatggttaatggttgcttcgaaattggcggaacagacaagattgaagggggagcgtgtgaacaaccttgatctttcaaagggccccattgaaacaaggtcaagggataaatttgggttccaggaagagaac

SEQ ID NO: 202628 - DNA, 234 bp, Glycine max
ggatacgggtacccacctcaggcggctggttacggatatccacaacatcaatcaggttatggatatccgcaacagcctggatatgggtacccacctcaggctcagaaaccaaagaagaacaaatttggaatgggattgggagctggattgcttggtggtgcctaagctggcatgttgattggagatatggtatctgatgctgctgattatgatgcgggctacgatgctggcttt

SEQ ID NO: 202629 - DNA, 237 bp, Glycine max
gccggagagcaagagcttcgacgacaccggactcggacccgttccgagcacgtggaaaggcgcgtgcgagacgggaacgaatttcaccgcgtcgaactgcaacagaaagttgatcggagcaagattctttgctaaaggtgtagaagccatgcttggtccaattaacgaaaccgaggagtccagatccgcgcgcgacgacgacggccacggcacccacacgtccagcaccgccgctgg

SEQ ID NO: 202630 - DNA, 239 bp, Glycine max
cttcaccccttccttttttgcgttcattctgttttcatagtgacgaacttctgaagaaatggcaaatcatcctttgacacactctcactctttccgcgagaggtttgatgaaactctcactggttcacaggaacgaaattttggcccttctgtcaaggcttgaagccaagggcaagggaatcctggcaacattcaccaagtggttgcagagtttgaagaaatccctgaggagagcagaa

SEQ ID NO: 202631 - DNA, 237 bp, Glycine max
gcgtgcttctgatggaaggcttattgttgattttctcgctcagggtcttggattgccatatttgagcccatatctgcaatcaattggatcagactatactcatggggctaactttgcgtcttcagcctccactgtgattccgcccacaacttccttctctgtcagtgggctaagtccattttccctctctgttcaactcaggcaaatggagcaattcaaagccaaagttgatgaatt

SEQ ID NO: 202632 - DNA, 241 bp, Glycine max
tctcgagccgattcggctcgagtatagcccaagccctatacaaccataccctaacacacacccatttgattcagtttccatggacagcctcaaggttgcatttttggctgcagtgctctgcatggttgtggtgagtgcacccatggcacatgcagctatcacgtgcgggcaggtgacgaatagcctgatcaattgcatcggttacctccagaacggaggaacgccgccgtcgggatgctgc

SEQ ID NO: 202633 - DNA, 288 bp, Glycine max
aaggtgccagaaaagcccaaagaagaagcagaagaggaggcacccaagcccaaacccaagaatccccttgatcttctccctccaagtccgatgatactggatgagtggaaaagactctactcaaacactaaaaccaacttcagggaggttgctataaaggattttgggacatgtatgatcccgagggatactctctctggttttgtgattacaaatacaacgacgagaatactgtttcttttgtgacattgaacaaggttggtggatttcttcagcggatggatttgg

SEQ ID NO: 202634 - DNA, 278 bp, Glycine max
ggaggcgaaagagtttaggtttggaattgggaattagggttgttcgcgtcacgaagatgatcgaggtggtgttgaacgatcgattggggaagaaggtgcgcgtgaagtgcaacgacgatgacaccatcggcgacctgaagaagctggtgcggctcagacgggcacaagagccgacaagatccgcatccagaagtggtacaccatatacaaggatcacatcactctcaaggattacgagatccacgacggcatgggtctcgaactctactacaactaaa

SEQ ID NO: 202635 - DNA, 280 bp, Glycine max
attacattagattggtggtaatggcagcgtcactacaagcagcagctactttcatgcaacccaccaagttgagcaggagcaacactttgcagcaaaagtctactcagtccatttccaaggcttttggtttggaacctgttggagctaaaaagtcacatgctcccttcaggctgatcttaaggacttggctcacaagtgtgttgatgctaccaaaattgcaggattcgcccttgccacctctgccctcgttgtctctggggcaaatgctgaaggtgttcca

SEQ ID NO: 202636 - DNA, 284 bp, Glycine max
ctcgagccgtcacatttgagatccctctctcactcttcctcatcatcataaggtgcatgacgtacctaaaaacaggagaaacaaaattgtcacaaattagagagatggaagggattagtgtgtgcaagaagagttcaaaattaggaaagaaagtgacctctatcatgttattcataaggtgccttatggagatagcccttatgtcaaagccaagcatgctcagttggttgataaggacccagaagcagcaatagtgttgttttggaaggcaataaattgtgggg

SEQ ID NO: 202637 - DNA, 282 bp, Glycine max
gttatggataccctctctcagcttagccttctttgcctttgcctttccttctttccccttttcgcttcccctgctttgctgtttcaggggttcaactgggaatcaagtaagaaaggtggttggtacaactcgctgaagaacactattcctgacttgcaaatgctggaattacacatgtttggctccctcctccctctcaatctgtttcacctgaaggttatcttccaggaagctatatgatcttgatgccatcaaagtatggaacaaaggatcaattgaagt

SEQ ID NO: 202638 - DNA, 280 bp, Glycine max
attgcattctgctatttaattccactacgtacacgcacattctcctcaaagacaacaatggcaccaacagccaagactctgacttacctggcccaggagaaaaccctagaatcgagcttcgttcgggacgaggaggagcgtcccaaggttgctacaacgaattcagcgacgagatcccagtgatttctcttgccggaatcgacgaggtggatggacgcagaagagagatttgtgagaagatcgtggaggcttgcgagaattggggtatattccagttgtt

SEQ ID NO: 202639 - DNA, 259 bp, Glycine max
ggcagaatgcgtgacagacttggctcaggctgcagcgtgccgaaacagcgcggcggcaacacacttaaaagtgatttccatctgtacaatttttgttaccagcgtgatgggcgtgtcaacacccgtcatgctggcacgatattttcaagaaaatctctgtatgatattgccatcttattgatcaaatgctttgctgctggtgtaattcttgccacctcattggtccacgtgttacctgacgccttcgccgaactctctg

SEQ ID NO: 202640 - DNA, 267 bp, Glycine max
cttcttcttcttcttctttctaacgccatgtctgaggagccaccaagagcagccactgttagagaactcgttcatagaagaagacgagccgcaagaaacagcttatgattcgtcggagaagatagtggtggtcggagtcgcgagtccgatgacgaggagaattgggggagagtgccccgattctcgtggaagaagctatggctgttcaccgggccgggctttctgatgagcatagcgtttctggaccctggaaacttagagggggac

SEQ ID NO: 202641 - DNA, 270 bp, Glycine max
ctatggtgccgcaacccattttgcatctaacccttttgtcattaataatctctctgaccactctttccttggtcgatgccgccgatcccacatttggcttcacccctcttggattatctagtagctcaaacttgcaaatccaaaagcttacgacgttgcagtcaacgagcgctacagcttttcaaatggagtgcacagattttgggtatactccacggacaagcctcatatgcaaggcagcaatacgaagccacgaactgagattcgtat

SEQ ID NO: 202642 - DNA, 277 bp, Glycine max
gatctgtgccattcatttcttctagccatggacgagaagctcatacagcggttagaatcggcggtgttgcgcttggagtcgctatcctctggactccacccctccgcttcacaatccggcggcgcccacgctcccgatgcggcgctcgtccctccgtcgtcgccttcgccgatctgatcgaccagtacgtcggtagggtttccggcgctgcagaggttatcggcggacaggtcttgggtgtcaccaaactggtgcaggaagctttcaatgttcagaa

SEQ ID NO: 202643 - DNA, 265 bp, Glycine max
tagtagctttcaagtttcaaacaactgcacccaagagttgttatatgcgccctccagctggtattcttgcccctggtgaaagtattattgccaccgtattcaagtttgtggagccaccggagaataatgagaaaccaattgatcaaaaaagcaagttaagtttaatattatgagcttaaaagtgcaaggtgaaatggactatgtaccggaactgtttgatgagcaaagagatcaagtggcaatagagcaaattctgcgggttatt

SEQ ID NO: 202644 - DNA, 281 bp, Glycine max
gtgtggtgagacttcactttattttttttccaattcccttcactcctaaacttttttttaggagggaagggaggggcaatggagatgcacacacaacctcataagatacaccattttggtgtacaacattgttgtcttattagcctcttatcttcaccttattcactactacaaccacccaagcttttgattatgctgatgccctttcaaagagtcttctctactttgaagcacaacgctctgggaggataccttacaatcagcgtgtcacttggcgtgac

SEQ ID NO: 202645 - DNA, 277 bp, Glycine max
atcagcatcaccaccgctccaacacaggggaaaatgagggagatccttcacgttcagggagggcaatgcgggaaccagatcggttcgaagttctgggaagtggtgtgcgacgagcacggcatagatccgacggggaagtacgtcggaactcagatctacaactcgagcgcgtgaacgtgtactacaacgaagcttcctgcgggcggtttgtcccacgcgcagtgctgatggacctggagcccggaaccatggacaacgtgcggactgggccgtacgg

SEQ ID NO: 202646 - DNA, 276 bp, Glycine max
atttttcttcgtctgtgtaacaaacacttcaacaatctactctatacccgatttacaagatgagttcatttagccaaaatccctatgttttagttctgttcctcgttctcactgtgtggatatcccgtgtaatgtctcgcgggctcatacatctgagagacatgagaaatggatggcacaatatggtaaggtttacaaggatgctgcagagaaggagaaacgtttccaagtattcaaaaacaatgtgcagttcattgagtcattcaatgctgctgg

SEQ ID NO: 202647 - DNA, 271 bp, Glycine max
cctggtcttactgtgtggtgactgtgctctgctctcatctcattcatattcatttcaatggcaactcaaggtcaagtcattacctgcaaagctgcggtggcctgggaacccaacaagcccttaaccgtccaagacgttcaggttgcccgcctcaggccggcgaggtccgtgtccaaatcctcttcaccgctctctgccacaccgatgcttacacttggggcggcaaggatcccgaagtcccttcccctgtattctcggccacgaagctgca

SEQ ID NO: 202648 - DNA, 272 bp, Glycine max
atcaattttcttcgtctgtgtaacaaacacttcaacaatctactctatacccgatttacaagatgagttcatttagccaaaatccctatgttttagttctgttcctcgttctcactgtgtggatatcccgtgtaatgtctcgcggctcattacatctgagagacatgagaaatggatggcacaatatggtaaggtttacaaggatgctgcagagaaggagaaacgtttccaagtattcaaaaacaatgtgcagttcattgagtcattcaatg

SEQ ID NO: 202649 - DNA, 271 bp, Glycine max
gcctttctttcaggttcttaacttgatcagtgtgcagtgtccaaatcataagggtagttgcaaattgcaatggctaagcatgatgttgagggtggttccttctctgcaaaggactaccatgatcctcctccagcaccgttgattgagctgaggaactcacacagtggtccttctacagggctttgattgctgagttcattgccacaagctctcctttacatcacagtgctcatgtgattggttacaagagccgagtgatgtaaaggtgggg

SEQ ID NO: 202650 - DNA, 274 bp, Glycine max
cggctcgaggagatggcagctgcaacatctagtgctgtgttaaacgggtttggatctcacttcttgtgtggaggaaagaggagccatgcccttcttgctgctagcattggagggaaagttggtgcttctgttagtcctaaaagagttttgtggcagttgctgctgcaccaaagaagtcatggatccccgctgtaaaaggtggtgggagtttcatagacccagaatggcttgatggctcgctaccaggtgactatggttttgacccactaggact

SEQ ID NO: 202651 - DNA, 279 bp, Glycine max
tcttacttcaaaaaaccagtggggcgtgcttctgatggaaggctacgtgttgattttctcgctcagggtcttggattgccatatttgagcccatatctgcagtcaattggatcggactatactcatggggttaactttgcatcttcggctccactgtgattccgcccacaacttccttctttgtcagtgggctaagtccattttccctctctgttcaactcaggcaaatggagcaattcaaagccaaagttgatgaatttcaggcgccaggaacaagga

SEQ ID NO: 202652 - DNA, 279 bp, Glycine max
gcagcagcggcaagcaactccatccgcaatgggaatcgatttgaaggcaggaggtaagtccaagaagaccaaacgtacagcccccaaatccaatgatatttacctcaagctcctcgtcaagctgtaccgttttcttgttcggaggacggtagtaacttcaatgccgtcatcctcaaacgccttttcatgagcaaggtcaacaagcccccgctatccctctctagattgattcgttacaccaagggaaaggaggataagatagctgtggtaatcggggcc

SEQ ID NO: 202653 - DNA, 271 bp, Glycine max
ggcacgcttcagaagacatggcctcattgggtgggttacaaaatgtgagcggcatcaattttcttatcaaagagggtccaaaagtcgatgcaaagttcgagctgaagccgccaccatatccactgaatggtttggagccggtgatagccagcagacactggagtttcactgggggaagcaccacaagacttatgtggaaaatctgaaaaaacaagttgttgggacagagcttgatgggaagtcactagaagagattattgtcacatcatac

SEQ ID NO: 202654 - DNA, 269 bp, Glycine max
tgcagatccgaggagttaccctttcttttcttttttcttttttctctttcctcattctacttaaaactcccaccagtgatggcaggtttggctccagagggaacacaattcgatggtcgccaatatgatgctaagatgagtgattgctttccactgatgggcaagaattcttcacctcttatgatgaagtgtatgacagctttgatgcaatgggattgcaagagaatcttctgcgaggcatatatgcttatggttttgagaggccttct

SEQ ID NO: 202655 - DNA, 241 bp, Glycine max
gtcgcctgcaagtgcggcaacggctgcggaggctgcaagatgtacccagacttgagctacaccgagtcaaccaccaccgggaccttggtcatgggaattgcaccagttaaggctcaattcgagaatgctggaatgggtgttccgctgagaacgatggctgcaaatgtggagctaactgcacctgcaaaccctgcacttgcaagtgaggtgttggagagccaaagcttcaagcagaaatggc

SEQ ID NO: 202656 - DNA, 259 bp, Glycine max
gtggcgttgatctgattagaatctgggatccgatcacagccatggcaggggcagcctctgctctgttcctcctcgacatcaaaggccgcgtcctcatctggcgcgactaccgcggcgatgtctccgccctcgacgccgaacgttcttcaccaaactcatcgaaaaacaggccgatccgcaagctcaagatccggttgagcacgacaacggcgtgacctacatgttcatccaacacagcacgtgtacctcatgatagcca

SEQ ID NO: 202657 - DNA, 276 bp, Glycine max
cttttcttaatttctctctattagtctgcatgctctgcaaactgagcatggctcctctcgcattttccttcttcttcatccttatcacattcttttcttcatcatctgaagcgggatccgttggaataaactatgggcgggttgcaacgacctacctacaccagcgaaagtggtggagcttctgaaggcacaaggtctgaaccgtgtgaaactctacgacaccgaaggcaacgtcctaaaccgagtttgcaaactcgagaatcaaggtcgtaattg

SEQ ID NO: 202658 - DNA, 272 bp, Glycine max
gacaaaatgtcctctaatccagtaatactgcagagtgtgaacttgaccaagtatatactggagaccagcgtttatccacgagaagaagagactctcaaagagctaaggaaagccactgcaggccacccttggggctttatgggcgtgctcccgatgcgggtcagctaatgaccttgctcttgaagttgttgaatgctaagaagacaattgaagtgggagtttttactgggtactctcttctcctcactgcacttaccattccagatgatgga

SEQ ID NO: 202659 - DNA, 216 bp, Glycine max
gttttctctcttctttctctgttgcgttttgtgaaatctaattcggcatggcgtcacgggacaacaagaaggcgtccagcagccgagccggccgaattcgcaccctctccgatctgaaccgcccctaccgccgattccgacaggactccgatggccctcaggaatattacaccggcggcgaaaagagtgggaatgctatccacgatccgtcaaagg

SEQ ID NO: 202660 - DNA, 213 bp, Glycine max
cttggtcttactgtgtggtgactgtgctctgctctcatctcattcatattcatttcaatggcaactcaaggtcaagtcattacctgcaaagctgcggcggcctgggaccccagcaagcccctaaccgtccaatacgatcagttgctccgcctcaggccggcgaggttcgtgtccgaatcggctgcaccgctctctgctacacacatgcgtaca

SEQ ID NO: 202661 - DNA, 269 bp, Glycine max
gtttcagggtgagtttttaaaattttacagtgaagagaatgaaaattcagaatgggtagagttgacccctgatgccatcccatccacatttacatggtacaagacatattttgatgtccctggtggcatagatccggttgcctagacttcaaaagcatgggaaaaggtcaggcttgggtgaatggtcaacatataggaagatactggactcgggtttccccaaaaagtggatgtcaacaagtctgtgattatcgtggagcatataattc

SEQ ID NO: 202662 - DNA, 264 bp, Glycine max
ttttcttgttcctctcgcccagaatccgagatcaaccctgacccctaaggccaggggtttttctcggcttcttcagattcctgaaatggcgtctgtttcagctttagccaagtacaagctcgtcttcttgggtgaccaatcgtgggcaagctcagcagtctcactcgcttcatgtacgataaattcgataacacctagtcaggctgcaataggtatggatttgcactcaaaaactaggtatctcgaagatcgaactgttcgact

SEQ ID NO: 202663 - DNA, 264 bp, Glycine max
  unsure (1)..(264): unsure at all n locations
ctgctacttcctactccaaccgcacttctgctccgcaattatcatgggcaaggtcnagatcngnatcannggatttngaagnattggccgtttngnnnccagagngggtctgnananngacgatnttgaactcgttgcgttacgaccctttcatcaccaccgattacatgccntacctgttnaantacgacatgttccggacanggnanttcaggtgtnacgntaggnccnaaaaacccttctntcggtgaaagccagtcattt

SEQ ID NO: 202664 - DNA, 273 bp, Glycine max
gtataacctaaacctatctttcttctctctctgtgtgtgcgcttcaacggcaaccagaagcagccatggccactgcaaggactgtgaaggatgtttcacctcatgagttcgttaaggcgtactcctctcatctcaagcgatccgcaagatggagctgccagagtggactgatattgtgataactgctagatttaaggagttggctcctaatgatcctgactggtactatgtcagagctgcatccatggcaagaaagatctacttgagaggagg

SEQ ID NO: 202665 - DNA, 195 bp, Glycine max
ttgctcgagcaactccactcttagctgccattggtttttcttcttccatttctcttcctttctaagcttttttcgattacccatttggagattctgtcctaatggctcttgctccttccaaagtttcctccttttccgggtttctcccaaacccagtgttggggatgctctgaaaaacccaacttgctctgtttc

SEQ ID NO: 202666 - DNA, 266 bp, Glycine max
ggaaaagagaaaaaaatttctcagaagagtctccgctgaaagttttggtttcttgaagatgtcgttgctctccgatcttatcaaccttaacctctccgacatcaccgataaagtgatcgccgagtacatatgggtaggggatctggcatggatatgaggagcaaagcaaggacactctcaggaccggttaaagacccttcgaagcttcccaagtggaactataatggttccagcactggtcaagctcctgggcaagatagtgaagt

SEQ ID NO: 202667 - DNA, 197 bp, Glycine max
gtcgcgtggatttcaacatcatctctggcacctccatgtcgtgccctcacgtgagctgcttagccgagctgatcaaatcggctcaccctgattggagcccagccgcggtgagatcggctctgatgacaacggcttacacatttacaaaactggtgagaagttgcaagacagcgcaacgggagaaccatccacgccgt

SEQ ID NO: 202668 - DNA, 257 bp, Glycine max
  unsure (1)..(257): unsure at all n locations
aagtcggctcgagcttttctccccagtattcaatttctattagtatccaaaccttgatagcgctcttggattttcctgtgnggtacgggggtttctcccctctttctctgatattcgcactgcctaccgcaaactcgctatgaggtggcacccggacaagtgggctctgaatcccgcaatcgccggcgaagcaagcgccggtttcagcaaatccaagaagcctactcagttctctccgatcagtctaaaaggtcaat

SEQ ID NO: 202669 - DNA, 258 bp, Glycine max
gtaaaactctttcaacaaaaaatcgaatcccattttaattctcagatccaagcttgggagacagagaaagaagaaagagattggcggccattgattcggggttcgatccgctgagagaattcgcaaaggacagcgtgaggctcgtgaagcgctgccacaaacccgatcgcaaagaattctccaaggttgccgtccgtactgcaattggtttcgtcgtgatgggattcgtcggtttcttcgtgaagctccattttcatt

SEQ ID NO: 202670 - DNA, 112 bp, Glycine max
ccaaaatgaaatctgtgttggttgattttcttgtgggggctggtatcaagccaacatctatagttaattaccaaccaccggggaaccaatgatggaatgaacccctcggttc

SEQ ID NO: 202671 - DNA, 266 bp, Glycine max
cgcgtcgctgctccgtaccagtttcactgcataaatttgagagaaaactctgcaaacatgttgggttaaccaggacttcctaacaggtgataaccttctctcggattccttccgttacaatgaaattgagaatggaatgctgtgggaagttgaggggaagtgggttgttaagggagcagttgatgttgacattggtgcaaacccttctgctgagggtggagaagatgagggagtcgatgacgcagctgtcaaggttgttgacattg

SEQ ID NO: 202672 - DNA, 270 bp, Glycine max
  unsure (1)..(270): unsure at all n locations
gtccaggcccggtggcggcggtggcattagcagggtccttcaagacggtgccgtttnggaaaanggntggggttaatgtctctgtngtttacggtgtcatgccacctgacgcatatcgtgctgccaagggtgttcctaccgatcaaaaacctggtcctgtgcctttcttcgctgctggaatcagctccgttttacacccaaagaacccgtttgcccctaccctacatttcaactatcgctattttgaaaccgatgctcctaaagatgctc

SEQ ID NO: 202673 - DNA, 272 bp, Glycine max
ctctgaaatcattaatgagaatgtcattgaggctgttgactccttgagatccttcagtgcatctcctgggggttccttccatggttgataacggttcaaccagggctaagttgggttcaaggaaatgggctcctcgatttgactacatcctaacccagcaggccatggtggcggtggacaatggaacacctattaaccgggacttaatcagcaacttcctgtcagacccagtgcatggtgccattaaagtttgcgctgaactgagacccaca

SEQ ID NO: 202674 - DNA, 288 bp, Glycine max
aattcggctcgatgtaatcgagcttcagcaatggtgtacgtcaaggctcagaaatcaaaagcctacttccagagataatcaggtcaagttcaagagaggaagagagggaaaaaccgattaccgtgccaggattcggttgattaatcaggacaagaacaaatataacactccgaaataccgatttgtggttcgctttagcaacaaggacattgttgcacaaataatatctgctagcattgccggcgatttagttcttgctacagcatattcacatgagctgccacgata

SEQ ID NO: 202675 - DNA, 272 bp, Glycine max
ttaacctttctcattccccatctcctcaccttaatcagccactgctaatttctaagggttcggaaatggacgctggcggaaagatcaagaagggcgccggagggagaaagggcggcggccctaagaagaagccgggttcaaggtccgtcaaagccggtctccaattccccgtcggaagaattggccgttatttgaagaaaggaaggtacgcccagcgtgtcggtaccggtgctcccgtttacttggccgcagttctcgagtacctagctgct

SEQ ID NO: 202676 - DNA, 253 bp, Glycine max
ctttctttttttggttcctgttttttctttttgaattaagagttgagtattcacgtgccccagttgggttgatccaccttgcaccttgagatagtaaagttgcaaactttgaagcaattagtgtagaagatgagtacgttggatgcaacaagggctgaacttggtcttcttgttttatatttgggcaaggctgaagcaagggacaaaatatgcagggcaatacaatatggttccaaattttggagtaacgggg

SEQ ID NO: 202677 - DNA, 266 bp, Glycine max
tatcgagccgaatcggctcgagcaagattctaagagagattttgctgctctttgaagaagggtgtttgctttattttgggagtggtcgttgttctcagatctcatcaaccttaacctctcagacactactgagaaggtgatcgcagagtacatatggatcggtggatcaggaatggacctgaggagcaaagcaaggactctcccaggaccagttagcgacccttcaaagcttcccaagtggaactatgatggttccagcacaggcc

SEQ ID NO: 202678 - DNA, 258 bp, Glycine max
tcctggtcttactgtgtggtgactgtgctctgctctcatctcattcatattcatttcaatggccactccaggttcaattcattaactggcaaagctgcggtggcctgggaacccaacaggcccttaaccgtccaagacgttcaggttgctccgcctcaggccggcgacgtccgtgtccaaatcctcttcaccgctctctgccacaccgatgcttacacttggtggcggcaaggatcccgaaggtctcttcccctgtat

SEQ ID NO: 202679 - DNA, 257 bp, Glycine max
gtaaaactctttcaacaaaaaatcgaatcccattttaattctcagatccaagcttgggagaccgagaaaggagaaagagattggacgccattgattctgtgttcgatccgctgagagaattcgcaaaggacagcgtgaggctcgtgaagcgctgccacaaacccgatcgcaaagaattctccaaggttgccgtccgtactgcaattggtttcgtcgtgatgggattcgtcggtttcttcgtgaagctcattttcatt

SEQ ID NO: 202680 - DNA, 251 bp, Glycine max
tggaatttgacttgcgcagaattcagcaaaatatgcatgtaacacctgctgttccctttgggctaaatgagttgctcatggtttatcaggaccttttgcagagttcttgatgagccagctttgtgcctactgtgtggtagattgtgctgtcctatttggaaatcatgctgcagggaacaccgctgccaaactcatgccgtaggctgtggagctggtactggagtgtttctgtggattaggagaacgacaat

SEQ ID NO: 202681 - DNA, 267 bp, Glycine max
ctaagaaccagtttggaatatatttttattccttctttgtttcttcactttctttcatacaccttacccaggtctcctcagaccgtggtcctcaaagttggtatgtcatgtcaagggtgtgctggagctgtaaacagggttttggaaaaaatggaaggtgttgagtcatttgacattgatctgaaggagcagaaggtgacagtgaaaggaaatgtgcagccggacgaagttctgcaagccgtttccaaatccggaaagaagacggca

SEQ ID NO: 202682 - DNA, 264 bp, Glycine max
gagacaaacagcatccgctgcagcgacggtaaccctccaacaacaacacttccgctgcgaaaaatgtctctggtggcgaacgaggatttccagcacattctgcgtgtgctgaacaccaacgtggatgggaagcagaagataatgttcgcaatgacctccatcaagggtattggaaggagattcgccaacatcgcttgcaagaaggctgatgttgacatgaacaaaagggctggtgagttgactgctgctgagttggatagtgtg

SEQ ID NO: 202683 - DNA, 254 bp, Glycine max
ctcactcgcaagtcacaccaatggcaaagctattcaatttcctccctctcctcttcctcaacatcttcattcaaacaatttcagcccaagtagcaccagcaccagcgggccccaccaacatcacccaagttcttgagaaagcaggccaattcacaaccttcatcaaacttctcaaggcctcacaaatagctgatagaatcaattcgcagctcaacaactcaaaccaaggcctaaccgtatttgcacccactgat

SEQ ID NO: 202684 - DNA, 258 bp, Glycine max
cgtctccctccagaactccgccggctggaacgctttgcaggaggcgctatgccgccgcgccttccgacatcgggttcgtcctcctccgccttcaccatcacaacgcctggtccaagtggcgccgtcgcctcccgcgggtcatcgccgcgctacgccgcatgcgtgacttctacatggagatctccttccacttcgagagctccctcattcccttcgtcggaaagatcgctccctccgacacctacaaaatctggaagc

SEQ ID NO: 202685 - DNA, 261 bp, Glycine max
atatggttatcatttctccatttccattttctctctcacttttcaagaatcgtaagctatggggaaatcctaacccaattggaagtgctgattaccagaaggccgttgagaaggcgaagaagaagctcagaggcttcatcgctgagaagagatgcgctcctctaatgctccgtttggcatggcactctgctggaacctttgacaagggcacgaagaccggtggacccttcggaaccatcaagcaccctgccgaactggctc

SEQ ID NO: 202686 - DNA, 267 bp, Glycine max
ctcaactccactcttagctgccattggtttttcttcttccatttctcttcctttctaaacttttttccgattccccatttggagattctgtcctaatggctcttgctccttccaaagtttcctccttttccgggttttctcccaaacccagtgttggggatgctctgaaaaacccaacttgctctgtttctctgagctttgcgaatgtgaaacttggaagcagaaaccttagggtttgtgcctcaactgtgcctctctcaggggtga

SEQ ID NO: 202687 - DNA, 270 bp, Glycine max
tgaatggctcccaagggtttaatctttttggctgtgttatgcttctcagcactgtcactgagtccgtggccttccgaaggataatggacttgttatgaacttctacaaggaatcatgccctcaggctgaagacatcatcaaagaacaagtcaagcttctctacaagcgccacaagaacactgctttctcctggctcagaaacatcttccatgactgtgctgttcagagttgtgatgcttcactgttgctggactccacaagaaggagctt

SEQ ID NO: 202688 - DNA, 176 bp, Glycine max
aaccatccagaagaaatgagtaaactatcaaaattgaaggctccaaataactgaggtcaaggggataatgatggacaatattgagaaggttttggatcgtggagagaagattgaactgctggtggacaaaacagaaaacttacagttccaggctgacagcttccagaggcagggca

SEQ ID NO: 202689 - DNA, 263 bp, Glycine max
tttatctctttccatatgcttccaaccatggaggatccaaatcaagctccagaagcgtcttctcagaaagaaatggggaagagggaagattgaaatcaaacggatcgagaacaccaccaataggcaagtcaccttctgcaagcgccgcaacggtttgctgaaaaaagcttatgaattatcagttctgtgtgatgctgaagttgcccttgttgtcttctcaacccgtggccgtttgtatgagtatgccaacaacagtgttaggg

SEQ ID NO: 202690 - DNA, 208 bp, Glycine max
gtagcttcctgctacagttataagcaaggctgctggaacattgatgtacagtaggagtctttttgaaaggtttcaaaaaagcagatggcccaacaatgtggttgtctgtgcagtatagaatgcacccccaaattcgagatttcccttctaggtacttctatcagggacgccttacggttagtgaaagtgtggctaaattgcttgatga

SEQ ID NO: 202691 - DNA, 241 bp, Glycine max
caacgctgtcactgagaaaggatctctatctacgaaggagcggaataaaacccttctctccgggattaagaagattggcttcagatcggaaacttcacacttttgaggaggtggcaaagcacaaccagaccaaggattgctggctcatcatttctggcaaggtgtatgatgtcacccctttcatggaggatcatcccggaggtgatgaggttttgttatctgcaacagggaaagatgcaac

SEQ ID NO: 202692 - DNA, 267 bp, Glycine max
tgtccgcacgaatatcttgttgtttggagcgatccgagaaaaactctgtaaacatggtggtttaccaagaccttccttccaggtgataagcttctccctgactccttccgttacaaggaaattgagaatggaatgctgtgggaagttgaggggaagtgggttgttaaaggagcagttgatgtagacattggtgcaaacccttctgctgagggtggaggagaagatgagggagttgatgatgcagctgttaaggttgttgacattgtt

SEQ ID NO: 202693 - DNA, 258 bp, Glycine max
aatttctctctgtttccttcttcaccgcatcaatggagttggacggcgttctcctcggcatgtgcaaccctctctcgacatctctgccgtcgtcgacgacgctttcttgcaaaaatacggtatcaagttgaacgatgcgattctcgctgaggataagcacaaacctatgtatgaagaattggctaacaatcctaatgtggagtacattgctggaggtgctactcagaattcaatcagggttgctcagtggatgcttca

SEQ ID NO: 202694 - DNA, 252 bp, Glycine max
ggatgcacttgatcaagactcaagagtgaacaaaaaataatgatgggtacccttaaggtgtccaacagtagtttatacatattttcgaagttcctagtaatttgtatggtgatgatgatatctttggttgattcaagttattccttgtgtgattttgaggcaatcttcaattttggtgattcgaattcagatacgggtgggtttcatacaagctttcctgcacagcctgctccctatggaatgacttacttc

SEQ ID NO: 202695 - DNA, 259 bp, Glycine max
gtgaagccaaaggcacaacaacaaccattggaacaacccaacaacaacaacatagtgaacaacaaacacctttggtaataataataacaaccatggagagcaccgaagactcatccacgagttcacaacaacaacaaccgaacctgccacccgggtttcggttccaccccacggacgaggagctcgtggttcattacctcaagaagaaagttgattctgttcctctccctgtttcaatcatcgctgatgttgatctcta

SEQ ID NO: 202696 - DNA, 254 bp, Glycine max
cttgtctcttccctttttctttccagaacaacagaacaacagagcacgaagctccaccaatggcgggttacagagccgacgacgactacgactacctcttcaaggtggtcctcatcggcgactccggcgtgggcaagtcaaacctcctctcgcgcttcaccaagaacgagttcaacctggagtccaagtccaccattggcgtcgagttcgccacccgcaccttgaacgtcgattccaaagtcatcaaggcccag

SEQ ID NO: 202697 - DNA, 240 bp, Glycine max
aatggctcccaagggtttaatctttttggctgtgttatgcttctcagcactgtcactgagtcgttgtcttgcggaaggttattggccttgtaatgaacttctacaaggaatcatgccctcaggctgaagacatcatcaaggaccaagtcaagcttctctacaagggcaacaagaccactgcttcctcctggctcagaaccatcttccatgacggtccggtccaaagtggtgaggcttcac

SEQ ID NO: 202698 - DNA, 235 bp, Glycine max
cggctcgagggtgtctctgaaacttcagaagcggcttgccgctagcgttctcaagtgtggtagaaggcaagtttggccttgacccaaatgaggtcaatgaaatctccatggctaattctcgacaaaacataaggaaattggttaaggatggtttcattatcaggaagccaactaagattcattcccgttcccgtgctcgcagaatgaaggaggccaataggaagggacgtcactc

SEQ ID NO: 202699 - DNA, 251 bp, Glycine max
ctatctcaaagttgaaagctgagaatccagcgatagttacaccagcatccgaaaaagctgagcagcttccggacaggttacgatctctccgtcaccactttctcccccgatggccgtgttttccagatcgagtatgctgccaaagccgtcgataacagcgggactgttattgggatcaagtgcaaagatggggttgtgttgggcgttgagaagcttattccgtcgaaaatgatgcttccgggttccaatag

SEQ ID NO: 202700 - DNA, 261 bp, Glycine max
gcagataaagcacagaacagttgaagtgaatggcataaaaatgcatgttgcagagaaaagagaggggtccattggggttgttcctcaagggtttccctgagctctggtactcatggggccatcagattctcgctctcagctccctcggctaccgcgccgtcgctcccgatctccgtggctacggtgacaccgaagcaccaccttcaatcagcagctacaactgcttccacatagtgggtgatctcgttgcgcttattgact

SEQ ID NO: 202701 - DNA, 210 bp, Glycine max
ggaatttctcagatctatccgacgtcgtcgcagatccaccaaccgttataggtgccctcagcggtgatggaaacggtccgtttttcggcttccttggagccgcagctgccctcgtcttctcctgtatgggagctgcctatggcacagcaaagagtggtgtgggcgtggcttccatgggtatgatgagaactgagctggtgatgaagtcta

SEQ ID NO: 202702 - DNA, 256 bp, Glycine max
ggaatttcaagaacatcaacgactacaactaccaaaccttgaaggacaacgtggacatgttgaagctgatcccaattaggtctcaccttctccgacgaaaacgggaaccttcccacctgcggcacggagagcccctgcatctggcaattcaacttccgcgagttcaacgtcagcgaagacatcttcgcgagcgactcgatcgagctgttgcgccagtgcggaatcgacttcaagaagaacagcgagaatggaatcg

SEQ ID NO: 202703 - DNA, 254 bp, Glycine max
gtcttcttgttcctctcgcccagaatccgagatcaaccccgacgaaggcaaggtggttttctcgggttcctcaagattccggaattgcggctggttcaagcttaagccaagtacaagctcgccttcctgggtgaccaatcggtgggcaaaaccagcatcataattggctcaaggaagataaattcggtaacacctatcaggctacaattggtaatgattttctatcaaaaactatggatcctgaagatcgaact

SEQ ID NO: 202704 - DNA, 236 bp, Glycine max
cgctctgtttctgtctctgtgtttgcggctgaggattccgaacgagcgaccttcttcgtttcccgcaaagtttaagtccaccaggggtaaggaaagactcccctccacaatggccgcaattgacatggccacccctgggagttcactaacaatgggcacttgaaccacaaacctggagggattgaccaacctgtgaattaaaagttccaaaaggaagctgctgagatgaacaagag

SEQ ID NO: 202705 - DNA, 125 bp, Glycine max
  unsure (1)..(125): unsure at all n locations
aggagatgaagcatacagtgaaaatggtttagtgcctcggacaatacgtttgctcaaggataagtacccaaaccttggtaaccaatcnnnnngtggnatnanatcntaatncgtnagntgggnnt

SEQ ID NO: 202706 - DNA, 244 bp, Glycine max
ctcttcttcttcaagattttgacgacgatccaagtgatagacactcgttgcgatggaacttgtaactgaattccaacggacttctgtacccatacgtgactggatcctctgtagtcgctatcaaatacaaagatgggattctaatggccgctgacatgggaggttcgtatggatctaccctgcggtataagagtgttgagcgtatcaagcctattggaaagcattctcttcttggtgctaccgg

SEQ ID NO: 202707 - DNA, 248 bp, Glycine max
aaggtgccagaaaagcccaaagaagaagcagaagaggaggcacccaagcccaaacccaagaatccccctgaacctcctccctccaagtccgatgatactggatgagtggaaaagactctactcaaacactaaaaccaacttcagggaggttgctatcaaaggattttgggacatgtatgatcccgagggatactctctctggttttgtgattacaaatacaacgacgagaatactgttcctttggggc

SEQ ID NO: 202708 - DNA, 266 bp, Glycine max
atggccactcttcttcttcccacgctcctccttctcatacccttcgccaccctcgtcttcggccggcctcaacttggcggaaaactttttccgattgccctccgaaaccgataacgttgacaacgtccagggcacccgctgggccgtcctcctcgccggttccaatggctactggaattacagacatcaggctgatgtttgtcacgcctatcaaatactaaggaaaggtggcctgaaagaagaaaatattattgtttttatgtatg

SEQ ID NO: 202709 - DNA, 286 bp, Glycine max
gagaaagtgaaggtgcttcggcgactcctcgagacaccaggggttcaccaggggccagcctgtttcgacgctctgggtgcgaactcatagaatccgctggcttcccctactgcatcaccagtggcttctccatcgccgcttccaggttggctctgcccgacaccggcttcatctcctacggcgaaatgctggagcagggccaactcatcacccaagccgtttccattcccgtcattggcgacgccgacaacggctacggcaatgccatgaaacctcaagcgaccgt

SEQ ID NO: 202710 - DNA, 281 bp, Glycine max
tagagcgtcgcactctgtgttttcagcgccgtctccgatctccgacaatggcgacccaaatgagcaagaagagaaagttcgtagctgatggagtgttcttcgctgaactgaacgaggttctgacaagagagttggccgaggacggttactccggcgtggaagttagggttacgccgatgcgcaccgaaatcataattagagccaccagaacccaagctgttctcggtgagaagggaaggagaataagggaacttacctctgtggttcagaagaggttcaag

SEQ ID NO: 202711 - DNA, 285 bp, Glycine max
aagcagtttccagtctccgtcagtaaaacgatgggcgacttcacggttgcgttaaaccctcccaaaaccttccgctccgacaatctcctatccaccaccaaccgcatttccccagcggcgcgtggctttcaaacctcactcgcgttcaaaccgcgcgtttttcgaggaatccgcgcttcggtgatgccaagagagggccagccacaacaacaacaacaacaagcgtcgtctctcggagacgctctcgtcaacagtccgcgccgaaacgacgtcgtcgaggccatc

SEQ ID NO: 202712 - DNA, 279 bp, Glycine max
attgctgtgcttggttgctctgattcatctcaagccaaaagggtccgcgtccttgagctttctcgcagattgaagcaccgtggtcctgactggagtgggctccaccaatatggtgataactatttggctcatcaacggttagccatagttgatccagcttctggtgatcaacccctcttcaatgaagacaaaactgttgttgttacggtgaatggagagatctacaatcatgaagaactcaggaaacaattgcctaatcacaccttccgtacaggaagt

SEQ ID NO: 202713 - DNA, 284 bp, Glycine max
  unsure (1)..(284): unsure at all n locations
tatgaccaaactaaaatgtgtaagccagctcttgccactgctgntttcagcaccatatctttcctgcttggaggtgtcacatccgcttatttctggattccttggaatgaaaattgcaacttatgccaatgcaaganccaccctggaggcaagaaagggtgttggaaaggctttcattacggcttttagatctggtgcagttatgggttttctccttgctgcaaatggtctttggttctttacattgccatcaacttgttcaagatttactatggtgatgactg

SEQ ID NO: 202714 - DNA, 259 bp, Glycine max
  unsure (1)..(259): unsure at all n locations
gtagggctaatccgcctcacgagggtcaccaacggcacgtgcctttgtgggggccgatgccccctactgctggtcggcaaacggacggcgggcgcacgcgtcgcttctagctcggattctgacttagaggcgttacttnctattccgacgcacggtagcttcgcgcctctggcttttcagctaagcgcgatgaccaattgtgcgaatcaacggttcctctcgtactaggttgaatgactagtgcgacactgtcatcagt

SEQ ID NO: 202715 - DNA, 283 bp, Glycine max
cgcgtcgctgctccgtaccagtttcactgcataaatttgagagaaaactctgcaaacatgttggtttatcaggacctccttacaggtgatgagcttctctcggactccttccgttacaatgaaattgagaatggaatgctgtgggaagttgaggggaagtgggttgttaagggagcagttgatgttgacattggtgcaaacccttctgctgagggtggagaagatgagggagtcgatgacgcagctgtcaaggttgttgacattgttgatacattcagacttc

SEQ ID NO: 202716 - DNA, 289 bp, Glycine max
ccgtatgtctctctctctcgccaaacgcttcttccactatgccttcccaatcggttctggttaccggaggagccggttatatcggtagccacaccgtccttcagcttctcctcagcggttaccatgtcttcgccgtcgacaacttcgacaattcttccgaaaccgccatcaacagagtcaaggaactcgccggagaattcgcaaataacctttccttttccaagctagacttgcgggacagagctgcactcgagaaaatattttcaacccaataagttgatgctgtgat

SEQ ID NO: 202717 - DNA, 291 bp, Glycine max
atgaaatccccgaagtttgagttcttgtcacatgcaaagccttcactttttgaatatcccaagcctactactgttcacacaactacttcaactgtgaaacttcccactgctgttctgtcaacctcagctaaggctaaagctagggctaagaaagctgaagaacagaaggctaatgctgaaatttcatctgctcctgactctgcatcagttgcaccaagtggtggaaaagcaaagttatccggtgagaaggatggagactcaatgcaggttgatagcacacaacagagaaga

SEQ ID NO: 202718 - DNA, 299 bp, Glycine max
gcataaagaaagaatcccaggcgaggagaaagatggaggggaaggagcaggatgtgtcgttgggagcgaacaagttccccgagagacagccgattgggacggcggcgcagagccaagacgacggcaaggactaccaggagccggcgccggcgccgctggttgacccgacggagtttacgtcatggtcgttttacagagcagggatagcagagtttgtgggcacttttctgtttctctacatcaccgtcttaaccgttatgggagtcgccggggctaagtctaagtgtagtaccgttggg

SEQ ID NO: 202719 - DNA, 256 bp, Glycine max
atttttggctgtgttatgcttctcagcactgtcactgagtcgttgtcttgcggaggataatggacttgttatgaacttctacaaggaatcatgccctcaggctgaagacatcatcaaagaacaagtcaagcttctctacaagcgccacaagaacactgctttctcctggctcagaaacatcttccatgactgtgctgttcagagttgtgatgcttcactgttgctggactccacaagaaggagcttgtctgagaag

SEQ ID NO: 202720 - DNA, 285 bp, Glycine max
tttgctaaaggtgtagaagccatgcttggtccaattaacgaaaccgaggagtccagatccgcgcgcgacgacgacggccacggcacccacacgtccagcaccgccgctggatcagttgtttccggcgcgagcctcctcggttacgcctccggaacagcgcgtgggatggccacgcgcgctagagttgctgcatacaaggtatgctggaaaggagggtgtttcagctctgacattcttgccgcaattgaaagggcaatattggacaacgtgaatgttctttcttta

SEQ ID NO: 202721 - DNA, 306 bp, Glycine max
gcgtacgtaactcgattcgctcaagatacgggtaccacctcaggcggctggttacggatatccacaacatcaatcaggttatggatatccgcaacagcctggatatgggtacccacctcaggcacagaaaccaaagaagaacaaatttggaatgggattgggagctggattgcttggtggaaccttgggtggcatgttgattggagatatggtatctgatgctgctgattatgatgcgggctacgatgctggctttgatgatgctggtggatttgatttttaattttcagtttttcaattaaccat

SEQ ID NO: 202722 - DNA, 289 bp, Glycine max
ctcaacgcacgcaggaggaggagattgatcgagagaagagaagatgactacacgcttcaagaagaacaggaagaagagaggccacgtgagtgccggccatggccgcatcgggaagcaccggaagcaccctggaggacgcggtaatgccggaggcatgcaccaccaccggatcctctttgacaagtaccaccctgggttcttcggcaaggtcggaatgcgctattttcacaagctccgcaacaaattctactctccgatcctcaacatcgacaagctctgggtcctgggt

SEQ ID NO: 202723 - DNA, 259 bp, Glycine max
  unsure (1)..(259): unsure at all n locations
atcacacatgaccatgctacctcattcattaactatgattgcaacactaataatcatttttcttgcacaaacacttgtgggggtgagttcacttcctgaagctgataaaataaccaatttgccggggcagccacgggtcgaatttcagcaatattctggttatgtcaccgtggatgatcanaatcaaagagctttgttttactactttgttgaggctgaagaaaacccttcttccaagccattagtcctatggttgaat

SEQ ID NO: 202724 - DNA, 290 bp, Glycine max
gaaaattcatcataccaacgctttcaaaccttgcaagtgccctctttcttggacttttcctgtccattatagtcactagtgtgctcgagctgcggtggagtggtgtgaccattgaagctttgtggcgtaatgaacaattctgggttattggaggagtttcagcgcatctatttgccgtgttccaaggattcctgaagatgttggcaggtgttgacaccaacttcactgtcactgccaaagctgctgatgacaccgagtttggtgatctatacataatcaagtggaccaca

SEQ ID NO: 202725 - DNA, 285 bp, Glycine max
gaatggctcccaagggtttaatctttttggctgtgttatgcttctcagcactgtcactgagtcgttgtcttgcggaggataatggacttgttatgaacttctacaaggaatcatgccctcaggctgaagacatcatcaaagaacaagtcaagcttctctacaagcgccacaagaacactgctttctcctggctcagaaacatcttccatgactgtgctgttcagagttgtgatgcttcactgttgctggactccacaagaaggagcttgtctgagaaggaaacag

SEQ ID NO: 202726 - DNA, 280 bp, Glycine max
gttttggcttcttcgctgcaactctctaccttccctctttttccgaatctgaatagaaatggcttcggagactgagacgttcgcttttcaggccgagatcaaccagctcctcagtctaataatcaacaccttctacagcaacaaggagatatttcttcgtgagctcatcagcaatgcctctgacgctttggacaagattcgatttgagagtcttacagacaagagcaagcttgatgctcagccagagttgttcattcacattattcgtgacaagaccaac

SEQ ID NO: 202727 - DNA, 283 bp, Glycine max
aaattttcttccccaaatcgtagatctacggtttaactggagtagtgtggtaagatgggaggtggatttagagtgcttcatttagttaggccgtttctatcgtttcttcctgaagttcaaactgctgacaggaaagtgccatttagagagaaggtcatatacactgtgatctctcttttcattttcctggtttgtagtcagctccctctatatgggatacactcaacaacaggtgctgatccattctattggatgcgagttattctcgcttcaaatcgtggaa

SEQ ID NO: 202728 - DNA, 281 bp, Glycine max
gttcgcttgcagtcacacaagaggccaatcctattcatagctcgagatgggtgaagaagtgaaggtagttgttccagaatcagtgttgaagaagcgcaagagggaggaggaatgggcgttggccaagaagcaagaactcgatgctgccaagaagaagagagccgagagccgcaaactcatctacaacagagctaagcagtacgctaaggagtacgatcaccaggagaaggaattgattcggttgaaacgcgaggccaagctgaaaggtggtttctatgtgg

SEQ ID NO: 202729 - DNA, 283 bp, Glycine max
tatcgagccgattcggctcgagtttctctctcgttttttctcaaaacgttgcaagagttaaaacaaaaaccaaagtgagagcactaatgatgaagccatcgatgctcagatctcttcactctgccgccacccgcggcgcctcccacctctcccgccgtggctacgcctccgaaccggtgccggagcgcaaggtggccgttctaggtgccgccggcgggatcgggcaacccctctcccttctcatgaagctcaaccccctcgtttccagcctctccctctacga

SEQ ID NO: 202730 - DNA, 284 bp, Glycine max
tgagctctgcgagatcttcattcgccgattttaaaagatgagtaagcttcagagtgatgctttgcgtgaagccatttcaggaatcatggccgattccaaggagaagaatcgcaaatttgtggagaccatcgaactccaaatcgggttgaaaaactacgatccacagaaggacaagcgtttcagtggctctgtcaagctgccccacatccctcgccccaagatgaaaatttgcatgcttggtgatgctcagcatgttgaagaggcggagaagataggactggact

SEQ ID NO: 202731 - DNA, 284 bp, Glycine max
  unsure (1)..(284): unsure at all n locations
caaagtgaagtgatgaacggagacaaggacaatcatggaagcgaagatggcaaccccaaagagtggttgaacctgagcataggtggaacttcttcactatcaacatctggagacactgattcacaagcaagaccaccagccactgccaaagttttttcatgcaacttctgcatgaggaagttctttagctcacaagcactaggaggccatcagaacgcgcacaagaggganaggggagctgccagaagataccaatctcagagatcgatggcaataatgggatc

SEQ ID NO: 202732 - DNA, 283 bp, Glycine max
  unsure (1)..(283): unsure at all n locations
acgagagagacagtggaaagaaaggaaagggatgacgctgggtctgatcaatgcgaaccctgtggttcacgccaagaaagagcgaatcgctcgttccgatgatcctcacgccgacgacgccgttgatcctctcgatatctatgatttcgtgagggatattcgggatcccgaacatcctttatnccttggaacagctcagtgttctctccgaggaatcaatcaccgttgatgacaaattaggccgaattctgataacttttacgccgaccgtacagcactgtag

SEQ ID NO: 202733 - DNA, 324 bp, Glycine max
agcgtagtagctcgggttgtaaaaaagattcatgttcagttagtatcttgtgaaggcgatcgaatactagaaagaaacaaatcgatcaagcttgaaagataggaagaatttaagaaatgggtgaggaggaaatagatgattctcccttgattcaaggttttccttccggcgacgtgccatttaggagaactggtaatgtagagagggcagtagcacatataataactggtgtgataggggcaggggtgctgtctctagcatggtctgtggcacagttagggtggattgctggtccttttatcatcatagtctttgcaggaacaa

SEQ ID NO: 202734 - DNA, 276 bp, Glycine max
cagaattctctaaaagagatctttttctgctctttgaagaaagaagggtctttgctagattttggagatgtctctgctctcagatctcatcaaccttaacctctccgataccaccgagaaggtgatcgcagagtacatatggatcggtggatcaggaatggacctgaggagcaaagcaaggactctcccaggaccagttagcgacccttcagagcttcccaagtggaactatgatggttccagcacaggtcaagctcctggtgaagacagtgaagt

SEQ ID NO: 202735 - DNA, 274 bp, Glycine max
atcttgttctatctgtgacgagcatcatggcctcaagagcagtgttattgttggctatgtgtgtgcttccggcgatggttgtggccattcgcccagcaaagaaccctttttgcgtgaagggtcgtgtctactgtgacccttgccgtgctggttttgagacctcagctaccacctacattgctggtgctgagattatgttgcaatgcaagagcagggttagcaacgaggttgtgtacacgaagaaggggtacaccgactcaaccggagcatacac

SEQ ID NO: 202736 - DNA, 279 bp, Glycine max
aagctcgagctcgagccgaatcggctcgagaacgagcatgatccaaataatacaactatttttactggcactttggatcctaacgtcacggatgaccatttgagacaagtttttgggcattatggagagttagttcatgtgaagattccagctggcaagcgatgtggatttgtccaatttgcggaccggagctgtgcggaagaggcactgcgggttttgaatggcacacttctaggcggacaaaatgttaggctttcatgggggcgaagtccttcaaac

SEQ ID NO: 202737 - DNA, 281 bp, Glycine max
agaagagaatggctcccaagggtttaatctttttggctgtgttatgcttctcagcactgtcactgagtcgttgtcttgcggaggataatggacttgttatgaacttctacaaggaatcatgccctcaggctgaagacatcatcaaagaacaagtcaagcttctctacaagcgccacaagaacactgctttctcctggctcagaaacatcttccatgactgtgctgttcagagttgtgatgcttcactgttgctggactccacaagaaggagcttgtctgag

SEQ ID NO: 202738 - DNA, 281 bp, Glycine max
agaatggctcccaagggtttaatctttttggctgtgttatgcttctcagcactgtcactgagtcgttgtcttgcggaggataatggacttgttatgaacttctacaaggaatcatgccctcaggctgaagacatcatcaaagaacaagtcaagcttctctacaagcgccacaagaacactgctttctcctggctcagaaacatcttccattactgtgctgttcagagttgtgatgcttcactgttgctggactccacaagaaggagcttgtctgagaagga

SEQ ID NO: 202739 - DNA, 279 bp, Glycine max
aggatctgtatggtaacattgttcttagtggtggctcaactatgttccctggtattgctgaccgtatgagcaaagaaatcactgcacttgctcctagcagcatgaagattaaggttgtggctccaccagagagaaagtatagtgtttggattggaggatcaatccttgcatccctcagcaccttccagcagatgtggatatcgaagggtgaatatgatgagtctggtccatccattgtccacaggaagtgcttctaagtccaaaagaaatgctttaatg

SEQ ID NO: 202740 - DNA, 287 bp, Glycine max
gctcggtggtgaaatccgccggagcgttggggatggtgctgtccaacaccgccgctaacggcgaggagctagtggcggatgctcatttattaccggccaccgcagttgggcagaaagccggtgacgctattaagaagtatttggtttccgatgcgaaaccgacggtgaagattttttttgagggaaccaaggtggggattcagccatcgccggtggttgctgcgtttagctcaagaggtcccaactcgatcacgccacagatcctgaagccagatctcatcgcgcca

SEQ ID NO: 202741 - DNA, 278 bp, Glycine max
aacaatcaaatgggatgtcattagctggaccccagatggctatgttgctgttgtgacaatgtacaactttcaacaatatcgccacattcaggcccccggatggtcattagggtggacatgggctaaaaaggaagtgatttggagcatgatgggagcgcaaaccacagagcaaggggactgttcaaagttcaaagcaggcattccacattgttgtaagaaggaccctacagttgtggatttgctgccagtactcttacaacagcagttgcaaattgtgc

SEQ ID NO: 202742 - DNA, 287 bp, Glycine max
agagcatcaaactcttcttcttcgatttccattgcgaacgttactttttcttcttctttctcttcattttcttcgctcttcgatcttcgtccggggactgctccgaataccaccaccaccactcgccgatggccacgatcggaggcttacacgactcccaaggctctcaaaacagcgtcgaaaccgaagccctcgctcgattcgccgtagacgaacacaacaagaagcagaattcgcttctggagtttgctagggtggttagggcacaggaacaggttgttgctggt

SEQ ID NO: 202743 - DNA, 305 bp, Glycine max
attcggctcgatagcagtcacaatgctttggctgccactttcggaatattaggtaacatcatttctgtgatggtgtacttggctccggtgccaacgtattaccggatatacaaaaagaaatgcacggacggtttccactcgctgccattcttgttgtcattaatgagttctatgctttggttatactacgccttcctcaaaattcatgacggcgttgttccccttattacgatcaactcgatcggatgtgtcatagagctcatctacattctcacctacattaaatatgcgcacaaggatgcaag

SEQ ID NO: 202744 - DNA, 299 bp, Glycine max
agcaactccaattcgtgccactctcttcaaaatggccgttaccttctcaaatctccacacagaatcaggtctcaagtccctcgacgacttcctctctgggaaggtctacgtttctggggatcagttcacaaaggacgacatcaaagtgtatggtgctgttttggagaagccaggtgactcttttcccaatgctgccaagtggtacgaggttgtctcatctcagcttgctgcaagcttccccggcaatgctcaaggggtgagattcagtggcaaagcttctgctccagcggaggctgctc

SEQ ID NO: 202745 - DNA, 287 bp, Glycine max
acgcggcgcctctcatctcttccgccgtgggtacgcctccgagccggtgccggagcgcaaggtagccgttctcggcgccgccggcgggatcgggcagcctctctcccttctcatgaagctcaatcccctcgtttcgagcctctcccttaacgatatcgccggaactcccggcgtcgccgccgatatcagccacataaacaccagatctgaggtagtggggtacaaggtgatgaagagcttggaaaagctttggagggtgccgatgttgttataattcctgctggtgt

SEQ ID NO: 202746 - DNA, 281 bp, Glycine max
ctcttcttctcttgcggcttgggttttagcgcagttcttctagaattaaggaagatgggtaaggaaaaggttcacatcagtattgtggtcattggccatgtcgactctgggaaatccactaccactggtcacctgatttacaagcttggaggcattgacaagcgtgttattgagaggtttgagaaggaagctgctgagatgaacaagaggtctttcaagtatgcctgggtgctggacaaacttaaggctgagcgtgaaagatgaatcaccattgatattgc

SEQ ID NO: 202747 - DNA, 279 bp, Glycine max
ctcgagccgcaagcagtgggaggaggctcgggactctgaccgcgtgctagttgaagaatgagccggcgactcataggcagtggcttggttaagggcaaccaccggagccgtagcgaaagcgagtcttcacagggcaattgtcactgcttatggacccgaacctgggtgatctatccatgaccaggatgaagcttgggtgaaactaagtggaggtccgaaccgactgatgttgaagaatcagcggatgagttgtggttaggggtgaaatgccactcgaac

SEQ ID NO: 202748 - DNA, 280 bp, Glycine max
tgttctcctgaggcgtgaattggcgaacgagaaaattgagaaacctgagattgttcatggtcaagcatgccagagcaagaaaggggaggatttaacactgctcaagacggaatgccagagggtcgtgggtgatggggtctctacatattcagtttttgggctatttgatggacacaatggatctgctgctgctatttatgctaaggagaatcttctaaataatgtattaagtgtgattcctcacgatcttaacagggatgagtggatagcagcatttcct

SEQ ID NO: 202749 - DNA, 281 bp, Glycine max
aaataacgctcgggacagtaacctcgtgtactcgccgctgtcgttgcacgttgttctgagcatcatcgcttctggctccaagggccccacactcgatcagcttctctccttcctccgatccaagtccaccgaccatctcaactccttcgcctctcagctcgtcgccgtcgtgctctccgacgccgctcccgccggcgggcctcgcctcttcttcgccgacggcgtgtgggttgagcaatccctctctcttcacccttccttcaaacaacttgtcagtgctc

SEQ ID NO: 202750 - DNA, 279 bp, Glycine max
aattggtgtaacaatgcaggctgggactcctttgagcatagagacaccacccaaatcatctggaaatactgatcagggtttaatgaagaaattgaaagagtttgatggacttgcaatgtcaattggcaatggccatgctgaaagtgcagagcgtggaggtgaaaacaggctctcacagagtgtggatactgagggttccagtgatggaagtgatggcaacacttcaggggctaatcaatcaagaaggaaaagaagccgtgagggaacaccaaccactga

SEQ ID NO: 202751 - DNA, 278 bp, Glycine max
cggtggcaaaaagcccagagggtctgcagagccctcactcagattccgtctcagccctaaaagacggttttatcgcagaacacttctcttccgttcaccctggttccgtcaccgtcaaccttggctcttccggtctcttggcctattcccttcacagacagaacccccttctcccaaggctgtttgcagttgtggacgacattttctgtttgtttcaaggtcaccttgagaatgttgccaaccttaagcaacaatatggattgaacaaaacagcaact

SEQ ID NO: 202752 - DNA, 283 bp, Glycine max
acaatttaaactatggtcaactatccgagaagaacaaatatgtcgtttcacgtctgatagcaaagagagattccgtggtaatgctggagttgttgtgacgacatataatatggttgcttttggtggtaaacggtctgaagaatctgaaaaaatcattgaagaaataagatacagagaatggggattgctcctcatggatgaggtgcatatggttccggcccatatgtttcgtaaagtcatcagtatcactaaatctcattgtaaacttgggctcacagctaca

SEQ ID NO: 202753 - DNA, 283 bp, Glycine max
tagcagtcacaatgctttggctgccactttcggaatattaggtaacatcatttctgtgatggtgtacttggctccggtgccaacgttttaccggatatacaaaaagaaatgcacggacggtttccactcgctgccatacttgttgtcattaatgagttctatgctttggttatactacgccttcctcaaaattcatgacggcgttgttccccttattacgatcaactcgatcggatgtgtcatagagctcatctacattctcacctacattaaatatgcgcac

SEQ ID NO: 202754 - DNA, 285 bp, Glycine max
aaacaaccttctttctttttctgtgagcctttctttcaggttcttaacttgatcagtgtgcagtgtccaaatcataagggtagttgcaaattgcaatggctaagcatgatgttgagggtggttccttctctgcaaaggactaccatgatcctcctccagcaccgttgattgatgctgaggaactcacacagtggtccttctacagggctttgattgctgagttcattgccacaatgctcttcctttacatcacagtgctcactgtgattggttacaagagccaga

SEQ ID NO: 202755 - DNA, 276 bp, Glycine max
ctctgaaatcattaatgagagtgtcattgaggctgttgactctttgaatcctttcatgcatgctcgtggtgtttctttcatggttgataactgttcaaccacggctaggttgggttcaaggaaatgggctcctcgatttgactacatcctaacccagcaggccatggtggcggtggacaatggaacacctattaaccgggacttaatcagcaacttcctgtcagactcagtgcatggagccattaaagtttgcgctgaactgagacccacagtaga

SEQ ID NO: 202756 - DNA, 279 bp, Glycine max
atctgaaaggttattgtcggcacggcaatgacagattgctaatatactcatacttggagaatggaagcttggattattggctgcatgagtgtgtggatgaaaattcagctctcaaatgggattcaagactcaaggttgcacaaggcgctgctcgcggattagcttacttgcataaggggtgtgaaccattcatagtgcatcgagatgttaaatctagcaacatacttttggatgacaactttgaagctcatttggctgattttggtctctcaaggctac

SEQ ID NO: 202757 - DNA, 277 bp, Glycine max
attctcctgaggcgtgaattggcgaacgagaaaattgagaaacctgagattgctcatggtcaagcatgccagagcaagaaaggggaggatttaacactgctcaagacggaatgccagagggtcgtgggtgatggggtctctacatattcagtttttgggctatttgatggacacaatggatctgctgctgctatttatgctaaggagaatcttctaaataatgttttaagtgtgattcctcccgatcttaacagagatgagtggatagcagcattgc

SEQ ID NO: 202758 - DNA, 280 bp, Glycine max
acgtgcttctgatggaaggcttattgttgattttctcgctcagggtcttggattgccatatttgagcccatatctgcaatcaattggatcagactatactcatggggctaactttgcgtcttcagcctccactgtgattccgcccacaacttccttctctgtcagtgggctaagtccattttccctctctgttcaactcaggcaaatggagcaattcaaagccaaagttgatgaatttcatcaaacaggaacaaggatatcatctggaacgaaaatccct

SEQ ID NO: 202759 - DNA, 282 bp, Glycine max
  unsure (1)..(282): unsure at all n locations
gagatgnagcatacagtgaaaatngtttagtgcctcggacaatacgtttgctcaaggataagtacccagaccttgttatctatacagatgttgcattagatccttattcgtcagatgggcatgatggcatagttagagaagatggagttattatgaatgatgagacagttcatcagctatgtaaacaagctgtagcccaggcccaagctggagcagatgttgtcagtcctagtgatatgatggatggtcgggtaggngcactgcgtgcagctcttgatgctg

SEQ ID NO: 202760 - DNA, 277 bp, Glycine max
  unsure (1)..(277): unsure at all n locations
attgtttgttgttgtaactcgttcttcttcttttgttgttctgtgtttgtgtttgttttttctctcacctgaaaatgtcttgctgcggtggtaactgtggttgcggaagctcctgcaagtgcggcaacggctgcggaggctgcaagatgtacccagacttgagctacactgagtcaaccaccaccgagaccttggtcatgggagtggcactgttnaagctcaatttgagggtgctgaaatgggtgtgccgctgagaacgatggctgcaaatgtggac

SEQ ID NO: 202761 - DNA, 271 bp, Glycine max
  unsure (1)..(271): unsure at all n locations
actcggattcggctcgagaggacttccatggctactccacatgtttcagggcttgcatgcagtgtcaaaagaaaaaaccccacttggagtgcctccgcaatcaaatctgccatcatgacttcagcaattcaaaatgacaatttgaagggtcccataacaacggattcagggttgatagccacaccttatgactatggagcaggggcaattacaacatctgaaccattgcaaccggggctagtttatganaccaacaacgttgactacttga

SEQ ID NO: 202762 - DNA, 166 bp, Glycine max
cacgacaacgtatcacaagctcccaatatagcaagcagcaaacatgatttcttccgtgtcctttccagcgtctcttcccgccgttaacttctccggcaacgccatggcttcgccgtcgtgccgcgtcaaatcccggccaatagtcgccttcgccaccgccactgcc

SEQ ID NO: 202763 - DNA, 166 bp, Glycine max
agaaggtgaagtaccagctggtggagtaccactccttgcccggttatttgagagacaacgagtacattctcggtcactatcgatccgaatggcccatcaggcaggttttgttgagcgcattcaccatccacaacgaaactctcaacgtttggacgcatttgatcgg

SEQ ID NO: 202764 - DNA, 183 bp, Glycine max
cacttttcatccttcgatcatacacttagttgcttccaattaagatggttctgctagagaagctctgggatgatgttgtggctggccctcaacctgagcgtggccttggcaagctcagaaaactcaccaccctcaaaactattgatgaaggagaaagtagcaagctgcagaagacgttgtcga

SEQ ID NO: 202765 - DNA, 286 bp, Glycine max
gctcgagcggctcgagcggctcgagcggctcgaggtcatctacaactagtaacaaagatccaacaagcagatcaatctctctctctgtctcacaatcaaaacagacatgggtttgaaggaggattttgagcagtatgctgagaaagcaaagactttgccaccgactcaatcaaacgaagacttgcttatcctttatggattgtacaagcaggccaccgttggacctgtcaacaccagccgtccgggaatgttcaggggggggacagagctaaatgggatgcatgga

SEQ ID NO: 202766 - DNA, 287 bp, Glycine max
tggtaaagaaagagaagaaaagagtggaatcgaagacgaagacgaagatggaggacgcatcagcatcaaagttcatcccacaccaaatcggaggggtccaaaacgacgtgcttcgatttggtctccatggagtcaagagcgacatcgttggttcccaccctcttcaatcttcactccaatctacaaggagaatggatgaagcgatgaagaagcaatgcaaagttaacctgtacggaactgcttttcccctgaaggaggagcttgacaggcaaatcctgtctaggttc

SEQ ID NO: 202767 - DNA, 277 bp, Glycine max
ttagaacccgcaatcaagtgatggaaggaacgatgacgattctgctctctctgatttcctcgcttccttaatggattatactcccactatacccgatgaattggtggagcattacttggccaagagcggttttcaatgtcccgatgttcgattgactaggttggtagctgttgccactcagaagtttgtagctgaagttgcaggagatgcacttcagcactgcaaagcaagacaagcaacatttccaaaagacaaaagagacaagcagcagaaggat

SEQ ID NO: 202768 - DNA, 282 bp, Glycine max
gattctacccgccgctcgatgggaattgcgcttcaaggcgtctcgtagggctaatccgcctcacgagggtcaccaacggcacgtgcctttggggggccgaggcccctactgctggtcggcaaacggacggcgggcgcacgcgtcgcttctagcccggattctgacttagaggcgttcagtcataatccaacgcacggtagcttcgcgccactgacttttcaaccaagcgcgatgaccaattgtgcgaatcaacggttcctctcgtactaggttgaattacta

SEQ ID NO: 202769 - DNA, 107 bp, Glycine max
ctcgagccgcgaagagaatggctcccaagggtttaatctttttggctgtgttatgcttctcagcactgtcactgagtcgttgtcttgcggaggataatggacttgtt

SEQ ID NO: 202770 - DNA, 115 bp, Glycine max
gcttattgggaataattttgttgaaccctgatgttggtagtaagtatctagacagttgcatagcggttttgtttacagaataagatatagcctctctgaacagtttgattattgc

SEQ ID NO: 202771 - DNA, 284 bp, Glycine max
gctggtgctcacacaaactacagcactaagtccatgagaaatgatggtggctatgaagtgatcaaaaccgccattgagaagttggggaagagacacaaggagcacattgctgcttatggagaaggcaacgagcgtcgtttgacagggcgccacgaaaccgctgacatcaacaccttcttatggggagttgcaaaccgtggagcttcagttagggttgggagggacacagagaaagcagggaagggatattttgaggacagaaggccagcttctaacatggaccc

SEQ ID NO: 202772 - DNA, 283 bp, Glycine max
gcagttttggagcacaagcttagctcactggggtgggagcgttactatgatgaccctgatcttctacaattccacaaacgctccaccgtgcatctaatttctcttccaagggatttcaacaagttcaggtccatgcacatgtatgacatagtcgtcaagaacaagaactacttcgaagttagggacatttaataagggggtgtgtaaaaaaaactatccatgacccaaattgggcagggtaaccctacaaaattgaattcttgggagtgatttatatctacaa

SEQ ID NO: 202773 - DNA, 276 bp, Glycine max
ggaaactaaagactagtcaaaatggtgaagttcacagctgaagagctgcgtcgcattatggactataagcataatatccgtaatatgtctgtcattgctcatgttgatcacggaaaatcaaccctgactgattctcttgtggctgctgctggtattattgctcagaaagttccagttgatgtcggtataactgatacccgtgcagatgaagctgagcgtggtattacaatcaagtctacgggtatctcactctactatgaaatgagtgatgacgct

SEQ ID NO: 202774 - DNA, 136 bp, Glycine max
tgctcatccacaattgctattatggctgcttttgatgtgaacttcccaaagaaagaacttgcacaagttacatgtgattgtgaacgacatattgggactcaatctggtgggatggatcaggcaatctctgtcatgg

SEQ ID NO: 202775 - DNA, 280 bp, Glycine max
gtcataatccaacgcacggtagcttcgcgccactggcttttcaaccaagcgcgatgaccaattgtgcgaatcaacggttcctctcgtactaggttgaattactattgcgacactgtcatcagtagggtaaaactaacctgtctcacgacggtctaaccccagctcacgttccctattggtgggtgaacaatccaacacttggtgaattctgcttcacaatgataggaagagccgacatcgaaggatcagaaagcaacgtcgctatgaacgcttggctgcc

SEQ ID NO: 202776 - DNA, 281 bp, Glycine max
tgagtcagtcatccttgctaaatttattgaagccgtgcagagctgtcccgatccaagctcccaagctgctctgaagctcgtctgtgatctttatgctctggatagaatatggaatgacattggaacctaccgaaatgttgactatgtggctcccaacaaagccaaggcaatccacaagctcgcggagtatcttagtttccaagtgaggaatattgcaagggaacttgttgatgcatttgatcttccggatcacgttacacgggcccccattgccaagcggt

SEQ ID NO: 202777 - DNA, 282 bp, Glycine max
gctgtgtctggggaaatttgcgttgtttttcgcggtacagctcacacacactgaacggtaagtatggcggacaaggctgttacaatccgaacccgaaagttcatgaccaacaggcttctttccaggaagcagtttgtcgttgatgttcttcatccagggagggcaaatgtttccaaggctgaacttaaggagaagctagctaggatgtatgatgtgaaagaccctaatactgtatttgtcttcaaattccgaacacattttggaggtggcaaatccactggt

SEQ ID NO: 202778 - DNA, 269 bp, Glycine max
ctcgagccgcgaagagaatggctcccaagggtttaatctttttggctgtgttatgcttctcaccactgtcactgagtcgttgtcttgcggaggataatggacttgttatgaacttctacaaggaatcatgccctcaggctgaagacatcatcaaagaacaagtcaagcttctctacaagcgccacaagaacactgctttctcctggctcagaaacatcttccatgactgtgctgttcagagttgtgatgcttcactgttgctggactcc

SEQ ID NO: 202779 - DNA, 194 bp, Glycine max
cggttatcccggactgcgttccggaaaaagtggcctacttgaaatgaaagaaagggcgagcactcttgtgtttcaaccccactatcactatactattcatagttgtggggcactgtgtacttacagcctctacgataagcaagtgaatggggccggtgcgtggcgaacggaacggttcatcaagccatttctcg

SEQ ID NO: 202780 - DNA, 166 bp, Glycine max
gatttctcagaccctgtgacatctgcaaccctcagcatagttcaggttttctgggggttggacaaaaagcttgcccagaggaagcactttccttctgtaaactggcttatttcttattcaaaatactcaacggcacttgaaaccttttatgagcaatttgatccag

SEQ ID NO: 202781 - DNA, 113 bp, Glycine max
gaggaatatggcttccttaagctcctcattagtgatgctccttgcagctctaattctatcccctcaagttcttgctgactatgagaagcccccaatttacaagccacctgttt

SEQ ID NO: 202782 - DNA, 112 bp, Glycine max
gcagacacagatggctcgtacgaagcaaaccgctcgtaagtccacaggaggaaaggctcctaggaagcagcttgcaaccaaggctgcacgtaagtctgcaccaactactggt

SEQ ID NO: 202783 - DNA, 188 bp, Glycine max
agcgaaacgcatagaatcgaaagaggggaaaagaaaaagaaaagttagggttagggattttgagagatggcatcgactaagaagatcaccctgaagagttcggacggtgaggccttcgaggtggaggaggcggtggcgctggagtcgcagacgatcaagcacatgatcgaggacgactgcgccgacag

SEQ ID NO: 202784 - DNA, 138 bp, Glycine max
gttttcttcagaaaatttgccatcgttgagggaagcgcgagagccttcgttgttcaagatgagagctaagtggaagaagaagcgcatgaggaggttgaagaggaagcgccgaaagatgagacaaagatctaagtaggt

SEQ ID NO: 202785 - DNA, 247 bp, Glycine max
  unsure (1)..(247): unsure at all n locations
ttctaatagctactgcttcgttagaagtgcaaaaattaaatgtccaacatcttctngttgatgtttgagattcatgtatccgattctcagtgaaatcttcttttccgggtgtatgatcaattccactgtnaggcgcaggacccatttagttcaatcctnctcagttgctttcctctattggttgtactacgtttcatgatttctaancctnccttagtctaataatcatctactactagctattata

SEQ ID NO: 202786 - DNA, 268 bp, Glycine max
ctcgcttgctgttgtaactcgatcttctacttttgttgttctgtgtttgtagtcgttatttctctcacctgaacatgtcttgctgcggtggtaactgtggttgcggtagctcctgcaagtgcggcaacggctgcggaggctgccagatgtactcagacttgagctacactgagtcaaccaccaccgagaccttggtcatgggagtggcacctgataaggctcaatttgatggtcctgaaattggtgtgcccgctgagaacgatggctg

SEQ ID NO: 202787 - DNA, 277 bp, Glycine max
ggactggatgccgacaactgcaaggtcctcgtcaacattgagcagcagagccctgatattgctcagggtgtacacggccaccttaccaaaaaacctgaagaaattggtgctggtgaccagggtcacatgtttggctatgccactgatgaaacccctgaattgatgccattgagccatgttcttgcaacaaaactcggtgctcgtctcaccgaggttcgcaagaacggtacctgcccttggctgaggcctgatgggaagacccaagtgaccgttgagt

SEQ ID NO: 202788 - DNA, 274 bp, Glycine max
  unsure (1)..(274): unsure at all n locations
gagagaagaagatggcgtcgagcggaggcntgccgttttggagggcagcggggatgacatacatcacatactcaaacatatgcgcgaatctggtcaggaattgcctcaaggaaccctacaaggctgaagccatctctcgtgagaaggtccattttgctctctccaaatgggtcgacgccaagcctgaaaaacctactattcgttcagacaccccagagcagtgatccggaatagttggaagctaataaatgcataagtctttgagatctggaag

SEQ ID NO: 202789 - DNA, 167 bp, Glycine max
  unsure (1)..(167): unsure at all n locations
attttatcctattgaaattttaaaaatgactgggataaacttaagagttcaattattgaaattgaataagtanacaatttaattggattggtcgaatggtatcacaaaaatggagtactaactcccatttcttatttattattgaattaaccgatcaacttgctttg

SEQ ID NO: 202790 - DNA, 190 bp, Glycine max
cttctttctttttttcaatttccaaatcacgaaactcaagaagatggagaaagcgatcaacagacagaagattttgcttcatcatctcaacccttcatcatccacccaccccaacgaatcatcctccctccatgcttcagcatgtgtggcgggggatagcgctgcttatcaaaggacatcgacatggggg

SEQ ID NO: 202791 - DNA, 150 bp, Glycine max
gcaagcaaaaagaaagaatcccaggcgaggagaaagatggaggggaaggagcaggatgtgtcgttgggagcgaacaagttccccgagagacagccgattgggacggcggcgcagagccaagacgacggcaaggactaccaggagccggcg

SEQ ID NO: 202792 - DNA, 266 bp, Glycine max
cgagatggcaccaacacaccttcgaggaggcctgaacatgctgtttcaagttgcaaccacttttgggattttcacagctaacatgatcaattttggaacacaaaagatcaagccttggggttagaggctgtccctaggcttggctacagtaccagctcttttgatgactgtgggagggatatttcttactgacactccaaatagctatattgaacgaggattcgcggacacaagaaggaagctgctgaaggtaatccgaagaacaa

SEQ ID NO: 202793 - DNA, 272 bp, Glycine max
caccagtttacaagccaccagtgtacaagccaccagttgagaagccaccagtatacaaaccacccgtttataagccaccagtttacaagccaccagtgtacaagccaccagttgagaagccaccagtgtacaagcctccagtgtacaagccaccagtatacaaaccaccagtttataagcctccagttgagaaacctcctatttacaagccaccagtttacaagcctccatagagaagccaccagtgtacaagccaccagtgtacaaaccac

SEQ ID NO: 202794 - DNA, 269 bp, Glycine max
agaaaatcgagcaactttgagagcaatggccgaatttggcctgattctgttttatttctacatatgtgatcgaatcaacatacttggagattccaccaagagttatagctgggatcttttcatcttcctctaccttcttctgattatagtttcagctttgagttctttgaagaaacataatgactcatcaacattgtctggacaaaacatactttaccttaatcgcatcaaacagaagagtggaaatgatggatgcaggtcctcttttt

SEQ ID NO: 202795 - DNA, 268 bp, Glycine max
cttcccctatggctcgtcactccttgctcttagccctcctccacttcgccgccgtggccaccgccgcgatggcggtggccgcgatccgacgccgacgacatcctgatccgtcaggtggtgccagatgttggcgaagcgaagaggaggacaacctgctgaacgccgagcaccacttcgcgagagctcaaggccaagttcgccaagacctacgccaccaaggaggagcacgatcatcgcttcggcgtcttcaagtccaacctccgcagag

SEQ ID NO: 202796 - DNA, 261 bp, Glycine max
gaacaacacaacagagagaccgagcattaaggatgttggagctgtgccgcaagccactgaagatgtgcttcggtggtggaggcaacgacgacggcctcctctggcacacagaccttaagccccacgcttcagggaactactcaattgcagtggtgcaagctaattcatccttggaagaccaagcacaagtatttacctctccctccgcaacctttgtcagtgtatacgacggtcacggtggtcctgaagcttcccgtttca

SEQ ID NO: 202797 - DNA, 263 bp, Glycine max
  unsure (1)..(263): unsure at all n locations
gttctaacagttcccactcactttcgcaattacgcattgtgtttctctctttccgcggcgtagatctgaacagtttagaaaaccctaactgctctcatcactctctttgctttttttcctctccgatcaatgacctctttggtcgcgctaagtcatggcaggacttgcacacgagggatcacagtttgatgctcgtcaatatgatcagtagatgaatgantgcttacatctgatggacaggattttttcacatcttatgatga

SEQ ID NO: 202798 - DNA, 270 bp, Glycine max
tgaatggctcccaagggtttaatctttttggctgtgttatgcttctcagcactgtcactgagtcgttgtcttgcggaggataatggacttgttatgaacttctacaaggaatcatgccctcaggctgaagacatcatcaaagaacaagtcaagcttctctacaagcgccacaagaacactgctttctcctggctcagaaacatcttccatgactgtgctgttcaggttgtgatgcttcactgttgctggactccacaagaaggagcttgt

SEQ ID NO: 202799 - DNA, 273 bp, Glycine max
tgaaagagaaagagtttgcagagttgaattccgaaagaggaatggcgaacacgaggagcttcctatcccgattaacaataacctagaacccgtctatggcggaggttccgcactcgaagaagctcagcttcgtttcgataatttgaagtccaaattcgtcgaaatcttcggtcatcatcctcaaatcttcgctcgctcacctggaagagtgaacttgattggggagcacttgattatgaaggttattcggtgctgcctatggcaattcggcaa

SEQ ID NO: 202800 - DNA, 270 bp, Glycine max
ctcgagccgaaactttcctattcacatctgaatcagtgaacgaggggcaccctgacaagctctgtgaccagatctccgatgctgtgctcgatgcatgcttggagcaggaccctgacagcaaggttgcctgtgaaacctgcaccaagaccaacatggtgatggttttcggagagatcacaaccaaggccaacgtggactatgagaagattgtgcgtgacacatgcaggacattggttttgtctctgatgatgttggtcttgatgctgacaa

SEQ ID NO: 202801 - DNA, 255 bp, Glycine max
agctgaagcataataatattgagaacttgcatgatcacatttatgatttattataaatatatacactacctaaacagataaaattacccctatttccactccacccacagatttgatgaaaactgtccctagctagttatactactactccatggagcttcccagcttgattacctcaaaattcaatactaagctgcccaataaagaaaataaaatcttaaaattttacagaaacagctaccgggaaggcttaaa

SEQ ID NO: 202802 - DNA, 266 bp, Glycine max
ctttccactcgcgaaatccagagatatcgatcaacagattcgagcgacacgttaaattgttttcaaggttgcgcatatccaggatgcaggcatcgcgggcaaggttgttcaaagagtacaaagaggtgcagcgggaaaaggccgttgatcctgatattcaactagtttgtgatgattcaaacatttttaaatggaccgctcttatcaagggaccctctgagatccttttgagggtggtgtgttccagcttgccttttctgttccgg

SEQ ID NO: 202803 - DNA, 261 bp, Glycine max
cgaggtcgcagatgtaccacaagaggggcatttgggctatcaaggccaaaaacggtggcgtagtacctcgccacgaccctaaacccaagcctgaagctcctgctgaaaaaccacccaaattttaccctgctgatgatatcaagaagccccttgtcaacaagcacaaaccgaaaccagctaagctcagggctagcattactcccgggacagtgttgattcttcttgccggtagatttaagggaaagagggtagtctttttga

SEQ ID NO: 202804 - DNA, 263 bp, Glycine max
attgctaccacaaccatgaattgtaggaggttggtttatgtagttgtgtggttcaatctgtatgtggcatgcacattcattcaagtttcaggtctggacgcctctaacttcagcaagtgttggttcccagcaatttacaactttggtgactcaaattcagacacaggagctgtttttgcagcattcacaggggtgaagcctcccaatggcataagcttcttggaagcctctcaggaagggcctctgatggtcgtctcatcata

SEQ ID NO: 202805 - DNA, 260 bp, Glycine max
ctcacctcgaccgaatcggctcgagttctattccattctcactcaaacggaccctcccacatcactacatttcctccgatgaactccgcaagcacaacacgcgccacgacgcctggatctccatccacggcacggtctacgacgtctcctcctggctccaccgccaccccggcagttccctgctcctcctcatcctcgccggcaccgacgccactgacgccttcctcgcctactcattacgaactctgcattactcctcg

SEQ ID NO: 202806 - DNA, 274 bp, Glycine max
caaatacgctgtccggttcttctttttcttcatcagacgtcattcttggcgtcttagacacaggcatatggccagaggcggcgagttttagcgacaagggtttcggtcctgttccatcccgatggaaaggcacctgcatgacatcaaaagacttcaattcctcttgttgtaacaggaagataattggcgcgaggttttaccctaacccagaggagaaaagggcaagggattcaacggacatgggactcacgtttcgtcgacggcagtgggcgtg

SEQ ID NO: 202807 - DNA, 269 bp, Glycine max
aacaatcaaatgggatgtcattagctggaccccagatggctatgttgctgttgtgacaatgtacaactttcaacaatatcgccacattcaggcccccggatggtcattagggtggacatgggctaaaaaggaagtgatttggagcatgatgggagcgcaaaccacagagcaaggggactgttcaaagttcaaagcaggcattccacattgttgtaagaaggacccacagttgtggatttgctgccaggaactccttacaaccagcagat

SEQ ID NO: 202808 - DNA, 266 bp, Glycine max
tgggatgctgcacttcttgctgctgggactacactatctgcgatgaagcatttactgaatggggatggaaaagtttcctatgcattggttaggccccctggtcaccatgctcagccttctcaggccgatggctactgtttccttaacaatgcaggtctagctgtgcaattggctttagattccggctgcaagaaggttgcggtcatagatattgatgtgcattatgaaatggaacggcagaggggttttatcgatctaataaggtt

SEQ ID NO: 202809 - DNA, 269 bp, Glycine max
ttaattgcaagaatggcacttcgttgcttggtgatgtccctttctgttctcttcactcttggtcttgcgagagaaagccatgccagagacgaagatttttggcatgctgtttggccaaacactcccattccaagttcattgcgagatcttctaaagcctggccctgcaagtgtagaaatcgatgatcaccctatgcaaattgaagaaacacagtacccgaaaacttcttctataaagaagaccttcatccaggcaaaacaatgaaagta

SEQ ID NO: 202810 - DNA, 266 bp, Glycine max
gtgcgtttgaggatcctcttcaactccctttgccgtagtgatgtttattggtgggatgctaaggaccagactcctctgtttcctcgtatcttaggccacgaagcttcagggattgtggagagcgtgggcgagggtgtgacacatctgaaaccaggtgaccatgcactcccaatattcactggggagtgtggtgaatgcacttattgtaagtctgaagagagcacctgtgtgagctactcaggatcaacactgacaggggtgttatg

SEQ ID NO: 202811 - DNA, 263 bp, Glycine max
agacaacagaagaaaacaaaatggaagacacagtttctgcgttgaggtctttgatggtttctcactctccgccgctggatgccttagtggtgccctctgaagattatcacctgagcgaatatgtgtctgcacgagacaagcgccgcgaattcgtttccggcttcactggaagtgccggcttggcacttataacaaagaaagaagcactgctgtggacggtggacggtattttttgcaggctgagaaagaacttagtgctgggt

SEQ ID NO: 202812 - DNA, 231 bp, Glycine max
aatgctggtacatgactgagtggccagtgcttgtatattaaatcagaatttccttttttttcatgttttttttttctttggatactaatcttgatgattggaaaggaattttctatttggttacagcttatacatttttaatgctgggtcctggatagttacaaaaaaaaaaaaaaaaaaaaaaaaaaaaaaaaaaaaaaaaaaaaaaaaaaaaaaaggggggggcccccc

SEQ ID NO: 202813 - DNA, 258 bp, Glycine max
ggcgaacatagacatcgaagggatcttgaagcagcagcagccttatgatgggcgcgttccgaagacgaagatagtgtgtactttgggccctgcttctcgatccgtagaaatgaccgagaagcttctgagggcagggatgaacgttgctcgtttcaatttctctcatggcacccacgactatcaccaggataccctcaacaatctcaagactgccatcacaacactggcatactctgtgccgtcatgcttgacactaag

SEQ ID NO: 202814 - DNA, 263 bp, Glycine max
aaggatttggcgtccgaggaaagcttttgggacttgtacgagagatggaggagtcaccacacggtttcgcgaacctcggtgacaagcacaagcggtttaacgtgtttaaagcaaatgtgatgcatgtccataacactaacaagatggataagccttacaagctgaaactaaacaagtttgctgacatgaccaaccatgaatttaggagtacctatgctggctcataggttaatcaccacagaatgttccaaggcacgccacgt

SEQ ID NO: 202815 - DNA, 268 bp, Glycine max
tgtgtttggaaccattcagacttatttgaaagatgccaaggagaggttgttgctcacaacaaaggcagcagaaaaaatgggagttccattggggttcaaattggttagaggtgcctacatgtccacagagagtaaattggctgagtcatttgggtatgcatccccaattcacaataccattcaagaaacacacaattgcttcaatggctgctcatcatttcttttgagaagattgctaatggacccggttcaatttcagttgttcttg

SEQ ID NO: 202816 - DNA, 273 bp, Glycine max
gagagaatggcagcacttggtgggaatcgtgatgtgacaggaagccagaacagcgttgagatcgatgctctagctcgctttgctgttgaagaacacaacaaaaaacagaatgcccttttggagtttgaaaaggtggtaactgcgaaacagcaagtggtttctggtaccttgtacaccatcactttggaggcaaaagatggtgggcaaaagaaggtttatgaagccaaatttgggagaagtcatggttgaacttcaaggaggtgcaagagttca

SEQ ID NO: 202817 - DNA, 269 bp, Glycine max
agagaatggctcccaagggtttaatctttttggctgtgttatgcttctcagcactgtcactgagtcgttgtcttgcggaggataatggacttgttatgaacttctacaaggaatcatgccctcaggctgaagacatcatcaaagaacaagtcaagcttctctacaagcgccacaagaacactgctttctcctggctcagaaacatcttccatgactgtgctgttcgagttgtgatgcttcactgttgctggactccacaagaaggagct

SEQ ID NO: 202818 - DNA, 265 bp, Glycine max
ctgttacgtcgtcatctcatagccaccgccacaacccttcgagtttcgaaaaccctaaccccacaaccccctctcacaaactcactctttttcattgtttgataattcgaacttcctccatctttcccgaagtttgctatcatggctgggttggcgccagatggatcacaatttgatgctcgtcaatatgatgctaagatgaatgagttacttgggactgatgggaagattttgttacttcttatgacgagtttgtgaaagcttt

SEQ ID NO: 202819 - DNA, 266 bp, Glycine max
ctcactcacacacacacacactctctttccatgggtccgtttcgtaaacccttccttgcatttctctcggttgttctatttctgggtctctatgaggcagcagcagaacagactcagactcacaagagtacttacattgtacacgtggcgaaatcggagatgcccgagagcttcgagcaccacgctgtgtggtatgagtcgtcactgaagaccgtgtctgactcggcggagatgatttacacctacgacaacgccatccacggcta

SEQ ID NO: 202820 - DNA, 265 bp, Glycine max
tgttgaggtacttgagaagagaaaatggtgtcgtcgcaggttgtgaatacgtacccgttgtcgagctacacgttcggcacgaaggagcccaagatggagaaggatacctccgtcgcggatcgtctcgctcgcatgaaagtcaactatatgaaggagggaatgaggaccagtgtggaaggaattttactggtacaagagcacaatcatcctcatatacttctctgcaaattggaaacacattctgcaaactcccaggtggtcgtct

SEQ ID NO: 202821 - DNA, 257 bp, Glycine max
ctaagacaaaggacaatgtgtttgttaatgtggttgcctcaatccaatatcgagcattggcagaaaaggcatcagatgcttactacaaactcaccaataccaaagcacagatacaatcctatgtctttgatgttatcagagctactgttccaaagatggaacttgatgctgtttttgagcagaagaacacaattgcaaaagcagtggacgaagaattgggaaggctatgtcagcatatgggtacgagatagttcaga

SEQ ID NO: 202822 - DNA, 259 bp, Glycine max
atttcttcatcggttgttcaagtaaatggccttcgtcaccactgctgaagtgtgtgatgcgaacccccagttaattttgagtggggagcttcgtgcccttcagccagtttttcagatttacggtcgtcgacaggtcttctctggacctatagttaccttgaaggtgtttgaagacaatgttttggttcgtgagttccgtgaagagaaaggcaatggaagagtgcttgttgttgatggaggcgcgagtttacgctgtgct

SEQ ID NO: 202823 - DNA, 259 bp, Glycine max
ctcgcccgcaccgtccagatcgtaatcaagagaagaggagcgagttttgtttttccttgcagcccaagccatggcgcctctgatcctgcatggtggaaaaaccaacaaaaattcttacaagacactcattgcggcggagtatgccggcgtccaagttgactttgccccaaattttgagatgggtgtctccaataaaactcctgaatttctcaagataatcctattggcaaggttcctgtgttggaaacacctgatggtc

SEQ ID NO: 202824 - DNA, 224 bp, Glycine max
gtacaatgtatgcataagcgatagaattttgtaagagcttctggttccttgtttaagtagaatatactatattactttaaaaaaaaaaaaaaaaaaaaaaaaaaaaaaaaaaaaaaagaaaaaaaaaaaaaaaaaaaaaaaaaaaaaaaaaaaaaaaaaaaaaaaaaaaaaaaagaaaaaaaaaaagggggggggggggggggcgggggggggggggccggggg

SEQ ID NO: 202825 - DNA, 266 bp, Glycine max
gtttaggtgaactaattcggagaccttgcaagacttcatcaatggctgtcaaagtttatattgtgtactactccatgtatgggcatgttgagaaactagcagaagaaataaagaaaggggcttcctctgtggaaggtgttgaggccaagttatggcaggtacctgagacactgctggatgaggtgcttggtaagatgagtgcaccacccaagagtgacgtacagtcattacccccaatgaactatccgaggctgatggctttgtat

SEQ ID NO: 202826 - DNA, 273 bp, Glycine max
gtactggctactttatttatttaagcagaagcaggtgagtgagtgagtgagcaagagtgaagagcgaagagaatggctcccaagggtttaatctttttggctgtgttatgcttctcagcactgtcactgagtcgttgtcttgcggaggataatggacttgttatgaacttctacaaggaatcatgccctcaggctgaagacatcatcaaagaacaagtcaagcttctctacaagcgccacaagaacactgctttctcctggctcagaaacatc

SEQ ID NO: 202827 - DNA, 268 bp, Glycine max
gcaaagagaagagatctgcctcctttttatcaaatctatctcttcttcaagaatagttgaaaatggggctgtctttcaccaagttgttcagccgactgtttgccaagaaagagatgcgtatactgatggtgggtctcgatgctgcgggtaagaccaccattctgtacaagctcaagcttggagagattgtcaccaccattcccaccattgggtttaatgtggaactgtggaatataagaacatcagcttcactgtctgggatgttgga

SEQ ID NO: 202828 - DNA, 266 bp, Glycine max
aatgctggtacatgactgagtggccagtgcttgtatattaaatcagaatttccttttttttcatgttttttttttctttggatactaatcttgatgattggaaaggaattttctatttggttacagcttatacatttttaatgctgggtcctggatagttacaaaaaaaaaaaaaaaaaaaaaaaaaaaaaaaaaaaaaaaaaaaaaaaaaaaaaaaaaggggggcccccccaaattggccccccccccccggggatttttttccg

SEQ ID NO: 202829 - DNA, 264 bp, Glycine max
cttctctgctgagacaacaatggcgatggctttcaaaatggccactactgggatgtgggtgacggatgagtgcaagaactctttcatggaaatgaagtggaagaaggttcatagatacatagtcttcaagatcgatgagaagtcaaggcttgtcaccgttgataaggtgggtggtcccggcgagagctatggtgatctcgccgcctccttgcccgacgatattgtagatatgccgtattcgactttgatttcgtcaccgtcgat

SEQ ID NO: 202830 - DNA, 263 bp, Glycine max
tctcgagccgattcggctcgagcgaacatatggcttcaactcatctgcttcccctagcaaacttcttcttacttctctcagcttcttatctccagattgctggggcggaagcacaaccgttgactagtctcaagcttaactctcatattcttcaggagtctactgctaaagagattaatgaaaatcccgaggcaggatgggaggctgctataaatcctcgttctccaattatacagttgaacaatttaagcgccttcttggag

SEQ ID NO: 202831 - DNA, 262 bp, Glycine max
aatcatcacacacacatactaagaagcaacaattcttctacaatggatctcctccttctggaaaagaccctcataggtctcttcctcgctgcggtggtcgccatcgccgtctccaccctccgcggccggaaattcaagctcccaccgggcccactccccgtcccaatcttcggcaactggctccaagtcggcgacgacctcaaccaccgcaacctcacgatttggccaaaaaattcggtgacatcttcctcctccgcatggg

SEQ ID NO: 202832 - DNA, 258 bp, Glycine max
ctcgagccgcagatttctgctccagctgcaaaggcgcaagttctgggatggccaccaaacccgttcattcaggaagaactcaatggcttctcagcctcagaagaatgatgctgctgctgatgcagaagccaagtctggatgcctttatgttaaagtcagcatggaaggcgccccatatttgaggaaagtggatctgaatagttttaccacttacaggacctctctttggcacttgaaaagatgtttagttgttttaca

SEQ ID NO: 202833 - DNA, 256 bp, Glycine max
gccaaacgtgacacctgcagaccttgttttcattatagatgagaaaccgcacagtgtcttcgcccgcgatggaaacgaccttgttgtaacccagaagatttctcttgcagaggcattaactggttacacagtgcacctcactaccctagatggtagaaacctaaccataccaatcaacaatgttattcatcccaattatgaagaggttgttccagagaaggaatgccacttccaaaagatccatcaaagaagggga

SEQ ID NO: 202834 - DNA, 257 bp, Glycine max
aaagagttctttcaaaatgcaaacagccttaaccttcgctgcccccaacgttgtgccattggcacccacaaagagtgtctcccatattaccatctttcccaccaaattgaaagccccgcgctcctcacctcgttactctccgattagggttgcaaccgtggagcccgatacttcaactgttgactacaactctgcgttctcagtgtttcctgcagaagcatgcgaaactgtaggaggggaagcctgcatggcggaga

SEQ ID NO: 202835 - DNA, 257 bp, Glycine max
gctcttggaaattcaaccatatcatcaagtcctcccttagctggggagagaaaatcgttctcaaatgttactaggcttgggtttgctgctgctcatgattctccatccttacaaattcaagaaactagtggtctgcataataacaacacaactgctgattcttctgtcacaacaggtttgagaaatggggagacacaatcatactccaatgctacacaagaacagaatctaatataagctcgaatgcaccaaagaca

SEQ ID NO: 202836 - DNA, 265 bp, Glycine max
cttgtcatccgacctttgccatgacaggtgcgcttgcatggcaggtcaaaaaatgttaataaaaaaagttttattggtttggggagagatcgcacgggggttgcccggggtctctgcctcttgtgtggtgtggtgtttgctgtgctctccttttcgttatgccttttattattacctatctgtcgctccactccgtattacgactctggatcagaggatactcagaggattcgctccaacccctatcgagtaaggtattatctgt

SEQ ID NO: 202837 - DNA, 266 bp, Glycine max
ggagaagaagggactagcggcgaactcaaacggcgtcgtatcgactcgttgttcatccatttgagaggcatctggtagcggaagatggataagggtaagatccaagaggtgatcgagaaccaagtcctgacggtggcgcaaccgtcgaggacaagatcgacgatgagatcgccgccctggaacgcctcgatgccgacgacatcgaagccctccgcgagcgccgctccagcagatgaagaagatggcggagaagcgctcccgctgga

SEQ ID NO: 202838 - DNA, 266 bp, Glycine max
ctcatctcgaaaccctaagcactcgctcgggttcgtgtagtgccaaaccctagggctcattttccagatctattcagtttttctctcctctcttttccgatccaccgttggagatcgaagatggtgtccgacgccagcaagaagaaggccgcacagaagaaggccgccgccgccgccaagagaggtggcaaagctgccgccgctgccgttatggccgccactcttccaaagccgccgacaaggtcgccaacggaatcgccgatatt

SEQ ID NO: 202839 - DNA, 258 bp, Glycine max
ctcgagccgctcgagccgttctcgttcacactttcagattgtgtgaagatgggggcggacggccgaaacgatgttcctcctgccaacaggaagtcagaggttgaccctttgaagcgggtgccatatgaaaaacctccatttagtctcagccaaatcaagaaggtcattccacctcactgtttccagcgttctgttttccgctcattctcctatgttgttacgacctcaccatagccttctgcctctattatgttgcca

SEQ ID NO: 202840 - DNA, 254 bp, Glycine max
gtttgaagaacaacatggtggtgctaaaggtgtgtttgttgcttcttttccttgtgggggttacagctgcacgcatggaactgagcttcttcaaaagtgatcagtcatcaagttatgatgatgatgagtattcaaaaccatgctgtgatctctgcatgtgcacacgctcaatgcctcctcaatgcagctgtgaagatattaggctgaattcagccactcagattgtaagagctgtatgtgcacacgctcacagc

SEQ ID NO: 202841 - DNA, 255 bp, Glycine max
tttgaaaccagtttcacttgaactaggaggcaagtcaccattcataatttttgatgatgcagatctagataaagcggttgagcttgctctcatggccgtagtatataacaagggagaagtttgtgctgcaggctcccgcgtatttgttcaggaagggatctatgatgaatttgagaagaggttggtggagaaggcaaaagcttgggttgttgggatccctttgatcctaatgttcagcaagggcctcaggttgac

SEQ ID NO: 202842 - DNA, 255 bp, Glycine max
cttactctagactcttccttttctcttctctgtctaaggggtagccctgagatcacattgaacaatggtgaaggctgtggccgttcttggcagcagtgagggtgtcactggaactattcacttcgttcaggagggaagtggtccaaccaccgtaactggatctcttgctggtcttaagcctggtctccatggtttccatgtccatgcacttggggacactaccaatggttgcctctcaactggatcacatttcaa

SEQ ID NO: 202843 - DNA, 272 bp, Glycine max
acgaaatttacgatagcttttgaaggtaccagtttttgtcatcactctctcagctgatcggtgcttatagatccagcgtcagcagattcaatttgacactggaagcaatttctcatttcaaagattaagtgaaaacatggttgtccttgctgcatccattgtgagcaaatctggcaaagttctagtttctagacagtttgtggacatgtctcgtatcagaattgagggtcttctagcagcatttcccaagttaataggcactggaaagcaac

SEQ ID NO: 202844 - DNA, 266 bp, Glycine max
cttgatgatgaggaagatattgatgaagcagagaagtcacgtcaagatgcagcagatgaatacagacgtttaattgccattcatgctgggaagcctaaaggtggattaacggaatgtctcaaagtggatcctgataaagtgagacgtctaagtttaagtgagctacagcttgaaaaggctgctgaaactcatggaaaagaaattgtcagatttactcaacggaatatactgagagtgtatccaaaaggtactcgcattacttcgac

SEQ ID NO: 202845 - DNA, 238 bp, Glycine max
tatacactccatgtcccttaaatgtgcaattgacttaagcataccagacatcatacacaaatatggccaacccatgccactctcacaactcattgcttcactaccaatccacccatccaagacttgctacatccatcgcttgatgcgactctttactcattccggtttcttctctcggcacgatttggtcgaaaacgaacaagaagtgatcacgtatgagctaactgatgcatctaga

SEQ ID NO: 202846 - DNA, 271 bp, Glycine max
atttcttctcatcgagaagcttcgcgaacgaaaacaaagaaccctagacagatccattccatagccatgtcaggtgtacgccctctatctcaggattgggaacccgtcgtcctccgcaagaaggctcccaccgccgccgccaagaaggacgagaaagccgtcaacgccgcccggcgctccggcgcggaaattgaaaccctaaaaaagtataatgctgggacaaataaagcagcatctagcagcacttcattgaacactaagaggctggatg

SEQ ID NO: 202847 - DNA, 253 bp, Glycine max
agcaatgaggtggcatgtgccagttggaggcttggcgtggaagcaaacaacgtagtcaagtggcaaactgttcctgcagcttgcggagagtacatagctgactacgttctaggagaccaatatagatcagattccaaaacagttaaccaacaagcttatttctatgctaaatccctcaaactcaccaacaaagatgtcttagtcttggacgttgacgacactactctctctaatctccagtattttgctaaca

SEQ ID NO: 202848 - DNA, 272 bp, Glycine max
agacatcaaagaatagatcaaaacttgatgaagagttggcagaacccagcaagatgggactaaagggtgaaggaatgtctgatcgtcacaattcaagttggtgctctaaagttgggtgtttcttctgtagtttccttgttagagaagattgccgcagtaatgaagatattagtctacagcaacaatctggagaagaggaggctttgttctgcactttgtgcaatgctgaggttcggaagttcagtaagcattgtcgaagttgtgacaaatgt

SEQ ID NO: 202849 - DNA, 270 bp, Glycine max
aaggcaagcgcttctcctctttgtgttctggctatgcttcttggcaagagttagatcggacgaggattgcgtgtacacggtgtacgttcggacgggttcgatcatcaagggaggcaccgattcagtaattggtctgaagctatacgacaagtccggctacggcatatacatcaccaacctcgaggcatggggcgggttaatggatccgggtcacaactactacgagcggggcaacctcgacatattcagtggtagaggcccttgcttgga

SEQ ID NO: 202850 - DNA, 268 bp, Glycine max
gcaaactaagaatgaaggaggagttggtggttgaagaagggtaccttttcaaagaagagactcacttcacagtgctcaaaacctctctcttcttcaacggtgatggcttcgctgtctacgattgcaaaggccaactcgttttccgcttcgactcctacggtccccgcgcgcgtgacaaggacgagctcgttctcatggatccccatggccgttctcttctcactctccgccgaaagaaaccgagtcttcatcaacgctgggaaggctt

SEQ ID NO: 202851 - DNA, 269 bp, Glycine max
ctggcttctcacagtccttccagaagacactactaacagatccaagggcagctaagttgcttgacagagagcttgggggtcaagaaagcaaggcagtgtctcctcctctcaagtcctcaaactatccatcaacggttgcatctagagcatccccacgaaagttcttcttttagttgcttagttcttttacccttcttggttgtagttaatcagctgtgaatgtgatcttgaagcttagttgagatatcattgtggtgacggtctcttct

SEQ ID NO: 202852 - DNA, 264 bp, Glycine max
cacttttcaacaaaggtatctcatcaacgataccttttggggtggtgccaagaacaatgctccagtctttgtctacactggcaatgaagggaacatagaatagttcacgcagaacacaggctttatgttcgaaaatgctccttgttttcaagcccttttggttttcatcgagcatagattttatggaaaatcaataccatttgggggaaacaagacggttgcatatgcaaatactagcacacttgggtatttgagctcaacaca

SEQ ID NO: 202853 - DNA, 266 bp, Glycine max
tcaaactccactcttagctgccattggtttttcttcttccatttctcttcctttctaagcttttttcgattacccatttggagattctgtcctaatggctcttgctccttccaaagtttcctccttttccgggttttctcccaaacccagtgttggggatgctctgaaaaacccaacttgctctgtttctctgagctttgcgaatgtgaaacttggaagcagaaaccttagggtttgtgcctcaactgtgcctctctcaggggtga

SEQ ID NO: 202854 - DNA, 268 bp, Glycine max
tcgactaaaaaatgaaatgaatcatttcatattgatagtattgctatgcttagtccccaaagaaccagatttcgtaaacaacatagaggaagaacgaaaggaatatcctatcgagggagtcatgtttgcttcggaagataagccttcaagcaacttggagccagcttggataacatctagacaaatagaagcgggacggcgggcaatgtcacgagatgttcgccgaggtggacaaatatgggtacgcatatgtccagacaaaccggtt

SEQ ID NO: 202855 - DNA, 258 bp, Glycine max
gcttccattgttttcaaggacaacaaggcctattcgaagaaactagttcatggtgctaccacgctgttcaagttttctagggagcagagaggcaggtacagtgcagggagttcggaagcttctatattttacaattctaccagttactgggatgagtatgtttggggaggcgcatggatgtactttgcaactggggattcatcgtaccttaagcttgctactgctcctggcctggccaagcatgctggtgccttctgg

SEQ ID NO: 202856 - DNA, 193 bp, Glycine max
ctgaaaggggagtccatcagatgcatcattcgaatgggggagtaaatctatatcagaccaatgatgacatgacatggtccctgttgggggactgagttctctttctggttgtgaaaagaagaaaataaatttcatatatgatatatatccctttaggattattgaatttgtgaaaacttgtgagtttgagtgt

SEQ ID NO: 202857 - DNA, 179 bp, Glycine max
caaacttaatcgatcatcacttcacttcactaatacatcatggcagacgatacccagaacaagtatgagagctctgaggttgaggtccaggatcgtggtgtatttgactttctcggtaagaaaaaggatgaagaagacaagcctcatcctcatgaggaggtcatcgccaccgagtttca

SEQ ID NO: 202858 - DNA, 266 bp, Glycine max
gtggaatcactccctacagaaccgcttgatgctaatgatttaaaaccattgaatagtcgttatgatgcacagatttcagtttttggacaaaagttacagaagaagttagaggacgctgaagtttttgttgttggatctggtgcattgggatgtgaatttttgaaaaaccttgccctaatgggagtttcttgtggtcagggaaagctcacaattactgatgatgatgtcatagaaaagagtaacctaagtaggcagttcctcttccg

SEQ ID NO: 202859 - DNA, 261 bp, Glycine max
atgacatgggagtccatcagatgcatgattcgaatgggggagtaaatctatatcagaccagtgatgacatgacatggtccctgttgggggactgagttctgtttctggttgtgaaaagaagaaaatacatttgatatatgatatatatccctttaggattattgaatttgtgaaaacttgtgagtttgagtgtagagaatgatagggcctttgctgctgttattgtctaatgcatgataaataggatgtcgtttttatgtc

SEQ ID NO: 202860 - DNA, 204 bp, Glycine max
aagagaatggcagcacttggtgggaatcgtgatgtgacaggaagccagaacagcgttgagatcgatgctctagctcgctttgctgttgaagaacacaacaaaaaacagaatgcccttttggagtttgaaaaggtggtaactgcgaaacagcaagtggtttctggtaccttgtacaccatcactttggaggcaaaagatggtggg

SEQ ID NO: 202861 - DNA, 170 bp, Glycine max
tgggtacggtggctcccagagttgaaagcttggcgagcagtgggataaagtgtatcccgaaggaatacgtgaggcctgaaaaagagttgaagagcatagggaacgtgttcgaggaggaaaagaaggaagggccagaggttcccacaattgacttgagagagatagattcg

SEQ ID NO: 202862 - DNA, 178 bp, Glycine max
catagctttcttcatcacttcatagtaagcactatagaaaaaacgacattcattcatctatggctacccttattgctcccagcaaccactctccccaagaagacgctgaggctctcagaaaggcttttgaaggatgggggactgatgagaaaactgtcatagtaatgttgggtcatag

SEQ ID NO: 202863 - DNA, 117 bp, Glycine max
tataccttcgtggcgtcttccccgggcgtcgaacagtcaactcagaactggtacggacaaggggaatccgactgtttaattagaacaaagcattggcgatggtccctgcggatgttg

SEQ ID NO: 202864 - DNA, 245 bp, Glycine max
attcactgtgtcggaaaaagaagaagagaaaaaagatgagcgacggaggaaaacgacaaggtggaagagcgttgccgcagccgcaaagaggccgtccggctcgtccccactctcgccctcgcctcgaacccgtcgatcgcgaaaagacatgtgcggtagtgctgcgagtgttcactgaagatttggagtcacgattccatggaagacttttccgtcagaagcaaagagatcacagactgaggttc

SEQ ID NO: 202865 - DNA, 268 bp, Glycine max
gtgaagctcaggctcaggattggagaggcagaccctccaaccctgccaaacacggtggaatgattcccgctgcttttgttcttgggttgcaagcttttgagataatggcaatagacgcagtggggaacaatctgataacctacgtgacgagtgagatgcacttgcctttgtccaaggctgccaacctagtcactgactttgttgggaccatctttctcatcgccctcctcggcggctatctttccgactcttagctcggcagcttctg

SEQ ID NO: 202866 - DNA, 259 bp, Glycine max
cttcgctccgcaccagtttcaccgcacgaatatcttgttgtttggagcgatccgagaaaaactctgtaaacatgttggtttaccaggacctccttacaggtgatgagcttctgtcagactccttccgttacaaggaaattgagaatggaatgctgtgggaagttgaggggaagtgggttgttaaatgagcagttgatgtagacattggtgcaaaccctctgctgagggtggaggagaagatgagggagctgatgatgca

SEQ ID NO: 202867 - DNA, 266 bp, Glycine max
tgcgtcgctccgcaccagtttcaccgcacgaatatcttgttgtttggagcgatccgagaaaaactctgtaaacatgttggtttaccaggacctccttacaggtgatgagcttctctctgactccttccgttacaaggaaattgagaatggaatgctgtgggaagttgaggggaagtgggttgttaaaggagcagttgatgtagacattggtgcaaacccttctgctgagggtggaggagaagatgagggagttgatgatgcagctg

SEQ ID NO: 202868 - DNA, 184 bp, Glycine max
tatttttcaatggcttctgcagatgttgagttccgttgctttgttggtgggcttgcttgggtcaccggcaacgatgccctacgagaaagccttttcagtctacggcgacatcgttgaatcgaaggttatcaacgaccgtgagactggaaggtccagaggattcggatttgtgaccttcgcctca

SEQ ID NO: 202869 - DNA, 142 bp, Glycine max
ctcaactgttcgtctctcaggggtgattttcgaacccttcgatgaggttaagaagggtgaacttggtgttccaacggctccccaagtctcgattgctcgtcagaactacgctgatgagtgtgaatctgccattaatgagcag

SEQ ID NO: 202870 - DNA, 218 bp, Glycine max
caacatttacattactctctcactttctccaatatggcttcttctcgaaatgagttttatgcacttatgctagtggtggtggttggctccatagtggcttcctgtggtgctaacttcaaccaagactttgatctaacttggggtgatcagcgtgctaagatattcaatggtggtcagcttctatctctttccctggacaaagtctctggctctggttc

SEQ ID NO: 202871 - DNA, 176 bp, Glycine max
ggtttttggttagttatcagcactggactttttaccccgtgatgtgtttcgctaggattaacttgtttgcacagtcttttttcttgttattgtctaagaggaaggtggagaacagatggagtgagcttttggggctgcttgcgttctgggtttggtacccttgttggtttccttct

SEQ ID NO: 202872 - DNA, 251 bp, Glycine max
cggctcgaggaggagagggggggagaaggggttgcagagagagagagagagagatgtcatcatcttcagacctggacaggcaaatagagcagttgaagaggtgtgagcctcttaaggagtctgaagtgaaggcgctttgcctcaaagccatggaaatccttgtcgaagagagcaacgttcaaagggtcgacgcccctgtcaccatatgtggtgatattcacggtcagttttatgacatgaaggagcttttc

SEQ ID NO: 202873 - DNA, 239 bp, Glycine max
ctccttgctcatcctatcagcaatgccagggaacattgttgagccaccactcaacacaatgttaccatagaggtccttcctgatgtcaacatcacacttcatgatggagttgtatgtggtctcatggatgccaggagactccatcccaatcatggatggctggaagagcacttcagggcaacggaaccgttccgcgccaatcgtgatcacctgtccatcaggtagctccgtagctcttc

SEQ ID NO: 202874 - DNA, 239 bp, Glycine max
gcgcagagaatggctcccaagggtttaatctttttggctgtgttatgcttctcagcactgtcactgagtcgttgtcttgcggaggataatggacttgttatgaacttctacaaggaatcatgccctcaggctgaagacatcatcaaagaacaagtcaagcttctctacaagcgccacaagaacactgctttctcctggctcagaaacatcttccatgactgtgctgttcaaattgtgat

SEQ ID NO: 202875 - DNA, 215 bp, Glycine max
cgaacttaatgtgtctgatctgcatggtcggatccagatgcagcaacatgtacatgaccccggatatttgttgcaacagcaatttgaacagcaccagcagctgcaatcacaacagcaacagcaatttgaacagcaccagcagctgcaatcacaaccgcaacatcaatttgaacagcaccaacaccaacaccaacagacactgcggaaacagcagc

SEQ ID NO: 202876 - DNA, 245 bp, Glycine max
gtttgttcagattggttggatctatggttcagttactgaggatatcttaacggggttcaagatgcaatgccgtggatggaggtcagtttactgcatgcccctaaggcctgcattcaaaggatcagcaccaatcaatctttctgatcgattgcaccaagttcttcgttgggcccttggatcagttgaaattttctttagcagacattgccccctctggtatggttttgcagggggtcgcctcaaat

SEQ ID NO: 202877 - DNA, 223 bp, Glycine max
catctctgataactggggtttcaatttctggttttcttgcattgtgtggtttcttatttggcatctacatgtacaggaggtacaagaatgctgatgtcatagaagcttgggagcttgagattgggccacataggtactcctatcaagagctcaagaaagcaacaaaagggttcaaggacaaagagctgcttggacaaggtgggtttggtagtgtttacaaagg

SEQ ID NO: 202878 - DNA, 254 bp, Glycine max
gttgtgtttggcagcgcggaggggcaagctagggagtaagagatggatttggaccagtggatctccaaggtgaaggatggccagcaccttctcgaagaggagcttcaacttctttgcgaatatgttaaagagatccttattgaggagtcaaatgtgcagcctgtcaacagtccagtgacggtttgtggtgatattcatggtcagtttcatgatccaatgaaatttttcggaattgggggactgtgcggaaaaat

SEQ ID NO: 202879 - DNA, 197 bp, Glycine max
tgctccatcacctaatcacttccccacttcccctgtaaatcacgtttagttcgcacaaggttttaaaaaatggctgatgctgaggacattcaacctcttgttgttgataatggaactggaatggtcaaggcgggttttgcaggtgatgacgctcctagggccgtgttccccagtattattgggcgaccacgccatac

SEQ ID NO: 202880 - DNA, 199 bp, Glycine max
gtggtgttagatctgtacccgcctagccattgatttggaaaagtccaagcttcaaagatgagtaagcttcagagtgatgctcttagagaagctatctcaggaatcatgactgattccaaggaaaagaacaggaaatttgtggagaccattgaactccaaattgggctgaaaaactatgatccccagaaggacaagcgtt

SEQ ID NO: 202881 - DNA, 259 bp, Glycine max
gttggctgatctgtacaacaaaattggcaagttcaaggagtctaagtcttactgtgaaaatgcactcagaattttcgggaagatcaagccaggggtcccctcagaagagattgctagtggcttgatagatgttgctgcaatctatcaatccatgaatgatttggagaaaggattgaagttgctcaaatacgccttgaagatatatggcaatgctcctggtcagcaaagcactgttgcagaaattgggcccaatgggggt

SEQ ID NO: 202882 - DNA, 176 bp, Glycine max
ctcaacgcacgcaggaggaggagattgatcgagagaagagaagatcggctacacgcttcaagaagaacaggaagaagagaggccacgtgagtgccggccatggccgcatcgggaagcaccggaagcaccctggaggacgcggtaatgccggaggcatgcaccaccaccggatcctc

SEQ ID NO: 202883 - DNA, 200 bp, Glycine max
gctatgttgacctttgaagcactatcagaaacagctgagtttgcaaagaagtgggtgcctttttgcaaaaagcacaatattgaaccaagagccccagagttttattttgcccagaagattgattacttgaaggacaagattcagccctcatttgtaaaagagcgacgagcaatgaagagggaatatgaagaattcaaagt

SEQ ID NO: 202884 - DNA, 86 bp, Glycine max
gtttgaagaacaacatggtggtgctaaaggtgtgtctgttgcatctgagccttgtgggggttacagctgcacgcatggaactgagc

SEQ ID NO: 202885 - DNA, 138 bp, Glycine max
gtgacctcatataggtatgagggtgatgagatcaatgtaaaattttcacaaactgaagctaatgttcttcatgaatctgtcaaggagaacagaggcaacagtgaagaagtcatcaggatccgtgctacaggaggcaag

SEQ ID NO: 202886 - DNA, 146 bp, Glycine max
tctcgagccgattcggctcgagaaggattctacccgccgctcgatgggaattgcgcttcaaggcgtctcgtagggctaatccgcctcacgagggtcaccaacggcaactgcctttggggggccgagggcccctactgctggtcggc

SEQ ID NO: 202887 - DNA, 271 bp, Glycine max
gtgcagcaacgcagtgttgtgagtgagttgggttttttctttggttttcctgagctgtgttttattctctttatctctctctctgccctctcatcttcgagctccgatggcgagcctgtggcgcgcggcgaccggcatgacggaaaacgccaccgattacgacggcgtcgagttctggtccaaccccgagcgcaccggctggctcaccaagcagggcgagtacatcaagacctggcgccgcggctggtcgtcctcaagcaaggcaagctct

SEQ ID NO: 202888 - DNA, 202 bp, Glycine max
attgtttgttgttgtaactcgttcttcttcttttgttgttctgtgtttgtgtttgtattttctctcacctgaaaatgtcttgctgcggtggtaactgtggttgcggaagctcctgcaagtgcggcaacggctgcggaggcttgcaaatgtacccagacttgagctacactgagtcaacaacaccgagaccttggtcagggga

SEQ ID NO: 202889 - DNA, 220 bp, Glycine max
cacaactccactcttagctgccattggtttttcttcttccatttctcttcctttctaagcttttttcgattacccatttggagattctgtcctaatggctcttgctccttccaaagtttcctccttttccgggttttctcccaaacccagtgttggggatgctctgaaaaacccaacttgctctgtttctctgagttttgcaaatgtgaaatttggaagc

SEQ ID NO: 202890 - DNA, 118 bp, Glycine max
  unsure (1)..(118): unsure at all n locations
tggtgaacaacgacgaccgagactcttacaaccttcaatctggcgatgccctaagagtccctgcaggatncacatactatgtggttaaccctgacaacgacgagaatctcagaatgat

SEQ ID NO: 202891 - DNA, 271 bp, Glycine max
cctaaattactgtgtttttcctccctattcaagtttgagagcgaagttatatagatttgcttattcactagagagaaagatggaaagtagtgaatatcatactctacacattttcttcttccccttctttgctcatggtcatgtgataccaacccttgacatggccagattatttgcttgaaagggtgtgaaggccactatagtcaccacacccctcaatgcacttttcatctccaaagccattggaaaatccaaaactaagcacaacaga

SEQ ID NO: 202892 - DNA, 262 bp, Glycine max
gttgaggtgcctaagaagaagaacaatatcatgttcttgggtgatgggaggaccaacactatcatcactgctagcagaaatgttgttgatggtagcaccaccttccactctgccaccgtcgctgtggtgggttcaaatttcttggcccgggacttaacattccaaaacacagcgggcccatcaaagcaccaagctgtggccctaagggttggtggggacctctcagcattcttcaattgtgacatcctagcattccaagaca

SEQ ID NO: 202893 - DNA, 260 bp, Glycine max
ggtgagcagcggcgatgttattgcgattgataaggcgtccgggaagattacgaagctcggacgatcgttttcgcggtcgagggactttgacgctatggggccgaggtgaagttcgtgcagtgtcccgatggggagttgcagaagaggaaggaggtcgtgcattgcgttacgcttcatgagattgatgttattaatagcagaacacagggatttctggctcttttcacaggggatacgggtgaaattcgtgctgaggtcag

SEQ ID NO: 202894 - DNA, 263 bp, Glycine max
cttttcttctgcagagcaaagaaccaaccaacacttgtttcttcagccatggccagtcaacctgaatcatctgacgcaaagggcacaaaaagggattttagcaccgccatattagagcgtaagaaggctccgaatcggctcgtggttgatgaagctgtcaacgacgacaactctgttgtcgcgcttcatcctgataccatggagaaacttcaactttttcgtggtgacaccatcttgatcaaggggacaaaaagaaaggatac

SEQ ID NO: 202895 - DNA, 264 bp, Glycine max
gaaaccctagcaagcggaacaatggcagacgttgaggtcgatgtggcggctgcagcagcagcagggcagccgaagaagagaacgttcaagaagttcagtttcaggggcgtggatctcgatgcgcttctggacatgtccaccgatgaactcgtgaagatgttcagtgctcgcgcacgtagaaggttccagagaggcctcaccagaaagcccatggccttgatcaagaagcttcgcaaagcgaaaagagaagctccaccaggtgag

SEQ ID NO: 202896 - DNA, 263 bp, Glycine max
atctcgagcgattcggctcgagcggctcgagttcacatttcacagttagcacttagcagactctgctgcagtgaggtgagaggaggtttatttgttgtttcgtttttcctttcctttccgccagaatccgttgagaatggcgttgccggtagtcgtcgatgcagagtacctcaaggaggtcgacaaggctcgccgcgatctccgcgcactcatcgctaacaggaactgcgctcctctcatgctccgattagcctggcacgatg

SEQ ID NO: 202897 - DNA, 261 bp, Glycine max
gaatgacctaatggagtctaaaggtgggaaaaagaagtctagtagtagtagtagtaaatcaattttttacgaagctcccctcggatacagcattgaagacgttagaccaaacggtggaatcaagaaattcagatctgctgcttactctaactgttctcgcaaaccatcctgatacacatccggattgatagttcgttgcatgcaaccatagttttattaggattttttcttctttgttttcaattaggtttttttgttgct

SEQ ID NO: 202898 - DNA, 273 bp, Glycine max
caaagtgtcccacgttgttgctttgcaagttgcgagtctctcttcctacgacaaccgtttcctctcgccggaaaaccgacattgatctctctctccgccgatccgtccgccatgagttccggcgagctcctccacatacaaccccaggagctgcagtttccctttgaattgaggaagcagatctcatgctctttgcagttgtctaacaagactgacaactatgtggctttcaaggttaagacaacaaatcctaagaaatattgtgttagacct

SEQ ID NO: 202899 - DNA, 272 bp, Glycine max
  unsure (1)..(272): unsure at all n locations
nttgggagacaggcaagatgcattcagcgtttattttgaatgggataatgattttggaattccaggagcattttacattaaaaattttatgcaatctgaatttttcctcgtgagtgtcactcttgaagacattccaaatcatggaaccattcactttgtttgcaactcatgggtttacaatgcaaaaagttacaaaagggatcgcattttctttgctaataagacatatcttccatatgaaactccaactccactagtgaagtacagataag

SEQ ID NO: 202900 - DNA, 267 bp, Glycine max
cgccgctaacggcgaggagctagtggcggatgctcatttattaccggccaccgcagttgggcagaaagccggtgacgctattaagaagtatttggtttccgatgcgaaaccgacggtgaagattttttttgagggaaccaaggtggggattcagccatcgccggtggttgctgcgtttagctcaagaggtcccaactcgatcacgccacagatcctgaagccagatctcatcgcgccaggtgtcaacatcctagcggggtggtctaa

SEQ ID NO: 202901 - DNA, 262 bp, Glycine max
  unsure (1)..(262): unsure at all n locations
gccaaaacaagcttctgaggagcctaagaagaaaaagaaagtgaagctgccacttccattagttccagctgataacaatcaaaatgcctcacaacctgttaggaaatgcatgcattgtgagataaccaagacaccacagtggagggcagggccaatgggaccaaaaacactatgcaanccttgtggtgttcgttacaagtccggccggctcttccccgagtaccggcctgctgcagtccaatttttgcccatctgtgcatcc

SEQ ID NO: 202902 - DNA, 262 bp, Glycine max
gtaagctcccaagcagtgggaggaggctcgggactctgaccgcgtgcctgttgaagaatgagccggcgactcataggcagtggcttggttaagggaaaccaccggagccgtagcgaaagcgagtcttcacagggcaattgtcactgcttatggacccgaacctgggtgatctatccatgaccaggatgaagcttgggtgaaactaagtggaggtccgaaccgactgatgttgaagaatcagcggatgagttgtggttagggg

SEQ ID NO: 202903 - DNA, 263 bp, Glycine max
gtggcatgttatttgggtaaagaatggaaataatggctatgatgatattcgtgctgccattaaggaagcaaaagctgtcaaagacaaacccacattaatcaaggtcacaacaaccattggttatggttctcctaacaaggctaactcctacagtgtgcatggaagtgcactgggtgccaaagaagttgatgccacaaggcagaaccttggatggtcacatgagccattccacgtgcctgaggatgtcaaaaagcattggagtc

SEQ ID NO: 202904 - DNA, 263 bp, Glycine max
cttcttccttttcatcaggtttattccttttcttttggttcaattttgctgaatggagagtgcaagaatcagcaaatggttaaatcttctagtttgtgtactgctattgcttaaggcagaaggatctcttgttccattgactttggtgaagaatgcagaatcaaaaggagctgtttgtttggatggaagccccccagcataccactttgacaacggatttgaagaagggattaagaactggattgttcacattgagggaggag

SEQ ID NO: 202905 - DNA, 240 bp, Glycine max
aatccttccttcttccttctaattcttttcctttctcttctcacttctcacacaccacatatattaaataattgttcctttcccctcaaaatcaaaatcaatggaaggatcaggatccggtgtggttacagggtacggcaacggtgcaatcaccgagaccaagaagtcccccttctccgtaaaagtgggcctggcccagatgctccgcggcggcgtcatcatggacgtcgtcaacgcgga

SEQ ID NO: 202906 - DNA, 271 bp, Glycine max
cccagatgattccagtcgtcagggcaatgctagtgagccccttgttgcttctctgtatgttcctaggaatgataagatggtgaagattgatgggaacttgattatccattccattatggccagtgagaaagccatggcatctcaaactgctgaggcaaagaaggacaagagggaaactgggttggccattcctaaggatttggattctgcattggctattcctggagttggaagaagcagagatcaacatccacatgtgtatagggtttct

SEQ ID NO: 202907 - DNA, 278 bp, Glycine max
caacacaattatgagaataatccctatgcaaaggagtttggcatcagcatagacagcaagcttgcatcagttgaggctcgggttcttccggctccatggttgaaatatcatgacactggaagagagaaagaatactgtgccacaagttggtcagtggaatatgatgaacaagaaagttataaatggaagtactgtaagatattgggcatgtatctacttctcacgaagtgtacaggaaagtgcagctcgtggattttgccaacagttagttcagatgt

SEQ ID NO: 202908 - DNA, 208 bp, Glycine max
ggcttccttaagctccttagtgctgctccttgcagctctaattctatcccctcaagttcttgcaaactatgagaatcccccagtgtacaagcctcccactgagaaaccaccagtttacaagcccccagttgagaagcctcctgtttacaaacctccagttgaaaagccaccagtctataagcctccagttgagaagccaccagtgtac

SEQ ID NO: 202909 - DNA, 232 bp, Glycine max
ctcatatcctcaatcaccccccctcgcactcgctcttcccttcctctggtggcgacaatgtcgactcctgctaggaagaggctgatgatagacttcaagatgctgcaacatgatccgcctgcagggatcagtggtgccccccaggataacaacataatgctctggaatgctgtcatatttggtcctgatgatactccatgggatggaggcacgttcaagttgacactccaat

SEQ ID NO: 202910 - DNA, 261 bp, Glycine max
gagaaataaggggaaaaaatggtgtcgctgaaactgcagaagcggctggccgcaagcgtgctcaagtgtggcagaggaaaggtgtggcttgaccccaatgaagtcaacgaaatctccatggccaattctcggcaaaacatcaggaagttggttaaggatgggtttatcatcaggaagccaaccaagattcactcacgctcgcgtgctcgtaggatgaaggaggcaaagaagaagggccggcactctggttatggtaagaga

SEQ ID NO: 202911 - DNA, 257 bp, Glycine max
cagtgactacgtttcgttcctctccttcgtttcgtcttcgatcttcggtttcattctgcgtttgttcacatcatggccaccgcttcagtggcatttaagtccagggaggaccaccgcaagcagattgagttggaggaggcgcgtaaagcagggcttgcgccggctgaactcgatgaagatggaaaggaaatcaatcctcacattccccagtatatgtcttctgcaccttggtatcttaatgctgagagacctagttt

SEQ ID NO: 202912 - DNA, 259 bp, Glycine max
ggctttttgagaagttaaaagcctctgaatctcctgtaacccccaaatataatgaagagggtgaagacacaggagaaggactccgcatgggaaaacgactgctccgatcactagccttggtttttggatgtgtagctatttcatctttggcatacactttcattttgaacataattgagtttgcaggtggttttattcctactcttttgtacaacagtcaggagttgataatcaccacttcatcggcactcatgcttta

SEQ ID NO: 202913 - DNA, 264 bp, Glycine max
caaaagaggtgctgttagcaatattgcacctttggcaattggactcattgttggggcaaacatccttgttggtggaccatttgatggagcatgcatgaaccctgctctggcttttgggccttccttagtgggctggagatggcaccagcactggatcttctgggtgggtccactgaacagggcagcactagcagcactggtctatgaatatgttgtgatcccaactgaaccccctcatcaacaccaacctttggctcctgaaga

SEQ ID NO: 202914 - DNA, 272 bp, Glycine max
tgacaattgagaattgttcctctcttctcttccattcgtgtacgcgcaaaagaatcatgacgagttcctctgctgccgctcgcaagaatctgagtaagattgcctgcaataggctccagaaagagctcgtggagtggcaggtcaatccccccactggtttcaagcacaaagtcacagacaatctccagaggtgggtggttgaagtcactggagctcctgggacactttacgctaatgaggactaccagcttcaggttgattttcctgagaat

SEQ ID NO: 202915 - DNA, 263 bp, Glycine max
cggctcgagtacactcctcctcttctcacggccagggttttagggcagcttctttctttgagattaagtttcagtagtaatgggtaaggaaaaggttcacattaacatcgtggtcattggccatgtcgactctgggaagtcaaccaccaccggtcaccttatctacaagctcgaaggtcttgactagcgtgtcttcgagagattcgagaaggaagctgctgccctacaataagaagtctttcaagtatgcctgggtgcttgac

SEQ ID NO: 202916 - DNA, 263 bp, Glycine max
caccactgttcatcacgtgagccaccaggttaacaccggtggtctctcgaccaaacccactgtcagggttttcaccaaagctaatcccaatttctctctcaccattcgtcgcggccaagtcattctcgctccctccgatcccaccaatgagtaccagcattggtataaggatgagaagtacagcacgagggtgaaggatgaagaggggtgccctgctttctctttgatcaacaaggccactggtgaggccttgaagcactcca

SEQ ID NO: 202917 - DNA, 261 bp, Glycine max
ggagtgaagcagcagagggaggagcggcattaaaaatgcagatcttcgtgaaaaccctaacggggaagaccataaccctcgaggtcgaaagcagcgacaccattgacaatgtcaaggctaagattcaagacaaggaaggcatccctccggatcagcagcgtttgattttcgccggaaagcaacttgaagatggaaggaccttggccgattacaacatccagaaggaatcaacccttcaccttgtcctcaggcttcgtggtg

SEQ ID NO: 202918 - DNA, 259 bp, Glycine max
cttttctatcaacataggtgcccttgtttccagcacttttattgtttggattcaagaaaatgctggctggggtcttggatttggcattcctgctttatttatggcattagctattggaagtttctttttaggcactcccctttacaggtttcaaaaacctgggggaagccctattacgagaatgtgccaggttgtggtagcatctgtctggaagcgaaatctggttgtccctgaggacagtaatctcctatatgagaca

SEQ ID NO: 202919 - DNA, 256 bp, Glycine max
caaggatttcgattggcgagacaaaggagccgtcactaacgtcaaggaccaaggggcgtgtggttcgtgttggtctttcagtacgacgggagcgttggaaggagctcattatctggccactggtgagctcgtgagccttagcgagcaacagtttgtggattgcgatcacgtgtgtgatccagaagaatatggagcgtgtgactcaggctgtaatggtgggttgatgaacaacgcatttgagtacatacttcagtct

SEQ ID NO: 202920 - DNA, 260 bp, Glycine max
ctcgagccgctcgagccgcgctcgccttgcttcgccacacaacagcaactgcagcaatggcacccaaacgacgtggaaaggctccggctcttgccgctaagaagaagcctgagaaggtttcgaatccgttgttcgagaagcgtccaaagcagttcggaatcggaggggcgttgcctccgaagagagacttgactcggttcgtgaagtggccaaagaatgttcaaattcagaggaagaagaggattctgaagcagaggttg

SEQ ID NO: 202921 - DNA, 262 bp, Glycine max
cagcgttccagaagatcaaggtcgccaaccccatcgtcgagatggacggagatgaaatgactagggttatctggaagtcaatcaaggacaagctcattttgcccttcttggagttggacatcaagtattatgacttaggccttccttaccgtgatgagaccgatgataaagttacaaataaaagtgcggaagcaactctcaagtataatgtggcaattaagtgcgcaactattactccagatgaagctcgtgtgaaggagtt

SEQ ID NO: 202922 - DNA, 262 bp, Glycine max
ggcatttccgtccgtaacctctgtaactgtggagaacgtgacattccctcccaccgtgaagcctccctgctcccccaacaccttcttcctcgccggcgccggcgtcaggggcctccaaattcatcacgctttcgttaaattcactgctctctgcatttacctccaatacgacgccctttccttcctctccgttaagtggaaaaccaagtctgctcaccagttaacggaatccgaccaattcttctcagatatcgttacaggt

SEQ ID NO: 202923 - DNA, 269 bp, Glycine max
aacaaaaacaaagaaaaaaaaaaacccttagccaacacaaccatcatggccacctctgctattcagcaatcagcattcactggtcaaactgctctgaagcagctcaatgagttcgtccgcaagaccggtggcgccggcaaaggtcgcactaacatgcgccgcaccgtcaagagtgctcctcagagcatttggtatggccctgaccgtcccaagtacttgggtccattctcggagcagattccatcatacctgaccggagaattccctgg

SEQ ID NO: 202924 - DNA, 274 bp, Glycine max
tctcgagccgaatcggctcgaggagagagtgagagagtgagtgagatagagagagacgcttcgcaaatctcaatcgaatctcagaaaaatgagagaaatcatcagcattcacataggtcaggccgggatccaggtcggaaactcctgctgggaactctactgcctcgaacatggcatccagcccgacggcatgatgccttctgactccaccttcggtgtagcccacgacgccttcaacaccttcttcagcgataccggatctggcaagcacgtc

SEQ ID NO: 202925 - DNA, 253 bp, Glycine max
  unsure (1)..(253): unsure at all n locations
agagtcttccacgttattctctctccgagcttcactctcttttcgcctctgctaaagggagaaaaatggggttctcctcctttctgggtcgtgttctctttgcctccctcttcatcctctccgcatggcagatgtttaatgaatttgatgccaatggtggacccatctcgaaagagttgattcccanactcagtgtggtgaagaataatttatcctctaaattgggggtagcgctaccagatattgatgcccg

SEQ ID NO: 202926 - DNA, 256 bp, Glycine max
gcggaagctctagcttgggtagcgaatcacaatggcgagaggattaaagaagcatctgaagaggcttaatgccccaaagcattggatgcttgacaaactgggtggtgcatttgctcctaagccctcatctggaccacacaaatcgagggaatgcctgccactcatactcattttgcgaaaccggctgaagtatgctctaacataccgtgaagtcattgctattctgatgcagcgacatgtccttgttgatggcaaa

SEQ ID NO: 202927 - DNA, 214 bp, Glycine max
cacgtattgactcctgtcgctgagccttacaacagtgtattgtccactgatgctcctcttgagcacactaatgtggctgtcatgctcgacgatgaagcgttgatagacatgctgatgcgttcagtggacattgagaggccaagctataccagccttaatcgaatagttccttcggtgatatcatcactgaatgcgtccctgacgtttgatggag

SEQ ID NO: 202928 - DNA, 256 bp, Glycine max
ctcgagccgaatcggctcgaggtgatttcagtgagtgatcggtgttcacttgatctcatcataatcgtcagcgtcaattgaagaagatgccgatcagaaacatcgccgtcggaaggcctgaagaggcgactcaccccgacacgttgaaggcggctttggctgagttcatctcaaccttcatcttcgtgttcgccggctcaggctccggcatcgcctacaacaagctcaccgacaacggcgctgccacccctgccgg

SEQ ID NO: 202929 - DNA, 253 bp, Glycine max
ttttcagcgatggagaaagggattttggtttcatgctccgctgggaactcgggtccgggtccctacagtctctccaatgtggctccatggatcactaccgtaggcgctggtacactggatcgtgacttccccgcatacgtggcgctcggaaatggactcaacttctccggcgtttcgctttaccgcggtaacgctttgccggattcttctttgcctttggtttatgcagggaatgtgagtaatggtgctatga

SEQ ID NO: 202930 - DNA, 250 bp, Glycine max
aacacagtcatgtactacagcccgacaattgtccaaatggcagggttccatgctaatgaattggctcttcttctatcccttatagttgccggcatgaatgcagccggaacaattcttggcatttaccttatcgaccatgctggacgaaaaaaattagctctttctagtctgggaggagtaattgtatctttggtcatcttggcctttgcattttataagcaatcatccacgtcaaatgagttgtatggat

SEQ ID NO: 202931 - DNA, 256 bp, Glycine max
gcgaagagaatggctcccaagggtttaatctttttggctgtgttatgcttctcagcactgtcactgagtcgttgtcttgcggaggataatggacttgttatgaacttctacaaggaatcatgccctcaggctgaagacatcatcaaagaacaagtcaagcttctctacaagcgcacaaagaacactgctttctcctggctcagaaacatcttccatgactgtgctgttcagagttgtgatgcttcactgttgctgg

SEQ ID NO: 202932 - DNA, 263 bp, Glycine max
ctcgagccgctcgagccgttcggatctagagtcttcagtttctcctcgttgttcttcgcttacctgttttcaatttcgattctttcgttaatttaataagatgtttgggagggcaccgaagaagagcgataatacgaggtactaggaaatcctcggcgtctccaagaacgcttcgcaggatgatctgaagaaggcttacaagaaagccgccattaagaatcaccccgacaagggcggtgatcccgagaagtttaaagagctgg

SEQ ID NO: 202933 - DNA, 266 bp, Glycine max
caagcatgctgttgagttagagaagagatcaattcagctttcattagaggaagctaaagaattacagcgtgttgctgttttaaatgtcttgggtaaatcagtgaagaacttcaaagcaccagcagatcatgacgaatgttcagacaagttgaaggcattatcatgatcttccccatttgggctgctgtaaatttcctcagacagtgaaaacattctgattgtttattgtgcttagtgtttatgctgattgttttataatctcttgt

SEQ ID NO: 202934 - DNA, 260 bp, Glycine max
ctcgagccgcttgaaagggttaggtttcgggagagaaagcaatctactcagagagctagaagaattcaacgatgcctcgctatgatgatacatacggcaatacccgcctctatgtggggcacttatcttcgaggactcgttcccgggatctggagcgtgccttcagcagatatggaagagttcgaggtgtggatatgaagaatgatttcgcctttgttgatattagtgatcctcgagatgctgatgatgcaagatataac

SEQ ID NO: 202935 - DNA, 255 bp, Glycine max
ggggtcagagtgagaaagagaaagagagaattcgtaaaccctaatttcggaaagatcggcgatgactgcctccaaggatcgcgagaacttcgtctacatcgccaaactcgccgagcaggccgagcgttacgaagagatggtggaatcaatgaagaacgttgcgaatctcgacgttgaactgacggtggaggagcggaatttgctttctgttgggtacaagaatgtgattggtgctcgcagagcgtcctggaggat

SEQ ID NO: 202936 - DNA, 255 bp, Glycine max
ttcaacactcatcagatcccagtcatcaattgcgttaacaactcgtaaggcaaccatgaggggcattctttctgtaaggacagccttggttcaacatcgtagtgagaaattgggccttggtttcaggctatttagcactcagggtgcttccactgctagtaccccacagccgccggcaccacctccaccaccagagaaaacccattttggtggccttaaggatgaggacaggatatttactaacttatatgggct

SEQ ID NO: 202937 - DNA, 259 bp, Glycine max
ggagtttcagttaacgtacctagttgttggtctttatatttagttattgacatcaacaaagtcatggaggaagttaatgtggttcaaaccaagaatggaactgtttcagtagcttctgcgtttgctggccataaggaagctatacagcaaagggaccacaaatttttaagaattatagttgaagaagcgtataaaggggtagactgtgaagatgggggtccctttggtgctattatagtttgtaatgatgaaattgttg

SEQ ID NO: 202938 - DNA, 263 bp, Glycine max
tgcggaataacgaagcctcctcgttcttcttcttccgccctttctctctctagaaccgtacggtcgtttctttctctctcctcaaccggagacagcgtcgccttcttttctgaatctcgcggtgttgttagttctgcggcggttgtagttccggcggcgatgggacagcaatcgttgatctacagcttcgtcgctcgcggcaccgtgatcctagcggagtacaccgagttcaccggaaacttcaccagcgtggcggcgcagtg

SEQ ID NO: 202939 - DNA, 269 bp, Glycine max
cggctcgagtgacaatgtgaagctgagggctggcaataacaagctttctttacttagcgttgcagttggtctcccgaatgttggtgtgcactttgaaacatggaatgcgggggtgttaggcccagtcactctgaagggtctaaatgaggggactcgagacttgtcccggcagaaatggtcttacaaggttggactgaaaggtgaatccttgagccttcacaccgaaagtgggagtagctctgtggaatggatacaaggatcattagtgg

SEQ ID NO: 202940 - DNA, 189 bp, Glycine max
ctcacacactcattcggtgctccgaatctcagattctagggttagggttcccaatttctccaccgatcagaaaatgagttcaactggtggttctaccaagggcggaaggggcaagcccaaagcctccaaatccgtttcaagatcgcagaaagctggtctccaattccccgttggaagaatcgctcgatt

SEQ ID NO: 202941 - DNA, 241 bp, Glycine max
caacaattctcaaagtggagaagctcccaaagaaaatttcattcacgtgagagctagaagaggtcaggccacaaatagccacagccttgcagaaagagtgagaagagacaagattagtgagcgaatgaggttgcttcaagaacttgttccaggatgcaacaagataactggcaaagctgtaatgcttgatggtcgaataaactacgtgcaatcacttcagcaacaggttgagtttttgtcc

SEQ ID NO: 202942 - DNA, 266 bp, Glycine max
ccgtaatattaataatcgtcacacacaagagagagaacagaactactactgtttctctttttgcctttgtttctctgcccctttgtgcagcgtctcacacaccaatggaagaaccaagtggttgcaacaagagcgctccaaaaggaaaaaaggatgacctttaccatgtacttcacaaggtccctaatggagatagcccttatgtcagagctaagcatgcccagctggtagaaaaggacccggaagctgcaattgtattattttgg

SEQ ID NO: 202943 - DNA, 277 bp, Glycine max
tgacggtctacaaaggaaaatatggtcagatccacctgattgcatctcttgctgctggattaagtcgctatcatgatgagtttgctgtagctatcgttgatgaggtactggaggagattagagttgggctggagttaaatgactatgggatgcagcaaagacgcattgcttacatgcgattcttgggggagctttacaactatgagcatgtagactcatctgttatttttgagacactatatctcattctcatctatggccatgggacacaagagca

SEQ ID NO: 202944 - DNA, 277 bp, Glycine max
cggctcgagacaataacaagcacaattacagtgactccgcttggttcctcttcttcgatcttcggtttgattctgcgtttgttcacatcatggccaccgcttcagtggcatttaagtccagggaggaccaccgcaagcagattgagttggaggaggcgcgtaaagcggggcttgcgccagctgaactcgatgaagatggaaaggaaatcaatcctcacattccccagtatatgtcctctgctccttggtatcttaatgctgagagacctagtttgaa

SEQ ID NO: 202945 - DNA, 231 bp, Glycine max
caactccctaccctattccgctttctctcatccatcatgaaaggaggaaagtccaagaccgaatctaagagagccgatgccaaacttgctgtgaataagaagggcgccgccaccaagactaggaaacccgccggaaaggggaaggcagcgagagatcctaacaagccaaagaggcctccaagtgctttcttcgttttcatggaggaattcaggaaggtgttcaacagggaa

SEQ ID NO: 202946 - DNA, 227 bp, Glycine max
cttcaattgtttctgaatttcttcctagagggagtttgtatagattaattcaccgacctaacaatcaattagatgagcgaaggcggttgcggatggcccttgatgctgctcgaggaatgaactatctgcacaactgcactccagtgattgtgcatcgtgatttaaagtccccaaatcttcttgttgacaaaaactgggtagtaaaggtatgtgattttggcttatca

SEQ ID NO: 202947 - DNA, 269 bp, Glycine max
  unsure (1)..(269): unsure at all n locations
cgcgttcccttttctctctggctccgcttccactantccnactngcgntctcgctcnctaagcgcagttgggaagccacctnccgagcatggcaaaaggcccagtcagagccaccgtttctatagagaaagagaccccggaggccaatcgtcccgaaacgtttctcagaggagtngccgaggcccagtcttccacttcggttcgggcccgcttcgagaagatgataagggaggcccaggacacgtgtgcagtgccctcgaggccgctga

SEQ ID NO: 202948 - DNA, 280 bp, Glycine max
gtcggaatgggaagggtgattcgcgcacagcgtaagggtgcggggtcggtgttcaagtcccacacccaccaccgcaagggtccggcgaggttccgcagcctcgacttcggcgagcgcaacggctacctcaaaggggtcgtcaccgatatctcccacgaccctggtcgcggtgctcctctagccaaggtggcgttccgccaccccttccgctacaagaagcagatggagctcttcgtcgccgccgagggcctctacaccggccagttcatctactgcggca

SEQ ID NO: 202949 - DNA, 283 bp, Glycine max
cagcttccgctcattctcctatgttgtttacgatctcagcataggctactgcctctcttatgttgccatccattcattccaactcctatcccagccctctctctttcttggcatcgtcaatctactgggctgtccaaggttgcatccttactggagtttgggtcattgctcatgcgtgtggccatcatgcattcagtgactaccagtcgcttgatgatattgttggccttgtcctcgactccggtctcctagtcccatacttttcatggcaatacagccatcg

SEQ ID NO: 202950 - DNA, 212 bp, Glycine max
catgattgagaggtccaccaaccttgactggtacaagggaccaactctccttgaggctcttgaccaaatcaatgagcccaagaggccctcagacaagccactcaggcttccattgcaggatgtctacaaaattggtggtattggtcaccgtgccagtgggacgtgttaagactggtgtcgtaacgcccggtatgggggtgacttttggtccc

SEQ ID NO: 202951 - DNA, 221 bp, Glycine max
ggcgttcgagaaccaagacacccctgtccgagaaatcaagcccaagaaccggagaatcatgggtgctggaggccctgatgacgaggacaataggtggccaccatggctgaaacctcttctcaaagagagcttctttgttcaatgcaagcttcacgctgattcgcacaagagcgagtgcaacatgtattgcttagattgtatgacaggtgctctctgctctc

SEQ ID NO: 202952 - DNA, 240 bp, Glycine max
gcatgtcgaaggaagtgagccagcagaggaaggactacgtagaccctccgccagcccccctcatcgacttggccgagattaagctctggtccttctacagagccctcatcgccgagtttatcgccacactcctcttcctctacgtcaccgtcgccaccgtcattggccacaaaaaacagaccggaccatgtgacggcgttggccttctcggcatcgcatgggccttcggtggcatgatct

SEQ ID NO: 202953 - DNA, 267 bp, Glycine max
gttctctctctttctctattaagttgttactctatttataactcagatatttgagaaggctttaaaagatggtgcttttgggacttctcttggtgggatttctctctcagctgggttcatcagtttcagcttctggttatggttggatggatgctcatgcaaccttctatggagggggtgatgcctctggcaccatgggtggagcctgtggatatgggaacttgtacagccagggctatggaacaaacactgctgctttgagcacag

SEQ ID NO: 202954 - DNA, 271 bp, Glycine max
caagacacccaactataaaggaaaatggaaggcaccattgattgataacccagatttcaaggatgaccccgacctatatgttttccccaacttgaagtacgtgggcattgaattgtggcaggtgaaatctggtactttgtttgacaatgtcttaattactgatgatcctgaatatgccaagcaactggctgaagaaacatggggcaagcacaaggatgttgagaagacagcatttgaagaggctgagaagaagagggaagaggaggaatca

SEQ ID NO: 202955 - DNA, 276 bp, Glycine max
tctcgagccgaatcggctcgagtcattttctctcttctctgcttcaccttgttcaaatcttacgagctgaggagaatcaatcgagagaaatatgtctggtatcgctcgtggacgccttgctgaggaacgaaagtcatggcgcaaaaaccatccacacggtttcgttgccaagcccgagactctacctgatggcaccgtaaatttgatggtctggcattgcactattcctggcaagaccgggactgattgggagggtggatatttcccactgacaat

SEQ ID NO: 202956 - DNA, 276 bp, Glycine max
ctttttctttggttctcctgagctgtgtttattctctttctctgccctctcatcttcgagctccgatggcgagcctgtggcgcgcggcaaccggcatgacggacaacgccaccgattacgacggcgtcgagttctggtcgaaccccgagcggaccggctggctcaccaagcagggcgagtacatcaagacctggcgccgccgctggttcgtcctcaagcaaggcaagctcttctggttcaaggactccgccgtcacgcgtgcgtctcgtccacgcg

SEQ ID NO: 202957 - DNA, 226 bp, Glycine max
cgaggaacagtggcaaacataagcgcgtgttcttcgattcagccaagtccacaatcctcgtcattcccaagccccacgcgcattgacggaaaccacccttcttcctttctcatcccattcatccgcaacataacttccatccccgacaacctccctcctctcaggatatccaacagcgcccccgtcaccccagctctctcatctcctcgtagctctaagcgcaagg

SEQ ID NO: 202958 - DNA, 248 bp, Glycine max
ctcgttctctctgccagagatggcattgtttcgctaggaggtccccatatccctcttaaaacaggaagaagggatggtagaaggagcagagccgatgtggtagagcagttcctcccagaccacaatgaatccatttctgcagttcttgacaagtttggtgccatgggaattgacacccccggcgtagttgcattgcttggagcacacagtgttggtcgaccccattgtgtgaagttggtgcaccgttt

SEQ ID NO: 202959 - DNA, 175 bp, Glycine max
gaagaaggcaaagatagtggcagagctccaagctgtgaagcacaacagtggcaagtcctacaatcagttagcggaggagactggactcaccaacgtctatgttgctcagcttctcaggagacaggctcagctcaatccccaaactgcccctctacttcgggcagcgctgcccgac

SEQ ID NO: 202960 - DNA, 240 bp, Glycine max
ttaacatatacaaattctctgtgttgtgttgtgtacttgtgttaattgtgttgttgttgtaggaaatttaagtgaagagagaatgatgatgaagtctgctatgtgtgcattggtgcatgtggcactggttgtggttgaagtggggcccatggctgaggctgcggtgacttgcaacccaacacagttgactccttgtcttccggcaattaattcaggttctgcaccttcgagtgcttgttg

SEQ ID NO: 202961 - DNA, 231 bp, Glycine max
tctcgagccgaatcggctcgagtcattttctctcttctctgcttctccttgttcaaatcttaacgcgtgaggagaatcaatcacgagaaatatgtctggtatcgctcgtggacgccttgctgaggaacgaaagtcatggcgcaaaaaccatccacacggtttcgttgccaagcccgagactctacctgatggcaccgtaaatttgatggtctggcattgcactattccggg

SEQ ID NO: 202962 - DNA, 232 bp, Glycine max
cgcggttcttgaccggagcaagaaatgcctctgcatcctcatcaaagatcgcgacgaccccaatcttggcatcaagatcaatgctactctcgctattcagctaccctctgcttgccactcacctgctaatattactcagtgtgtagatcttttgcatttagcacctaactctcctgatgctaaggtgtttgagggattccaaaaatctgccaaaacaaacagctccacccca

SEQ ID NO: 202963 - DNA, 274 bp, Glycine max
cacagagcaaaaagctccaccaatggcgggttacagagccgacgacgactacgactacctcttcaaggtggtcctcatcggcgactccggcgtgggcaagtccaacctcctctcgcgcttcaccaagaacgagttcaacctggagtccaagtccaccattggcgtcgagttcgccacccgcaccttgaacgtcgattccaaagtcatcaaggcccagatctgggataccgcaggccaagaaaggtatcgtgcgatcaccagtgcttactatcgt

SEQ ID NO: 202964 - DNA, 157 bp, Glycine max
cggattcagctcgagccaggattctactcgccgctcgatgggaattgcgcttcaacgcgtctcgtagggctaatccgcctcacgagggtcaccaacggcacgtgcctttgggcgggccgaggccccctactgctggtcggcaaacggacggcgggcg

SEQ ID NO: 202965 - DNA, 287 bp, Glycine max
ggcattcggctcgagcgggcacacactttgttcaacttgcaagacaagggtacacaaccgatgcccaacttgcaggcaggaacttggcgatataaggtgtttggcattagagaagatagcagaatcacttgaactgccttgcagatacatctctcttgggtgtccagagatatttccctattacagcaaactcaaacatgaggctatttgtaacttcagaccatacaactgcccttatgccgggtcagactgctcggtggttggggatattccatgccttgtcgctc

SEQ ID NO: 202966 - DNA, 268 bp, Glycine max
  unsure (1)..(268): unsure at all n locations
gctcatcgacttcgtccccaccgtctctggcgtgtccctggccgaggcccctggcttcctcaaggcccccggcggcgcccccgctaacgtcgccatcgccgtgtcgcgcctcgtcggcaaagccgccttcgtcggcaagctcggcgacgacgagttcggccacatgctcgccggaatcctcaaggaaaacggcgttcgcgccgacggcatcaatttgaccagggcgcagcancgccctggcttcgtgaccctangcgccganggggag

SEQ ID NO: 202967 - DNA, 243 bp, Glycine max
catctttctgatcgtctcaatcaggtgcttcggtgggccttgggttcaattgagatctttctaagcaggcattgtcccttgtggtatggctacaatgggaagttgacgcctctgatgaggcttgcttatattaacaccattgtctacccgtttacctcaatcccattgattgcttactgtacgcttcctgcattttgtcttctcacaaataaatttattattcctgagataagcaatttggcc

SEQ ID NO: 202968 - DNA, 269 bp, Glycine max
ccttgcaaggtttatacagaaagggggatcatttgtcaattattatatgtatcatggcggaacaaattttggtcgaactgctggtggcccctttattgctacgagctatgattacgatgcgccccttgatgaatatggattggccagacagccaaagtggggtcatctgaaggatttacatagagcaataaaactctgtgaacctgctttagtatctggagattctactgtacaacggcttggaaactatgaagaggctcatgttttta

SEQ ID NO: 202969 - DNA, 272 bp, Glycine max
cctgaatggaactatggtggtttccctgtttggctgcacttcattccgggaatcaagttccgaactgacaatgaacctttcaaggcagaaatgaagagattcactgccaaacttgtggatatgatcaagcaagagaagctatatgcctcccaaggaggacctgttattttatctcagattgacaatgagtatggaaacattgatacggcctacggtgctgcgggtaaatcctacattaagtgggcagcaactatggctacatctcttgatac

SEQ ID NO: 202970 - DNA, 255 bp, Glycine max
gcgatcgaagtttcacatcagccttatccagtttagggtttcggttccttaccctacctttgacgtatcgaaaccttaaatttgggattaggtctgagcaatctggttggtagaacctttggtcttagagagtcaagttttatgtctggattagacgatcaaattcctactgccttcgatccttttgctgatgcaaatgctgatgactcgggtgctgggtcaaaggagtatgtgcatattcgcgttcagcagcga

SEQ ID NO: 202971 - DNA, 196 bp, Glycine max
cgattctacccgccgctcgatgggaattgcgcttcaaggcgtctcgtagggctaatccgcctcacgagggtcaccaacggcacgtgcctttggcgggccgaggccccctactgctggtcggcaaacggacggcgggcgcacgcgtcgcttctagcccggattctgacttagaggcgttcagtcataatccaacgca

SEQ ID NO: 202972 - DNA, 216 bp, Glycine max
ctcgagccgcgccggccgccaccgttcgtcatggttctgtccaaaaccgcctcggagacagacgtctctgttcattccaccttcgcctctcgctatgtccgcacctcccttcccaggttcaagatggcggaggaatcgatcccgaaggaagccgcgtaccagatcatacacgacgagctgatgctggacggaaatcgaggctaaacctggcgtcgt

SEQ ID NO: 202973 - DNA, 220 bp, Glycine max
gagagaacttccagtgagggtgagagtgacacaaatctagagagagcactagtactctaaaagtctattatattcttcaaaatatgaccatgcatcgcgagtcttgggcttttgtcttcggcgttatgggcaacatcatctcctttggagtgttccttgctccattgccaaccttttaccaaatctacaagaagaaatccactgaaggtttccagtcact

SEQ ID NO: 202974 - DNA, 157 bp, Glycine max
acttctctctccgccttacgttcgttgacgagtggcacaaagacatcatatgtagggaacaagtgggcaagtctgtctcggccgttcagttcaaagcctgctggaaatgatgtcatgggaattgatctgggtactaccaatccatgtgtttctgtta

SEQ ID NO: 202975 - DNA, 266 bp, Glycine max
ctcgagccgctcgagccgggaagattcgtaaagaatttcttaacatgcgtcgtcaggctgttacaattcaagctgcattccggtgctttcaagttcggaagcattatcgcaaaattctttggtctgttggtgtggttgagaaagcagtgctgcgttggcgtttgaagagaaggggcttccgtggtctccaggtcaaaactgtcgatgcgggaaccggagatcaggatcagcaaagtgatgtagaggaggaattcttccggactggt

SEQ ID NO: 202976 - DNA, 267 bp, Glycine max
gagaaagatggattttgaactgagaagagcgagagagaagcttgagaaagagcagagggagaggaaggaaagagcaagattgaagcttctgaaggaaaagaaggccaaagaagaggctcagaagcaaaaagaagccatcgaagctgttcaaagatctcgtcgtattgatgccgcccaagctcaactcaaggctgaccaacagatgcaagaaaacctacttgctggcagaggaatagtgttttaccgactactagaggctttttttta

SEQ ID NO: 202977 - DNA, 268 bp, Glycine max
ccataatccaattgaatttgagcttggtactggtcaagtgatcaaaggttgggaccagggattattgggcatgtgtcttggtgagaagcgtaactgaaaataccatcaaaacttggctatggagagcagggttccccacccactattccaggtggtgctacactcatatttgacgctgagcttgtgggagtgaacgacaaaagtttaggcgaaggaaaaggaaacaacgaactgtagacaaatcaaaacaactggatagtcgagcttt

SEQ ID NO: 202978 - DNA, 282 bp, Glycine max
ctctgcactctctccttctcatcctcttctcttcgcttctctgttcgtgccacttcttctcgagcaatggcatctcatattgttggttatccacgcatgggacccaagagagaacttaagtttgctttggaatctttttgggatggaaagagtagtgctgatgatctgcagaaggttgctgctgaccttaggtcagccatctggaagcagatggctgatgctggaataaagtatattcctagcaacactttctcatactatgatcaagtactggacacaaca

SEQ ID NO: 202979 - DNA, 280 bp, Glycine max
cagtacccaacaggaccccatatagcttctcgaatgcttttcactgcagagaattcttttgaggatgtgagcgacaaagtagtggctgactttggatgcggttgtggtacgttaggtgttgcagctgcactgttgagtgcagaacatgttcttggcattgacattgatccagaatctcttgaaatagcttccaataatgctgaggaacttgaggttgacatcgattttattcagtctaatgtcatggacttgggatggagaggtcgaattgtggatacag

SEQ ID NO: 202980 - DNA, 272 bp, Glycine max
gtggttgataaaaatcttggacctctggtgaagactgtgatgactcggtgcattcaatgtacaagatgtgttagatttgcaacagaggttgctggggttcaggatcttggcatgttaggtcgtggaagtggagaggagattggaacatatgttgaaaaacttttgacaagtgagctttctggaaatgtcatagatatctgtcccgtgggagctctcacttcaaaaccttttgcatttaaagcccgaaattgggagttgaagggcacagagac

SEQ ID NO: 202981 - DNA, 284 bp, Glycine max
cacactttctctctctctctctctcacccagatcttgtagcaatggcgagcgctcccactccacgcgaagagttcgtgtacatggcgaagctggcggagtaggccgagcgctacgaggagatggtggagttcatggagaaggtctccgcctccgccgagagcgaggagctgaccgtggaggagcgtaacctcctctccgtcgcctacaagaacgtgatcggcgctcgccgcgcctcctggcgcatcatctcctcaatcgagcagaaggaggagagccgcggcaa

SEQ ID NO: 202982 - DNA, 282 bp, Glycine max
gcgaagagaatggctcccaagggtttaatctttttggctgtgttatgcttctcagcactgtcactgagtcgttgtcttgcggaggataatggacttgttatgaacttctacaaggaatcatgccctcaggctgaagacatcatcaaagaacaagtcaagcttctctacaagcgccacaagaacactgctttctcctggctcagaaacatcttccatgactgtgctgttcagagttgtgatgcttcactgttgctggactccacaagaaggagcttgtctgag

SEQ ID NO: 202983 - DNA, 280 bp, Glycine max
gaaatcgcgaacagaacagcaacgttaacaatgggttctcgctacgaggtggaactgaagctctcatcggcacgcgctctcaagaacgtgaactggcgccatggcccgaaccgcccatacgtcgtcgtttgggtcgacccaagcaacaagctctcgacgcgcgtggacgaaagcggcgacactgacgcgaattgggaccaaacgctcacaattccgttgccaccaaagcctctcgaggatcaaacgttgtacatcgacgtggtccacgccggctcggagg

SEQ ID NO: 202984 - DNA, 152 bp, Glycine max
tgcagccactgcttgaattcctcaggcttcacagttataagggaaagaccatgatgttgaatgacaaagttcaaagcctggattctctccagcatgttttgagaaaagcagaagagtatctgacttcagttgctcctgaaacaccctactca

SEQ ID NO: 202985 - DNA, 282 bp, Glycine max
ctgagagacctagtttgaaacatcaaaggaaatggaaatctgaccccaattacaccaaatcatggtacgatagaggtgctaaaatctttcaggcagacaagtatcggaaaggtgcttgtgagaactgtggagctatgacacatgattctaagtcatgcatggaaagaccacggagagtgggagcaaaatggacaaacaaacacattgctcctgatgaaaagatagaaacttttgagcttgactatgatggaaaacgggacagatggaatggctatgatgcat

SEQ ID NO: 202986 - DNA, 284 bp, Glycine max
gttgaaaagaaaccctagcaagtggagcaatggcagacgttgaagtcgatgtggcggcagcagcagcagcagggctgccgaagaagagaacgttcaagaagttcagttttcgaggcgtggatctcgatgcacttctcgacatgtccaccgatgaactcgtcaagatgttcagtgcccgcgctcgtagaaggttccagagaggcctcaccagaaagcccatggccttgatcaagaagctccgtaaagcgaaaagggaagctccaccaggtgagaagccagaacca

SEQ ID NO: 202987 - DNA, 154 bp, Glycine max
gttgagtggaaacgtgaaattagggttcatcgaggaggaagaagaagaagaagatgtcgtacctgttgcctcacttgcactctggatgggccgtcgatcaagcaatcctcgccgaagaggagcgtctcgtcgtcatccgtttcggccacgactg

SEQ ID NO: 202988 - DNA, 276 bp, Glycine max
caatatgcgagcccttgatggactccaaggaccagtctatgtgggaactggatgccttttcagacgggttgcactttatggttttgacccaccgcgttctaaagagcaccacacaggttgctgtaattgttgctttggtcgtcaaaagaagcatgcatcactggcaagcaccccagaagagaaccgtgcactgaggatgggtgattctgatgatgaggaaatgaatctatcattgttccctaagaagtttggaaactctactttcctcattgactc

SEQ ID NO: 202989 - DNA, 280 bp, Glycine max
accctacaatgctactctctctgttcaccagcttgttgaaaacgcagacgagtgcatggtgcttgacaatgaagctttgtatgacatttgcttccgtaccctcaagctaaccaccccaagctttggtgacttgaaccatctgatctcagctacaatgtctggtgtcacttgttgtttgaggttccctggtcaacttaactctgatctgcgaaagcttgcagtgaaccttattcccttccctcgcctccacttcttcatggttggatttgctcctttgaca

SEQ ID NO: 202990 - DNA, 281 bp, Glycine max
aattaagcactctaaaacatatctttatttccttgtctacatatatcttgaaaaactcaatcatggctagtgtttcttcggtttcagctccatttagaaggcttgaggggaaggtggcgattatcactggtggtgcgagtggtctaggtgcagccactgcaagactcttctctaagcatggagcacatgtagtcatagctgatattcaagacgacttgggtctctctgttgccaaagagttagaatccgcttcctatgtccattgcgatgccacaaacgaa

SEQ ID NO: 202991 - DNA, 280 bp, Glycine max
ggacaccctcattgacaaggcccttgagaaaattggcaccccagtggcccttaatctacgcgggaaggcagcggtagcccaagcagcattggcttaccagctctaccaaaggaaattttctggtccaaggtgggaagctctagttaaaaagggggccaagaagcaaaggctcctctgggcctcaaccagtgtaaagaatcctgcctattctgacaccttatatgttgctcctcttattggacccgacactgtatcaacaatgccagaccaagcccttcaa

SEQ ID NO: 202992 - DNA, 277 bp, Glycine max
tgcggaataacgaagcctcctcgttcttcttcttccgccctttctctctctagaaccgtacggtcgtttctttctctctcatcaaccggagacagcgtcgccttcttttctgaatctcgcggtgttgttagttctgcggcggttgtagttccggcggcgatgggacagcaatcgttgatctacagcttcgtcgctcgcggcaccgtgatcctagcggagtacaccgagttcaccggaaacttcaccagcgtggcggcgcagtgcctccagaaactcc

SEQ ID NO: 202993 - DNA, 278 bp, Glycine max
gtaatgacctcatatgggctgatccagtttcatgctgttatgcactgtatgcaaagttgaaccccgatacagttctcttgcagcaatcacctttagcccttgcaaaagctttaaagaactcggtggagttggatgggttaaaaaaggcacatattcgggatggtgcagcagttgtgcaatatcttgtctggctggataagaagatgcaggatatttatggagcttctggttactttttggagaaggattctgtgaaaaaggagaaacatttgcaatct

SEQ ID NO: 202994 - DNA, 280 bp, Glycine max
  unsure (1)..(280): unsure at all n locations
ctcgagcctcttgaaagggttaggtttcgggagaaaaagcaatccactcagaaangtagaacaattcaacgatgcctcgctatgatgataaatacggcaatacccgcctctatgtggggcacttatcttcgaggactcgttcccgggatctggagcgtgccttcagcagatatggaagagttcggggtgtggatatgaagaatgatttcgcctttgttgattttagtgatcctcgagatgctgatgatgcaagatataacttggatggtcgggatgttga

SEQ ID NO: 202995 - DNA, 280 bp, Glycine max
aattaaagatgtttgggagggcaccgaagaagagcgataatacgaggtactacgaaatcctcggcgtctcgaagaacgcttcgcaggatgatctgaagaaggcttacaagaaagccgccatcaagaatcaccctgacaagggcggtgatcccgagaagtttaaagagctggcacaagcatatgaggttctgagtgaccctgagaagcgtgagatatatgatcagtatggtgaagatgcgcttaaggaaggaatgggtggtggcggtggccatgatccgtt

SEQ ID NO: 202996 - DNA, 277 bp, Glycine max
ttttcttcgtctgtgtaacaaacacttcaacaatctactctatacccgatttacaagatgagttcatttagccaaaatccctatgttttagttctgttcctcgttctcactgtgtggatatcccgtgtaatgtctcgcgggctcattacatctgagagacatgagaaatggatggcacaatatggtaaggtttacaaggatgctgcagagaaggagaaacgtttccaagtattcaaaaacaatgtgcagttcattgagtcattcaatgctgctgggg

SEQ ID NO: 202997 - DNA, 274 bp, Glycine max
atttgcagagagagagagagagagagagggaagacggttgtggggattcgatgggggccaccgttcactcgccgctagtcacttatgcttccgtcatatctctgcttacactctgtcctccgtttgtcatacttctatggtacaccatgactcttgctgacggatctgtttccgagacattccattatttaaggcagaatgggttgcagggtttgctacatatatggcccacccccactcccaccgcctgcaaaatcattgcagtctatgctgc

SEQ ID NO: 202998 - DNA, 161 bp, Glycine max
gtcaagaaaggtcttacagatgatcttggtgcagaggctctgatgatagatgcattggacaaaattgaaaaggatttaaaaaaacctttactgagaaatgataagaaaggaatggaccttctcttggcagagtttgataagattaataagaaaattggaat

SEQ ID NO: 202999 - DNA, 278 bp, Glycine max
gagaaaacagaagaaaacaaaatggaagacacagtttctgcgttgaggtctttgatggtttctcactctccgccgctggatgccttagtggtgccctctgaagattatcacctgagcgaatatgtgtctgcacgagacaagcgccgcgaattcgtttccggcttcactggaagtgccgtgcttggcacttataacaaagaaagaagcactgctgtggacggatggacggtattttttgcatgctgagaaagaacttagtgctgggtggaagctaatgc

SEQ ID NO: 203000 - DNA, 280 bp, Glycine max
gagaaatagagagagaacttcaagtgagggtgagagtgacacaaatctagagagagcactagtactctaaaagtctattatattcttcaaaatatgaccatgcatcgcgagtcttgggcttttgtcttcggcgttatgggcaacatcatctcctttggagtgttccttgctccattgccaaccttttaccaaatctacaagaagaaatccactgaaggtttccagtcacttccttatgttgttgcactgttcagtgcaatgctttggatttactatgctt

SEQ ID NO: 203001 - DNA, 279 bp, Glycine max
attctctttgcgcagttccctacctctcctttcaagatgcagatcttcgtcaagaccctcaccggaaagaccatcacccttgaggtggaaagctctgacaccatcgataacgtcaaggccgagatccaggacaaggaaggaattcccccggatcagcaacgtctcatcttcgccggaaagcagctcgaggacggccgtaccctcgccgactacaacatccagaaggagtcaacccttcaccttgtccttcgtctccgtggtggcatgcagatcttcgtc

SEQ ID NO: 203002 - DNA, 277 bp, Glycine max
tgcagctctagctagggtttcgcaagtgcgatcgaagaagaacaacgacgatggcgatggctgcagctctgcgtcgcgaaggaaggcgtttgacccaaccaatcaacgccctccactcttctctcaattcctccctcatctctcaagaccaagcccctcatggcgcgcgctccatttccactcaagttgtgaggaaccgaatgaagagtgtgaggaatatccagaagatcaccaaggccatgaagatggatgccgcgtccaagctgcgggccgttca

SEQ ID NO: 203003 - DNA, 274 bp, Glycine max
ggcgcgtcctcaacactggctcccctattaccgttccagttggtagggctacccttggccgtatcataaatgtcattggagagcctattgatgacaagggagaaatcaataccgagcattatttgcccattcatagagaagctcctgcttttgttgagcaagaaaccgcacagcagattcttgttactggaatcaaggttgttgacctgcttgcaccatatcaaagaggaggaaagattgggttgtttggtggtgctggtgtaggaaaaactgt

SEQ ID NO: 203004 - DNA, 273 bp, Glycine max
ctctctggctgttcagctggaggactgactacaatattacactgtgatcgctttaaaaatctgttgccttctgaagctaatgtgaaatgtgttccagatgctggttattttgtcaatgtagaggatatctcaggaacacatttcatcgaaaagttctacagtgaagttgtttcaactcatggctcagcaaagaatttgccctcatcctgcacttcaaaattcagcccagaactatgctttttcccacaatatgtggcatcacatatcagtact

SEQ ID NO: 203005 - DNA, 270 bp, Glycine max
gaacaagaaaaagaggcgcaagatgagtggtagggtttctgggaaggtgaagtggttcaatgatcagaaggggtttggattcataagccctgacgatggcagcgacgatctcttcgttcagcaatctcagatcaaatctgacggtttccgaagcctcgccgaaggagagtccgttgagttcgccattgaatctgaatctgacggacgcgcgaaggctgtagatgtcactagccccgacggagccattatccagggaaccagacgaggcgg

SEQ ID NO: 203006 - DNA, 276 bp, Glycine max
gagaaatagagagataacttcaagtgagggtgagagtgacacaaatctagagagagcactagtactctaaaagtctattatattcttcaaaatatgaccatgcatcgcgagtcttgggcttttgtcttcggcgttatgggcaacatcatctcctttggagtgttccttgctccattgccaaccttttaccaaatctacaagaagaaatccactgaaggtttccagtcacttccttatgttgttgcactgttcagtgcaatgctttggatttactat

SEQ ID NO: 203007 - DNA, 278 bp, Glycine max
ctaagatggcttcctttgtatccttcctagtgctgcttcttgcagaccttatcctcatgcctcaagggcttgctacttactacaaaccaattaagaagccaccagtgtacaagcctccagtgtacaagccaccagtgtacaaaccaccggtttataagccaaaaccaccggtttacaagccgaaaccaccggtttacaagccaccatataagaagccaccatacaagaaaccaccttatggaaagtaccctccagtagaggacaacacccatgcctaa

SEQ ID NO: 203008 - DNA, 276 bp, Glycine max
ctcgcaagcaaaaagaaagaatcccaggcgaggagaaagatggaggggaaggagcaggatgtgtcgttgggagcgaacaagttccccgagagacagccgattgggacggcggcgcagagccaagacgacggcaaggactaccaggagccggcgccggcgccgctggttgacccgacggagtttacgtcatggtcgttttacagagcagggatagcagagtttgtggccacttttctgtttctctacatcaccgtcttaaccgttatgggagtcgcc

SEQ ID NO: 203009 - DNA, 149 bp, Glycine max
attctctttgcgcagttccctacctctcctttcaagatgcagatcttcgtcaagaccctcaccggaaagaccatcacccttgaggtggaaagctctgacaccatcgacaacgtcaaggccgagatccaggacaaggaaggaattccccc

SEQ ID NO: 203010 - DNA, 276 bp, Glycine max
  unsure (1)..(276): unsure at all n locations
ggcttcaaaggaatcactgctaagagatcctcctctggaagaccccttgagcaggaaaggaagaaaggtgtgccatggactgaagaggaacataagtantttctactggggctgaagaagtatggcaaaggtgattggagaaacatatcgcgaaattatgtgatcactaggacgccaactcaaggtgctagccatgctcagaagtacttcatcaggcaactatcaggaggcaaggacaagaggagggctagcatccatgactaacaacggttatct

SEQ ID NO: 203011 - DNA, 274 bp, Glycine max
gcgaagagaatggctcccaagggtttaatctttttggctgtgttatgcttctcagcactgtcactgagtcgttgtcttgcggaggataatggacttgttatgaacttctacaaggaatcatgccctcaggctgaagacatcatcaaagaacaagtcaagcttctctacaagcgccacaagaacactgctttctcctggctcagaaacatcttccatgactgtgctgttcagagttgtgatgcttcactgttgctggactccacaagaaggagct

SEQ ID NO: 203012 - DNA, 277 bp, Glycine max
tgagcccaagaggccctcagacaagccactcaggcttccattgcaggatgtctacaaaattggtggtattggtaccgtgccagtgggacgtgttgagactggtgtcgtgaagcccggtatggtggtgacttttggtcccactgggctgacaactgaggttaagtctgttgagatgcaccatgaggctctcacagaggctcttccaggtgacaatgttggctttaatgtgaagaatgttgcagtcaaggatctcaagcgtggttttgttgcatccaac

SEQ ID NO: 203013 - DNA, 277 bp, Glycine max
cacacactctctttccatgggtccgtttcgtaaacccttccttgcatttctctcggttgttctatttctgggtctctatgaggcagcagcagaacagactcagactcacaagagtacttacattgtacacgtggcgaaatcggagatgcccgagagcttcgagcaccacgctgtgtggtatgagtcgtcactgaagaccgtgtctgactcggcggagatgatttacacctacgacaacgccatccacggctacgcgacgagattaaccgctgaggaa

SEQ ID NO: 203014 - DNA, 274 bp, Glycine max
cttcaacctcaccaaaggaactaagaatttcattgaggctagagaaagtggtgatcaatatgtcaaagaatccaaaagttttctttgatattctaattggaaagatgaaagctggacgagtagtgatggagttgtttgccgatgcaaccccaaaaacagctgaaaacttcagggctctctgcactggggaaaaggggattggacgatctgggaaacctttacactacaaaggttctgtatttcatcgtattattccagaatttatgtgtcaggg

SEQ ID NO: 203015 - DNA, 273 bp, Glycine max
tctcgagccgaatcggctcgaggactagttctagatccttaatgcgccaggaccaaacaccatccgcggcacgacggacaccctccaacaacaacacttccgctgcgaaaaatgtctctggtggcgaacgaggatttccagcacattctgcgtgtgctgaacaccaacgtggatgggaagcagaagataatgttcgcaatgacctccatcaagggtattggaaggagattcgccaacatcgcttgcaagaaggctgatgttgacatgaacaaa

SEQ ID NO: 203016 - DNA, 272 bp, Glycine max
  unsure (1)..(272): unsure at all n locations
atctcgnacgaatcggctcaggactagttctagatccttaataggccaggaccaaacagcctccgcggcacgacggacaccctccaacaacaacacttccgctgcgaaaaatgtctctggtggcgaacgaggatttccagcacattctgcgtgtgctgaagaccaacgtggatgggaagcagaagataatgttcgcaatgacctccatcaagggtattggaaggagattcgccaacatcgcttgcaagaaggctgatgttgacatgaacaaa

SEQ ID NO: 203017 - DNA, 273 bp, Glycine max
gccggatctgctaaaatacgcttgatccatatgggcctcctcgaccacttgtgggacgacaccgtcgccggcccaaggccggaaaacggtctcggcaagctccggaaacaccacaccttcactttccgacctagctccggcaaggaagcggagggcgggagcgtgagatcgtacggtgacgaatcgtcggaggatgcgactagagtgacgcgtagtatcatgatcgtgaaaccgccagggtaccagagtggatcgcctccggtttctcctgcc

SEQ ID NO: 203018 - DNA, 264 bp, Glycine max
ctgtgagctggtctatatccaagactctgtgagctggaggatacggtttgggataccaactgtgtgcatgctatgctccataataatgttctttgtgggcacaagggtctacgtgcatgtaaagcctgaaggaagcattttttctggtattgctcaagttttagtgactgcatataaaaagagaaaactccaccttccaatgagtgaggagaagccagatggagttttttatgatcccccactaattgggatcacagttgtgtc

SEQ ID NO: 203019 - DNA, 267 bp, Glycine max
agaaaatcgagcaactttgagagcaatggccgaatttggcctgattctgttttatttctacatatgtgatcgaaccaacatacttggagattccaccaagagttatagttgggatcttttcatcttcctctaccttcttctgattatagtttcagctttgagttctttgaagaaacataatgactcatcaacattttctggaaaaaacatactttaccttaatcggcatcaaacagaagagtggaaaggatggatgcaggtcctctt

SEQ ID NO: 203020 - DNA, 271 bp, Glycine max
aattaattaagcactctaaaacatatctttatttccttgtctacatatatcttgaaaaactcaatcatggctagtgtttcttcggtttcagctccatttagaaggcttgaggggaaggtggcgattatcactggtggtgcgagtggtctaggtgcagccactgcaagactcttctctaagcatggagcacatgtagtcatagctgatattcaagacgacttgggtctctctgttgccaaagagttagaatccgcttcctatgtccattgcg

SEQ ID NO: 203021 - DNA, 277 bp, Glycine max
  unsure (1)..(277): unsure at all n locations
ngtcaactcagcgtttgtgactgaaaaaaggttttagatcgtaaaaactaatcactacgaaaacaagagatatcgaagatggctctgcccaaagctaaggagatcgtgtcgtccaattccgtcgtcgttttcagcaaaacctattgccctttctgcgtcgatgtgaagaagctcttcggtgacctcggtgccaattacaaggccatcgaactcgacactgaatccgatggaaaagagctccaagcagcattagttgagtggacggaccagcgaaccg

SEQ ID NO: 203022 - DNA, 270 bp, Glycine max
gagaatggctcccaagggtttaacctttctggctgtgttaatatgcgtttcagcactgtcactgagtccttctgttgcgggggaagggcaaaataatggccttgttatgaacttctacaaggaatcatgccctcaggctgaagacatcatcacagaacaagtcaagcttctctacaagcgccacaagaacactgctttctcctggctcaggaacatcttccatgactgtgctgttcagagttgtgatgcttcactgttgctggactccac

SEQ ID NO: 203023 - DNA, 269 bp, Glycine max
tttccattctcttcaacctaacgcagcatcgctatactcttcattccatggctttgcccaatcagcaaaccgtggattaccctagtttcaaactcgttatcgtcggtgatggtggcacaggaaagacaacctttgtgaaaaggcatctcaccggagaattcgagaagaaatatgagccaaccatcggtgtggaggttcacccattggattttttcacaaactgtggaaagattcgattctactgctgggatactgctggacaggagaag

SEQ ID NO: 203024 - DNA, 262 bp, Glycine max
tgcgaatctcttctccacgtatcggagaacatggggaacaagatgaatgcgatcgcgttgtgcttgttagtgtcgaccctgttggtttctgcggtgtattgtgcaccgaatgctgggctccgtagattgggctgaagaagattaaattggaccctaacaacaggcttgctgctcgagttgggtccaaggatgttgattctttccgggcttctattagaaagtttcatctccaaaacaactttggtggcactgaggaaaccga

SEQ ID NO: 203025 - DNA, 274 bp, Glycine max
ctctgcgagatcttgagtcgccgatttgaaaagatgagtaagcttcagagtgatgctttgcgtgaagccatctcaggaatcatggccgattccaaggagaagaatcgcaaatttgtggagaccatcgaactccaaatcggtttgaagaactacgatccacagaaggacaagcgtttcagtggctccgtcaagttgccccacatccctcgccccaagatgaaaatttgcatgcttggtgatgctcagcatgttgaagaggcagagaagataggac

SEQ ID NO: 203026 - DNA, 269 bp, Glycine max
cggcaagaccataaccctagaggttgaaagctccgacaccatcgataacgtcaaggccaagatccaggacaaggagggtatccccccggaccagcaacgtctcatcttcgccggaaagcagctcgaggacggccgcaccctcgccgactacaacatccagaaggaatcaacccttcacctcgtcctccgtctccgtggtggcatgcagatcttcgttaagaccctcaccggcaagactattaccctagaagtcgaaagctccgaaacca

SEQ ID NO: 203027 - DNA, 268 bp, Glycine max
cttcatcttgttctatctgtgacgagcatcatggcctcaagaacagtgttattgttggctatgtgtgtgcttccggcgatggttgtggccattcgcccagcaaagaaccctttttgcgtgaagggtcgtgtctactgtgacccttgccgtgctggttttgagacctcagctaccacctacattgctggtgctgagattatgttgcaatgcaagagcagggttagcaacgaggttgtgtacacgaagaaggggtacaccgactcaaccg

SEQ ID NO: 203028 - DNA, 266 bp, Glycine max
ggaatcttgagaaatggcaggggacagcaagagcaagattctgttcatcggagggactggttacatcggaaaattcatcgtggaagccagcgccaaagctggccacccaactttccttttggtgagggagtccactctctccaaccccgcaaaatcacccctcatcgacaatttcaaaggcctcggtgtcaatcttgttttaggagatctatacgatcaccaaagtttggtgagtgctataaagcaggtcgatgtggtaatttcta

SEQ ID NO: 203029 - DNA, 266 bp, Glycine max
agcagcactcactgcgctaaccccttctctctctctctctctgctcggttctccgatcgccgtcttcgccttgcccattcctgatcaatatgtctagaagatatgatagccgtacaacaatcttctcccccgaaggacgtctttaccaagtggagtatgcaatggaggccattgggaatgctggaactgcaatagggatcttgtcaaaagatggggtagttctggttggtgaaaagaaggtcacatccaagctgctgcaaacctca

SEQ ID NO: 203030 - DNA, 263 bp, Glycine max
atacactgtgaatggaccatcaacctccaccgtgccccgccgccgcctccgcaacggacaaccctcgtggcggaacgcgccaccccatgtaccgcggcgtccgcaagcgccggtggggcaaatgggtctccgaaatccgggagccacggaagaagaaccgcatatggttggggtcgtttccggtgccggagatggcggcacgagcatacgacgtcgcagcctactgcctcaaaggccggaaggcgcagctcaactttcccgac

SEQ ID NO: 203031 - DNA, 264 bp, Glycine max
cgctccctctcggatcagatctgcgctctccgttttcagatcgcgttttgtttcaattcgacactttcctcgcttcaaagattaagcgaacaatatggttgtccttgctgcatccattgtgagcaaatctggcaaagtgctagtttctagacagtttgtggatatgactcgcataagaattgagggtcttctagcagcatttcccaagttggtagggactggaaaacagcacacgtatgttgaaactgagaatgtgcgctatgt

SEQ ID NO: 203032 - DNA, 267 bp, Glycine max
gggagaagagggtggtggagaagtgagaagggttagggttgtttttgatgatgatgatgagaaggtgcagaggatgaggaagggggtgttgcagaagctgcacatgacttttgggggttctgatgaggacaattatgcttttgggttggaccgcgtgaccgacacagagatgttctttcttgcttccatgtacttctcttttccccgggggcttgggggtccaggtaagtgttttgcttctgggaagcatttgtgggtttcggatgt

SEQ ID NO: 203033 - DNA, 266 bp, Glycine max
gttcttatccatcgcattgaaaagcagcaccatcaccacccccacctcttaccccttctttcataaatatgcgtctctgcaacaacatgttcaccaccacctccttgttcttcacatcatcctcatcatcttcttcaatcagttgactcttcgttcctccctctattctttcggatggagcccatggacatcgttgggaaggccaaggaagacgcttctcttcctaaagcgacaatgacgaaaattattaaagagatgttgccccc

SEQ ID NO: 203034 - DNA, 266 bp, Glycine max
atctctcttctctttcttcttcttcctttaaccatgagacagatcttgcacgttcagggaggccaatgcggtaaccaaatcggttccaagttctgggaggtgaactgcgacgagcacggcatcgatcccaccggaaagtacaacgaggaaggcaacagcagcatccaactcgaaaggatcaatgtgtattacaacgaggcctctggcggaaggtacgttccccgtgccgtgcttatggatctcgaacctggaaccatggacagcat

SEQ ID NO: 203035 - DNA, 264 bp, Glycine max
tttccctcttgttctatgctttcaagtagtaccaattgggcactttgtttagtgtcttcattttttttttcatcctcatcaaattaaccccctaaacatcatttagctagctagccaaattaattattaattaggcaaataatgggaaacccagaatccaatttgccacccggttttaggttccacccaaccgatgaggggctcattcttcactaccttagtaaaaaggtagcatccatacccttgcccgtttccatcattgca

SEQ ID NO: 203036 - DNA, 154 bp, Glycine max
gctcggaattgcggctacgagtcgggcacacactttgttcaacttgcaagacaagggtacacaaccgatgcccaacttgcaggcaggaacttggcgatataaggtgtttggcattagagaagatagcgaatcacttgaactgctcgtaaccctg

SEQ ID NO: 203037 - DNA, 257 bp, Glycine max
gaaggagcccaaatttttgaagaatggtgatgcaggtatggttaagatgattccaaccaagcccatggtggttgaaactttctctgagtatcctccccttggtcgttttgctgtgagggacatgcgtcaaactgtggctgtcggagtcatcaagagtgttgagaagaaagaccccaccggagccaaggtcaccaaggccgctgccaagaagaagtgattgcatttgggcaattttgctagcacatgtgatcatcatc

SEQ ID NO: 203038 - DNA, 258 bp, Glycine max
caagaatcgcgaaaaaatggttgagacaatgtttgagaagtacaattttgctggagtgtttatccaaattcaagctgttctaacattatatgctcaaggtgcttatagagatgagtgaaggtttgctgactggattagttattgactcaggcgatggtgtcactcatgtggttccagttgttgatggctattctttccctcatctaactaaacgaatgaatgttgctggtcgacatataacctcctatcttgttgatt

SEQ ID NO: 203039 - DNA, 262 bp, Glycine max
attccattctctctgtgtatttccctacctctcccttcaagatgcagatcttcgtcaagaccctcaccggcaagaccatcacccttgaggtggaaagctctgacaccatcgacaacgtcaaggccaagatccaggacaaggaaggaatccccccggaccagcaacgtctcattttcgccggaaagcaacttgaggacggccgtacccttgctgactacaacattcagaaggagagtactcttcacctcgtcctccgtctccg

SEQ ID NO: 203040 - DNA, 263 bp, Glycine max
ctcgagccgcttttgagcacttttgtgtgcatgctgcaagcaagaccattcttgatgagcttcaaaggaacttggaactgagtgacaagaacatcgaagcgtctagaatgacgctgcatcgctttggcaacacctctagcagcagcatttggtatgagttggcttacatggaagcaaaagagagtgttagaagaggagaccgtgtttggcaactcgcatttggctctggcttcaagtgcaacagtgtggtttggcgcgccatg

SEQ ID NO: 203041 - DNA, 266 bp, Glycine max
gaagatccatagctaataagctaggttcagtagttagtgagtgatcgatatctggagatgggtcgaggcaagattgagataaagttgattgagaaccccaccaacaggcaagtcacttactccaagcgaaggaatggtatcttcaagaaagctcatgaactcagtgttctctgtgatgccaaggtttcacttatcatgttctctaaaaacaacaagatgcatgaatacattagccctgggcctcacgacaaaaaggatcattgatc

SEQ ID NO: 203042 - DNA, 258 bp, Glycine max
ttaacatatacaaattctctgtgttgtgttgtgtacttgtgttaattgtgttgttgttgtaggaaatttaagtgaagagagaatgatgatgaagtctgctatgtgtgcattggtgcttgtggcactggttgtggttgaagtggggcccatggctgaggctgcggtgacttgcaacccaacacagttgactccttgtcttccggcaattaattcaggttctgcaccttcgagtgcttgttgccagaagctgaaggagca

SEQ ID NO: 203043 - DNA, 264 bp, Glycine max
ctctgtctcgtttacacatctctccaacctttcactttcgtttctcagttttattcgaatccctctctcaatctcctttccaaatggccagcgttgaggttgcacagcaaacaccaacaacagttccagaaaatgaaacaaccgaggtaagcaagacccaggaaacaaccccagtcactgaggctcctgcaacagaacaaccagcagctgaggttcctgcaacagaacaaccagccgctgaggctcctgccccagaatcaacca

SEQ ID NO: 203044 - DNA, 260 bp, Glycine max
gtttctataagacatcttggcccgtccatgattcagcagatgcagcatgcttgcaatgaatgcaagggtactggagaaaccatcaacgacagagatcgctgcccacagtgcaagggagaaaaggttgtgcaggagaaaaaagtccttgaagttattgtggaaaagggaatgcagaacgggcagaagattacattccctggcgaagctgatgaagcgccagacacaattactggggatattgtctttgtccttcagcagaa

SEQ ID NO: 203045 - DNA, 261 bp, Glycine max
gagaaaatcatggtggacgcagcagaacgtagatacttggaggatgatgattcatctctcatgaaaactatcaagggcgcaacaactggtttagtggctggaactatctggggtactgtagttgccacctggtatgatgtcccccgtgtcgagagaaatgttgctcttccagggctgattaggactatcaggatgatgggcaactatggtttgacctttgctgccataggaggagtctacataggtgtagagcagttggtg

SEQ ID NO: 203046 - DNA, 263 bp, Glycine max
gacaaggatggatggtaccctcctggccatggagatgtctttccatcattattgaacagtggcaaacttgatgcactattgtcacagggtaaagagtatgtatttgttgccaattcagataacttgggagctatagttgacttgaaaatcttaaatcatttgatccagaacaagaatgaatactgtatggaggtgactcccaaaacattggctgatgtaaagggtggcactttgatttcttacgaaggaagggttcagctttt

SEQ ID NO: 203047 - DNA, 288 bp, Glycine max
ctagaggcctcatacgacaccaaattcgaggagataaacaaggttctgtttggtagagaggaggggcagcaacaaggggaggagaggctgcaagagagtgtgattgtggaaatctcaaagaaacaaattcgggaactgagcaaacatgccaaatctagttcaaggaaaaccatttcttctgaagataaacctttcaacttgagaagccgcgaccccatctattccaacaagcttggcaagttgtttgagattaccccagagaaaaaccctcagcttcgggacttggat

SEQ ID NO: 203048 - DNA, 277 bp, Glycine max
tgctcgcgaattcgagctcgagagataaacagtgtatcatttcaattcattcaggcttattattattagggtttggcgattcagagagaaagagaaatgggagaacgaaaaggaatcccaattgctctggggctcttggcgatgctcctcttcttcattgcttcttcctcttcctctcacctcgttcgtgcttccgatgacgccgacgacgcgatcttctacgagtcattcgacgaggattttgacggacggtggattgtgtccgacaaggaggatt

SEQ ID NO: 203049 - DNA, 232 bp, Glycine max
gtcgtcgcaggcgcagagtagagcagcacagaagagggaaaacggcaccgccgccgtagaagaaaacaaccatggtgcacgtctccttttacaggaactatgggaagacattcaagaagccgcgtcgtccgtacgagaaggagcgtctcgacgcggagttgaagctggttggtgagtacgggcttcggtgcaagagagagctgtggagggtgcagtacgcgctcagccgcat

SEQ ID NO: 203050 - DNA, 287 bp, Glycine max
tgcggaataacgaagcctcctcgttcttcttcttccgccctttctctctctagaaccgtacggtcgtttctttctctctcctcaaccggagacagcgtcgccttcttttctgaatctcgcggtgttgttagttctgcggcggttgtagttccggcggcgatgggacagcaatcgttgatctacagcttcgtcgctcgcggcaccgtgatcctagcggagtacaccgagttcaccggaaacttcaccagcgtggcggcgcagtgcctccagaaactcccttcctccaa

SEQ ID NO: 203051 - DNA, 278 bp, Glycine max
cggctcgaggattctacccgccgctcgatgggaattgcgcttcaaggcgtctcgtagggctaatccgcctcacgagggtcaccaacggcacgtgcctttggggggccgaggccccctactgctggtcggcaaacggacggcgggcgcacgcgtcgcttctagcccggattctgacttagaggcgttcagtcataatccaacgcacggtagcttcgcgccactggcttttctaccaagcgcgatgaccaattgtgcgaatcaacggttcctctcgtact

SEQ ID NO: 203052 - DNA, 286 bp, Glycine max
gaaaggttaactaagaagcaatacttcaatggccacccttgttgttcataaccaaacttcttctgctcaagatgctgaggctctccaacaggctttcaaaggatggggggctgatgacaaggccattatagcaatactgggtcacagaaatgttcatcagaggcaagaaatcagaaaagcttatgaggagatttaccaagaggatctcatcaaacgccttgagtccgagatctctggtgactttgagagagctatgtaccggatgttgcagcctgcggatcgtgat

SEQ ID NO: 203053 - DNA, 245 bp, Glycine max
ttttcagcgatggagaaagggattttggtttcatgctccgctgggaactcgggtccgggtccctacagtctctccaatgtggctccatggatcactaccgtaggcgctggtacactggatcgtgacttccccgcatacgtggcgctcggaaatggactcaacttctccggcgtttcgctttaccgcggtaacgctttgccggattcttctttgcctttggtttatgcagggaatgtgagtaatgg

SEQ ID NO: 203054 - DNA, 147 bp, Glycine max
ctcgagccgatttgaatgggacacaaattgcacataaagctggcgcattatctgtattttaccggtgtaccacttttttactgatgagaattgaacttaattagaaattaaattgcacaaaaagcttcagaattgtcctatttattt

SEQ ID NO: 203055 - DNA, 275 bp, Glycine max
gaaaggcgatggacctcggaacctatgaagtgccagaaggagtggacattctaggaagatacgatgcagagtttgcaaaaatcctcacaaaagacgctttgaaattcgttgctgagctgcaacgtgagttcaggagcgatatcaagcatgcattagagaagctaccagggcacaagaagacagaggaggccacagctactactcctcctccaccaccacctgttgcatcattggagcatggtgaaggtgctcatcatgaaggagaggccaaggag

SEQ ID NO: 203056 - DNA, 281 bp, Glycine max
gcaacacaagaacactctcttgaacattcatggatccagtgagcgtgtggggtaacacgcccttggcgacggtggatcccgagatccatgacctcatcgagaaggagaagcaccgccaatgccgcggcatcgagctcatcgcctccgagaacttcacctccttcgcagtcatcgaggccctcggcagcgccctcaccaacaaatactccgagggcatgctcggtaaccgctactacggcggcaacgaattcatcgaccagatcgaaaacctctgccgctca

SEQ ID NO: 203057 - DNA, 270 bp, Glycine max
actcgagccgaatcggctcgagcaacaaggtgctctgctcgttcaatcctctctcatacctactggctcctcctccggtgaacgagggtgagaagaggagttagcaagcaatttttgtttcttttgggagttgggacccctcactcacatggacgcatcaacggctttaatgatcctatccgcaatagcggcctatttaatatggttcaccttcgtcactcgctccctaaaaggtcaacgtgtctggcccctattcggcagcctccctgg

SEQ ID NO: 203058 - DNA, 285 bp, Glycine max
accaccccttcttccttttcatcaggtttattccttttcttttggttcaattttgctgaatggagagtgcaagaatcagcaaatggttaaatcttctagtttgtgtactgctattgcttaaggcagaaggatctcttgttccattgactttggtgaagaatgcagaatcaaaaggagctgtttgtttggatggaagccccccagcataccactttgacaacggatttgaagaagggattaagaactggattgttcacattgagggaggaggatggtgcaacaatg

SEQ ID NO: 203059 - DNA, 241 bp, Glycine max
cggctcgagtcgccctcaaactcctcttgttttgcccaagattcaatctttgcgcaacgaaactagagctattccagttaccaaagacctgtgggataattcaattctgaaaagtgaaatcccagtccttgttatattctatgcaaattggtgcggcccgtgcaggatggttcaccggataatagatgagatcgcaacagagtatgctgggaaactcaaatgttttatagtcaacacagac

SEQ ID NO: 203060 - DNA, 283 bp, Glycine max
  unsure (1)..(283): unsure at all n locations
cttctctgtttttctaactctcttcaaaccttattcttccaagtncatggaaacatcattttcccttgctaggtggcttattgtgtgttattctgttttagggatttgccattggttctgctgcccttgtatcactggccctctttggtgcctttgtgagccgagctgctattacaactgttgatgtgttgactccaaaggttttcattggtttgattgtgggtgcaatgcttccttactggtttccggctatgactatgaagantgtgggaagtgctgcnct

SEQ ID NO: 203061 - DNA, 274 bp, Glycine max
  unsure (1)..(274): unsure at all n locations
caagacctggtgtgtgggagtacctganagtgaatgtgcacgctcttgttnttgaggagttgcaacctgctgagtacctgcacttcaaggaagaacttgttgacggaagttctaatggcaactttgtgcttgagttggactttgaaccattcaatgcagccttcccccgcccaactcttaacaanacaattggaaatggtgtgcaggacctcaaccgtcacctttctgccaaactcttccacgacaaggnagagctcacacccattttggagtt

SEQ ID NO: 203062 - DNA, 280 bp, Glycine max
gctccttctctcatcactcatctatggctacctttccctcccctccttcaccatcttcttcttcttcaattccgtctccaagatctagaatgttttactatgctggaagtgaagaccactatgaggagcctcacttcctccaagcttgttttctttgcagaaaaccactaggccaaaatcgtgacatcttcatgtacagagggaacacaccattttgtagcaaagagtgcagacaggagcaaatagagattgatgaggcaaaggagaaaagttggaagct

SEQ ID NO: 203063 - DNA, 214 bp, Glycine max
agagaatggctcccaagggtttaatctttttggctgtgttatgcttctcagcactgtcactgagtcgttgtcttgcggaggataatggacttgttatgaacttctacaaggaatcatgccctcaggctgaagacatcatcaaagaacaagtcaagcttctctacaagcgccacaagaacactgctttctcctggctcagaaacatcttccatga

SEQ ID NO: 203064 - DNA, 280 bp, Glycine max
gtgggaaataggtattcctgatagatccgctgcagaattttatgctcctgatcccagtccacaacatattaataagctttttatcaaccatccagacaggttcaggcagtatggattgtgggataggtattcagaattgtatcctgatgcagatttggtttacacaattggtgttagtgactatacgaaggattggttttatgcacaggctccgaggaaaaaagtggataacactcttcaaggaacaacttggcaaatcaagttcgaaatctgtagtgtt

SEQ ID NO: 203065 - DNA, 272 bp, Glycine max
cggctcgagtcgccctcaaactcctcttgttttgcccaagattcaatctttgcgcaacgaaactagagctattccagttaccaaagacctgtgggataattcaattctgaaaagtgaaatcccagtccttgttatattctatgcaaattggtgcggcccgtgcaggatggttcaccggataatagatgagatcgcaacagagtatgctgggaaactcaaatgttttatagtcaacacagacactgacatgcaaattgctgaggactatgaaa

SEQ ID NO: 203066 - DNA, 279 bp, Glycine max
ctcgagccgtgaagagcgaagagaatggctcccaagggtttaatctttttggctgtgttaagcttctcagcactgtcactgagtcgttgtcttgcggaggataatggacttgttatgaacttctacaaggaatcatgccctcaggctgaagacatcatcaaagaacaagtcaagcttctctacaagcgccacaagaacactgctttctcctggctcagaaacatcttccatgactgtgctgttcagagttgtgatgcttcactgttgctggactccaca

SEQ ID NO: 203067 - DNA, 153 bp, Glycine max
aaagaacacaagaggcttcttgctcgaaaatcaattattgagaaaaggaaagaagaacaagaacgacagcttcttgaaatggaacgggaggaggagtcgaagaggctaagactgctgaaaataacagaagaagcggaacaaagaaggcttgcc

SEQ ID NO: 203068 - DNA, 276 bp, Glycine max
  unsure (1)..(276): unsure at all n locations
tggtagctgatgttcatcgtacgttgctttatggaggcatctttttgtaccctgctgacaaaaaaagtccaaatggaaaacttcgtgtcctgtatgaagtcttcccaatgtcattcttgatggaacaggcaggaggacagtctttcangggcaaggaacgggnncttgattnngtnccaaggagtngcangagggatctcccatattcctgggaancaagaagantttgggggaaaaaaaggnntttaacccttttgggggganaaaaaanaattt

SEQ ID NO: 203069 - DNA, 210 bp, Glycine max
atcaaagaagctttggaaagggaatgcccaggagttgtatcctgtgctgatatcctcgttctctctgccagagatggcattgtttcgctaggaggtccccatatccctcttaaaacaggaagaagggatggtagaaggagcagagccgatgtggtagagcagttcctcccagaccagaatgaatcgatttctgcagttcttgacaagttt

SEQ ID NO: 203070 - DNA, 229 bp, Glycine max
ctaaattactgtgtttttcctccctattcaagtttgagagcgaagttatatagatttgcttattcactagagagaaagatggaaagtagtgaatatcatactctacacattttcttcttccccttctttgctcatggtcatgtgataccaacccttgacatggccaaattatttgctgaaaagggtgtgaaggccattatagtcaccacacccctcaatgcacctttca

SEQ ID NO: 203071 - DNA, 188 bp, Glycine max
gaatcacttagttgaattgaattatcttcaaaatgagagaaatccttcatgttcaagctggtcaatgtggcaaccaaattggaggcaagttttgggaggtgatgtgtgatgaacatgggattgatgccactggaaattacgtaggcaattcgcatcttcaacttgagagggttaacgtgtactacaat

SEQ ID NO: 203072 - DNA, 273 bp, Glycine max
aagagaatggctcccaagggtttaatctttttggctgtgttatgcttctcagcactgtcactgagtcgttgtcttgcggaggataatggacttgttatgaacttctacaaggaatcatgccctcaggctgaagacatcatcaaagaacaagtcaagcttctctacaagcgccacaagaacactgctttctcctggctcagaaacatcttccatgactgtgctgttcagagttgtgatgcttcactgtggctggactccacaagaaggagcttg

SEQ ID NO: 203073 - DNA, 226 bp, Glycine max
aaaatcagttctcttctgcctgcgctctttcgcttcctgcgaatctttccgagaatcgagtcacagagtagagcgaaatcggcgtagagatacaaaaatgccaaaagtaaagacaaatcgtgttaaatacccagagggctgggaattgattgagcctacactccgtgaacttcaagcaaagatgagggaagctgagaatgatccacatgatggcaaaagaaaatgt

SEQ ID NO: 203074 - DNA, 273 bp, Glycine max
gttcaactgggatgaaaatggtgttttcatttatacaacactaaatcacatcaaatattgtcttcccaatggagataatgggataataaagacattggacattccaatttatatcacaaaggtctctggcaacacaatcttctgcttggatagggatggaaagaacagatcaataattattgatgctactgaatatatttttaagctttccctcttgaagagaagatatgatcatgtcatgaacatgataaggaactcacagctttgtgggca

SEQ ID NO: 203075 - DNA, 277 bp, Glycine max
agttctgccaagtaaagttgatccattggtcaatctgatgaaagttgagaaggttcccgattctacttacgacatgattggtggtttagaccagcaaattaaagaaataaaagaggtcattgagttaccaatcaaacatcctgagcgctttgaaagtcttggaattgcacaaccaaagggtgtcctgctctatgggccacctggtacaggaaaaacattgttggctagggcagtggctcatcatactgactgtacattcatcagggtgtctggttct

SEQ ID NO: 203076 - DNA, 290 bp, Glycine max
gctatcggctcgagggcagccaaaacatctaccaacggcactcattattctcgctctcgccccgagtacattccaaaccgcatccccgattcgcattatgtccgcatcctggacaccacgcttcgcgacggcgagcaagcccccggagcctccatggtttccagccagaagcttgctcgccagctcgcgaagttggcgtcgatgtcatcgaaggaggctttccttcagcgtcgcaggaagacttcaatgctgtcaagatgatagcacaagaagttggcaacaactgtgat

SEQ ID NO: 203077 - DNA, 276 bp, Glycine max
ggcgttcgagtaccaagacacccctgtccgagaaatcaagcccaagaaccggagaatcatgggtgctggaggccctgatgacgaggacaataggtggccaccatggctgaaacctcttctcaaagagagcttctttgttcaatgcaagcttcacgctgattcgcacaagagcgagtgcaacatgtattgcttagattgtatgaacggtgctctctgctctctctgcctcgcttaccacaaagatcaccgtgctattcagataagaaggtcttcata

SEQ ID NO: 203078 - DNA, 273 bp, Glycine max
cacagttatactctctctctctcactttgatcactgatctcatctcaattttcagatatgtcgacatctgataagccagaagaggtggaaaggggtagcaaggatgaaaagcacaaggaagatgatcaagaggaggggaagggtggattcattgagaaggtgaaggatttcattcatgacattggtgagaagattgaggaagctattgggtttgggaagccgagtgccgatgttactgcgatacacattccatcaattaatcttcacaaagcg

SEQ ID NO: 203079 - DNA, 273 bp, Glycine max
cagctgagaaaaaaaaatggatgtagagaaagccttccacatgactggaggagctggcaaaactagctatgccaagaattcctcactacagaagaaggaatctgataaagtgaagcacataatcatacaaacagttgaggacttctaccttgcaaccactccaaagagcataggcattgctgatttgggctgctcctctggaccaaacaccctatcaatcatcaaagatatctttcaggccatccaaggcataagccacaggatcatgcacca

SEQ ID NO: 203080 - DNA, 229 bp, Glycine max
agagaatggctcccaagggtttaatctttttggctgtgttatgcttctcagcactgtcactgagtcgttgtcttgcggaggataatggacttgttatgaacttctacaaggaatcatgccctcaggctgaagacatcatcaaagaacaagtcaagcttctctacaagcgccacaagaacactgctttctcctggctcagaaacatcttccatgactgtgctgttcagag

SEQ ID NO: 203081 - DNA, 180 bp, Glycine max
cttaatttctctctgccttgctcatttacacacctctccaaccttacactttcagctttatttgaatccctctctctcctttccaaatggccagcgttgaggttgcacatcaaacaccaacaacagttccagaaaatgaaacaaccgaggtaatcaagacccaggaaacaaccccggaac

SEQ ID NO: 203082 - DNA, 277 bp, Glycine max
  unsure (1)..(277): unsure at all n locations
attctctatatatgccttgggaccatgttaatatgacacccacatttagaggtagaggcctatctataaggggtgagggtcctttaaggaatgtgaggagccgttctgcacttgatttggaatccaacctggctaggacccatttatcaaatactcatccacacaactcatactcnactggtctaccaattgaccattctaacatggtcgatctttcaactcaaacttctggcacttggaccagggattggagcccaatngngtatatgcccccctc

SEQ ID NO: 203083 - DNA, 274 bp, Glycine max
cgttccgtcgttgacgatggcgtttcgggtgcgaaccctgacctccgctctctctttcttctctctctcttgtccatcgcttccgccaatgtcttcttcgaagagcgtttcgatgacgggtgggaaaatcgatgggttaaatcagattggaaaaaagatgagaacgtggctggggagtggaaccacacctctggtcaatggaatggagacgctaatgacaaaggtattcaaaccagtgaggattacagattctatgctatttcagctgagtacc

SEQ ID NO: 203084 - DNA, 164 bp, Glycine max
tatggagcttgggatgaaaatggtgtgttcatttatacaacactagatcacatcaaatattgtcttcccaatggagataatgggataataaagacattggacattccaatttatatcacaaaggtctctggcaacacaatcttctgcttggatagggatggaaa

SEQ ID NO: 203085 - DNA, 270 bp, Glycine max
gggagaatctttgtggtggagcttgagggcaggtcttatagatgcaagttctgcagaactcacttggcccttgcagatgatctcatctccagggcctttcattgccggagggggaaagcatacctattcaataatgccgtgaacttcacaattggaacaccagaagaaagaatgatgctttcaggattacatagtgtcgcagatattttttgctgttgctgcggtcaaataattggctggaaatatgaatctgcacacgagaagagccaa

SEQ ID NO: 203086 - DNA, 271 bp, Glycine max
gtaattccagagccagaagtgaagtgtgtccaaagagacaaaagcgacgagtgcctcattctagccagtgatggtttatgggatgtcatgacaaacgaagaagcctgcgaaattgcacgaaagcggatccttctttggcataagaagaatggcaacaactcagtatcatcagaacaaggccaagaaggagttgatcctgcagctcagtatgctgcagagtatctttctagacttgccctccaaagaggaaccaaagataacatctctgtca

SEQ ID NO: 203087 - DNA, 271 bp, Glycine max
caaaaaatgttcgggaggcactttgagattgatgatgaacttgtaagccatatttcacggagatctatcgatatactcaaagctaattatcgggatgaactaaatatggaggaatggaggttggttgtgaaattgaagaatcttttcaagatacaatgaggagacttgatgtgtgggcattcatttaagaaaaaacaaggttttagtgaaatgtttggttttatgcaacactttgaaggatttgttgagcatgcggttggatccaccagag

SEQ ID NO: 203088 - DNA, 242 bp, Glycine max
gcgaagagaatggctcccaagggtttaatctttttggatgtgttatgcttctcagcactgtcactgagtcgttgtcttgcggaggataatggacttgttatgaacttctacaaggaatcatgccctcaggctgaagacatcatcaaggagcaagtcaagcttctctacaagcgccacaagaacacggctttctcctggctcagaaacatcttccatgactgtgcatgtcagagttgtgatgc

SEQ ID NO: 203089 - DNA, 286 bp, Glycine max
attaattgcaagaatggcacttcgttgcttggtgatgtccctttctgttctcttcactcttggtcttgcgagagaaagccatgccagagacgaagatttttggcatgctgtttggccaaacactcccattccaagttcattgcgagatcttctaaagcctggccctgcaagtgttgaaatcgatgatcaccctatgcaaattgaagaaacacagtacccgaaaaccttcttctataaagaagaccttcatccaggcaaaacaatgaaagtacaattcagcaagcct

SEQ ID NO: 203090 - DNA, 260 bp, Glycine max
tcgatcttcgatcttcgtcgctgaaaatgagatagtgcatttcaatccacatcggccaggccggattcaggttggaaacgcctgctggggagctttactgcctcgaacacggcattcagcctgatgggcagatgccaagtgacaagaccgttggtggaggtgatgatgctttcaacaccttcttcagtgaaactggggcaggaaagcacgtgccccgcgcgatttttgtagatcttgagcccactgtgaagtgatgaggt

SEQ ID NO: 203091 - DNA, 277 bp, Glycine max
ctcgagccgcaagcagtgggaggaggctcgggactctgaccgcgtgcctgttgaagatcagaccgcgattataggaagtggcttggttaagggagaccaccggatgccgtagcggagacgagtcttcacagggcaattgtcactgcttatggacccgaacctgggtgatctatccatgaccaggatgaagcttgggtgaaactaagtggaggtccgaaccgactgatgttgaagaatcagccgatgagttgtggttaagggtaaaatgccactcgga

SEQ ID NO: 203092 - DNA, 308 bp, Glycine max
gaatgcggctcgagattggttctctctctgctctctaccaacctatccaatatcccactgctcgcagagacggattccgtccctcgacgtatttcacgggcgtcaagattgctgatccttaccgatggctggagaatccggaggcagaggaagtgaaagagttcgtgcagaaacatggttgcgctgacggattcggtgctgcagaggtgcgactgtaggaccaaactggccgagaagataaccaagttgtttggtaatcctcgttacaacgctcctttcagacgaggcgataataagtatttttactt

SEQ ID NO: 203093 - DNA, 187 bp, Glycine max
cgtacggatgcaacctacagcatcctgattgataatgtggagaagcacaactggtagtctctactctgattgggatcttctacctccaaagacaatcaaggatcatgaggctaaaaaaccagaagattgggatgacaaagaatatattcctgatcactgaggataagaaaccaagagggtatgatga

SEQ ID NO: 203094 - DNA, 278 bp, Glycine max
gcacgtgtgtctttagcagtgagtgttatatcgggttgcattggaggttccatcatggtggctgctagaggggtttgggggaatttgtttagtcatcaaaaaggggttgtaaagggtgtggagaaggcaatgttgctgatggctctggtcgaagtgtttaattttcctgtgacggtttgtggaggcatagtacgaggaactggacgaccctggctaagcatgtatgctaagtcttggtgggttctatttcctgacactaccattgggtgtggtttttg

SEQ ID NO: 203095 - DNA, 283 bp, Glycine max
aaggaatcaaggtgcttgtgtatgctggagaagaagatctcatatgcaactggctcgggaattcaaggtgggttaatgcaatggagttgtctggtcaaaaacaatttgggggcgtctggtacagtcacatttttagttgatggtgcagaagcaggaacgctgaaaagccatggacctctctctttcctcaaggtatacgaggctggtcacatggtcactatggatcaaccaaaagctgcacttgagatgctaggaagctggatgcaaaggaaactgacaatga

SEQ ID NO: 203096 - DNA, 274 bp, Glycine max
tctgaatctattgaatcaacaatcatgtcggacgaagagcaccatttcgagtccaaggccgacgcccggagcctccaaaacctaccctcagcaagccggtaccatccgcaagaacggctacatcgtcatcaaaggccgcccctgcaaggttgtggaagtttcgacttccaaaactggaaagcacggtcacgctaagtgtcactttgttggaattgatattttcactgccaagaaacttgaggatattgtgccctcttctcacaactgtgatgtt

SEQ ID NO: 203097 - DNA, 296 bp, Glycine max
attgtcagaggaaaatggcgggtacggtttcgacttgtttcttacttagtgtttgcctcatttctatccattagtcactttcaagtctccgctgaggaatcctcggagaaggagttcgtactcacattggatcactctaactttcacgacactgtcagcaagcacgatttcatcgtcgtcgagttctacgccccatggtgtggtcactgtaagaagcttgctccggagtatgagaaagctgcttctatcttgagtagtcatgatcctcctattgttttggctagagtagatgccaa

SEQ ID NO: 203098 - DNA, 260 bp, Glycine max
gagacgcttttagctttctccgccccttttttgttgttccttcttctcgttcgtcgctatgtgatctctctctgcaacaatgtccgtcgagaaagagagagagacccaggtttacttggccaagcttgccgagcaggccgagagatacgaagaaatggttgagtgtatgaagaaagtagcaaaacttgatcttgatctgactgtggaagaaaggagccttctctcagtgggatacaaaaatgtgattggtgaacgaaggg

SEQ ID NO: 203099 - DNA, 277 bp, Glycine max
aagagccagtaccttgatgatattgccatcttgactggaggtactgtaatcagagaagaggttggccttactttggacaaagctgggaaagaggttctcggatatgcctccaaggtggtgctcaccaaggatacaaacacaattgttggtgatggaagtacccaggaagcagtgaacaagagatttgcacaaattaggaacctaattgaggctgctgagcaagagtatgagaaagaaaagctgaatgagagaattgctaaattgtctggtggtgtgg

SEQ ID NO: 203100 - DNA, 279 bp, Glycine max
acaaattccgatttccaattcaaaaccctaactccgttcgaagcaccaaatcgtgatagcaccaaaggcagagaagaagccagcagagaagaagcccgcggaggagaagaaatcgacggtgggagacaaggctccggcggagaagaagccaaaggccggaaagaagcttccgaaggagggaggcgccggcggagaagggaagaagaagaagagagacaagaagagcgtggagacatacaggatctacatcttcaaggttctgaagcaggttcacctgac

SEQ ID NO: 203101 - DNA, 256 bp, Glycine max
tgctgaaagtggatgacagcatgtggtaaaaaactcaacaggaaatgatggagacagtcgtgcatccgaaactgcaaagcatgggactcaagctgttaaagattcagccattgaagttcctgaattacaagtggatgaactcaaagaaatcaccgatggctttggagaaagttctctgattggagagggatcctatggaagagtatattatggtgttctaaaagtgggaaggctgcggcattcaggaaattggatg

SEQ ID NO: 203102 - DNA, 266 bp, Glycine max
gtaagcactatagtaaaaaaaggacattcattcatctatggctacacttattgctcccagcaaccactctccccaagaagatgctgaagctctcagaaaggcttttgaaggatggggaactgatgagaacactgtcatagtaattttgggtcatagaactgtgtatcagaggcagcatatcagaagagtttatgaggaaatttaccaggaggatcttgtgaaacgcctagagtctgagatcaaaggagactttgagaaagcgtgta

SEQ ID NO: 203103 - DNA, 258 bp, Glycine max
aaaccctaagccgacatcaccattcatccgatgagttcgagaggagcgaccgcggtgctatctcgtgccagcaggattcggtcgaagctgcaaacggcgctggaagccacagttttggaggtggacgacgtgtcgtaccagcacgcgggccacgccgccgtgaagggtagttccgacaaagaaacccacttcaacctcaacatcgtctcccccaagttcgagggccagagccttgtcaaacgacaccgtctcatctac

SEQ ID NO: 203104 - DNA, 274 bp, Glycine max
ttctgtgtttcttagaagaattaagatggctaccttgactgtacctccagttcctccttcccccagagatgatgccatgcagctttaccgtgcttttaagggatttgggtgtgatacaagtgctgttatcaatatacttgctcatcgagatgctacacagcgtgcctacatccagcaagaatacaaagcaatgtattctgaggaactttccaagcgcttagcttcggagcttagtggaaagttagagactgcagttctgctcatgtttgcatga

SEQ ID NO: 203105 - DNA, 260 bp, Glycine max
gcgagagaacaagaacataagggaaccacagcggcggtaacagaagaacaagcagagaatggggtcgagtgagaacgaagacggtgaagaaatcctctcggcaggtgatagagcgtcactactcgcgcatgaccctggacttccacacgaacaagaagcttctggaggaagtggcgataatcccgtcgaagaggctaaggaacaagatcgcggggttctcgacgcacatgatgaagcgcatccagaagggcctgtgcgcg

SEQ ID NO: 203106 - DNA, 284 bp, Glycine max
gctggtgctcctgcaacatcttctccacccaggaccacgccgccgccgctattgcacgcgacagtgccgcagccttcgcctggaagggtgagaccctccaggagtactggtggtgcaccgagcgcgccctcgactggggccccggtggtggacccgacctcatcgtcgacgacggtggtgacgctacccttctcatccacgaaggcgtcaaggccgaggagctctatgagaagaccggcgaactccccgaccccaactccaccgacaacgccgagtttcagatc

SEQ ID NO: 203107 - DNA, 288 bp, Glycine max
  unsure (1)..(288): unsure at all n locations
cactacactagcaagcacacacctttagcacaatcaccaatggcttcttccgacaggacgtatcccctggtaacccntccctgtaagctacggacttcctttctttggacccatgattgatcgacatgactatttctacaaccaaggacgcgacaagttctttgccgaacgaattaaaaagtacaactctacggttatacgaacacacatgccaccgggtcctttcatgtcctcacatcctagagtcatcgctctcctcgacggtgtctccttccccattctattcga

SEQ ID NO: 203108 - DNA, 285 bp, Glycine max
gagcgatttgcagatacttacaagatggagtgccctgcagcgattaccgctcgtggttcggtgtgctgccaccgtggagcatcgtgcaactgcggctgcctctgcttccacctctgccgctactgtggccgagtgtgttcagaattttattacttcaatggattccttgaaacttaacatggtggctgtggatcaggtgcacccattgctctcggacctttatgcttcgcttaataagttgacaatcctgccgcctgattttgaggggaaaaccaaaatgaaggg

SEQ ID NO: 203109 - DNA, 157 bp, Glycine max
gtctcttcctacttgaagaaagtaggatacaaccctgacaagattccttttgttcctatctctggttttgagggagacaacatgattgagaggtaccacaaaccttgactggtacaagggtacaactctgcttgatgcacttgaccagattagtgag

SEQ ID NO: 203110 - DNA, 251 bp, Glycine max
gttcaacaactgctgcaggacttctttaatggaaaggagctgtgcaagagcatcaatcctgatgaagctgttgcatatggtgctgctgttcaggctgcaattttaagtggtgagggcaatgagaaggttcatgatcttctcctccttgatgtcacccctctatctcttggtttggagactgctggcggtgtgatgactgtcttgatccctaggaacactacaattccaaccaagaaggaacaggttttctc

SEQ ID NO: 203111 - DNA, 271 bp, Glycine max
ctctctcttaattaaattaaaacaaaaaatgtgcgctgccatatccgaagtggaacaagaagagttgctcgaaaaattggaggtgttcaagatcaaaggcagggacaagcatggccgcaagatccttcgcattatcgccagattcttcccagcacggttggtgagtgttgaggttctgaaaaagtacctggaggagagggttttcccgaagctgatggggaagaggaaattcgcggtgctgtacgtgcacacaggcgtccagaggagcgag

SEQ ID NO: 203112 - DNA, 208 bp, Glycine max
agaaggtatgtttagaccagagagaggaggttagaaatcatgctttattatctctgcagaagtgcttgacaggtgccgacggcatttatctaccatatagcttgtggttacaatgttttgaatcttgtgatcttcactgtgcttgatgacctgcttgagattgcacagggacactctcagaaggactaccgcaacatgggaaggcaca

SEQ ID NO: 203113 - DNA, 275 bp, Glycine max
atttcaaatcccaacaaaaaaccaaagtaatctaacaaagtaagcacaatgagggagatattgcacgtgcaaggtcgggaatgcgggaaccaaatcggttccaagttctgggaagtgatatgcgacgagcatggcatcgaccccaccggaaagtacaccggcgacgaggcctccgatctccaactggagaggatcaacgtctactacaatgaagcctccggcggaaggtacgttccacgggcagtcctcatggatctcgagcccggcaccatgga

SEQ ID NO: 203114 - DNA, 283 bp, Glycine max
gctgcttttgatgtgaacttcccagagaaagaacttgcacaagttacatgtgattgtgaacgggcatattgggactcaatctggtgggatggatcaggcaatctctgtcatggccaagactgggtttgcagaactgattgatttcaacccaattcgtgcaacagatgtgcaacttcctgctggtgggacttttgtgatagctcattctttggcagagtctcaaaaggctgttactgctgccacaaattataataatagggttgttgaatgccatttggcttct

SEQ ID NO: 203115 - DNA, 277 bp, Glycine max
cggcgactcccgcgccgtcctctgccgcaacggcgtcgccatccctctccctccgatacagccggatctaccggcgaattactccgagtccaatccaagggagggcgcgtgatttactgggacggtccgagagtgcttggtgtgttagcaatgtctcgagccataggtgacaattatctgaagccgtacgtgatttcagaaccggaggtgatggtgacggagcggacggaggaggacgagtgtttgatactggcgagtgatgggttgtgggatgtgg

SEQ ID NO: 203116 - DNA, 285 bp, Glycine max
agtcaacccttcaccttgtccttcgtctccgtggtggcatgcagatcttcgtcaagactctcactgggaagaacataaccctaggaggtcgaaagctctgacaccattgacaacgtcaaggccaagatccaggacaaggagggaatccccccagaccagcaacgtctcatcttcgccggaaagcaacttgaggacgggcgcaccctcgccgactacaacatccagaaggaatcaacccttcacctcgtcctccgtctccgtggtggcatgcagatcttcgttaag

SEQ ID NO: 203117 - DNA, 302 bp, Glycine max
gacttccgctcgaggccttccaatttcttgatcagaacaaaagtgagtatattgagattgaggagctgacgaggccttatctggtgatcatgacacaaacagtgaagaagttatcactgcaattatgcatgatgtggacacagacaaggatggaaggataagttacgacgaatttgctacaatgatgaaggctggcacagattggagaaaagcatcaaggcagtattcgcgagagaggtttgccagtctgagcctaacgttgatgagggacgggtcattgcatttaaacaatgagaaacaat

SEQ ID NO: 203118 - DNA, 193 bp, Glycine max
attgctatgcaggagtttatggttcttcccgtgggagattcctctatcaaggaagccatgaagatgggtgtagaagtatatcacaatttgaagtctgtgattaagaagaaatatggtcagatgcagtaaaatgtggtgacaaagtggctttgccctagcatccaggaaacaaaggaggtttggaattgctgaa

SEQ ID NO: 203119 - DNA, 173 bp, Glycine max
aagagccagtaccttgatgatattgccatcttgactggaggtactgtaatcagagaagaggttggccttactttggacaaagctgggaaagaggttctcggatatgcctccaaggtggtgctcaccaaggatacaaccacaattgttggtgatggaagtaccaggaagcagtg

SEQ ID NO: 203120 - DNA, 268 bp, Glycine max
tgctgaaagtggaggacagcatgtggtaaaaaactcaacaggaaatgatggaaacagtcgtgcatccgaaactgcaaagcaggggactcaagctgttaaaattcagcccattgaagttcctgaattacaagtggatgaactcaaagaaatcaccgatggctttggagaaagttctttgattggagagggatcctatggaagagtatattatggtgttcttaaaagtgggcaggctgcggaaatcaagaaattagatgccagtaaacag

SEQ ID NO: 203121 - DNA, 96 bp, Glycine max
attaattgcaagaatggcacttcgttgcttggtgatgtccctttctgttctcttcactcttggtcttgcgagagaaagccatgccagagacgaaga

SEQ ID NO: 203122 - DNA, 202 bp, Glycine max
aggcgaaagactttaggtttggaattgggaattagggttgttcgcgtcacgaagatgatcgaggtggtgttgaccgatcgattggggaagaaggtgcgcgtgaagtgcaacgacgatgacaccatcggcgacctgaagaagctggtggcggctcagacgggcacaagagccgacaagatccgcatccagaagtggtacacca

SEQ ID NO: 203123 - DNA, 271 bp, Glycine max
tgaacatgaagctgatgatgatagggacattgagcttccacatgtggaccatggctatgtaaagaataggtcattgccactttctaccatcatagacatactcaagcagaaaactgggaaaaatgatatagatgttgggagattgagactctcgctttatgacatatctggggaagatgctagccctaaagtgaagaagttcatgaagggtatcttgaatagactccaacaaggggatggtggaagtggaatacaaggtggaatcttgggg

SEQ ID NO: 203124 - DNA, 271 bp, Glycine max
attaattgcaagaatggcacttcgttgcttggtgatgtccctttctggtctcttcactcctggtcttgcgagagaaagccatgccagagacgaagatttttggcatgctgtttggccaaacactcccattccaagttcattgcgagatcttctaaagcctggccctgcaagtgttgaaatcgatgatgaccctatgcagattgaggaacacagtacccgaaaaccttcttctataaagagggcttcatccaggcaaaacaaatgaagtaca

SEQ ID NO: 203125 - DNA, 249 bp, Glycine max
agtagacatccccatcacactagtttctgggaagaacacaattgatctcctgagtttgaacggtggggcttcagaacttatggagctttgtttgacacatggggtgcggggatcactggccctgtgatattgaaatgtttgaagaatggcagcaatgttgatctctcctccaagcagtggacatatcaggttggccttaaaaatgaagatttaggtctatctagtggctgttctggacagtggaatcac

SEQ ID NO: 203126 - DNA, 277 bp, Glycine max
ctcgagccgctcgagccgatgaactcgtctccgtcttcttcccagttaccttcatcaagcgtagatttgacacgtttaatagtttgcagcgcttccgcccatttgaatgcttgcaagggaacccggttccggcgttcctgtccaagactttcgaactcgtcgacgatccctcgctggatccgatcatatcctggggctccaccggtgttagcttcgtggtgtgggatcctaccctgtttgcaagacacgtcttgccgaggaatttcaagcataacaa

SEQ ID NO: 203127 - DNA, 288 bp, Glycine max
acactgcacaattgcctcatgaatcatcattagtcagggtttatcctctaagaaaataaacatactatagcaatgagtgcgtccaggttcatcaagtgtgtcactgtgggtgacggtgccgttggcaagacttgcatgctcatctcctacaccagcaacacttttcctacggactacgtgccaactgtctttgacaatttcagtgcaaatgtcgttgtggatggaagcactgtgaatcttgggttgtgggatactgctggccaagaagattacaatagattgagaccc

SEQ ID NO: 203128 - DNA, 290 bp, Glycine max
cggctcgagttcaacttgctccctcagaagcgaagaagaagccacagagaactagtctcctactctcacccgcaagaaaaaaatggcatctcacatcgttggatacccccgtatgggtcccaagagagagctcaagttcgctctcgagtctttctgggatggcaagagcagcgccgaggatttgcagaaggtgtcttctgatctcagggcatccatctggaagcagatggctgatgctgggatcaagtacatccccagcaacactttctctcactatgaccaggttctcg

SEQ ID NO: 203129 - DNA, 287 bp, Glycine max
ctcttcttctcttgcggccagggttttagcgcacttcttctagatttaaggaagatgggtaaggaaaaggttcacatcagtattgtggtcattggccatgtcgactctgggaaatccactaccactggtcacctgatttacaagcttggaggcattgacaagcgtgttattgagaggtttgagaaggaagctgctgagatgaacaagaggtctttcaagtatgcctgggtgctggacaaacttaaggctgagcgtgaaagaggaatcaccattgatattgctttgtg

SEQ ID NO: 203130 - DNA, 255 bp, Glycine max
cgaggttaagtgggctcagaggcttgacaaggtctatatcacggtgcaattggctgattcaaaaaatgcaaaagtggatcttacgccagatggtatttttaccttctccggtagtgctggtgctgaagaccatcagtatgagctaaaactggagctctttgataaggttaacgttgaggagagcaaaattaatgtaggagagcgagcatattcattgtagtgcagaaggcagaggatggatggtggaaagggtac

SEQ ID NO: 203131 - DNA, 277 bp, Glycine max
acccgcgaacatcctagtaaactccgaaggggatgttaagattgcagacttcggagtcagcaaactcatgtgccgctcgctcgaagcgtgtaactcttatgtaggcacgtgcgcgtacatgagtcccgaccggttagacccggaagcgtatggcgggaactataacggttttgctgcggatatttggagtttgggtttgaccctatttgaactctatgtgggtcacttcccatttcttcaagcgggtcagacacccgactgggctacccttatgtgt

SEQ ID NO: 203132 - DNA, 286 bp, Glycine max
caccactgttcatcacgtgagccaccaggttaacaccggtggtctctcgaccaaacccactgtcagggttttcaccaaagctaatcccaatttctctctcaccattcgtcgcggccaagtcattctcgctccctccgatcccaccaatgagtaccagcattggtataaggatgagaagtacagcacgagggtgaaggatgaagaggggtgccctgctttctctttgatcaacaaggccactggtgaggccttgaagcactccatcggtgctactcatccagtgcgg

SEQ ID NO: 203133 - DNA, 168 bp, Glycine max
taagattttataatttaacttttttggggtgtgattaaaagagaagctagctaaaaaaaatgggttcagcatccgaaagtgtttgcgttacaggagcttctggtttcatcgggtcatggcttgtcatgagactcatcgagcgtggctacaccgttcgagccaccgtac

SEQ ID NO: 203134 - DNA, 266 bp, Glycine max
aaacaacaatctcttcccttagtaaaataaaaataaaaatccttctttcttctgaatcttcaatcttgcattgatccatggcagccaaaacatctaccaacggcactcattattctcgctctcgccccgagtacattccaaaccgcatccccgacacgcattatgtccgcatcctggacaccacgcttcgcgacggcgagcaagcccccggagcctccatggtttcaagcaagaagcttgctcgcaagctcgcgaagttgggcgtc

SEQ ID NO: 203135 - DNA, 285 bp, Glycine max
cagcctctcttcaggtcaccatctagactgcaatcatggctgatggaccacagcatccatcagttgttcagaagctagctggacagtcttacctggtgtccaggcttagccccaactttaactctaggaattattctgcaactggttcttacgtcaataccggaatgcactcgcctgggttggctgttgtgtcacctgtatctccagttactgtgcatgctccagcagagaaaggagtgagtggatttctagtggattttctgatgggtgaagtatccgctgctt

SEQ ID NO: 203136 - DNA, 286 bp, Glycine max
taaagacttgcttccaagatggttctgctagagaagctctgggatgacgttgttgctggccctcaacctgagcgtggccttggcaagctcagaaaactcaccaccctcaaaactattgatgaaggagacagtagcaagctgcagaagacgttgtcgatgccgtcgacaccgacaaccccgatgactcccacgactccaacgacaccgggatcagcgcgtaaagctgacaacgtttggaggagcgtcttccatcctgggagcaactccgccacaaagaccatcggtg

SEQ ID NO: 203137 - DNA, 286 bp, Glycine max
cttgaagccctcaaaggctcaaacacaaacactaacactaacactagcattcactcaagagatcaataatgggatctggggccggcaatttcctcaaggtgcttctcaaaaacttcgatgtgcttgctgggcctgtcattagtcttgtttatcctctatatgcttcaattagggcaattgagagcaagtctcctattgatgatcagcagtggctcacttactgggttctctagtccttgatcaccctctttgaacttacttttgctaaagtccttgagtggattcc

SEQ ID NO: 203138 - DNA, 282 bp, Glycine max
tttgctcccagcactgagcttaaccgagcttcacaaagatgaatcgggaaaaattgatgaagatggccggttcggttagaactgggggaaagggcaccgtgagaagaaagaagaaggctgtccacaagacaacaaccacagatgacaaaaggcttcagagcaccctgaagagaataggggtgaatgccatcccggctattgaggaggtcaatatctttaaggatgacgtattatccagtttctaaatcccaaagttcaagcatccattgctgctaatacttg

SEQ ID NO: 203139 - DNA, 242 bp, Glycine max
gcgaagagaatggctcccaagggtttaatctttttggctgtgttatgcttctcagcactgtcactgagtcgttgtcttgcggaggataatggacttgttatgaacttctacaaggaatcatgccctcaggctgaagacatcatcaaagaacaagtcaagcttctctacaagcgccacaagaacactgctttctcctggctcagaaacatcttccatgactgtgctgttcagagttgtgatgc

SEQ ID NO: 203140 - DNA, 276 bp, Glycine max
taactcgagctcgagccgctcgagccgttcttcttttgttgtttgtgtgtttgccttttctctcacctgacacatgtcaccctgcggtggtaactgtggttgcggaagcgcctgcaagtgcggcaacggctgcggaggctgcaagatgtacccagacttgagctacaccgagtcaaccaccaccgagaccttggtcatgggagtggcaccagttaaggctcaattcgagagtgctgaaatgggtgttcccgctgagaacgatggctgcaaatgtgg

SEQ ID NO: 203141 - DNA, 245 bp, Glycine max
cacctttgttcactcttcttctcttgcggctagggttttagcgcacttcttctagatttaaggaagatgggtaaggaaaaggttcacatcagtattgtggtcattggccatgtcgactctgggaaatccactaccactggtcacctgatttacaagcttggaggcattgacaagcgtgttattgagaggtttgaaaaggaagctgctgagatgaacaagaggtctttcaagtatgctggggtgct

SEQ ID NO: 203142 - DNA, 217 bp, Glycine max
cgaaaattctcagtttgcagagaaaatctgaatcatgtcgtggcaagcgtatgtcgacgatcaccttctgtgtgacatcgaaggtaaccacctcactcacgctgctatcatcggccaagacggcagcgtttgggctcagagtaccgacttccctcagttcaaacctgaggagataactgccatcatgaatgactttaatgagcctggatcacttgct

SEQ ID NO: 203143 - DNA, 166 bp, Glycine max
gtgatttcagtgagtgatcggtgttcacttgatctcatcataatcgtcagcgtcaattgaagaagatgccgatcagaaacatcgccgtcggaaggcctgaagaggcgactcaccccgacacgttgaaggcggctttggctgagttcatctcaaccttcatcttcgt

SEQ ID NO: 203144 - DNA, 274 bp, Glycine max
taagaaaatgtggcttgtgcagctctcaaccccatttctgaacggacatggtcattccaccacccttctctccaagcacagttcggcggtgactcagacccactgggccccaccgagtttcctgcctcaaatcaatgcgatgaagacaatgcaggggagagtggtgtgctccaccagcgacaagacggtggcagtggaggtggtgcggctggcccctcacccaaagtacaagaggcgcgtgaggaagaagaagaagtaccaggcccacgacccc

SEQ ID NO: 203145 - DNA, 286 bp, Glycine max
attaacctcactcaaactcgggatcacagaaaccaacaacagttcttgcactgaggtttcacgatgttgctggaacttgcacttggtttgtttgtgttagctttgtttctgcacttgcgtcccacaccaagtgcaaaatcaaaagcacttcgccacctcccaaaccctccaagcccaaagcctcgtcttcccttcattggccaccttcacctcttaaaagataaacttctccactatgcactcatcgatctctccaaaaagcatggccccttattctctctctcct

SEQ ID NO: 203146 - DNA, 246 bp, Glycine max
ctcgtaaaggggttgtagatactgctgtacgaacatcagatgctggatatcttacacgcagacttgttgaagtggttcaacacattgttgtacgtcgaacggattgtggtaccattcaaggaatttcggtgaatacccagaatggaatgatgccggaaagaatatggatacaaacattaattggtcgtgtattagcagacgatatatacagaggttcacgatgcattgccgttagaattcaggata

SEQ ID NO: 203147 - DNA, 286 bp, Glycine max
atgtggtgagacttcactttattttttttccaattcccttcactcctaaactttattttaggagggaagggaggggcaatggagatgcacacacaacctcataagaaacaccattttggtgtacaacattgttgtcttattagcctcttcatcttcaccttcttcactactacaaccacccaagcttttgattatgctgatgccctttcaaagagtcttctctactttgaagcacaacgctctgggaggataccttacaatcagcgtgtcacttggcgtgaccatt

SEQ ID NO: 203148 - DNA, 280 bp, Glycine max
caacgcagcagcagcggcagcttcatctgtttttctgcatcggcgtgaacaatggcgacgtacgctgcgatgaagcccaataagcctggcttggaggagtcccaagaacagatccacaagataaggatcaccctttcctccaagcacgtcaaaaatctcgagaaggtttgtggggacttggttcgtggtgcaaaggataagaggctcagggttaagggacctgtcaggatgcccactaaggttcttcacatcactaccaggaagtccccctgtggtgaag

SEQ ID NO: 203149 - DNA, 280 bp, Glycine max
agtttgggattggagggattgacgctgcgtctcttcctcttctctttcgatccatccctcattcctaatcctccaatccaaccacctcagcctcacactcacatatacacatatctgaacgcgtatcgtccctcctatggcttcaaagcgcatcctcaaggagctcaaggacttgcagaaagacccaccaacttcttgcagcgctggtccagtagctgaggacatgttccattggcaagcaacaataatgggtcctgctgatagtccttatgctggaggt

SEQ ID NO: 203150 - DNA, 279 bp, Glycine max
gagaagagagaaaacggcactgcagccgtagaaggaaaaccgaccatggtgcacgtctccttttacaggaactatggtaagacgtttaagaagccccgccgtccgtacgagaaggagcgtctagacgcggagctgaagctggtgggggagtacgggctgcggtgcaagagggagctgtggagggtgcagtacgcgctcagccgcatccgaaaaaacgcgcggaatctccttaccctcgaggagaagaacccgcgccggatcttcgagggcgaggctctt

SEQ ID NO: 203151 - DNA, 286 bp, Glycine max
gcagagccgatgtggtagagcagttcctcccagaccacaatgaatccatttctgcagttcttgacaagtttggtgccatgggaattgacacccccggcgtagttgcattgcttggagcacacagtgttggtcgaacccattgtgtgaagttggtgcaccgtttgtacccagagattgatccagctctgaaccctgaccacgtccctcacattctgaagaagtgccctgatgccattccagaccctaaggccgtgcagtacgtgagaaacgaccgtggcacccccat

SEQ ID NO: 203152 - DNA, 241 bp, Glycine max
cggcatccatccataccaccagcaatgggctccggcggcagcgctcctcctcctcctcctccggcagccgcgggcggtcctcctcctcacccaggggaggaggttcgaactatattcataactggtcttccggaagacgtgaaagagagagagctgcagaatctgctgagatggttgcccggtttcgaagcatctcaattgaatttcaaagctgagaagccaatgggttttgcactcttct

SEQ ID NO: 203153 - DNA, 189 bp, Glycine max
tttacaacttcgtagcaatgcatattcttgactcttgcatgcacttcaatccttcgtagcattaatgatgtggccaagtcatcatgagcatcatacttatttctttgtgaatgtaaatcaaaattataagagagaaaatggtgcttttgtactacagattactataaataaaaaacttttatggttttc

SEQ ID NO: 203154 - DNA, 283 bp, Glycine max
ctaaactgtcttctgccttttcaagaccaaaacaaggaaactaaaaatggatcaatcccagaatgcgagccatcaagctggccaagccatgggacaagctcgggagaaggcaagcaacatgatgaacagtgcaggcaatgctgctcaaaatgtcaaagaatcctgccaagagactggccagcaaatgcagcaaaaggcacaaggggctgctgatgctgccaagaatgcagttggggctaacaaatgaatctagttgactggatatccctcaaagtggctattt

SEQ ID NO: 203155 - DNA, 280 bp, Glycine max
atgggtgtcgcattctccgcaaaggttgtggtgaggattgtgccataaggccatgcctcgagtggatcaacactcctcaggcccaagccaacgctaccctcttccttgccaaattctatggtcgtgctggcttggtcaacctcatcgattctgccccacaacacaatggacctgctgtattcaagtcactattgtatgaggcatgtgggagaattgcgaatccgacatttgggtcagtgggcttgttttggaccggtgagtgggcccaatgccaagctgc

SEQ ID NO: 203156 - DNA, 272 bp, Glycine max
aaacgctgctgccgaaacccttccggaaccctaaggtaagtgagtaatcagtggttgagaatggtggacaaggcgaagggtagaaaggaggaggtggttacacgtgagtacaccattaacctccacaagcgcctccatggctgcacatttaagaagaaagctcctaaagctattaaggagataaggaaatttgcccaaaaggccatggggaccaatgatgtgagggtggatgtgaagttgaacaagtttgtctggagccagggaatcaggag

SEQ ID NO: 203157 - DNA, 278 bp, Glycine max
gcatgaagcgttttgtgattttggtaaagaagggtgtttatgttgagaacgtggagatcaagaagaagaagtggaatattatgattcttggacaggggatggatgccaccgtcatctccggtaaccggagtgtcgtcgacggctggaccaccttccgctcagctacattcgctgtgagtggcagagggttcatagcaagagacatatcctttcagaacacagcagggcccgagaagcaccaagcagtggcactaagatcagactctgacctttccgtg

SEQ ID NO: 203158 - DNA, 265 bp, Glycine max
ctaaaatacgcttgatccatatgggcctcctcgaccacttgtgggacgacaccgtcgccggcccaaggccggaaaacggtctcggcaagctccgaaaacaccacaccttcactttccgacctagctccggcaaggaaacggagggcgggagcgtgagatcgtacggagacgaatcgtcggaggaagcgacgagagtgacgcgtagtatcatgatcgtgaaaccgcccgggtaccagagtggatcgcctccggtttctcccgcggg

SEQ ID NO: 203159 - DNA, 250 bp, Glycine max
acttgatctccgcagcaatggtgaacgttccgaagacaaagaagacctactgcaagagcaaggagtgcaggaagcacacgctccacaaggtcacccaatacaagaagggcaaggacagcatcgccgctcagggaaaacgccgttatgaccgcaaacagtccggttacggtggccagactaagcctgttttccacaaaaaggccaaaaccaccaggaaaattgtgttgaggctccagtgtcagggatgcaa

SEQ ID NO: 203160 - DNA, 204 bp, Glycine max
ttcaaagtgtaggacgagaaagtagacacagccatgtccactactggtactgttctggcttccactccaacacaaaggctattaggcaaagtggcattggttactggtggagcgtctggaattggagaaagcattgtgcgcctcttccatatccatggtgctaaaatatgtatagctgatgtgcaagacaaccttggaaagcag

SEQ ID NO: 203161 - DNA, 236 bp, Glycine max
atcgcttctcctctctcccaagaaagaatcatcaatggcgattgaacacgaagacgatctcaaagacgagaagaaccctcgacctctcgacgaggatgacatcgccctcctcaagacctacggtttgggaccttactccacaagcataaaaaaggcggagaaggaaatcaaagatatggccaagaaagtgaatgacttatgtggtataaaggagtctgatactggtttagctgcac

SEQ ID NO: 203162 - DNA, 258 bp, Glycine max
tacgaagagaatggctcccaagggtttaatctttttggctgtgttatgcttctcagcactgtcactgagtcgttgtcttgcggaggataatggacttgttatgaacttctacaaggaatcatgccctcaggctgaagacatcatcaaagaacaagtcaagcttctctacaagcgccacaagaacactgctttctcctggctcagaaacatcttccatgactgtgctgttcagagtcgtgaggcttcactgttgcggga

SEQ ID NO: 203163 - DNA, 284 bp, Glycine max
ccaaacactcttcttcatattcttcttcttcttcttgttcttgttctatctgtgacgagcatcatggcctcgagagcagtgctattgttggctatgtgtgtgcttccggccatggttgtggccattcgcccagcaaagaaccctttttgcgtgaagggtcgcgtctactgtgacccttgccgtgctggttttgagacctcagcaaccacctacattgccggtgctgagattatgttgcaatgcaagagcagggttagcaacgaggttgtgtacaccaagaaggg

SEQ ID NO: 203164 - DNA, 276 bp, Glycine max
taccgctataaaagaaggagatcttgtcaaacgaactggatctattgtggatgttcctgcgggaaaggctatgctagggcgtgtggtcgacgcgttgggagtacctattgatggaagaggggctctaagcgatcacgagcgaagacgtgtcgaagtgaaagcccctgggattattgaacgtaaatctgtgcacgagcctatgcaaacagggttaaaagcagtagatagcctggttcctataggccgtggtcaacgagaacttataatcggggaccg

SEQ ID NO: 203165 - DNA, 278 bp, Glycine max
atctgtcagacaatgggttgatgtcattcgccaaggctgcttcatcacttgaaagcctacgattggaagagtgccacagaattacccaacttgggttttttggtgtcctttttaactgtggtgcaaaattgaaggctatctctttggtgagctgctatgggatcaaagatctgaacttggtgttgccaacagtatctccatgtgaatcacttcggtcgttgtctatcagtaactgttctggatttggcaacgcctccctgtctgtatggggaaagctg

SEQ ID NO: 203166 - DNA, 275 bp, Glycine max
acagatggctccaaagggtttaatctttttggctgtattatgcttctcagcactgtcactgagtcgttgtcttgcggaggataatggacttgttatgaacttctacaaggaatcatgccctcaggctgaagacatcatcaaagaacaagtcaagcttctctacaagcgccacaagaacactgctttctcctggctcagaaacatcttccatgactgtgctgttcagagttgtgatgcttcactgttgctggactccacaagaaggagcttgtctg

SEQ ID NO: 203167 - DNA, 276 bp, Glycine max
aaactaagtgcttattttaatctgaactttaaagttttattattttgtgcaatggcagcaaagagcaaaatcctagtcattggaggaacaggatacattggaaaattcatagttaaggcaagttcagaagcaggacaccccacatttgccttggttagagaaagcaccctttctcataccgaaaaatttaaacttattgagagcttcaagacctctggagttactctcctttatggtgatcttactgatcatgaaagccttgttaaggcaatcaaa

SEQ ID NO: 203168 - DNA, 246 bp, Glycine max
ccgcgttcaattaggtgcatggatttatcgaagatgtaacagggaaaaaagttgccacattatttggcaagtgggatgacagcatgtattatatgaatggcaatgtaaatgtcaagcctaaagatttcacttcatcaaacgcatccttgttgtggaaaaggactatgccatctcctaatctcacccggtataatttgacaccatttgccatcactctgaatgagcttactccgggactgaagcttt

SEQ ID NO: 203169 - DNA, 273 bp, Glycine max
aaatggctcccaagggtttaatctttttggctgtgttatgcttctcagcactgtcactgagtcgttgtcttgcggaggataatggacttgttatgaacttctacaaggaatcatgccctcaggctgaagacatcatcaaagaacaagtcaagcttctctacaagcgccacaagaacactgctttctcctggctcagaaacatcttccatgactgtgctgttcagagttgtgatgcttcactgttgctggactcaacaagaaggagcttgtctg

SEQ ID NO: 203170 - DNA, 270 bp, Glycine max
ccagacacgagtccagcaagaagctccccgattctcgttggttcaatttacacaggcccaatgcggttggcgaggaagaaacacagaaaaagaaggagaaattctcaagcaagattcacctccgagtgtgtcttgaggccggctaccacgtgcttgatgagtccacgcatttcagcagtgatcttcagccatcctccaaacatttgaggaagaaaaacattggaattctcgaacttgggatcctgagtgcccgcaatttgctgcccatga

SEQ ID NO: 203171 - DNA, 274 bp, Glycine max
aaaggattctacccgacgctcaatgggaattgcgcttcaaggcgtcttgtagggctaatccgcctcacgagggtcaccaacggcacgtgcctttggggggccgaggcccctactgctggtcggcaaacggacggcgggcgcacgcgtcgcttctagcccggattctgacttagaggcgttcagtcataatcctacgcacggtagcttcgcgccactggcttttcaaccaagcgcgatgaccaattgtgcgaatcaacggttcctctcgtactag

SEQ ID NO: 203172 - DNA, 273 bp, Glycine max
attctttttctctcagattcttgcgcggtttatcatgggggatagtcagtattcgttttctctcaccacatttagcccttctggaaagcttgttcagattgagcatgctttgacggctgttgggtctggacaaacgtctttgggaattaaagctgcaaatggagttgtcattgctaccgagaagaaattaccatctatattggttgatgaagcatcagtccagaaaattcagttattaacaccaaatataggtgtcgtatatagtggcatggg

SEQ ID NO: 203173 - DNA, 275 bp, Glycine max
tatcgatccgctcgagccgattcggctcgaggcggtgtgagttagaacgagagtgctaagcaatcgtcttctattctcggagcttggctttgcttatcgattctctctcctctcgtttctctaattccaaggtttgtaaaagatggcagatgccgaggatattcaaccccttgtttgcgacaatggaactggaatggtcaaggcaggatttgctggtgacgatgctcctagggctgtctttcccagtattgttggccgacctcgacatactggtg

SEQ ID NO: 203174 - DNA, 189 bp, Glycine max
ctctctctctgtctctctctacgctttctcgttcgagatccctcaagggatccactaactgaaggagaaatggggttgacattcaccaagcttttcagccggcttttcgccaagaaggaaatgcgaattctgatggtgggtctcgatgcagctggtaagaccaccatcctgtacaagctcaaacttgga

SEQ ID NO: 203175 - DNA, 236 bp, Glycine max
cccgccagcgccgacgaggtccgaaccctctggatcggggatctgcagtactggatggactagaactatctctatacctgctttgctcacaccggcgaggttacatcggttaaagtaattcgaaacaagcaaactagtcaatctgaaggttatgggtttattgagtttaatagtcgtgctggagctgagagaattcttcaaacatataatgggggcataatgccaaatggggggca

SEQ ID NO: 203176 - DNA, 273 bp, Glycine max
aggaagggtgccagaagtgcttctggacgttgtatatctcatggtgggggtaggaggtgtcagaaacctggttgccacaaaggagccgagggtcgtacagtgtactgcaaggcacatggaggtggcaggcgatgtgaattccttggttgcacaaagagtgcagaaggacgtacagatttctgtattgcccatggtggtggccggagatgcagtcatgaaggttgtacccgggctgccagagggaaatctggattatgcatccggcatggtggg

SEQ ID NO: 203177 - DNA, 271 bp, Glycine max
cggagtgtgtctggggaaatttgcgttgtttttcgcggtacagctcacacacactgaacggtaagtatggcggacaaggctgttacaatccgaacccgaaagttcatgaccaacaggcttctttccaggaagcagtttgtcgttgatgttcttcatccagggagggcaaatgtttccaaggctgaacttaaggagaagctagctaggatgtatgatgtgaaagaccctaatactgtatttgtcttcaaattccgaacacattttggaggtg

SEQ ID NO: 203178 - DNA, 263 bp, Glycine max
ctcgagccgctttgccgctgttgttgttgctgcaccaccgaacaacttcccctgtaaatcgcgtttcgtttgtgcaaggttttaaaagatggctgatgctgaggacattcaacctcttgttgttgataatggaactggaatggtcaaggctggttttgcaggtgatgatgctcctagggccgtgttccccagcattattgggagaccacgccatactggtgtaatggttgggatgggtcagaaggatgcttacgtgggtgatg

SEQ ID NO: 203179 - DNA, 258 bp, Glycine max
gtaaaccatgaattctctatcactcttcaccttcctctgcgcaatttgtgcgcactccgtcgccgtcacctccgcggcatatccttccatccccggcacggaaaccggagagtgctccctccgcggcgtcggcgtcggcgacggtgatctggtccctccgcggcgagaagtgtacgaggaggggcgaatcttcgacatcacccacaggtatgtccccgagatgccggtgtgggactcgacggaggggctcgggcagca

SEQ ID NO: 203180 - DNA, 284 bp, Glycine max
attcggctcgaagatccggccttcagaaaggatgacagaaccacgcttggtaggaaggagttgtttaaaaacaacttgagaaaagcagcttatgcatggaaaaggatcaacgagctccgtcttaatgaacaggaagcttataagctcagatcctttgtggatcaacctgcttttacggatcttcattggggaatgtttgtgcctgctatccaaggaccaagcactgacgaacagcagcagaagtggttgcctctagcttataggatgccaataatcggttgcta

SEQ ID NO: 203181 - DNA, 185 bp, Glycine max
ctttacacacctctccaacctttcactttcagctttatttgaatcccactctctcctttccaaatggccagcgttgaggttgcacatcaaacaccaacaacagttccagaaaatgaaacaaccgaggtaatcaagacccaggaaacaaccccggaaccagtaccagccactgaggctcctgcaac

SEQ ID NO: 203182 - DNA, 270 bp, Glycine max
acgtcgctccgcaccagtttcaccgcacgaatatcttgttgtttggagcgatccgagaaaaactctgtaaacatgttggtttaccaggacctccttacaggtgatgagcttctctctgactccttccgttacaaggaaattgagaatggaatgctgtgggaagttgaggggaagtgggttgttaaaggagcagttgatgtaaacattggtgcaaacccttctgctgagggtggaggagaagatgagggagttgatgatgcagctgttaag

SEQ ID NO: 203183 - DNA, 269 bp, Glycine max
atcctcacactcattccgtgctctaaatctcaaattctagggttagggttcccaatttctccgccaatcagaagatgagttccaccggtggttctaccaagggcggaaggggcaagcccaaagcctccaaatccgtttcaagatcgcagaaagctggtctccaattccccgttggaagaatcgctcgattccttaaggctgggaaatacgctgagcgtgttggtgctggtgctcctgtatacctctctgcagtgctcgagtatctcgct

SEQ ID NO: 203184 - DNA, 265 bp, Glycine max
gtcaacatcattaacaatatcagagatacagtcatttctaatctcaggtggcttgagtcccattgattttgatgcttatatttgcaatagtggcagtgatctatactatccatccctcaatcccggagatcgcccatttgtggttgacttgtattaccactcacacattgaataccgttggggtggagaagggttgaggaagactttagtgcgatgggctgattcaatcactgataagaagggtgataatgacgaacaaattgtg

SEQ ID NO: 203185 - DNA, 272 bp, Glycine max
ctttgtacactcttcttctcttgcggctagggttttagcgcacttcttctagatttaaggaagatgggtaaggaaaaggttcacatcagtattgtggtcattggccatgtcgactctgggaaatccactaccactggtcacctgatttacaagcttggaggcattgacaagcgtgttattgagaggtttgagaatgaagctgctgagatgaacaagaggtctttcaagtatgcctgggtgctggacaaacttaaggctgatcgtgaaagagg

SEQ ID NO: 203186 - DNA, 240 bp, Glycine max
cgctgctgttcttgcgcgtgaacaagcctcaggtaagccaaaaccatggttaagcataacaatgttatcccaaacggacacttccgtaaacactggcagaactatgtgaagacttggttcaatcagccagcacggaagacaaggagacgattggctcgtcagaagaaagctgtgaagatattccccagacctacggctggacctctcagagccattgtacatggtcaaactttgaaatac

SEQ ID NO: 203187 - DNA, 267 bp, Glycine max
ctttcatttcccattctactcactcacacacatacacactctctttccatgggtccgtttcgtaaacccttccttgcatttctctcggttgttctatttctgggtctctatgaggcagcagcagaacagactcagactcacaagagtacttacattgtacacgtggcgaaatcggagatgcccgagagcttcgagcaccacgctgtgtggtatgagtcgtcactgaagaccgtgtctgactcggcggagatgatttacacctacgac

SEQ ID NO: 203188 - DNA, 245 bp, Glycine max
gcaaaaggccatataatttttttttatttgaaataatgtccgggatcatccacaagattgaggagaccctccatgtgggagggcacaagaaagaggagcacaaaggagaacaccatggtgagcacaaaggtgaacacaaaggagaacaccatggtgagcacaaaggtgaacacaaaggagaacaacaccatggggagcacaaggagggacttgtggataagatcaaggacaagatccatggtgat

SEQ ID NO: 203189 - DNA, 247 bp, Glycine max
ctccttagtttcgaaagcatggcttccctggcggcttccaccgcgagctatgtcagaaatccttggaaaccccgttaacctcagatgcgcaaccaggtctgctccatcaccaactacacctgccaccttcaagaccgtcgcacttttctccaagaagaagccagctccacctccaaagaaaaagcctgccgctgtatcccccgccaatgaggaactcgccaagtggtatggtcctgacagaaggatc

SEQ ID NO: 203190 - DNA, 237 bp, Glycine max
ctcgagccgatcaaatcaggagagcatgcatatgaacatgatgatgaagaaggtgtgtggatttgcaatagtgatggtggcagtgcagcttctggtggaggtgagtcccaaggcagaggctgtgacttgtacccctgtggagctgagtccttgtttgggggcaataacttcctctcaaccaccatcaacaatttgttgccgaaaggtgagggaacaaaggcaatgcctctggggtta

SEQ ID NO: 203191 - DNA, 262 bp, Glycine max
acgtttcgtcgacggcagtgggcgtgccggtgagtggcgcatcgttctatggtctggcggcggggacggcaaggggtgggtcccctgagtcaaggttggcggtttacaaagtgtgtggggcttttgggtcatgtcctgggtcggccattcttgcggggtttgacgatgccattcacgacggagtggatatcttgtcgctgtcgctcggtggattcggtggaaccaaaaccgatttgaccaccgacccgattgcgattggagc

SEQ ID NO: 203192 - DNA, 259 bp, Glycine max
acgaagcctcctcgttcttcttcttccgccctttctctctctagaaccgtacggtcgtttctttctctctcctcaaccggagacagcgtcgccttcttttctgaatctcgcggtgttgttagttctgcggcggttgtagttccggcggcgatgggacagcaatcgttgatctacagcttcgtcgctcgcggcaccgtgatcctagcggagtacaccgagttcaccggaaacttcaccagcgtggcggcgcagtgcctcc

SEQ ID NO: 203193 - DNA, 266 bp, Glycine max
gaaatatctatgtctctaacgtgagcttggctaatgtagatattgctatttggttcactggttcatatggggagcatccggatgatgcttatgacccaaatgctctacctgtaatagaaaaagttacaatcaaggatgtggtaggagaaaatatcaaaactgcaggtcttatagagggtattgaaggtgacaattttgtcaacatttgcccgtgcaacattatccttaacgtgacctcaaactatccatggaactgctcctacgta

SEQ ID NO: 203194 - DNA, 210 bp, Glycine max
acagcacaaacatactatgcaggagtttatggtacaacccaaaagagcaaccacattcaaagaaaccatgaagatgggtgtagaagtatatcacaatttgaagtctgtgattaagaagaaatatggtcaagatagcataaatgttggtgacgaaagagactttaaccctaaaatccaagaaaacaaggaaggtttggaattactgaaaac

SEQ ID NO: 203195 - DNA, 252 bp, Glycine max
cctccgcccacaatatcaccgacattctcgccgccaaccccgactacagcgacttcaacggcttcctctcccaaaccggcctcgccggcgaaaccaacacccgccagaccatcaccgtcctcgtcctcaacaacgccgccctctccgccgtggccgcaaaacaccccctctccgtcgtcaaaaacctcctcagcctccacatcctcctcgactacttcgacaacacaaagctccaccagatccccaacggca

SEQ ID NO: 203196 - DNA, 265 bp, Glycine max
ccgtgctctgtgattccagaccttaatttttctctcattcccttcaaatttcaggaaatcaattatggctcaaccctcaacaagaataggccttgctggactggctgttatgggccaaaatctagcactcaatattgctgagaaaggctttcccatttctgtttataaccgaaccacttccaaggttgatgagactgtagaacgagcaaaacaagaaggaaatcttccagtttatggctaccatgaccccgaagcttttgttcat

SEQ ID NO: 203197 - DNA, 181 bp, Glycine max
gcgtttcggaagcagacacagatggctcgtacgaagcaaaccgctcgtaagtccacaggaggaaaggctcctaggaagcagcttgcaaccaaggctgcacgtaagtctgcaccaactactggtggtgtgaagaagccccaccgttatcgtcctggtaccgttgctcttcgtgagattagga

SEQ ID NO: 203198 - DNA, 262 bp, Glycine max
cgttttcattcaaaattggttttgcaaacattgatccaaaccgagtcttttgtgacgggttgtttattgattagggtattgaaatttgacaacttgtatgggtgccgtcactctctccctgatggtctcatgagggctaccgatgttatgattgctggaaaggtggctgttgtggctggatatggtgatgttggcaagggttgtgctgctgcaatgaagcaggctgatgctcgtgtcatcgtgaccgagattgatcccatct

SEQ ID NO: 203199 - DNA, 265 bp, Glycine max
acactttccaatacaataatcactaactgaatattcgatcggagatgtctgccgccgccgaagaagctaacgctcccgccgtcgaaaagccggttgaggaggtgaaggcgccgaaccccgcgaaggagaagaaacctaaggctccgaaggaaaagaagccaaaacaggccaaaacagcttcacatcctccacattttcagatgattaaggaggctttgatcgctttgaacgagaaaggaggatcgagtccttatgcgatacgaag

SEQ ID NO: 203200 - DNA, 255 bp, Glycine max
caccctttctctctgcttagggttttgatcgcatcggatcttcactctcttctccgatctcaaaatgcccgccgtttatggagctcgcttgaccaccttcgaagactccgagaaggagagtgaatacggttacgttcgcaaggtatcaggaccagtcgtcgttgcagattgcatggctggggctgctttgtatgaactcgtgcgtgttggtcatgataatctcattggtgaaattattcgtctcaaagggatttc

SEQ ID NO: 203201 - DNA, 261 bp, Glycine max
gttggcattgccgatagatctgcatatgatttgcgtgctcactcggataaaagtggtgttccgttagtggctcatgaaaaatttgcagaacctaaggaagtggagaaattggttataactccagtaaagaaagagctgggtctggcattcaaggggaaccagaggatggtggttgaagcacttgaggcaatggctgagaaagaagctttggatatgaaggctgctctggagtcaaaaggggaggtggagtttcaagtgtgt

SEQ ID NO: 203202 - DNA, 263 bp, Glycine max
ctcttaattacttaatactgctaacaaccatagacacaaaagtgcatatacttcacaaccatgggaaccgagactccgacgagtggaaatcctattgcttcagggggagaaaaggttgctttcccagcagcagagattgataaaagaacagcggagcagaaggcacttgatgattggcttcccataacttcttcaaggaacgcaaaatggtggtactcagcttttcacaacgtcactgccatggttggagctggtgttctaag

SEQ ID NO: 203203 - DNA, 263 bp, Glycine max
gtactttctctcgcaatcttcactacattcaccgagcatttgcattcacattgaatatggctgagactacacaatctaatgctgagttgttggagtggcctaagaaagataagcgccgcttcctgcatgttgtgtatcgtgttggtgatcttgatcgcaccattaagttttatactgaatgttttgggatgaagcttttgaggacaagagatattccagaggggaaatatgcccatgcttttcttggatttggccttgacaat

SEQ ID NO: 203204 - DNA, 269 bp, Glycine max
gcaccaacagccaagactctgacttacctggcccaggagaaaaccctagaatcgagcttcgttcgggacgaggaggagcgtcccaaggttgcctacaacgaattcagcgacgagatcccagtgatttctcttgccggaatcgacgaggtggatggacgcagaagagagatttgtgagaagatcgaggaggcttgcgcgacttggggtatattccaggttgttgatcacggtgtggatcaacaactcgtggccgagatgacccgtctcgc

SEQ ID NO: 203205 - DNA, 211 bp, Glycine max
ctctgaaatcattaatgagagtgtcattgaggctgttgactctttgaatcctttcatgcatgctcgtggtgtttctttcatggttgataactgttcaaccacggctaggttgggttcaaggaaatgggctcctcgatttgactacatcctaacccagcaggccatggtggcggtggacaatggaacacctattaacggggacttaatcagc

SEQ ID NO: 203206 - DNA, 262 bp, Glycine max
catgatgatgaagaaggtgtgtgggtttgcaatagtgatggtggcagtgcagcttctggtggaggtgagtcccaaggcagaggctgtgagttgtacccctgtggagctgagtccttgtttgggggcaataacttcctctcaaccaccatcaacaatttgttgccagaaggtgagggaacaaaggcaatgcctctgtggttacctcaaaaacccaagtctaaggccatatgccaattctcctggctccagaagggttgctagc

SEQ ID NO: 203207 - DNA, 240 bp, Glycine max
gtgtgattgtttgttgttgtaactcgttcttcttcttttgttgttctgtgtttgtgtttgttttttctctcacctgaaaatgtcttgctgcggtggtaactgtggttgcggaagctcctgcaagtgcggcaacggctgcggaggctgcaagatgtacccagacttgagctacactgagtcaaccaccaccgagaccttggtcatgggagtggcacctgttagggctcaatttgagggtgc

SEQ ID NO: 203208 - DNA, 259 bp, Glycine max
ctttctcgctccccaaacgcccctctctctcctccaatggccgaccagctcaccgacgaccagatcgccgagttcaaggaggccttcagcctcttcgacaaggacggcgatggttgcattactaccaaggaacttgggactgttatgaggtcacttggtcaaaacccaactgaggcagaactgcaggatatgataaacgaggttaatgctgatggcaacggaaccatcgatttcccagagttcctcaacctgatggctc

SEQ ID NO: 203209 - DNA, 258 bp, Glycine max
caacttttcacacatgaccatactcactcattcattaactatgattgcaacactaataatcatttttcttgcacaaacacttgtgggggtgagttcacttcctgaagctgataaaataaccaatttgccggggcagccacgggtcgaatttcagcaatattctggttatgtcaccgtggatgatcaaaatcaaagagctttgttttactaactttgttgaggctgaagaaaacccttcttccaagccattagtcctat

SEQ ID NO: 203210 - DNA, 259 bp, Glycine max
  unsure (1)..(259): unsure at all n locations
ctcatctgcttcccctagcaaccttcttcttacttctctccgcttcttatctccagattgctggggcggaagcacaaccgttgactagtctcaagcttaactctcatattcttcaggagtctactgctaaagagattaatgaaaatcccgaggcaggatgggaggctgctataaatcctcgtttctccaattatacagttgaacaatttaagcgcctacttggagtcanaccaatgcctaagaaggaacttagaagtac

SEQ ID NO: 203211 - DNA, 253 bp, Glycine max
ctggttcttacttcaatggaggactgcactcttctgggttggctattgtgtcgcctggatctccagttactgtgcatgctccagcagagaaaggagtgagtggatttctagtggattttctgatgggtggagtgtctgctgctgtgtcaaagacagctgctgctccaattgaacgagtcaaattgcttatccaaaatcaggatgaaatgatcaaaagtggtcggttatctgagccatacaagggaattggtga

SEQ ID NO: 203212 - DNA, 259 bp, Glycine max
cactatcaagccaactggaaagaaggcatgtgtgattggagggagtggatttatggcctctttgttgatcaagcagttgcttgaaaagggttatgctgtcaataccacagttagagacccagataatactaaaaaaatacctcaccttttggcactgcaaagtttgggcgaattgaacatatttggagcagatttaactggtgaaaaagattttgatgctcctatagcaggctgtgaacttgtcttccagcttgctaca

SEQ ID NO: 203213 - DNA, 254 bp, Glycine max
gtaaaccatgaattctctatcactcttcaccttcctctgcgcaatttgtgcgcactccgtcgccgtcacctccgcggcatatccttccatccccggcacggaaaccggagagtgctccctccgcggcgtcggcgtcggcgacggtgttctggtccctccgcggcgagaagtgtacgaggaggggcgaatcttcgacatcacccacaggtatgtccccgagatgccggtgtgggactcgacggaggggctcgggc

SEQ ID NO: 203214 - DNA, 242 bp, Glycine max
ctcttctccgccacttctgaatctattgaatcaacaatcatgtcgaccgaagagcaccatttcgagtccaaggccgacgccggagcctccaaaacctaccctcagcaagccggtaccatccgcaagaacggctacatcgtcatcaaaggccgcccctgcaaggttgtggaagtttcgacttccaaaactggaaagcacggtcacgctaagtgtcactttgttggaattgatattttcactgc

SEQ ID NO: 203215 - DNA, 196 bp, Glycine max
ctttagccgaggtcaggaggagcactagctaagttcacaatttcaaaatggctaggggactaaagaagcatttgaaaaggctcaatgctcctaagcattggatgcttgacaaactgggtggtgcatttgcgcctaaaccctcatctggaccacacaaatcgagggagtgcctccccctcattcttattctgcgaaa

SEQ ID NO: 203216 - DNA, 227 bp, Glycine max
gaggcttggaaacattctcccagctcgcatggggccaccccacgcaggttccagtgggcgtgcacgtgtgtgactccccactctatgcccaccgcggtgtcatggtggacaccgcgaggaactattatcccgtgaaggacttgatgaggacagtgaaagccttgagcatgaacaagctcaacgtgcttcacttgcacctcacggatgcagaatctttccctttggtg

SEQ ID NO: 203217 - DNA, 264 bp, Glycine max
ctgctcgtgcctctagggttatcatatctccatttccatttcctctctctcagtttccaagaatcttaagctatgggaaagtcttacccaaccgtgagcgctgattaccagaaggccgttgagaaggcgaagaagaagctcagaggcttcatcgctgagaagagatgcgctcctctaatgctccttttggcatggcactctgctggaacttacgacgtgagctcgaagaccggtggtcccttcggaaccataaagcacccctcg

SEQ ID NO: 203218 - DNA, 259 bp, Glycine max
gtggaaagctctgatactattgacaatgtgaaagctaagattcaggacaaggaaggtatccctccagatcagcagaggctcatttttgctgggaagcaattggaagatggtcgtaccttggcagattacaatattcagaaggaatccactttgcatcttgtccttcgccttcgtggtggttgctaaggggaatcccttttatgaagtgttctcaaatgtcttatctgtatgttcagtgtctccctagaacttgtgcttt

SEQ ID NO: 203219 - DNA, 256 bp, Glycine max
ggaaaggtggccctgagaatgctacttgcacctacaaaggtgtgaggcaaagaacctggggaaaatgggttgctgaaatacgtgaacccaaccgtggtgcaaggctctggcttggaacctttgacaccgctcgtgaggctgctttggcctatgatgctgctgccagaaagctttatggacctgatgcaaaactcaacctcccagaactctctgtgccttatgctgctggagtgatgaatccttctcacatgcaaca

SEQ ID NO: 203220 - DNA, 258 bp, Glycine max
cactatcaagccaactggaaagaaggcatgtgtgattggagggagtggatttatggcctctttgttgatcaagcagttgcttgaaaagggttatgctgtcaataccacagttagagacccagataatactaaaaaaatacctcaccttttggcactgcaaagtttgggcgaattgaacatatttggagcagatttaactggtgaaaaagattttgatgctcctatagcaggctgtgaacttgtcttccagcttgctac

SEQ ID NO: 203221 - DNA, 259 bp, Glycine max
ggagtgaagcagcagagggaggagcggcattaaaaatgcagatcttcgtgaaaaccctaacggggaagagcataaccctcgaggtcgaaagcagcgacaccattgacaatgtcaaggctaagattcaagacaaggaaggcatccctccggatcagcagcgtttgattttcgccggaaagcaacttgaagatggaaggaccttggccgattacaacatccagaaggaatcaacccttcaccttgtcctcaggcttcgtgg

SEQ ID NO: 203222 - DNA, 255 bp, Glycine max
aatcactctagctgttgcaaatttctactatttttcaatggcttctgcagatgttgagttccgttgctttgttggtgggcttgcttgggtcaccggcaacgatgccctcgagaaagccttttcaatctacggcgacatcgttgaatcgaaggttatcaacgaccgtgagactggaaggtccagaggattcggatttgtgaccttcgcctcagagcagtcaatgaaagatgcgatcgcaggaatgaacggccagga

SEQ ID NO: 203223 - DNA, 215 bp, Glycine max
caacggcttacacagtttacaaaactggtgagaagttgcaagacagcgcaacgggaaaaccatccacgccgttcgatcacggttcgggacacgtggacccagtcgctgccctcaatccaggactggtctacgatctaacggtggatgattacttaggttttctctgcgcgttaaactactcagctgcggaaatcagcactttagccaagagaaat

SEQ ID NO: 203224 - DNA, 204 bp, Glycine max
cgcggttaccccttcagtctccgggaaggtgtaccaactgcagtttctcatggtctttggctcaacatcccagattacgatgctcctactcagcttgtgaagccacttgagaggaacactaggtatgtggatgctattttgaccataccaaagggcactttgtttcccatgtgtggaatgaacttggcctttgatcgcgatctc

SEQ ID NO: 203225 - DNA, 183 bp, Glycine max
agttactatctataattaattaaattcctcgtggaatattgaagaagccatgtctacagctgggcaggtcatcaagtgcagagctgcggtggcatgggaagcagggaagccactgtcaatagaaaccataggagtggcaccaccccagaaaggtgaagtgcgtttgaggatcctcttcaactc

SEQ ID NO: 203226 - DNA, 180 bp, Glycine max
acagagtgaagattttatttttctttctttctttggaagataaagaatgggttctaagtccgaaaccgtttgcgttactggggcttctggttacatcggatcatggcttgtcatgagactcatcgagcgtggctataccgttcgagccaccgaactcgacccagctgatataagggaggt

SEQ ID NO: 203227 - DNA, 193 bp, Glycine max
ctcgagccgttttcgttctcgttctggtttatagatctttgcgaaggaggtttacagcgctcaaccaaagatgcagaacgaggaaggacagatcactgagctttacattcctaggaagtgctccgccacaaacagattgattaccgctaaggaccatgcttcggttcagatcaatatggggcttggggataaa

SEQ ID NO: 203228 - DNA, 192 bp, Glycine max
gcacaagcactctctctttcccttaccctttttcaggtttcaacgctccaactatccatggcaaaccgctggctcagacccgaggtgtatccactgttcattgcggttggtcctgctgttgggatctgtggattccaactggttcgtaatatctgcatcaaccctgaagtcggggtgaaaagggggggaagg

SEQ ID NO: 203229 - DNA, 189 bp, Glycine max
ggatcctacctttaggaagctctctgtggatcacattgcctctgcatatagagatacacacagtcgattgatccttttggactacgatggcaccatgatgccgcaggcgacaatcaagactccgagcaaggaagttattactgtcttgaattatttatgcagtgatcctgaaaacatggtgttcattgt

SEQ ID NO: 203230 - DNA, 254 bp, Glycine max
agctgccgaagatgagagctgaataaatttctcttctgtgttttcttgtacatcaagggtcatttggcaccgtcttctacagattctggctcatctggaaacttaatcattgatttttactgggggatggaactttatccacgcattggaaaacattttgacataaaagtcttcacaaactgcagatttggaatgatgtcatgggctgttcttgcactgacctactgcataaagcagtatgaagaatatggaaa

SEQ ID NO: 203231 - DNA, 177 bp, Glycine max
gagaagccgtgtggttcaaggccgggtcccagatcttcagcgagggtgggctcgactacttgggcaacccaagcctgatccacgcccagagcatcctcgccatctgggccacacaagttatcctaatgggtgccgttgaaggttaccgtattgctggtggccccctcggtgaggtca

SEQ ID NO: 203232 - DNA, 215 bp, Glycine max
ctcagagaagagagaaaagaaaaagaaaaatcccagtgagagagagaaaagaaaagaacgaaaaaccaagaagcttcgaaacgatcgtgtgagatgaacaagtgcgaactgtgcaaagttccggcgaggatcttctgcgagtcggaccaggcgagcttatgctgggactgcgacgctaaggttcacagcgccaacttcttggtcgcgagacacgc

SEQ ID NO: 203233 - DNA, 165 bp, Glycine max
attctctgcactcttcatcaagctccgctccaacacaggggaaaatgagggagatccttcacgtgcagggagggcaatgcgggaaccagatcggttccaagttctgggaagtggtgtgcgacgagcacggcatagatccgacggggaattacgtcggaaactcag

SEQ ID NO: 203234 - DNA, 266 bp, Glycine max
cgcaacaaaaagaaagaatcccaggcgaggagaaagatggaggggaaggagcaggatgtgtcgttgggagcgaacaagttccccgagagacagccaattgggacggcggcgcagagccaagacgacggcaaggactaccaggagccggcgccggcgccgctggttgacccgacggattttacgtcatggtcgttttacagagcggggatcgcagattttgggcccattttgggggtctccacaaagtcgttttctaaggggggggg

SEQ ID NO: 203235 - DNA, 246 bp, Glycine max
  unsure (1)..(246): unsure at all n locations
tatctctcaccaacttccgctacancctactccaaccacantcttttttcccgcagtcancgggcaaggtcaagatcggaatcaacggatttggaagaattggccgtttggtggccagggtggctctgcagagagacgatgttgaactcgttgccgttaacgatcctttnattaccacggattaccntgaccatacaggttnaaaaacgaagntnttcaggggccanggaancctccnggttttcc

SEQ ID NO: 203236 - DNA, 227 bp, Glycine max
cagggctcgtgcggatcgtgttggtcatttagcgccgttggagctttggaaggtgcccattttctttctaccggtgggctcgtgagcctcagtgagcagcaacttgtggattgcgatcatgagtgtgatccggaagagcgtggagcatgtgattcgggttgtaacggtgggttgatgaccactgcatttgagtacacattcaaggctggtggactattgcgaaaaga

SEQ ID NO: 203237 - DNA, 223 bp, Glycine max
tctcgagccgaatcggctcgaggggtttctgagtttatgtggttgaccctctgcctgtaagactgaaaaaaccttctctttaccttctctcaagtctcaagagatttcatcatggctccaaagaaggacaaggctccaccaccttcctccaagcccgccaaatctggcggtggcaagcagaagaagaagaagtggagcaagggaaagcaaaaggagagggtga

SEQ ID NO: 203238 - DNA, 255 bp, Glycine max
agctgccgaagatgagagctgaataaatttctcttctgtgttttcttgtacatcaagggtcatttggcaccgtcttctacagattctggctcatctggaaacttaatcattgatttttactgggggatggaactttatccacgcattggaaaacattttgacataaaagtcttcacaaactgcagatttggaatgatgtcatgggctgttcttgcactgacctactgcataaagcagtatgaagaaaatggaaaa

SEQ ID NO: 203239 - DNA, 250 bp, Glycine max
  unsure (1)..(250): unsure at all n locations
gtttcatttctttggattagaaatttttcccaaagctgatcgagaagccagccaggccagaaagagttgaagaagaatgggaagggggaagatcgaaatcaaaaggattgagaacacaacaaatcggcaagtgaccttctgcaagagaagaaatgggcttctgaagaaagcttatgagctgtcagtgctgtntgatgcanangnnccccncagggttttcncaggngggggncgtnctctaggtttcccc

SEQ ID NO: 203240 - DNA, 235 bp, Glycine max
atggactacacctacgacaccaagcatcgcacaatggaacctcatgggataaggggtgtaatggacttggagcatcaaattcactacctggaaactgaggcttatagttctattttgaaggctttcattgctcaatctgatcttcttacttggggcaaagaggggcttatgactgagctgcgaaaggaactaaatgttacagatattgaacatggagaaatctacggaaaataat

SEQ ID NO: 203241 - DNA, 229 bp, Glycine max
ggatgccaccactcctccttttcctgatagggttcaagtgggaggatcgcccatgtacaaggtagagagaaaattgggtaaaggtggatttggtcaggtttttgttggccgtcgggagcgtgcaacaggtgctggagctgtggaggtggctctgaaatttgaacataggaacagtaagggctgtaactatggccctccttacgattggcaagtatacaacacccttggg

SEQ ID NO: 203242 - DNA, 227 bp, Glycine max
tgggagggtgggctatcgcggtgcatggtggcgctggtgtcgaccctaatctcccactcgagcgccaagaagaagcgaaacaacttctcacgcgctgtctcaatcttggaatctctgctcttgattctaatcttcccgccatagatgtcgtcgaacttgtggtgagggaattggaaacggatccgctgttcaattcgggccgtggatctgccctgacagaaaaagga

SEQ ID NO: 203243 - DNA, 214 bp, Glycine max
gtgaaaacagctgtttttctgtctcccaagtttgaacttggaccgggttcggtagccaataaatttgattatgatattgattttccaagaggtcatattgccctcaagagtttcaatgctgaagtagttgatgagggagggaactctgtggctctccataaaacttatctccatcactgggttgttgcaagatactatcaacctaaatgtgtta

SEQ ID NO: 203244 - DNA, 159 bp, Glycine max
ccgccacattggataccaatttttctcatggttgcagcggggatgggtccaattctagccatcaagtacttccgatatacatatagaccgagcaaaatcaatacccttcagcaagctgaacgtcggggtgggcctatatggtctcttggcaccattgag

SEQ ID NO: 203245 - DNA, 228 bp, Glycine max
cacgatcctactaaaaccaaacaactactcgttgattgaaagatacagtgtgtgttgtgctgtgctgtgtcggtggcatttttgttggttcgagtgagcgagggaagatgtactctagagattcatggggtggtccgttggagataaacgcgacggactcggcaacggaggacgagcggagccggaacctgcaggacgtggacagggcggctctgtcgcgtccctgga

SEQ ID NO: 203246 - DNA, 170 bp, Glycine max
caaaactacagtctcacccatggttggtggagtcagagagagagcaactatgtaggctgatggattgccagaagctctcattagaagcatgcactcatgctgcgcagaatgaaaggctacccatcagaataattgtccaagttctatttttcgagcagctccagcttcgg

SEQ ID NO: 203247 - DNA, 171 bp, Glycine max
ctatggctcgtcactccttgctcttagccctcctcctcttcgccgccgtggccaccgccgcgatggcgtggcgcgtccgacgccgacgacatcctgatccgtcaggtggtgccagatgttggcgaacgaagaggaggacaacctgctgaacgccgagcaccacttcgcgag

SEQ ID NO: 203248 - DNA, 166 bp, Glycine max
attctctttgcgcagttccctacctctcctttcaagatgcagatcttcgtcaagaccctcaccggaaagaccatcacccttgaggtggaaagctctgacaccatcgacaacgtcaaggccaagatccaggacaaggaaggaattcccccggatcagcaacgtctca

SEQ ID NO: 203249 - DNA, 241 bp, Glycine max
cggctcgagttatgtaggaccatttcaattcaggttgcagaatgagggcaatacgccccggaacattttggaagagattgtgtggaataaggacacagaagtctcacagcttaaagaaagaaaaccccttggcgtgctgaagaaagctcttgaaaatgcacctcctgctagggattttattggtgctctaaaggcagccaaggaacgaactggacttccagggttaattgctgaagtgaag

SEQ ID NO: 203250 - DNA, 193 bp, Glycine max
gttgattcggatctagagtcttcagtttctcctcgttgttcttcgctttcctgttttcaatttcgattctttcgttaatttaataagatgtttgggagggcaccgaagaagagcgataatacgaggtactacgaaatcctcggcgtctccaagaacgcttcgcaggatgatctgaagaaggcttacaagaaag

SEQ ID NO: 203251 - DNA, 253 bp, Glycine max
ctcaaatccaagctcgggaacagagaaggagaaagagaatggacgccattgattctgtgttcgatccgttgagagaattcgcaaaggacagcgtgaggctcgtgaagcgctgccacaaacccgatcgcaaagaattctccaaggttgccgtgcgtaccgcaattggtttcgttgtgatgggattcgtgggtttcttcgtgaagcttattttcattccaattaacaacatcatcgtcggatctggttaggatga

SEQ ID NO: 203252 - DNA, 209 bp, Glycine max
ttccttttcatcaggtttattccttttcttttggttcaattttgctgaatggagagtgcaagaatcagcaaatggttaaatcttctagtttgtgtactgctattgcttaaggcagaaggatctcttgttccattgactttggtgaagaatgcagaatcaaaaggagctgtttgtttggatggaagccccccagcataccactttgacaa

SEQ ID NO: 203253 - DNA, 264 bp, Glycine max
  unsure (1)..(264): unsure at all n locations
cttagntagagttgttaccatttgctcccagtacagagcttaaccnatnttcacnaagatgaatcgggaaaagttgatgaagatggccggttcggttagaactgggggaaagggtaccatgagaagaaagaagaaggctgtccacaagacaacaaccacagntgacaaaaggcttcagagcaccctgaagagaatangggtgaatgccntcccggctattgnggaggtcantatctttaaggatgacgtattntccagtttcta

SEQ ID NO: 203254 - DNA, 263 bp, Glycine max
atttgtttctgttttaatggagagaaccaaatatggcaagagatttcaaggtaaggtatccattgtgacagcttccacccttggaattggctttagcatagccgagaggcttggtttggagggtgcatctgttgtcatctcttctcgcaaacagaaaaatgttgatgaggctgctggtaaactgagagctaaaggaatcgaagtattggcggttgtttgccacgtttcaaatgcgcaacaaaggaagaatttgatagacaaaa

SEQ ID NO: 203255 - DNA, 263 bp, Glycine max
  unsure (1)..(263): unsure at all n locations
aaagaagcgagaagatgtcagangcgttctgcagcgactgcaagangcagacggaggtggtgtntgaccactctggccggcgacacggtgtgctcggagtgcggcntcgtactggagtcccantctatcgacgagacctctgagtggcgtaccttcgccaacgagtccggtgacaacgatcccaatcgtgtcggcgggccctccaaccccctcntcaccgacggcggcntntccaccgtcatcgccaagnncaacggcggcgg

SEQ ID NO: 203256 - DNA, 261 bp, Glycine max
gaagtatcagatctggagcaggagaatagcgttggcagcgtttgcgtttgctctgctgttccaatcggcctcagcagacgacgtcgttgtgctctctgaagataacttcgagaaggaagttggtcaggacagaggagctctcgttgagttctatgctccttggtgtggacactgcaaaaagcttgctccagagtatgaaaagcttggtagcagcttcaagaaagccaaatctgttttagttggcaaggttggctgtgatga

SEQ ID NO: 203257 - DNA, 261 bp, Glycine max
cgagattgaggcgggggttgatttggaagaaacccagctaaggtaacatcatttctgtgatggtgtacttggctccggtgccaacgttttaccggatatacaaaaagaaatgcacggacggtttccactcgctgccatacttgttgtcattaatgagttctatgctttggttatactacgccttcctcaaaattcatgacggcgttgttccccttattacgatcaactcgatcggatgtgtcatagagctcatctacattc

SEQ ID NO: 203258 - DNA, 261 bp, Glycine max
gagatctcagattgcaattgcctcttctcttctcccagaatcggtgtaggttacaggtttaagggttttgttttcatttaggtcactaatccgatatcatgaagctcgatacgactagtctcgaatcgtttcccacactgattgcacctcaaaacgacgtcgccggagaactctccgccgctccgttctttgaccttccgaattccaatgacttcgatgggttcttgaaagacgctattcagatggtgaagcccgcgaagg

SEQ ID NO: 203259 - DNA, 259 bp, Glycine max
gagaaacatggcttccttaagctccttagtgctgctccttgcagctctaattctatcccctcaagttcttgcaaactatgagaatcccccagtgtacaagcctcccactgagaaaccaccagtttataagcccccagttgagaagcctcctgtttacaagcctccagttgaaaagcctccagtttataagcctccagtagagaagccaccagtgtacaagccaccagttgaggatcctccagtttacaagccgccagtt

SEQ ID NO: 203260 - DNA, 261 bp, Glycine max
ctcgagccgtcacttttggggaagaggtcgagtttcacagcagcaatggtgtaagtcaaggctcagaaatcaaaagcctacttcaagagatatcaagtcaagttcaagagaagaagagagggaaaaaccgattaccgtgccaggattcggttgattaatcaggacaagaacaaatgtgacactccgaaataccgatttgttgttcgctttagcaacaaggacattgttgcacaaatagtatctgctagcatttatggcgat

SEQ ID NO: 203261 - DNA, 262 bp, Glycine max
aggcaagccccactcaaccaccacacctctcctcgttcacgctacccctttctgctcttcttctacctttcaagttttaaaagtataaagatggcagagacattcgtatttacctcagagtcggtgaacgagggacaccctgacaagctctgcgaccaaatctccgatgctgtcctcgacgcttgcctcgagcaggacccagatagcaaagttgcctgcgaaacatgcaccaaaaccaacttggtcatggtcttcggagaaa

SEQ ID NO: 203262 - DNA, 260 bp, Glycine max
  unsure (1)..(260): unsure at all n locations
ggataacattaacggagactctttcgacgagaagtcgaggattccggatccgcagaggatgattagggcttattgccaagccgcggccacgctgaatcttctcagagcttttgccaccggtggttatgctgctatgcagaggttntatcagtggaatttggacttcacggatcacagcgaacagggagataggtaccgagagcttgctaaccgagttgatgaggcccttggattcatggctgctgctgggctcacggtgg

SEQ ID NO: 203263 - DNA, 260 bp, Glycine max
gtttcgtaaacccttcgtggccattctctgggttgttctgtttctgggtctccatgaggcagcggaaccagagaagagcacatacattgtacacgtggcgaaatcggagatgccggagagcttcgagcaccacgcgctgtggtacgagtcgtcgctcaagaccgtgtctgactcggcggagattatgtacacctacgacaacgcgatccacggctacgcgacgaggctaaccgctgaggaagcagtttgctcgagaccca

SEQ ID NO: 203264 - DNA, 262 bp, Glycine max
atccccatatggctcgctactccttcctcttggccctcctcctcctcctctacgccgccgtgtcccagggtagccgacgacatcctgatccgtcaggtggtgccggatgccgtcggcgaacggcggagaaggaggaggaccacctgctgaacgcggagcaccacttcgcgagcttcaaggcgaagttcgggaagaagtacgcgaccaaggaggagcacgaccgtcgcttcggcgtcatcacatacaacctccgcagagcgag

SEQ ID NO: 203265 - DNA, 259 bp, Glycine max
atacaatcaaagaatcttctttgctttctctcctttgcactttccttctcctcgtgattttatgtatgcatcaaagggagaaactgggagacacagaagatgagagagataattagtattcatattggacaagctggagatcaggtggggaattcatgctgggagttgtattgccttgagcatggaattaaccccgatgggaccatgcctagtgacacctctgttggcattgcacacgatgctttcaacaccttcttca

SEQ ID NO: 203266 - DNA, 259 bp, Glycine max
gaggttagtaagtaacaatggtggagaaggccaagggtaggaaggaggaggttgtcactcgagagtacaccatcaacctccacaaacgcttgcatggctgcacatttaagaagaaggctcctaaagcaattaaggagataaggaagtttgctcagaaagcgatggggacgaatgatgtaagagtggatgtgaagctcaacaaggctgtgtggagccaggggatccggagcgtcccaaggaggattagggttcgcattgc

SEQ ID NO: 203267 - DNA, 262 bp, Glycine max
cgcaatcctccagtacatcaactcaactagccatccagtgggaacaatactagcaacagttacaattcctgattataagcctgctccccgggtgggttatttttcatcaagagggccttcattgattacaagcaatgttctcaagcctgatattgcagccccgggagttaacattctcgctgcatggtttggaaatgacacatcagaggttccaaaaggaagaaagccctcactatgtcgcatactctcaggaacttccatg

SEQ ID NO: 203268 - DNA, 260 bp, Glycine max
cggtgtgttgatatcatagcagatctattccatgctcctataagtgatgatgagactgcagtaggtgtgggaactgtggggtcatcggaggcaataatgttggcaggtctagcttttaaaaggaaatggcagacaaagagaaaagcagaaggcaaaccatatgatgagcccaacatagtaactggggctaatgtgcaggtttgttgggaaaaatttgcaaggtactttgaggtagagctcaaggaagtgaaactcaaaga

SEQ ID NO: 203269 - DNA, 258 bp, Glycine max
gattcgctcgccttgcttcgccacacaacagcaactgcagcaatggctcccaaacgaggtggaaaggctccggctcttgccgctaagaagaagcctgagaaggtttcgaatccgttgttcgagaagcgtccaaagcagttcggaatcggaggggcgttgcctccgaagagagacttgactcggttcgtgaagtggccaaagaatgttcaaattcagaggaagaagaggattctgaagcagaggttgaaggttcctcca

SEQ ID NO: 203270 - DNA, 258 bp, Glycine max
gtatgtttgcatgtatctgaagaaaaaatgagaattgggagacaagaagtggtggaagaagtgaaaaggctgctatggttagcagtgcctctcttctcagttggaattttacaatacattcttcaagccatctctgtcatgtttattggccatcttgttaccctccctctttccggcgcttccattgcctcttccttcgcatcggccaccggcttcaacttattgttggggctagctactgcactggacacattttgt

SEQ ID NO: 203271 - DNA, 259 bp, Glycine max
aaagaagatcctcaattttctgagcagccaaacactctctctctgtctctcgagaattctcagtttgcagagaaaatctgaatcatgtcgtggcaagcgtatgtcgacgatcaccttctgtgtgacatcgaaggtaaccacctcactcacgctgctatcatcggccaagacggcagcgtttgggctcagagtaccgacttccctcagttcaaacctgaggagatgactgccatcatgaatgactttaatgagcctggat

SEQ ID NO: 203272 - DNA, 256 bp, Glycine max
ggcaagcgcttctcctctttgtgttctggctatgcatcttggcaagagttagatcggacgaggatgcgtgtacacggtgtacgttcggacgggttcgatcatcaagggaggcaccgattcagtaattggtctgaagctatacgacaagtccggctacggcatatacatcaccaacctcgaggcatggggcgggttaatggatccgggtcacaactactacgagcggggcaacctcgacatattcagtggtagaggc

SEQ ID NO: 203273 - DNA, 256 bp, Glycine max
gttgttgttgctgcaccaccgaacaacttcccctgtaaatcgcgtttcgtttgtgcaaggttttaaaagatggctgatgctgaggacattcaacctcttgttgttgataatggaactggaatggtcgaggctggtttagcaggtgatgatgctcctagggccgtgttccccagcattattgggagaccacgccatactggtgtagtggttgggattggtcagaaggatgcttacgtgggtgatgaagcccaatcaa

SEQ ID NO: 203274 - DNA, 257 bp, Glycine max
cttggatttgctggttatatcccaacaatgttctggcccaacaacttgggtcgggcctaaacgggcttggcataggagcaattgggcttgactggtccaccatttcgtcctacctcggaagcccactcgcaagcccatggtttgccactgccaatgtcgcggtgggtttcgtgtttgtgatgtacgttctgactccgctgtgctattggctcgacttgtacaacgccaaaaccttccccattttctcggacgaactc

SEQ ID NO: 203275 - DNA, 257 bp, Glycine max
cacaaccactcttaatttctctctgccttgctcatttacacacctctccaacctttcactttcagctatatttgaatccctctctctcctttccaaatggccagcgttgaggttgcacatcaaacaccaacaacagttccagaaaatgaaacaaccgaggtaatcaagacccaggaaacaaccccggatccagtaccagccactgaggctcctgcaacagaacaagcagcagctgaggttcctgctcaagaagaaca

SEQ ID NO: 203276 - DNA, 256 bp, Glycine max
ttttcatctgcttcaatggggaagggaacagggagttttggtaagagaaggaacaagactcacactctctgtgtgaggtgtggccgccgcagcttccatctccagaagagtcgttgcgccgcttgtgctttccccgccgcacgcactaggatatataactggagcgtcaaggcaatccgcagaaagaccaccggaactggcaggatgaggtacttgcgtaacgtgcctcgccgattcaagagtggcttcagagaag

SEQ ID NO: 203277 - DNA, 262 bp, Glycine max
gggatttgctcctttgacatctcgaggctctcagcaatacagagccttgagtgttccagagctcacccagcaaatgtgggattccaagaacatgatgtgtgctgctgaccctcgacacggccgctacctcactgcctcagccatgtttagaggaaagatgagcaccaaggaggtcgatgaacaaatgatcaatgtgcagaacaagaactcctcatactttgtggaatggattccccacaatgtgaaatccacagtctgtgac

SEQ ID NO: 203278 - DNA, 261 bp, Glycine max
cttaatttctctctgccttgctcatttacacacctctccaaccttacactttcagctttatttgaatccctctctctcctttccaaatggccagcgttgaggttgcacatcaaacaccaacaacagttccagaaaatgaaacaaccgaggtaatcaagacccaggaaacaaccccggaaccagtatcagccactgaggctcctgcaacagaacaagcagcagctgaggttcctgctcaagaagaacaacaagcaactgagg

SEQ ID NO: 203279 - DNA, 258 bp, Glycine max
tttacgttttgcccaagcaccttgatgagaaggtggctgcacttcaactgggcaaacttggagttaagctgacccagcttagcaagtcccaggctgattacatcagtgtgcctgttgagggtccatacaagcctgctcactacaggtactaagtgattgagatgatcaactgaaaagtgagtgagggaaagacaaaaatcggttttatcaatcggatttgattgtttaattttcctttttttgatttttggtgttaga

SEQ ID NO: 203280 - DNA, 258 bp, Glycine max
cgagattgaggcgggggttgatttggaagaaacccagctaaggtaattcctcgcaacccctaactagaccttcaaaggatcatcatgggcagtcacaatgctttggctgccactttcggaatattaggtaacatcatttctgtgatggtgtacttggctccggtgccaacgttttaccggatattcaaaaagaaatgcacggacggtttccactcgctgccatacttgttgtcattaatgagttctatgctttggtta

SEQ ID NO: 203281 - DNA, 259 bp, Glycine max
tccatttccatttcctctctctcagtttccaagaatcttaagctatgggaaagtcttacccaaccgtgagcgctgattaccagaaggccgttgagaaggcgaagaagaagctcagaggcttcatcgctgagaagagatgcgctcctctaatgctccgtttggcatggcactctgctggaactttcgacgtgagctcgaagaccggtggtcccttcggaaccataaagcacccctccgaactcgctcacggcgctaacaa

SEQ ID NO: 203282 - DNA, 256 bp, Glycine max
gagagagagagagggaggagggagagtgttgacgctccatcaagatgggtatttctagggattccatgcacaagaggcgtgccactggtggcaagaagaaggcatggagaaagaagagaaagtatgagcttgggcgtcaggccgcaaacaccaagttatcaagcaacaaaactatccggaggattcgtgttcgaggtggcaatgttaaatggagggcattgaggttggataccggcaattactcatggggtagtga

SEQ ID NO: 203283 - DNA, 257 bp, Glycine max
tctcgaccgattcagctcgaggaaaagcaccgtacgaccttccctacggcttctcttgtctatcgcgagtgaccatggtgaaggtcagtgtggtgaaggatgctctgaagagcatgtacaatgctgacaaaatgggaaagcgccaagtcatgattcggccatcctccaaagtcattatcaagttccttatggtgatgcagaagcacggatacattggagagtttgagtatgatgatgaccacagggctggtaaaatc

SEQ ID NO: 203284 - DNA, 258 bp, Glycine max
taccagggttggtgaatgtagattttgctgatgttcgggctataatggccaatgcaggttcttcactaatggggataggaactgcaactggaaaatcaagggcaagagatgctgcattaaatgccatccagtcacctttactggatattggtatagagagggctactggaattgtttggaacataactggtgggactgatctgaccttgtttgaggtaaacacggcagcagaggttatttatgacctcgtggacccta

SEQ ID NO: 203285 - DNA, 258 bp, Glycine max
ctcgagccgtaaaaacaaaaacgctggctttgaaaccctaataagcttcatcaatctccgaactccgaagcccttcagcaaccatgtcgaggagaaaggttagggagccaaaggaggaaaatgtcactcttggtccagccgttagagacggtgaacatgttttcggcgtggctcgcatctttgcctccttcaacgacaccttcatccatgtcactgatttgtctgggagggaaacccttgttcgcatcactggtggga

SEQ ID NO: 203286 - DNA, 255 bp, Glycine max
acctagctagccacaatgcagatattcgtgaaaaccctaacggggaagacgataaccctagaggtagagtcatcggacacaatcgacaatgtgaaggcgaagatccaggacaaggagggcatcccgccggaccagcagcgcctgatcttcgccggtaagcagctggaggacggccgcaccctcgccgactacaacatccagaaggagtccacgcttcacctcgtcctccgcctccgcggcggcgccaagaagcgc

SEQ ID NO: 203287 - DNA, 253 bp, Glycine max
accggtgctaccttttctagggctagcagcactgtaacctcaactcacctgtcttatatccgttccctctttcaaaccttttttttttgaccaaatcggcgatggcaacgacgtcggtggtgccggcgaaccggcgtcgcgcggcgaaccccgcggaggagatggacttcgagacgacggagggcgtgaaggccatcgcaagcttcgaggagatggggatcaaggacgatctgctccgcggaatctaccagta

SEQ ID NO: 203288 - DNA, 254 bp, Glycine max
agctcactgaacttcaagatggattgccaacatttcctgatgaggaggcctttgcatgcattgagagggaattaggactatctattgactttatcttttctactatatctccaacggctgtagcagcagccagtttgggtcaagtttataaagcccggttgaagtactctgggaaacttgttgctgttaaggtgcaacgccctgatattgaagaagctataggaatggacttctacctaattagaggtttaggg

SEQ ID NO: 203289 - DNA, 255 bp, Glycine max
cgagaagaagaagatggagatgtatcagatctggagcaggagaatagcgttgggagcgttcgcgtttgttctgcttttcctatcggcctcagcagacgacgtcgttgtgctctctgaagataacttcgagaaggaagttggtcaggacagaggagctctcgttgagttctatgctccttggtgttgacactgcaaaaagcttgctccagaatatgaaaagcttggtagcagcttcaagaaagccaaatctgtttt

SEQ ID NO: 203290 - DNA, 258 bp, Glycine max
ctaagccttactttaatgaacctggatatgcacacatgagtggttcagcaaatggtgaaaagatgtcttttcagtataatgaggacacattcattctatcattgaggacaatgatgtatatgatacgaaagcctccaaagaatttcgaggaccttgttaaggggcatttctgcaaccgagctagcgatattctggtggcatgtaaggcatacatggaaggtgctcaagttgggtgtttggtcaaaggaggggttcagg

SEQ ID NO: 203291 - DNA, 257 bp, Glycine max
aataatatagtggctagcatagagctagtaataatattaatattgttaagctagctctaagccatggctaatgaacgtgatctgttctcggcggagattgtgaaccgtggaattgaatcgtcaggaccaaacgctgggtcgtagacgttttcggtgagggtgagaaggcgcttaccggattttcttcaatcggtgaaccttaagtacgtgaaattgggttaccattatctgataaaccatggcatatacttgttcac

SEQ ID NO: 203292 - DNA, 257 bp, Glycine max
atcatgtcaaagaaattaagagagttttttttgttcctcactgaccaagttataacgatgagaaccagactttctgtagctgtctttagcttttttcttttagccttattttcaaacctagcctttggcaaatgtaaagaaaccgaggtagaagaagaagaccctgagctcgtaacgtccaaacaccaatgccaacagccacagcaatacactgaggtttgcaagcgggtatgcttgcaaagatgtgacaggtatca

SEQ ID NO: 203293 - DNA, 256 bp, Glycine max
cgtgatttagcatttaccacaccaaaatcagtctgcggagtcagaaagccatggatccctacaagaatcggccatcaagcgccttcaattctcccttctggactacaaattccggtgctcccatctggaacaataactcatcgctgactgttggatctagaggtccaattctgctggaggattatcatctggtggagaagcttgcaaactttgacagggaacggatccccgaacgtgttgtccacgctcgtggagc

SEQ ID NO: 203294 - DNA, 253 bp, Glycine max
atcaagttactgtctatagttggttgaattcctcgtggaatattgaagaagccatgtctacagctgggcaggtcatcaagtgcagagctgcggtggcatgggaagcagggaagccactgtcaatagaaaccatagaagtggcaccaccccagaaaggtgaagtgcgtttgaggatcctctttaactgcctttgccgtagtgatgtttattggtgggatgctaaggaccagactcctctgtttcctcgtatctt

SEQ ID NO: 203295 - DNA, 256 bp, Glycine max
cactcgagccgcacacgtccagcaccgccgctggatcagttgtttccggcgcgagctcctcggttacgcctccggaacaacgcgtgggatggccacgcgcgctagagttgctgcatacaaggtatgctggaaaggagggtgtttcagctctgacattcttgccgcaattgaaagggcaatattggacaacgtgaatgttgtttctttatctctcggtggtggcatttctgattatcacagagacagtgtcgctatt

SEQ ID NO: 203296 - DNA, 254 bp, Glycine max
atgggtgccctgagatcactttgagcaatggtgaaggctgtggcagttcttggcagcagcgagggtgtcactggaactattttcttcactcaggagggaaatggtccaaccaccgtaactggatctcttgctggtcttaagcctggtctccatggcttccatgtccatgccttgggggacactaccaatggttgcctgtcaactggagcgcatttcaatcctaataacaacgagcacggtgcccctgaggacga

SEQ ID NO: 203297 - DNA, 255 bp, Glycine max
aaacaatttgctcacaaaggaggaaaaatggcacctttcgtttccctctctttgttgcttctctttctcaaccaccccctcctttccctctcaaccaaccctgaagggaacgctctgcatgctttgagaagcaggctttctgatcccaacaatatgttgcagagttgggacccaacactggttaatccctgtacttggtttcatgttacctgtgactccaacaatcatgtgattcgcttagacttgggcaactct

SEQ ID NO: 203298 - DNA, 251 bp, Glycine max
aaagatcacaacaaaccagtccaagaggtcattgctgaaatgactaatggaggagtagatcgtgctattgaatgcactggaagcatccaagcttcaatctcagcatttgaatgcactcatgatggttggggtactgctgtccttgttggtgtgccaaagaaggatgttgaattcaaaactaatcctatgaagttcatggaagggagaactcttaagggtaccttctatggtcactacagaccccgcactga

SEQ ID NO: 203299 - DNA, 255 bp, Glycine max
agttactatctataattaattaaattcctcgtggaatattgaagaagccatgtctacagctgggcaggtcatcaagtgcagagctgcggtggcatgggaagcagggaagccactgtcaatagaaaccatagaagtggcaccaccccagaaaggtgaagtgcgtttgaggatcctcttcaactccctttgccgtagtgatgtttattggtgggatgctaaggaccagactcctctgtttcctcgtatcttaggcca

SEQ ID NO: 203300 - DNA, 252 bp, Glycine max
atcggatctagagtcttcagtttctcctcgttgttcttcgctttcctgttttcaatttcgattctttcgttaatttaataagatgtttgggagggcaccgaagaagagcgataatacgaggtactacgaaatcctcggcgtctccaagaacgcttcgcaggatgatctgaagaaggcttacaagaaagccgccattaagaatcaccccgacaagggcggtgatcccgagaagtttaaagagctggcgcaagc

SEQ ID NO: 203301 - DNA, 281 bp, Glycine max
cttctctgttaaaaaaaaattaggcgtctaaagggccaaagcttagaaagttgaagctttttttgttgaggtgaaagtgaaatggttggcaaggataatctgagggctgaggacttgaacttgtgctttaagaagcttatgatggtgccgggagtgggaacagtgagaaaggggtgaacttgaaggttggggtgatcaccgagtggaaggatattcctgtggagcttctgatgcaaattctgtcccttgtggatgatcagacggtgatcatagcttctgga

SEQ ID NO: 203302 - DNA, 278 bp, Glycine max
aaaggagctgtttgtttggatggaagccccccagcataccactttgacaacggatttgaagaagggattaagaactggattgttcacattgagggaggaggatggtgcaacaatgtagagagttgcctttaccgtaaggatagtcgcttaggttcatctaagcaaatggaggatctttacttttctgcaattttaagcaacgaacaagagtataatccagatttctacaattggaatagagtcaaggttaggtactgtgatgggtcatcgtttactgg

SEQ ID NO: 203303 - DNA, 275 bp, Glycine max
aatattcattccccttatctttctctcttctctctccccgcccaaaccctaactccctaccctattccgctttctctcatccatcatgaaaggaggaaagtccaagaccgaatctaagagagccgatgccaaacttgctgtgaaaagaagggcgccgccaccaagactaggaaacccgccggaaaggggaaggcagcgaaagatcctaacaagccaaagaggcctccaagtgctttcttcgttttcatggaggaattcaggaaggtgttcaacaa

SEQ ID NO: 203304 - DNA, 272 bp, Glycine max
gcgcgggtgaggtagaacccttccacggtggtgactgcgcgatgggtgcctacaagtatgtttcagagctatggcgcaagaagcagtctgatgtcatgcgcttcttgcagcgggtgaggtgctgggagtataggcagcaaccttccattgttcgcttgacaaggtcgacccgccctgacaaggctcgtcgcttgggcttcaaggctaagcagggctatgtgatataccgtgttcgtgttaggaggggtggccgaaagaggccagttcccaaa

SEQ ID NO: 203305 - DNA, 274 bp, Glycine max
tgattatgaacttgtcaaggatgtcatatttgatgactacctccggcagcgaatagctaagacggaagccgagttgttggccgagaagagatgtgtggctcacctaacaggcgagggaattgctgtttgtgatctacctggtgataccatgctcccaggagaaatgtaacaagcctatatctcctgaatgccaaagcagacattgaaataggtcctgcaaacttgtgtcttaaaagatactagttagggaatcaataaataaaatatttttatt

SEQ ID NO: 203306 - DNA, 271 bp, Glycine max
aagtaatcaaatttgtctttctgagggtaccaataacttaggaaaagcaacccctgcttccatcttgaaaggtgctaatggaaccaatagtcctggttctatcattgttgctgccaaggaagctgttaaaaggagagtggaactccttcagctgccaccaaaagagctgaaaatatggatgccattgtgaaggctgctgagctggcagcagaagctgtatctcaagcaggaaaaattgtaactatgggtgatcctttgccaataagtcagt

SEQ ID NO: 203307 - DNA, 271 bp, Glycine max
gagggggcccctaaccaaacctaatagcttcagaggatccatcatgcccactcaccatgcttccgccgccatttttggtattataggtaacatgatttctgtgatggtgtacttggctccggtgccaacgttttaccagatatacaaaaagaaatgcacggacggtttccactcgctgccatacttgttgtcattaatgagttctatgctttggttatactacgccttcctcaaaattcatgacggcgttgttccccttattacgatcaac

SEQ ID NO: 203308 - DNA, 223 bp, Glycine max
gtcgagctgagaataccagttgctccagtagccggcactaaacaacatggcggacaaggcagtcaccatccgaaccaggaagtttatgacaaacaggcttctctccagaaagcagttcgtcgttgatgtccttcatccagggagggctaatgtttccaaggctgaactgaaggagaagctgggaagaatgtatgacgtgaaagaccccagcactgtatttgtc

SEQ ID NO: 203309 - DNA, 248 bp, Glycine max
gggcagttggcgaagtggaaaacagcagaagaagttgctgctcttgtaaggtctttgcctgttgaagaacaaccaaagcaaattatcgtcactcgtaaaggaatgttggatccattggaggttcacctgctggacttccccacattgttattaaaggaagtgaactgcaacttcctttccaggcatgtttgaaaattgagaaatttggggatctaatcttgaaggccacagaaccccaaatggttttg

SEQ ID NO: 203310 - DNA, 279 bp, Glycine max
aacttcacctagcataacctaatcgcaccccggttccgattgcatctgaatcaattctgagaagcattgacgttcaacaggttgcttcgaagtgaagtctgtaatcatgtcaagcaagtatatcatttctgctattcttggatcattggagttgcatgggtttgtgattattatgtttcagagaagaagctatttggaggtagtacccctggcactattacaaacaatgagtgggcagaagagactgacaaaaaattgcaggcatggcctcgtactgcc

SEQ ID NO: 203311 - DNA, 231 bp, Glycine max
  unsure (1)..(231): unsure at all n locations
agccatcatcatgggancagtgattctcccagatnctcggcaccgagattttgattccggtctgcgccatcattggaatagggttcgccctcttccgtgggtcctcgtctccaaggttaagctctccgctgccagantagattccccnaacgccgccggcaaaaatggctacaacgattacctcatcgaagaagaggaaggcctcaacggatcacaacgttgtcctcaaat

SEQ ID NO: 203312 - DNA, 273 bp, Glycine max
aaagatgatatagatgttgggaaactgagacctacccttttcgatgtttttggggaagatgtaagtcctaaagtgaaaaagttcatgaatgttatttttaacaaactccaacatggaagtgatgaaagtgggggtggaatattgggctggtgggtggtcttgcccaagagtttctcaagcaaaagcttgatgacaatgatgagggatatgcaaagcctgcactggagacaaaagtggaaagtaagcatgaggcatacgctggaccaaccaaac

SEQ ID NO: 203313 - DNA, 277 bp, Glycine max
tggaaccatttccctcataaaattctctcttcctttttgggttctcctcaatccattccaagcttcaatcttttctctcttctgccctctgcacctcccctcacacccttcctcattcgcaggaggtgaagatgtcgaccccggcaaggaagagactgatgagggattttaaaagattgcaacaagatcctcctgctggcatcagtggggctccccaagacaataatattatgctttggaatgctgttatctttggaccagatgacaccccttggga

SEQ ID NO: 203314 - DNA, 242 bp, Glycine max
aaaaactttcgaaagattttatccaattgaaattttaaaaatgactgggataaacttaagaattcaattattgaaattgaataagtaaacaatttaattggattggtcgaatggtatcaaaaaaatggagtactaactcccattcttatttattattgaattaaccgatcaacttgctttgttatcgaacatttctttttgatttcaaaaattttccggaaaaaatttgaatctatttttat

SEQ ID NO: 203315 - DNA, 264 bp, Glycine max
  unsure (1)..(264): unsure at all n locations
gctgaagctgattggtaaagtattgaatcctgtgcatacatcctcacttatcctcntcctgcgactctcttctcattggttctccgtattctccctcaatcctattaaccttttcttctttcatttcccacccattctataatcaatcaatggcaatggcttcttcaatccctaatgcgccttctgcgttcaattctcagagctacgttggtctcagagcgccactgaggaccttcaacttttcttctcctcaagctgccaaaa

SEQ ID NO: 203316 - DNA, 274 bp, Glycine max
tctcgagccgaatcggctcgaggcgaccagaaggtgctgtcatataccgcgacgaagtagaagctgtaattaaggtaaagaacatagttggaggaatgagatgggacactaaaatggttgaccatgaggatggtcctcttgttcctgagaaggtgcttgttgctgtcaagcagtattgggttactaattccacatcaacacaataagccactatatcaaagttgaagaactggcttggcctttggctgccagtacatttctctatacgatcttc

SEQ ID NO: 203317 - DNA, 271 bp, Glycine max
gagctaatacgtgcaacaaaccccgacttctggaagggatgcatttattagataaaaggtcaacacaggctctgcctgttgctttgatgattcatgataactcgtcggatcgcacggcctttgtgccggcgacgcatcattcaatttctgccctatcaactttcgatggtaggatagtggcctaccatggtggtgacgggtgacgaagaattagggttcgattccggagagggagcctgagaaacggctaccacatccaaggaaggcagca

SEQ ID NO: 203318 - DNA, 170 bp, Glycine max
gtttcacagaacgtgatcttatcaactatggcggagaaacacaacatcaagaacccagccgtgaagcggattctccaggaggtcaaggagatgcaatcaaacccttccgatgactacatgagcctccctcttgaggaaaatattttgaatggcaatttgcgatcaggggg

SEQ ID NO: 203319 - DNA, 273 bp, Glycine max
ctttcaagagacaaactgctttgaaaaatgggatccaaggttgttgcatccgttgcccttctcctctccatcaacattcttttcatttccatggttagctccagcagccactacgatccacagccccaaccttctcacgtcatgctcttattacacgacctagttgtccggatctgagtatttgcctcaatattttaggcgggtctctaggaaccgtggatgattgttgtgccctcatcggtggtcttggtgacattgaagccattgtgtgcc

SEQ ID NO: 203320 - DNA, 269 bp, Glycine max
atatagcccaagccctatacaaccaaaccctaacacacacccatttgattcagtttccatggctagcctcaaggttgcatttttggctgcagtgctctgcatggttgtggtgagtgcacccatggcacatgcagctatcacgtgcgggcaggtgacgaatagcctgatcaattgcatcggttacctccagaacggaggaacgccgccgtcgggatgctgcaacggagtgaagagcctcaatgccgccgccaagaccaccgccgaccgcc

SEQ ID NO: 203321 - DNA, 249 bp, Glycine max
ctctctttgtttcggtgaattgaagcagcggaggagatggcgagtcgcatgaaggaagatgagaagaacgagcgcgtgattcggggtcttctcaagcttcaacataatcgcagatgcattaactgcaacagtctgggacccaatatgtgtgcacaaacttctggacgtttgtttgcacaaactgcataggaatacatcgggaattcactcatcgagtaaaatcagtttcaatggctaagtttacttcac

SEQ ID NO: 203322 - DNA, 254 bp, Glycine max
tctcactctccgccgctggatgccttagtggtgccctctgaagattatcacctgagcgaatatgtgtctgcacgagacaagcgccgcgaattcgtttccggcttcactggaagtgccggcttggcacttataacaaagaagaagcactgctgtggacggatggacggtattttttgcaggctgggaaagaacttagtgctgggtggaagctaatgcgaattggtgaagatcctgctgtagatatctggatggcc

SEQ ID NO: 203323 - DNA, 251 bp, Glycine max
ggaaagtccaagaccgaatctaagagagccgatgccaaacttgctgtgaataagaagggcgccgccaccaagactaggaaacccgccggaaaggggaaggcagcgaaagatcctaacaagccaaagaggcctccaagtgctttcttcgttttcatggaggaattcaggaaggtgttcaacaaggagcatcccgacaacaaagcagtgtctgctgtgggcaaagctgctggagcaaaatggaagacgatgtc

SEQ ID NO: 203324 - DNA, 237 bp, Glycine max
ttttaggattaagcggtgagattcgtgaatctgagaaatgtcggattcttctcgggaggagaatgtttacatggcgaaattggcggagaggccgagcgttacgaggagatggttgagttcatggagaaggtagcaaagactgtggaggttgaggagttgacggtggaggagagaaatcttctctctgtggcttacaagaacgtgattggtgcgaggagggcttcgtggaggacatat

SEQ ID NO: 203325 - DNA, 272 bp, Glycine max
gtgaactatgcccgagcggggcgaagccagaagaaactctggtggaggcccgcagcgatactgacgtgcaaaacgttcgtctgacttgggtataggggcgaaagactaatcgaaccgtctagtagctggttccctccgaatttccctcaggatagctggagcccgcgggcgagttctatcgggtaaagccaatgattagaggcatcgggggcgcaacgccctcgacctattctcaaactttaaataggtaggacggtgcggctgctctgttg

SEQ ID NO: 203326 - DNA, 275 bp, Glycine max
caattttctgtatcgtgtattttttttttctttgttcacagctctgcgagatcttcattcgccgattttaaaagatgagtaagcttcagagtgatgctttgcgtgaagccatttcaggaatcatggccgattccaaggagaaaatcgcaaatttgtggagaccatcgaactccaaatcgggttgaaaaactacgatccacagaaggacaagcgtttcagtggctctgtcaagctgccccacatccctcgccccaagatgaaaatttgcatgcttg

SEQ ID NO: 203327 - DNA, 271 bp, Glycine max
cttttccaaatttccatggcttctgcggatgttgaataccgatgctttgttggtgggctcgcttgggccactgacaactacgatctggagaaagccttctctcagtacggtgacgtcgttgaatcgaaggtccgcatcgctatgatctgacacaattcggatccggaatttctccatcccgttctgatctgtgatctctgatctatttgcgttacttgttctatgatatgatacttgtgttactatatgattcttttattactcacgccaa

SEQ ID NO: 203328 - DNA, 259 bp, Glycine max
ccctacctctcctttcaagatgcagatcttcgtcaagaccctcaccggaaagaccatcacccttgaggtggaaagctctgacaccatcgacaacgtcaaggccaagatccaggacaaggaaggaattcccccggatcagcacgtctcatcttcgccggaaagcagctcgaggacggccgtaccctcgccgactacaacatccagaaggagtcaacccttcacctggtccttcgtctccgtggtggcatgcagatctgcg

SEQ ID NO: 203329 - DNA, 269 bp, Glycine max
cggctcgaggaaagaatcccaggcgaggagaaagatggaggggaaggagcaggatgtgtcgttgggagcgaacaagttccccgagagacagccgattgggacggcggcgcagagccaagacgacggcaaggactaccaggagccggcgccggcgccgctggttgacccgacggagtttacgtcatggtcgttttacagagcagggatagcagagtttgtggccacttttctgtttctctacatcaccgtcttaaccgttatgggagtcg

SEQ ID NO: 203330 - DNA, 272 bp, Glycine max
gtcaggcggggctacccgctgagtttaagcatatcaataagcggaggaaaagaaactaacaaggattcccttagtaacggcgagcgaaccgggaaaagcccaccatgaaaatcggtcgccctcggcgtccgaattgtagttggagaagcgtcctcagtggcggaccgggcccaagtcccctggaagggggcgccagagagggtgagagccccgtcgtgcccggaccctgtcgcaccacgaggcgctgtcggcgagtcgggttgtttgggaat

SEQ ID NO: 203331 - DNA, 269 bp, Glycine max
acaagattgcaaaatgaagttcaacattgcaaatcccaccactgggtgccagaagaagctggaaatcgatgacgacctgaagcttcgagcatttgggacaagaggatctcccaggaggttcttggtgatgctctgggtgagagtttaaaggatatgttttcaaaatcaccggtgggtgtgacaaacaaggattccctatgaagcagggagtgctgacccctggtcgtgttcgacttttgctccatagaggaactccttgtttccgtgga

SEQ ID NO: 203332 - DNA, 269 bp, Glycine max
ataacacaaagcacaaagcaaagctcatccttgagttaaaaaatggcagcagcttcttccatggctctctcatccccatccttggctggcaaggccgtgaagctgggcccatcagccccagaagtgggaagggtgagcatgaggaagaccgtcaccaagcaggtctcctcaggaagcccatggtacggcccagaccgagtcaagtacttgggcccattctctggcgagcccccgtcctacctaaccggtgagttcccaggcgactacgg

SEQ ID NO: 203333 - DNA, 271 bp, Glycine max
tttttgtgttagtgagagaaagttctctctctttgactcacaaccctattgcgtgctttgcaatcgaccccgcttatggccaacagtaacctccctcgaagaatcatcaaggaaacgcagcgtttgctcagtgagccagcgcctggaattagtgcgtccccttcggaggacaatatgcggtatttcaatgtgatgatccttggcccgactcagtcgccatatgaagggggagttttcaagttggaattatttttgccagaagaatatccaa

SEQ ID NO: 203334 - DNA, 197 bp, Glycine max
ctcgagccgattcattcaagattcagcaagtgcgttttggaagcagagaccgaaatacttcgagatggcccgtacaaagcaaactgctcgtaagtcaactggaggaaaagctcccaggaagcagcttgcaaccaaggctgccgtaagtctgcaccaacaactggtggtgtgaagaagcctcatcgttatcgccctgg

SEQ ID NO: 203335 - DNA, 267 bp, Glycine max
cgtgttttcagctccggtaacctctccttctccgccgccgttgctatctccgccgtgaccgtccatccctcaacgccccacagatcttcaatttgattgcttgggtcaacaatttctgtcattctcaatcatggcaatagacttcagtttgaaaataattgtgaagttggagtcttctctaaactcaccaatgcttactgtttggttgcgattggaggttctgaaagcttctacagtgtatttgaagctgagttagcagatgttatc

SEQ ID NO: 203336 - DNA, 268 bp, Glycine max
aattaagctttcaagagacaaactgctttgaaaaatgggatccaaggttgttgcatccgttgcccttctcctctccatcaacattcttttcatttccatggttagctccagcagccactacgatccacagccccaacttctcacgtcactgctcttattacacgacctagttgtccggatctgagtatttgcctcaatattttaggcgggtctctaggaaccgtggatgattgttgtgccctcatcggtggtcttggtgacattgaac

SEQ ID NO: 203337 - DNA, 267 bp, Glycine max
aggaccaagccttatgtgaagaaaatggccaagagccaggactatttcttcaaggagttttctagagccattactttgctctctgagaacaaccctctcactggcacaaagggtgagatcagaaagcagtgcaatgctgccaacaagcaccatgaggagccttaattgcttcccgcttaatttgggccttgaattttcttccccttctctatgtggaagaaatctgtaagatattatgcaaaaaataattaaggtgtttttctttaa

SEQ ID NO: 203338 - DNA, 267 bp, Glycine max
cagttctctcacacactcattcggtgctccgaatctcagattctagggttagggttcccaatttctccaccgatcagaaaatgagttcaactggtggttctaccaagggcggaaggggcaagcccaaagcctccaaatccgtttcaagatcgcagaaagctggtctccaattccccgttggaagaatcgctcgattccttaaggctgggaaatacgccgagcgtgttggtgctggtgctcctgtgtacctctctgcagtgctcgaat

SEQ ID NO: 203339 - DNA, 265 bp, Glycine max
aaacaggcatcttagtgtgctccaccctatttataaacttttgttgcctcactatcgtgacaccatgaacatcaatggactcgcaagacaatcactcatcaatgcaggtggcattattgagcaatcatttctgcctgggccatttgctgtggagatgtcttcggcagtttacaaggggtgggttttcactgatcaagcccttcctgcggatcttatcaagagaggaatggcagtggaggatccatcctctccctatggccttcgc

SEQ ID NO: 203340 - DNA, 274 bp, Glycine max
caaggtttctgtttcagtttcagagggagaaatgggtcgttgccgagctgcgtcgcgccccggtgacgatgaccccaagtacagatcaaagagaaaaagggctgctctgaatgtagaaaattcagaaactttacctactggccaaggagtaactaatagcaaggtatctccttatcactgcaattattgtaacaaagatatttcggggaagattcgcatcaagtgtgctgtttgtcaagattttgacctctgcatagagtgcttctctgtcggt

SEQ ID NO: 203341 - DNA, 271 bp, Glycine max
cacaagccaagtgaaagtgagaaaaaataaaaatcaaagagcataatgtcagggatcattcacaagattggggagacccttcatgtgggagggcacaagaaggaggaggagcataagggtgagcaccatgctggagaatacaaaggggagcaccatggtgaacacagtagtgagtacaaaggagagcatcatggtgaacacaaagctggagagtaccatggtgagcacaagccagagcacaaagaggggttcctagacaaagtcaaggaca

SEQ ID NO: 203342 - DNA, 269 bp, Glycine max
tttttgtgttagtgagagaaagttctctctctttgactcacaaccctattgcgtggtttgcaatcgaccccgcttatggccaacagtaacctccctcgaagaatcatcaaggaaacgcagcgtttgctcagtgagccacgcctggaattagtgcgtccccttcggaggacaatatgcggtatttcaatgtgatgatccttggcccgactcagtcgccatatgaagggggagttttcaagttggaattatttttgccagaagaatatcca

SEQ ID NO: 203343 - DNA, 270 bp, Glycine max
  unsure (1)..(270): unsure at all n locations
gttgagaactaagaaggagaagcaaatggcttcctcaatgatctcttccccagctgttaccactgtcaaccgtggccggtgccggcatggttgctccattcactggcctcaagtccatggctggcttccccaccaggagaccaacaatgacattacctccattgctagcaacggtggaagagtgcaatgcatgcaggtgtggccaccagttggcaagangaagtttgagactcttncctaacctgccagaccttgatgatgcanaattgg

SEQ ID NO: 203344 - DNA, 264 bp, Glycine max
  unsure (1)..(264): unsure at all n locations
ttccttagctacctagattattcacttcaattcctcacaagatacaatatagcatgctccaatggcagcttngtatctcccaataagcatgttggtactcattgttgttgtttctcttggtttgtggagtggtgttaaggtgcaccacaagtgccatgctacttcatttttggtgattctttggttgataatgggaacaacaaccagctccagtctttggctagggctgattactggccttatggggattgacttccctggtgg

SEQ ID NO: 203345 - DNA, 262 bp, Glycine max
gaaacactagctacggtattgggagctctcgttgtttcggagttagggaccttacgcagccatggccactgctacgaatgccgccgccgccccaccacgccagctctcccagaaggaagctgacatccagatgatgttggccgccgacgtccacctcggcaccaagaactgcgacttccaaatggaacgttacatcttcaagcgccgcaacgacgggatttacattattaaccttgggaagacgtgggagaagcttcagcta

SEQ ID NO: 203346 - DNA, 268 bp, Glycine max
aaagatcacaacaaaccagtccaagaggtcattgctgaaatgactaatggaggagtagatcgtgctattgaatgcactggaagcatccaagcttcaatctcagcatttgaatgcactcatgatggttggggtactgctgtccttgttggtgtgccaaagaaggatgttgaattcaaaactaatcctatgaagttcatggaagggagaactcttaagggtaccttctatggtcactacagaccccgcactgacattcctggtgttgtgg

SEQ ID NO: 203347 - DNA, 270 bp, Glycine max
agcgtcgtagtcgcaaccctaatcagaagaagcgcacttcagagcgagtgacagccaccagccatgggtcgtatgcacagccgcggtaagggtatatcctcttctgctttgccctacaaaaggacacctcctagctggctcaagatctcttcgcaagatgtcgaagaaaatatctgcaagtttgcgaagaaaggtttgaccccgtctcagattggtgtcattctcagagattctcacggtattgctcaggtcaatagcgtcactggcagc

SEQ ID NO: 203348 - DNA, 248 bp, Glycine max
  unsure (1)..(248): unsure at all n locations
cggctcgagctagggtttacagagaagctaagaggcgcaccgnagcaaaagctcgtggaattgctagcaatggcgaggatcaaggtttacgagctgaggcagaagacgaaggctgatctgctgaatcaactgaaggactgaaggcggacttgccttgcttcgtgttgctaaggtcaccggtggtgcccctaacaagctttccaagataaaggtggtgaggttgaacattgcccaggttttgacggtga

SEQ ID NO: 203349 - DNA, 271 bp, Glycine max
gggaagaagatggtgtcaggttctggaatctgcgcaaagcgagtggtggtggacgctcgccaccacatgttgggtcggctagcgtccatcgtggcgaaagagcttctgaatgggagaaggttgcggtggtgcgctgcgaagagatttgcatctccggcggtctggtgaggcagaagatgaaatacttgagattcctccgcaaacgcatgaacaccaaaccctcccatggccctatccacttccgcgccccagccaagatcttctggcgcac

SEQ ID NO: 203350 - DNA, 264 bp, Glycine max
atctctcttcccagttctcacctcaccgctgcatcttcacgtcgtctctaacgagggaaaatgagtcgaggaggtgcagcagcagcgaagggaaagaagaagggtgctacattcacattgactgtgcaaagccagtagaagacaagatcatggacattgcttctctcgagaagtttcttcaagagaggatcaaggttggtcgcaaagctggtgctcttggtgactctgttaccgttacacgtgagaagactaagattattctca

SEQ ID NO: 203351 - DNA, 270 bp, Glycine max
cggctcgagagaaactctaacgaaagagcgagaaagcgaagacagccatggcgtcgtttcttcaatcgtttctggatccgaagaagaactggttcgccgctcagcacatgaaatccctctccaaacgcctccgcaaatatgggctccgatacgacgatttgtacgatccttactacgatctggatgtgaaggaggcgctgaatcggcttccgaaagaggtggtggacgctcgccacgcgcgtcttaaacgcgccatcgatctttccatga

SEQ ID NO: 203352 - DNA, 305 bp, Glycine max
gtcgcactgtaacgtacgtataatcgggtaaaaactagtattttaattgagactagaactcatagggaagaaaatagatttatgaatggaataaaatatgcagtatttacagacaaaagtattcggttattggggaaaaatcaatatactttaatgtcgaatcgggattaactaggacagaaatcaagcattgggtcgaactcttctttgatgtcaaagtaatagctatgaatagtcatcgactcccggtaaagggtagaagagtacgacctattatgggacatacaatgcattacagacgtatg

SEQ ID NO: 203353 - DNA, 251 bp, Glycine max
aaaaaattatagagtattgggttgtgtctatactttgcatgcttttgtcgggtcattggatctctgttcaagctgcccctgcaccctctctcatcacacaactccctggcttaacgccaatttcccatccaagcactattccggatatataagtattgatggaaatactgaaagtgggaagaacctgttctactacttcgttagttcagaaagaagtccagagaaggacccagttgtgctatggctgaatg

SEQ ID NO: 203354 - DNA, 267 bp, Glycine max
gcaatgatgagtgtggtgttaagtgtgatatgctcatggaatttgtcaaggatttcaagggtgcagcccagattctagacaaaggcggttacactcagtttacaccccattatattacttggtactgtcctcatgctttcactttgagcaagcagtgcaagtctcagtgcataaatcacggtagatactgtgctccggatcctgagcaagacttcaccacaggttatgatggcaaagatgtcgttattgaaaatttaaggcagctat

SEQ ID NO: 203355 - DNA, 270 bp, Glycine max
ttccaaatggccagcgttgaggttgcacatcaaacaccaacaacagttccagaaaatgaaacaaccgaggtaatcaagacccaggaaacaaccccggaaccagtaccagccatgaggctcctgcaacagaacaagcagcagctgaggttcctgctcaagaagaacaacaagcaactgaggttcctggcccagaatcaaccaccgaagcaccaaaggaagaaaccaccgaagcaccaacaacagaaacagtagaaacaacaactacagagg

SEQ ID NO: 203356 - DNA, 261 bp, Glycine max
atagggcagtgccggcgcgcgctgaagtttgctaggttcatgagcaggttcgggaagagttaccgaagcgaggaagagatgagggagaggtacgagatattctcgcaaacctcaggttcatccgctcccacaacaagaaccgcttgccctacactctctctgttaatcattttgctgattggacttgggaggagttcaaaagacacagactaggcgctgcccaaaattgctctgccactcttaacggcaaccacaagctca

SEQ ID NO: 203357 - DNA, 258 bp, Glycine max
ggaaaaactaaggttgcaatcttgttgctttgggtcttgtgtatcaaattgcagttgaatgttgaagcaagaacatcatcagctttagaaacagaaatcgaagccaattgaagcaactcaacaagcctgccgtgaaaaccattaagagtgaagatggagatattattgattgcgtcaacatctacgatcaacctgcttttgatcatccagccttaaaaaaccacactattaagatgatgcccgattttttgctagaat

SEQ ID NO: 203358 - DNA, 260 bp, Glycine max
tctgtctctgtgtttgcggctgaggattccgaacgagcgaccttcttcgtttctcgcaaagtttaagtcatcatgggtaaggaaaagactcacatcaacattgtcgtattggacatgtcgactctgggaagtcaactaccactggtcatttgatctacaagcttggaggtattgacaagcgtgtgattgagaggttcgagaaggaggctgctgagatgaacaagaggtcattcaagtatgcctgggtgcttgacaagctc

SEQ ID NO: 203359 - DNA, 270 bp, Glycine max
atcaagactcgagtgaacaaaaaaaaaatgatgggtacccttaaggtgtccaacagtagtttatacatattttcgaagttcctagtaatttgtatggtgatgatgatatcttggttgattcaagttattccttgtgtgattttgaggcaatcttcaattttggtgattcgaattcagatacgggtgggtgtcatacaagctttcctgcacagcctgctccctatggaatgacttacttcaaaaaaccagtggggcgtgcttctgatggaa

SEQ ID NO: 203360 - DNA, 260 bp, Glycine max
cggctcgagggaaaaggcaagaaagatgtcggggcaaacgcagcgtctgaacgtggtccccaccgtgacgatgctgggagtggtcaaggcgcgtctagtcggcgccagcgcggtcacgcgtcctgaagaagaagagcgacgcgctcacggtgcagttccgccagatcctgaagaagatcgtgtccacgaaagaatctatgggcgacatcatgaaaacgtcgtcgttcgcgctcaccgaggcaaaatacgtcgccggcgac

SEQ ID NO: 203361 - DNA, 232 bp, Glycine max
ttaaccttggtgactacaaaggaaaggtccttatcattgtcaatgttgcctcacaatgtggcttgactaattcaaattacactgagctcagtcagttgtatgagaaatacaaacagaaaggtctggaaattctggcgttcccatgcaatcagtttggggcacaggagcctggatctaatgaacagatacaagagtttgtttgtactcgcttcaaggctgagtttcccgtttt

SEQ ID NO: 203362 - DNA, 260 bp, Glycine max
cacaagggaagtcctgcaattcttggagacatggaagaagatggtgctgctgctgctgatgccagtgacttcaattatgattcagaaaatcagaatcagaatcaaaaccaaaagcagaagatttcagagcgcatgttaagctggcaattgacatacccacgaggagaggaggttggtgctccaaattatgataaggatgtttctcacaaccacattcctctggtgaccattggacaagaggtatctggaaatttgtctgc

SEQ ID NO: 203363 - DNA, 253 bp, Glycine max
ccggtggccttttccctctctttctctggaaaattcccccgattttctcgagaaagtgaaacggaattatgagctttcaggacatcgaggctgggcggcccttcagttcgaggcgcgggttgatgaacgggaagcaagacccgacgcaagcggtggctgccggaatattccagatcaacaccgccgtctccaccttccagagactcgtcaacaccctcggaacccccaaagacacccccgacctccgcgaaaa

SEQ ID NO: 203364 - DNA, 255 bp, Glycine max
aaaccctctctttctctctcttccaaaacctaatttgcattttttctcttcaaacaaattttcaaaatgcgtgagatccttcacatccagggtggccaatgcgcaaccagatcggcgccaagttctgggaggtggtttgcgcggagcacgggatcgaccccactggaaggtacggtggggactcagagcttcagctcgagaggatcaatgtctactacaacgaagccagctgcggccggttcgtgccgcgcgcgg

SEQ ID NO: 203365 - DNA, 196 bp, Glycine max
tccatttccatttcctctctctcagtttccaagaatcttaagctatgggaaagtcttacccaaccgtgagcgctgattaccagaaggccgttgagaaggcgaagagaagctcagaggcttcatcgctgagaagagatgcgctcctctaatgctccgtttggcatggcactctgctggaacttacgacgtgagctcg

SEQ ID NO: 203366 - DNA, 258 bp, Glycine max
ttccaatatggaatgctgcataatcgccaggctcaagacccaacctttatggttcgcgctgctcttcgttgtcggattgttaacgattctcaaattggctttcttgttttcagatgggtctacgtcaatttcctccgaccaccgaagaatctcaaaaagtacggatcttgggcagtggttactggacccactgacggcattggaaagagcttcgctttcgagctcgctcgcaagggcctgaacctcgtccttgtcgga

SEQ ID NO: 203367 - DNA, 235 bp, Glycine max
gttgtggtcaacgctacctcagatctgaatttctttgcttttggtatcaatgccgagaacaaccagaggaacttccttgcaggttctaaagacaatgtgataaccagatacctagtcaagtgcaggagcttgcgttccctgggtctgcaaaagatattgagaacctaataaagagccaaagtgagtcctactttgtggatgctcagcctcagcagaaagaggaggggaccaaggg

SEQ ID NO: 203368 - DNA, 244 bp, Glycine max
actcgagccgaatcggctcgagctatgcaggccagcttttctttgactggcttggtgataaactgggaaggaaacgtgtctacggaatgacccttatgctctggtgatatgctcaattgcttctggtctttctattggcaaagaccctaaagctgttatggccaccctttgcttcttccgtttctggcttggatttggcattggtggtgactaccctctttcggccactatcatgtctgagtat

SEQ ID NO: 203369 - DNA, 253 bp, Glycine max
gttgttgttctaaagcactcatccacacattctccgtcgccacgacaacaatggctccaaagaaaggtgcgaaaggtggagttgtagcagcaaagaagaaggttcaggagaaggtaacgaaccctttgttcgagaagcgtccgaagcagttcgggatcggaggcgcgctgccgccgaagcgggacctgacgcgcttcgtgaagtggccgaagaacgtccaaatccaacgcaagaagcgcatcctcaagcagag

SEQ ID NO: 203370 - DNA, 174 bp, Glycine max
gccaggaaccaaagaatatggtgaacttaccagtaatcatcaaaaggcttatttgagaacaattacaggaaagactgaggcccttgtggacctaacagtgtagagatattgtcaaggcatgcttctgatgaggtctaccttggacagagggacaatccaaattggactgatgac

SEQ ID NO: 203371 - DNA, 255 bp, Glycine max
gaaggtgaagaagggttggctcgcggttcaagtggaagaagaaggtggcggtggagggtctcaaagatttgtgatcccaatttcgtatctttatcacccctcttcaagcaccttttggataaggcttatgaggtttatggctaccacaccgagggtcctctcaaactgccatgttcagtcgatgactttcttcatctccgatggagaatcgagaaagaatccactacccatcaccaccaccaacatcatcatcat

SEQ ID NO: 203372 - DNA, 209 bp, Glycine max
aatcaattgaagaaaagagagagagaaaatgtacgtggatcacgcgttttcgatttcagatgaggacataatgatggatgcagcgtacacggtgagcaaaaggcacccatgaaggagatcgccctcgccgtttcccttctcgtctttggaaccctagctatcattatcggctccctcatggcctacaatcacgtcggcggcgacaccat

SEQ ID NO: 203373 - DNA, 252 bp, Glycine max
agcgaagagaatggctcccaagggtttaatctttttggctgtgttatgcttctcagcactgtcactgagtcgttgtcttgcggaggataatggacttgtatgaacttctacaaggaatcatgccctcaggctgaagacatcatcaaagaacaagtcaagcttctctacaagcgccacaagaacactgctttctcctggctcagaaacatcttccatgactgtgctgttcagagttgtgatgcttcaatggtg

SEQ ID NO: 203374 - DNA, 247 bp, Glycine max
gatgagatttgttagacaaccaatttgcacttcagaggagcaaggattttttcagctgtaatagaagaattactagcaaaaggattggaaagggctgaaatgctattctctctggctgttcagctggaggattgacaactatattacactgtgatagctttaaaacttttttgccctctagagctaatgtgaaatgtgttccagatgctggttattttgtcaatgtagaggatatcctcgggagcac

SEQ ID NO: 203375 - DNA, 249 bp, Glycine max
aagataacaaaatggaagacacagtttctgcattgaagtcttttatggtttctcactctccgccgctggatgccttagtggtgccctctgaagattatcacctgagcgaatatgtgtctgcacgagacaagcgccgcgaattcgtttccggcttcactggaagtgccggcttggcacttataacgaagaaagaagcactgctgtggacggatggacggtattttttgcaggctgagaaagaacttagtg

SEQ ID NO: 203376 - DNA, 244 bp, Glycine max
gggttttccaattcacagagcaacacaacgaaccaacaatggcgcagctcagccgcagtcgcagccgcagcacgggcaagcagcgctggagcagggcagtgcttcggtcgcaagaagaccgccgtggccgtgacctactgcaagcgcgggcgcggtctcatcaagatcaacggctgccccattgagctcgtggagccggagatcctccgcttcaaggccttcgagcctatcctcctgttgggta

SEQ ID NO: 203377 - DNA, 272 bp, Glycine max
tagtttttctgaactaactgcactgccactgaacacacaggttttaggatcatcttactcagtttgatcatgcagttgatgcactgacagtgttgacggataacagacataagcttgacctcgttatcagcgatgtgaatatgcctgacattgatggacttaagctccttgagttggtgggacttgaaatggacctacctgtcatcatgttgtcagcacacggtgatacaaagctggtgatgaagggtgttacacatggtgcatgtgactat

SEQ ID NO: 203378 - DNA, 252 bp, Glycine max
aaaagaagaagaggttttgatcggatgcgatgagcacacaggggcaagtgattattgatgaggcggttctggatgacataatccggcgcttaacgaggtccgactggcccgacccggcaagcaggttcagctctccgagtctgagatcaagcaactctgcgtcgcttccagagacatcttcattaaccagcccaatttgcttgaactcgaagcccccatcaagatttgtggtgacattcatgggcagtacag

SEQ ID NO: 203379 - DNA, 168 bp, Glycine max
ctcgagccgcttgaggtggaaagctctgacaccatcgacaacgtcaaggccaagatccaggacaaggaaggaatccccccggaccagcaacgtctattttcgccggaaagcaacttgaggacggccgtacccttgctgactacaacattcagaaggagagtactcctt

SEQ ID NO: 203380 - DNA, 245 bp, Glycine max
taaataaataataatggagttgtgagagaaagagatagagaagaagatggatagtgaaattgaaaagaagaagaacctgttttcggaactaccgacgacatcgttctgaacatcttctacaaactcgaagacgatcctcgccactgggctcgcttagcctgtgtctgcaccaaattctcttccctcgttagggatttctgttggaagaccaaatgctccctcaccatcccccaagacctcctctc

SEQ ID NO: 203381 - DNA, 245 bp, Glycine max
caccccttcttccttttcatcaggtttattccttttcttttggttcaattttgctgaatggagagtgcaagaatcagcaaatggttaaatctctagtttgtgtactgctattgcttaaggcagaaggatctcttgttccattgactttggtgaagaatgcagaatcaaaaggagctgtttgtttggatggaagccccccagcataccactttgacaacggatttgaagaagggattaagaactgg

SEQ ID NO: 203382 - DNA, 178 bp, Glycine max
  unsure (1)..(178): unsure at all n locations
aaggattctactcgccgctcgatgggaattgcgcttcaaggcgtctcttanngctaatccgcctcacgagggtcaccaacggcacgttgcctttgggggccgaggccccctactgctggtcggcaaacggacggcgggcgcacgcgtcgcttctagcccggattctgacttagaggcg

SEQ ID NO: 203383 - DNA, 277 bp, Glycine max
cgacaacagaagaaaacaaaatggaagacacagtttctgcgttgaggtctttgatggtttctcactctccgccgctggatgccacagtggtgccctctgaagattatcacctgagcgaatatgtgtctgcacgagtcaagcgccgcgaattcgtttccggcttcactggaagtgccggcttaccacttataacaaagaaagaagcactgctgtggacggatggacggtattttttgcaggctgagaaagaacttagtgctgggtggaagctatgcga

SEQ ID NO: 203384 - DNA, 228 bp, Glycine max
cttcttctattctcacacatacccatctactccttcactcatggctgaacaatcttccaactccatttacgatttcactgtcaaggacatcagtggaaatgatgtgagtctgaatgattacagcgggaaggttctactgattgtgaatgtcgcctctcaatgtggtttgacacagacaaattacaaagaattgaatgtattgtacgagaagtacaagattcagggatt

SEQ ID NO: 203385 - DNA, 269 bp, Glycine max
gttgcagtcaggaaagcaattcatgctgaatcggaaaaagtggcgggtccgtgggaattatgtacgggaaggatagagtaccatcacaatgctggaagcatgattccttaccacaagaacctaaccaggctgggctataaggcacttattttcagtggcgaccatgatatgtgcgtgccatttaccggaagtgaggcttggacacgatctttgagatataagattgtgggacaatggaggccatggaactcaaataaccaagtgccggg

SEQ ID NO: 203386 - DNA, 273 bp, Glycine max
caaaacacaaaaactctcacccatgatggaaccaccaaatataactaattgactgcaattcacccgaatttgagttctggatgctccgaaacccttctttccctcaaccgaatcttctctccgccgacgaactcttcgtcgacggcgtcctcctccctctccatctcctccctaacaaaccagaccctccccaagcctccaactttataactccgatccaagaacccgacccggaacccgaacccgaacattcgccgagcataacggattcta

SEQ ID NO: 203387 - DNA, 160 bp, Glycine max
cggctacatcgtcatcaaaggccgcccctgcaaggttgtggaagtttcgacttccaaaactggaaagcacggtcacgctaagtgtcactttgttggaattgatattttcactgccaagaaacttgaggatattgtgccctcttctcacaactgtgatgtt

SEQ ID NO: 203388 - DNA, 284 bp, Glycine max
ctacaattaaggtctctcatacagtagtattttatctgcactacgaactggctactttatttatgtaagcagaggcaggtgagtgagtgtgtgagctagagtgaagaccgtctatgatggctcccaagggtttaatctttttggctgtgttatgcttctcagcactgtcactgagtcgttgtcttgcggaggatactggccttgttatgaacttctactaggaatcatgccctcaggcttaagacgtcatctttgtacacgtcaggcttctctatttgcgcgat

SEQ ID NO: 203389 - DNA, 155 bp, Glycine max
ctccctctttctcgtcactagctctgtgcattcttctctcgctctctgccttccatcacactcggcatttcctttcccaagatagtagaagatggcagacactgaggatattcaacctcttgtttgtgacaatggaacaggaatggttaaggctg

SEQ ID NO: 203390 - DNA, 235 bp, Glycine max
cgaaaattagggtttgtagtgtagcaggaagaagcagcaatggcgccgaagataacacgtaaggttagcagaaaccctgaattgataaggggaatcggaaagtactcgaggtcgcagatgtaccacaagaggggcatttgggctatcaaggccaaaaacggtggcgttttacctcgccacgaccctaaacccaagcctgaagctcctgctgaaaaaccacccaaattttaccctg

SEQ ID NO: 203391 - DNA, 278 bp, Glycine max
gtgagtgagatagagagagacgcttcgcaaatctcaatcgaatctcagaaaaatgagagaaatcatcagcattcacataggtcaggccgggatccaggtcggaaactcctgctgggaactctactgcctcgaacatggcatccagcccgacggcatgatgccttctgactccaccttcggtgtagcccacgacgccttcaacaccttcttcagcgaaaccggatctggcaagcacgtcccccgtgctgtcttcgtcgacctcgaacccaccgtcatcg

SEQ ID NO: 203392 - DNA, 274 bp, Glycine max
ctgattgtcgtgactcgttcttcttcctcgttatcttcttcttttgtcgtttgtgtgttcgttttttctctcacctgaaaatgtcttgctgcggtggtaactgtggttgcggaagcgcctgcaagtgcggcaacggctgcggaggctgcaagatgtacccagacttgagctacaccgagtcaaccaccaccgagaccttggtcatgggagtggcaccagttaaggctcaattcgagagtgctgaaatgggtgttcccgctgagaacgatggctg

SEQ ID NO: 203393 - DNA, 279 bp, Glycine max
ctcgcttgtgctgccttcgtttgcgtttttatcacagaggaattaacatatatatagcaagcatggcagtcacactctacgaccttagctcttcctctgggttgaacaaacttgatgagtaccttctcccacgcagttacatcaccgggtaccaagctacaaaggatgatcttactgtttatgcagctttgccaactgctccatcagatgaatatggaaatgtttccaggtggtacaagcacattgatgctttgttgagaatctctggtgttactggcg

SEQ ID NO: 203394 - DNA, 158 bp, Glycine max
cgaatatcttgttgtttggagcgatccgagaaaaactctgtaaacatgttggtttaccaggacctccttacaggtgatgagcttctctctgactccttccgttacaaggaaattgagaatggaatgctgtgggaagttgaggggaagtgggttgtcaa

SEQ ID NO: 203395 - DNA, 271 bp, Glycine max
cggctcgagtgctgttcttgcgcgtgaacaagcctcaggtaagccaaaaccatggttaagcataacaatgttatcccaaacggacacttccgtaagcactggcagaactatgtgaagacttggttcaatcagccagcacggaagacaaggagacgattggctcgtcagaagaaagctgtgaagatattccccagacctacggctggacctctcaggcccattgtacatggtcaaactttgaaatacaacatgatagtgagaggtggaaggg

SEQ ID NO: 203396 - DNA, 274 bp, Glycine max
taccaattaaggtctctcatacagtagtattttatttgcactacgtactggctactttatttatttaagcagaagcaggtgagtgagtgagtgagcaagagtgaagagcgaagagaatggctcccaagggtttaatctttttggctgtgttatgcttctcagcactgtcactgagtcgttgtcttgcggaggataatggacttgttatgaacttctacaaggaatcatgccctcaggctgaagacatcatcatagaacaagtcaagcttctcta

SEQ ID NO: 203397 - DNA, 160 bp, Glycine max
atcatggcagacgagacccagaacaagtatgagagctctgaggttgaggtccaggatcgtggtgtttttgactttctcggtaagaaaaaggatgaagaagacaagcctcatcctcaggaggaggtcatcgccaccgagtttcaaaaagtcactgtctcag

SEQ ID NO: 203398 - DNA, 274 bp, Glycine max
aggaaacagtgaggactagagaaggagcaatagccaaagacaccactgaaactgaactcaccaaaatccctctcctccgggcaactgttgaaacacttcatccctcttccaaggaagaggatgattttatgattagaagattcctgcgtgctcgtgatttagatgtagagaaggcttcggcaatgttcctcaagtacttgaaatggagacatgaatttgttccaaatggttctgtatcagtgtctgatgttcctatcgaacttgcacaggataa

SEQ ID NO: 203399 - DNA, 248 bp, Glycine max
caatcatcctcgctctatgcttcagcatgtgtggcgggggacagcgctgcttatcaaaggacatcgacattcagggatgatgttgtgatcgtggctgcttatcggactgctcattgcaaaggtaaacgtggtggtttcaaagatactcttcctgatgatctactggctcctgttttgaaggctgtaattgagagaaccattgtgacccccagcgaagttggggatattgtcgtagggagtgtattggc

SEQ ID NO: 203400 - DNA, 272 bp, Glycine max
cttctttctccaaacctacctttctatcttttctttttcatcggagcattatttgataccctcttgagtcctctctgcagcaacgcatttttcctcattctcttaaacaatttaacttctcctcgtttgatctgcataaaattgcattaatataaaaaatgaagaagtttgtactaaagttagatttgcatgatgacaaggataagcagaaggccttgaaaacagtttcaactctttcaggaattgatgccatagccatggatatgaaagag

SEQ ID NO: 203401 - DNA, 240 bp, Glycine max
caagcaccatgaggagccttaattgcttcccgcttaatttgggccttgaattttcttccccttctctatgtggaagaaatctgtaagatattatgcaaaaaataattaaggtgtttttctttaaatgggttggttgattggttcaatgaaccgatcaagaccacagcaggttcatggggatgcgaggactaagacgctttgttttctaatcttccgatgtcactcttgtttgtaagttgg

SEQ ID NO: 203402 - DNA, 272 bp, Glycine max
ctattccacaactggtagttacttcaatggaggcttgcagtcttcgggtttggttccagtcatggcacatgcaccggctgagaaaggagtgtctggatttttgttggatttcatgatgggaggagtgtcggctgctgtgtccaagacggctgcggctccaatcgagcgagttaagttgctcatccaaaaccaggatgaaatgatcaagagtggtcggttgtctgaaccatacaagggaatcggcgattgtttcagtcgaaccatgaaggatg

SEQ ID NO: 203403 - DNA, 267 bp, Glycine max
caggaatatggcttccttaagctcctcattagtgctgctccttgcagctctaattctatcccctcaagttcttgctcactatgagaagcccccaatttacaagccacctgtttacacaccgccagtttataagcccccagtacaaaaaccaccagtgtacaaacctccagtttacaagcctccagttgacaaaccacctgtttataagcctccagtttataagccacccatttacaagcctccagtgtataaacctccagttgaaaa

SEQ ID NO: 203404 - DNA, 237 bp, Glycine max
  unsure (1)..(237): unsure at all n locations
ctttaaagttacatagtttttcattgttttacttaatctacaatggctgcttcaacaatgactctctcttcatcatcattggctggccagctatcaagctgccccctccacccctgagcttgagatggaagggtagctgaggaaacagctccanactgtttctcaggaagccatggtacggccagaccgtgtcaagtactggagccatctctggtgagccccatctatctcactgtg

SEQ ID NO: 203405 - DNA, 277 bp, Glycine max
atccctaacgcgtgcatagcagagtcagagacagagacgcagccatgagggcggagacctgcgaggtgttataggcaaattaagaacaagccataccccaagtcacgtttctgccgtggtgttcctgatcccaagatcaggatttatgatgttggtatgaagaagaagggtgttgatgagtttcctttctgtgtccatctggttagttgggagaaggaaaatgtttcaagtgaggccctggaagctgctcgcattgcttgcaacaagtacatggcca

SEQ ID NO: 203406 - DNA, 158 bp, Glycine max
ccagcatgcgcacagactttgcaagaaccaattggtcaaattttaaaaaggactgagctagtagataaactcatcctggagaagatatcatgtcctttgggtgtccttctggttatatttgagtctcgacctgatgcccttgttcagatagctgcatt

SEQ ID NO: 203407 - DNA, 274 bp, Glycine max; identical to SEQ ID NO: 152037

SEQ ID NO: 203408 - DNA, 270 bp, Glycine max
aagcaaaaccctagcggcgcctgctttctttgttcgtgttttgcatcaggatggagtctcaggtgaagcacgcacttgttgtcaaagttatgggtcgtactggatccagaggacaagtgacccaggttagagtgaagtttttggatgatcagaaccgtcacatcatgaggaatgtgaaaggacctgtgagagaaggagacattctcaccctactcgagtctgaaagggaagcaagaagattgcgctagatggtctcttttttttggcttg

SEQ ID NO: 203409 - DNA, 269 bp, Glycine max
ccctaacccagacgagaaaacggcaaagaatttcaacgaacatgggactcacgtttcgtcgacggcagtgggattgccggtgagtggcgcatcgttctatggtctggcggcggggacggcaaggggtgggtcccctgagtcaaggttggcggtttacaaagtgtgtggggcttttgggtcatgtcctgggtcggccattcttgcggggtttgacgatgccattcacgacggagtggatatcttgtcgctgtcgctcggtggattcggtg

SEQ ID NO: 203410 - DNA, 206 bp, Glycine max
actcgagccgaatcggctcgaggcagaaagcaagctcatcctagagacctaaaaatggcagcaacctcctccatggctctctcatccccatccttggctggcaaggccgtgaagctgggcccatcagcccccgaagtcgggagggtcagcatgaggaagaccgtcaccaagcaggcctcctccggaagcccatggtacggcccaga

SEQ ID NO: 203411 - DNA, 271 bp, Glycine max
gcgagaataagccagtggttgatccttctggtgtgtgcgctgctgttgctgatatcagaagcatcttatgtgccaatcactattgttcagaacgcggtagcaaaaggagctgtttgtttggatgggagtccaccagcttatcattttgataggggatttggatcagggattaacaattggttggttgcatttcagggaggaggatggtgcaacaatgtcactacttgccttgctcgcaagaccaatcgtttaggttcatctaagcaaatgg

SEQ ID NO: 203412 - DNA, 159 bp, Glycine max
gaaaccttttatgagcaatttgatccagattttatcaacattaggacaaaggctcgtgaagttctgcaaagggaagatgacctgaatgaaattgttcaccttgtgggcaaggatgctttagctgaaggggataagatcaccctaggaactgcaaagctt

SEQ ID NO: 203413 - DNA, 269 bp, Glycine max
ctctttctccgagaacaaaaaaaaaaaaaaaaaaaatccgggatccgccctcctctgggaaaagtgaaacccagaattacgaccgaaagaaaagagcgttttaaaagtgaaaaaagagggggttgccgtccacgaagctgtccaccaggttttttccgaaaagggaaatgaggttcctaagggaaggccccgatcctccgggaaaaccacccatcttgaaaaagcccaaccttggaaaattggccaccatttcccccacaacgggttta

SEQ ID NO: 203414 - DNA, 273 bp, Glycine max
attgcaagaatggcacttcgttgcttggtgatgtccctttctgttctcttcactcttggtcttgcgagagaaagccatgccagagacgaagatttttggcatgctgtttggccaaacactcccattccaagttcattgcgagatcttctaaagcctggccctgcaagtgttgaaaccgatgatcaccctatgcaaattgaagaaacacagtacccgaaaaccttcttctataaagaagaccttcatccaggcaaaacaatgaaagtacaattc

SEQ ID NO: 203415 - DNA, 272 bp, Glycine max
aacagagaaagaaaggaacatttgagcaaaaatggttcaagcacagcctctacaacatgttggtaatggtgcagggaaagaagatctagcttataattttgatccaagtgctccaccacccttcaagattgcagatatcagagcagcaattccaaagcattgctgggagaagaacacattgagatctctgagttacgttctgagggatgtgttgatagtttctgcattggtagctgcagcaattggcttcactagctggctcttctggccac

SEQ ID NO: 203416 - DNA, 274 bp, Glycine max
ctaaacaggaccgttatgctcttaggacttcaccacaatggcttggtcctctaattgaagtgattagattctctaccaagtcaattgagagggagattaactcagtcaatgacaaccctttgattgatgtgtcaaggaacaaggcacttcatggtggtaacttccaaggaactcctattggagtctccatggataatacacgtttggctcttgcttcaattggtaaactcatgtttgctcaattctctgagcttgtcaatgattattacaacaa

SEQ ID NO: 203417 - DNA, 273 bp, Glycine max
agaatatcttgttgtttggagcgatccgagaaaaactctgtaaacatgttggtttaccaggacctccttacaggtgatgagcttctctctgactccttccgttacaaggaaattgagaatggaatgctgtgggaagttgaggggaagtgggttgttaaaggagcagttgatgtagacattggtgcaaacccttctgctgagggtggaggagaagatgagggagttgatgatgcagctgttaaggttgttgacattgttgacacattcagactt

SEQ ID NO: 203418 - DNA, 230 bp, Glycine max
  unsure (1)..(230): unsure at all n locations
gctcattatagctcatcgccttaacaccattattgattgtgatcggattcttttgcttgatggtggtaaggttcttgaatatgatacccctgaggagctgttgtcaaatgaaggtagtgctttctctaagatggtccaagtacaggagcggcacctgcccaatatgacgcagcttncccttggaggggtaagtcgaaagagagagacgagcatctgatggcagagaaatg

SEQ ID NO: 203419 - DNA, 253 bp, Glycine max
ctcagaagcactcaaaagtaaacactcaaaacacttggtattaatttgttcttcttattcttcaatttgttgtgcctctagttcttgtttctaagctaagaatatgtctggggtttgggttttcaagaacggtgtggtgaggctggtggagaaccctggctcagagcgcaaggtgttggttcacactgcaagcaacgaaatcatcacttcctatgcagtgttggagcacaacttagctcactggggtgggagc

SEQ ID NO: 203420 - DNA, 238 bp, Glycine max
aagagatctgatccggagcgatgagtgagagtgagaagcagagggtaacggggaaggtgaagtggttcgatgaccagaagggttttggcttcataaccaccgacgacagcggcgaggaattcttcgtccaccagtcctccatccgatccgacggcttccgcagcctcgccctcggcgagtccgtcgagttccttattgactccgatcccgaaggccgcaccaaggccgtcgatgtcac

SEQ ID NO: 203421 - DNA, 291 bp, Glycine max
gcaagccccactcaaccaccacacctctcctcgttcacgctacccctttctgctcttcttctacctttcaagttttaaaagtatacagatggcagagacattcctatttacctcagagtcggtgaacgagggacaccctgacaagctctgcgaccaaatctccgatgctgtcctcgacgcttgcctcgagcaggacccagacagcaaagttgcctgcgaaacatgcaccaaaaccaacttggtcatggtcttcggagaaatcacgaccaaggccaacgttgactacgagaa

SEQ ID NO: 203422 - DNA, 157 bp, Glycine max
gcgaagagaatggctcccaagggtttaatctttttggctgtgttatgcttctcagcactgtcactgagtcgttgtcttgcggaggataatggacttgttatgaacttctacaaggaatcatgccctcaggctgaagacatcatcaaagaacaagtca

SEQ ID NO: 203423 - DNA, 257 bp, Glycine max
ccgagttccgagttgcgagttgcagagagagcaatgagtcaggaatcgtttatatatagcttcgtggctcgggggacgatggtgttagccgagtacaccgagttcactgggaacttccctgcaattgcagctcagtgcctccagaaactaccctcttccaataacaagttcacctacaattgcgaccactcacaccttcaattttctcgtcgaagaggttacgcttactgtgttgttgccaaggaatctgttagcaa

SEQ ID NO: 203424 - DNA, 281 bp, Glycine max
ggttctcctgagctgtgtttattctctttctctgccctctcatcttcgagctccgatggcgagcctgtggcgcgcggcaaccggcatgacggacaacgccaccgattacgacggcgtcgagttctggtcgaaccccgagcggaccggctggctcaccaagcagggcgagtacatcaagacctggcgccgccgctggttcgtcctcaagcaaggcaagctcttctggttcaaggactccgccgtcacgcgtgcgtctcgtccacgcggcgtggtccccgtcg

SEQ ID NO: 203425 - DNA, 304 bp, Glycine max
gaaaccttttatgagcaatttgatccagattttatcaacattaggacaaaggctcgtgaagttctgcaaagggaagatgacctgaatgaaattgttcagcttgtgcgcaaggatgctttagctgaaggagataagatcaccttagaaactgcaaagcttttgagagaggattatcttgctcaaaatgcctttacaccatatgacaaattctgccccttctacaagtctgtttggatgatgcgcaacattatccatttctacaatttggcaaatcaggcagtagagaggggagctggttcagatg

SEQ ID NO: 203426 - DNA, 235 bp, Glycine max
attcattcaagattcagcaagtgcgttttggaagcagagaccgaaatacttcgagatggcccgtacaaagcaaactgctcgtaagtcaactggaggaaaagctcccaggaagcagcttgcaaccaaggctgcacgtaagtctgcaccaacaactggtggtgtgaagaagcctcatcgttatcgccctggaactgttgctcttcgtgagattaggaaataccagaagagcactgag

SEQ ID NO: 203427 - DNA, 156 bp, Glycine max
ggaagtgatgcctcaggaacaatgggtggggcatgtggatatggcaacctctacagccaagggtatggaacaaacactgctgctttgagcactgctttgttcaacaatggccttagttgtggctcatgctatgaaataaggtgtgtgaatgcccat

SEQ ID NO: 203428 - DNA, 100 bp, Glycine max
ctcggatcttttgtgcaatcgcccgggaatttcgacagttaaatatcactacgatcgtttcattagcacccgtggtattatacgacgaaactgtgctatg

SEQ ID NO: 203429 - DNA, 290 bp, Glycine max
  unsure (1)..(290): unsure at all n locations
gtagttgagaactaagaaggagaagcaantggcttcctcaatgatctctcccccagctgttaccactgtcaaccgtgccggtgccggcatggttgctccattcactggcctcaagtccatggctggcttccccaccaggaagaccaacaatgacattacctccattgctagcaacggtggaagagtgcaatgcatgcaggtgtggccaccagttggcaagaagaagtttgagactcttcctacctgccagaccttgatgatgcacattggcaaaggaagtagaatacctt

SEQ ID NO: 203430 - DNA, 297 bp, Glycine max
  unsure (1)..(297): unsure at all n locations
cagagaaatttatttgagtggttccccggtgagaaaacagggtatccaatgttttcacttttaattttgcctataagcaatgtaattggttaatgcaaacaagggagccgcctttggaggatcgaagccagacaattgttccttggcatcctttaacaattcttgagcaaattcctttgacttatctatccccaatagcttgggataagtaaccttatcagccaccaaatccttccccgccgtcttccccaattcctccgacgattcgtaacatccagaatgtcgtccanaacctga

SEQ ID NO: 203431 - DNA, 149 bp, Glycine max
gacgcttcgcaaatctcaatcgaatctcagaaaaatgagagaaatcatcagcattcacataggtcaggccgggatccaagtcggaaactcctgctgggaactctactgcctcgaacatggcatccagcccgagggcatgatgccttctg

SEQ ID NO: 203432 - DNA, 291 bp, Glycine max
cttctctggttgattcggatctagagtcttcagtttctcctcgttagttcttcgctttcctgttttcaatttcgattctttcgttaatttaataagatgtttgggagggcaccgaagaagagcgataatacgaggtactacgaaatcctcggcgtctccaagaacgcttcgcaggatgatctgaagaaggcttacaagaaagccgccattaagaatcaccccgacaagggcggtgatcccgagaagtttaaagagctggcgcaacttatgaggttctgagtgaccctgaga

SEQ ID NO: 203433 - DNA, 257 bp, Glycine max
tttacttctcagcagcttcggctagggttcagaaacgaaaaagggttcggtgttctgttcgcgatgagagccaagtggaagaagaagcgtatgaggaggttgaagaggaagcgccgaaagatgagacagagatccaagtagtgcgttaaacctagtttgtttctgttgcttttacaattgcttatgttgtcgaatgggacacccagttgttagtggcactggtttctcctttttgatgtttgatacattttgttgga

SEQ ID NO: 203434 - DNA, 246 bp, Glycine max
gtagctgaatgctttgataagattcgtgtaaaccctggaaattttgctgatagacgggctcaatttgaaacattagagtacacagaagaagactatcagaaagaacttgagcatattgaaaaggttttcacaccattggttgagaaatgtaagaaatatgggagagcaatgcgcattgggacaaaccatggaagtctttctgatcgtataatgagctaactatggagactcgcctaggggaatggt

SEQ ID NO: 203435 - DNA, 287 bp, Glycine max
aaaagcgtgaaggacagtgataggtttggttttgaaggaagaagaaaatgaaggccatagtgataacgaggccaggaggtcccgaagtgctccaacttgaggaagtggaagatcccctagtcggagacgacgagcttctcatcggagtccacgccacttcccttaacagagccgatacctttcagaggaaaggctcctaccctccccctaagggcgccagccttacctcggtctcgaatgttccggaactgtcctttccctgggtaaaaagtttccagctggaaaat

SEQ ID NO: 203436 - DNA, 290 bp, Glycine max
actcgagccgattcggctcgagggaaaaatggtgtcgctgaaactgacagaagcgcctctccgcaagcgtgctcaagtgcggcagaggaaaggtttggcttgaccccaatgaagtcaacgaaatctccatggccaattctcggcaaaacatcaggaaattggttaaggatgggtttatacatcaggaagccaaccaagattcactcccgctcacgtgctcgtaggatgaaggaggcaaagaggaagggccgccactccggttatggtaaacgtcagggtacaagggaggc

SEQ ID NO: 203437 - DNA, 286 bp, Glycine max
ctttctctctttttttgtgtgtccaaaatggctcctagttctgctcacaacaatgggttctatgtgcttatgctagttgggatagtggttagcactatggttgctacctgtgctggtagcttctaccaagactttgatctaacatggggtggtgaccgtgctaagatattcaatggtggccagcttctatcactttccctagacaaagtctctggctctggcttcaaatcaaagaaagaatacctatttgggaggattgatatgcagctcaagctcgttgccggca

SEQ ID NO: 203438 - DNA, 253 bp, Glycine max
atatagcccaagccctatacaaccaaaccctaacacacacccatttgattcagtttccatggctagcctcaaggttgcatttttggctgcagtgctctgcatggttgtggtgagtgcacccatggcacatgcagctatcacgtgcgggcaggtgacgaatagcctgatcaattgcatcggttacctccagaacggaggaacgccgccgtcgggatgctgccacggagtgaagagcctcaatgccgccggccag

SEQ ID NO: 203439 - DNA, 157 bp, Glycine max
gctccgcaccagtttcaccgcacgaatatcttggtgtttggagcgatccgagaaaaactctgtaaacatgatggtttaccaggacctccttacaggtgatgagcttctctctgactccttccgttactaggaaattgagaatggaatgctgtgggag

SEQ ID NO: 203440 - DNA, 259 bp, Glycine max
aaccactcttaatttctctctgccttgctcatttacacacctctccaacctttcactttcagctttatttgaatccctctctctcctttccaaatggccagcgttgaggttgcacatcaaacaccaacaacagttccagaaaatgaaacaaccgaggtaatcaagacccaggaaacaaccccggaaccagtaccagccactgaggctcctgcaacagaacaagcagcagctgaggttcatgctaaaaaagaacaacaag

SEQ ID NO: 203441 - DNA, 261 bp, Glycine max
ccgaaagtcacatttttcttttcttttctttttctctgaaagatctgtgactattattattattattattatttctgatttttgtgggaaaatggctgactgggcaccggtgttgatcggggtggtgctgttcgtgctgctccaaccggggctgcttttttcctttccgggaaacgggaagcagctagagtttgggagcatgaagtccaacggcaaggccattttcatccacactctcatcttcttcgccctctactcaat

SEQ ID NO: 203442 - DNA, 225 bp, Glycine max
ctccaatggagtttcatagcattaccaagtttcacaatatcccacttgtgtcttcttctcttgtgattttatgtattgctaccactatactgaataaccctgcaatggccacaaagcaatattattgtgatttccctgccatctttaactttggtgcctcaaacgctgacactggtggcttggctgcttcattttttgttgctgcaccaaaatcaccaaatggag

SEQ ID NO: 203443 - DNA, 286 bp, Glycine max
atgggaacaagtttgttgccgggggagaagatatgtgggctcacgtgtttgatttccatacagggaatgagattgcatgcaacaaggggcaccatggtcctgtccactgtgttcgttttgctcctggtggagaatcctatgcctcaggatctgaggatggaaccatcagaatatggcagactggccccttgaccctggatggctcggagactgtgtctgcaaatggttcagttgataaggtgaaggttactgcagatgaggcttcgcataagattgatggttttca

SEQ ID NO: 203444 - DNA, 255 bp, Glycine max
ggaagaggaaccctagctagggcatggaagaagctgaaccgagaagatggtgcagcgtctcacctagcgcaaacgccacagctatgctaccaaatccaaccagcacagagtcgtcaagactcccggtggcaagcttgtttatcagaccacgaagaagagggccagcggacccaagtgccctgtcactggaaagaggattcaagggattccacatttaaggccagcagagtataatagttcaaggtcacacagaaa

SEQ ID NO: 203445 - DNA, 282 bp, Glycine max
tacgtagctcggattcggtcgagtgttatgggatttccttaggattcgatgcatgcgtttgggaatgaaacatgagggccgttacttatccgtgtattagctagagatagggttccattgttttctctttgtttcttgttgattgccccatacttcccgataggggaaagagatactccatttgtgctatatttatggtatgtttttatttgtgtggtgtctggaaatggcctatttcattcccaatccttttcctccagtctctgggggatttgattgatg

SEQ ID NO: 203446 - DNA, 153 bp, Glycine max
aggtcttctcaggtgaacatgggaagagggaagattgaaatcaaacggatcgagcacaccaccaataggcctgtcaccttctgaaagcgccgcaacggtttgctgaagaaagctgatgacttatccgttctgtgtgatccggtagttgcccct

SEQ ID NO: 203447 - DNA, 255 bp, Glycine max
tctcgagccgattcggctcgagtggaactgcaacaatggtgccgcaacccattttgcatctaacccttttgtcattaataatcgctctgaccactctttccttggtcgatgccgccgatcccacatttggcttcacccctcttggattatctagtagctcaaacttgcaaatccaaaagccttacgacgttgcagtcaacgagcgctacagcttttcaaatggagtgcacagattttgggtatactccacggaca

SEQ ID NO: 203448 - DNA, 286 bp, Glycine max
ctctgcgagatcttgagtcgccgatttgaaaagatgagtaagcttcagagtgatgctttgcgtgaagccatctcaggaatcatggccgattccaaggagaagaatcgcaaatttgtggagaccatcgaactccaaatcggtttgaagaactacgatccacagaaggacaagcgtttcagtggctccgtcaagttgccccacatcccacgccccaagatgaaaatttgcatgcttggtgatgctcagcatgttgaagaggcagagaagataggactggactggatgg

SEQ ID NO: 203449 - DNA, 254 bp, Glycine max
ttcaagactgcgacgacgatccaagtgatagacactcgtcgcgatggaacgtgtagctgaatccgagcgaactctgtacccatacgtgactggatcctctgtagtcgctatcaaatacaaagatgggattctaatggccgctgacatgggaggttcgtatggatctaccctgcggtacaagagtgttgagcgtatcaagcctattggaaagcattctcttcttggtgctagcggggagataagtgactttcagg

SEQ ID NO: 203450 - DNA, 232 bp, Glycine max
agaatggctcccaagggtttaatctttttggctgtgttatgcttctcagcactgtcactgagtcgttgtcttgcggaggataatggacttgttatgaacttctacaaggaatcatgccctcaggctgaagacatcatcaaagaacaagtcaagcttctctacaagcgccacaagaacactgctttctcctggctcagaaacatcttccatgactgtgccgttcagagttgtg

SEQ ID NO: 203451 - DNA, 228 bp, Glycine max
ttcaagccgtagttaaagaaacgatgaggttgtatgcagctgcaccacttccaggtccaggtgaattcacaagtgagtgtaccttaggtggctaccgtatccaagcaggtaccagatttattttgaacatttggaagatgcagagagacccacgtgtatggtcagacccattagaatttcaaccagaaaggttcctcacgaaccacaagggtgtggatgtaaaaggtc

SEQ ID NO: 203452 - DNA, 263 bp, Glycine max
gcctgtcattcctgagaagtaccttgatgagaagaccatcttccaccttaacccttctggccgttttgtcattggtggccctcatggtgatgctggtctcactggaagaaagatcatcattgatacctatggtggctggggtgctcatggtggaggtgccttttcagggaaggaccctaccaaggttgacagaagtggtgcctatattgtaaggcaggctgcaaagagtgtcgtggcaaatggccttgctagaaggtgcatgt

SEQ ID NO: 203453 - DNA, 284 bp, Glycine max
aatttgtccaaacctaacgatctcgcatccattgctcgcaacacaatccacacttccgacgatgacgacgtgaggggagagcagtgggttgaagtagtgtcgtgggagccgagagcctttgtctatcacaattttctgacgaaggaggaatgcgagtatctaattgacatagcaaagccaaatatgcataagtcatcagttgttgatagcgtaaccggagagagtaaagacagcagagtacgtacaagctctggaacttttctggccagaggtcgggatcagat

SEQ ID NO: 203454 - DNA, 287 bp, Glycine max
ctctctctatctctcacacacactttctctctctctctctctcagccagatcttgtagcaatggcgagcgctcccactccacgcgaagagttcgtgtacatggcgaagctggcggagcaggccgagcgctacgaggagatggtggagttcatggagaaggtctccgcctccgccgagagcgaggagctgaccgtggaggagcgtaacctcctctccgtcgcctacacgaacgtgatcggcgctcgccgcgcctcctggcgcatcatctcctcaatcgagcagaagga

SEQ ID NO: 203455 - DNA, 262 bp, Glycine max
caaaggtgaagctcaggctcaggattcgagaggcagaccctccaaccctgccagacacggtggaatgattcccgctgcttttgttcttgggttgcaacttttgagataatggcaatagccgcagtagggaacaatctgataacctacgtgacgagtgagatgcacttccctttgtccaaggctgccaacctagtcactaactttgttgggaccatctttctcctcgccctcctcggcggctatctttccgactcttacctcg

SEQ ID NO: 203456 - DNA, 173 bp, Glycine max
gagaaataagggcacaatggtgtcgctgacactgcagaagcgcctctccgcaatcgtgctcaagtgcggcagacgacaggtttggcttgcccccaatgaagtcaacgaaatctccatggctaattctcggcacaacatcaggaagttggttacggatccggttatcatcacga

SEQ ID NO: 203457 - DNA, 281 bp, Glycine max
gccaatacgactattgccaaggcagtgggagactggttttatggtgcgacttctttccgtcacgtggattgcaattatccttacaacccttcttgccagaaccgtgtttttgatctaaaagaccaccctggaatatagacttgtttgatcaaatatatatcattcctataaaccagacttattggttaactggttattgaatatgaaaataacgtttataagttacaaagctagcaaaataagaaaagggaaccattacactggagcttatgttctgggag

SEQ ID NO: 203458 - DNA, 187 bp, Glycine max
agattgtaatggtgcatgttcacctttcgagatgccaccgtgccgctcacgtgattgtcgttgtgtccctataggactagttgctggtttctgcatacatccaactggactttcatctgttgcgaagatgatcgacgaacatcccaacttatgtcaatctgatgatgaatgcatgaagaaaggaagt

SEQ ID NO: 203459 - DNA, 171 bp, Glycine max
gattcgctcgccttgcttcgacacacaacagcaactgcagcaatggatcccaaacgaggtggacaggctccggctcttgccgctaagaggaagcctgagaaggtttcgaatccgttgttcgagaagcgtccaaagcaattcggaatcggaggggcgttgcctccgaagaga

SEQ ID NO: 203460 - DNA, 165 bp, Glycine max
cggctacatcgtcatcaaaggccgcccctgcaaggttgtggaagtttcgacttccaaaactggaaagcacggtcacgctaagtgtcactttgttggaattgatattttcactgccaagaaacttgaggatattgtgccctcttctcacaactgttgagttcccca

SEQ ID NO: 203461 - DNA, 121 bp, Glycine max
gcagaaagcaagctcatcctagagttttaaaaatggcagcagcctcctccatggctctctcttccccatccttggctggcaaggccgtgaagctgggcccatcagcccccgaagtcgggag

SEQ ID NO: 203462 - DNA, 164 bp, Glycine max
aaaacaaacccactaagatggcttcctttgtatccttcctagtgctgcttcttgcagcccttatcctcatgactcaagggcttgctacttactacaaaccaattaagaagccaccagtgtacaagcctccagtgtacaagccaccagttacaaaccaccggttt

SEQ ID NO: 203463 - DNA, 241 bp, Glycine max
cattctctctgtgtatttccctacctctcccttcaagatgcagatcttcgtcaagaccctcaccggcaagaccatcacccttgaggtggaaagctctgacaccatcgacaacgtcaaggccaagatccaggacaaggaaggaatccccccggaccagcaacgtctaattttcgccggaaacaacttgaggacggacgtacccttggtggctacaacatccagaaggagagaactcttcacc

SEQ ID NO: 203464 - DNA, 197 bp, Glycine max
gaaacattcagttatcagattttgattgttgcaactggctcaacagttataaggctgacagatttcggtgtagaaggagctgatgcgaaaaacatcttttatttgagggaggttgacgatgctgacaaattgtacgcagcaatcaaggcaaagaagaatgggaaagctgtggttgttgggggaggatacattggtct

SEQ ID NO: 203465 - DNA, 273 bp, Glycine max
caggaaagtaggaactcgcagccacttctccctttcttctgcgctccatcagtctcagccacgctccttctcttatgttgcagacggggagaggtttgacagttgcatccaccccactgccgttgttcatcccaatgccgtcattggccagggtgtttcgattggtcctttttgttctgtaagctcctctgcaacgctggggaatggttgcacactacatcctggaagccatgtttttggaagtacacagttaggggccaattgcatgttgat

SEQ ID NO: 203466 - DNA, 147 bp, Glycine max
ctcgagccgctttttttattaacgttggtgattctcttcaggttatgacaaatggaaggtaccgaagtgtgagacacagagtgttggcaaatgggttcaagtccaggctttcaatgatttactttggaggtccactttgagtgagaa

SEQ ID NO: 203467 - DNA, 177 bp, Glycine max
tcgatctcaaggccggaggtaaaagcaaaaaaaaccacaagaacagcacccaagtccaatgatatctatcttaagctcttggtcaagctttatcgcttccttgttcggagaactggcagcaaattcaatgccgttatactcaagagattgttcatggagccaggttaacaagccccc

SEQ ID NO: 203468 - DNA, 144 bp, Glycine max
caagatgttctactttttctttgaatcaaggaacagcaagaaggatcctgttgtgatttggttgactgggggaccaggttgcagcagtgaattggctgtgttttatgagaatggccctttcaagattgctaacaacatgtccct

SEQ ID NO: 203469 - DNA, 171 bp, Glycine max
agaaaattcagattcaaagggatgacactacatttgacgcatatgtggttggaaaagaggatgctcctggaattgttgtgattcaggagtggtggggtgtggattacgaaattaagaaccatgccgtgaagatttctcagcttggtagtgggttaaagctctaattccaga

SEQ ID NO: 203470 - DNA, 137 bp, Glycine max
actccccaaatttgaacactacagtggtaatgatgatcatccagctcaccagcttatgcttaacccttccaactattcatcaattgaaagtgcacttatttttgttggcttggctggattgagggatcctcctaggg

SEQ ID NO: 203471 - DNA, 121 bp, Glycine max
gaatgggaagggggaagatcgaaatcaaaagaatcgagaacacaacaaatcggcaagtgaccttctgcaagagaagaaatgggcttctgaagaacgcttatgagctgtcagtgctgtgtga

SEQ ID NO: 203472 - DNA, 260 bp, Glycine max
cctcctatggttccaaagctttctagttgcctttataatggcaggctagacatattgccttctagggcctgggaactagagtctattcatagcttggcagtcttggatatgataagggaacacataactactgtaactcgcttgagagctaaatctagtgtaactgactgttgggcaacaacccccgttagacaattcttacttgcccgagtttatgttgcctccattttataatgttactttttgaaaccatttcattg

SEQ ID NO: 203473 - DNA, 86 bp, Glycine max
ggtaagaccatcactctcgaagtcgagagttcagataccatagacaatgtaaaggccaaaattcaagacaaggaagggatcccacc

SEQ ID NO: 203474 - DNA, 137 bp, Glycine max
agaaacttcagattcaaagggatgacactacatttgacgcatctgcggttggaaaagaggatgctcctggacattgttgtgattcaggagtggtggggtgtggattacgaaattaagaaccatgccgtgcagatttc

SEQ ID NO: 203475 - DNA, 113 bp, Glycine max
ggaattaggatcgagtagatttccatttactctctctcagtttccaggaatcttgagctatgggaaagtcttacccaagcgtgggcgctgattacaagagagccgttggagaa

SEQ ID NO: 203476 - DNA, 178 bp, Glycine max
gattctacccgccgctcgatgagaattgcgcttcaaggcgtctcgtagggctaatccgcctcacgagggtcaccaacggcacgtgcctttggagggcagaggcccctactgatggtcggcaacggacggcgggagcaagcgtcgattctagcccggattcggacttagaggagttcag

SEQ ID NO: 203477 - DNA, 176 bp, Glycine max
tgaccttgttgaaatcatacggagatttccagaagaatactcccgaagagcgcaatgttagatttggtgttagagaacatgggatgggagcaatctgtaatggtattgctcttcatagccccggattcattccatactgtgaaactttctttgtcttcactgactacatgagagct

SEQ ID NO: 203478 - DNA, 90 bp, Glycine max
ggacaggccttagttgaagcattccaacccttgggaatctctgattacagctctatcttctggattgcacaccctggtggaccggaaatt

SEQ ID NO: 203479 - DNA, 94 bp, Glycine max
cgagaatggctcccaagggtttaatctttttggctgtgttatgcttctcagcactgtcactgagtcgatgtcttgcggaggataatggacttgt

SEQ ID NO: 203480 - DNA, 271 bp, Glycine max
ggcattatcagctgtctggcgactagcgaatcttgggcgacacttggatttgagtgaatcagtgaacaaggctgcgacagttgggtcaatcaagttgaaggtaccttcagaggtttctgaagcattatcactgggtcgtgctgttgttgctcttgaatctaccattatttcgcatgggatgccatatccccaaaatttggaaactgcaaaagaggtggaacgtattgtaagagagaacggtgcagttccggaaacaattgcaattttagat

SEQ ID NO: 203481 - DNA, 160 bp, Glycine max
gttactctgatgttttcattttcgttttttggcaggactccatatgttcaagaacaggtcaatataggttccggtccacctgattccaaagttagatggttcggttcatcaggcaatgaaccacggtttattaacacagtgacgtttcacagtaaggatg

SEQ ID NO: 203482 - DNA, 246 bp, Glycine max
ctctcctcgttcacgctacccctttctgctcttcttctacctttcaagttttaaaagtataaagatggcagagacattcctatttacctcagagtcggtgaacgagggacaccctgacaagctcatggacaaaatcatcgatgctgtcctcgaggttgcatcgagaaggaccagaacagcaaatttgcctgcaaacatgaacgaaaacaaccttggtcatggtctccggagaaatcacgaccaagg

SEQ ID NO: 203483 - DNA, 84 bp, Glycine max
gtcgttgcgaactaagaaggagaagcaaatggcttcctcaatgatctctgccccagctgttacaaatgtcaaccgtgcaggtgc

SEQ ID NO: 203484 - DNA, 172 bp, Glycine max
tgttgcagtcaggacagcaattcatgctgaatcggaaaaagtggcgggtccgtgggaattatgtacgggaaggatcgagtaccatcacaatgctggaagcatggattccttaccacatgaacttaaccagtgctgggctataaggcaatgattaccagtggagaacaggata

SEQ ID NO: 203485 - DNA, 191 bp, Glycine max
ctcattttcaagctgtttggtgtaaagatgggacaagtgcttggttgtgttcaagtgaagcagtcaactgtagccgtcaaggaatgtttcgggaagtacgatgatgttcttcaacctggttgccattttgtgccatggtgtcttggctgcggtgtggctggtgtcctttctacgcgtgtcatgcagataag

SEQ ID NO: 203486 - DNA, 220 bp, Glycine max
ggtactgcgtttcggaagcagacacagatggctcgtacgaagcaaaccggtcgtaagtccacaggaggaaaggctcctaggaagcagcttgcaaccaaggctgcacgttaagtctgcaccaactactggtggtgtgaagaagccccaccgttatcgtcctggtaccgttgctcttcgtgagattaggaaatacccgaagagtaccgagcttttgatccgg

SEQ ID NO: 203487 - DNA, 221 bp, Glycine max
gcgaagataatggctcccaagggtttaatctttttggctgtgttatgcttctcagcactgtcactgagtcgttgtcttgaggaggataatggacttgttatggacttctacaaggaatcatgccctcaggctgaagacatcatcaaagagctggtcaagcttctctaaaagcgccaaagagcactgtttctcctggctcaggaacatccttccatgactgt

SEQ ID NO: 203488 - DNA, 253 bp, Glycine max
attgcgtactaagaatgtctgcaaggttgctccaattccaggggaaacgaaagtctggcagtatataaccctaacaaagaggatctttctgattgattgtcaaggtgttgtctaccacaacaatgatactgaaacagatgttgtgttgaagggagtggtgcgtgtaactaatttgaaagatgctgcagatcatataggtgaggttttaaaacgtgtgaagacagagatttggagagggcgtataaaataaaag

SEQ ID NO: 203489 - DNA, 246 bp, Glycine max
cgttttcgtaacccattctccatctcagaatggagaatgcgagcatgagccaatagttgatccttctggtgtgtgtgctgctgttgctgatatcagaagattcttatgtgccaatcactattgttaggaacgcggtagcacaaggagctgtctgtttggatgggagtccacaagtctatcagtttgataggggatttgggaccaggaattagcaattggtgggttgcatttgaggggagacggcta

SEQ ID NO: 203490 - DNA, 261 bp, Glycine max
tgggagttaacatggagactgcacagtttttcaaacgtgactttgaggagaatggctcggtggagacagtgacccttgttccttaatctggcgaatgatcctacaattgagcgtatcatcactcctcgtattgctcttactactgctgaatatttggcatatgaatgtggcaagcaatgttcttgtgatactcacagatatgagtgcttatgctgatgctcatcgtgaggtatctgctgcccgagaggaagtacctggtag

SEQ ID NO: 203491 - DNA, 141 bp, Glycine max
cgaagagaatggctcccaagggtttactctttttggctgtgttatgcttctcagcactgtcactgagtcgttgtagtgcggaggataatggaattgttatgaacttctacaaggaatcatgccctcaggctgaagacatca

SEQ ID NO: 203492 - DNA, 239 bp, Glycine max
tcggaattaggctagagctcgagccgcagctgttgcaacctcagctggggataagcccgtacgtgagcttatagctgatgatgcctggttgaatgggggattcattactactgttcaacaacgtggcgctgaagttatcaaagcgagagagctttcgggtgcacttcagctgctggtgcggcttgtgacaatattaggagacgggtgcatggaactctcagggacttgggatcaatggg

SEQ ID NO: 203493 - DNA, 120 bp, Glycine max
taaggatctcaagcgtggttttgttgcatccaactccaaggccgaccctgacaaggaagctgcacacttcacatcccaagtcattatcctgaacaatcctggccagattggtaatggata

SEQ ID NO: 203494 - DNA, 284 bp, Glycine max
tcggcggaagaagacaattcaactacgagttttaccccaagacacaagctaagaacacttacagcttaccttttctggttcaaaccaacgacggctaacgctgaaaacaacctctacccgtttgtttttctgaacgtggatggcaacctttttatcttctcaaacaaccgcgctatcttattcgattacaataagaacagtgtggtgagaacgtaccctcaaataccaggtggagcatccacggtgttatcctagcacgggttcggcggtttcgcttcctttga

SEQ ID NO: 203495 - DNA, 174 bp, Glycine max
  unsure (1)..(174): unsure at all n locations
ggacttctgctcgaggtctcatagcgctctgtgcgcgtactccgcaatggaatcgggttccaattcgtggagcgggaagtggcggctgacggcaacgttagggagtcncgagacgtagcgggggccccggaaacagttatcttctctgtatagcagactgcccaccctggagac

SEQ ID NO: 203496 - DNA, 275 bp, Glycine max
atcggctcgaggaatggctcccaagtgggttatctttttggctgtgttatgcttctcagcactgtcactgagtcgttgtcttgcggaggataatggacttgttatgaacttctacaaggaatcatgccctcaggctgaagacatcatcaaagaacaagtcaagcttctctacaagcgccacaagaacactgctttctcctggctcagaaacatcttccatgactgtgctgttcagagttgtgatgcttcactgttgctggactccacaagaagga

SEQ ID NO: 203497 - DNA, 276 bp, Glycine max
gtccattcatatatatcacaatttcaactgcaaattttgaacaaaacttaattaagaaatccttctccggagccatggcagatctcaagtccacattcttgaacgtctattctgttctcaaatctgaactcctccacgaccctgcttttgagttctccgatgatgctcgtaattgggtcgaccggatgctggactacaatgtgccgggaggaaagttgaaccggggactgtcagtaattgatagctacagattgttaaaagaaggacaggcattaa

SEQ ID NO: 203498 - DNA, 265 bp, Glycine max
ctcgagccgggaatatacaatgctctccagaaattgggtattgactggagctttgttggactcccagcttgaacttgaaggagtggactcgtttaagaagagctttgacagcctcctggattctctgcaagagaaggcaaactctcttaagttggtcagccactgaagtttgaacgtcatggttagtaatgcagtgctgtgtatgatggcatctatggattaataaaaggcagcggctgtgcattttgtgctgctgcaaatgtgc

SEQ ID NO: 203499 - DNA, 262 bp, Glycine max
tcaacgctacctcagatctgaatttctttgcttttggtatcaatgccgagaacaaccagaggaacttccttgcaggttcgaaagacaatgtgataagccagatacctagtcaagtgcaggagcttgcgttccctgggtctgcaaaagatattgagaacctaataaagagccaaagtgagtcctactttgtggatgctcagcctcagcagaaagaggaggggaacaagggaagaaagggtcctttgtcttcaattttgagggc

SEQ ID NO: 203500 - DNA, 264 bp, Glycine max
tagacaatccccagctcttcatgtttaccttggagaaacttcacgccgctatgggtaccaagttcatgattcccattgttggaggaagagaactagatttgcatcgcctctttgttgaagtgacttctcgaggagggattgccaaaataattagagagaggaaatggaaagacgtaacttcagtcttcaattttccatcaacagctacaaatgcttcttttgtgttgcggaagtactatgcttcattgctctaccattatgaac

SEQ ID NO: 203501 - DNA, 290 bp, Glycine max
  unsure (1)..(290): unsure at all n locations
tcggaatcggctcgagggtgaaccgacgacagagacccctactaccttgaccgtggttatgcacattgaatccctgcaggaaccactgtctatttggttaacccggacaagaagaaagatctcagagtgattaaactcgccatacccgttaacaaacctggcaattttgaggatttcttcctatctagcactcaagaccagcaattctacntgcaaggcttcagcgagaatattctggaggcttccttcaataccaaattcgaggagataaacagggttttgtttggtgg

SEQ ID NO: 203502 - DNA, 275 bp, Glycine max
tggtgactacaaaggaaaggtccttatcattgtcaatgttgcctcacaatgtggcttgactaattcaaattacactgagctcagtcagttgtatgagaaatacaaacagaaaggtctggaaattctggcgttcccatgcaatcagtttggggcacaggagcctggatctaatgtacagatacaagagtttgtttgtactcgcttcaaggctgagtttcccgtttttgacaaggttgatgtgaatggtgacaaggctgctccactgtacaaatatc

SEQ ID NO: 203503 - DNA, 279 bp, Glycine max
tggatggtcggaagccagaagatgtgaatgatgtacttgggatgcgagtgatattgaatcctaaggctggagagaattgattagaggctggagagagagcatgttataggactcatcagatcatccaatctatgtggaaggaaatcccttatcggacaaaggattatattgtcaggccaaaagcaaatggatataaaagtttgcatatggcagttgatgtgagtgaaaatggtaagacaagaccattgatggaaatacagataagaacaactgaaatgg

SEQ ID NO: 203504 - DNA, 270 bp, Glycine max
cgccagagacatggtgatccaacttaaagaagagcttctcatgaactccttcaagaccatcgacggaagaggtgccagcgtgcacgttgctgggggtccatgcataacgatacagtacgtgaccaacgtcatcatccatgggattcacatacacgattgcaagcagggagggaacgctatggtgcgggactccccacggcactacggctggagaaccgtatcggacggtgacggcgtgtccatcttcggagggagccacgtgtgggttga

SEQ ID NO: 203505 - DNA, 269 bp, Glycine max
ctcaatctcattcacctcaaccacttctcatcatctctatcaccccattttctcaaacacctacacaaaatgtgcttcctcaacacaaagtccctggctcacttcatgttgctaacaacaattgtagttggcattgcaatgggagattcatcaaaggacaaagaggaatgcactgagcaattggcaggcctagcaacatgtctgccctatgttgggggtcaagcacaagctccaaccccagattgttgtagtggtctcaagcaagtgct

SEQ ID NO: 203506 - DNA, 268 bp, Glycine max
cttgatcaagagtgaaaaacaaaaaaaatgatgggtacccttaaggtgtccaacagtagtttatacatattttcgaagttcctagtaatttgtatggtgatgatatcttctttggttgattcaagttattccttgtgtgattttgaggcaatcttcaatttcggggattcaaattcggatacgggtgggtttcatacaagctttccagcacaacctggtccctatggaatgacttacttcaaaaaaccagtggggcgtgcttctgatg

SEQ ID NO: 203507 - DNA, 266 bp, Glycine max
tcttcttctcttgcggctagggttttagcgcacttcttctagatttaaggaagatgggtaaggaaaaggttcacatcagtattgtggttattggccatgttgactctgggaagtccactaccactggccacctgatctacaagcttggaggcattgacaagcgtgttattgagagatttgagaaggaagctgctgagatgaacaagaggtctttcaagtatgcctgggtgcttgataagcttaaggctgagcgtgaaagaggaatc

SEQ ID NO: 203508 - DNA, 274 bp, Glycine max
tctcgagccgttttcgttctcgttctggtttatagatctttgcgaaggaggtttacagcgctcaaccaaagatgcagaacgaggaaggacagatcactgagctttacattcctaggaagtgctccgccacaaacagattgattaccgctaaggaccatgcttcggttcagatcaacattgggcatgtggatgagaatggcgtctacaatggccatttctccacttttgccctctgcggattcatccgtgctcagggtgatgctgacagtgctct

SEQ ID NO: 203509 - DNA, 269 bp, Glycine max
caactctgctaccctcttctctctctctcggatttcttgcgcggtttatcatgggggatagtcagtattcgttttctctcaccacatttagcccttctggaaagcttgttcagattgagcatgctttgacggctgtcgggtctggacaaacgtctttgggaattaaagctgcaaatggagttgtcattgctaccgagaagaaattgccatctatattggttgatgaagcatcagtccagaaaattcagttattaacaccaaatataggt

SEQ ID NO: 203510 - DNA, 271 bp, Glycine max
aaaaatggcccgatcatttatcaaaggccaatcttcggtagaagagaaggttcctttggaacacttatttctatttcagtataccgggtctctttctttcatttcaaaaaatttatagaatttcgattttgaaatgaaagaaaagtgtggggataaatataaatgacaaaaagatattggaacataatcttggaagagatgatggaagcaggagttcattttggccacggtactagaaaatggaatcctaaaatgtcaccttatatatctg

SEQ ID NO: 203511 - DNA, 267 bp, Glycine max
tgaactttgaagttttgttattttgtgcaatggcagccaagagcaaaatcctagtccttggaggaacaggatacattggaaaattcatagttaaggcaagcgcagaagcaggacaccccacttttgccttagttatagagagcaccctttctcatcctgaaaaatctaaacttattgagagcttcaagacctccggagttactcttctttatggtgatctaactgatcatgaaagccttgttaaggctatcaagcaagttgatgttg

SEQ ID NO: 203512 - DNA, 266 bp, Glycine max
tatctcgagccgattcggctcgagctttcacacacagatctgagttatgttaggtttattttgttaacaaaaaaaaatccccagtgtcgcagcaattagggttcgcgatcgagctatacctagaccctgcgttggagaatcaggttctgaaagcatggaacgttcttgcgagaagacaaatcagcacgcacctgatagaaatggagtctcggccacacataaccctattctcggcgccatttctagaaccttcgaagctcgaatct

SEQ ID NO: 203513 - DNA, 266 bp, Glycine max
tccgtcttcatcaatcagcatcaccaccgctccaacacaggggaaaatgagggagatccttcacgttcagggagggcaatgcgggaaccaggtcggttcgaagttctgggaagtggtgtgcgacgagcacggcatagatccgacggggaagtacgtcggaaactcagatctacaactcgagcgcgtgaacgtgtactacaacgaagcttcctgcgggcggtttgtcccacgcgcagtgctgatggacctggagcccggaaccatgg

SEQ ID NO: 203514 - DNA, 266 bp, Glycine max
cggctcgagcatgatcgctgctcgtaggaaggagcgggaatattttgagacaagtcctgaatatggacatttggcgcataaaatgggctcagaatatcttgctaagcttctatcccagcatttggagcaagttatcaggcagaagatacctagcatcattgccttaataaataagacaattgacgagcttaatgcagagttggaccgtattggcaggccaattgctgtggactcaggggcccaactttacactattttagagatgt

SEQ ID NO: 203515 - DNA, 267 bp, Glycine max
catcgagccgattcggctcgacttcctttctctctctcctcggtactccttctttcccactatcccctcctccgcatgcccattcttcttcctcccttccccttctctggataaggaaagacggagcaaagcgtaagaaaggcaggatgagtaaaaaacaaagagagcaaaatcactttgtcctggtgcatggtataggccatggtgcctggtgttggtacaagcttaagccactgttggaatccgccggccacaaagtcacagtcc

SEQ ID NO: 203516 - DNA, 264 bp, Glycine max
atttaatcctatcctatcgtagcaaagaaagaaagaaagaaaaccctagcttaccttttcaactttcaagatgcaaatctttgttaagacactcactggtaagacaatcacccttgaggtggagagttcagataccatagataatgtaaagtccaagattcaagacaaggaagggatcccaccagaccagcaacgtctcatttttgctggcaagcagcttgaggatggacgtacacttgctgattacaacattcaaaaggagtc

SEQ ID NO: 203517 - DNA, 248 bp, Glycine max
  unsure (1)..(248): unsure at all n locations
atttgcgccaccagtaatgttgganngcccaatctcggcacataaaccagagggcagagacaatcgtaccaaaggagccacgagtggttcctctgagccgtctgatgaggatgatgaagcaggtgcttgtgaacagagcacaaatccagctgatatgaagcgccttagaaggaaggtttctaatcgcgactctgctagaaggtcaagaagaagaaagcaagcgcattgtctgagcttgagttgcaggt

SEQ ID NO: 203518 - DNA, 283 bp, Glycine max
caggtcgagcaaagcatggatggtatcagcgagctaaataagggacccagagctgccaagagttctgataataaaaatatcaaaagtcttggacctgtcacattattactcaaaggacagaaccttccagtgaagagtgataacaaagaagttcctccagttcctgacaaggaacagtacaatgggaaagattttgctgagaattattctgatgcaaagttttttgtcatcaaatcctatagtgaggatgatattcataaaagcataaaatatagcgcatggg

SEQ ID NO: 203519 - DNA, 275 bp, Glycine max
gtatcttctcaccccagtttcactttctcattattttctctcctattgataaagaatcagagagagagagaaaaaaatgcctgcggtaggaggtattagcaacggagggggcaaggagtaccctggaagcctcactccttttgtgacggtaacatgtatagttgcagccatgggtgggttaatcttcggttacgatatcggaatttcaggtggggtgacatccatggatccgtttctgctcaagtttttcccgtcggtgttccggaagaagaatt

SEQ ID NO: 203520 - DNA, 271 bp, Glycine max
cgccaaggtaggttaaacactcttcttcatcgtcgtcgcaatgggacgtgtgatccgtgcgcacgtaagggagcaggctcggtcttcaagtcccacacgcaccaccgcaagggccctgcccgcttccggagcctggatttcggagagcgcaacggctacctgaatcatgacgtcactgacgtcatccacgatcctggccgtggcgcgcctctcgctaaggtcgccttccgccactcgttccgctacaagaagcagatcgagctcttcatcg

SEQ ID NO: 203521 - DNA, 262 bp, Glycine max
gaggagaaagatggaggggaaggagcaggatgtgtcgttgggagcgaacaagttccccgagagacagccgattgggacggcggcgcagagccaagacgacggcaaggactaccaggagccggcgccggcgccgctggttgacccgacggagtttacgtcatggtcgttttacagagcagggatagcagagtttgtggccacttttctgtttctctacatcaccgtcttaaccgttatgggagtcgccggggctaagtctaag

SEQ ID NO: 203522 - DNA, 260 bp, Glycine max
attctagggttagggttcccaatttctccaccgatcagaaaatgagttcaactggtggttctaccaagggcggaaggggcaagcccaaagcctccaaatccgtttcaagatcgcagaaagctggtctccaattccccgttggaagaatcgctcgattccttaaggctgggaaatacgccgagcgtgttggtgctggtgctcctgtgtacctctctgcagtgctcgaatatctcgctgctgaggttttggaattggctggg

SEQ ID NO: 203523 - DNA, 263 bp, Glycine max
aagagaatggctcccaagggtttaatctttttggctgtgttatgcttctcagcactgtcactgagtcgttgtcttgcggaggataatggacttgttatgaacttctacaaggaatcatgccctcaggctgaagacatcatcaaagaacaagtcaagcttctctacaagcgccacaagaacactgctttctcctggctcagaaacatcttccatgactgtgctgttcagagttgtgatgcttcactgttgctggactccacaag

SEQ ID NO: 203524 - DNA, 251 bp, Glycine max
agttattccgtcaaaacttgtacagacggtcaaaactatacgatgctagaaagtcctcctccattctatctagggatgctcgtacaagacgttgggcaatcaagaaatctgaaagtggctataagaggatggaggaattccttgctttaagactaagggaaattatgaagacaaattcctgcgacttttttgtgtccaaggttgcagaaattgaggctacaatgaatagtggttattacagtagccgtggg

SEQ ID NO: 203525 - DNA, 274 bp, Glycine max
ctgttcatcctttgcttcccaaagaaagagaaaataaaaagcaatgggtagccttgaagcggaaagaacaacagtaggattggcagcaagagacccttcagggattctctccccatacacctacaatctaagaaacacaggccctgatgatgtttacataaaagttcactactgtggaatttgccattctgatctccaccagattaaaaatgatcttggcatgtccaactatcccatggtcccaggacatgaagtggttggtgaggtactggag

SEQ ID NO: 203526 - DNA, 264 bp, Glycine max
gctgaagtttgctaggttcatgagcaggttcgggaagagttaccgaagcgaggaagagatgagggagaggtacgagatattctcgcaaaacctcaggttcatccgctcccacaacaagaaccgcttgccctacactctctctgttaatcattttgctgattggacttgggaggagttcaaaagacacagactaggcgctgcccaaaattgctctgccactcttaacggcaaccacaagctcactgatgctgttcttcctcccac

SEQ ID NO: 203527 - DNA, 258 bp, Glycine max
cacgatttgcagaatctccaagagagcatcatgaagacaaagcagcatatggatgttattatttggtgtacgagacatcaatttttggaagatgtgagatcacgttttactgatagttcgtcatggtcatcagttgttcggacaaggaaatcagaagcaattagacgtgcttggcctgatccaataaatcaatctgtggagtcatcaggacatgatgggtctctatttattgaagatgcaatgaataatcttgatctg

SEQ ID NO: 203528 - DNA, 263 bp, Glycine max
gagagagtgagagacggcaaagacggaggagaggtcgcaaacgcaaaaatggtgaagtttctgataccaaacaaggccgtcattgtccttcagggacgctacgccggcaagaaagccgtgatcgttcgaaccttcgacgaaggaactcgcgagcgcccctacggccactgtttggtggcggggataaagaagtaccctgcgaaggtgatcaagaaggactcggcgaagaagacggcgaagaagtcgcgcgtgaaggcgttcgt

SEQ ID NO: 203529 - DNA, 266 bp, Glycine max
aaccactcttaatttctctctgccttgctcatttacacacctctccaaccttacactttcagctttatttgaatccctctctctcctttccaaatggccagcgttgaggttgcacatcaaacaccaacaacagttcgagataatgaaacaaccgaggtaatcaagacccaggaaacaaccccggaaccagtaccagccactgaggctcctgcaacagaacaagcagcagctgaggttcctgctcaagaagaacaacaagcaactga

SEQ ID NO: 203530 - DNA, 261 bp, Glycine max
gcactatagaaaaaacgacattcattcatctatggctacccttattgctcccagcaaccactctccccaagaagacgctgaggctctcaaaaaggcttttgaaggatgggggactgatgagaaaactgtcatagtaatattgggtcatagaactgtttatcagaggcagcaaatcagaagagtctatgaggaaattttccaggaggatcttgtgaaacgcctagagtctgagatcaaaggagactttgagaaagccgtgta

SEQ ID NO: 203531 - DNA, 259 bp, Glycine max
gttggggtgttacccgccttccccgtaagactcacagaggtttgaggaaggttgcttgtattggtgcctggcatcctgcaagagtttcattcactgttgccagggctggtcagaatggataccaccaccgaactgagttgaacaagaaggtttacaagcttggcaaagctggagatgaatctcactctgctcttactgagtttgataggaccgagaaagacattaccccaatgggtggtttccctcactatggtgttgt

SEQ ID NO: 203532 - DNA, 253 bp, Glycine max
ctttctgtttgttcttcttccttattttcttccctagtcaaggagattcatctctgcaggttgttttagaaaagaaaaaatggtgaagatttgctgcattggtgctggatatgtggggggtccaacaatggcagtcattgctctgaagtgcccctccattgaagtggctgttgttgacatctccaaatcccggattgcagcatggaacagtgaccagcttcctatctatgagccaggccttgatggtgtggtg

SEQ ID NO: 203533 - DNA, 265 bp, Glycine max
ctctttcactcttcttgtatgatggagaagatccagcacagtgaggtggaagtgaagggactgaagcttcacgtggcagagattggaagtggctccaaaacagtggtattcttgcatggattcccagagatctggtacacatggaggcaccaaatgatttctgtggcaaacgctggttatagggctattgcctttgatttcagaggctatggactttctcagcaaccagcagagcctgaaaaggaaaccatgtctgatctggttc

SEQ ID NO: 203534 - DNA, 267 bp, Glycine max
cgcgtcgctccgcaccagtttcaccgcacgaatatcttgatgtttggagcgatccgagaaaaactctgtaaacatgttggtttaccaggacctccttacaggtgatgagcttctctctgactccttccgttacaaggaaattgagaatggaatgctgtgggaagttgaggggaagtgggttgttaaaggagcagttgatgtagacattggtgcaaacccttctgctgagggtggaggagaagatgagggagttgatgatgcagctgt

SEQ ID NO: 203535 - DNA, 259 bp, Glycine max
atcatattcgcctacgttgtcaccgacaaggggtccggtcggagggtgatgaaccgcgcttacttggagtattatcttgaggactattcggggtggttggaggagcgcgtggcgagtgatagctactgggggaagattgtttcgtgtgttagggattctaaagcatgtgggaggatggggataaccattaatgggatgcccgagactcctgatatgttctacatcagacatctcacccctattcagtctggttgctgca

SEQ ID NO: 203536 - DNA, 223 bp, Glycine max
  unsure (1)..(223): unsure at all n locations
ctcatgtcgattggaaatggtggcctttcatgctccatcgcatttggcgcagaccaggtgaataaaaaagataaccccagcaaccagagggctttaganacatntttcagctggtattatgcttctacagctttttctgtcgtaattgccctcacagtcatagtgtttatccaagatgcttttggatggaaagtaggttttggagttccagcagcacttatgt

SEQ ID NO: 203537 - DNA, 255 bp, Glycine max
aagagaatggctcccaagggtttaatctttttggctgtgttatgcttctcagcactgtcactgagtcgttgtcttgcggaggataatggacttgttatgaacttctacaaggaatcatgccctcaggctgaagacatcatcaaagaacaagtcaagcttctctacaagcgccacaagaacactgctttctcctggctcagaaacatcttccatgactgtgctgttcagagttgtgatgcttcactgttgctggac

SEQ ID NO: 203538 - DNA, 257 bp, Glycine max
tgacaaggccattatagcaatactgggtcacagaaatgttcatcagaggcaagaaatcagaaaagcttatgaggagatttaccaagaggatctcatcaaacgccttgagtccgagatctctggtgactttgagagagctatgtaccggtggatgttgcagcctgcggatcggtgatgctgttttggtgaatgtggcaatcaagaatggcaccaaagactaccatgtgattgcagagattgcttgtgtcctatcagct

SEQ ID NO: 203539 - DNA, 251 bp, Glycine max
gaccatgctacctcattcattaactatgattgcaacactaataatcatttttcttgcacaaacacttgtgggggtgagttcacttcctgaagctgataaaataaccaatttgccggggcagccacgggtcgaatttcagcaatattctggttatgtcaccgtggatgatcaaaatcaaagagctttgttttactactttgttgaggctgaagaaaacccttcttccaagccattagtcctatggttgaatg

SEQ ID NO: 203540 - DNA, 253 bp, Glycine max
gtggttatcatcttcttcttcctctttcttagatctcttctttctctacgccgcacgccgaaaccatggccggaaaaggagagggtcctgctatcggaatcgatctcggaaccacctactcttgcgtcggtgtgtggcaacatgaccgcgttgaaatcatcgccaacgaccaagggaacagaaccacgccgtcttacgtcggattcactgacaccgagcgtctcatcggtgatgcggccaagaatcaagtcgc

SEQ ID NO: 203541 - DNA, 261 bp, Glycine max
tacacatccctagctctgtcgttccgtcgttgacgatggcgtttcgggtgcgaaccctgacctccgctctctctttcttctctctctcttgtccatcgcttccgccaatgtcttcttcgaagagcgtttcgatgacgggtgggaaaatcgatgggttaaatcagattggaaaaaagatgagaacgtggctggggagtggaaccacacctctggtcaatggaatggagacgctaatgacaaaggtattcaaaccagtgagga

SEQ ID NO: 203542 - DNA, 257 bp, Glycine max; identical to SEQ ID NO: 153017

SEQ ID NO: 203543 - DNA, 257 bp, Glycine max
gagaatggctcccaagggtttaatctttttggctgtgttatgcttctcagcactgtcactgagtcgttgtcttgcggaggataatggacttgttatgaacttctacaaggaatcatgccctcaggctgaagacatcatcaaagaacaagtcaagcttctctacaagcgccacaagaacactgctttctcctggctcagaaacatcttccatgactgtgctgttcagagttgtgatgcttcactgttgctggactcca

SEQ ID NO: 203544 - DNA, 255 bp, Glycine max
actcgagccgaatcggctcgaggtcgtcgctgtttgtgtgtgtatacggtgcagctaccaaagatggtgaagggtcgtcaaagagagcgcgtcagactctacgtgaggggtacaatccttggatacaaaaggtccaagtccaaccagtacccaaacacatccctgatccaaattgagggagtgaacaccaaagaagaagtaggatggtatgctggcaagaaaatggcctatatctacaaggctaaggtgaaaaag

SEQ ID NO: 203545 - DNA, 253 bp, Glycine max
actgggtctgccggtggcggcgacggtgaactgcgccgacaacaccggcgcgaagaatctctacatcatatcagtgaaggggatcaagggaaggctgaaccggttgccgtcagcttgcgtgggtgacatggttatggccaccgtcaagaagggaaagcctgatctccgtaaaaaggtgctccccgccgtcatcgtccgtcagcgcaagccgtggcgccgaaaggacggtgtttacatgtacttcgaagataat

SEQ ID NO: 203546 - DNA, 251 bp, Glycine max
cttgttatgaacttctacaaggaatcatgccctcaggctgaagacatcatcaaagaacaagtcaagcttctctacaagcgccacaagaacactgctttctcctggctcagaaacatcttccatgactgtgctgttcagagttgtgatgcttcactgttgctggactccacaagaaggagcttgtctgagaaggaaacagatagaagctttgggttgagaaatttcaggtacattgagaccatcaaagaagc

SEQ ID NO: 203547 - DNA, 252 bp, Glycine max
ctggaagcacttgatcaagagtgaaaaacaaaaaaaatgatgggtacccttaaggtgtccaacagtagtttatacatattttcgaagttcctagtaatttgtatggtgatgatatcttctttggttgattcaagttattccttgtgtgattttgaggcaatcttcaatttcggggattcaaattcggatacgggtgggtttcatacaagctttccagcacaacctggtccctatggaatgacttacttcaaa

SEQ ID NO: 203548 - DNA, 248 bp, Glycine max
agacgctgcacgccacgcagcagatcgccgagtgttggacgcgctcggtgaagaagctgctggagagagtaacggagtcggtggagaaaaaggcgttggagaaggccgcgagtgagtgccatgcggtggagcggatctggaagttgttaacggaggttggggacatgaacctcatgatggatccagaggatttcttgaggctgaagaaggagttagggatgatgagaactgcgggcgaaacggtggcg

SEQ ID NO: 203549 - DNA, 250 bp, Glycine max
cttggaattcctttcggttctgtgctcaatgatgctgttcgtataagctatgctgcgcacctgatgcttgtatttccagttgtcttctttccgttgcgtcttaacatagatggtctcctcttctcaaaatcaaggcctctggttctggataacgtcagatttgcatcactcactgttgcccttattggtgttatcttcctgggagcaaatttcatacctagcatttgggatgccttccagtttactggag

SEQ ID NO: 203550 - DNA, 252 bp, Glycine max
ctcgagccgaatcggctcgagcggctcgagccctgttaagaaacctcctatttacaagccatcttacccatcgtaccctccaggctccaaatgaagacacccacctgattttgaattaagttaagggatgtattaagtatatgctaaataagaggtgtatctacaaccattgactttgtcatgctcaaaaatttagtttaatttacaaattatggcaagggttacacctggctagcttccgcgtttagatca

SEQ ID NO: 203551 - DNA, 250 bp, Glycine max
aagaacatgaataatttggtcctatccctagctcctaaattcacaaaattacagactttaatccttcgtcaagacaagcctcaactagaggacaatgctgttgaaactatttcaaatttttgtcatgacctccaaatcttggacctcagcaaaagtttcaagcttaccgatcattcgttgtatgccatagcccttggttgtcaggatcttacaaaactgaacatcagtggttgttcagcctttagtgaca

SEQ ID NO: 203552 - DNA, 258 bp, Glycine max
gcaaggtcagagaatgaaatgataaagcctacaattcaaggagtactaaacatcatgaaagcatgcctgaaggcaaaaactgtccgaagctagtattcacgtcctcagccggaactaccaacattactgagcaccaaaagcctatcattgacgaaacctgctggactgatgttgagttctgccggagattaaatatgactggttggatgtatttcgtttctaaaacacttgcggagaaagaagcttggaaatttgcga

SEQ ID NO: 203553 - DNA, 254 bp, Glycine max
agccaaggtaggttaaacactcttcttcatcgtcgtcgcaatgggacgtgtgatccgtgcgcacgtaagggagcaggctcggtcttcaagtcccacacgcaccaccgcaagggccctgcccgcttccggagcctggatttcggagagcgcaacggctacctgaagggtgtcgtcactgacgtcatccacgatcctggccgtggcgcgcctctcgctaaggtcgccttccgccacccgttccgctacaagaagca

SEQ ID NO: 203554 - DNA, 251 bp, Glycine max
atgggcatctatatcaatgctcgggttgtttattctatccacaacatttcttatcaaggaatatttgcattcgctgacttctcacttctaaatctcccagaccaatttaagagctcacttcactttattgatgggcatcttaaaccagtagttcgaaggaaaatcaattggactaaagctgcgacttatagaatcatggtctgtgataactgttagcccaaactatgctagagaactggtgtcatgtccat

SEQ ID NO: 203555 - DNA, 250 bp, Glycine max; identical to SEQ ID NO: 137269

SEQ ID NO: 203556 - DNA, 249 bp, Glycine max
gcgaagagaatggctcccaagggtttaatctttttggctgtgttatgcttctcagcactgtcactgagtcgttgtcttgcggaggataatggacttgttatgaacttctacaaggaatcatgccctcaggctgaagacatcatcaaagaacaagtcaagcttctctacaagtcccacaagaacactgctttctcctggctcagaaacatcttccatgactgtgctgttcagagttgtgatgcttcactg

SEQ ID NO: 203557 - DNA, 247 bp, Glycine max
ctcgagccgtccaaataaagaagggaaaaggagctttagtgatgtcatgttcaggcgtcttacgaagcttggcatttcaaagaccaatccagatgatcttacaccagaagaagtaaataaatttgctaggcttgatattgacccaaattctatcacatggaggagagtaatggacatcaatgatcgattcttgagaaaaattgctattggccagggacctgacgagaaaggaatggtgagagaaaca

SEQ ID NO: 203558 - DNA, 248 bp, Glycine max
atgcgtttcagcactgtcactgagtccttctgttgcgggggaagggcaaaataatggccttgttatgaacttctacaaggaatcatgccctcaggctgaagacatcatcacagaacaagtcaagcttctctacaagcgccacaggaacactgctttctcctggctcaggaacatcttccatgactgtgctgttcagagttgtgatgcttcactgttgctggactccacaagaaggagcttgtctgaga

SEQ ID NO: 203559 - DNA, 250 bp, Glycine max
aaaggttttagatcgtaaaaactaatcactacgaaaacaagagatatcgaagatggctctgcccaaagctaaggagatcgtgtcgtccaattccgtcgtcgttttcagcaaaacctattgccctttctgcgtcgatgtgaagaagctcttcggtgacctcggtgccaattacaaggccatcgaactcgacactgaatccgatggaaaagagctccaagcagcattagttgagtggacggaccagcgaacc

SEQ ID NO: 203560 - DNA, 246 bp, Glycine max
cataaagaagaagacaagaattttagtcaatgcatgggccattggacgagaccctaaagtttggtcagataatgctgatatgttttgtccagagaggtttgtgaatagcaatgtagacattagaggacatgactttcaacttttaccatttggttctggtcgaagaggatgtcctgggattcaattgggtctgaccacatttggccttgttttggctcaattagtgcattgcttcaattgggagct

SEQ ID NO: 203561 - DNA, 257 bp, Glycine max
ggaagcacttgatcaagactcaagtgtgaacaaaaaaaaatgatgggtacccttaaggtgtccaacagtagtttatacatattttcgaagttcctagtaattggtatggtgatgatgatatcgttggttgattcaagttattccttgtgtgattttgaggcaatcttcaattttggtgattcgaattcagatacgggtgggtttcatacaagctttcctgcacagcctgctccctatggaatgacttacttcaaaaa

SEQ ID NO: 203562 - DNA, 255 bp, Glycine max
cagcagctgaggttcctgctcaagaagaacaacaagcaactgaggttcctgccccagaatcaaccaccgaagcaccaaaggaagaaaccaccgaagcaccaacaacagaaacagtagaaacaacaactacagaagaagccaagccagaggagcctaaagaagttgcagttgagaccgaggaggtggtgacaaaggagacagaggaagagaagccagtagcagaagagaaatcagaggagaaaactgaagaagtga

SEQ ID NO: 203563 - DNA, 248 bp, Glycine max
cttaaatattcatggaaaacaaaagcaacatgcccgcactactacgttcttcaacttttgcaaagcagaaaaggggatcttgctctgtactgatgttgctgctcggggacttgacataccggatgtggactggattgtgcagtttgatccacctgatgaaccaaaggaatatatccatagggttggtagaacagctcgtggggaaggtggaaaaggaaatgctttacttttcctgattcctgaagaat

SEQ ID NO: 203564 - DNA, 250 bp, Glycine max
aagcaaccaaaaatggttctcacatccactgccacacacccagatgaacaagaccagagcctaaactatacttttgcttccagatatgtgcgtgaacctattccaaagttcaagatgccggagaaatccataccagaagatgctgcttatcagatggtaaacgatgagttgatgttggatggtgcaccaaggctcaacttggcctcgtttgtgaccacttggatggagcctgagtgtgacaagctcataa

SEQ ID NO: 203565 - DNA, 247 bp, Glycine max
ggctgaacttggactagttggtgatggtccaaatagctatcagatttggcttggaggaaaccataaacaaacatcattagctcgaagtttcatggacagggtgaagattctagaccttgaaaaagttttggagcctttgttttattattggaagcaaaagcgtcaatctaaagaatcatttggtgacttcacaaaccgaatgggatttgagaagcttaaagaatatcttgagaaatgggagggtcca

SEQ ID NO: 203566 - DNA, 247 bp, Glycine max
  unsure (1)..(247): unsure at all n locations
ctcaacttctgctacccactctcttcttccaagtccaaccacgcttttctctacagtcatgggcaaggtcaagatcggaatcaacggatttggaagaattggccgtttggttgccagagtcgctctgcaaagagacgatgtggagctcgttgccgttaacgaccctttcattaccaccgattacatnacatacatgtttaaatacgacagtgttcacggacactggaagcatcacgatgtcaccgtt

SEQ ID NO: 203567 - DNA, 248 bp, Glycine max
aagccctatacaaccaaaccctaacacacacccatttgattcagtttccatggctagcctcaaggttgcatttttggctgcagtgctctgcatggttgtggtgagtgcacccatggcacatgcagctatcacgtgcgggcaggtgacgaatagcctgatcaattgcatcggttacctccagaacggaggaacgccgccgtcgggatgctgcaacggagtgaagagcctcaatgccgccgccaagacca

SEQ ID NO: 203568 - DNA, 254 bp, Glycine max
ctcatttggatgatataatctctaatatcgcggcagatgtgggggtataagatgtttttcaaacgggctcaactcgaggcgtcaactttcctcaaggatgactgcttgaagataaactgcactgttggtgttgtggtgtcttccattgattgttccaagttaaacacaatacaggttcccgaatccgatattggggcacatttcgggatgctgttagagaatgaggagggatcagatgttactttctctgtcgg

SEQ ID NO: 203569 - DNA, 250 bp, Glycine max
tctcgagccgaatcggctcgagcggctcgagggtgtggcacggattacagggtatgagagtgttgcctctaatagtgaaaaggcactcctaaaagctgtggcaaatcaaccagtttcagtttatattgatgcaggagcaattgctttcaaattttactcaagtgggatttttgaagcaagaaattgtggaactcatctagaccatgctgttgcagttgttggttatggtaaacttcgtgatggtacaaag

SEQ ID NO: 203570 - DNA, 247 bp, Glycine max
caattatcacgacaccaattctccttcttcttcttcttcctcaacgaatcgaatgcaagcttctcctcctcctcctcctcttcctccttcggtttcgaacgagcgcgttgcctacaagctcaaaggctacttcgatttggcgacgcaggagatcgcgaagggcgttagggcagaggaatggggcttgatcgacgatgcgcttctccactaccgtaacgcgcactcgatcctcctcgaagctaattca

SEQ ID NO: 203571 - DNA, 246 bp, Glycine max
  unsure (1)..(246): unsure at all n locations
ttgagatccgaggggagtgttccggtgagggaatgcgaacgagngcttatgctggtcacgtggcnggatgaatgagcagaagaacagaatggcttcaggaaaggaagtaaattgttattttgactacctggtatcggaagctaaagaactgactgaagatcaaatttccatgctaatctgggagaccattattgagacatctgatactacattagttacaactgaatgggctatgtatgaacttgc

SEQ ID NO: 203572 - DNA, 247 bp, Glycine max
attttcgagtaaaagtaaaacacagttcctgatcaatggcatctcgccgccgcatgttattgaaggtcataatcctcggagacagcggggttggtaaaacatcactgatgaatcagtatgtgaatcgtaaatttagtaatcagtataaggcaaccatcggtgcagattttcttaccaaggaagttcaatttgaagataggttgttcacattgcagatttgggatactgctggtcaagaacggtttca

SEQ ID NO: 203573 - DNA, 245 bp, Glycine max
acttaatcgatcatcacttcacttcactaatacatcatggcagacgagacccagaacaagtatgagagctctgaggttgaggtccaggatcgtggtgtttttgactttctcggtaagaaaaaggatgaagaagacaagcctcatcctcaggaggaggtcatcgccaccgagtttcaaaaagtcactgtctcagaccaaggagagaacaagcacagcctcttagacaagcttcaccgatctgacag

SEQ ID NO: 203574 - DNA, 245 bp, Glycine max
ggtaagaccatcactctcgaagtcgagagttcagataccatagacaatgtaaaggccaaaattcaagacaaggaagggatcccaccagatcagcaacggctcatatttgctggcaagcagcttgaggatggacgtacccttgctgattacaacatccacaaggagtccactctccaccttgtgcttcgtctccgtggtgggatgcaaatctttgtgaagaccctgacgggatagacaatcaccct

SEQ ID NO: 203575 - DNA, 243 bp, Glycine max
  unsure (1)..(243): unsure at all n locations
ctcacttcaagggcaagtaccatgatgagcttatcgccaatgctgcgtacattggcactcctggaaagggtattctgctgctgatgagtcaacagggacaattggcaagcgtttggccagcatcagtgtagagancattgaatccaacaggcgagctcttagggagctgcttttcactgctcctggtgttcttcaatatctcagtggtgtcatcctctttgaggaaaccctctaccagagcac

SEQ ID NO: 203576 - DNA, 247 bp, Glycine max
gcactcttcgttcttcgactgtctacgatctgctttctctgaattgtgaaaatgtcgctcggagaaactgcttgttcatacgcagctctcatccttcatgaagatggaattagtgtaattgctgacaagatcagcaccttgttgaaaactgcaaaggttccagtagactcttattggccaaccttgtttgctaaacttgctgagaagaaaaatcttggcgatttgatagcaaatgcggcaggcggtg

SEQ ID NO: 203577 - DNA, 248 bp, Glycine max
aaaacattacctcactcagttcggcagtgtccttattccataagctcccaaaaaatgagttcaaagccattcaccaatttcttggtaatttttactcttgtattgctttgcctggtcggttcaagtcacaccaagtgtgatttcaaggcaattttcaactttggagactcaaattcagatactggtggcttctgggcagcttttcctgcacaatccagtccctttggaatgacttacttcaagaaacc

SEQ ID NO: 203578 - DNA, 246 bp, Glycine max
ctttctgctcttcttctacctttcaagttttaaaagtataaagatggcagagacattcctatttacctcagagtcggtgaacgagggacaccctgacaagctctgcgaccaaatctccgatgctgtcctcgacgcttgcctcgagcaggacccagacagcaaagttgcctgcgaaacatgcaccaaaaccaacttggtactggtcttcggagaaatcacgaccaaggccaacgttgactacgagaa

SEQ ID NO: 203579 - DNA, 244 bp, Glycine max
aagcaaaaccctagcggcgcctgctttctttgttcgtgttttgcatcaggatggagtctcaggtgaagcacgcacttgttgtcaaagttatgggtcgtactggatccagaggacaagtgacccaggttagagtgaagtttttggatgatcagaaccgtcacatcatttgggatgtgaaaggacctgtgagagaaggagacattctcaccctactcgagtctgaaagggaagcaagaagattgcg

SEQ ID NO: 203580 - DNA, 244 bp, Glycine max
gtcgttgtcttgcggaggataatggacttgttatgaacttctacaaggaatcatgccctcaggctgaagacatcatcaaagaacaagtcaagcttctctacaagcgccacaagaacactgctttctcctggctcagaaacatcttccatgactgtgctgttcagagttgtgatgcttcactgttgctggactccacaagaaggagcttgtctgagaaggaaacagatagaagctttgggttgag

SEQ ID NO: 203581 - DNA, 241 bp, Glycine max
cttgatcaagagtgaaaaacaaaaaaaatgatgggtacccttaaggtgtccaacagtagtttatacatattttcgaagttcctagtaatttgtatggtgatgatatcttctttggttgattcaagttattccttgtgtgattttgaggcaatcttcaatttcggggattcaaattcggatacgggtgggtttcatacaagctttccagcacaacctggtccctatggaatgacttacttca

SEQ ID NO: 203582 - DNA, 229 bp, Glycine max
tacagaatcgatgtgttaacatgatagctcatcttttcaatgcaccactagaagagactgaggcagcagttggtgttggcacggttggctcatcagaggccattatgttggctggattggcattcaaaagaaagtggcaaaacagaaggaaacaagagggaaagccttatgacaaacccaacattgtcactggagccaacgttcaggtttgctgggagaaatttgcaag

SEQ ID NO: 203583 - DNA, 225 bp, Glycine max
aaataattaattaaattcctcgtggaatcttgttgaagccatgtctacagctggtcaggtcatcaagtgcagagctgcggtggcatgggaagcagggaagccactatcgatagaaaccatagaagtggcaccaccccagaaaggtgaagtgcgtttgaagatcctcttcaactccctttgccgtacagatgtttactggtgggatgctaagggccagactccgct

SEQ ID NO: 203584 - DNA, 226 bp, Glycine max
attttctacgtattgaatctcaagattctaagagagattttgctgctctttgaagaagggtgtttgcttgattttggagatgtcgctgctctcagatctcatcaaccttaacctctcagacactactgagaaggtgatcgcagagtacatatggatcggtggatcaggaatggacctgaggagcaaagcaaggactctcccaggaccagttagcgacccttcaaag

SEQ ID NO: 203585 - DNA, 230 bp, Glycine max
cgcgaagactagatctgatctgagagaatggctcctcggtctagcagcaaggacgcccaagaccttttccgcgctctttggtctgcttatgctgcaacccccactaatctcaagatcattgatctctatgtcatctatgccgtattcaccgctttcatccaggttgtttacatggctttggttggatcatttccatttaactccttcctatcaggagtactttcttgtgt

SEQ ID NO: 203586 - DNA, 235 bp, Glycine max
ctttagttaagaggctggctgctggtgagtggttcacggcacgggtttcgtcgtgcggtttgttccatattgcttaccccagtgcaccagagtcggtgaagactgaactgagagccatatatggtcagctgtgtcaagatgatatgcccatggttaggagatccgctgccacaaacctgggaaagtttgccgcaactgttgaagctcctcacttgaaatctgacatcatgtctgt

SEQ ID NO: 203587 - DNA, 233 bp, Glycine max
cggctcgagggcaaattcgaaagccaaggatgaccaaagtgaagcagaagaagatcttgtggatgttctcatacaatatgaggatgggagcaagaaggatttttccttaactagaaacaagatcaaggccataattctggacatttttgctgctggaggtgagacaacagcaacaaccatagattgggcaatggctgaaatggtaaagaatccaacagtaatgaagaaagcac

SEQ ID NO: 203588 - DNA, 230 bp, Glycine max
aacttgcaaaagagttaggtgtagtcattccagttagcttctttgaggaggcaaacaatgcacattataactcaatagccataattgatgctgatggaactgatcttgggatttatagaaagtcccatattccagatggaccaggttatgaggaaaagttctattttaatccaggtgacactggattcaaggtaggtgcttaaggtaggcttatttgataatttgatatt

SEQ ID NO: 203589 - DNA, 230 bp, Glycine max
gacagattcgtgatttaccatttaccacaccaaaaccaatctgatcgtttcctctgcggagtcagaaatccatggatccctacaagaatcggccatcaagcgccttcaattctcccttctggactactaattccggtgctcccatctggaacaacaactcatcgctgactgttggatctagaggtccaattctgctggaagattaccatctggtggagaagcttgcaaac

SEQ ID NO: 203590 - DNA, 184 bp, Glycine max
gagaatggctcccaagggtttaatctttttggctgtgttatgcttctcagcactgtcactgagtcgttgtcttgcggaggataatggacttgtatatgatcttctacaaggaatcatgccctcaggctgaagacatacatcaaagaacaagtcaagcttctctacaagcgccacaagaacactg

SEQ ID NO: 203591 - DNA, 227 bp, Glycine max
gagggcaaaaccctagctttggagtcttccctcccatctcccacttcttgcaatctctgcagccatggcgagtaccaaagttcagagggttatgacccaacctattaacttgattttcaggtttcttcagagcaaagcgcgcattcagatttggctttttgagcagaaggatttgaggattgaaggccgaatcatcggttttgatgaatacatgaatttggttcttg

SEQ ID NO: 203592 - DNA, 226 bp, Glycine max
ctctgagcgtggtgtcacaaaccttggcctctctgcagttgctcatggttgcccttctctcagatcactttctttatggaatgtgtctaccattggggatgagggtgtgtctcagatagcaaaaggatgtcatatattggagaagcttgacttgtgtcattgttcctcaatcagcaacaagggtttgattgcaatagctaaaggttgccccaacttgaccacctta

SEQ ID NO: 203593 - DNA, 234 bp, Glycine max
cgtgcttaccaaaggatggagccggttcgttaaggagaagaatcttcgagccggtgacgcggttcagttcttcaagtcgaccggaccggaccggcagctatatatagactgcaaggcgaggagtggtgaggttaacaataatgctggcggtttgtttgttccgattggaccggtcgttgagccggttcagatggttcggcttttcggggtcaaccttttgaaactacccgtacc

SEQ ID NO: 203594 - DNA, 228 bp, Glycine max
accctagctagccacaatgcagatattcgtgaaaaccctaacggggaagacgataaccctagaggtagagtcatcggacacaatcgacaatgtgaaggcgaagatccaggacaaggagggcatcccgccggaccagcagcgcctgatcttcgccggtaagcagctggaggacggccgcaccctcgccgactacaacatccagaaggagtccacgcttcacctcgtcct

SEQ ID NO: 203595 - DNA, 228 bp, Glycine max
cgctcgagccgaatcggctcgaggggctcgagcttcttcccaacacctactactcactcactgcagatctcaattgcatcgctgtccatggctaccatcgttagcatcaaggcccgccagatcttcgacagtcgtggcaatccaactgtcgaggtggatttgacttgctccgatggtacttttgccagagctgctgttccaagtggtgcatccactgggatttatgag

SEQ ID NO: 203596 - DNA, 224 bp, Glycine max
ggaaaaactaaggttgcaatcttgttgctttgggtcttgtgtatcaaattgcagttgaatgttgaagcaagaacatcatcagctttagaaacagaaatcgaagccaaattgaagcaactcaacaagcctgccgtgaaaaccattaagagtgaagatggagatattattgattgcgtcaacatctacgatcaacctgcttttgatcatccagccttaaaaaacca

SEQ ID NO: 203597 - DNA, 224 bp, Glycine max
tacaactcgcagcctcaggcttcgtacaaagttgcagttcttggtgctgctggagggataggtcagccactcgcgcttctcatcaagatgtcgcctctagtttccgacctgcatctctatgatattgcgaatgtcaagggagttgctgctgatatcagtcactgcaacaccccctcacaagtcagggatttcactggagcttctgagttggcgaattgtttgaa

SEQ ID NO: 203598 - DNA, 222 bp, Glycine max
gagaagtttagttgtttggtgtggggggaagcccgtttgccagaagggtgcagattgccctggaactgaagggagtccaatacacttactttgaagaagatcttaggaacaagagtgatcttcttatcaaatacaaccctattcacaagaaggtacctgtgcttgtccacaatggaagaccattggctgagtcccttgtgatccttgaatacattgatgaga

SEQ ID NO: 203599 - DNA, 227 bp, Glycine max
caaaggacatggatcggataaaagggccatggagtcctgaagaggacgaagcgttacggaggttggttcagacttacggccctaggaactggtccgttataagcaaatccattccgggtcggtctgggaaatcgtgccgcttgcggtggtgcaaccagctagtctccggcggtggagcgccggcctttcacggcggaggaagacgaggcgatcctgaaggctcacgc

SEQ ID NO: 203600 - DNA, 229 bp, Glycine max
ctccattgcctccgcttctacctcgctaccatgatcattcctgagaagaaccgcaaggagatctgcaaatacctcttccaagagggagtttgctttgcgaagaaggacttcaatttggcgaacacgctgagattgacgtgccgaatctgcaggtgattaagctgatgcagagtttcaagtctcgcgagtatgtgagggagacttttgcttggatgcactattactggtt

SEQ ID NO: 203601 - DNA, 231 bp, Glycine max
tctccctctgcgcaggaattgggaacattcgacaggtagagtttcttcaatggctcctaaagttgataagaagaacgacctgaaggcacaggccttgaagactgctaaggcagttaagtctggtgctacctttaagaagaaggcaaagaagatccgaacttctgtcactttccacagaccgaggacattgaagaaggataggaaccccaagtaccctcgcattagcgcgcc

SEQ ID NO: 203602 - DNA, 226 bp, Glycine max
cttaaatcaaaatacttaatagcatggcgatacatttatacaaaacttctaccccaagcacacgcaatggagccgtagacagtcaagtaaaatccaatccacgaaatcatttgatctatggacagcatcgttgtggtaaaggccgtaatgccagaggaatcattaccgcagggcatagagggggaggtcataagcgtctataccgtaaaattgattttcgacggaa

SEQ ID NO: 203603 - DNA, 224 bp, Glycine max
gcagcaatcatggatggagctttgctactcattgctgccaatgaaagctgcccacaaccacaaacctctgagcatttagctgctgtggaaattatgcgtctacagcacataataattcttcagaacaaggtagacttgattcaagaaaatgtggctatcaatcagcatgaggcaatttcaaagtttatacaaggaactgttgctgatggtgcaccagtagtacc

SEQ ID NO: 203604 - DNA, 225 bp, Glycine max
ctctctttgtttcggtgaattgaagcagcggaggagatggcgagtcgcatgaaggaagatgagaagaacgagcgcgtgattcggggtcttctcaagcttcaacataatcgcagatgcattaactgcaacagtctgggaccacaatatgtgtgcacaaacttctggacgtttgtttgcacaaactgcagtggaatacatcgggaattcactcatcgagtaaaatca

SEQ ID NO: 203605 - DNA, 226 bp, Glycine max
gaagtatcagatctggagcaggagaatagcgttggcagcgtttgcgtttgctctgctgttccaatcggcctcagcagacgacgtcgttgtgctctctgaagataacttcgagaaggaagttggtcaggacagaggagctctcgttgagttctatgctccttggtgtggacactgcaaaaagcttgctccagaatatgaaaagcttggtagcagcttcaagaaagcc

SEQ ID NO: 203606 - DNA, 229 bp, Glycine max
gacgcttcgcaaatctcaatcgaatctcagaaaaatgagagaaatcatcagcattcacataggtcaggccgggatccaggtcggaaactcctgctgggaactctactgcctcgaacatggcatccagcccgacggcatgatgccttctgactccaccttcggtgtagcccacgacgccttcaacaccttcttcagcgaaaccggatctggcaagcacgtcccccgtgct

SEQ ID NO: 203607 - DNA, 220 bp, Glycine max
gccaaagtaaggcaccctgtgttctttgttttctacgcacaggcttatcatttgcttttggttggactttgctgaatggagagtgcaagaatcagccaatggttaaatcttcttgtttgtgtactgctattgctcaaggcagaaggatctttagttccattgattttggtcgagaatgcagaatcaaaaggagctgtttgtttggatggaagtcccccag

SEQ ID NO: 203608 - DNA, 222 bp, Glycine max
ggaggatggagaggtggctgaagaaaatgatgaagagggtggatgggagatggaggatttaggtctgggcccagaagctgacactcccaaagcttctatcagtacccaatcttcagtttttgtgaccccaacacctggcatgccggtaagtcatatatggattcagaaatcatctcttgcagctgatcatgcagctgctggaaattttgatactgcaatgag

SEQ ID NO: 203609 - DNA, 225 bp, Glycine max
cacaatctaaagaaatggagcatttgcaatgacaagatattcaatgactgggccgattcaaagccatctgttatcccaatttacaagaagcttatttcagcaggacttaggatttgggtttatagtggagatacagatggtagagtaccagtgctgtcgacaaggtacagcttaagccctcttgcgttgcctatcactaaatcatggaggccctggtaccatgac

SEQ ID NO: 203610 - DNA, 224 bp, Glycine max
aagcaaaaccctagcggcgcctgctttctttgttcgtgttttgcatcaggatggagtctcaggtgaagcacgcacttgttgtcaaagttatgggtcgtactggatccagaggacaagtgacccaggttagagtgaagtttttggatgatcagaaccgtcacatcatgaggaatgtgaaaggacctgtgagagaaggagacattctcaccctactcgagtctgaa

SEQ ID NO: 203611 - DNA, 226 bp, Glycine max
ctctcatagctgtagcggcgacactaagatcggagaaagaatggcgaaaacgacgtcgttgctgctctttacactgctcctcttcggaaccctagctctcatccaggcgaagaaatcgaaggaggatttgaaggaggtgacccacaaggtttactttgatgttgagattaatggaaaagaagcaggtcgtattgtaatgggtctttatgggaaggctgttccaaaa

SEQ ID NO: 203612 - DNA, 220 bp, Glycine max
cctatggctctcactccttgctcttagccctcctcctcttcgccgctctggccaccgccgcgatggcgtggcgacgtctcgacgccgacgacatcctgatccgtcaggtcggtgccagatgttcggcgaagccgaagaggaggacaacctgctgaacgccgagcaccacttagcgagcttcaaggccaagttcgccaagacctacgccaccaaggaggag

SEQ ID NO: 203613 - DNA, 224 bp, Glycine max
caaatggctgaggcctcagcacaagcatgtgtcaatatccctgctagttcctggagttctatgcagcggggtttcagtgcataattcctagaatgcgctccattgaagaccgagtatagtcgttgtaacattattctttacgagtgttatggactgtactctctgctcatgatttcttatacctaccctgtaaatacaaatgggacgctggggaaacctcttta

SEQ ID NO: 203614 - DNA, 264 bp, Glycine max
tgggtcatgggttctccaacatatttggaatctattgcatcctctgcggtacgagcagctattaaggtgaaggcttctgttattatttgtttcacttcttctggaagggctgcaagattgatagcaaaatatagaccaaccatgccggttctctctgttgtgatcccccgactcaagtcaaatcagctgaaatggagcttcagtggagcttttgaggctaggcaatcacttattgtcagaggtctctttcccatgcttgccgat

SEQ ID NO: 203615 - DNA, 273 bp, Glycine max
ttcggctcgatatcgagccgattcggctcgaggtgatttcagtgagtgatcggtgttcacttgatctcatcataatcgtcagcgtcaattgaagaagatgccgatcagaaacatcgccgtcggaaggcctgaagaggcgactcaccccgacacgttgaaggcggctttggctgagttcatctcaaccttcatcttcgtgttcgccggctcaggctccggcatcgcctacaacaagctcaccgacaacggcgctgccacccctgccggcctcat

SEQ ID NO: 203616 - DNA, 261 bp, Glycine max
ctcgagccgctcgcaagcaaaaagaaagaatcccaggcgaggagaaagatggaggggaaggagcaggatgtgtcgttgggagcgaacaagttccccgagagacagccgattgggacggcggcgcagagccaagacgacggcaaggactaccaggagccggcgccggcgccgctggttgacccgacggagtttacgtcatggtcgttttacagagcagggatagcagagtttgtggccacttttctgtttctctacatcacc

SEQ ID NO: 203617 - DNA, 260 bp, Glycine max
ctcgagccgctcgagccgatgaggagccttaattgcttcccgcttaatttgggccttgaattttcttccacttctctatgtggaagaaatctgtaagatattatgcaaaaaataattaaggtgtttttctttaaatgggttggttgattggttcaatgaaccgatcaagaccacagcaggttcatggggatgcgaggattaagacgctttgttttttaatcttccgatgtcactcttgtttgttagtttgtttttttatt

SEQ ID NO: 203618 - DNA, 262 bp, Glycine max
cgagattgaggcgggggttgatttggaagaaacccagctaaggtaacatcatttctgtgatggtgtacttggctccggtgccaacgttttaccggatatacaaaaagaaatgcacggacggtttccactcgctgccatacttgttgtcattaatgagttctatgctttggttatactacgccttcctcaaaattcatgacggcgttgttccccttattacgatcaactcgatcggatgtgtcatagagctcatctacattct

SEQ ID NO: 203619 - DNA, 266 bp, Glycine max
aacacaactccactcttagctgccattggtttttcttcttccatttctcttcctttctaagcttttttcgattacccatttggagattctgtcctaatggctcttgctccttccaaagtttcctccttttccgggttttctcccaaacccagtgttggggatgctctgaaaaacccaacttgctctgtttctctgagctttgcgaatgtgaaacttggaagcagaaaccttcgggtttgtgcctcaactgtgcctctctcaggggt

SEQ ID NO: 203620 - DNA, 261 bp, Glycine max
gagagagagagagaggagagagtattggcgcttcatcaagatgggtatttctagggattccatgcacaagaggcgtgccactggtggcaagaaaaaggcttggagaaagaagagaaagtatgagcttgggcgtcaggcagcaaacaccaagttatcaagcaacaagacaatcaggaggattcgtgttagaggtggcaatgttaaatggagggcattgaggctggatactggcaattactcatggggtagtgaagcagttac

SEQ ID NO: 203621 - DNA, 262 bp, Glycine max
ggactaccccgccgtcgtggccagggtgtttgtgaagtaccttgacctcatgaggaagctgcaattacagtactcgcttggagcctgctgggtcccatggtgtgtgggggcttgatgattatcattttttgcccttcatatttgggtcttcgcagttgattgatcacaagtatatgaagcccaagtccattcacaatgaggatattttggagaatttctctaatgagtatttgtaccttgcttgcattgcctttgtcaagaa

SEQ ID NO: 203622 - DNA, 266 bp, Glycine max
ctcaacagccttaggcctgtttatgggttgatttttcttttcaaatggcgtccaggagaaaatgatgaccgagtggttatcaaaggatcccaaccctaacttgttttttgctagtcaggtaattaataatgcttgtgcaacccaagcaatcttgtccattcttatgaattcaccagacattgacattggtccagagctgacgaaattgaaagaatttaccaagaatttccctcctgaactcaaaggtttggccatcaataacagtg

SEQ ID NO: 203623 - DNA, 263 bp, Glycine max
atcacttcatagtaagcactatagaaaaaacgacattcattcatctatggctacccttattgctcccagcaaccactctccccaagaagacgctgaggctctcagaaaggcttttgaaggatgggggactgatgagaaaactgtcatagtaatattgggtcatagaactgtttatcagaggcagcaaatcagaagagtctatgaggaaattttccaggaggatcttgtgaaacgcctagagtctgagatcaaaggagactttg

SEQ ID NO: 203624 - DNA, 261 bp, Glycine max
aaattctctgtctctctctctctctctcgatcaatcatggctttgcccaatcagcaaaccgtcgattaccctagtttcaaactcgtcatcgtcggtgacggtggtacaggaaagacaacgttcgtgaaaaggcatcttaccggtgaatttgagaagaaatacgaaccgaccattggagtggaggttcacccattggatttcttcacaaactgtggaaagattcgcttctactgttgggatactgccggacaagagaagttt

SEQ ID NO: 203625 - DNA, 262 bp, Glycine max
tgcatatgatgaagaaggtgtgtgggtttgcaatagtggtgatggcagcactttttctggtggagatgagtcccatggcagaggctgtgacttgtagccctgtggagttgagtccctgtttgggggcaatcacgtcctcttcagcaccatcgacaacttgttgccagaaggtgagggaacaaaggccatgcctctgtggttacctcaaaaaccctagtctgaggccatatgtcaactctcctggttccagaagggttgctag

SEQ ID NO: 203626 - DNA, 216 bp, Glycine max
gcgaagagaatggctcccaagggtttaatctttttggctgtgttatgcttctcagcactgtcactgagtcgttgtcttgcggaggataatggacttgttatgaacttctacaaggaatcatgccctcaggctgaagacatcatcaaagaacaagtcaagcttctctacaagcgccacaagaacactgctttctcctggctcagaaacatcttccat

SEQ ID NO: 203627 - DNA, 263 bp, Glycine max
gtagtgtagcaggaacaagcagcaatggcgccgaagtaacacgcaaggttagcagaaaccccgaattgataaggggaattggaaagtactcgaggtcgcagatgtaccactagaggggcatttgggctatcaaggccaaaaatggtggcgttttacctcgccacgaccctaaacccaaacctgaaacacccgctgaaaaaccacccaaattttaccctgctgatgatatcaagaagccccttgtcaacaagcacaaacccaaa

SEQ ID NO: 203628 - DNA, 263 bp, Glycine max
ctaaatggttcccaccgggtcaaagtcattggatggatttgtgacgccgtttcactcagtgtctttgcatcacctctaagcattatggcaaaagtgattagaacaaagagtgtacagtttatgcccttctatttgtcatttttcctcacactgaatgccataacgtggtttgtatatggtttgtctatgcaagacaaatgcatttatattccaaatgtgggagggtttgcactggggctagttcagatggtgctatatggcat

SEQ ID NO: 203629 - DNA, 262 bp, Glycine max
atactctctagagtaattgcggaatctgctagaattttctaataatggcgaaagacgttgagcaggtcacagagcaaggtgaatactccgcgaaggactaccatgaccctcctccggcaccgttgatcgacccagatgagctcacaaagtggtccttgtacagagccgccatagctgagttcatagcaacactcctttatctttacatcaccgtgttgaccattattggctacaagagacagagtgacaccaaaatccccgg

SEQ ID NO: 203630 - DNA, 264 bp, Glycine max
ctctctctccctctctccttccccaagatgtcgagcgccgatcccgagcaccgagaagaggaggaggcacccgccgtcggctacgacggaggacaccggagcacacgtcgctcccatcgtcaagctcgaggaggttgctgtcaccaccggcgaggaggacgaagatgcaatcctagatctcaaatcgaagctttaccggttcgacaaggatgggaaccagtggaaggagcgaggcgcgggcaccgtgaagttcctgaagcataa

SEQ ID NO: 203631 - DNA, 258 bp, Glycine max
gattctacccgccgctcgatgggaattgcgcttcaaggcgtctcgtagggctaatccgcctcacgagggtcaccaacggcacgtgcctttagggggccgaggccccctactgctggtcggcaaacggactgcgggcgcacgcgtcgcttctagcccggattctgacttagaggcgttcagtcataatccaacgcacggtagcttcgcgccactgacttttcaaccaagcgcgatgaccaattgtgcgaatcaacggtt

SEQ ID NO: 203632 - DNA, 259 bp, Glycine max
cgcaaaaacgcattgtgtttctctctttccgcggcgtagatctgagcagtttgggaaaccctaactgctctcaccactctctttgctttttttcctctccgatcaacgacctctttcgtcgccctaagtcatggcaggacttgcacccgagggatcacagtttgatgatcgtcaatatgataccaagatgaatgagttgcttacatctgatggacaggattttttcacatcttatgatgaggtttatgacagttttgat

SEQ ID NO: 203633 - DNA, 261 bp, Glycine max
atttctttggattagaaatttttcccaaagctgatcgagaagccagccaggccaggagttgaagaatgggaagggggaagatcgaaatcaaaagaatcgagaacacaacaaatcggcaagtgaccttctgcaagagaagaaatgggcttctgaagaaagcttatgagctgtcagtgctgtgtgatgctgaagtttccctcatcgtcttctccagccgtggccgtctctatgagtattccaacaacaacataagatcaacca

SEQ ID NO: 203634 - DNA, 260 bp, Glycine max
ttcaagattcagcaagtgcgttttggaagcagagaccgaaatacttcgagatggcccgtacaaagcaaactgctcgtaagtcaactggaggaaaagctcccaggaagcagcttgcaaccaaggctgcacgtaagtctgcaccaacaactggtggtgtgaagaagcctcatcgttatcgccctggaactgttgctcttcgtgagattaggaaataccagaagagcactgagctcctaatcaggaagcttcctttccagagg

SEQ ID NO: 203635 - DNA, 263 bp, Glycine max
tccatttccattttctctctctcagtttccaagaatcttaagctatgggaaagtcttacccaaccgtgagcgctgattaccagaaggccgttgagaaggcgaagaagaagctcagaggcttcatcgctgagaagagatgcgctcctctaatgctccgtttggcatggcactctgctggaacttacgacgtgagctcgaagaccggtggtcccttcggaaccataaagcacccctccgaactcgctcacggcgctaacaacggt

SEQ ID NO: 203636 - DNA, 262 bp, Glycine max
gaggttagtaagtaacaatggtggagaaggccaagggtaggaaggaggaggttgtcactcgagagtacaccatcaacctccacaaacgcttgcatggctgcacatttaagaagaaggctcctaaagcaattaaggagataaggaagtttgctcagaaagcgatggggacgaatgatgtaaaagtggatgtgaagctcaacaaggctgtgtggagccaggggatccggagcgtcccaaggaggattagggttcgcattgctcg

SEQ ID NO: 203637 - DNA, 262 bp, Glycine max
tttctccatttccattttctctctcacttttcaagaatcgtaagctatgggaaagtcttacccaactgtgagtgctgattaccagaaggccgttgagaaggcgaagaagaagctcagaggcttcatcgctgagaagagatgcgctcctctaatgttccgtttggcatggcactctgctggaacctttgacaagggcacgaagaccggtggacccttcggaaccatcaagcaccctgccgaactggctcacagcgctaacaac

SEQ ID NO: 203638 - DNA, 261 bp, Glycine max
cagcgagtgagtgagcgagccaggtagggttttcggtgttcccctctttgtgttcgttcgcgacgatggggtccatccccgatccaggcgagttgagcgagttgactcagccgagcttcgacgagttccagcgccaaacctctctcatgaccagctgcaccctcctctggaaggagctctccgaccacttctcctccctcgagcaagacctcaaccacaaatccgaagccctcaagcgcaagattcacaccctcgacaact

SEQ ID NO: 203639 - DNA, 262 bp, Glycine max
cctcaaagcaacacaagaacactctcttgaacattcatggatccagtgagcgtgtggggtaacacgcccttggcgacggtggatcccgagatccatgacctcatcgagaaggagaagcaccgccaatgccgcggcatcgagctcatcgcctccgagaacttcacctccttcgcagtcatcgaggccctcggcagcgccctcaccaacaaatactccgagggcatgctcggcaaccgctactacggcggcaacgaattcatcg

SEQ ID NO: 203640 - DNA, 261 bp, Glycine max
cactcacatagagtgagagcttcacaattctttattgtcaacagtgtttggttgaaatcttgagccttgaagtcagcacagcttggtccaagtctgaaatcaagcatggcatggctgaggttgaaatgggattctggccaaatctttggaagaggtccatgaagtctgaaccttttaagcttagaagttctaagatggagagacttcaactgggggcaatctaatatggttaacttgtgaagctttgattcagactcaatg

SEQ ID NO: 203641 - DNA, 295 bp, Glycine max
acgcgtatgagctctcagaattcgtctcgaggttctttcaaaatgcaaacagccttaaccttcgctgcccccaacgttgtgccattggcacccacaaagagtgtctcccatattaccatctttcctaccaaattgaaagccccgcgctcctcacctcgttactctccgattagggttgcaaccgtggagcccgacacttcaactgtcgactacaactctgcgttctcagtgtttcctgcagaagcatgcgaaactgtaggatgggaagcctgcatggcggagatgtaccctgaaa

SEQ ID NO: 203642 - DNA, 257 bp, Glycine max
ccctcaatgttcaaatgtagcttgtttggaaagacaggaagagtacctgtttgcaaaaccagcaagggatgctgcagccaaagcaaaaatggaagctggagcaccatcaactgaggaagtgccacttcacgaagataatgaatggaatataaggtgtttaatgatcttgttcttgatcattttcatgtgtgtaacagaagatacaaaacacttatcaattgaacttgatttaatccctgatttacttgttgcaatca

SEQ ID NO: 203643 - DNA, 256 bp, Glycine max
ggaaacagtacgttgtctggcatgtgtacttgttcaaggtgacatgtgacctatacaattattagaacttaatctgatcacaatgcagttttggtgagctgatctggatgggaaccggtgaagaaagcacagctaaagttcctaaaccatgcttctacttcttcaattcagataccactggcaccttcatatcctgattggtcaagctcgatgcaggcttactatgctcctggaggcactccacctgcgtgttttg

SEQ ID NO: 203644 - DNA, 260 bp, Glycine max
gcgaagagaatggctcccaagggtttaatctttttggctgtgttatgcttctcagcactgtcactgagtcgttgtcttgcggaggataatggacttgttatgaacttctacaaggaatcatgccctcaggctgaagacatcatcaaagaacaagtcaagcttctctacaagcgccacaagaacactgctttctcctggctcagaaacatcttccatgactgtgctgttcagagttgtgatgcttcactgttgctggactc

SEQ ID NO: 203645 - DNA, 258 bp, Glycine max
gtgaccatgcctgagagagtggaagaaggagttgttgccttgaatcagcactgtgtgcttgtacatggcataggtggaggaagttggtgctggtacaaaatccggtgtcttatggagaattctggctataaggtctcatgcatagacctcaagagtgctggaattgatcaatctgatgctgattccgtgctatcctttgatgattacaataaaccactaatggatttcatgtctgatttgcctgagaatgaacaggtt

SEQ ID NO: 203646 - DNA, 255 bp, Glycine max
ctttcttcttcctttgatccgttcatacggtggttagatgatggaatcctgtgattgtatagacacacagtatcctccagatgaacttctcgtaaagtatcagtatatctcggatgtgctaattgctcttgcctatttttctattcccgtggagctcatctattttgttcagaagtctgctttctttccatatagatgggtgcttatgcagtttggtgcttttattgttctctgtggagcaactcatttcataaa

SEQ ID NO: 203647 - DNA, 259 bp, Glycine max
ggatgaagggggaattgagaagcggcgctacgatgttttgctgtgttttagaggggaagacacgcgctacaccttcacaggtaatctctatgctgctttgcggcaggcgagattgaggaccttcttcgatgatgggttcaagagtggcgaccaaatctttgacgttgttcttcaagcaattcaggaatcaaggatttcaatcgttgttctctccgaaaacttcgcttcttcctcgtggtgccttgaagaacttgtgaag

SEQ ID NO: 203648 - DNA, 259 bp, Glycine max
atttggtataaatattacttatagcttccaaccatggaggatccaaatcaagctccagaagcgtcttctcagaagaaaatgggaagagggaagattgaaatcaaacggatcgagaacaccaccaataggcaagtcaccttctgcaagcgccgcaacggtttgctgaaaaaagcttatgaattatcagttctgtgtgatgctgaagttgcccttgttgtcttctcaacccgtggccgtttgtatgagtatgccaacaaca

SEQ ID NO: 203649 - DNA, 258 bp, Glycine max; identical to SEQ ID NO: 132047

SEQ ID NO: 203650 - DNA, 259 bp, Glycine max
aagcaaaaccctagcggcgcctgctttctttgttcgtgttttgcatcaggatggagtctcaggtagaagcacgcacttgttgtcatagttatgggtctgtcctggatccagaggacgagttacccaggttagagtgaagttttgtggatgatcataaccgtcacatcatgaggaatgtgaaaggacctgtgagagaaggagacattctcaccctactcgagtctgaaagggaagcaagacgattgcgctagatggtctc

SEQ ID NO: 203651 - DNA, 260 bp, Glycine max
attgtttgttgttgtaactcgttcttcttcttttgttgttctgtgtttgtgtttgttttttctctcacctgaaaatgtcttgctgcggtggtaactgtggttgcggaagctcctgcaagtgcggcaacggctgcggaggctgcaagatgtacccagacttgagctacactgagtcaaccaccaccgagaccttggtcatgggagtggcacctgttaaggctcaatttgagggtgctgaaatgggtgtgcccgctgagaac

SEQ ID NO: 203652 - DNA, 256 bp, Glycine max
attcaatctgcctcgatcatggagaggaaaacatttgggtttttgttcttgctcctccttgtcttagcttctgatgtgacggtgaagagagcagaggcgaaagattgcttgacaaggaggcacgggttccagggtagatgcttattcgacaggcaatgtgcacatgtgtgcaggagcgatggtttcatcggtggtcagtgccgaggccctcttcgcaaatgcttttgcagcaggccatgttgatcgaaattactac

SEQ ID NO: 203653 - DNA, 258 bp, Glycine max
tcaaacctaacgcagcatcgctattctcttcattccatggctttgcccaaccagcaaaccgtggattaccctagtttcaaactcgttatcgtcggcgatggtggcacaggaaagacaacctttgtgaaaaggcatctcaccggagaattcgagaagaaatatgagccaaccatcggtgtggaggttcacccattggattttttcacaaactgtggaaagattcgattttactgctgggatactgctggacaggagaaa

SEQ ID NO: 203654 - DNA, 257 bp, Glycine max
gagagagagatagaggagagagtattggcgcttcatcaagatgggtatttctagggattccatgcacaagaggcgtgccactggtggcaagaaaaaggcttggagaaagaagagaaagtatgagcttgggcgtcaggcagcaaacaccaagttatcaagcaacaagacaatcaggaggattcgtgttagaggtggcaatgttaaatggagggcattgaggctggatactggcaattactcatggggtagtgaagcag

SEQ ID NO: 203655 - DNA, 259 bp, Glycine max
atctggtgaggtcattaacgagagagataaatgtcctctgtgcaaaggaaacaaggtttcccaggaaaagaaggtgctggaagtgcatgttgagaagggcatgcagcagggtcagaagattgtttttgaaggacaagctgatgaagctcctgacacaatcacaggagacattgtttttgtattgcaagtaaaggatcacccaaagttcagaagggagcaggatgacctctatattgatcacaatctcagcttaaccgag

SEQ ID NO: 203656 - DNA, 266 bp, Glycine max
ctcgagcttcgatggtttgggcagctcttcctcccgttgaggcaaagaatattcaagttgcgacgccgttcgtgtattgttgaggtgccgctgtcatgtttgggcgtggtggaccaaggaggagtgataactccaaatattatgatattctcgggatttccaaaaatgccagtgaagatgatatcaagtaggcctatagaaaggcggctatgaagaaccatccagataagggaggagatcctgaaaagtttaaggagttaggtcaa

SEQ ID NO: 203657 - DNA, 201 bp, Glycine max
aattaattgaattcctcgtggaatattgaagaagccatgtctacagctgggcaggtcatcaagtgcagagctgcggtggcatgggaagcagggaagccactgtcaatagaaaccatagaagtggcaccaccccagaaaggtgaagtgcgtttgaggatcctcttcaactccctttgccgtagtgatgtttaatgggtggga

SEQ ID NO: 203658 - DNA, 162 bp, Glycine max
atggaattctctgtaagagctgcggaactaacaactctattagaaagtagagttaccaacttttacactaattttcaagtggatgagatcggtcgagtggtctccgttggagatgggattgcacgtgtttatggattgaacgagattcaagctgggggaaat

SEQ ID NO: 203659 - DNA, 275 bp, Glycine max
  unsure (1)..(275): unsure at all n locations
tatttnctcccancactgagcttaaccgagcttcacaaanatgaatcgggaaaaattnatcgaacatnggccngttcggttacaantngggnaaacggcaccgtcacaanaaacaagaaggctgtncacaagacaacaaccacacatgacaaaangttcanancacctgaagagaatangggtnaatncnatcccggctattgannaggnnaatatntttaaggatnacgtnttatccagtttntaaatccccaaagttcaagcgatcgattgct

SEQ ID NO: 203660 - DNA, 187 bp, Glycine max
ctctttgctattatcaaattcaagttctcattatcaaggtgttttgatctgttgagggggtttaatactgaaaatgggacaagtgttaggttgcgtgcaagtggatcagtcaagtttggccatcaaggaggttttcgggaagtacgatgatgttctcgaacctggttgccactgtgttccatggtgt

SEQ ID NO: 203661 - DNA, 240 bp, Glycine max
ctagtataccttaataaataatttaagatactatgatgagagcacggttcccattactgttgctgggacttgttttcctggcttcagtttctgtctcatttggcattgcttactgggaaaaagagaaccccaaacacaacaagtgtctccagagttgcaatagcgagagagactcgtacaggaaccaagcatgccacgctcgttgcaacctccttaaggtggagaaagaagaatgtgaag

SEQ ID NO: 203662 - DNA, 274 bp, Glycine max
ctttctcgtattttcccctcttcttcccctctctcgtgttatccgctttagttttctcgggaaaatcatggtgaaaggtccaggtctctactctgacatcggcaagagagctcgcgatcttctgttcaaggattatcagaatgaccacaagttcaccatcaccacttacacttccactggagtggaaatcacttcaactggagtcaggaaaggtgaaatatatttggccgatgtcagcactaaggtgaagaacaagaacatcacaactgatgtc

SEQ ID NO: 203663 - DNA, 269 bp, Glycine max
tatcggatgcaaccctaattgaatccaagcaagcaggggaagtgggggtattatttgatcagaagtacaaagctcttcaaaacccaaacaacagctccacggaccacccctactgctctgctctgcaatggccgacgaggaacctgttgatcagaagagatatcttgaagagtcttgcaaaccaaaatgtgtaaaaccattactggaataccaggcgtgcattaaaaggatacatggtgatgattctggggcagaacactgcactggac

SEQ ID NO: 203664 - DNA, 269 bp, Glycine max
gtcctaatatcatactcagaaagagagagagagtgagatagagaggatggaaaaactaattttcagtggtctagttgtgcttgtggggttattaaccacagaaatcaaagtagcatctgcaatttggctgcgagctcatgcaactttctatggtggaagtgatgcctcaggaacaatgggtggggcatgtgggtatggaaatttgtacactgatggttatggaataaaaacagctgcttggagtactgcttggtttaatgatggcaagt

SEQ ID NO: 203665 - DNA, 269 bp, Glycine max
cttcgagctccgatggcgagcctgtggcgcgcggcaaccggcatgacggacaacgccaccgattacgacggcgtcgagttctggtcgaaccccgagcggaccggctggctcaccaagcagggcgagtacatcaagacctggcgccgccgctggttcgtcctcaagcaaggcaagctcttctggttcaaggagtccgccgtcacgcgtgcgtctcgtccacgcggcgtggtccccgtcgccacgtgcctcaccgtcaaaggcgccgaaga

SEQ ID NO: 203666 - DNA, 250 bp, Glycine max
gggagctgatcaatgtgacaataattataccgatacagtcatgttagttgggattccaaatgttggaaagtcggcacttgtcaatgctttgcatcaagtggggagaatcagtgcagcagaaaaaggaaagttaaagcatgcaactgtgagtccagagccaggggagactaaagacatacgaagttttaagattggtagccatcccagtatctatgtgttagacactccagctattttatctcccaaggtt

SEQ ID NO: 203667 - DNA, 271 bp, Glycine max
atcacaaccactcttaatttctctctgccttgctcatttacacacctctccaacctttcactttcagctttatttgaatccctctctctcctttccaaatggccagcgttgaggttgcacatcaaacaccaacaacagttccagaaaatgaaacaaccgaggtaatcaagacccaggaaacaaccccggaaccagtaccagccactgaggctcctgcaacagaacaagcagcagctgaggttcctgctcaagaagaacaacaagcaactga

SEQ ID NO: 203668 - DNA, 213 bp, Glycine max
gtttcctcactattctcaccatgggcctcctcgatcacttgtgggatgataccctcgccggtcctcgcccggagaacggcctcggcaagctccgaaagcaccactccttcgctttccgatctgcctccgccaaggaatcagacagcggaagcgtgaaatcgtacggtgaggattcgcccaagaatgcggtgagagtgacgcgaagtatgatga

SEQ ID NO: 203669 - DNA, 270 bp, Glycine max
gcggaaagcaggtatcccatggttcgcttatctgaaatacctgctaaacagttggaaaatgataaacctgagaagatgaaaattgccataaggcctaggcctaacaaaatcagtttaaatgaagccaatgaagctggaaggaaaagcaatcctcctagaagtgtggaagagagaaaggtggaatatgatcgggcacgagcacgcatttttagtagctccagaagttgtgattcagatgatactctgtcccagacttgcactgatgagaaa

SEQ ID NO: 203670 - DNA, 178 bp, Glycine max
cttccatgactgtgctgttcagagttgtgatgcttcactgtagctggactccacaagaaggagcttgtctgagaaggaaacagatagaagctttgggttgagaaatttcaggtacattgagaccatcaaagaagctttggaaagggaatgcccaggagttgtttcctgtgctgatatc

SEQ ID NO: 203671 - DNA, 265 bp, Glycine max
aacgaatcgaaaaaagaaagatcatggcgatggcaaacttggctcgacggaagggttactccgtcgttttgtcgtcgaggtcgtcgctttgtctgacaaggtggagggggttcgcgtccggatctgacgaaaacgacgtcgtggtcatcggcggcggtaccggcggctacgtggcggccattaaagcggcgcagtgggtctgaaaaccacttgcatcgaaaaacgtggcactctcggcggtacctgcctcaacgtcggatgcatc

SEQ ID NO: 203672 - DNA, 268 bp, Glycine max
cacacacaaggcagaaccaaatagctcattagtgagtttttgagttcgtgtgtcctttctttgtgtgttgcaaggttacaagatggaggatcaaaatgcatcatctaatggattgggcaaggtgttccacaaggttaagccctaccttgctatgatgtcccttcagtttggctactccggaatgtacatcatcaccatggtttctttcaagcatggcatgagccattgggtactctccgtgtaccgtcatatagttgccactctcatc

SEQ ID NO: 203673 - DNA, 216 bp, Glycine max
ctcagatgttcctatgggcagctgacatgccttctggttgtgctggacctaaaattgacgaacatgactaagcttgtggaatatcactaacttcaactatagggatgcattcttcttgttaagtgcactgccagatatgtatccttgaacagtgtaagttccagtgatgtaaggtttcatgtctcgagaataaggtcttggtagtttcatgtgaat

SEQ ID NO: 203674 - DNA, 221 bp, Glycine max
gagaatggctcccaagggtttaatctttttggctgtgttatgcttctcagcactgtcactgagtcgttgtcttgcggaggataatggacttgttatgaacttctacaaggaatcatgccctcaggctgaagacatcatcaaagaacaagtcaagcttctctacaagcgccacaagaacactgctttctcctggctcagaaccatcttccatgactgtgctg

SEQ ID NO: 203675 - DNA, 269 bp, Glycine max
gcagcaaccctgttaatcgctggtccatatctggataaacttttgaccaaccaaaatgtatttggtttcaagtatacgacacaagtgacggttttcataattctttcctgccttatctccatctctgtcaatttcagtacgttccttgttattggaaagacatctccagtcacctatcaggttcttggacacctgaagacatgccttgtattggcatttggttatatacttctccgagacccatttagctggagaaacatactgggtat

SEQ ID NO: 203676 - DNA, 266 bp, Glycine max
actcgagccgaatgcggctcgagccaggtctataagcccccagtactggaaccaccagtatacagacctccagtgtacacaccaccggtgtacaagccccctgttaagaaacctcctatttacaaaccaccttacccaaagtaccctccaggctccaactgaagacacccacctgattttgaattaagttaagggatgtattaagtatatgctaaataagaggtgtatctacaaccattgactttgtcatgctcaaaaatttggtt

SEQ ID NO: 203677 - DNA, 256 bp, Glycine max
gaatgctaacagaaggcattcacacagacatcaccatcaatgcttctgatggaagtataggagctcatagagctgttcttgctgccagatcacctgtcttccgcagcatgttctcacatagtcttcaggagaaagagttatcaaccataaacatctcagacatgtcacttgaatcatgccaggcttttctctattatctttatgggataatcaaacatgaagagtttctgactcataggctggcccttctgcaggc

SEQ ID NO: 203678 - DNA, 264 bp, Glycine max
ctcgaccggaatggccatggaaaataaaaaaattgtagagtattgggttgtgtctatactttgcatgcttttgtcgggtcattggatctctgttcaagctgcccctgcaccctctctcatcacacaactccctggctttaacgccaatttcccatccaagcactattccggatatataagtgatggaaatactgaaagtgggaagaacctgttctactacttcgttagttcagaaagaagtccagagaaggacccagttgtgct

SEQ ID NO: 203679 - DNA, 267 bp, Glycine max
actcagtcctctatgacggtgtgcgtgcgcaaaccctaacctagttcttctatatcggcacctctatcccctgaaccctgttccatcttccaaccatggcgaaccaagacttcgaagagcgctcgcagcaaccgcaggagctagggtacgacccgaactttgtccccgactcggtaaaatcttttgtgtgttcacctgtaccgtcacatccgtgaaaagaacgtgtacgagatccaccagatgtacgagagctccttccagacctct

SEQ ID NO: 203680 - DNA, 259 bp, Glycine max
gcaaagttgaaaggagtgaatgttggtgaacctgttggacttgaagttcttgttgatggaacagtgccgacaggttctggactatcaagctctgcagcgtttgtctgctcatccacaattgctattatggctgcttttgatgtgaacttcccaaagaaagaacttgcacaagttacatgtgattgtgaacgacatattgggactcaatctggtgggatggatcaggcaatctctgtcatggccaagactgggtttgcag

SEQ ID NO: 203681 - DNA, 260 bp, Glycine max
ctgggacatcccaagctgactgtgctgttcttatcattgattccactactggtggttttgaagctggaatttcaaaggatggacagactcgtgaacatgctctgctttcattcacccttggtgtgaaacagatgatttgttgctgtaacaagatggatgctactacaccaaagtactccaaggccaggtatgatgaaattgtgaaggaagtttcttcctatttgaagaaagtaggatacaaccctgacaagattcctttt

SEQ ID NO: 203682 - DNA, 188 bp, Glycine max
ggaaacttgaagaggttccaattcagagaactccagattgctactaaaaacttcagcagcaaaaacatactgggaaaaggtggttttggaaatgtctacaaaggaattctccctgatggcactcttgtagctgtcaagaggcttaaagatggcaatgccattggtggagagattcaatttcagaccga

SEQ ID NO: 203683 - DNA, 265 bp, Glycine max
ctctcaagtccaacctacccctttttcttctcccaccaacttcaccgtcttcttcctcgatcatgtctcacttcaagggcaagtaccatgatgagcttattgccaatgctgcttacattggcactcctggaaagggtattcttgctgctgatgagtcaacagggacaattggcaagcgtttggctagcatcagtgtagagaatgttgaatccaacaggcgtgctcttagggagctgcttttcaccgctcccggtgctcttaaata

SEQ ID NO: 203684 - DNA, 197 bp, Glycine max
aaccctagaagtcgagagctccgacaccatcgacaacgtcaaggctaagatccaggacaaggagggtatccccccagaccagcagaggctgatcttcgccggcaagcagctcgaggacggacgtacccttgctgactacaacatccagaaggagtcaactctccacttggtgttgcgtcttcgtggtggtatgcaga

SEQ ID NO: 203685 - DNA, 263 bp, Glycine max
gacgatttgtttgaggacagatttagcattgcatataatcttgacagagaatttggaccagcactcaaggagcatatgcagtattgcatgaaccatccagaagaaatgagtaaactatcaaaattgaaggctcaaataactgaggtcaaggggataatgatggacaatattgagaaggttttggatcgtggagagaagattgaactgctggtggacaaaacagaaaacttacagttccaggctgacagcttccagaggcaggg

SEQ ID NO: 203686 - DNA, 185 bp, Glycine max
agcagagggaggagcggcattaaaaatgcagatcttcgtgaaaaccctaacggggaagaccataaccctcgaggtcgaaagcagcgacaccattgacaatgtcaaggctaagattcaagacaaggaaggcatccctccggatcagcagcgtttgattttcgccggaaagcaacttgaggatggag

SEQ ID NO: 203687 - DNA, 263 bp, Glycine max
gagaatggctcccaagggtttaacctttctggctgtgttaatatgcgtttcagcactgtcactgagtccttctgttgcgggggaagggcaaaataatggccttgttatgaacttctacaaggaatcatgccctcaggctgaagacatcatcacagaacaagtcaagcttctctacaagcgccacaagaacacttctttctcctggctcaggaacatcttccatgactgtgctgttcagagttgtgatgcttcactgttgctgg

SEQ ID NO: 203688 - DNA, 228 bp, Glycine max
caatgaatttgtaaatagggcaaaagtaatggataaggaattaatttctctggatatattagaaaaccgaattcgattgtctaatgatgaaactaaaacaaaatatttaactagaatatatgatcctttcctgaacggacgctttcgtggacaaatcgaaaatgttttttcaacctcaatccaatatgaaaaaaatgacaaaaaaaataccattttggtaaataaaat

SEQ ID NO: 203689 - DNA, 267 bp, Glycine max
ttaatttctctctgccttgctcatttacacacctctccaacctttcactttcagctttatttgaatccctctctctcctttccaaatggccagcgttgaggttgcacatcaaacaccaacaacagttccagaaaatgaaacaaccgaggtaatcaagacccaggaaacaaccccggaaccagtaccagccactgaggctcctgcaacagaacaagcagcagctgagggttctgctcaagaagaacaacaagcaactgaggttcctgc

SEQ ID NO: 203690 - DNA, 247 bp, Glycine max
cctctttctctgttctgaaaccactcccgcctcgtcgtcaccatgccgcaaggggattacatagagcgtcacagaagagactatggctaccgtctcgatcacttcgagcggaagcgcaagaaagaggcgcgtcaagttcacaaacgctctgcaattgcccagaaggctctgggtattaagggcaaaatgattgccaagaaaaattatgctgaaaaggcacagatgaagaagactttggctatgcatg

SEQ ID NO: 203691 - DNA, 254 bp, Glycine max
catttaccaaactcactcatcaattgtcatctttcttctcactaactattaattcatcatgtcgagcacagctggccaagtcatcaaatgcaaagctgcggtttcatgggaggcagggaagccacttgtgattgaagaagtagaggttgcgccaccacaagctggtgaagtgcgtttgaagatcctctacacctctctttgccacactgatgtttacttctgggaagctaagggccaaactccattgtttcctc

SEQ ID NO: 203692 - DNA, 205 bp, Glycine max
cgcgtgtactttcttgcgaaacagaagggcgaaggggcaaacacaacttttttgtttttttgtagagcgagagagaaaaaaatgttggggatcttcagcagttccgtggtgtcgccgccggaggagctggtggctgccggcagcagaacgccgtcgccgaagacgacggcggggaagctgctgaaccggttcgtggagaacaagg

SEQ ID NO: 203693 - DNA, 262 bp, Glycine max; identical to SEQ ID NO: 200465

SEQ ID NO: 203694 - DNA, 260 bp, Glycine max
tggtcacactaaggcatccagcggcggagagtgagaaaccatcaaagacctcaacgcagaaactgtggacggatggacggtattttttgcaggctgagaaagaacttagtgctgggtggaagctaatgcgaattggtgaagatcctgctgtagatatctggatggccgataatttgccaaaagaagcatccgttggggttgatccctggtgcatttcaattgatactgctcaaagatgggagcgtgcttttgccgaaaaa

SEQ ID NO: 203695 - DNA, 256 bp, Glycine max
gccgatattcgtctattaagggagcaaaagttgtcattgattctaatactggccgctcaaaaggctatggttttgttaggtttggtgatgaaaacgagagaacgagggcaatgaccgaaatgaatggcgtttattgttctagtaggcccatgcgaataggtgttgcaactcccaagaaaacttatggcttccaacaacaatattcttctcaagctgtggtattggctgggggacactcagctaatggtgctgtggc

SEQ ID NO: 203696 - DNA, 261 bp, Glycine max
cttcgttcagtaagaatctgattagaattgaaagttaaaggttaattgtgatcactagctactatttggtgcactgtgaaaaataaacacatgttgatgaacttgaaaaggcactcctaaaagctgtggcaaatcaaccagtttcagtttatattgatgcaggagcaattgctttcaaattttactcaagtgggatttttgaagcaagaaattgtggaactcatctagaccatgctgttgcagttgttggttatggtaaac

SEQ ID NO: 203697 - DNA, 260 bp, Glycine max
gattattcctcttcccattctagggttcccaaatggacgctggcggaaagatcaagaagggcgccggaggaagaaagggcggcggccctaagaagaagccggtttcaaggtccgtcaaggccggtctccagttccccgtcggaagaattggccgttatttgaagaaaggaaggtacgcccagcgtgtcggtaccggtgctcccgtttacttggccgcagttctcgagtacctagctgctgaggtgcttgagttggctggg

SEQ ID NO: 203698 - DNA, 273 bp, Glycine max
  unsure (1)..(273): unsure at all n locations
gtccccttgctgtgagaaagcacacacaaacaaaggtgcatggaccaaagaagaagatcatcgcctcatttcttacattagagctcacggtgaaggctgctggcgctctctccccaaagccgccggccttctccgttgcggcaagagctgtcgtctccgctggatccaactatctccgcctgaacctnaggcgcgnnatttctccntcgaagaggaccatctcancancaaactncnanagtnttnttggaaaaaatngtctttnantngggg

SEQ ID NO: 203699 - DNA, 255 bp, Glycine max
gattcataggcccaagagcaaagaaactaagaagattttgagcacaatggcatccacacaatgcttcttgcaccaccatgccctcaccactccaaccagagcttcatcacagcgcttagttgtgagcaccaaaccagcccacattgtttgcaaggcacaaaagcaggttgtccaagagggtgaggacactactaacattgtctctcgcaggttggccctcactgttctcattggtgctgctgctgtgggctcaag

SEQ ID NO: 203700 - DNA, 195 bp, Glycine max
  unsure (1)..(195): unsure at all n locations
caaaacgccatttccnaaggagcaacctctttccttntcactgantataaggacgtgggaanctncatggtggcnttngccattttgatattcctcngccttgagctctntgganggattcagcacaagctatcagcngngcacctatgancaantaaaaatggnnngcnnagttctgncnaggntgtgaanagg

SEQ ID NO: 203701 - DNA, 205 bp, Glycine max
attcaattcaatctgcctcgatcatggagaggaaaacatttgggtttttgttcttgctcctccttgtcttagcttctgatgtgacggtgaagagagcagaggcgaaagattgcttgacaaggaggcacgggttccagggtagatgcttattcgacaggcaatgtgcacatgtgtgcaggagcgatggtttcatcggtggtcagtg

SEQ ID NO: 203702 - DNA, 209 bp, Glycine max
attcgtgcagcaccggatcctctcatttctccggcgataactctcccttttccggcgaattcaccgcttcctcgatatgaatcccgagtatgactatctgttcaagctccttctgattggagactctggtgttggtaaatcatgccttcttctaagatttgctgatgattcatacattgagagctacataagcacgatcggagttgatt

SEQ ID NO: 203703 - DNA, 256 bp, Glycine max
tagaaaacaaaatggaagacacagtttctgcgttgaggtctttgatggtttctcactctccgccgctggatgccttagtggtgccctctgaagattatcacctgagcgaatatgtgtctgcacgagacaagcgccgcgaattcgtttccggcttcactggaagtgccggctttgcacttataacaaagaaagaagcactgctgtggacggatggacggtattttttgcaggctgagaaagacttagtgctgggtgg

SEQ ID NO: 203704 - DNA, 222 bp, Glycine max
ttatcattcattctcatctttctctcttctctctccacccaaaccctaactcccgaccctgttcccctctcgtatccgtcatgaaaggaggaaagtccaagaccgaatctaagagagccgatcccaaacttgctgtgaataagaagggagccgccaccaaggctaggaaacccgccggcaaggggaaggcagcgaaagaccctaacaagccaaagaggcctc

SEQ ID NO: 203705 - DNA, 209 bp, Glycine max
attcgtgcagcaccggatcctctcatttctccggcgataactctcccttttccggcgaattcaccgcttcctcgatatgaatcccgagtatgactatctgttcaagctccttctgattggagactctggtgttggtaaatcatgccttcttctaagatttgctgatgattcatacattgagagctacataagcaccatcggagttgatt

SEQ ID NO: 203706 - DNA, 241 bp, Glycine max
  unsure (1)..(241): unsure at all n locations
gttttgcatttcactttgacgaagagtgacgagagtcttatctgtcgtatctgatctctgatcgcatcttcattccgaaaatggctgtttcggctatcactggagcgaggctaactctagggatgtctctttctcttccacgcgatcaggatncnccgcatgggcgtntntatngnnccccanaggcgganaaaancnntnttgnacnantcangaaaatttccgggnngnnanggntttc

SEQ ID NO: 203707 - DNA, 179 bp, Glycine max
gcggctgctacttcggctccatcttctccgatctcctcaaactctatcagcgcagaaccaagcctctatcaccatggggaagacacatggaatgggagctgcccgcaagctgaagtctcaccgtaggagacaaaggtgggctgacaagtcatacaaaaagtctcatctgggaaatgatt

SEQ ID NO: 203708 - DNA, 272 bp, Glycine max
ctcactttctcgcagaaacgtattgtttttctctctttccgcggcctagatctgagcagtttggaaaccctaactgctctcaccaacgacatcaccactctctccgatcaactacctctttcgtcgccctaagtcatggcaggaattgcacccgagggatcacagtttgatgctcgtcaatatgataccaagatgaatgagctgcttacgtccgatggtcaggatttcttcacatcctacgatgaggttaatgacagttttgatgctatggg

SEQ ID NO: 203709 - DNA, 170 bp, Glycine max
gaatggctcccaagggtttaatctttttggctgtgttatgcttctcagcactgtcactgagtcgttgtcttgcggaggataatggacttgttatgaacttctacaaggaatcatgccctcaggctgaagacatcatcaaagaacaagtcaagcttctctacaggcgccaa

SEQ ID NO: 203710 - DNA, 207 bp, Glycine max
cggctcgagcttaatttctctctgccttgctcatttacacacctctccaacctttcactttcagctttatttgaatccctctctctcctttccaaatggccagcgttgaggttgcacatcaaacaccaacaacagttccagaaaatgaaacaaccgaggtaatcaggacccaggaaacaaccccgaaaccagtacaagccattgagg

SEQ ID NO: 203711 - DNA, 169 bp, Glycine max
tgaaccatcacagctagcagctgttgacatttttgtcagtactgttgatccattaaaagaacccccacttgtgactgcgaacactgtcctatctattctttctgttgactacccagtggataaggtctcatgttatgtctcgaatgatggtgctgctatgtgtacattg

SEQ ID NO: 203712 - DNA, 250 bp, Glycine max
gtcaaaatggcacagaaagtggctcagggggttgctgagaaaagaagaggaagaaggggtccgggcagtgttattggatccagtgctgctggttgcatttgtgctttcctcacaatttttggtgttgggggagaggcattttctcggctatggagactggggtttgttcccattttctgtaccaagttgagtgacactgtctcaagtgagatcgggagggcttttggaaaaacaacgtccctggttacaa

SEQ ID NO: 203713 - DNA, 196 bp, Glycine max
gatcggaacgtggaactgcggaaaccggaatatctcacttctcagatcagatcaatccgacgtcgttgcagttataatggctccattcagcggcgatgagacggcaccgtttttcggcttccttggagccgcagctgccctcgtcttctcctgtatgggagctgcctatggcacagcgaagagtggcgtgggcgtg

SEQ ID NO: 203714 - DNA, 268 bp, Glycine max
tcaggagtgtgcgttgggaagaacaagttcgtgtcagcagaatgggaacatctgtgcaggtaacgccactgtgtggagtgtacaatgagaaccctcgctgcgtagtttggttccattgatggcttcaacttcctcgtcgtctgtgggctgaattgccacttcgactgcttccctccttcaacccctcgccagggtagcatcaatcatagaggctgttttgctgttcacatgcgtatacgcttcatcttggtgctcttccatatgccat

SEQ ID NO: 203715 - DNA, 224 bp, Glycine max
gcataatgtaccgacaaacttcttggtctagctggttgtcttccctatgttggtggtgaagccaaagtccccgccatggattgttgctctggtatcagagaggttattgacaagagcaagaggtgcctctgcatcctcatcaaggatcaggatgaccctaatcttggcctcaagatcaacgtcacccttgctctaagtttaccagatgcttgtctaaacaccac

SEQ ID NO: 203716 - DNA, 179 bp, Glycine max
cctgctccagctcgagctcgcaaagggactcgttgttcttctcccaggttatttagaaaagcaaaatggacgcagatttgctgcattggtgctggatatgtggggggtcctactatggcagtcattgcacttaagtgcccatccattgaagttgctgttgttgatatccctaaatcccg

SEQ ID NO: 203717 - DNA, 195 bp, Glycine max
cccattttctctctttctctttctctccgacctagcgagaccgagcgatccgatcctaaccccgcgatgctccgccgcgcaaccacctccctcatctccggcgcctcccgccgccgcctctccaccgacgtgccggcaacgcgggggcggtttccgtcttcgcggaggcgtggaagaaggtgagccccaatatcg

SEQ ID NO: 203718 - DNA, 195 bp, Glycine max
cgaagaatgaagatggtgcgctgctgtcggtgcttcgcctgagtctcattccgtttgcgcccactatcacaggttgtgctgaggcttaactggttcttgaagcatatttcagagttttatcagagaacaaatgggttatattgggactcacggtgttgcagctcggcacagttataaatataggggagtagatca

SEQ ID NO: 203719 - DNA, 265 bp, Glycine max
ctttcttcatcacttcatagtaagcactatagaaaaaacgacattcattcatctatggctacccttattgctcccagcaaccactctccccaagaagacgctgaggctctcagaaaggcttttgaaggatgggggactgatgagaaaactgtcatagtaatattgggtcatagaactgtttatcagaggcagcaaatcagaagagtctatgaggaaattttccaggaggatcttgtgaaacgcctagagtctgagatcaaaggag

SEQ ID NO: 203720 - DNA, 181 bp, Glycine max
tcttgctgaaaatcagtcaccttttatgattgatatatatccttattatgcctaccgtgattcccggagtaaagtgtctttagactatgccctgtttgatgcatcctctgaagtaattgatccaaacacaggcttgctgtacacaaacatgtttgatgcccagattgatgctatttacttg

SEQ ID NO: 203721 - DNA, 177 bp, Glycine max
tggatcactaccgtaggcgctggtacactggatcgtgacttccccgcatacgtggcgctcggaaatggactcaacttctccggcgtttcgctttaccgcggtaacgctttgccggattcttctttgcctttggtttatgcagggaatgtgagtaatggtgtataaatgggaatttgt

SEQ ID NO: 203722 - DNA, 200 bp, Glycine max
gggaagaacctgttctactacttcgttagttcagaaagaagtccagagaaggacccagttgtgctatggctgaatggtggacctgggtgctccagctttgatggctttgtttatgagcatggaccattcaactttgaggctgcaaattcgaaagggaatctacccactttgcatatcaatccttacagctggtctaaggt

SEQ ID NO: 203723 - DNA, 260 bp, Glycine max
  unsure (1)..(260): unsure at all n locations
gtcagacttaccccttgctaccaacactgagcttaaccgagcttcgcaaagatgaatcgggaaaagttaatgaagatggccggttcggtnagaactggaggaaagggtactgtgagaagaaagaagaaggctgtccacaagacaacaaccacagatgacaaaaggcttcagagcacccgaagagataggggtgattgccatccctgctattaangnggcantntctttaggttccgtatntccngttncaaacncccaaa

SEQ ID NO: 203724 - DNA, 206 bp, Glycine max
gctagctattagttcgattttgtagtaagtgaggtgccaatatggtgaagatagctcttggtactttggatgactcttttagcgctgcctctcttaaggcttatttcgcagagttccacgcaactctgatttgcgtgttcgctggtgttggatcagccatcgcttacaacgagtttacaaaatgatgcaccttggttccaaggggg

SEQ ID NO: 203725 - DNA, 170 bp, Glycine max
ttaatttctctctgccttgctcatttacacacctctccaacctttcactttcagctttatttgaatccctctctctcctttccaaatggccagcgctgagggtgcacatcaaacaccaacaacagttccagaaagtgatacatccgaggtattcaagccccaggaaacaa

SEQ ID NO: 203726 - DNA, 188 bp, Glycine max
ctttctcaagttagtagggataaattgccagatattggttcagacgtacgaaggggatgcggatactgtagcagatgctgtagagttcgtgctccaaaatttcactgcaatgaacaaactttgggtgcgaatgcaacatcaggggcctgcccgggagacggaaaaccgggaaaaggaaaggagcgatt

SEQ ID NO: 203727 - DNA, 241 bp, Glycine max
caattaattaagcactctaaaacatatctttatttccttgtctacatatcttgaaaaactcaatcatggctagtgtttcttcggttttagctccatttagaaggcttgatgggaaggtggcgattatcactggtggtgcgagtggtctaggtgcagccactgcaagactcttctctaagcatggagcatatgtagtcatagctgatattcaagacgacttgggtctctcttttcccaaaga

SEQ ID NO: 203728 - DNA, 182 bp, Glycine max
ctttgttcactcttcttctcttgcggctagggttttagcgcagctcttctagatttaaggaagatgggtaaggaaaaggttcacatcagtattgtggtcattggccatgtcgactctgggaaatccactaccactggtcacctgatttacaagcttggaggcattgacaagcgtgttattga

SEQ ID NO: 203729 - DNA, 170 bp, Glycine max
attccaatatattccattctctctgtgtatttccctacctctcccttcaagatgcagatcttcgtcaagaccctcaccggcaagaccatcacccttgaggtggaaagctctgacaccatcgacaacgtcaaggccaagatccaggacaaggagggaatccccccggacca

SEQ ID NO: 203730 - DNA, 263 bp, Glycine max
agacgccgcagagtcagagagagagattcactgaaacagagcgcagaagaaaatacataaactaatccagaaaatgagcagcggcgctggaaaggtggtgtgtgtcaccggcgcttccggttacattgcttcctggatagtcaaattcctcctcaatcgcggctacaccgttaaggccaccgttcgcgacacaagtgatccgaaaaaaataaaccacttggttggcctcgacggtgctaaggagaggctgcacctctacaagg

SEQ ID NO: 203731 - DNA, 260 bp, Glycine max
attaattgcaagaatggcacttcgttgcttggtgatgtccctttctgttctcttcactcttggtcttgcgagagaaagccatgcctgagacgaagatttttggcatgctgtttggccaaacactcccattccaagttcattgcgagatcttctaaagcctggccctgcaagtgttgaaatcgatgatcaccctatgcaaattgaagaaacacagtacccgaaaaccttcttctataaagcagaccttcatccaggcaaaa

SEQ ID NO: 203732 - DNA, 261 bp, Glycine max
attcattctcatctttctctcttctctctccacccaaaccctaactcccgaccctgttcccctctcgtatccgtcatgaaaggaggaaagtccaagaccgaatctaagagagccgatcccaaacttgctgtgaataagaagggagccgccaccaaggctaggaaacccgccggcaaggggaaggcagcgaaagaccctaacaagccaaagaggcctccaagtgctttcttcgttttcatggaggagttcaggaaggtattc

SEQ ID NO: 203733 - DNA, 257 bp, Glycine max
tttctcctaaaacatctccagtgggttcttcttcttctattacaacaacgtcgtccaagaccatgaccatggccatggccacgatcctgctcctgttcacggtcttcgcggtttcatcggccctagacatgtcgataatctcgtacgacaacgcccacgccgccacgtcgcgcagcgcgaggagctgatgtccatgtacgagcagtggctagtaaagcacggcaaggtgtacaacgcgctcggagagaaggagaaga

SEQ ID NO: 203734 - DNA, 261 bp, Glycine max
accttctctgctgagacaacaatggcgatggctttcaaaatggccactactgggatgtgggtgacggatgagtgcaagaactctttcatggaaatgaagtggaagaaggttcatagatacatagtcttcaagatcgatgagaagtcaaggcttgtcaccgttgataaggtgggtggtcccggcgagagctatggtgatctcgccgcctccttgcccgacgatgattgtagatatgccgtattcgactttgatttcgtcacc

SEQ ID NO: 203735 - DNA, 261 bp, Glycine max
gacgattggcccactgtgacggagatggttcaagcaaatcaccgacttgttgttttcacttccgatgcttcaaaggaagcaggggaaggaatagcttatcagtggaagcacatggttgaaaatgagtctggagatcctggagtgcaacagggttcttgtccgcacagaaaagaatcaaaggcattaaattctaaaagtcattcacttttcctgatgaattactttccgacatatccagttgaagctgactcttgcaaagag

SEQ ID NO: 203736 - DNA, 260 bp, Glycine max
  unsure (1)..(260): unsure at all n locations
cgcaggaggagaaggccgaggaagacagatccaaggtcgacgatctccgaggctctcccatgagcgtcggaaatctcgaagagctcatcgacgaaaatcacgctattgtttcctcctccgtcgggcctgagtattacgtcggaatcttgtctttcgtcgataaggatcagttngagcctggttgtgctattttgatgcataataaggttctttctgttgttgggcttcttcaagatgaagttgatccaatggtctctgtt

SEQ ID NO: 203737 - DNA, 255 bp, Glycine max
tttacttctcagcagcttcggctagggttcagaaacgaaaaagggttcggtgttctgttcgcgatgagagccaagtggaagaagaagcgtatgaggaggttgaagaggaagcgccgaaagatgagacagagatccaagtagtgcgttaaacctagtttgtttctgttgcttttacaattgcttatgttgtcgaatgggacacccagttgttagtggcactggtttctcctttttgatgtttgatacatttgttgg

SEQ ID NO: 203738 - DNA, 256 bp, Glycine max
ggagtggaggcggacattaacttcaacattgaagattatgaagatgacttgaagcagatgagcaatcttaccaaggaagagttcgtgcacgtgcttcgccgacaaagcactggatttccgagagggagttccaagtatcgaggtgtcactttgcacaagtgtggaagatgggaggctcgaatgggccaatttttagggaaaaagtacgtttatttgggtctcttcgacactgagatcgaagctgcaagggcttatg

SEQ ID NO: 203739 - DNA, 258 bp, Glycine max
caaaacactcataacacaaagcacaaagcaaagctcatccttgagttaaaaaatggcagcagcttcttccatggctctctcatccccatccttggctggcaaggccgtgaagctgggcccatcagccccagaagtgggaagggtgagcatgaggaagaccgtcaccaagcaggtctcctcaggaagcccatggtacggcccagaccgagtcaagtacttgggcccattctctggcgagcccccgtcctacctaaccgg

SEQ ID NO: 203740 - DNA, 261 bp, Glycine max
ctcgagccgctttttttattaacgttggtgattctcttcaggttatgacaaatggaaggtaccgaagtgtgagacacagagtgttggcaaatgggttcaagtccaggctttcaatgatttactttggaggtccacctttgagtgagaaaatagcaccattatcctctctcatgaaaggaaaagaaagtctatataaagagtttacctggtttgagtacaaaaaatcaatctacggttcaagattatctaaaaatagacttg

SEQ ID NO: 203741 - DNA, 259 bp, Glycine max
acacgcacacagttacgctcttcaaatctatctcttctcagcgattcttgcttcaagttccagaaatgggtgtggctcaaaacattcccgatgcggaggagggaaccttggagattggaatggaatacagaactgtttctggagttgctgggccattggtcattcttgataaagttaagggacccaagtttcaagagattgttaacattcgcttaggagatggtactactcggcgtggacaagtgctagaagttgatgg

SEQ ID NO: 203742 - DNA, 256 bp, Glycine max
ctctgttctctctccccctccccgattcgttttgcccctttcgtagccctaatttcaaccatgcctcgccgtagctccggtggaagatctgcccgtcctgctcctcgtgcagcacctcgtcctgctccagttcaccatgctcctcctccagcccctgctcagagcggtggcggatctatgcttggtggcattggttcaaccatagctcaaggtatggcttttggcactggaagtgcagtggcacacagggctgtgg

SEQ ID NO: 203743 - DNA, 258 bp, Glycine max
gtccccgagaatttcaattgtcccaaggattcgagctctgatctcatctccagcatcaactacccttccatagcagtaaacttcactggcaaagcagacgcggtcgtgagtagaactgtcacaaacgttgacgaagaagatgaaacagtgtacttccccgttgttgaagctcctagtgaagtaattgtcacactctttccatataatcttgagtttacgacaagtattaaaaaacaaagctacaatattactttcaga

SEQ ID NO: 203744 - DNA, 254 bp, Glycine max
accgcggcgtcttcgctagggcgtctggagactacgccattgttatcagtcacaaccctgataatgacacctctaggattaagctcccatctggttcaaagaagattgttccaagtgactgtagggccatgattggtcaagttgcaggtggagggagaactgagaagcctcttctcaaggctggaaatgcttaccacaagttcagagtgaagaggaattgctggcccaaggttcgtggtgttgctatgaaccct

SEQ ID NO: 203745 - DNA, 256 bp, Glycine max
ctcgagccgctctcagccttggcagtgaggactagaattacattctatagcatatactacaacaccagaagtgatgatatgagttctctatgtgggcctgtggtggatgacgtcagggtctggttttctggctccaacgggcttcgtgggttgggcttaggaaggcttgtgcttgtaattttgggtctagttttggttctgatgtaaaagggtttcatttggtcttgctttatttattattaccattaccatatgc

SEQ ID NO: 203746 - DNA, 253 bp, Glycine max
ccaatatagcccaagccctatacaaccaaaccctaacacacacccatttgattcagtttccatggctagcctcaaggttgcatttttggctgcagtgctctgcatggttgtggtgagtgcacccatggcacatgcagctatcacgtgcgggcaggtgacgaatagcctgatcaattgcatcggttacctccagaacggaggaacgccgccgtcgggatgctgcaacggagtgaagagcctcaatgccgccgcc

SEQ ID NO: 203747 - DNA, 255 bp, Glycine max
gggatcaacaatctgtctcatgatgtcgctcttgccgtcgctcccgatgtcgaataccgcatgcgccagattatgcaggaggcaattaagtgcatgcgccattccaagagaaccactttgacggcagatgatgtcgatgctgcactcaacttgaagaatgttgaaccaatatatggatttgcatctggtggccctttacggttcaaaagagctgttggacacagagacttgttttatattgatgacaaggatgta

SEQ ID NO: 203748 - DNA, 254 bp, Glycine max
gaatgctaacagaaggcattcacacagacatcaccatcaatgcttctgatggaagtataggagctcatagagctgttcttgctgccagatcacctgtcttccgcagcatgttctcacataatcttcaggagaaagagttatcaaccataaacatctcagacatgtcacttgaatcatgccaggcttttctctattatctttatgggataatcaaacatgaagagtttctgactcataggctggcccttctgcag

SEQ ID NO: 203749 - DNA, 257 bp, Glycine max
ctcgagccgcggcaaggggtgggtcccctgagtcaaggttggcggtttacaaagtgtgtgagcgttttgggtcatgtcctgggtcggccattcttgcggggtttgacgatgccattcacgacggagtggatatcttgtcgctgtcgctcggtggattcggtggaaccaaaaccgatttgaccaccgacccgattgcgattggagcattccactccgtccagcgcggcatcctggtggtctgcgccgccgggaacgac

SEQ ID NO: 203750 - DNA, 251 bp, Glycine max
gcttccttaagctccttagtgctgctccttgcagctctaattctatcccctcaagttcttgcacactatgagaatcccccagtgtacaagcctcccactgagaaaccaccagtttacaagcccccagttgagaagcctcctgtttacaagcctccagttgagaagcctccagtttataagcctccagttgagaagccaccagtgtacaagcgcccagttgagaatcctccagtgtacaagccgccagttga

SEQ ID NO: 203751 - DNA, 254 bp, Glycine max
agagaatggctcccaagggtttaatctttttggctgtgttatgcttctcagcactgtcactgagtcgttgtcttgcggaggataatggacttgttatgaacttctacaaggaatcatgccctcaggctgaagacatcatcaaagaacaagtcaagcttctctacaagcgccacaagaacactgctttctcctggctcagaaacatcttccatgactgtgctgttcagagttgtgatgcttcactgttgctggac

SEQ ID NO: 203752 - DNA, 248 bp, Glycine max
tgtatcttcaacttggacaggtttcaactattgtcatttcatcccctgagtgtgctagggaagtgatgttaacccatgacattaactttgccacaaggcctaaagttctagctattgaaataatgtcttacaattccacaagtatagctttttctggctatggaaattattggaggcagctaagaaaaatatgcacattggagcttttaagcctaaaacgcgtcaactcattccagccaattagagaa

SEQ ID NO: 203753 - DNA, 255 bp, Glycine max
tggtaactcaactgaaaatatcagatgtaccacagccagcaatgataagatccccaatttctcaaggatggcctatcagtgaagagagagtatcagaatggctttggaccttgcataggatagttgttgatgttgtgaggactgatagtcatcttgaattctacgaggacacgagaaatttagctaggatgtcagatattcttgctgtctatgcatgggttgatccttcaacagggtattgccaaggtatgagtg

SEQ ID NO: 203754 - DNA, 253 bp, Glycine max
attcattcaagattcagcaagtgcgtttcggaagcagagaccgaaatacttcgagatggcccgtacaaagcaaactgctcgtaagtcaactggaggaaaagctcccaggaagcagcttgcaaccaaggctgcacgtaagtctgctccaacaactggtggtgtgaagaagcctcatcgttatcgccctggaactgttgctcttcgtgagattaggaaataccagaagagcactgagctcctaatcaggaagctt

SEQ ID NO: 203755 - DNA, 255 bp, Glycine max
tccatctacacttccttcatttccatccccttctctcttttaaacctcacgcacaacgaaatcgtgattctgttgttcttttgaaatggaaaacgctccggtggtgtgtaaggaagatgatcagatggatttgcctcccggatttcggttccacccgactgatgaagagcttataagccattacctctacaagaaggtcattgacaccaagttctgcgccagggctattggagaagtggacctcaacaagtctga

SEQ ID NO: 203756 - DNA, 254 bp, Glycine max
atcaaatcaggagagcatgcatatgaacatgatgatgaagaaggtgtgtgggtttgcaatagtgatggtggcagtgcagcttctggtggaggtgagtcccaaggcagaggctgtgacttgtacccctgtggagctgagtccttgtttgggggcaataacttcctctcaaccaccatcaacaatttgttgccagaaggtgagggaacaaaggcaatgcctctgtggttacctcaaaaacccaagtctaaggccat

SEQ ID NO: 203757 - DNA, 253 bp, Glycine max
accaaaaccgatttgaccaccgacccgattgcgattggagcattccactccgtccagcgcggcatcctggtggtctgcgccgccgggaacgacggagaaccattcaccgttctcaacgacgcaccttggattttaaccgttgcagcttccaccatcgaccgtgatcttcaatccgacgtggtcttgggtaataaccaagtcgtcaagggtagagccataaatttctcccctcttttaaattctcccgattatc

SEQ ID NO: 203758 - DNA, 252 bp, Glycine max
ctcgagccgggagcttgtctgagaaggaaacagatagaagctttgggttgagaaatttcaggtacattgagaccatcaaagaagctttggaaagggaatgcccaggagttgtttcctgtgctgatatcctcgttctctctgccagagatggcattgtttcgctaggaggtccccatatccctcttaaaacaggaagaagggatggtagaaggagcagagccgatgtggtagagcagttcctcccagaccaca

SEQ ID NO: 203759 - DNA, 256 bp, Glycine max
tactcgagccgattcggctcgagggaaaaatggtgtcgctgaaactggagaagcgcctctccgcaagcgtgctcaagtgcggcagaggaaaggtttggcttgaccccaatgaagtcaacgaaatctccatggccaattctcggcaaaacatcaggaagttggttaaggatgggtttatcatcaggaagccgaccaagattcactcccgctcacgtgctcgtaggatgaaggaggcaaagaggaagggccgccactc

SEQ ID NO: 203760 - DNA, 248 bp, Glycine max
gctcaccaactcccgctcccatttccttatttatagacagagtctgattgtttcctcaccactccctccactctctttctctagtcctgttatttctcagcgcgtaaagcatggctttgttggtggagaaaaccacgagtggtcgcgagtacaaggtcaaggacctttcccaggccgacttcggccgcctcgagatcgagctggccgaggttgagatgcccggcctcatggcctgtcggaccgagttc

SEQ ID NO: 203761 - DNA, 244 bp, Glycine max
gtacaagacaaagaggcgcaagatgagtggtagggtttctgggaaggtgaagtggttcaatgatcataaggggtttggactcataagccctgacgatggcagcgacgatctcttcgttcaccaatctcagatcaaatctgacggtttccgaagcctcgccgaaggagagtccgttgagttcgccattgaatctgaatctgacggacgcgcgaacgctgttgatgtcactggccccgacggcgcc

SEQ ID NO: 203762 - DNA, 251 bp, Glycine max
gtgctaaatccctagtaagccgccatggtgaagtactcaagggagcctgacaatccaagcaagtcttgcaaggctagaggcgccgaccttagggttcattttaagaacactagggaaactgcctttgcaatcaggaagttgcccttggttaaagctaaaaggtacttggaagatgttcttgcgcacaagcaggccattccgttcagacgtttctgtcgtggtgttggaaggacagctcaagcaaagaatag

SEQ ID NO: 203763 - DNA, 164 bp, Glycine max
ggtcaatggccatgtcgactctgggaaatccactaccactggtcacctgatttacaagcttggaggcattgacaagcgtgtctttgagaggtttgagaaggaagctgctgagatgaacaagaggtctttcaagtatgcctgggtgctggacaaacttaaggctg

SEQ ID NO: 203764 - DNA, 251 bp, Glycine max
gcctctcttaattcataattcctcaccttcaaatctccattctgcttcattttctgcaaagaacaaacccctttctgaagaaagaatatagtcttcagctggacaaggatcatttattttgaaagacaagtttgtgtgacaatcttatagttctaagaagggtgcaagtgagagctttgctgtgatggcaacccgtagatattcttttggaagggctgatgaggccactcatccagactccatgagggcca

SEQ ID NO: 203765 - DNA, 248 bp, Glycine max
gctagaaatctactgttacctccttgtccttctttttctgattgaccagaaaagatacgatgcggccaaagcttgttcctcagcaagcattgttcggctgaagagcctgaatagaagaactgtcgatgttattgcatctagactgtacttttattactcatatagctatgagcttacaggaaatcttgctgaaattcgaggcaacctccttgcattgcaccggattgctaccctgcgtcatgatgagc

SEQ ID NO: 203766 - DNA, 250 bp, Glycine max
aattggcctccacttatgaagatgttttgtttctgacgttggatgtggatgaggttaaggaaattgcctccaagatggaaatcaaagccatgcccacctttctgttgctgagtggagggactcctgtggacaaaattgtgggtgcaaatcctgatgaaattaggaaaaggattgaccattttgttcactcaactcgttcctagaacttttgttcattgtgctaggaagcatttcatatatgttttatatt

SEQ ID NO: 203767 - DNA, 251 bp, Glycine max
gatgacataaatttcacccttttaagttttaatttacctcactcaagactcaaccatgattcttttgaaatgcaaaatgaagtaatggttgcctctatataaggcacagctaacagcagaaacactcaacaccaaaacagaaccaagcgtatggataccctctctcagcttagccttctttgcctttgcctttccttctttcccctgctcgcttcccctgctttgctgtttcaggggttcaactgggaatc

SEQ ID NO: 203768 - DNA, 249 bp, Glycine max
cgagaacaaaaaaaaaaaacgtgattcgctcttctcttcgaataaaccacaaaaccaacaaacgagaggaggagtgaaagaagatggggttgtcgttcacgaagctgttcagcaggttgtttgcgaagaaggaaatgaggattctgatggtaggtctcgatgctgctggtaagacaaccatcttgtacaagctcaagcttggagaaatcgtcaccaccatccccaccatcggatttaatgttgagactg

SEQ ID NO: 203769 - DNA, 248 bp, Glycine max
cttcgttcagtaagaatctgattagaattgaaagttaaaggttaatacgtgatcactagctactatttggtgcactgtgaaaaataaacacatgttgatgaacttgaaaaggcactcctaaaagctgtggcaaatcaaccagtttcagtttatattgatgcaggagcaattgctttcaaattttactcaagtgggatttttgaagcaagaaattgtggaactcatctagaccatgctgttgcagttgt

SEQ ID NO: 203770 - DNA, 179 bp, Glycine max
acgaagagaatggctcccaagggtttaatctttttggctgtgttatgcttctcagcactgtcactgagtcgttgtcttgcggaggataatggacttgttatgaacttctacaaggaatcatgccctcaggctgaagacatcatcaaagaccaagtcaggcttctctacaaggcccacaa

SEQ ID NO: 203771 - DNA, 195 bp, Glycine max
atttcttcatcacttcatggtgggaggtatagaaaaaacgacatacattcatctatggctacccttattgctcccagcaaccactctccccaagaagacgctgaggctctcagaaaggcttttgaaggatgggggactgatgagaaaattgccagggaaatatggggccaatggacctgttttatcgggggcagg

SEQ ID NO: 203772 - DNA, 281 bp, Glycine max
tatcgagccgctcgagccgaatcggctcgagcaaagaacaaaaaggcacaagacagatgagagacaccaatgtcattcccaagcaaacgtcgagacatggacttgatgaagctgatgatgagtgattacaaggtggagacgatcaacgatggcatgcaagagttctttgtggaattccacggacccaaagacagtccttatcaaggtggtgtgtggaaggtaagggtggagctacctgatgcttatccttataagtctccatctattggctttgtcaacaa

SEQ ID NO: 203773 - DNA, 278 bp, Glycine max
gtaacgactgccccgctgtctccgacatggacccggtgaaattgaattctccgtgaagatgcggagtaccaacggctagacggtaagaccccgtgcaccttaactatagcttcgcagtgacaaccttgatcgaatgtgtaggataggtgggaggtgatgacacagaacgaccaatcctgaaagaccactctttcgtctaaggatgcctaaccgccgcaccgaaaattcgggggggggcgggacactgcgaggtgggtagtttatctggggcggatgct

SEQ ID NO: 203774 - DNA, 163 bp, Glycine max
tcttgtacactggtggcttctcaacttgtggcttgtacaagcctcatttgtacaagccaccagtatacaaaccaccagtttataagcctccagtgtataagccaccagtatacaaaccaccagtttaaaagcctccagttgaacaacctcctatttacaggcc

SEQ ID NO: 203775 - DNA, 269 bp, Glycine max
ctctgaagcagctcgaatgtttagtgagaacaagcgtgagtacaatcgaagagtgagggaaattgtggagcacagttggacagcagattaagttcatccttatatgcatgggaagctttgaaggcatgaatttggttgcagtgatggcaactataagaatgattgtgcaaactcatcacatttatattctctgctgatatgaatgatagcatcatcttatctttgaatttattatagcttctgcattgcatatgtcagctaatgtaaaa

SEQ ID NO: 203776 - DNA, 276 bp, Glycine max
agagaatggctcccaagggtttaatctttttggctgtgttatgcttctcagcactgtcactgagtcgttgtcttgcggaggataatggacttgttatgaacttctacaaggaatcatgccctcaggctgaagacatcatcaaagaacaagtcaagcttctctacaagcgccacaagaacactgctttctcctggctcagaaacatcttccatgactgtgctgttcagagttgtgatgcttcactgttgctggactccacaagaaggagcttgtctg

SEQ ID NO: 203777 - DNA, 147 bp, Glycine max
ggctcgagtaaattcctcgtggaatattggaggagccatgtctacaggtgggcaagtcgtcaagtgcaaagctgcggtggcatgggaagcagggaagccactgtcaataggaaccatagaagtggcaccaccccagaaaagtggagt

SEQ ID NO: 203778 - DNA, 174 bp, Glycine max
cggctcgagttgcaatcaaattagttcattctctttgcgcagttccctacctctcctttcaagatgcagatcttcgtcaagaccctcaccggaaagaccatcacccttgaggtggaaagctctgacaccatcgacaacgtcaaggccaagatccaggacaaggaaggaatcccc

SEQ ID NO: 203779 - DNA, 267 bp, Glycine max
cgcgttggtgcaaagcatccttcgtttcaatttctctctctcagcgctttctgcaatcgaacctttcatctccaaagggatccacaggccgaaggagaaatggggctgacattcacaaagcttttcagtcggcttttcgcgaagaaggaaatgcgaattctgatggttggtcttgatgctgctggtaagaccactatcctgtacaagctcaagctcggagagatcgttaccacaattcctaccatcgggttcaatgttgagactgtg

SEQ ID NO: 203780 - DNA, 266 bp, Glycine max
atcggatgcaaccctaattgaatccaagcaagcaggggaagtgggggtattatttgatcagaagtacaaagctcttcaaaacccaaacaacagctccacggaccacccctactgctctgctctgcaatggccgacgaggaacctgttgatcagaagagatatcttgaggagtcttgaaaaccaaaatgtgtaaaaccattactggaataccgggcgtgcattaaaaggatacatggtgatgattctgggcagaaacactgcgctgg

SEQ ID NO: 203781 - DNA, 265 bp, Glycine max
gcacggttataactgtggctcacagggttccaactgtaatagatagtgacatggtcatggtcctctcctatgggaaattggtggaatatgaggagccttcaagactaatggagaccaactcctcattctcgaagctggtagctgaatattggtccagctgcaggaagaattcttcctcaaatcttagcagacagcaacattgaataatgaatagtaacattatggaaaatcacgtgcagacttactttttcactgttttactttt

SEQ ID NO: 203782 - DNA, 248 bp, Glycine max
actcgagccgaatcgtactcagagctcgagcggctcgaggaacgactcgcaggatgatctacagaaggcttacaagaaagacgccatcaagaatcaccctgacaagggcggtgatcccgagaagtttaaagagctggcacaagcatatgaggttctgagtgaccctgagaagcgtgagatatatgatcagtatggtgaagatgcgcttaaggaaggaatgggtggtggcggtggccatgatccgtttg

SEQ ID NO: 203783 - DNA, 274 bp, Glycine max
ctagtcaatcggagggatatgggtttattgagtttactagtcgagctggtgccgagagagtccttcaaacatacaatggcaccattatgccgaatggcgggcagaacttcagattgaactgggcaacttttagtgcaggtgagaggcgtcatgatgacagcccggatcacaccatatttgttggagacctggctgcagatgttgcggattatcttcggcaagagacatttggggcacgatatccttcagctaggggggccaaagttgtaattga

SEQ ID NO: 203784 - DNA, 274 bp, Glycine max
gatcgccccgacattggtggctttggctgcgccaatggcaaggtccagatcatccagcagatcaaccatgagggtgaggttaacagggctcgctacatgccccagaaccctttcatcattgccaccaagaccgttagtgctgaggtttatgtatttgattatagcaagcatccctctaagccccctcttgatggttcctgtaaccctgattaagggcttaggggtcataacactgagggctatggcttgtcctggagtaagttcaagcagggcc

SEQ ID NO: 203785 - DNA, 196 bp, Glycine max
gcgtagtaagctcggaaccatatcgatatcgagccgctcgagccgttctcgttcacactttcagattgtgtaaagatgggggcgggtatccgaagtgatgtatctcctgccaacaggaagtcagaggttgaccctttgaagcgggtgccatttgaacaacctccatttagtctcagccaaatcaagaaggtcattc

SEQ ID NO: 203786 - DNA, 269 bp, Glycine max
gttattatcaaataattagttagattcctcgtggaatcttgttgaagccatgtctacagctggtcaggtcatcaagtgcagagctgcggtggcatgggaagcagggaagccactatcgatagaaaccatagaagtggcaccaccccagaaaggtgaagtgcgtttgaagatcctcttgaactccctttgccgtacagatgtttactggtgggatgctaagggccagactccgctgtttcctcgtatcttaggccacgaagcttcgggga

SEQ ID NO: 203787 - DNA, 273 bp, Glycine max
gtgaaaaccctaacgggtaagacgatcacccttgaggtggagtcttctgacaccatcgacaacgtgaaggccaagatccaggacaaggaaggcatccctccggaccagcagcgcctcatcttcgccggaaagcagctggaggacggccgcaccctcgccgactacaacatccagaaggagtccaccctccacctcgtcctccgtctccgcggtggcgccaagaagcgcaagaagaagacctacaccaagcccaagaagatcaaacacaagcac

SEQ ID NO: 203788 - DNA, 192 bp, Glycine max
agcacagactcatttgattggacatgcagtgatgagacgccagcaaggcacagcttgatatataggggcttgattccaatattgggggagggatccgccaaggctactgatgcagaatctacagaggtcattctcgaagctgctcttaagtccgaaacacaaaggggcctttgaacgcccggtgatgcattt

SEQ ID NO: 203789 - DNA, 165 bp, Glycine max
atcggtgcagctcttgcagcactctaccaccaggtcgtaatcagggccattcccttcaagtccaagtgattcaatcaaacggttcatgcttaatcaagttgggaacaacaacaacaacaaaaatcaagccaatgtttgtgggttttggtttcatttcattaagat

SEQ ID NO: 203790 - DNA, 186 bp, Glycine max
aaaaaagtgtagtgggaaatggcaggtgcgggtgcaggaggagggtatggggacgcgaaccagaggatagactacgtgttcaaggtggtgctgataggggactcggcggtggggaagtcgcagatactagctcggtttgcgaggaacgagttcagcttggagtccaagtccaccatcggtgttgaa

SEQ ID NO: 203791 - DNA, 271 bp, Glycine max
ggaccatccttttcttgaaagatgatggcaccttaaagccattggccatcgaattaagtttgccacatcctaggggagatgagtttggtgccgttagtagagtcgtcttgcccgcagaccaaggtgctgaaagtacaatttggctaattgccaaggcatatgttgttgtcaatgactcctgctatcatcaactcatgagccactggttaaatactcatgctgtgattgaaccatttgtcatagcaacaaacaggcatcttagtgtgctcca

SEQ ID NO: 203792 - DNA, 272 bp, Glycine max
tgaacttgaactatcgggtcttcttcttggctctctctgtttaggatcgatatggatttgtattttcctttggcaatacttgtgctgatattaggcacaccatactctagtgcttttgggaagagtgaaagtaatgtgaaaacagctgtttttctgtctcccaagtttgaacttggaccgggttcggtagccaataaatttgattatgatattgattttccaagaggtcatattgccctcaagagtttcaatgctgaagtagttgatgaagc

SEQ ID NO: 203793 - DNA, 191 bp, Glycine max
atccacgtgggtggctcgagtggaacacttcctcctttgctttagacacgtgttattatggtgaatacatgaattatgggccgggttcaggtctgggccaacgggttaattgggccgggtatcgggttatcaattcgacggtggaagcttctagatttacggtgggccaattcatatcgggctcgtcatgg

SEQ ID NO: 203794 - DNA, 250 bp, Glycine max
ctctagtcctgttatttctcagcgcgtagagcatggctttgttggaggagaaaaccacgagtggtcgcgagtacaaggtcaaggacctttcccaggccgacttcagccgcctcgagatcgagctggccgaggttgagatgcccggcctcatggcctgtcggaccgagttcggcccctcccaacccttcaagggggcccgcatcaccggctccctccagatgaccatccagaacggcggttctcattggga

SEQ ID NO: 203795 - DNA, 267 bp, Glycine max
gttttcggtgagatcgagatcgatcgaacatggatgaggagtacgatgtgatcgtgttgggcacgggtctcaaggagtgcattctcagcggtcttctctccgtcgatggcctcaaggttctgcatatggataggaacgactattacggaggagaatccacttcgctcaatcttattcagctttggaagagattcaggggagatgacaagcctcctccacatttgggcgctagcagggactacaacatcgatatgagccccaagttta

SEQ ID NO: 203796 - DNA, 230 bp, Glycine max
gtttcttcgattctctctttctctttcttcagaaaaattaaacccattcaaagaaagaaagaaagagcgatcatttccaatcacaatggcagatcaactcaccgatgaacagatctcggagttcaaggaagccttcagtttgttcgataaggatggcgatggttgcatcacaacaaaggagcttgggactgttatgcgttcgttgggtcagaatccaacagaggctgagc

SEQ ID NO: 203797 - DNA, 274 bp, Glycine max
gtgatttcagtgagtgatcggtgttcacttgatctcatcataatcgtcagcgtcaattgaagaagatgccgatcagaaacatcgccgtcggaaggcctgaagaggcgactcaccccgacacgttgaaggcggctttggctgagttcatctcaaccttcatcttggtgttcgccggctcaggctccggcatcgcatacaacaagctcaccgacaacggcgctgccacccctggcggcctcatctcggcctccatcgcccatgcattcgccctctt

SEQ ID NO: 203798 - DNA, 244 bp, Glycine max
gcatttcagacagtgccaaagatctaattcgaaaaatgcttgatcggaatccaaaaacaagggttacagctcaccaagtactctgtcacccttggattgttgatgacaacattgcaccagataaacctcttgattctgctgttttatcacgcctgaagcagttctctgcaatgagtagacttaaaaagatggctttgcgtgttattgcagagaggctctctgaggaagaaattggtggtctgaa

SEQ ID NO: 203799 - DNA, 269 bp, Glycine max
ctgtatcctgtggttaaggagagttttcagttgtatgctgatatgtgtgaggttttggctgtgttgcttgataagttctttgatatggactatgctgattgtgtgaaggcttttgatgcttattctagtgcggctaaacaaattgatgagttggttgcattttacaattggtgtaaggataccggtgtggcgaggtcctcggagtaccctgaggttcagaggattaccaataagttgcttgagacattggaggagtttgtgagggatag

SEQ ID NO: 203800 - DNA, 268 bp, Glycine max
tctctctagagtaattgcggaatcagctagaattttctaataatggccaaagacgttgagcaggttacagagcaaggtgaatactccgcgaaggattaccatgacccacctccggcgccgttgatcgacccagatgagctcactaagtggtccttgtacagagccgccatagctgagttcatagcaacactccttttcctttacatcaccgtgttgaccattattggctacaagagacagagtgacaccaaaatccccggtaacaccg

SEQ ID NO: 203801 - DNA, 235 bp, Glycine max
gatctgatctgctgaaacacgccacactcttcttaccatgggcctcctcgatcacttgtgggatgacaccgtcgccggtcctcgcccggagaacggccttggcaagctccgaaagcaccacaccttcgctttccgatctgcctccggcaaggcatcagacagcggaagcgtgaaatcgtacggtgaagatttgccggaggatgcggtgagagtgacgcgaagtatcatgatcgtg

SEQ ID NO: 203802 - DNA, 273 bp, Glycine max
tgaagtaatggcgaacatagacatcgaagggatcttgaagcagcagcagccttatgatgggcgcgttccgaagacgaagatagtgtgtactttgggccctgcttctcgatccgtagaaatgaccgagaagcttctgagggcagggatgaaccttccccgtgacaatttctatggtggccgcccactagtagcgggaggaccccctgaacattcggaagactgccatgcacaacactggcatactctgtgccgtcaagcttggacactaggggg

SEQ ID NO: 203803 - DNA, 231 bp, Glycine max
accaaaatgggcatatggagaaacgagatttcagaagaagcaaagaagcagctatggctatcagggccaatggtatttgtgagtgtgtttcaatacagtttacaaatgatatctctcatgtttgtaggccatttggacgagttgcttctagctgggtgtttctctggctacttcatttgtaaatgtcactggtttcagtgtgctgctaggtatgtcaagtgcacttgacac

SEQ ID NO: 203804 - DNA, 139 bp, Glycine max
atgagtatgtgcagaagatgacctttgatagctatttgtacaagacggtggtgcctggcaatccattggaggatctgaaattggccattaacaccattgggagcttagtgagagccagtgcaataaggagggagatgag

SEQ ID NO: 203805 - DNA, 199 bp, Glycine max
atcggaagaaaccctagccactctcccggcgtcacgatgcagatcttcgtgaaaaccctaacgggtaaaacgatcacgttggaggtggagtcttcggacaccatcgacaacgtgaaggccaagatccaggacaaggaaggcatccctccggaccagcagcgcctcatcttcgccgggaagcagctggaggacggccgca

SEQ ID NO: 203806 - DNA, 261 bp, Glycine max
tagcgtctcgtggatgtgtggtgccgcactcttgcgcgtcaggctggtcctgttatccgccaccgtagacgccgccgaacggatcaacgatgaagacgaccttctgatccgtcaagtggtgccggatgcggaggaccaccacctgctcaacgcggagcaccacttctccgccttcaagacaaagttcggcaagacctacgccacgcgggaggagcacgaccaccggttccgtatcttcaagaacacttgctcctcgccaag

SEQ ID NO: 203807 - DNA, 267 bp, Glycine max
ctctccccgcccaaaccctaactccctaccctattccgctttctctcatccatcatgaaaggaggaaagtccaagaccgaatctaagagagccgatgccaaacttgctgtgaataagaagggcgccgccaccaagactaggaaacccgccggaaaggggaaggcagcgaaagatcctaacaagccaaagaggcctccaagtgctttcttcgttttcatggaggaattcaggaaggtgttcaacaaggaacatcccgacaacaaagca

SEQ ID NO: 203808 - DNA, 259 bp, Glycine max
  unsure (1)..(259): unsure at all n locations
gtcaggtggtgccagatgttggcgaacgnaagaggaggacaacctgctgaacgccgagcaccacttcgcgagcttcaaggccaagttcgccaagacctacgccaccaaggaggagcacgatcatcgcttcggcgtcttcaagtccaacctccgcagagccaggctgcacgccaagctcgacccctccgccgtccacggcgtcaccaaattctccgatctaactccggccgagttccgccgccagttcctcggcctcaag

SEQ ID NO: 203809 - DNA, 259 bp, Glycine max
cataggaagaaaccctagcctctcaccctccctgcgacacgatgcagatcttcgtgaaaaccctaacgggtaagacgatcacccttgaggtggagtcttctgacaccatcgacaacgtgaaggccaagatccaggacaaggaaggcatccctccggaccagcagcgcctcatcttcgccggaaagcagctggaggacggccgcaccctcgccgactacaacatccagaaggagtccaccctccacctcgtcctccgtct

SEQ ID NO: 203810 - DNA, 273 bp, Glycine max
tcacaaacttaagcgctgagcgtgaaagaggaatcaccattgatattgctttgtggaagtttgaaacaacaaagtattattgcacagttattgatgcgcctggacatagggatttcattaagaatatgattactgggacatcccaagctgactgtgctgttcttatcattgattcgaccactggtggttttgaagctggtatttccaaggatggacagactcgtgaacatgctctgctttcattcacccttggtgtgaaacagatgatttgct

SEQ ID NO: 203811 - DNA, 268 bp, Glycine max
tagagagcgcaacccttaccgcaaagtgctgttcttggagccaaggatttgccgagaactattcttagtgatcacatagaacagcgattatttaaacggctaaagcaagaaagactagaaagggcaaggcttcaaggaaaaagttatgatgagattcctggggctgatgctcttgttgtaagagttgtgtcatctgttgacaaaaagttagaagtgaaaccgcggtttctggagatttttcaggaagagaattacccaacagaatttc

SEQ ID NO: 203812 - DNA, 260 bp, Glycine max
tttctctcagattcttgcgcggtttatcatgggggatagtcagtattcgttttctctcaccacatttagcccttctggaaagcttgttcagattgagcatgctttgacggctgttgggtctggacaaacgtctttgggaattaaagctgcaaatggagttgtcattgctaccgagaagaaattaccatctatattggttgatgaagcatcagtccagaaaattcagttattaacaccaaatataggtgtcgtatatagtg

SEQ ID NO: 203813 - DNA, 262 bp, Glycine max
catgggccacaaaacaaaccccaacaacattatctcgaagatccctgcttgcgcaagcatttactactaaactaataggaccagaatccatcttagacccatgtgttttgatctcaaattggacattcttctcttcttcacctagcagtgctaagttaagcatcttcttgactctatcagttgaagaatcctcaacaagtgtgagtaaatgctttcccatagcttcaccaactggaagacctgtcaactcagcaatttttat

SEQ ID NO: 203814 - DNA, 264 bp, Glycine max
ctctttgactcttcttcgtctcaaatctcttcgttccttcgattcgttccatttcttccaaaatggccaaagacccagttcgcgttctcgtcactggagctgcagggcaaattgggtatgctcttgtccctatgattgctaggggagtgatgttgggtcctgaccagcccgtgatcctccacatgcttgacattcctccggcagcagagtcattgaatggggttaaaatggaattggtggatgctgcattccctcttcttaaag

SEQ ID NO: 203815 - DNA, 263 bp, Glycine max
gttgctccagtagccggcactaaacaacatggcggacaaggcagtcaccatccgaaccaggaagtttatgacaaacaggcttctctccagaaagcagttcgtcgttgatgtccttcatccagggagggctaatgtttccaaggctgaactgaaggagaagctgggaagaatgtatgacgtgaaagacaccaacactgtatttgtcttcaagttccgaactcattttggtggtggcaagtccactgggtttggtttgatctatg

SEQ ID NO: 203816 - DNA, 271 bp, Glycine max
caccattgtacaacccaattcccttcgtcgttttcgattaagagagcaatggcacgtaccaagcaaaccgctcgcaagtccaccggaggaaaggctccgaggaagcaattggcaaccaaagccgctcgcaagtcagccccggcgaccggcggagtgaagaagccccaccgcttcaggccaggaacggtggctctgagggagattcgaaagtaccagaagagcaccgaacttctgatccgaaaactcccattccagaggctcgtcagagaaa

SEQ ID NO: 203817 - DNA, 260 bp, Glycine max
ctggaatcaattaccagcctccaactgttgttcctggcggtgatcttgccaaggttcagagggctgtgtgcatgatctccaattccaccagtgttgttgaggtcttctctcgcatcgaccacaaatttgacctcatgtatgccaagagggcttttgttcattggtatgttggtgagggtatggaagagggagagttctctgaggctcgtgaagatcttgctgccctggagaaagattatgaggaagtcggtgcagaggca

SEQ ID NO: 203818 - DNA, 261 bp, Glycine max
aaccatccttttctttcgctcttcttccattccacactacatagtaaacacttcggacggaaacacaatacaacacaaaaagccccccccacaaaccaaatcaccttttttttcctttcaaaatgttcgccgaagagaatggcctcaagggagaccccagactccaagccatttcccaagccatcagagtcgtccctcacttccccaaacatggaataatgttccaagacataacgacattgctgttggatcacaaggcgt

SEQ ID NO: 203819 - DNA, 256 bp, Glycine max
tctcgagccgattcggctcgacggctcgagcctagaaccttcttcctttacacctcgctggacatcagcgatggatcctcagactgagccaatcagctacatatgcggagattgtggaatggagaatacgctgaagcccggtgacgttatacagtgccgtgagtgcggttaccgtattctttacaagaagcgcactcgtcgcattgtccagtacgaggcacgctgaagaaaactgctataacgtttgcaagtaatt

SEQ ID NO: 203820 - DNA, 262 bp, Glycine max
tttctagctccttctctcatcactcatctatggctacctttccctcccctccttcaccatcttcttcttcttcaattccgtctccaagatctagaatgttttactatgctggaagtgaagaccactatgaggagcctcacttcctccaagcttgttttctttgcagaaaaccactaggccaaaatcgtgacatcttcatgtacagagggaacacaccattttgtagcaaagagtgcagacaggagcaaatagagattgatga

SEQ ID NO: 203821 - DNA, 265 bp, Glycine max
gcacaagcactctctctttcccttaccctttttcaggtttcaacgctccaactatccatggcaaaccgctggctcagacccgaggtgtatccactgttcgctgcggttggtgctgctgttgggatctgtggattccaactggttcgtaatatctgcatcaaccctgaagtcagggtgaacaaggagggaaggaaggcaggagttttggagaactttgctgagggagagaagtatgccgagcacttcctgaggaagtatgtgcgca

SEQ ID NO: 203822 - DNA, 261 bp, Glycine max
agaaaagtgaattggattgcatctctcgctttgtgttggaagaggggaatcgtagatctgatttctttcattcttttaataataattttgtgatcagaattattgagctgaagaaaagacaatgggattgtgggaagcttttctcaattggctacgcagccttttcttcaagcaggaaatggagttatctctaataggacttcagaatgctgggaagacttcccttgtaaatgtagttgctactggtggatatagtgagga

SEQ ID NO: 203823 - DNA, 261 bp, Glycine max
attctacctcttcacatccatatcacagaaaactattttggtttaatttgcctttccttttcaagggagctcattgaagagacaaaaaacaatggctgaaacaaagttgagcatgatgaaggacaaaagatggtcactccgtggaatgactgctctcgtcacaggagccacccgaggcatagggcatgccattgttgaagaattggcagactttggagcaactgttcatatatgtgcacgtaatcaagatgatattgataa

SEQ ID NO: 203824 - DNA, 260 bp, Glycine max
ctcgagccgctctctttctctctttctagttcgtgttcttcgtcgcaaatccgaagtaggatctctcttgttttttctctaggtttttcgcgatggcgtcgaagcgaattttgaaggagcttaaggatttgcagaaggatcctccaacatcttgcagtgccggtcctgttcatgaagatatgtttcattggcaagctacaattatgggtcctccagacagtccctatgctggaggtgttttcctagtgactattcatttc

SEQ ID NO: 203825 - DNA, 259 bp, Glycine max
gagagggagtcagagaaaccctaggtaagaagaaaagatgccggctggtcatggtttgagatcccgcaccagagattccttctctcgtcctttcaggaagaagggaaccatcgccctcaccacatacctgagaacctaccacgtcggcgactatgttgacgtcaaggttaacggtgccgttcacaagggaatgccccacaaattctaccatggccgcaccggacgcgtctggaatgtcaccaaacgtgctgttggcgtc

SEQ ID NO: 203826 - DNA, 259 bp, Glycine max
tgacagtggagaaggctgttcaaaacttaggtgcaattccagggaaatgtgtttaaatttccaggtggagggaccatgttccctcacggagcagatgcatatattgatgaacttgcgtcagttattccaattgctgatggttctgtcagaacagcactggacactggttgtggggttgcaagctggggagcctacttgctaaagagaaatgtgctggctatgtccttcgctccaaaggacaaccatgaagcacaagttc

SEQ ID NO: 203827 - DNA, 257 bp, Glycine max
cggcagttggcgaagtggaaaacagcagaagaagttgctgctcttgtaaggtctttgcctgttgaagaacaaccaaagcaaattatcgtcactcgtaaaggaatgttggatccattggaggttcacctgctggacttccccaacattgttattaaaggaagtgaactgcaacttcctttccaggcatgtttgaaaattgagaactttggggatcttatcttgaaggccacagaaccccaaatggttttgttcaacat

SEQ ID NO: 203828 - DNA, 262 bp, Glycine max
actcttctcctaagtgtagtagaggagaggaaccgcgccaaccctctcatcttctacttcttcaatccttttataacatttatagtttcattcttaatcgttgggaaaaatgttcatcgagaattttaaggtatagagtcctaatgtgaagtacaccgagactgagattcagtccgtgtacaactacgaaacacacgaacttgttcacgagaacaggaatggcacctatcagtggattgtcaaacccaaatccgtcaactac

SEQ ID NO: 203829 - DNA, 260 bp, Glycine max
gttgagaactaagaaggagaagcaaatggcttcctcaatgatctcttccccagctgttaccactgttcaaccgtgccggtgccggcatggttgctccattcactggcctcaagtccatggctggcttccccaccaggaagaccaacaatgacattacctccattgctagcaacggtggaagagtgcaatgcatgcaggtgtggccaccagttggcaagaagaagtttgagactctttcctacctgccagaccttgatgat

SEQ ID NO: 203830 - DNA, 255 bp, Glycine max
attgcaagaatggcacttcgttgcttggtgatgtcactttctgtttacttcactcttggtcttgcgagagaaagccatgccagagacgaagatttttggcatgctgtttggccaaacactcccattccaagttcattgcgagatcttctaaagcctggccctgcaagtgttgaaatcgatgatcaccctatgcaaattgaagaaacacagtacccgaaaaccttcttctataaagaagaccttcatccaggcaaa

SEQ ID NO: 203831 - DNA, 258 bp, Glycine max
acgatctgggacttttctttctcccccacaccacacccagattcaaaaactcgctctgatctgctctgcaattccccttccgtttcgtttcgatctcaaaacatgttcttcttcgattggatctatggcattctagcttccctcggtctctggcagaaagaagccaaaattctctaattaggtctcgataatgcagggaagaccacacttcttcacatgctcaaagacgagagattagttcagcaccagccgacccaa

SEQ ID NO: 203832 - DNA, 254 bp, Glycine max
gagaatggctcccaagggtttaatctttttggctgtgttatgcttctcagcactgtcactgagtcgttgtcttgcggaggataatggacttgttatgaacttctacaaggaatcatgccctcaggctgaagacatcatcaaagaacaagtcaagcttctctacaagcgccacaagaacactgctttctcctggctcagaaacatcttccatgactgtgctgttcagagttgtgatgcttcactgttgctggact

SEQ ID NO: 203833 - DNA, 260 bp, Glycine max
gctagccacaatgcagatattcgtgaaaaccctaacggggaagacgataaccatagaggtagagtcatcggacacaatcgacaatgtgaaggcgaagatcaaggacaaggagggcatcacgccggaccagcagcgcatgatcatcaccggtaagcagctggaggacggcagcaccctcgccgactacaacatccagaaggagtacacgcttcaccacgtcatccgaatcagcggcggcgccaagaagcgcaagaagaaga

SEQ ID NO: 203834 - DNA, 264 bp, Glycine max
atcacatcgcagagaagaacagagagagatccatccatcaattccaatggccgatcagctcaccgacgaacagatctccgagttcaaggaagccttcagcctcttcgacaaggacggggatggttgtattaccaccaaggaacttgggaccgtgatgcggtcacttggccagaacccaactgaggcagagctgcaggacatgataaatgaggttgatgctgatgggaatggtaccattgatttcccagaattcctgaatctcat

SEQ ID NO: 203835 - DNA, 264 bp, Glycine max
ctcacttgcagaattcaaagaaggcgtcttcataaacgcctttattctccgtttccgtttccttcccggaattcgatttttcatctctgaaaatgagagagtgcatctcgatccacattggtcaggccggtatccaggtcggaaatgcttgctgggagctctactgtcttgagcacggcatcgggcccgatgggcaaatgccaagtgacaaaacagttggcggaggtgatgatgctttcaacactttcttcagtgagactggtg

SEQ ID NO: 203836 - DNA, 262 bp, Glycine max
acggattatttagtcgccaagttgtgaaagattttgcagattatgcagaattttgtttcaagacttttggagatagagttaagaattggatgacgtttaacgaacctcgtgtggtggctgctcttggctatgataatggtttctttgcacctggaagatgctcaaaagaatatgggaattgtactgctggcaactcaggcactgagccttacattgttgcccacaatttgatattgtcgcatgcagcagctgttcaaagata

SEQ ID NO: 203837 - DNA, 259 bp, Glycine max
gtctgatagcgctctgtgcgcgtactccgaaagggaatcgggttaaaattcctgaaccgggacgtggcggctgacggcaacgttagggagtccggagacgtcggcgggggccccggaaagagttatcttttctgtttaacagcctgcccaccctggaaacggctcagccggaggtagggtccagcggctggaagagcaccgcacgtcgcgtggtgtccggtgcgcccccggcggcccttgaaaatccggaggaccgagt

SEQ ID NO: 203838 - DNA, 258 bp, Glycine max
ctgaaacactagctagggtattgggagctctcgttgtttcggagttagggaccttacgcagccatggccactgctacgaatgccgccgccgccccaccacgccagctctcccagaaggaagctgacatccagatgatgttggccgccgacgtccacctcggcaccaagaactgcgacttccaaatggaacgttacatcttcaagcgccgcaacgacgggatttacattattaaccttgggaagacgtgggagaagctt

SEQ ID NO: 203839 - DNA, 258 bp, Glycine max
cggctcgagctctactcccacattcgccggaggagattacactttgaatttcactgatgattctgggacagtgcacattaattcaggatggtccaagaccagggtgagcagtgctgttcattccacagatcctgttgcaatatatcaagttgacaaggtgctactccctgaggccatttttggcactgatatacctcctgcacctgctcctgcaccaactcctgatattgcccctgctgctgattctccaactgaaca

SEQ ID NO: 203840 - DNA, 261 bp, Glycine max
caactgaaccagcagcaacatttgcgcaaatcagacttgattctctgccacttaacctaaaatggaaatctttccgattcccgccgaatcctacactctcggcttcatcggcgccggaaaaatggccgagtccattgcccgaagcgccgtccgctccggcgtcctgccgccttctcgcattcggaccgcagtccacttcaacctcgcccgccgtagtaccttcgagtccttcggcgtcaccgttctcccttcaaacgacga

SEQ ID NO: 203841 - DNA, 287 bp, Glycine max
gtgaatgatatacataagcgtgggggaactgtccttggaacatcacgaggtggacatgacaccacaaagatagttgacagtattcaagatcggggaatcaatcaggtttatataattggaggagatggaactcagaagggtgcatctgcaatttttgaggaagtcagaaggcgtggtctcaaagtttcagttgtaggtatccccaaaaccatagataatgatatcccggttattgataagtcctttggctttgacactgctgttgaggaggctcaacgagctataaa

SEQ ID NO: 203842 - DNA, 249 bp, Glycine max
gacacatttgagcagaaatggttcaagcacagcctctacaacatgttggtaatggtgcacggagagatgatcaagctcagtttgatccaagtgatccaccagcctacaagactgccaatatcagcgcagcaattccatcacattgctgggagaagatcacattgagatctctgagtaatgttctccgggctgtgtcggtcgtgactgcattggtagctgcagtaatcggcttcaatagctggatcttct

SEQ ID NO: 203843 - DNA, 294 bp, Glycine max
accctcgagccgatttcgctcgagcagaaattaagctagagctacatcctttagttcttatctcaccttccatctctccctatcaaccaagggacgaaaaatcagagagagagagagagagagagagagaaattccaaaaccatgtcgtcccacagtcatctaagtttcgcctttggggttctaggtaacatcggctcctacgtgtgctttctggcaccactagcgacattttatagagtgtgtcagaagatatcaaccgaagggttccaatcaattccatatgtggctgcact

SEQ ID NO: 203844 - DNA, 290 bp, Glycine max
ggagtcagagaaaccctaggtaagacgctcagatgccggctggtcctggtttgagatcccgcaccagagattccttctctcgtcctttcaggaagaagggaaccatcgccctcaccacatacctgagaacctaccacgtcggcgactatgttgacgtcaaggttaacggtgccgttcacaagggaatgccccacaaattctaccatggccgcaccggacgcgtctggaatgtcaccaaacgtgctgttggcgtcgaagtcaacaagcaggttggccaccgcattataagg

SEQ ID NO: 203845 - DNA, 293 bp, Glycine max
agctgcagacaacaatggcgatggctttcaaaatggccactactgggatgtgggtgacggatgagtgcaagaactctttcatggaaatgaagtggaagaaggttcatagctacatagtcttcaagatcgatgagaagtcaaggcttgtacaccgttgataaggtgggtggtcccggcgagagctatggtgatactacgccgcctccatgcccgacgatgattgtagatatgccgtattcgactttgatttcgtcaccgtcgataactgccgcaagagcaagatcttcttcatt

SEQ ID NO: 203846 - DNA, 230 bp, Glycine max
aaacccgaaaacagagtacatgatttacacacgcgaacaccgtgtttgaaaatccaacatcagacaagagggcgcaatcgttagggtttccaagatggaaggcatggttgatcacctggctttcgagcggaacaattcgcagttcgatgtcgacgagatgaagatcgtttgggccggttctcgtcacgcttttgaagtatctgacaaaatggctcgcctcgttgccagcg

SEQ ID NO: 203847 - DNA, 287 bp, Glycine max
ctctttgactcttcttcgtctcaaatctcttcgttccttcgattcgttccatttcttccaaaatggccaaagacgcagttcgcgttctcgtcactggagctgcagggcaaattgggtatgctcttgtccctatgattgctaggggagtgatgttgggtcctgaccagcccgtgcatcctccacatgcttgacattcctccggcagcagagtcattgaatggggttaaaatggaattggtggatgctgcattccctcttcttaaaggtgttgttgccacaactgatgt

SEQ ID NO: 203848 - DNA, 285 bp, Glycine max
tcttgatcttgatgctggtgctcaaactttccttcatattaaatcccttgggcatgctcttcatgctttcataactgggaagcttgcagggagtggaaccggcaaccatgagaaagctaatgtcgaagtagacatccccatcacactagtttctgggaagaacacaattgatctcctgagtttaactgtgggacttcagaactatggagctttttttgacacatggggtgcggggatcactggccctgtgatattgaaatgtttgaagaatggcagcaatgttga

SEQ ID NO: 203849 - DNA, 284 bp, Glycine max
tctcactcttgttcttcggtctcctcctattctccgctgccgtagccaccgtcgaacgaatcgacgatgaagacaaccttctgatccgtcaagtggtgccggacgcggaggaccaccacctgctcaacgcggagcaccactcctccgccttcaagacaaagttcgccaagacctacgccacgcaggaggagcacgaccaccgcttccgtatcttcaagaacaacttgctccgcgccaagtcgcaccagaaattggacccctccgccgtccacggcgtcaccagg

SEQ ID NO: 203850 - DNA, 282 bp, Glycine max
ctctgctcctagggtttctccttcgagtgagggaaatggctcccacaccgcctagtacgggtctgtttgttggactgaacaagggtcacgtcgtcaccaagaaggaattgcccccacgcccctcagatcgtaaggggaaaacaagcaagatggtgcactttgtgaggcacctcataagagaggttgctggttttgcaccctatgaaaagcgtataactgagttgctgaaggttgggaaggataagagggcactgaaggttgcaaagagaaagcttggaaccc

SEQ ID NO: 203851 - DNA, 294 bp, Glycine max
gaagtactatgagccggttttgcgcaatgcagtcaagaagtttggaactgacgaggatggactaagccgtgtgattgttacaagggctgagaaggatctgaaggacatcaaagagctctactacaagagaaacagtgttcaccttgaggatgaagtgtccaaggaaacttctggggactacaagaagttcctacctcactctcttggggaaataagactaagttaagaacttgctctaagggcatcttagtaatgggtttttgttaattatgtcattggtttctggtttgtgcg

SEQ ID NO: 203852 - DNA, 288 bp, Glycine max
tgtgagaatcgatgggggagaaagggtgtgtgagcttagaaggaaagaaggtgatattggtcccttacatggaggcccacgtgcccaaatatcacgaatggatgaaggacccatctctccttcaagccactggctcagagcctctcaccctccaacaggagtacaccatgcaactctcctggtcccaagaccctaacaaagagacctttattgtattggacaaggacttggttgttggcgatttctctcacggggaaccccaccctgaagccatggttggagatgtaa

SEQ ID NO: 203853 - DNA, 289 bp, Glycine max
ctgggtggggagcgcaacacggttttcactttggccgaggtctctcagcacaagaatgccaaagactgttggcttgtcattcatggcaaggtttataatgtaacaaagtttttggaagatcaccctggtggggatgaggtcctgttgtcttccacagggaaagatgcaaccaatgattttgaggatattggtcacagcaccagtgccgtagccatgatggatgagttctatgttggagccattgatacatcaaccatccccagcaaggttaagtacactcctccaaaac

SEQ ID NO: 203854 - DNA, 289 bp, Glycine max
gagcgaagagaatggctcccaagggtttaatctttttggctgtgttatgcttctcagcactgtcactgagtcgatgtcttgcggaggataatggacttgttatgaacttctacaaggaatcatgccctcaggctgaagacatcatcaaagaacaagtcaagcttctctacaagcgccacaagaacactgcttactcctggctcagaaacatcttccatgactgtgctgttcagagttgtgatgcttcactgttgctggactccacaagaaggagcttgtctgagaagga

SEQ ID NO: 203855 - DNA, 268 bp, Glycine max
ccactcacctgcctcttcctcacccctttctccatctaacgagtaaggccaaatggcgcgtaagacgatcagagagtatgactcaaagaggttgttgaaggcgcactttaagagactttctggcaaggcgttgccgatcaagtctgcacaaattactgcatcaactgatttcactgagctacaagagaaggaaccctggctttcatcttctaaattggttgtgcaacctgacatgttatttggaaaacgtggcaaaagtggactaggt

SEQ ID NO: 203856 - DNA, 289 bp, Glycine max
gcagccgcgcctctaacttgtagcagcgatacctcttctcttatcactaaaaaatgaccaagagaaccaagacggccggtattgttggaaaatacggcacccgatatggtgctagtttaaggaagcaaatcaagaagatggaagttagtcagcacagtaaattcttttgtgagttctgtggaaagtacgctgttaagaggaaggccgtgggtatttggggctgcaaagattgtggaaaagtgaaggctggaggtgcttacacattgaatactgcgagtgctgtcactgt

SEQ ID NO: 203857 - DNA, 313 bp, Glycine max
acgtcagctcggcctaccgctcgagctatttctgactacgttttgctctacgcctctccctctctctcaacaatcgttctcttcgattttcgggttttgttttgctgctgcctccgttccccccttctcataaacaacgcgttttctcttctgcttcgtatctattctttgcttttggtcttcgttgattcaaggccttcacagcattcgttgcggcattttaatcgatttatccaagcaggactgaatgaactaatggagtctaaaggtgggaaacagaagtctagtagtagtagtagtaaatcattgttct

SEQ ID NO: 203858 - DNA, 286 bp, Glycine max
caaaaacaaaaacaaagtaagagttcactcaatctcactgtgttgtgagttgtgtgtgagcaccaaccaacaatcgtgtctctgactccgttatgtttctttattaccttgttgatcgctggtgcagacgcagcggcggaccccaaacggtgcgttttgacaccggggggttgagcagagacacctttcccaaaggattcttattcggaacggccacgtctgcgtaccaagtggagggtatggcccacaaagacggtcgcggcccaagcatttgggacgtcttcat

SEQ ID NO: 203859 - DNA, 283 bp, Glycine max
ctcgatctcgagcggttgttgagtattctaattctaatgaggaacaggggtgtgtgggaagatgcaatcacagcaacagtgcttgtacttgtgctatgttcatcgtatggacttgcagaagtaaagtcacagtcacagaaggtatctggtttgtttgtttttggagattcattggttgaagtaggttacaataacttcctaaccaccatagcaagggcaaattactttccttacggcatcgacttcggcaggggttccactggccgattttctaatggcaaat

SEQ ID NO: 203860 - DNA, 283 bp, Glycine max
attctacccgccgctcgatgggaattgcgcttcaaggcgtctcgtagggctaatccgcctcacgagggtcacaacggcacgtgcctttggggggccgaggccccctactgctggtcggcaaacggacggcgggcgcacgcgtcgcttctagcccggattctgacttagaggcgttcagtcataatccaacgcacggtagcttcgcgccactggctcctcaaccaagcgcgatgaccaattgtgcgaatcaacggttcctctcgtactaggttgaattactatt

SEQ ID NO: 203861 - DNA, 281 bp, Glycine max
cttctccagagagaagaagaaacttactcgatcatcacttcacttcactaatacatcatggcagacgagacccagaacaagtatgagagctctgaggttgaggtccaggatcgtggtgtttttgactttctcggtaagaaaaaggatgaagaagacaagcctcatcctcaggaggaggtcatcgccaccgagtttcaaaaagtcactgtctcagaccaaggagagaacaagcacagcctcttagaaaagcttcaccgatctgacagcagctctagctcttc

SEQ ID NO: 203862 - DNA, 280 bp, Glycine max
ccaatacaataatcactaactgaatattcgatcggagatgtctgccgccgccgaagaagctaacgctcccgccgtcgaaaagccggttgaggaggtgaaggcgccgaaccccgcgaaggagaagaaacctaaggctccgaaggaaaagaagccaaaacaggccaaaacagcttcacatcctccatattttcagatgattaaggaggctttgatcgctttgaacgagaaaggaggatcgagtccttatgcgatagcgaagtacatggaggagaagcacaag

SEQ ID NO: 203863 - DNA, 286 bp, Glycine max
ctccctaacgcgtgcatagcagagtcagagacagagacgcagccatgcggcggagacctgcgaggtgttataggcaaattaagaacaagccataccccaagtcacgtttctgccgtggtgttcctgatcccaagatcaggatttatgatgttggtatgaagaagaagggtgttgatgagtttcctttctgtgtccatctggttagttgggagaaggaaaatgtttcaagtgaggccctggaagctgctcgcattgcttgcaacaagtacatggccaaatttgctgg

SEQ ID NO: 203864 - DNA, 286 bp, Glycine max
ctcgagccgctctatctctcacacacactttctctctctctctctctcacccagatcttgtagcaatggcgagcgctcccactccacgcgaagagttcgtgtacatggcgaagctggcggagcaggccgagcgctacgaggagatggtggagttcatggagaaggtctccgcctccgccgagagcgaggagctgaccgtggaggagcgtaacctcctctccgtcgcctacaagaacgtgatcggcgctcgccgcgcctcctggcgcatcatctcctcaatcgagca

SEQ ID NO: 203865 - DNA, 290 bp, Glycine max
accgtgggagtgcttacaacaagctacttagtcgacttgcagcagacagtcatgatctgtcaaaccctgttgacctcaaggaccattgggcaaaacatggaacgaaccgatacatcacaataaagtagagggcgagacattgactctggggcagcattacacgaatagaaactgcttttagtgatcaattatgtgattctcaagtcgaatgagaaaaataatgttaagtgtaaaggccatccgggaaagctaatgatttagagtatgcccatgcttatatttaggatgca

SEQ ID NO: 203866 - DNA, 284 bp, Glycine max
ctttgcttcttcgagtttcacagccaagtcgtaacacggtttcatgggatggaaaacatgcagagcttctggcaattgggtgatgaactccgtgggcactcaaaagcatcggaggatcacaagtggttaatggttgcctcgaaactggccgaacagacaagattgaagggggagcgtgtgaacaaccttgatctttcaaagggacccattgaaacaaggtcaagggataaatttgggttccaggaagagaacaaatttgattctcttaacttgagcatgttgaa

SEQ ID NO: 203867 - DNA, 281 bp, Glycine max
caagcgcttctcctctttgtgttctggctatgcttcttggcaagagttagatcggacgaggattgcgtgtacacggtgtacgttcggacgggttcgatcatcaagggaggcaccgattcagtaattggtctgaagctatacgacaagtccggctacggcatatacatcaccaacctcgaggcatggggcgggttaatggatccgggtcacaactcatacgagcggggcaacctcgacatattcagtggtagaggcccttgcttggaagcacccgtttgcga

SEQ ID NO: 203868 - DNA, 284 bp, Glycine max
ctcactcttgttcttcagtctcctcctattatccgccaccgtagccgccgccgaacggatccacgatgcagacgaccttctagatccgtcaagtggtgccggatacggaggaccaccacctgctcaacgcggagcaccacttctccgccttcaagacaaagttcggcaagacctacgccacgcaggaggagcacgaccaccgcttccgtatcttcaagaacaacttgctccgcgccaagtcacaccagacattggatccctccgccgtccacggcgtcagcagg

SEQ ID NO: 203869 - DNA, 281 bp, Glycine max
cgcaaaggattctacccgccgctcgatgggaattgcgcttcaaggcgtctcgtagggctaatccgcctcacgagggtcaccaacggcacgtgcctttagcgggccgaggccccctactgctggtcggcaaacggacggcgggcgcacgcgtcgcttctagcccggattctgacttagaggcgttcagtcataatccaacgcacggtagcttcgcgccactggcttttcaaccacgcgcgatgaccaattgtgcgaatcaacggttcctctcgtactaggtt

SEQ ID NO: 203870 - DNA, 288 bp, Glycine max
accctcgagccgattcggctcgagcttcatctgtcttttacagcaggcacgttcccttgccaggtacctgagtggggaaggatgaacatgtgcgatgctgaaagaagactccttgctaatgcattgcttgatatctccaacgagtggtttattctgctgtctgaatcatgcatccccctctacaatttcagctttgtctaccactagataatgaaatccaagcacagcttcgtgggtgcatttgatgatcccggtccatagtgaagagggcgctacaacgagcacatg

SEQ ID NO: 203871 - DNA, 286 bp, Glycine max
caaaaacgagatgaatgcattcagatcatacacacttgggatgaatttgtgcaagctttgaaccaaagacgaatgatcttagctccttggtgtgacgaggaggaggttgaggctgatgtcaaagcgaggacaaagggtgagatgggagcagctaagactctttgcagtccctttgatcagccagaactcccagaaggcaccaagtgctttgcatcaggaaagcctgcaacaaagtggacatactggggaagaagttactaggctactggctgttgattgtggtatt

SEQ ID NO: 203872 - DNA, 285 bp, Glycine max
ctctccccgcccaaaccctaactccctaccctattccgctttctcacatccatcatgaaacgaggaaagtccaagaccgaatctaagagagccgatgccaaacttgctgtgaataagaagggcgccgccaccaagactaggaaacccgccggaaaggggaaggcagcgaaagatcctaacaagccaaagaggcctaccaagtgctttcttcgttttcatggaggaattcaggaaggtgttcaacaaggaacatcccgacaacaaagcagtgtctgctgtgggcaa

SEQ ID NO: 203873 - DNA, 281 bp, Glycine max
cggctcgagatgatccctacgccatggaaccatttccctcataaaattctctcttcctttttgggttctcctcaatccattccaagcttcaatcttttctctcttctgccctctgcacctcccctcacacccttcctcattcgcaggaggtgaagatgtcgaccccggcaaggaagagactgatgagggattttaaaagattgcaacaagatcctacctgctggcatcagtggggctccccaagacaataatattatgctttggaatgctgttatctttgg

SEQ ID NO: 203874 - DNA, 281 bp, Glycine max
cccaggctcttccagaaccttctacgggagttcaagtaatccagactgctgaaaaaagttatctctcagatccacaccatgcagaacttgtggagaggcgatggggtggtagcactcacatcactgttgaagatgtgaagaagaggattgctgatttactaagagaatatgtggatagtggtgacacattagaagcctgtaggtgcatacgggaattgggggtttcattctttcatcatgaggtcgtgaagagggccttggtacttgccatggagatccat

SEQ ID NO: 203875 - DNA, 283 bp, Glycine max
ctttattctgcattcgtcctcgatcctcaggcggagatttcaaacacaacttgcgttattcaatctcttcttccaattccttctttcattcattcccaggctgagatggcagcggcaccagcagctaccttcactattggaaccaccggttccctaggccaaagaggaaactcgcttcctcaattaaagtcttctgggttgaaattcaactcccagaatcatttgaagagcttctgcggcctcaaggccatgtcatccgtgagatgtgagtcagaatcgtctt

SEQ ID NO: 203876 - DNA, 284 bp, Glycine max
cttacattaagcactctaaaacatatctttattaccttgtctacatatatcttgaaaaactcaatcatggctagtgtttcttcggtttcagctccatttagaaggcttgaggggaaggtggcgattatcactggtggtgcgagtggtctaggtgcagccactgcaagactcttctctaagcatggagcacatgtagtcatagctgatattcaagacgacttgggtctctctgttgccaaagagttagaatccgcttcctatgtccattgcgatgtcacaaacga

SEQ ID NO: 203877 - DNA, 254 bp, Glycine max
atctagaactagtccggctcgaacggctcgaggcccttttcacactctttcactcgcatcacacacaaactaacactcccattttctctcttactctttctctccgacctagcgagaccgagcgatccgatcctaaccccgcgatgctccgccgcgcaaccacctccctcatctccggcgcctcccgccgccgcctctccaccgacgtgccggcgacgccggcggcggattccgtcttcgcggaggcgtggaag

SEQ ID NO: 203878 - DNA, 281 bp, Glycine max
gttcctctctatttaaggttctccacagtagttaacgtagctcttgtttttctatttggtcggccacagtaaggcaccctgtgttctttgttttctaggcacaggcttatcatttgcttttggttggactttgctgaatggagagtgcaagcatcagccaatggttaaatcttcttgtttgtgtactgctattgctcaaggcagaaagatctttcagttccattgattttggtcgagaatgcagtatcaaaaggagctgtttgtttggatggacatccccc

SEQ ID NO: 203879 - DNA, 280 bp, Glycine max
cttcataccgttcgcaacacgatcactatttctgcgacgatggtggcacattcgagttcttggggcagggcactcgtggccatctcgccctataccttctctgccatcggcatcgccgtcgctatcggcgtctccgttctcggcgccgcctgggggatctacatcaccggtagtagcttgatcggcgctgcaatcagggctcctcgaatcacttccaaaaatctcattagtgtaatcttctgtgaagctgttgctatatatggtgttcattgtggctatt

SEQ ID NO: 203880 - DNA, 277 bp, Glycine max
ctcatggcagacgagacccagaacaagtatgagagctctgaggttgaggtccaggatcgtggtgtttttgactttctcggtaagacaaaggatgaagaagacaagcctcatcctcaggaggtggtcatcgccaccgagtttcaaaaagtcactgtctcagaccaaggagagaacaagcacagcctcttagaaaagcttcaccgatctgacagcagctctagctcttcaagtgaggaggtcggagaagatggagagaaaaggaagaagcagaagaagg

SEQ ID NO: 203881 - DNA, 280 bp, Glycine max
cttctgggtcaccgattgatacacccttcttcgttcctcactcacccgaaaatgaaaactctcttctctattcagtaaacggctgttttgtatacgagctgtcccggtctcagcctctacatcccaaaacatcaaaacaactggttgggctccttgtatggcttcttcctcagttggtagaagagctacatattcaacacaatctgtatcgccaaatgagccagttgtatctgtagattggctttatgataacctgaaggagccagatatcaaggtacta

SEQ ID NO: 203882 - DNA, 284 bp, Glycine max
gagtgaagagcgaagagaatggctcccaagggtttaatctttgtggctgtgttatgcttctcagcactgtcactgagtcgttgtcttgcggaggataatggacttgttatgaacttctacaaggaatcatgccctcaggctgaagacatcatcaaagaacaagtcaagcttctctacaagcgccacaagaacactgctttctcctggctcagaaacatcttccatgactgtgctgttcagagttgtgatgcttcactgttgctggactccacaagaaggagctt

SEQ ID NO: 203883 - DNA, 276 bp, Glycine max
gagaaataagggaaaaatggtgtcgctgaaactgcagaagcgcctctccgcaagcgtgctcaagtgcggcagaggaaaggtttggcttgaccccaatgaagtcaacgaaatctccatagccaattctcggcaaaacatcaggaagttggttaaggatgggtttatcatcaggaagccaaccaagattcactcccgctcacgtgctcgtaggatgaaggaggcaaagaggaagggccgccactccggttatggtaaacgtaagggtacaagggaggc

SEQ ID NO: 203884 - DNA, 282 bp, Glycine max
cgctttgaaaagcaaaacaacgaaactatccttgtttttgaccttggaggcggtacctttgatgtctccgtgctcgaggttggcgatggagtctttgaggtcctcactacttcaggtgatacccacttgggtggtgatgactttgataagagaattgttgattggctggcttctaacttcaagagggatgaaggcatagaccttttgaaagataaacaagctcttcagcgtctcactgagacagccgagaaagcaaagatggagctctcaacattgactcaa

SEQ ID NO: 203885 - DNA, 280 bp, Glycine max
cttctccatcttatttcttcttcttgaatgtgcttctgttgccaaagtttggattgtcgttttactgctgcggtggcatgggaagcagggaaaccactgtcaatagaaaccatagaagtggcaccaccccagaaaggtgaagtgcgtttgaggatcctcttcaactccctttgccgtagtgatgtttattggtgggatgctaaggaccagactccactgattacctcgtaacttacgccacgaagcatcagggattgtggagagcgtgggcgagggtgtg

SEQ ID NO: 203886 - DNA, 278 bp, Glycine max
ctactcactacagtcacaaggatatcttcctcagagagttgatttccaatgcttctgatgctttggacaagattaggttccttaccctcacggataaggacgttttgggagacggtgataacaccaagcttgatatacagattaagttggacacggaaaagaaaattctctcacttcgagacagaggtattggtctgacgaaggaggctttgataaagaatttggggacaatagcaaaatctggaacttctgcatttgttgagaagatgcaaacaagt

SEQ ID NO: 203887 - DNA, 280 bp, Glycine max
ctgacattgtttggtttggttacttgctcgaatttcctcgaatcgcttaatttgtatttgattagttaaaccgcaacgcggaatctcttttctcgaactggctaactctcaggcaagtggttcggacgctgattccagcaacaagcggctggtgctcgcactgtatgacgccctaaactccggcgactccgacgccgtcgtcaagatcgtcgccgccgacctcgagtggtggttccatggtccgccctcacaccagtttttgatgcgcatgctacaccgg

SEQ ID NO: 203888 - DNA, 283 bp, Glycine max
  unsure (1)..(283): unsure at all n locations
gatagcnnntgaantaacagttctgtttgnngcnnncagtnnncctngntgttcttcacaacccgnggccnctttgtntgagtatgccaanaacantgttagggccaccattganaggtacaagaaggcagatgctgctgcttcaaacgcagaatccgtcatctgaagctagnacacagttttaccagcaagagtcaaccaaattgagaagacaattcgagatattcagaatctaaacaggcacatccttggtgnancattggttctctgagnctcaaggnac

SEQ ID NO: 203889 - DNA, 241 bp, Glycine max
ctctcctcgttcacgctacacctatctactcttcttctagctttacagttttaacagtatatatatggcatagacattcctattgacctcagaatcggtgaatgagggacaatctgacaagctctgcgtacacatctccgatgatgtcctcgacgcttgcctcgagcaggatccagacagaaaagttgcatacgatacatgcaccaaaaccaacttggtcatggtcttcggagaaatcacg

SEQ ID NO: 203890 - DNA, 283 bp, Glycine max
ctcgagccgctcgagccgattcggctcgagcaacaatggcttctacgtcttcagaatcggacgtgtcggaccgaagaggaataccaggggctcagttcgtagaggatgtccaaacttacctcactcaatcgggtctcgatgttggttcagccctggcttttctccaagagagacttcagcagtacaaggtagtagaaatgaagcttcttgctcagcaaagggatcttcaggcaaagataccacatattgaaaagtgcttagacgttgttgctacattgaaagc

SEQ ID NO: 203891 - DNA, 290 bp, Glycine max
tcggctcgagtggaagcacttgatcaagactcaagagtgaacaaaaaaaaatgatgggtacccttaaggtgtccaacagtagtttatacatattttcgaagttcctagtaatttgtatggtgatgatgatatctttggttgattcaagttattccttgtgtgattttgaggcaatcttcaattttggtgattcgaattcagatacgggtgggtttcatacaagctttcctgcacagcctgctccctatggaatgacttacttcaaaaaaccagtggggcgtgcttctgat

SEQ ID NO: 203892 - DNA, 281 bp, Glycine max
cggctcgagtacactcctcctcttctcacggccagggttttagggcagcttctttctttgagattaagtttcagtagtaatgggtaaggaaaaggttcacattaacatcgtggtcattggccatgtcgactctgggaagtcaaccaccaccggtcaccttatctacaagctcggaggtattgacaagcgtgtcatcgagagattcgagaaggaagctgctgagatgattaagaggtctttcaagtatgcctgggtgcttgacaagctcaaggctgagcgtg

SEQ ID NO: 203893 - DNA, 281 bp, Glycine max
ctctctgccttgctcatttacacacctctccaacctttcactttcagctttatttgaatccctctctctcctttccaaatggccagcgttgaggttgcacatcaaacaccaacaacagttccagaaaatgaaacaaccgaggtaatcaagacccaggaaacaaccccggaaccagtaccagccactgaggctcctgcaacagaacaagcagcagctgaggttcctgctcaagaagaacaacaagcaactgaggttcctgccccagaatcaaccaccgaagc

SEQ ID NO: 203894 - DNA, 284 bp, Glycine max
aaaaccttagcccaaccggatcttcacgattaggagatggctaagtcgaagaaccacaccgctcacaaccagtcctacaaggcccacaagaatggcatcaaaaagccaaagaggcaccgccacacttccaccaaagggatggatccaaagtttctgaggaaccaaaggtacgcgaggaagcataacaagaagagcggtgaaacagccacggaagaagagtaaagtgtcactctcaaatggggctattaggattgaatttgctattcaagtcccatatgttttgt

SEQ ID NO: 203895 - DNA, 282 bp, Glycine max
actcgagccgattcggctcgaggagaatggctcccaagggtttaatctttttggctgtgttactgttctcagcactgtcactgagtcgttgtcttgcggaggataatggacttgttatgaacttctacaaggaatcatgccctcaggctgaagacatcatcaaagaacaagtcaagcttctctacaagcgccacaagaacactgctttctcctggctcagaaacatcttccatgactgtgctgttcagagttgtgatgcttcactgttgctggactccacaa

SEQ ID NO: 203896 - DNA, 280 bp, Glycine max
ctaattctcatttcttcatcgttcgattcttctcctcctaaagatgcagatcttcgtgaaaactttgaccggtaagaccatcacccttgaggtggagtcctccgacaccatcgataacgtgaaagctaagattcaagacaaggaagggatcccacctgaccagcagagacttatctttgcgggtaaacagcttgaggatggtcgaacccttgccgactacaacatccaaaaggaatccactctccacctcgtgcttcgcctcaggggtggcatgcaaatc

SEQ ID NO: 203897 - DNA, 278 bp, Glycine max
attctgtgattcgggtaatggccaccagtggaggcgatgaggggcagaacaaccctgccctcgacccggatttggatgctccggatgacccggatcacgagttcgctgagttcgggtcgggttgcttctggggtgctgagttggcctttcagcgagttgtgggtgtggtgaagactgaggttggttacactcagggtcacactccggatccgaattacaaactggtttgcaccggaaccactaaccacgttgaagtggttcgggtccagttcgacccg

SEQ ID NO: 203898 - DNA, 279 bp, Glycine max
ataactgctcttcacatcaagctccgtgcgacgggtggaaacaagacaaaaacacctggtcctggtgctcaatcagctcttcgtgcccttgctcgttctggaatgaaaattggccgcatagaggatgtgacccccattccttccgatagcacacgtagaaagagtggtagaaggggtagaaggctttaaggttctcgtggtattttaatttccatgtcaaacagatttgtggaatttggatatttcgctagagttaatataagaacttctattgtattt

SEQ ID NO: 203899 - DNA, 279 bp, Glycine max
gcgaagaggcgcagcgtagcagtaactcgtggaattgctagcaatggcgaggatcaaggtttacgagctgaggcagaagacgaaggctgatctgttgaatcagctgaaggacctcaaggccgagcttgccttgcttcgtgttgctaaggtcaccggcggtgcacctaacaagctctctaagatcaaggtggtgaggttgaacattgcccaggttttgacggtgatttctcagaagcagaaggccgcgttgagggatgcctacaagaacaagaagtactt

SEQ ID NO: 203900 - DNA, 115 bp, Glycine max
tcacaggaacaaagtcaaggcttctctacaagcgccacaagaacactgctttctcctggctcaggaacatcttccatgactgtgctgttcagagttgtgatgcttcactgttgct

SEQ ID NO: 203901 - DNA, 291 bp, Glycine max
ggcattcggctcgagctcgtttacacatctctccaacctttcacttgcgtgtctcagtcttattcgaatccctctctcaatctcctttccaaatggccagcgttgaggttgcacagcaaacaccaacaacagttccagaaaatgaaacaaccgaggtaagcaagacccaggaaacaaccccagtcactgaggctcctgcaacagaacaaccagcagctgaggttcctgcaacagaacaaccagccgctgaggctcctgccccagaatcaaccaccgaagcaccaaaggaag

SEQ ID NO: 203902 - DNA, 276 bp, Glycine max
attcttttgaactagaccctcttcttcagaatcctggctacacagctagtgacaccatcatagacttcgctggaaggagatttcgctttggagccattggtgacaagcctgttatactggtcatgacaggattgagcgtgataaatgcagctataacgactcagcttctgttgagtttattcacggtagaaggagtggtgcattacggcattgctggaaatgcaaacccgtccttgcatattggagatgtagctattccccaatactgggctcatc

SEQ ID NO: 203903 - DNA, 275 bp, Glycine max
agcgaagagaatggctcccaagggtttaatctttttggctgtgttatgcttctcagcactgtcactgagtcgttgacttgcggaggataatggacttgttatgaacttctacaaggaatcatgccctcaggctgaagacatcatcaaagaacaagtcaagcttctctacaagcgccacaagaacactgctttctcctggctcagaaacatcttccatgactgtgctgttcagagttgtgatgcttcactgttgctggactccacaagaaggagct

SEQ ID NO: 203904 - DNA, 278 bp, Glycine max
aaggaagagaagttcaaggtagaggtacacaagaatatggtatggaagaactgttactatacatgtgtttgctgcttgcaacataaacatgtattcgccgttatcttattgctcccaaagatatgtaaattaatttagtaattaaaacatttgataagaaaagctgcatttgcggatagcttacaggcttcttttgtgactgttggagagcatcccgggggtagagttactggtggtgtatcatggctgatggatgtgtaaatttctatgcaggtcat

SEQ ID NO: 203905 - DNA, 275 bp, Glycine max
aagcaatgttctcaagcctgatattgcagccccgggagttaacattctcgctgcatggtttggaaatgacacatcagaggttccaaaaggaagaaagccctcactatatcgcatactctcaggaacttccatggctactccacatgtttcagggcttgcatgcagtgtcaaaagaaaaaaccccacttggagtgcctccgcaatcaaatctgccatcatgacttcagcaattcaaaatgacaatttgaagggtcccataacaacggattcagggt

SEQ ID NO: 203906 - DNA, 279 bp, Glycine max
  unsure (1)..(279): unsure at all n locations
ttcggataacttggggagctatagttgacttgaaaatcttgaatcatttgatccagaacaagaatgaatactgtatggaggtgactcccaaaacattggctgatgtaaagggtggcactttgatttcttacgaaggaagggttcagctcctggaaattgcacaagtccccgatgaacatgtcaatgagttcaagtcaatagagaagttcaaaattttcaacacaaataatttgtgggtgaacttaaacgcagtnaaaaggnttgttgaagctgatgctc

SEQ ID NO: 203907 - DNA, 279 bp, Glycine max
aaaaccttagcccaaccggatcttcacgattaggagatggctaagtcgaagaaccacaccgctcacaaccagtcctacaaggcccacaagaatggcatcaaaaagccaaagaggcaccgccacacttccaccaaagggatggatccaaagtttctgaggaaccaaaggtacgcgaggaagcataacaagaagagcggtgaaacagccacggaagaagagtaaagtgtcactctcaaatggggctattaggatttgatttgctattcaagtcccatatgt

SEQ ID NO: 203908 - DNA, 278 bp, Glycine max
gagcatgtgatcaagcctgtgatcccagagaagtaccttgatgagaagaccattttccacttgaacccttcaggccgttttgtcattggtggccctcatggcgatgctggtctcaccggccgcaagaccattatcgatacttatggaggatggggtgctcatggtggtggtgctttctccgggaaggaccctaccaaggttgataggagtggtgcttacattgtgagacaggctgctaagagcattgtggcaagtggacttgccagaaggtgcattgt

SEQ ID NO: 203909 - DNA, 278 bp, Glycine max
cggctggtcatggtttgagatcccgcaccagagattccttctctcgtcctttcaggaagaagggaaccatcgccctcaccacatacctgagaacctaccacgtcggcgactatgttgacgtcaaggttaacggtgccgttcacaagggaatgccccacaaattctaccatggccgcaccggacgcgtctggaatgtcaccaaacgtgctgttggcgtcgaagtcaacaagcaggttggcaacagaattataaggaagaggattcatgtgcgggtagag

SEQ ID NO: 203910 - DNA, 277 bp, Glycine max
ctgttgctaaagaagccaggattggtgcctctattcttcgcttgttctttcatgattgctttgtaaatggctgtgatggatcaatcttattggacgacactgccaccttcactggcgagaaaaatgcaggacctaacagaaattcagcgaggggcttcgaagttattgataccattaaaaccaacgttgaagcttcttgcaatgccaccgtttcttgtgctgatatcctagcacttgccacaagagacggagttgtgctgctaggaggaccctcgtg

SEQ ID NO: 203911 - DNA, 276 bp, Glycine max
aaaattactatatgtaccatggagggactaattttggccgggcttctgggggaccttttgttgctagtagttatgattatgatgcaccaattgatgagtatggatttattagacagcctaagtggggccaccttaaagacgtgcataaggccataaaactttgtgaagaagcactgatagctactgatccaacaattacatctcttggaccaaatatagaggctgcagtttacaagacaggagttgtatgtgctgccttccttgctaacattgcca

SEQ ID NO: 203912 - DNA, 277 bp, Glycine max
ctaaccaaacctaatagcttcagaggatccatcatgcccactcaccatgcttccgccgccatttttggtattataggtaacatgatttctgtgatggtgtacttggctccggtgccaacgttttaccagatatacaaaaagaaatgcacggacggtttccactcgctgccatacttgttgtcattaatgagttctatgctttggttatactacgccttcctcaaaattcatgacggcgttgttccccttattacgatcaactcgatcggatgtgtca

SEQ ID NO: 203913 - DNA, 278 bp, Glycine max
gatttaggggttgaatagcaagaaacccagccaaggtttcttaacctagcaactcctaaacctaatattgctcaaaacctaaagcaggcaaagagaggtcatggctattttcaacggtcacaatcatttggctttaggttttggcatgctaggtaacgtcatttcattcatggtgtacttggcacccctgccaacattttaccgaatatacaaaaagaaatccacagaaggtttccaatcactgccttacctggtggcactcttcagttccatgcttt

SEQ ID NO: 203914 - DNA, 260 bp, Glycine max
gccatggctcttcctcttcgcagactctcctccacactcaacaaacctctcgccagcgatactttcatttatcatcgcatgtcctcctcgatctccgctcatgagaaagacaaatctcgcgccgattggataaagcagctcaacgatcctctcgagatcatcgatcccgagatcgctgacataatcgaactcgaaaaagcgcgtcaatggaaggggttcgaacttataccttcggagaatttcacgtcgctgtcggtaat

SEQ ID NO: 203915 - DNA, 276 bp, Glycine max
aggaaattgagctgcaaaaccacaataattatctgcgagctaagatagctgaacatgagagagctcaacaacagcaatcaaatatgatgtcaggaacactgtgcgagtcccttccttcacaatcatacgacaggaattttttccctgtaaatctcatagcttctgatgatcaacaacaatattctagtcaagaccacactgctctccaacttgtctgatgatatgctggaaattagagctactggaagttctgccacagtcattatatatatatat

SEQ ID NO: 203916 - DNA, 272 bp, Glycine max
tggcaagccccactcaaccaccacacctctcctcgttcacgctacccctttctgctcttcttctacctttcaagttttaaaagtataaagatggcagagacattcctatttacctcagagtcggtgaacgagggacaccctgacaagctctgcgaccaaatctccgatgctgtcctcgacgcttgcctcgagcaggacccagacagcaaagttgcctgcgaaacatgcaccaaaaccaacttggtcatggtcttcggagaaatcacgaccaa

SEQ ID NO: 203917 - DNA, 273 bp, Glycine max
aaaaaaaaaaaaaaaatccgcgattcgcccttctcttggaaaagtgaaaaccagaagtacgaacgaaagagaagagcgatttagaagtgagaaaagatggggttttcgttcacgaagctgttcagcaggttgtttgcgaagaaggaaatgaggattctgatggtaggtctcgatgctgctggaaagacaaccatcttgtacaagctcaagcttggagaaatcgtcaccactatccccaccatcggatttaatgttaaaactgtggagtacaag

SEQ ID NO: 203918 - DNA, 272 bp, Glycine max
attgcaaaccacaagtttttcgtagtgtatttgttgattggtcattggctcgccgaaatgggagaacaggacaggagcatattgacataattaccttttacaatgaaatattcattcctatctgtaaagccactgcttgttgaacttggccctgctggaccaactacaaaaagcgaccgaatacctgaagttaataaaaatgatggccatttagctcaatgtccagggtctcctaaaatatcacctttcccaacccttcctgatatgtctcc

SEQ ID NO: 203919 - DNA, 258 bp, Glycine max
  unsure (1)..(258): unsure at all n locations
ctttaatttcttatctttgaggagccaaagaatggaacgtggggttcttgatggtatcatcagtcggctgcttcaagtcagagtgagacctgggaaacaggttcagctttcagaggcagaaatcaggcagctttgtgcggtttccagagatatctttttgaagcagcccaatctgttggaactggaaccaccaattaagatatgtggagacatccatggtcaatattctgactnctgagactttttgagcatggtgga

SEQ ID NO: 203920 - DNA, 274 bp, Glycine max
cgaagttgctacaaactgaacggcggcgcacattcgattcggagttccccaacaaagcgttaacgcgcacgcgtttatccgacctgaatccaccactctctgaaccggttctccaagccctatcacactctggcttcgagttctgcacccctgtccaagctgccactattcctctgctctgcagcttcaaggacgtcgccgtcgacgccgccaccggttccgtcaaaactctagctgttgtcgtacctctcgtcgagattctacgccgctcctc

SEQ ID NO: 203921 - DNA, 276 bp, Glycine max
agagatttgaagcctcaaaatatactggtggatcctcttacacaccaagtgaagctatgtgactttggaagtgcaaaagttctagtcaaaggtgaagctaatatatcatacatatgttcacggttctatcgagcaccagaactcatatttggggccacagagtatacaagttcaattgatatttggtcagctggctgtgtccttgctgaacttcttttgggccagccattattccctggcgaaaatgcagtagaccagcttgtacatattataaag

SEQ ID NO: 203922 - DNA, 267 bp, Glycine max
gttacgaggaaattatcatgaatccaattatttctgctgcttctgttattgctgctgggttggccgtagggcttgcttctattggacctggggttggtcaaggcactgctgcagggcaagctgtagaagggattgcacgacaaccggaggcagagggaaaaatacgaggtactttattgcttagtttggcttttatggaagctttaacaatttatggactggttgtagcattagcacttttatttgctaatccttttgtttaatcct

SEQ ID NO: 203923 - DNA, 227 bp, Glycine max
ctcgagccgagaagcttcgcgaacgaaaacaaagaaccctagacagatccattccatagccatgtcaggtgttggccctctatctcaggattgggaaaccgtcgtcctccgcaagaaggctcccaaccgccgcagcaagaaaggacgagaaagcggtaaagccggcccggggctccggcgcggaaattgaaaccctaaaaagttatattgctgggacaattaaagca

SEQ ID NO: 203924 - DNA, 259 bp, Glycine max
aggagaagaagaaaaaggaaaagaaggacaaagatgaagaaacagacacattacacggaaagggaaaaaatggtgatggtgaagagaagaaagaaaaggaagacaaggagagaaaaaggaaaagaaggacaaagatgaagaaacagccccattaaaggaaaagggaaaaaatgacgaaggcgaggatgatgacgaaaataagaaaaataagaaaaaggataagaaggagaaagagaaggatcacaaaaaagaaaagaag

SEQ ID NO: 203925 - DNA, 272 bp, Glycine max
cgaatcgagcggtgtttgcggctgtggattacgaacgagcgaccttcttcgtttctcgcaaagtttaagtcatcatgggtaaggaaaagactcacatcaaaattgtcgtcattgggcatgtcgactctgggaagtcaactacaaatggtcatttgatctaaaggctttgaggtattgaaaagcgtttgattgagaggttcgagaaagaggctgctgagatgaacaagaggtcattcaagtatgcctgggtgcttgacaagctcaaggctgag

SEQ ID NO: 203926 - DNA, 269 bp, Glycine max
gagagagacaacactcgtagaagaagaaagcgtttccaagaagcgaaaggaaggaaaggggttttgtgatttttgaaagaatcgcgtttgggagtagtcggagatggagctttcgactccgaattcttcctcgaagcacttgtccatcacgccgggttctaaggttttgagaagccctctctccgacgaacagatctgggaagcgctccgtgacgctggcttcgacgaggaatcgattaagcacaaagacaaagctgcgcttattgctt

SEQ ID NO: 203927 - DNA, 273 bp, Glycine max
agaaaccttaaaaaacaagtagtgttccgaaaagatggctcagcaggaagtggtagaagggttcaagttcgaacagaggcacgggaaagagcgcgtgagagtggcgcgcgtgtggaagacgaggcaggggcagcacttcgttgtggagtggcgcgtgggcatcactctcttctcagactgcgtcaactcgtatctccgcgatgacaactctgacatcgttgctactgataccatgaaaaacacagtgtatgcaaaagcaaaggaatgctcaga

SEQ ID NO: 203928 - DNA, 276 bp, Glycine max
aaaacaaacccactaagatggcttcctttgtatccttcctagtgctgcttcttgcagcccttatcctcatgcctcaagggcttgctacttactacaaaccaattaagaagccacaagtgtacaagcctccagtgtacaagccaccagttacaaaccaccggtttataagccaaaaccaccggtttacaagccgaaaccaccggtttacaagccaccatataagaagccaccatacaagaaaccaccttatggaaagtaccctccagtagaggacaa

SEQ ID NO: 203929 - DNA, 274 bp, Glycine max
ggaggatttcttaatcaggtcaatcccctttccagcatggactgtcaaatccagctacaagaaactctacgaaggtctctcgacagcaggtactgcgattctggacgaagcggagcgcgtgggggataaagagggacgaagcgtgccacaatcttgtgttcatgttatcgttcaacgcgcagggtgggttagtgaaccagtttccgattttgatcaagtggctaggactggctggggagggtttacacaagcagctcgcggaggagatcaggac

SEQ ID NO: 203930 - DNA, 273 bp, Glycine max
atccaagcagcctccaattcgtgccactctcttcaaaatggccgtcaccttctcaaatctccacacagaatcaggtctcaagtccctcgacgacttcctctctgggaaggtctacgtgtctggggatcagttcacaaatgacgacatcaaagtgtatggtgctgttttggagaagccaggtgactcttttcccaatgctgccaagtggtacgaggttgtctcatctcagcttgctgcaagcttccccggcaatgctcaaggggtgagattcag

SEQ ID NO: 203931 - DNA, 272 bp, Glycine max
aaaagagaataaaatttctcagaagagtctccgctgaaagttttggtttcttgaagatgtcgttgctctccgatcttatcaaccttaacctctccgacatcaccgataaagtgatcgccgagtacatatgggtaggtggatctggcatggatatgaggagcaaagcaaggacactctcaggaccggttaaagacccttcgaagcttcccaagtggaactatgatggttccagcactggtcaagctcctgggcaagatagtgaagtgatctta

SEQ ID NO: 203932 - DNA, 281 bp, Glycine max
ttcggctcgagcttcaagtaaaatgagagactgagagtagccagaatgggcttatggagacacgagattgcagaattatcgaagaagcagctattgctatcaggtgcaatgggtattgatgatgtgtttcaatacagtttgcagatgatatcgctcaagtttgtaggccatttggacgagttgcttctagctggagtttctctggctacttcatttgtaaatgtcacgggtttcagtgtgcatgctaggatttcaagtggcacttgacacattttgtggtc

SEQ ID NO: 203933 - DNA, 300 bp, Glycine max
cgtacgtaatctcggccgagttccgagttgcgagttgcagagagagcaatgagtcaggaatcgtttatatatagcttcgtggctcgggggacgatggtgttagccgagtacaccgagttcactgggaactttccctgcaattgcagctcagtgcctccagaaactaccctcttccaataacaagttcacctacaattgcgaccaccacaccttcaattttctcgtcgaagaggttacgcttactgtgttgttgccaaggaatctgttagcaaacaaatctctattgctttccttgaacgt

SEQ ID NO: 203934 - DNA, 272 bp, Glycine max
ggcattctcagcggtctggcgactagcgaatcttgggcgacacttggatttgagtgaatcagtgaacaaggctgcgccagttgggtcaatcaagttgaaggtagcttcagaggtttctgaagcattatcactgggtcgtgctgttgttgctcttgaatctaccattatttcgcatgggatgccatatccccaaaatttggaaactgcaaaagaggtggaacgtattgtaagagagaacggtgcagttcctgcaaccattgcaattttagatg

SEQ ID NO: 203935 - DNA, 271 bp, Glycine max
aaatatgcgcacaaggatgcaaggaacttaacctataccctatttgcggcgatgaatattggcttcttggccttggtcctttcctcgcgttttgctctaaatggttcccaccgggtcaaagtcattggatggatttgtgacgccgtttcactcagtgtctttgcatcacctctaagcattatggcaaaagtgattagaacaaagagtgtacagtttatgcccttctatttgtcatttttcctcacactgaatgccataacgtggtttgtat

SEQ ID NO: 203936 - DNA, 269 bp, Glycine max
cttgtctgcagttgaagaaagaatagatgatcgtggtcgatggcgtctgctagccttggaagtggtggggtcagcagttcgaggtctgttaatggtggcttcaagggttcttccagttacgtcgattggcttggcagaaagatgcttgagatgaggttgagagaccacgaagacgatagagatagtgagcctgacatcattgatggtgtgggtgctgagacaggtcacgtcataagaaccagcattggtggccgaaatggtcagtctaa

SEQ ID NO: 203937 - DNA, 261 bp, Glycine max
ccaattttatagggttatattcattttccgatggcttctgcagatgttgagtaccgttgctttgtcggtgggctcgcttgggccactgacgaccatgccctcgagagagccttctatcagtacggcgaaatcgttgaaacgaagattatcaacgatcgtgagactggcagatccaggggttttggatttgtgaccttcgcctcggagcagaccatgaaagatgcgatcggagcgatgaatggacagaacttggacggccgt

SEQ ID NO: 203938 - DNA, 236 bp, Glycine max
ccgggagtcaggttggcaactcctgctgggaactctactccctggaacatggcatccatcccgatcggcatgatgccaagtgactcctccttcggtgtagcccacggcgccttcaacacctcttcagcgaaaccggatccggcagtcacgtccctcgcgccgtcttcgtcgatctcgggcccaccgtcatcgacgaagccgttgtggcacttaccgtcaactcttccaccccgaac

SEQ ID NO: 203939 - DNA, 268 bp, Glycine max
aagaaagtacacgctattcttacctacaatgacacaaaccacttgataaagaaggatgttccttgtgagactgaccaacttactcatgtttacacatttatcctccgtccggatgcaacctacagcatcctgattgataatgtggagaagcaaactggtagtctctactctgattgggatcttctccctccaaagacaatcaaagatcccgaggctaaaaaaccagaagattgggatgacaaagaatttattcctgatcccgaggata

SEQ ID NO: 203940 - DNA, 269 bp, Glycine max
attgccgccctctgtaggtgcaatgataatgacatttgcacagcgttggatgctctgaaatacgccaagaggccgaggcttatgccattcatagcagtgagccccattcacatggagtacaagctcaataagactaaagaagaggtgcttcaaatagctaaagatatgatcaaatttgcacgcagtttaggttgcagtgacatccagttctgttccgaagatgcagccagatcggatagagaggttctttatcaaattttggaagaagt

SEQ ID NO: 203941 - DNA, 270 bp, Glycine max
cggaggttttgggaaaggggagcatggggacttcttataaggccattctggaggacgggaccacggtcgtggtgaagaggttgaaggacgtggcggttgccaagagagagttcgagggcgacaatggaggttgttgggaacgttaagcacgagaatgtggttcctcttagagcgttttactactccaaggatgagaagttgctcgtctacgattacatggccgccggcagcttgtctgcacttcttcacgggagcagagggtcagggcga

SEQ ID NO: 203942 - DNA, 274 bp, Glycine max
catcgttggagttggaaggcgaacgatgtgaagtgcgcagtgtcaccccccacatggcgtgaagggcggcgcacggtgtcgttgtctcttgttctctcccacttgcttctcattgctaaccgtgatactgccctagcaagtcctttcgataagtatgttaagagaaaaaagcttgatcctctggaggtttatataccagctgtcatacttacagagtttcagatacaggacttagaaaaaactttagaggatgaggaaccccaatttgccctct

SEQ ID NO: 203943 - DNA, 244 bp, Glycine max
atagctttcttcatcacttcatagtaagcactatagaaaaaacgacattcattcatctatggctacccttattgctcccagcaaccactctccccaagaagacgctgagggctctaggaaggcctttgaaaggatgggggattgattgagaaaactgtaatagtaatattgggtaaaagaactgttaacaagaggcagcaattcagaggggtctaatgaggagattttccaggaggatcttgtg

SEQ ID NO: 203944 - DNA, 234 bp, Glycine max
actcgagacggttcggctcgagggtggatacctaggcacccagagacgacgaagggcgtagtacgcgacgaaatgcttacgggacgtgaaaataagcgtcgatccggggacttcccgtcatgggtcaacctttcgaactgctgctgaatacacgggcaggcaagagttaacctggtgaactgcaacatcttagtagccagcggttaagacagcagaagcgattcccgtagtagc

SEQ ID NO: 203945 - DNA, 268 bp, Glycine max
aattctttctttttctgtgagcatttctttcaggttattagcttgatcagtgtgcagtgtacaaatcataagggtagttgcaaattgcaatggctaagcatgatgttgagggtggttccttctctgcaaaggactaccatgatcatcatccagcaccgttgattgatgctgaggaactcacacagtggtcattctacagggctttgattgctgagttcattgccacaatgctcttcctttacatcacagtgctcactgtgattggtta

SEQ ID NO: 203946 - DNA, 243 bp, Glycine max
acaccaccccttcttccttttcatcaggtttattccttttcttttggttcaattttgctgaatggagagtgcaagaatcagcaaatggttaaatcttctagtttgtgtactgctattgcttaatgcagaaggatctcatgttccattgactttggtgaagattgcagaatcaaaaggagctgtttgtttggatggaagcccaccagcataccattttgacaacggatttgaagaagggattag

SEQ ID NO: 203947 - DNA, 265 bp, Glycine max
gttaaggtcaggagacctactgattataatccttccttagctgctaccctaggcccaagccaacctaacccaaaccttaatctgggtgctgttggcttaacacctgggtcggctgggggacttgatggtcctgatcgggtttttgttggtggacttccttattactttactgaaacacagatcagagagcttttagagacttttgggcctctacggggttttgatctagtgaaagatagagaaacgggcaactcaaagggttatg

SEQ ID NO: 203948 - DNA, 270 bp, Glycine max
agatatcgagcgattcggctcgagggtggatacctaggcgaccagagcagatgaagggcgtagtaagcgacgaaatgcttcggggaattgaaaataagcgtagatcacgggattcccgatataggtcaacctttcgaactgctgctgaatccacgggcaggcaagagacaacctggtgaactgaaacatcttagtagccagaggaaaagaaagcaaaaccgattcccgtagtagcggcgagcgaaatgggagcagcctaaaccgtgaaaa

SEQ ID NO: 203949 - DNA, 241 bp, Glycine max
gagaaacatggcttcgattaagctccttagtgctgctccttgcagctctaattctatcccctcaagttcttgcaaactatgagaatcccccagtgtacaagcctcccactgagaaaccaccagtttataagccgccagttgagaagcctccggttaaaagcctccagttgagaaccccccagtttataagccaccagtagagaagccacagtgtacaagcccccagttgagaatcccccag

SEQ ID NO: 203950 - DNA, 271 bp, Glycine max
atagcccaagccctatacaaccaaaccctaacacacacccatttgattcagtttccatggctagcctcaaggttgcatttttggctgcagtgctctgcatggttgtggtgagtgcacccatggcacatgcagctatcacgtgcgggcaggtgacgaatagcctgatcaattgcatcggttacctccagaacggaggaacgccgccgtcgggatgctgcaacggagtgaagagcctcaatgccgccgccaagaccaccgccgaccgccagac

SEQ ID NO: 203951 - DNA, 153 bp, Glycine max
ggggggaatccacttttggtgggaacaagctgcataggaatcaagagatgctattgctgatgctcttaaaggatcagacttggtgtttataacgggtgggattggtatgggaaaccggtcctgtgctggcccagtttgtatgccaaattttca

SEQ ID NO: 203952 - DNA, 148 bp, Glycine max
cctggatggaagtaatccaactgggaaatgaaaggggttcctctaagaattgaaattgggccaaaggatttagcagataaacaagttcgggccgttcgacgtgataatggtgcaaagattgacattggctatggcggatttggtgtgg

SEQ ID NO: 203953 - DNA, 218 bp, Glycine max
ctccgcactccgtcttcatcagtcatgcatcaccacggctccaacacaggggaaaatgagggagatccttcacgttcagggagtgcaatgcgggaatcagatcggttcgaagttctgggaagtggtgtgcgacgagcacggaatagatccgacggggaagtacgtcggaaactcagatctacaactcgagcgcgtgaacgtgtactacaacgaagctt

SEQ ID NO: 203954 - DNA, 115 bp, Glycine max
gggatttgctcctttgacatctcgtggctctcagcaatacagagccttgagtgttccagagctcacccagcaaatgtgggattccaagaacatgatgtgtgatgctgaccctcga

SEQ ID NO: 203955 - DNA, 265 bp, Glycine max
aaattctctgtctctctctctctctctcgatcaatcatggctttgcccaatcagcaaaccgtcgattaccctagtttcaaactcgtcatcgtcggtgacggtggtaaaggaaagacaacgttcgtgaaaaggcatcttaccggtgaatttgagaagaaatacgaaccgaccattggagtggaggttcacccattggatttcttcacaaactgtggaaagattcgcttctactgttgggatactgccggacaagagaagtttggtg

SEQ ID NO: 203956 - DNA, 270 bp, Glycine max
gaaagaagaaaatccagcgaaagtaaaaccagcatccgaaaaagatgagcagcatcggaacaggttacgatctctccgtcaccactttctcccccgatggccgtgttttccagatcgagtatgctgccaaagccgtcgataacagcgggactgttattgggatcaagtgcaaagatggggttgtgttgggcgttgagaagcttattccgtcgaaaatgatgcttccgggttccaatagaagaatacactccgttcatcgtcactctggga

SEQ ID NO: 203957 - DNA, 270 bp, Glycine max
cccaatcctaacactttcttctctctgttttccttcttcctcgcatcaatggagttggacggcgttctcctcggcatgtgcaaccctctcctcgacatctctgccgtcgtcgacgacgctttcttgcaaaaatacggtatcaagttgaacgatgcgattctcgccgaggataaacacaaacctatgtatgaagaattggctaacaatcctaatgtggagtacattgctggaggtgctactcagaattcaatcagggttgctcagtggatg

SEQ ID NO: 203958 - DNA, 263 bp, Glycine max
attcaattcaatctgcctcgatcatggagaggaaaacatttgggttattgttcttggtcctccttgtcttagcttctgatgtgacggtgaagagagcagaggcgaaagattgcttgacaaggaggcaacggttccaaggtagatgcttattcgacagggcaatgtgacatgtgtgaaggagcgatggtttcatcggtggtcagtgccgaggccctcttcgcaaatgcttttacagcaggccatgttgaacgaaattactactg

SEQ ID NO: 203959 - DNA, 222 bp, Glycine max
tcagactatgagctcactttcacgcataaccaccatatatctgcaaaataaccagtttacaggcactattgatgtccttgatagtctgcctctggacaatctgaatgtggaaaacaataattatactggatcgataccggtaacagctgaagaacattaacctacagaccggtggtaatgcatggagctcaggtcctgaacccccatctcctcccagggaag

SEQ ID NO: 203960 - DNA, 256 bp, Glycine max
acttaccaggtccagacatagtaaggattgacagactgagagctctttcttgattctatgggtggtggtgcatggccgttcttagttggtggagcgatttgtctggttaattccgttaacgaacgagacctcagcctgctaaatagctatgtggaggtaaccctccacggcaagcttcttagaggcgactatggccgccttaggcacgggaagtttgacgcaataacaggtctgtgatgcccttagatgttcaggg

SEQ ID NO: 203961 - DNA, 263 bp, Glycine max
aaaaaaggaggctgaagcataatcagcgcggcggtgtaagatggtggcaacggcgatcgatgaagtgcgaaccctctggattggcgatttacagtactgggtcgacgagtcctacctctctcagtgcttcgcccaaagcggcgaagtggtttccatcaaaatcatccgcaacaagctgacgggccagcccgagggctacggcttcgtcgagttcgtctcgcacgcctcggccgaagcctttctccgaaccttcaacggggccc

SEQ ID NO: 203962 - DNA, 269 bp, Glycine max
gttaaggtcaggagacctactgattataatccttccttagctgctaccctaggcccaagtcaacctaacccagaccttaatctgggtgctgttggcttaacacctgggtcggctgggggacttgatggtcctgatcgggtttttgttggtggatttcctattactttactgaaacacagatcagagagcttgtagagacttttgggcctctacggggttttgatctagtgaaagatagggaaacgggcaactcaaagggttattcgttt

SEQ ID NO: 203963 - DNA, 262 bp, Glycine max
ctcgagccgtcattttcaagctgtttggtgtaaagatgggacaagtgcttggttgtgttcaagtgaagcagtcaactgtagccgtcaaggaatgtttcgggaagtacgatgatgttcttcaacctggttgccattttgtgccatggtgtcttggctgcggtgtggctggtgtcctttctacgcgtgtcatgcagctaagtcttcgttgtgaaaactaagacaaaggacaatgtgtttgttaatgtggttgcttcaatccata

SEQ ID NO: 203964 - DNA, 262 bp, Glycine max
cgcgtcgctgctccgtaccagtttcactgcataaatttgagagaaaactctgcaaacatgttggtttatcaggacctccttacaggtgatgagcttctctcggactccttccgttacaatgaaattgagaatggaatgctgtgggaagttgaggggaagtgggttgttaagggagccagttgatgttgacattggtgcaaacccttctgctgaaggtggagaagatgagggagtcgatgacgccgctgttaaagttgttgac

SEQ ID NO: 203965 - DNA, 268 bp, Glycine max
tggccattattttgggccctttttgtaagctttgtgctaggaactgcttattcaatcaatgtgcctctgttgagatggaagaggtttgcagtgcttgcagcgatgtgcattctagctgttcgggcagtaatagttcaacttgcatttttccttcacatccagactcatgtatacaagaggccacctgtcttttcaagatcattgatttttgctactgcattcatgagctcctctctgtagttataacactgtttaaggatatacctga

SEQ ID NO: 203966 - DNA, 269 bp, Glycine max
gaggagtaagattacgcgggatagggatcgtgatattagtgaaaaggttgctcttggtatggcctctactaaaccagggactgaggttatgtatgatgagagactgtttaaccaggataagggaattgcgtctgggtttgccaccgatgatcagtacaatgtgtatgagcatgggctgtttactgcccagccaacgctgtccactttgtataggccaaagagaatcttgatgatgagacttatggaggtgctgatgagcagttggagaa

SEQ ID NO: 203967 - DNA, 277 bp, Glycine max
caagttattatcaaataattaattaaattcctcgtggaatcttgttgaagccatgtctacagctggtcaggtcatcaagtgcagagctgcggtggcatgggaagcagggaagccactatcgatagaaaccatagaagtggcaccaccccagaaaggtgaagtgcgtttgaagatcctcttcaactccctttgccgtacagatgtttactggtgggatgctaagggccagactccgctgtttcctcgtatcttaggccacgagcttcggggattgtgg

SEQ ID NO: 203968 - DNA, 280 bp, Glycine max
gaaaggcgatggacctcggaacctatgaagtgccagaaggagtggacattctaggaagatacgatgcagagtttgcaaaaatcctcacaaaagacgctttgaaattcgttgctgagctgcaacgtgagttcaggagcgatatcaagcatgcattagagcagctaccagggcacaagaagacagaggaggtcacagctaatactactcctccaccacgactgttgcatcattggagcatggtgacagtgctcatcatgaaggagaggccaaggagaagaaa

SEQ ID NO: 203969 - DNA, 178 bp, Glycine max
cagtagatctatccagtcacctgcctcttcctcacccctttctccatctaacgagtacggcaaaatggcgcgtaagaagatcagagagtatgactcaaagaggttgttgaaggagcactttaagagactttctggcaaggagttgccgatccagtctgcacaaattactgcatcaact

SEQ ID NO: 203970 - DNA, 205 bp, Glycine max
ggcctcttcagtgatggcatctgtggccctcaaacctgcccctttcactgttgagaagtcctcagttagaggccttccctccctctcaaggaactcctcttcattcagagttgtggccagtggtggcaagaagatcaagactgacaagccttatggaattaatggtggcatggctttgagggaaggagttgatgcatctggcagg

SEQ ID NO: 203971 - DNA, 200 bp, Glycine max
ctcatatcctcaatcaccccccctcgcactcgctcttcccttcctctggtggcgacaatgtcgactcctgctaggaagaggctgatgagagacttcaagatgctgcaacatgatccgcctgcagggatcagtggtgccccccaggataacaacataatgctgtggaatgatgccatatcaggtcctgatgatactccatg

SEQ ID NO: 203972 - DNA, 272 bp, Glycine max
cagcattacaacaaagatggttctgtcaataacagtcgttgtacttgtattgcttgggtgcctggaggtgatgctgcctttgttgtagctcatgctgatgggaatttgtatgtatatgataagaacaaagatagtgctggtgattcttcatttgcggttgtcaaagatcaaacacaattttctgtttcccatgcacgtaacagtaagagtaatccaatagccagatggcatatatgccagggttcaatcaacagtatttctttctcaaccga

SEQ ID NO: 203973 - DNA, 265 bp, Glycine max
gagcatttggttgattagggtttcttcggctgcgtgctgatgctcttgttttctcacagtcacacaacagcaatggaagcaatcacagagggagtgaacaacatcaacatctctgattcttacaagaagaatcgcattcaggtctccaacaccaaaaagcctctcttcttctacgtcaatctcgccaagaggtatatgcaacagcataatgaggttgagctctcagcactaggaatggctattgctacagtggttactgttgctg

SEQ ID NO: 203974 - DNA, 248 bp, Glycine max
ggaaaaatggtttcgctgaaactgcagaagcggctcgcagccagcgtcctcaagtgtggcagaggaaaggtttggcttgaccccaatgaagtcaacgaaatctccatggctaattctcgccaaaacataaggaagctggttaaggatgggtttattatcaggaagcccaccaagattcactctcgctcacgtgcccgccgaatgaaggaagccaagaggaaaggacgtcactctggatatggtaagcg

SEQ ID NO: 203975 - DNA, 270 bp, Glycine max
tcttttctccaaatctgccagccctcatcatggatttgcagcatattattcctttgttgagaaaatcttcaaagctgatgctgtacttcattttgggacacatggttcccttgaattcatgcctggacaacaggtggggatgagtgatgtctgttaccctgacagtctgattgggcatattccaaatgtatattactatgctgcacacaacccttctgaggccaacatcgccaagcgcaggagttatgcaacaccattagctatctgact

SEQ ID NO: 203976 - DNA, 243 bp, Glycine max
cgcaagtgaggaacaagcaagtgcttctaaaggactatgttaccggttttcccaaagaatccgacatgaatattgtcgaaagtaccataacattgaagcttccacaaggttccaatgatgtcttgctcaaaaatttgtacttgtcttgtgatccgtatatgaggaatctcatgaacaagcccgaaggccctcccaatagtcgtgcttacactcctggatctcccataataaggtatggtgtgt

SEQ ID NO: 203977 - DNA, 281 bp, Glycine max
tgaaaaaagagaagaagatgggtttgaagaacaacatggtggtgctaaaggtgtgtttggtgctacttttccttgtggggggtactactagtgccagcttgaggctgagtgagcttggcctgctcatgaaaagtgatcatcatcaacactcaaatgatgatgactcttcaaaaccatgctgtgatcaatgcgcatgcacaaagtcaaaccctcctcaaatgcgctgttcagatatgaggctgaattcgtgccattcagcttgcaaatcttgaatttgcgca

SEQ ID NO: 203978 - DNA, 272 bp, Glycine max
tcggtatgcatgacttatatatgtctcttaagcctctcctcgaggactatatgcttcgtgtcttcactgaagaaggtgctcgcgaaaatagccacaacgaggtcgaggacagcagcgaccttgatgttgacaaaagtaagctgccattgcagttagccattgtaggacgccctaatgttggtaaatcaactttattgaatgcattgttgcaaaaagaccgtgttcttgtgggtcctgaagctggtctgacaagagattcaatcagaacccag

SEQ ID NO: 203979 - DNA, 255 bp, Glycine max
gcaaataataaaaaacaaggttttagccatggcatcgaagcggatcttgaaggaactcaaggatctccaaaaggatcctcctacctcatgcagcgccggtcctgttgctgaagacatgtttcactggcaagcaacaattatgggtcctccagacagtccttatgctggaggtgttttcctagtcactattcatttccctccaattatcccttaaagccacccaggttgctttcaggacgaggtattccacccaat

SEQ ID NO: 203980 - DNA, 273 bp, Glycine max
cgtcgaatctgcttataaactcgcggaagcaggtgaagatcgctgacttcggggtgggtcggatactgaatcagacgatggatccgtgcaattcgtcggtggggacgatcgcctacatgagtccggagaggatcaatacggacataaacgacgggcaatacgacgcgtacgcaggggacatatggagctttggggttagcatactggagttctacatgggaaagttccccttcgcggttgggacgcaaggcgattgggccagtctcatgtgcg

SEQ ID NO: 203981 - DNA, 271 bp, Glycine max
caccctttctctctgcttagggttttgatcgcatcggatcttcactctcttctccgatctcaaaatgcccgccgtttatggagctcgcttgaccaccttcgaagactccgagaaggagagtgaatacggttacgttcgcaaggtatcaggaccagtcgtcgttgcagatggcatggctggggctgctatgtatgaactcgtgcgtgttggtcatgataatctcattggtcgaattattcgtctcgaagggaattctgctaccatccaagtt

SEQ ID NO: 203982 - DNA, 269 bp, Glycine max
gtgcttattttaatctgaactttaaagttttattattttgtgcaatggcagcaaagagcaaaatcctagtcattggaggaacaggatacattggaaaattcatagttaaggcaagttcagaagcaggacaccccacatttgccttggttagagaaagcaccctttctcatcctgaaaaatttaaacttattgagagcttcaagacctctggagttactctcctttatggtgatcttactgatcatgaaagccttgttaaggcaatcaaa

SEQ ID NO: 203983 - DNA, 270 bp, Glycine max
gggagctctgccgcctccaacaaaacagagttcagatcacaaaccctcgaaccgaacgtttttgagggttgatagagcacgatggttcagtacaattttacgaagattaccgtggtgccaaatgggaacgatgtggtcgacattatcctctctcgcacccaacgtcagacaccaaccgttgtgcacaacagatatgcgatttcacggctgcgccaattctacatgcgacaagtgaagtatactcagcagaattttcacgacaagctctcc

SEQ ID NO: 203984 - DNA, 271 bp, Glycine max
gaaaaaagcgatcatagtttcacttcggccttatccagtttagggtttcggttctctaccctatctttcacgtatcgaaaccttaaatttacgatcaggtctgagcaatctggttggtagaacctttggtcttagtgagtcaagttttatgtctgaattagacgatcaaattcctactgccttcgatccctttgctgatgcaaatgctgatgactcgggtgctgggtcaaaggagtatgtgcatattcgtgtacagcagcgaaatggtagg

SEQ ID NO: 203985 - DNA, 262 bp, Glycine max
  unsure (1)..(262): unsure at all n locations
cagtgctgcaacttgctttttggcttcctgtgtcaccaaaaagggtttttgaantcctccgcgatgagaactccagaagtgagtgggatattctttccaacggtggagttgtccaagaaatggcacacattgccaatggccgagacatggaaattgtgtctncctattcgtgtgaatagtgcnaatnccagcccaaggcaacatgnggatattacaagagnattgcgcggactcaacaggatcttttgtgattatgctcctg

SEQ ID NO: 203986 - DNA, 218 bp, Glycine max
caagtctggtgccagcagccgcggtaattccagctccaatagcgtatatttaagttgttgcagttaaaaagctcgtagttggaccttgggttgggtcgatcggtccgcctccggtgtgcaccggtcggctcgtcccttctgccggcgatgcgctcctgtccttaactggccgggtcgtgcctccggtgctgttactttgaagaaattagagtgctcca

SEQ ID NO: 203987 - DNA, 209 bp, Glycine max
tggctgatgtggacaaaagtggaaccatagactatggggagtttattgctgcaacagttcatctcaacaaactagagcgtgaagaacatctcattgcagcattccaatattttgacaaggatggtagtgggtacattacagttgatgaacttcaacaagcttgtgcagaacaaaacatgactgacgcgtttcttgaatgactcattaga

SEQ ID NO: 203988 - DNA, 271 bp, Glycine max
tagatatatagatatataagatccatctgtatagatatcatcatctacatccagaaagccgtatgctttgtaagaagcttgtacagtttgggaagaggttttgattgatcaaaaagaagaatctacttcaaccgatatgcccttaggcacggcaatacataacatagaaatcacactcggaaagggtggacaattagctagagcagcaggtgctgtagcgaaactaattgcaaaagaggggaaatcggccacattaaaattaccttctggg

SEQ ID NO: 203989 - DNA, 268 bp, Glycine max
  unsure (1)..(268): unsure at all n locations
gttaactcagacgaagcaccaacagaagaagaagaaacaaaaccgaacctctctaaactctccaacgtcgccacccgattcatacgcatttcgcaggctgcaatggcgacgttcgaactgtaccgcagtcgacgattggaatgtgcctgacggagacgctggacgagatggttcagaacggcatctaagccccgagctcgcgattcaggttctggtccaattcgataagttccngatgagggcctggaaacgccagttaagagtaagg

SEQ ID NO: 203990 - DNA, 263 bp, Glycine max
cgtaactaaactaaaaatggatcgagaatggggatcgaagccggggagcggaggtgcggcgtcggcgcagaacgaagccatagaccggcgagagcgtctccggcgattggctctggagaccatagacctggcgaaggatccctatttcatgcgcaaccacctcggaagctacgaatgcaaactctgtctcactctccacaacaacgagggtctagtattggctcacactcagggaagcgccgacaaaccaattggccaaagtg

SEQ ID NO: 203991 - DNA, 258 bp, Glycine max
gtggcaccaccccagaaaggtgaagtgcgtttgaggatcctcttcaactccctttgccgtagtgatgtttattggtgggatgctaaggaccagactcctctgtttcctcgtatcttaggccacgaagcttcagggattgtggagagcgtgggcgacggtgtgacacatctgaaaccaggtgaccatgcaatcccaatattcactggggagtgtggtgaatgcacttattgtaagtctgaagagagcaacctgtgtgag

SEQ ID NO: 203992 - DNA, 249 bp, Glycine max
actcactcacacacacacacactctctttccatgggtccgtttcgtaaacccttccttgcatttctctcggttgttctatttctgggtctctatgaggcagcagcagaacagactcagactcacaagagtacttacattgtacacgtggcgaaatctgagatgctcgatagcttcgagcaacacgctgtgtggtatgagtcgtcactgaagaccgtgtctgactcggcggagatgatttacactacgac

SEQ ID NO: 203993 - DNA, 221 bp, Glycine max
gcgattttcgattctcttctctgcaactatgcctaaccctaaggtcttcttcgacatgaccatcggcggtcaacctgccggccgcatcgtgatggagctctacgccgacgtgactccgagcaccgccgagaacttccgcgcgctctgcaccggcgagaagggcgccgggcggagcggcaagcccctccaatacaaaggctcgtccctcccacgcgtgatcc

SEQ ID NO: 203994 - DNA, 254 bp, Glycine max
gtaaactcaggctttttctactcaagtgcggaacagagagaagctatggttgcagctgaaagacgacaggttgatgaaaaagttaaaaaaatcattgaactgaagaataaggtttgttctggtaatgatagcaattttgttgtcctcaatcaaaaaggacttgatcccccatctctggaactgcttgcaagggaaggaataattgctcttcggagagcaaagatgagaaacatggaaagaatggttttggcctg

SEQ ID NO: 203995 - DNA, 207 bp, Glycine max
atcctttcgtgcaaggtagctacggattcatctgggcaatcaaaaggctatggctttgttcaatttgataatgaggaatctgcccaaaaagctatagagaagctgaatggtatgctgttgaatgataaacaagtgtacgtgggacccttccttcgcaagccagagagagaaagtgctgctgacaaggcaaaattcaaccatgttttt

SEQ ID NO: 203996 - DNA, 231 bp, Glycine max
gggaccagttgaataggggcattgtgccggatgatattgatgtccactgtttagcggggctgatcaaagcctggttccgagagctaccttcgggagtgctagatggactttcccctgagcaagttcttcagtgcaacacagaagaagaatctgttgagcttgtgaagcagctaaagccaaccgagtctgctttactcagctgggctattgatctcatggctgatgttgtag

SEQ ID NO: 203997 - DNA, 251 bp, Glycine max
tagaaaacaattttctttgatgacagtgttagaaatgttgaaagtgcaaaaataactggacttaacactgttttagtgggccattcagatttggtccctggagctgatcatgccctgaacagcattcataatatcaaagaagcgttacctgaaatttgggagattgaagatggcaaccaacagccaaagattcaaccccccacagttgaaaacatggtgctaagctaagttttactacgataaaatgtttt

SEQ ID NO: 203998 - DNA, 253 bp, Glycine max
  unsure (1)..(253): unsure at all n locations
gttgattcggatctagagtcttcagtttctcctcgttgttcttcgctttcctgttttcaatttcgattctttcgttaatttaataagatgtttgggagggcaccgaagaagagcgataatacgaggtactacgaaatcctcggcgtctccaagaacgcttcgcaggatgatctgaagaaggcttacaagaaagccgccattaagaatcaccccgacaaaggcggtngatccgagcagtttaaagagctggcgc

SEQ ID NO: 203999 - DNA, 260 bp, Glycine max
gaaggaaactcttttggctttactacgacctaatgaagatgctcttggaaatgcattacctctacatgctctagctgcttctctccaggttgcagttggtcgtaggcttggtgttgaagaacctcaactcatgaaaataatgcgagctactctttatactcataatgagtggtttaaacttcaaatgtggaaagatcgttttgaaggtcttttgaggcttgattccttgaaggaagccaacactcccttccttgcaccag

SEQ ID NO: 204000 - DNA, 230 bp, Glycine max
tgcgtctgttctttcaaatggatataatgaagaagaaatgaaaatggtcaaggagaccaggaaaatctggaatgacaaggatgttaaagtaactgccacatgcatacgagttcccatcatgcgagctcatgctgagagtgtgaatcttcaatttgaaagaccccatgatgaggacactgcaagagatattctgaaaaatgctccaggtgtagtggttattgatgatcgtg

SEQ ID NO: 204001 - DNA, 270 bp, Glycine max
cacctctccaacctttcactttcagctttatttgaatccctctctctcctttccaaatggccagcgttgaggttgcacatcaaacaccaacaacagttccagaaaatgaaacaaccgaggtaatcaagacccaggaaacaaccccggaaccagtaccagccactgaggctcctgcaacagaacaagcagcagctgaggttcctgctcaagctgaacaacaagcaactgaggttcctgccccagaatcaaccaccgaagcaccaaaggaag

SEQ ID NO: 204002 - DNA, 269 bp, Glycine max
cttccgttcctttcttcgttccttccccaacccaatcttcgccttcgcccacaacaactcctccttcaggatcgctgccaacgttactttccatttttacccttcatcctcgagaaaaaaatggcgaacgcagcatctggtatggccgtccatgatgagtgcaagctaaagtttctggagctcaaggcgaagaggacgtaccggtatatcgtttttaagattgaggagaaatcgaagcaagttattgtggagaagctgggtgaccctgc

SEQ ID NO: 204003 - DNA, 141 bp, Glycine max
tggttctcttgattggaggaattccaattgccatgccaactgttctgtctgtcactatggctattggttcgcacagtgtttcgcagcaaggcgctattacgaaacgtatgacagctattgaggaaatggcaggaatggatg

SEQ ID NO: 204004 - DNA, 285 bp, Glycine max
tcaagattcaggtactgcgtttcggaagcagacacagatggctcgtacgaagcaaaccgctcgtaagtccacaggaggaaaggctcctaggaagcagcttgcaaccaaggctgcacgtaagtctgcaccaactactggtggtgtgaagaagccccaccgttatcgtcctggtaccgttgctcttcgtgagattaggaaataccagaagagtaccgagcttttgatccggaagctccccttccagaggctggttcgtgaaattgctcaggacttcaagactgatct

SEQ ID NO: 204005 - DNA, 286 bp, Glycine max
gttactatctataattaattaaattcctcgtggaatattgaagaagccatgtctacagctgggcaggtcatcaagtgcagagctgcggtggcatgggaagcagggaagccactgtcaatagaaaccatagaagtggcaccaccccagaaaggtgaagtgcgtttgaggatcctcttcaactccctttgccgtagtgatgtttattggtgggatgctaaggaccagactcctctgtttcctcgtatcttaggccacgaagcttcagggattgtggagagcgtgggcg

SEQ ID NO: 204006 - DNA, 276 bp, Glycine max
ctgagattgaccccatttgtgcccttcaggctctcatggaaggacttcaggttctgaccttggaggatgttgtttctgaggctgatatctttgtcaccaccacgggtaacaaggacatcatcatggttgaccacatgaagaaaatgaagaacaatgccattgtttgcaacattggtcactttgacaatgagatcgacatgctggggctggagaactaccccggcgtgaagcgcatcaccatcaagccccaaaccgacagatgggtcttccccgaga

SEQ ID NO: 204007 - DNA, 287 bp, Glycine max
ccaaaccctgctgcataggaagaaaccctagcctctcaccctccctgcgacacgatgcagatcttcgtgaaaaccctaacgggtaagacgatcacccttgaggtggagtcttctgacaccatcgacaacgtgaaggccaagatccaggacaaggaaggcatccctccggaccagcagcgcctcatcttcgccggaaagcagctggaggacggccgcaccctcgccgactacaacatccagaaggagtccaccctccacctcgtcctccgtctccgcggtggcgccaa

SEQ ID NO: 204008 - DNA, 289 bp, Glycine max
gcagaatatcagtatccttggcgtgagaagttggcgaaatataaggatgagtttgctaagggtgtgtggggatactgggagctgggggcatggaagccgctgagcatcggtgctcggcatcgcgctagaattcgcaaggaagtcctccttgctggggaagattggccgtatgatcctgaaaggaaggagatgaagaccaggaggaaaggacacaaatgtgataggatatccgctgagaagcgcgcaaacactgccaagttgatggagaagatgccccagatgttgctgg

SEQ ID NO: 204009 - DNA, 289 bp, Glycine max
gctgccgcacatttgaagggtggtgcaaagaaggttattatttctgcccccagtaaggatgcccccatgtttgttgttggtgttaacgagcacgagtacaagccagagcttgacattatttccaatgctagctgcacaaccaactgccttgccccgctcgccaaggttatcaatgacaggtttggcattgttgagggtttgatgaccactgttcattccatcactgctacccagaagactgttgatgggccatcagccaaagactggagaggtggaagagctgcttcat

SEQ ID NO: 204010 - DNA, 289 bp, Glycine max
cttcccaaccactactactcactcactgcagatctcaattgcatcgctgtccatggctaccatcgttagcatcaaggcccgccagatcttcgacagtcgtggcaatccaactgtcgaggtggatttgacttgctccgatggtacttttgccagagctgctgttccaagtggtgcatccactgggatttatgaggcccttgaattgagagatggaggatctgactaccttggaaagggtgtatcaaaggctgttgacaatgtgaacaccgtcattggccctgctttgatt

SEQ ID NO: 204011 - DNA, 295 bp, Glycine max
cactttcttttttcccgcagtcatgggcaaggtcaagatcggaatcaacggatttggaagaattggccgtttggtggccagggtggctctgcagagagacgatgttgaactcgttgccgttaacgatcctttcattaccaccgattacatgacatacatgtttaaatacgacagtgttcacgggcactggaagcatcacgatgtcaccgttaaggatgagaagacccttctcttcggtgacaagccagtcactgtttttggacacaggaaccctgaagagatcccatggaagtcc

SEQ ID NO: 204012 - DNA, 298 bp, Glycine max
agagtcttcagtttctcctcgttgttcttcgctttcctgttttcaatttcgattctttcgttaatttaataagatgtttgggagggcaccgaagaagagcgataatacgaggtactacgaaatcctcggcgtctccaagaacgcttcgcaggatgatctgaagaaggcttacaagaaagccgccattaagaatcaccccgacaagggcggtgatcccgagaagtttaaagagctggcgcagcttatgaggttctgagtgaccctgagaagcgtgagatatatgatcagtatggtgaag

SEQ ID NO: 204013 - DNA, 297 bp, Glycine max
gggctttagagtgtcttttcttctttttcttcttcttcttcttcgttgaatcgcgattgttctgttgtgcgactgaaagaagagagatcgaaaatggcgttggctttcgacgagttcggaaggcctttcataatcctgaaggaacaggagcagaagagcagacttcgaggtttggacgctcagaaagccaacatctccgccggcaaagccgtcgctcgcatcctccgaacctccctcggcaccaaaggcatggacaagatgctccagagcccgacggcgacgtcactatcacgaacg

SEQ ID NO: 204014 - DNA, 247 bp, Glycine max
gaccactggtggttttgaagctggtatttccaaggatggacagactcgtgaacatgctctgctttcattcacccttggtgtgaaacagatgatttgctgctgtaacaaaatggatgctactacacccaagtattccaaggccaggtatgatgaaattgtgaaggaagtctcttcctacttgaagaaagtaggatacaaccctgacaagattccttttgttcctatctctggttttgagggagacaac

SEQ ID NO: 204015 - DNA, 283 bp, Glycine max
aaaatatgagcattcccaactaaagggcaatgaaaataagaacatggatgccataatggaaaacatacgaccacaggagtctgaataccaggatgacaagaatgaaccgaggaatgtggttgtagcaggggaatttgacaccagtactgtgcagttcataaagaatgaagatcttgaagagttgcgagagctgggttctggtacatttgggactgtgtaccatggaaaatggagaggatcagatgttgcaattaaaagaataaagaaaagctgcttcgctggt

SEQ ID NO: 204016 - DNA, 282 bp, Glycine max
caggctgtcttgtctctgtatgccagtggaagaactacaggtattgtgcttgattctggtgatggtgtgagccacacagttcccatatatgaagggtatgctcttcctcatgcaattcttcggttggaccttgctggccgtgatttaacggagtacttggtgaaaatccttactgagagaggatactccttcagcacctctgctgaaaaggaaattgtccgtgatgtgaaggagaaattggcatatgtggcccttgattttgaacaagaaatggagactact

SEQ ID NO: 204017 - DNA, 281 bp, Glycine max
gagaatggctcccaagggtttaatctttttggctgtgttatgcttctcagcactgtcactgagtcgttgtcttgcggaggataatggacttgttatgaacttctacaaggaatcatgccctcaggctgaagacatcatcaaagaacaagtcaagcttctctacaagcgccacaagaacactgctttctcctggctcagaaacatcttccatgactgtgctgttcagagttgtgatgcttcactgttgctggactccacaagaaggagcttgtctgagaagg

SEQ ID NO: 204018 - DNA, 293 bp, Glycine max
gtacacagcactagggaggagttcgaccatcagcatgtttgcctattacgatcgatgtggggacaaacaatgaaaaattactgaatgatgagttttacattgggctcagacaaaagagggcaactggacaggaatattctgaactcttgcaagagttcatgactgctgtcaagcaaaactatggagaaaaagttctattcagtttgaagattttgcaaaccacaatgcttttgaattgctgcaaaatatggcacaactccatcttgttttcaacgatgatattcaggggactg

SEQ ID NO: 204019 - DNA, 300 bp, Glycine max
tgaggatgggtagacgatcctgctgccctatagagatcaacaaaggtgcttggtctcgagaagaagatgaaaccctctccaaatatgtttccatccatggagaaggaaaatggcagaaggttgcccaaaatgcagggttaaagcgatgtggaaagagttgcagacaaagatggttgaattatctcaagcccggtataaaaagagggccacatctctgtggatgaagaggtatgattataagacttcatcgtcttcttggtaacagatgggcatgattgcaaagaggctacctggacgaac

SEQ ID NO: 204020 - DNA, 315 bp, Glycine max
  unsure (1)..(315): unsure at all n locations
aattcggctcgatctcgagccgaatcggctcgagcagacctagggatttcggccgtatgctccccaaaaaggaaagaagcagattctgtcctttgaaatcaacaagaaaagatgtcaggtgaagaggtagctgttgcagttgaggtacctgctacttcaattccaggtgagccaatggacatcatgactgctctacagcttgtgctgaganaatctctggcctatggtggtcttgcacgaggtcttcatgaaggtgccaaggtgatcgagaagcatgctgcacagctctgtgttctagcagaagattgtgaccac

SEQ ID NO: 204021 - DNA, 275 bp, Glycine max
ctcgagccgaaaaaattgaatggccatggaaaataaaaaaattatagagtattgggttgtgtctatactttgcatgcttttgtcgggtcattggatctctgttcaagctgcccctgcaccctctctcatcacacaactccctggctttaacgccaatttcccatccaagcactattccggatatataagtattgatggaaatactgaaagtgggaagaacctgttctactacttcgttagttcagaaagaagtccagagaaggacccagttgtgc

SEQ ID NO: 204022 - DNA, 281 bp, Glycine max
ctcgagccgatagtacacaggacagttgaagtgaatggcataaaaatgcatgttgctgagacaggtgaaggtcccgtggtcttgttcctccacggcttcccggagctctggtactcctggcgccaccagattctggctctcagcaacctcggctaccgcgccgtggctccagatctccgcggctacggagacaccgaggcaccagcttcaatcagcagctacaccatcctccacttagtttctgacatcgtcgcgctcattcagtacattgctgtggatca

SEQ ID NO: 204023 - DNA, 280 bp, Glycine max
cagggttttggtttattattccaatttttggttttcccttttgttggatattagagtgtgtaagaaagagaagagagagaaatgggaaggggaagagtggagttgaagagaattgagaacaagatcaacaggcaagtgacctttgcaaaacgaaggaacgggcttttgaagaaagcttacgagctttccgttctttgtgatgccgaggttgctctcatcatcttctccaatagaggaaaactgtacgagttctgcagcagttcaagcatgctcaaaacgc

SEQ ID NO: 204024 - DNA, 279 bp, Glycine max
ggaatataatgtccgtgtggcttcaagatactttaaggggcctgaacttctagttgatttgcaagactatgactactcattagacatgtggagccttggctgcatgtttgctggaatgatatttcgcaaagaacctttcttttatggtcatgacaaccatgatcagcttgtcaaaatagctaaggtgcttgggactgatgaactgaatgcatatcttaataagtatcatctggagcttgatcctcaacttgatgcacttgttggaagacacagtcgaaa

SEQ ID NO: 204025 - DNA, 281 bp, Glycine max
caaatgtagaggagtatcttggagtgcttgatgtttacatacatcaggccagggacattcaaaacatttgcatataccacaagcaagatgtttatgctaagatttgtctgaccagtaatcctgagacaactgtgtctaccaaaaccatcaatggaggaggaaggaaccctgtgttcaacgagaatcttcgtattgatgttaggactgttgatgcttctctcaagtgtgagatatggatgcttagcagggtgaagaactatcttgaagaccagttgcttggt

SEQ ID NO: 204026 - DNA, 287 bp, Glycine max
attttccggtttctctctctctctctctctcatggcgaatctagcacacttctccaagagagccctaagaagcgcacacgcgctcgcaaggcaccacgtgcagccgcagctgctggcagcggaacgcgcttttgcgacggaggcggcgaaatcgatatccccgtcggcggatcgcgtgaagtgggactaccgagggcagaggaagataatcccgttagggcagtggctccccaaagtggccgtggatgcttacgtagcacccaacgtggtcctcgccggccaagtca

SEQ ID NO: 204027 - DNA, 283 bp, Glycine max
agagaatggctcccaagggtttaatctttttggctgtgttatgcttctcagcactgtcactgagtcgttgtcttgcggaggataatggacttgttatgaacttctacaaggaatcatgccctcaggctgaagacatcatcaaagaacaagtcaagcttctctacaagcgccacaagaacactgctttctcctggctcagaaacatcttccatgactgtgctgttcagagttgtgatgcttcactgttgctggactccacaagaaggagcttgtctgagaagga

SEQ ID NO: 204028 - DNA, 286 bp, Glycine max
gttgtaactcgttcttcttcttttgttgttctgtgtttgtgtttgtattttctctcacctgaaaatgtcttgctgcggtggtaactgtggttgcggaagctcctgcaagtgcggcaacggctgcggaggctgcaagatgtacccagacttgagctacactgagtcaaccaccaccgagaccttggtcatgggagtggcacctgttaaggctcaatttgagggtgctgaaatgggtgtgcccgctgagaacgatggctgcaaatgtggaccaaactgctcctgcaac

SEQ ID NO: 204029 - DNA, 294 bp, Glycine max
ggaagttcgatattgaaaaggcaaaacatatgtggactgacatgctacaatggaggaaggagtttggtgctgatactattatgcaggattttgagttcaaggagttagatgaagtcgtgaagtattatccacatgggcatcatggcatcgacaaggagggaaggcctgtttatattgaaagacttggaaaggtcgatccaaacaaacttatgcaagttacaactttggataggtatgtgaagtaccatgtgcaggagtttgagaaagcttttgcaatcaagtttcctgcttgct

SEQ ID NO: 204030 - DNA, 280 bp, Glycine max
gttttagatcgtaaaaactaatcactacgaaaacaagagatatcgaagatggctctgcccaaagctaaggagatcgtgtcgtccaattccgtcgtcgttttcagcaaaacctattgccctttctgcgtcgatgtgaagaagctcttcggtgacctcggttccaattacaaggccatcgaactcgacactgaatccgatggaaaagagctccaagcagcattagttgagtggacggaccagcgaaccgtgcctaatgtgtttattggtggaaaccacattg

SEQ ID NO: 204031 - DNA, 277 bp, Glycine max
agcgggggtgagccgagcttccatttatttgggttcatagtatgcattgcagctactgcggcacgtgccttaaaatctgtgttacaaggaattttgctttcttctgaaggagagaagttgaattctatgaaccttcttctttacatggctccaattgctgttgttttccttcttcctgctacacttataatggaagaaaatgtggtaggtattacattggctcttgccagagatgatgtgaagatcatttggtatctgctatttaattcagcacttg

SEQ ID NO: 204032 - DNA, 281 bp, Glycine max
ctcacagttaacgaagctcaaagatgggctcgcaatgggcctagcgttcaaccatgctgtcttggacgggactgccacgtggcagttcatgacctcatgggccgagatctgcagcggttcaccttccacgtcagcaccacccttcctggaccggaccaaggcccggaacacacgcgtgaagctggacctttcgctaccagagcccaacggcccaccaacttccaacggtgaagcaaagcccgcgccagcacttagggaaaaaatcttcaaattctctgagt

SEQ ID NO: 204033 - DNA, 282 bp, Glycine max
gttgattttgagatgtttcttcttgttgcaggttttcaagtgtgccattctctgggaggaggaactggatcaggaatgggtaccttgttgatttctaagatcagggaagagtacccagataggatgatgcttactttctctgtttttccttctccaaaggtttcggacactgttgtggaaccctacaatgctactctctctgttcaccagcttgttgaaaacgcagacgagtgcatggtgcttgacaatgaagctttgtatgacatttgcttccgtaccctc

SEQ ID NO: 204034 - DNA, 283 bp, Glycine max
gtttggtgtaaagatgggacaagtgcttggttgtgttcaagtgaagcagtcaactgtagccgtcaaggaatgtttcgggaagtacgatgatgttcttcaacctggttgccattttgtgccatggtgtcttggctgcggtgtggctggtgtcctttctacgcgtgtcatgcagctaagtcttcgttgtgaaactaagacaaaggacaatgtgtttgttaatgtggttgcctcaatccaatatcgagcattggcagaaaaggcatcagatgcttactacaaactc

SEQ ID NO: 204035 - DNA, 286 bp, Glycine max
ggagaaactgcgaaaatggcatcggagtcaggtcaaagtcccaatccttcttggtttacgcccaaaaggcttcttatgatattttgtctcattaacatgctaaactatgtggatcgaggagctatagccagtaacggtgtcaatggaagtcttgcaacttgcactgactctggaatttgtacaggtggcagtggaattcagggggattttaacttgaacaattttcaagatggagttctgtcatctgcatttatggttggacttctaattgcttccccaatatttg

SEQ ID NO: 204036 - DNA, 281 bp, Glycine max
cgcaaatactggggcggcgatgacgaagaccctttggcctctgatgactatatgtggaacaaggagtttatgggtcgcttccaaaagttgattgaggaacccaatgctcaaccccctcctgcaaaggaagagccttcagggtttctaagcttaaatagagtcatgagcctggacagtttggaagttgatttgagcaaagaactcgcagctcctgtaaatcataatgcacacctgcaaattgatgcagaaactaatgtgacaggaagcatagggtaagatat

SEQ ID NO: 204037 - DNA, 294 bp, Glycine max
gtagaagtgtatcacaatttgaagtctgtgattaagaagaaatatggtcaagatgcaataaatgttggtgacgaaggtggctttgcccctaacatccaggaaaacaaggaaggcttggaattgctgaaaactgccatcgccaaagctggttacacaggcaaagttgtcattggaatggatgttgcagcttctgaatctacaaggagacaaaacatacgatttgaacttcaaggaagataacaatgatggctcccagaggatctctggagatgctttgacagatctgtacaagtc

SEQ ID NO: 204038 - DNA, 251 bp, Glycine max
caaaaaaagacaacacagagagaagcgtcttaataaacgctcttctctgaaaaacctgatttcttctcttcttctcttctctttcgtttcgatcttcgatctctgaaaatgagagagtgcatttcaatccacatcggtcaggccggtattcaggtcggaaacgcctgctgggagctctactgcctcgaacacggcattcagcctgatgggcagatgccaagtgataagactgttggtggaggtgatgatgc

SEQ ID NO: 204039 - DNA, 276 bp, Glycine max
ggatgccactaccccgaagtactctaaggctaggtatgatgaaattgtgaaggaagtctcttcctacttgaagaaggttggttacaacccagacaagattccatttgtgcccatctctggtttcgagggtgacaacatgattgagaggtccaccaaccttgactggtacaagggaccaactctccttgaggctcttgaccaaatcaatgagcccaagaggccctcagacaagccactcaggcttccattgcaggatgtctacaaaattggtggtat

SEQ ID NO: 204040 - DNA, 277 bp, Glycine max
gttatttgaagaatctgaaaggtactagctagctagctagtacttctacactgtgaggtagcatcatgaggaagcgccaagtagttgtgagaagagaggagcctcaaaggagcgctaggacggtacaatacggcgagtgccagaagaatcacgccgcgaatgtgggagggtatgctgttgatggctgcagggagttcatggcgagtggcgccaccggagaaggaacaagtgctgctctcacttgtgccgcctgtggttgccacaggaacttccacaa

SEQ ID NO: 204041 - DNA, 267 bp, Glycine max
gcggaatctgctagaattttctaataatggcgaaagacgttgagcaggtcacagagcaaggtgaatactccgcgaaggactaccatgaccctcctccggcaccgttgatcgacccagatgagctcacaaagtggtccttgtacagagccgccatagctgagttcatagcaacactcctttttctttacatcaccgtgttgaccattattggctacaagagacagagtgacaccaaaatccccggtaacaccgaatgtgacggcgttg

SEQ ID NO: 204042 - DNA, 278 bp, Glycine max
gtgtatgtatctaaggagtataggaggagggatgtgttgcaagggattctcagggatgtggatgctctcaccagagatgaaatggagaaaatacccgaggaagagttggtcaacaagctccgcaatgtgttgagtgagaaacggtatttggtggtgcttgatgacatatggggcatggaggtttgggatggtttaaaatctgcatttcccagagggaagatgggaagtaagatattgctcaccacaaggaatggggatgttgctttacatgctgatgc

SEQ ID NO: 204043 - DNA, 283 bp, Glycine max
gcgaagagaatggctcccaagggtttaatctttttggctgtgttatgcttctcagcactgtcactgagtcgttgtcttgcggaggataatggacttgttatgaacttctacaaggaatcatgccctcaggctgaagacatcatcaaagaacaagtcaagcttctctacaagcgccacaagaacactgctttctcctggctcagaaacatcttccatgactgtgctgttcagagttgtgatgcttcactgttgctggactccacaagaaggagcttgtctgaga

SEQ ID NO: 204044 - DNA, 286 bp, Glycine max
cggctcgagaccaccggtttacaagcctccagtttataaaccacctgtttacaagcctccagtggctaaacccccaattgaaaaaccacccgtttataagccaccagtttacaagccaccagtgtacaagcctccagtgtataagccaccagtttacaagccaccagtgtacaagccaccagttgagaagccaccagtatacaaaccacccgtttataagccaccagtttacaagccaccagtgtacaagccaccagttgagaagccaccagtgtacaagcctcca

SEQ ID NO: 204045 - DNA, 288 bp, Glycine max
ctcgagccgctatggctcgtcactccttgctcttagccctcctcctcttcgccgccgtgggcaccgccgcgatggcggtgccgcgtccgacgccgacgacatcctgatccgtcaggtggtgccagatgttggcgaagcagaagaggaggacaacctgctgaacgccgagcaccacttcgcgagcttcaaggccacgttcgccaagacctacgctaccaaggaggagcacgatcatcgcttcggcgtcttcaagtacacctccgcagagccaggctgcacgctaagctc

SEQ ID NO: 204046 - DNA, 294 bp, Glycine max
  unsure (1)..(294): unsure at all n locations
atcacactcacacacagatctctctatctatcgttcattgtcgtttcaatctcaaacgccatggcgttttggagatccctcgcgttctctgcgatccttctctcgctcttcatccatggcgctctctgcttctacctccccggcgtcgctccacaggacttccagaagggagatccactgcaagtagaagtanacaaattgacttcaacgaagacccagcttccttatacatattattctcttccttattgtccaccaaatagaatagtggatagtgctgaaaatcttggagaa

SEQ ID NO: 204047 - DNA, 298 bp, Glycine max
acctctcaattcggctcgagctagcctactaacttcctcgcaatttccatatcacggaactcatgaagatggagaaagcgatcaacagacagaagattttgcttcatcatctcaacccttcatcatccacccaccccaacgaatcatcctccctccatgcttcagcatgtgtggcgggggatagcgctgcttatcaaaggacatcgacattcggggacgatgttgtgatcgtggctgcttatcggactgctcattgcaaagctaaacgaggtggtttcaaagacactcttcctgatga

SEQ ID NO: 204048 - DNA, 277 bp, Glycine max
gccaaagtggctgagatgattactcgaacatttggagacatattatttgctcctacctcaaaaagcttgaaggaattttcttcttcttcaaggtgttgggagacatgcctagcaaacagacttatagcttttgcttctgcttccgccggcgtttcaggctccccgtgtcggaggccccgccggagataaggacccttttcgaccgttactccgatcagaatggcgtcatgacagccactcacctccgaagtttcctggctgaggtgcagagggaaga

SEQ ID NO: 204049 - DNA, 273 bp, Glycine max
caagccctatacaaccaaaccctaacacacacccatttgattcagtttccatggctagcctcaaggttgcatttttggctgcagtgctctgcatggttgtggtgagtgcacccatggcacatgcagctatcacgtgcgggcaggtgacgaatagcctgatcaattgcatcggttacctccagaacggaggaacgccgccgtcgggatgctgcaacggagtgaagagcctcaatgccgccgccaagaccaccgccgaccgccagacggcgtgca

SEQ ID NO: 204050 - DNA, 276 bp, Glycine max
caacaccatcctcaaaatctccaaactcgcgatcctcctcgttttgttcgcttcagtctgcaacgtcgctatgtcggactccaccgccaaacccctcgaccagcacgccaccacgggctctgaccctactgcgccagcggttcacatcgtgtacaccgagagaccacagaacgaggagcctgaggcctaccacatcagaaccctcacttcagtccttggcagtgaggaggctgcaaaggaagctttgttgtatagttacaagtctgcagccagtgg

SEQ ID NO: 204051 - DNA, 274 bp, Glycine max
cacacatgcccctatcttccttagctacctagattattcacttcaattcctcacaagcaacaccgtttcttgctccaatggcagctttgtatctcccaataagcatgttggcactcattgttgttgtttctcttggtttgtggagtggtgttcaaggtgcaccacaagtgccatgctacttcatttttggtgattctttggttgataatgggaacaacaaccagctccagtctttggctagggctgattacttgccttatgggattgacttccc

SEQ ID NO: 204052 - DNA, 264 bp, Glycine max
atctagaggcatggagagggaaagtgagaagggtggtgttgatgatatttaagattgagacaaggtttttttgttggttggagatgcatgattgtggtgtgctttgttttcatttcatcatatgacagccttgtgggtttctttggtgtttcttgatgcatacttaatttactttattattgtgtatttatctcttccatttacaaaaaaaaaagtttgtgtaggtttccttctttgaagtaaaaagaaattaaatatgtactg

SEQ ID NO: 204053 - DNA, 274 bp, Glycine max
aggaggaggatactgatgacgaaggtcttgaagacgaggaggatgatgagagtgcaaatgaatatacagatgatgaagatgtaagctggcaagttcggagagcagcagctaaatgattagcagcattgattgtttctcgtcctgagatcttgtcaaagctgtatgatgaggcttgtccaaaactaatagacagattcaaagagagggaagaaaatgtcaagatggatgtatttaatactttcattgagctcttgcgtcaaactggaaatgtcac

SEQ ID NO: 204054 - DNA, 285 bp, Glycine max
gagaggccaacctacaccaaccttaatcgtttagtttctcaggtgatatcatcactgactgcttccctgaggtttgatggagccttgaatgttgatgtcaatgaattccagaccaaccttgtgccataccccaggattcattttatgctttcatcttatgctcctgtaatttcagccgagaaggctcaccatgagcagctatcagttggtgaaatcaccaacagtgcattcgagccatcatctatgatggccaagtgtgatccccgccatggcaaatacatggcg

SEQ ID NO: 204055 - DNA, 275 bp, Glycine max
cttgatcaagactcaagagtgaacaaaaaaaaatgatgggtacccttaaggtgtccaacagtagtttatacatattttcgaagttcctagtaatttgtatggtgatgatgatatctttggttgattcaagttattccttgtgtgattttgaggcaatcttcaattttggtgattcgaattcagatacgggtgggtttcatacaagctttcctgcacagcctgctccctatggaatgacttacttacaaaaaccagtggggcgtgcttctgatgga

SEQ ID NO: 204056 - DNA, 288 bp, Glycine max
gaaacatgtgcagaaactgggatcaacatcttttttggcaagatcattaagttgggagcagtcagaataagtggcatggttgaaaggctacaattatctcagcagattagggagaatgtatactgtcttttccagcggatcctaaatcaatggacatctctctttttcaaccatcatattgaccaaatcatcttgtgttgtttctatggagttgcaaagatttcacaactgaacctaacttttaaggagattgtatacaactacagaaagcaaccacattgcaaaaca

SEQ ID NO: 204057 - DNA, 285 bp, Glycine max
gttatttataatgaaataaatggcatttgcaagagactcaaggcagtgcaatacccaaaatgaagctcactaccatcttaatcttcttcatctttgcccttccgttcacatttgctaacctgcgcgttggattctataccgcaacatgtccaagagcagagacaattgtaggtgaagttgtgcaaaggcgtttcagccaggataaatccattgtcgcagcccttcttcgcatgcactttcacgattgctttgttagaggttgtgatgcctcaatactaatagatc

SEQ ID NO: 204058 - DNA, 274 bp, Glycine max
gaaatcgcgaacagaacagcaacgttaacaatgggttctcgctacgaggtggaactgaagctctcatcggcacgcgctctcaagaacgtgaactggcgccatggcccgaaccgcccatacgtcgtcgtttgggtcgacccaagcaacaagctctcgacgcgcgtggacgaaagcggcgacactgacgcgaattgggaccaaacgctcacaattccgttgccaccaaagcctctcgaggatcaaacgttgtacatcgacgtggtccacgccggct

SEQ ID NO: 204059 - DNA, 278 bp, Glycine max
taccattgccaaccctgattacaagggcccatggaaggcaaagaaaatcaagaaccccaactataaaggaaaatggaaggcaccattgattgataacccagatttcaaggatgaccccgacctatatgttttccccaacttgaagtacgtgggcattgaattgtggcaggtgaaatctggtactttgtttgacaatgtcttaattactgatgatcctgaatatgccaagcaactggctgaagaaacatggggcaagcacaaggatgttgagaagacag

SEQ ID NO: 204060 - DNA, 277 bp, Glycine max
cggctcgaggaagaagtgaagctgttgagcttttttgcgagtccatttggcaaaagggttgaatgggcattgaaactgaagggtgtggagtatgagtacatagaacaagatatcttcaacaagactagtctccttctccagttgaacccggttcacaagaaggttccggttcttgttcatgcccacaaacccatcgctgagtcattcgtcatcgttgaatacgttgatgaaacatggaagcagtatccactgttgcctcgagacccttatcaaagag

SEQ ID NO: 204061 - DNA, 278 bp, Glycine max; identical to SEQ ID NO: 177049

SEQ ID NO: 204062 - DNA, 280 bp, Glycine max
tgcttgtctgagaaggaaacagatagaagctttgggttgagaaatttcaggtacattgagaccatcaaagaagctttggaaagggaatgcccaggagttgtttcctgtgctgatatcctcgttctctctgccagagatggcattgtttcgctaggaggtccccatatccctcttaaaacaggtagaagtgatggtagaaggagcagagccgatgtggtagagcagttcctcccagaccacaatgaatccatttctgcagttcttgacaagtttggtgcca

SEQ ID NO: 204063 - DNA, 280 bp, Glycine max
attcgagcgaatcggctcgagcggctcgaggataaaaagaagcaagtgttggcgatgcttggcgtggaagcgaactcaagcaacgccaagatcatagcggagaccattggtctttgccaagagcctgcaacggagggagaaaggaaacactgcgcgacttcgttggagtccatggttgatttcgtcgtatccgcgctcgggaagaacgttggtgctttctcaacagagaaagaaagggaaactgagtctggaaagtttgtagtggtgaaaaatggggtga

SEQ ID NO: 204064 - DNA, 281 bp, Glycine max
gttcttcttcgtcgttatcttcttcttttgttgtttgtgtgtttgttttttctctcacctgaaaatgtcttgctgcggtggtaactgtggttgcggaagcgcctgcaagtgcggcaacggctgcggaggctgcaagatgtacccagacttaagctacaccgagtcaaccaccaccgagaccttggtcatgggagtggcaccagttaaggctcaattcgagagtgctgaaatgggtgttcccgctgagaacgatggctgcaaatgtggagctaactgcacct

SEQ ID NO: 204065 - DNA, 281 bp, Glycine max
ctgcttcaggcatttctggcacaattttttccacctttatttcaactttaagactccacagaaagaagcatattcctgagtcaaatagttctgtccatatagaatttgtgaagtgagagtccaacctttcattttcaattttcaaagatgcctcgtggaacacttgaagttgttctgatcagcgccaaaggaatcgatgacaatgattttctctccagcatagatccttatgtgattctcacatacagggcacaggagaaaaagagcactgtgcaagaaga

SEQ ID NO: 204066 - DNA, 277 bp, Glycine max
cggctcgagaaagaaggagaagtgaagtgatgaatgccccagatcgttacgagcgtttcgttgtccctgaaggcaccaaaaaggtttcttatgagagggacacaaagatcatcaatgccgcgtccttcaccatcgagagagaggagcacactatcggcaacatcctccgcatgcagcttcacagagaccccaatgtgttgtttgccggatacaagcttcctcaccctcttcaatacaaaattatcgtcaggatacacaccactagtcagtcttcgcc

SEQ ID NO: 204067 - DNA, 277 bp, Glycine max
agcgcttctcgaagccgctgctggacgatgatttcgaggctgggttcagagaattcaaggatgattcggaaatcgaggatgttgatgacgaggacgatgaagacgaggaggagttgaagaagaagccctttgggttctctcgctccagcaacaaggctgcttctaagcctctctctcgtggatcagcaactgtggaatcaaaggggcaagctgagaagtgtgccaagagaaagaggaagaaccagtatcgtggaatccgtcagcgtccatggggaaa

SEQ ID NO: 204068 - DNA, 280 bp, Glycine max
tgttctcactactgcaatcctatctgaatcattcatcatcttcttaaaagttaaaaaggccaaggtcctgaatctcacagagacagagagaatgagtacggtgggagaagggaaggtgagtagtaatggtcatggatgttgcaaatcagggccaggctatgcttcacagcatggaagccatttctggtcccagagagtctctcatttatgtaacctctgtctacacagggaccggaatagagaagccagactatttggcgacagtggatgtggatccaaa

SEQ ID NO: 204069 - DNA, 276 bp, Glycine max
tcacacatgaccatgctacctcattcattaactatgattgcaacactaataatcatttttcttgcacaaacacttgtgggggtgagttcacttcctgaagctgataaaataaccaatttgccggggcagccacgggtcgaatttcagcaatattctggttatgtcaccgtggatgatcaaaatcaaagagctttgttttactactttgttgaggctgaagaaaacccttcttccaagccattagtcctatggttgaatggagggcccggttgttca

SEQ ID NO: 204070 - DNA, 276 bp, Glycine max
tactcgagccgattcggctcgaggttttgatgcaacgctgtcactacgaaaggatctctatatacgaaggagcggaataaaacccttctctctgtgattaagagaatggcttcagatcggaaacttcacacttttgaggaggtggcaaagcacaaccagaccaaggattgctggctcatcatttctggcaaggtgtatgatgtcacccctttcatggaggatcatcccggaggtgatgaggttttgttatctgcaacagggaaagatgcaaccaat

SEQ ID NO: 204071 - DNA, 275 bp, Glycine max
ctcgagccgcaccgcacgaatatcttgttgtttggagcgatccgagaaaaactctgtaaacatgttggtttaccaggacctccttacaggtgatgagcttctctctgactccttccgttacaaggaaattgagaatggaatgctgtgggaagttgaggggaagtgggttgttaaaggagcagttgatgtagacattggtgcaaacccttctgctgagggtggaggagaagatgagggagttgatgatgcagctgttaaggttgttgacattgttg

SEQ ID NO: 204072 - DNA, 278 bp, Glycine max
ctaggagattgatgatgaagtctgctatgtgtgcagtggtggttgtagcacttcttcttctggcggaagtggggcccatggctgaggctgtgacatgcaccccaacagagttgagtccgtgtcttccagcaatcacttccggtgctaaaccttccaatgcttgttgcacgaagctgaagcagcatagaccatgcttatgtggctacctcaaaaacgctagcttgaagcagtatgttaactctcctaatgcccgaaaaaccgttgcttcttgtgggatt

SEQ ID NO: 204073 - DNA, 273 bp, Glycine max
ctcgaccgcttgaatgtttaccgccccgccggataaggagaaggagaaggaggatctgagtcgcaggcactgttcatcgccatgtctcgggttgataacagaaattcctcagccaccaagcgtgctaggactgatggtagtcgtagggaagatgattggacatgccccagctgtggcaatgtcaatttctctttcaggacaacttgtaacatgcgtaattgcactcaaccaaggccggctgatcataattcgaaatctgctgccaacctctac

SEQ ID NO: 204074 - DNA, 274 bp, Glycine max
cggctcgagatggaatttttttctagtaatacgagtgccgataccctcaatcgtgtgaggggagaagttggtgagatacgcactatcatggtggacaatattgagaaaatattggagagaggtgaccggattgagcttcttgttgataaaacagcaacaatgcaagacagtgcatttcactttaggaaacagtcaaagcgccttcgaagagctctttggatgaaaaattttaaactcctggccttattgacatgcttgattgttgttgttcttt

SEQ ID NO: 204075 - DNA, 283 bp, Glycine max
gtttggatttattatatgtgttgcggctacagctgcaagggctctgaaatcagtgctacaagggattttgctttcttctgaaggagagaagctgaattctatgaaccttctcctttacatgtctccaatggctgtggttttccttcttcctgcaacacttataatggaagagaatgtggttggcatcacgttggctcttgccagagatgattccaagatcatttggtatctgctgtttaattcagcacttgcatattttgtcaacctgaccaactttttggtc

SEQ ID NO: 204076 - DNA, 281 bp, Glycine max
gcgaagagaatggctcccaagggtttaatctttttggctgtgttatgcttctcagcactgtcactgagtcgttgtcttgcggaggataatggacttgttatgaacttctacaaggaatcatgccctcaggctgaagacatcatcaaagaacaagtcaagcttctctacaagcgccacaagaacactgctttctcctggctcagaaacatcttccatgactgtgctgttcagagttgtgatgcttcactgttgctggactccacaagaaggagcttgtctga

SEQ ID NO: 204077 - DNA, 279 bp, Glycine max
ctcgagccgatagtacacaggacagttgaagtgaatggcataaaaatgcatgttgctgagaaaggtgaaggtcccgtggtcttgttcctccacggcttcccggagctctggtactcctggcgccaccagattctggctctcagcaacctcggctaccgcgccgtggctccagatctccgcggctacggagacaccgaggcaccagcttcaatcagcagctacaccatcctccacttagtttctgacatcgtcgcgctcattcactcacttgctgtggat

SEQ ID NO: 204078 - DNA, 270 bp, Glycine max
tgaatctcagaattctctaaaagagatctttttctgctctttgaagaaagaagggtctttgcttgattttggagatgtctctgctctcagatctcatcaaccttaacctctccgataccaccgagaaggtgatcgcagagtacatatggatcggtggatcaggaatggacctgaggagcaaagcaaggactctcccaggaccagttagcgacccttcagagcttcccaagtggaactatgatggttccagcacaggtcaagctcctggtg

SEQ ID NO: 204079 - DNA, 276 bp, Glycine max
gggaccagttgaataggggcattgtgccggatgatattgatgtccactgtttagcggggctgatcaaagcctggttccgagagctaccttcgggagtgctagatggactttcccctgagcaagttcttcagtgcaacacagaagaagaatctgttgagcttgtagagaagctaaagccaaccgagtctgctttactcagctgggctattgatctcatggctgatgttgtagaagaggaggaatttaacaaaatgaatgctagaaatattgcaatgg

SEQ ID NO: 204080 - DNA, 273 bp, Glycine max
aaccactcttaatttctctctgccttgctcatttacacacctctccaacctttcactttcagctttatttgaatccctctctctcctttccaaatggccagcgttgaggttgcacatcaaacaccaacaacagttccagaaaatgaaacaaccgaggtaatcaagacccaggaaacaaccccggaaccagtaccagccactgaggctcctgcaacagaacaagcagcagctgaggttcctgctcaagaagaacaacaagcaactgaggttcct

SEQ ID NO: 204081 - DNA, 273 bp, Glycine max
atggcttctgcggatgttgaataccgatgctttgttggtgggctcgcttgggccactgacaactacgatctggagaaagccttctctcagtacggtgacgtcgttgaatcgaaggtccgcatcgcatatgatctgacacaattcggatccggaatttctccatcccgttctgatctgtgatctctgatctatttgcgttacttgttctatgatatgatacttgtgttactatatgattcttttattactcacgccaataggtacgttcatctt

SEQ ID NO: 204082 - DNA, 274 bp, Glycine max
acaacttctgctacttcctactccaaccgcacttctgctccgcaattatcatgggcaaggtcaagatcggaatcaacggatttggaagaattggccgtttggtagccagagtggctctgcagagagacgatgttgaactcgttgccgttaacgaccctttcatcaccaccgattacatgacatacatgtttaaatacgacagtgttcatggacactggaagcatcacgatgtcaccgttaaggacgagaagacccttctcttcggtgacaagcc

SEQ ID NO: 204083 - DNA, 273 bp, Glycine max
agaaaactggttcttcttttcgcgttgcgttttcttggtgtctctgtcgattcttcttctgaattttaatacttaggaagtttagttttctctcttggcttctccggttggagtttccggcgaccttgtcggagattttgttgtttatttttcacaccacttgtgaaacttctcaagaaaaagaaaaaggatgtttcttgttgattggttctatggaattttggcgacccttggcctgtggcaaaaggaggcgaagattttgttcctagggtt

SEQ ID NO: 204084 - DNA, 276 bp, Glycine max
agcatgatcaagtcgttgcatctggatctcatgacagggaaattttcctctggaatgtgcatggggattgcaagaacttcatggttctgaaaggtcacaagaatgcagttttagatcttcactggactacagacgggacacaaatagtctctgccagcccggacaaaacagtgagggcatgggaaccagaaacaggaaaacaaatcaaaaagatggtagaacatctctcatatgttaattcatgttgtccttcccgaagggaccacctcttgtggt

SEQ ID NO: 204085 - DNA, 274 bp, Glycine max
ggaagcataacttggactcttggggtggccttgttggaagctgggaaggcgtattcggttaggtttggactccgtggtttttacttgcttcagatgaagatgaatccgcttattcttattcccattttgatactttctttcattcttctgctttgtgctttgtcgtgggttgtcaattggatgccaagatttttccggagacagtatcttccatttttcaggcataacagtgcgtccagtgcatctggtattaatatcccatctcctttccggt

SEQ ID NO: 204086 - DNA, 280 bp, Glycine max
gcattttcagaggaaaatggcgggtacggtttcgacttgtttcttcttcgtgtttcttctttctctccttcttccttttcagatctccgctgaggaatcctcggagaaggagttcgtactcacattggatcactctaactttcacgacactgtcagcaagcacgatttcatcgtcgtcgagttctacgccccatggtgtggtcactgtaagaagcttgctccggagtatgagaaagctgcttctatcttgagtagtcatgatcctcctattgttttggct

SEQ ID NO: 204087 - DNA, 274 bp, Glycine max
aaaggattctacccgccgctcgatgggaattgcgcttcaaggcgtctcgtagggctaatccgcctcacgagggtcaccaacggcacgtgcctttggggggccgaggccccctactgctggtcggcaaacggacggcgggcgcacgcgtcgcttctagcccggattctgacttagaggcgttcagtcataatccaacgcacggtagcttcgcgccactggcttttctaccaagcgcgatgaccaattgtgcgaatcaacggttcctctcgtacta

SEQ ID NO: 204088 - DNA, 272 bp, Glycine max
gttcttcttcgtcgttatcttcttcttttgttgtttgtgtgtttgttttttctctcacctgaaaatgtcttgctgcggtggtaactgtggttgcggaagcgcctgcaagtgcggcaacggctgcggaggctgcaagatgtacccagacttgagctacaccgagtcaaccaccaccgagaccttggtcatgggagtggcaccagttaaggctcaattcgagagtgctgaaatgggtgttcccgctgagaacgatggctgcaaatgtggagcta

SEQ ID NO: 204089 - DNA, 272 bp, Glycine max
gcgaagagaatggctcccaagggtttaatctttttggctgtgttatgcttctcagcactgtcactgagtcgttgtcttgcggaggataatggacttgttatgaacttctacaaggaatcatgccctcaggctgaagacatcatcaaagaacaagtcaagcttctctacaagcgccacaagaacactgctttctcctggctcagaaacatcttccatgactgtgctgttcagagttgtgatgcttcactgttgctggactccacaagaaggag

SEQ ID NO: 204090 - DNA, 271 bp, Glycine max
atcctttcgtgcaaggtagctacggattcatctgggcaatcaaaaggctatggctttgttcaatttgataatgaggaatctgcccaaaaagctatagagaagctgaatggtatgctgttgaatgataaacaagtgtacgtgggacccttccttcgcaagcaagagagagaaagtgctgctgacaaggcaaaattcaacaatgtttttgtgaagaatctatcagaatcaaccaccgatgatgagttgaagaacacttttggtgaatttggaa

SEQ ID NO: 204091 - DNA, 273 bp, Glycine max
gttcgccatcaatggctatactaatcaccaggttgccgctaccctcaccagtgacaggccctgagtccgtagcattcgaccggaacggggagggccatatgtcggtgtttctgatggaagaattctcaaatatgctggtccaaccgagggcttcaaggaatatgctttcacttcaccaaacagaaacaagacaatctgtgatgggcttgctgatttctcagaactccaagcaacatgtgggaggccattaggattgcgtttcaaccatcaaac

SEQ ID NO: 204092 - DNA, 276 bp, Glycine max
gcgggattagggttttgcactccagagtccaaactcacctgcttcttcctctttttttcatttctcttcaacttcctcttctttcaattctcttcagtctctctccgccttcccaaaatggtgaaccctagatgcttcctcgacgtcagcatcggcggcgagttagaaggccggatcgttgtggagctcttccacgacgtcgttcccaaaactgccgagaatttccgcgccctctgcaccggcgaaaagggcatcggtcccaacaccggcgtcccc

SEQ ID NO: 204093 - DNA, 277 bp, Glycine max
acacaacacaacccatggccaccacctccgcattcctcctccttctgctcctcctgctgctccacctcgccatcgccgctcacggcatcggcatcaactacggcacgctcggcgacaaccttccaccgcccgcggcggtgtgcgaacttcctgaagacgaagacgaccatcgaccgcgtgaagatctacgacgtgaacccggacatcctgcgggccttcgccggcagcggcatctccgtgacggtgaccgcccccaacggcgacatcgccgccttaa

SEQ ID NO: 204094 - DNA, 272 bp, Glycine max
ttttacttcccctatggctcgtcactccttgctcttagccctcctcctcttcgccgccgtagccaccgccgcgatggcggtggccgcgtccgacgccgacgacatcctgatccgtcaggtggtgccagatgttggcgaagcgaagaggaggacaacctgctgaacgccgagcaccacttcgcgagcttcaaggccaaactcgccaagacctacgccaccaaggaggagcacgatcatcgcttcggcgtcttcaagtcctacctccgcagagc

SEQ ID NO: 204095 - DNA, 273 bp, Glycine max
cttgcagtcgcagaggaaaaccctagctagtagtctcagttcgtatgagagagaaaaaatggcagagggtctcgttctccgcggaaccatgcgcgcccacaccgacgtcgtgacggcgattgccactcccatcgacaactccgacatgatcgtgacggcgtcgcgcgacaaatccatcattctctggcacctcaccaaggaggacaagacctacggtgtcccccgccgccgcctcaccggacattctcacttcgtccaggacgtcgtcctctc

SEQ ID NO: 204096 - DNA, 273 bp, Glycine max
ggctatctctttcccgagattgctagaagaaggtctgcgcacttgctgaagtaccctgatgctaaagtaataagccttggaattggtgatacaactgaacctattcctgaagtcataactgatgcaatgtcaaagagatcacatgcattgtcgactatagaaggatacagtgggtatggagctgaacaaggtgaaaagccattaagaagggcacttgcttcaacattttacagcgatcttggcatagaagaggatgatatatttgtctcagat

SEQ ID NO: 204097 - DNA, 271 bp, Glycine max
caaatgtagaggagtatcttggagtgcttgatgtttacatacatcaggccagggacattcaaaacatttgcatataccacaagcaagatgtttatgctaagatttgtctgaccagtaatcctgagacaactgtgtctaccaaaaccatcaatggaggaggaaggaaccctgtgttcaacgagaatcttcgtattgatgttaggactgttgatgcttctctcaagtgtgagatatggatgcttagcagggtgaagaactatcttgaagacca

SEQ ID NO: 204098 - DNA, 274 bp, Glycine max
caggaatttggagagactgttgatatagaaaggtaggataaaccagtggccaaggaatatatggcgttttctatggttttcattgttagcaacattatgctgcttttcagttcagcatttgccaaaactgctagtcctccctctctgagcccaactccagcaccagccccggcacccgactacgtgaacctcaccgagttgctcagtgttgctggtccatttcacaccttccttggataccttgagtccaccaaagtgattgacactttccaaa

SEQ ID NO: 204099 - DNA, 276 bp, Glycine max
tcttcttgttcctctcgcccagaatccgagatcaaccctgacccctaaggccaggggtttttctcggcttcttcagattcctgaaatggcgtctgtttcagctttagccaagtacaagctcgtcttcttgggtgaccaatccgtgggcaaaaccagcatcatcactcgcttcatgtacgataaattcgataacacctatcaggctacaattggtattgattttctatcaaaaactatgtatctcgaagatcgaactgttcgactgcagttgtggga

SEQ ID NO: 204100 - DNA, 271 bp, Glycine max
cgaaaagataattctagtgaagagatggatagactaagacgtttgtggatgtctcttcttccatttggatttctgttgttctttagttcagctttcatcggagtacctggtgcccttgcctggagcaaagagggtcatgttatgacatgccaaattgcacaggcacttttagagcctgaggcatcggaagccgtgtaccaattgttacctgaccatgtcaaaggtaacctatcagccctctgcacatggcctgaccaaattagacactggt

SEQ ID NO: 204101 - DNA, 272 bp, Glycine max
  unsure (1)..(272): unsure at all n locations
agcgaagagaatggctcccaagggtttaatctttttggctgtgttatgcttctcagcactgtcactgagtcgttgtcttgcggaggataatggacttgttatgaacttctacaaggaatcatgccctcaggctgaagacatcatcaaagaacaagtcaagcttctctacaagcgccacaagaacactgctttctcctggctcagaaacatcttccatgactgtgctgttcganattgtgatgcttcactgttgctggactccacaagaagga

SEQ ID NO: 204102 - DNA, 270 bp, Glycine max
caccaattaagctttcaagagacaaactgctttgaaaaatgggatccaaggttgttgcatccgttgcccttctcctctccatcaacattcttttcatttccatggttagctccagcagccactacgatccacagccccaaccttctcacgtcactgctcttattacacgacctagttgtccggatctgagtatttgcctcaatattttaggcgggtctctaggaaccgtggatgattgttgtgccctcatcggtggtcttggtgacattg

SEQ ID NO: 204103 - DNA, 269 bp, Glycine max
  unsure (1)..(269): unsure at all n locations
gcagtctctgcaccctccctccttgtttgtatcatatcaggcagctcagaaggcaaagatagatccatgtccaccaccgcaactacaacctctgaagaagttagcatcnatgagtggaaagtcatacacatgagcgagcaagaggaggatctcattcgcaggatgtacaagctagtcggggacaagtggaatttgatagctggtcgcattcccggtcgtaaagcagaagaaatagagagattctggattatgagacacggcgatgcttt

SEQ ID NO: 204104 - DNA, 268 bp, Glycine max
  unsure (1)..(268): unsure at all n locations
aatgtctggtgtcattgttgtttgaggttccctggtcaacttaactctgatctgcgaaagcttgcagtgaaccttattcccttccctcgcctccacttcttcatggnnggatttgctcctttgacatctcgtggctctcagcaatacagggccttgagtgttccagagctgacacagcaaatgtgggattcaaagaacatgatgtgtgctgctgaccctcgacatggccgctacctcactgcctcagccatgtttagaggcaagatga

SEQ ID NO: 204105 - DNA, 270 bp, Glycine max
  unsure (1)..(270): unsure at all n locations
gttgtaagagtttcaataaatccacttcaactgaatcctagtgctgaagaaatggggcatggacgctatccaggtcaaccccaaggccatgctctctttcaaccattnnactgtgagccaaccttacaaattggatatcatcctgatccagtatcagtggtgtcagaaggcccaagcatgaataattacatggcaggatggttaccatgaaagagtgtcaagtgtggagcataattaaagatcgatcctgccgtttcaaatctatttcaa

SEQ ID NO: 204106 - DNA, 267 bp, Glycine max
  unsure (1)..(267): unsure at all n locations
agtgtccagcttagaaagaaaaacgggtacgatgacgatggtctccctctcgatgtccccaaaggccatttcgctgtctacgttggacaaaacagaagtagatacanngtacccatctcttttttgactcaccccgagtttcagtctctccttcgtcaagctgaagaagaatttggcttcgatcacgaaatgggtctcactattccatgtgaagaagttgttttccgctctctaacatccatgctaagatgctagatatatatacta

SEQ ID NO: 204107 - DNA, 271 bp, Glycine max
  unsure (1)..(271): unsure at all n locations
aaaagattacaaatcttttgaagttttcgtagttctctgaatcatggagatggaacgcgtcttcgaatttcctcacacttacatggatcgtcgcccgagaaagagagcangattgggctgggacatccctgaagttcccaaggctcaggtaggattgttttgtggacaagatgttgggactatttcaagctttgctccttcaaggggtccctcagaacataccactagttctctatttgttaagccagttgctcgaaatggttctccccct

SEQ ID NO: 204108 - DNA, 222 bp, Glycine max
  unsure (1)..(222): unsure at all n locations
gcactntgcaaagccatccttgagttaaaaaatggcagcagcttcttccatggctctctcatccccatccttggctggcaaggccgtgaagctgggcccatcaagancataagtgggaaaggggagcatgaggaagaccgtcaccaagcaggtctcctcaggaagcccatggtacggcccagaccgagtcaagtacttgggcccattctctggcgagccccg

SEQ ID NO: 204109 - DNA, 196 bp, Glycine max
  unsure (1)..(196): unsure at all n locations
gtctcnccgcagcaccttcttcgccgtttcagctcaagagccaccagcaggtaagatatggttaagcataacaacgttatccccaatgggcacttcaggaaacagtgacaatactatgtgaagacttggttaattcaaccagcacggaagaccagaaggcgtttagctcggaagagaagggctgtcaagatttccc

SEQ ID NO: 204110 - DNA, 259 bp, Glycine max
  unsure (1)..(259): unsure at all n locations
aaggtntatggcttcttaagctcctcattagtgctgctccttgcagctctaattctatcccctcaagttcttgctgactatgagaagcccccaatttacaagccattngtttacacaccgccagtttataagcccccagatgataaaccaccagtgtacaaacctccagtttacaagcctccagttgaaaaaccacctgtttataagcctccagtttataagccacccatttacaagcctccagtgtataagcctccag

SEQ ID NO: 204111 - DNA, 269 bp, Glycine max
  unsure (1)..(269): unsure at all n locations
gtaggtattttctcgctgaagttgttagacattcaacacaagaacgtcaatgggaagtgtatagatttttgttggaggaaagccgtgactttccattgaccagaagatnagcaagaactcagattgttgacaaagttagaagaacactgatgggctggtaatctggttcagtatcaaatgaaaaagcactttccgttcagtttttatgttaaatatcaatttggtttgccgtttgaatatggttaagttagcagggtatctaattaacg

SEQ ID NO: 204112 - DNA, 269 bp, Glycine max
  unsure (1)..(269): unsure at all n locations
cacccncttggtttcataacccattctccatctcagaatggagaatgcgagaataagccagtggttgatccttctggtgtgtgcgctgctgttgctgatatcagaagcttcttatgtgccaatcactattgttcagaacgcggtagcaaaaggagctgtttgtttggatgggagtccaccagcttatcattttgataggggatttggatcagggattaacaattggttggttgcatttgagggaggaggatggtgcaacaatgtcacta

SEQ ID NO: 204113 - DNA, 266 bp, Glycine max
  unsure (1)..(266): unsure at all n locations
ctttantccttttgaatttcattcattcttaatctttgtgaaaaataatgttcatcgagaattttaaggttgagtgtcctaatgtgaagtacaccgagactgagattcagtccgtgtacaactacgaaaccaccgaacttgttcacgagaacaggaatggcacctatcagtggattgtcaaacccaaatctgtcaaatacgaatttaaaaccaacatccatgttcctaaattaggggtaatgcttgtgggttggggtggaaacaac

SEQ ID NO: 204114 - DNA, 230 bp, Glycine max
  unsure (1)..(230): unsure at all n locations
ctgttcactagcctgtgcattcttctctcgctctctgccttccatcacactcggcatttgctttcccaagatagtagaagatggcagacactgaggatattcagtnnattgtttgtaagcatagaacaggaatggttaaagatggatttaatggagatgatgctcnctgttttgtgctncccagcattgtaggttgtcctcgtcacactgggtgtgatggttggcatggg

SEQ ID NO: 204115 - DNA, 268 bp, Glycine max
gagcgtcgcagtgcaaccctaatcagaagaagcgcagttcaagcgagtgacagccaccagccatgggtcgtatgcacagccgcggtaagggtatatcctcatatgatatgccctacaaaaggacacctcctagctggctcaagatctcttcgcaagatgtcgaagaaaatatctgcaagtttgcgaagaaaggtttgaccccgtctcagattggtgtcattctcagagattctcacggtattgctcaggtcaatagcgtcactggcag

SEQ ID NO: 204116 - DNA, 269 bp, Glycine max
  unsure (1)..(269): unsure at all n locations
ggcntgaatgcctgcctaaaggtataatcacatgtggcatgactttcataattataggaacggaggtggctccatggttaaaaactggtgggttaggagatgttctnagaggtctaccaccagcattggcaggtttcgggcatcgagtaatgactattgtgccacgctatgaccagtacaaagatgcatgggatacaggtgttgtaattgaggtgaaagtaggagatagaacagaaaaggttcgactcttccattgctataagagggga

SEQ ID NO: 204117 - DNA, 127 bp, Glycine max
  unsure (1)..(127): unsure at all n locations
ctctgtccttatagcaatgacaaagagctacaatcttggtactctgagtcaatcaatgtaggccatgcggatcttaggcacgaaaattggtggccaacattgaacatnagtaaggatcttgtgtcca

SEQ ID NO: 204118 - DNA, 264 bp, Glycine max
  unsure (1)..(264): unsure at all n locations
gatgaggatgcatcactcgcgtggttgtgagccgggccgagaaggacctgaagataatctcagaggtttactacaagagaaacagcgttcttcttgagcatgatnttgccaaggaaatctcaggggactacaagaagttccttctcactctgttggggaaagaagactaaatattttttctctgagggcatttgtgattacgagtttaggacaccaagctatacttgtgtgtgtgtgatggttgatggtgttaatctgtgttga

SEQ ID NO: 204119 - DNA, 225 bp, Glycine max
  unsure (1)..(225): unsure at all n locations
cgtctgcaaggataccaggagccggcgccggcgccgctggttgacccgacggagtttacgtcatggtcgttttacagagcagggatagcagagtttgtggccactnnnctgtttctctacatcaccgtcttaaccgttatgggagtcgccggggctaagtctaagtgtagtaccgttgggattcaaggaatcgcttgggccttcggtggcatgatcttcgccctc

SEQ ID NO: 204120 - DNA, 269 bp, Glycine max
  unsure (1)..(269): unsure at all n locations
aaanaaaaaaaaaaaatccgcgattcgctcttctcttggaaaagtgaaaaccagaagtacgaacgaaagagaagagcgatttagaagtgagagaagatggggttatcgttcacgaagctgttcagcaggttgtttgcgaagaaggaaatggggattctgatggtaggccacgatgctgctggtaagacaaccatcttgtacaagctcaagcttggagaaatcgtcaccactatccccaccatcggatttaatgttgagactgtggagta

SEQ ID NO: 204121 - DNA, 261 bp, Glycine max
caacacgaaagctagccaaaaccttttttcgaagtctctgattttcctaatggctccggcaaaggcagagaagaagccggcggagaagaagccagcggcggagaaggaaccggcggagaagaagccgaagggctagaagaagatctcgaaggaaggagggagcgagaagaagaagaagcgcacgaagaagagcgtggagacctacaagatctacatcttcaaggtcctcaagcaggttcaccccgacattggtatttccag

SEQ ID NO: 204122 - DNA, 174 bp, Glycine max
  unsure (1)..(174): unsure at all n locations
tntacagaaaaaaaccctagcttaccttttcaactttcaagatgcaaatctttgttaagacactcactggtaagacaatcacccttgacgtggagagttcagtnancatagataatgtaaagtccaagattcaagacaaggaagggatcccaccagaccagcaacgtctaattt

SEQ ID NO: 204123 - DNA, 261 bp, Glycine max
  unsure (1)..(261): unsure at all n locations
tnactcactccacacacacacactctctttccatgggtccgtttcgtaaacccttccttgcatttctctcggttgttctatttctgggtctctatgaggacaatgaaatttcggaatcagactcacaagagtacttacattgtacacgtggcgaaatcggagatgcccgagagcttcgagcaccacgctgtgtggtatgagtcgtcactgaagaccgtgtctgactcggcggagatgatttacaccttcgacaacgccatc

SEQ ID NO: 204124 - DNA, 237 bp, Glycine max
ttggctttaagtgtcttttcttctttttcttcttcttcttcttcgttgaatcgcgattgttctgttgtgcgactgaaagaagagagatcgaaaatggcgttagatttcgacgagttcggaaggcctttcataatcctgaaggaacaggagcagaagagcagacttcgaggtttggacgctcagaaagccaacatctccgccggcaaagccgtcagctcgatcctccggacctccctc

SEQ ID NO: 204125 - DNA, 263 bp, Glycine max
tctatttgtgatgagttgcatggtcgcctggtgacccttcttggaggacgtgcagctgaagaagttgttttttctggtcgggtgtcaacaggtgcacttgatgacatacgacaagcaactgacatggcatacaaggctatagctgaatatgggcttaatcagaccataggccctgtttcaatagccactctttctagtggtggaattgatgattctgggggagctgctgttccttggggaagggatcagggacatcttgttga

SEQ ID NO: 204126 - DNA, 263 bp, Glycine max
  unsure (1)..(263): unsure at all n locations
tnttcactccacatgtttctcattccttttctaagtcgattaatatttacagagtgaagattttatttttcattctatctttggaagataaagaatgggttatangtcatataccgtttgcgttactggggcttctggttacatcggatcatggcttgtcatgagactcatcgagcgtggctataccgttcgagccaccgtactcgacccagctgatatgagggaggtgaagatttgctggatctgccaggtgcagagagcaa

SEQ ID NO: 204127 - DNA, 259 bp, Glycine max
  unsure (1)..(259): unsure at all n locations
tctgctcgagtcacattattattcatatctatctctctctcccccaagaaattcaacagagtttagattaccttgaaattgttcaacaagaaatggagaataagnanattaagtacggaaaagaacttaatctcgaggctacagagttgaggttggggttgcctggaagcgatgagcctgagaaacgttctgctgttagaagcaacaagagatcttcaccagaagcaagtgaagaagagtgcataagcatgggcaacat

SEQ ID NO: 204128 - DNA, 262 bp, Glycine max
  unsure (1)..(262): unsure at all n locations
tgttagtgatcgattgagctactcaagaccaagtttctcaacaaaggtctcacagtgaaagaccttgttcttcttagtggtgcacatacaattggaaccacatngtgcttctttatgaccagaagactgtacaactttttcccaagtggtgagggatcagacccagcaattagacaaaacttcctccctcggctaaaggcaaggtgccctcagaatggagatgttaatattcgcctagctattgatgaagggagtgagcaga

SEQ ID NO: 204129 - DNA, 259 bp, Glycine max
tgatttgtaggaaaccaaagttgtttgttggcaacaaaatcaatgctggaatctacctattgaacccctcagttttggatcgaattgaactgaggcccacttatatcgagaaagaggtgtttccaaagattgcagcagagaaaaagctatatgcaatggtcctgccaggattctggatggacattggacaaccaaaggactatatttctggcctgacactttacctggactcgctgaggaaaaagtctccttctaaact

SEQ ID NO: 204130 - DNA, 270 bp, Glycine max
  unsure (1)..(270): unsure at all n locations
tncctctccacctttcactttcagctttatttgaatccctctctatcctttccaaatggccagcgttgaggttgcacatcaaacaccaacaacagttccagaaanncaaacaaccgaggtaatcaagacccaggaaacaaccccggaaccagtaccagccactgaggctcctgcaacagaataagcagcagctgaggttcctgctcaagaagaacaacaagcaactgaggttcctgccccagaatcaaccaccgaagcaccaaaggaaga

SEQ ID NO: 204131 - DNA, 262 bp, Glycine max
tcggctcgatgaagaggcactaagagatccttatttccatggtttgtcaaatgtggaccgtgaaccgtcgtccactcagcccatttcaaagcttgaatttaagtattagaggagaaagttggccaaagatgatgttagagagttgatttatcgagagattttagagtatcatcctcagatgctcgaagaatatcttcgtggtggagaacaaacaagcttcatgtatccaagtggggttgaccggttcaagcgacagtttgca

SEQ ID NO: 204132 - DNA, 265 bp, Glycine max
  unsure (1)..(265): unsure at all n locations
tntggaatatgaagaagccatgtctacagctgggcaggtcatcaagtgcagagctgcggtggcatgggaagcagggaagccactgtcaatagaaaccatagaagntgtatcaccccagaaaggtgaagtgcgtttgaggatcctcttcaactccctttgccgtagtgatgtatattggtgggatgctaaggaccagactcctctgttatctcgtatcttaggccacgaagcttcaaggattgtggagagcgtgggcgagggtgtg

SEQ ID NO: 204133 - DNA, 268 bp, Glycine max
  unsure (1)..(268): unsure at all n locations
tagatttgcaaatcctaatttctctatcctaacaaaaaccccaaattcaaacaaatccaatggcttcgattccgcgtccggcgagttcgggatcttcggaggntnnatnagatccggctgcgatggacgagagaaagaggaagcggatggagtcgaaccgcgagtncgcacggcgatcgcggatgaagaagcagaagctgcttcgaagacctatccgacgtagcgagtcgccttcaaggcgagaacgtgcgcttagcgcagagcataa

SEQ ID NO: 204134 - DNA, 265 bp, Glycine max
tgtgcgtcgcgtcgcaaccctaatcagaagaagggcgttcaagcgagtgacagccaccagccatgggtcgtatgcacagccgcggtaagggtatatcatcatgtgctttgacctacaaaaggacacctcctagctggctcaagatctcttcgcaagatgtcgaagaaaatatctgcaagtttgcgaagaaaggtttgaccccgtctcagattggtgtcattctcagagattctcacggtattgctcaggtcaatagcgtcactgg

SEQ ID NO: 204135 - DNA, 273 bp, Glycine max
  unsure (1)..(273): unsure at all n locations
gtagacgttacaaggtcagataatgcagtgcaggccaatatggagcttgaatttcagagaaacaaggagaggtttgcttatcttaaatgggggtcaactgcattccttaacnatgctgttgttcctcctggttcgggtatagtacatcaggtcaatcttgaatatcttggaagggttgtattcaacaatgagggcctactctatcctgacagtgtagttgggactgattcacatacaactatgatagacgggcttggtgttgctggatgggga

SEQ ID NO: 204136 - DNA, 276 bp, Glycine max
tggattcattggttctcacctagtcgatagattgatggaaaatgaaaaaaatgaggtcattgttgctgataactacttcactggatcaaaggacaacctcaaaaaatggattggtcatccaagattcgagcttattcgtcatgatgtcactgaacctttgacgattgaggttgatcagatctaccatcttgcgtgccctgcatctcctattttctacaaatataatcccgtgaagacaataaagacaaatgtgattggtacactgaacatgcttgg

SEQ ID NO: 204137 - DNA, 277 bp, Glycine max
atgatctgctgctgtaacaagatggatgccactaccccgaagtactctaaggctaggtatgatgaaattgtgaaggaagtctcttcctacttgaagaaggttggttacaacccagacaagattccatttgtgcccatctctggtttcgagggtgacaacatgattgagaggtccaccaaccttgactggtacaagggaccaactctccttgaggctcttgaccaaatcaatgagcccaagaggccctcagacaagccactcaggcttccattgcagg

SEQ ID NO: 204138 - DNA, 273 bp, Glycine max
ctcgagccgctcgagccgctcgagccgatttccatggaagtctcaaaagaagaagctcgagcggcacccacaccggccctagtagcgatgctgccatcccctggcatgggccacctaatcccaatgatcgagttcgcaaagcgagtggtgtgctaccataacctggcggtgagcttcgtgatccccactgacggcccaccttcaaaagcccaaaaggcagttctggaggcccttccggactcaatttcccacaccttcctccctccggtcaat

SEQ ID NO: 204139 - DNA, 275 bp, Glycine max
aaaagagaaaaaaatttctcagaagagtctccgctgaaagttttggtttcttgaagatgtcgttgctctccgatcttatcaaccttaacctctccgacatcaccgataaagtgatcgccgagtacatatgggtaggtggatctggcatggatatgaggagcaaagcaaggacactctcaggaccggttaaagacccttcgaagcttcccaagtggaactatgatggttccagcactggtcaagctcctgggcaagatagtgaagtgatcttatat

SEQ ID NO: 204140 - DNA, 274 bp, Glycine max
ctacaattgtgatcttcacaaatcaacaacgtctctctctgttactctgaaaattgacttcaagttagtataactggctgtcaagttgtaatggcattggtctctggaagaagttctgcactgaacccaaatgcacctctattcatacctgctgctcttcggcaggtggaggatttttcacctcaatggtgggatcttgtgaaatcttcaacatggtttcgtgattattggttgagccaacataaggaggaagattttgaagttgccatgactc

SEQ ID NO: 204141 - DNA, 275 bp, Glycine max
attgcactctctcatctcacatctcattctagctaacatccccttttcttcttctcacttctctccaagtttttttttcacatttctctgtctgtctttgatctgcacacacaacatccctctaaaacattgagggataaaataaaaaacatgaagaaatttgtactcaggttagatttgccagatgacaaggcaaagcagaaggccctgaaaacagtttcaacactttcagggattgatgccatctctatggatatgaaggagaagaaactaac

SEQ ID NO: 204142 - DNA, 277 bp, Glycine max
attctagggttagggttcccaatttctccaccgatcagaaaatgagttcaactggtggttctaccaagggcggaaggggcaagcccaaagcctccaaatccgtttcaagatcgcagaaagctggtctccaattccccgttggaagaatcgctcgattccttaaggctgggaaatacgccgagcgtgttggtgctggtgctcctgtgtacctctctgcagtgctcgaatatctcgctgctgaggttttggaattggctgggaatgctgctagggataa

SEQ ID NO: 204143 - DNA, 148 bp, Glycine max
aaaaaaaaccctctctttctctctcttccaaaacctaattttcattttttctcttcaaacaaattttcaaaatgcgtgagatccttcacatccagggtggccaatgcggcaaccagatcggcgccaagttctgggaggtggtttgcgc

SEQ ID NO: 204144 - DNA, 271 bp, Glycine max
aagaagcaaacaacacaatgagttctgaaaatttgatttttatatgtatttttattatgttgataagcattagttcaggaaattgtgtagataggaataggaagaagcattatgttctggtgcatggagcatgccacggagcttggagttggtgcaagctgaagccacgcttggaatctgaaggccacaaggtcacagtgctcgaccttgcagcttctggcatcaacatgaagagaattgcagatgttgacactttctcgcagtactctga

SEQ ID NO: 204145 - DNA, 275 bp, Glycine max
caagatcggaatcaacggatttggaagaattggccgtttggttgccagagtcgctctgcaaagagacgatgtggagctcgttgccgttaacgaccctttcattaccaccgattacatgacatacatgtttaaatacgacagtgttcacggacactggaagcatcacgatgtcaccgttaaggacgagaagacccttctcttcggtgacaagccagtcactgtttttggacacaggaaccctgaagagatcccatgggggtcaatggagctgatat

SEQ ID NO: 204146 - DNA, 272 bp, Glycine max
gtttgggtttctcttcctcccttggagaaaaagaagagccaccgctgcgacgccgttcgtgcatttttgaggtgccgctgtcatgtttgggcgtggtggaccaaggaggagtgataactccaaatattatgatattctcgggatttccaaaaatgccagtgaagatgaaatcaagaaggcctatagaaaggcggctatgaagaaccatccagataagggaggagatcctgaaaagtttaaggagttaggtcaagcatatgaagttttaagtg

SEQ ID NO: 204147 - DNA, 269 bp, Glycine max
cgcaacacaacaaaaaaagacaacccagagagcgcgtcttaataaacgctcttctctgaaaacccccatttcttttcttctttcttcttctctttcgcttcttcgatcttcgatcttcgtcgctgaaaatgagagagtgcatttcaatccacatcggccaggccgggattcaggttggaaacgcctgctgggagctttactgcctcgaacacggcattcagcctgatgggcagatgccaagtgacaagaccgttggtggaggtgatgat

SEQ ID NO: 204148 - DNA, 274 bp, Glycine max
ctcaccagtgcccaagcctccttattactatcaatctcctcctcctccatcaccggttcctaagccaccatattactacaaatctccacctcctccatcaccagttcctaagccaccatactattaccagtctccacctccaccatcaccgattcctaaacccccatactattaccaccaacgtcatatcctccacctccttaccactacgtgagccctccaccaccttctccatctcctcccccaccataccattacacatcaccacctcctc

SEQ ID NO: 204149 - DNA, 271 bp, Glycine max
gtttgtgtttactttcactgttgttgttggtcacattcacagtggcctcatctgccaatgtcagctacgacggtcgctccctcattattgatgcccaacggaaacttcttatctctgcctccattcattacccacgcagcgttcccgcgatgtggcctggtcttgttcaaacagccaaggaaggaggagtagatgtgattgaaacctatgttttctggaatggccatgagctttctccaggcaattattactttggaggaaggtttgatct

SEQ ID NO: 204150 - DNA, 270 bp, Glycine max
cgactagccgcgttgactcggttccgtttttcattctcgcggatctaatattaaggaatagcttaagggcacattacaatgaaggcattgattctggttgggggatttggaacaaggctgaggccactgacactcagtttccctaagcctcttgttgattttgctaacaagcctatgattttgcatcagatagaagcccttaaggccattggagtgactgaggtagtgctagccatcaattaccaaccagaggttatgttgaatttcttg

SEQ ID NO: 204151 - DNA, 270 bp, Glycine max; identical to SEQ ID NO: 193654

SEQ ID NO: 204152 - DNA, 271 bp, Glycine max
ctcgagccggtacgtgagaaacgaccgtggcacccccatgattctagacaacaattactacacgaaatatattggacaacaagggcttgttgatagtggatcaccaactagccaatgacaagaggaccaagccttatgtgaagaaaatggccaagagccaggactatttcttcaaggagttttctagagccattactttgctctctgagaacaaccctctcactggcacaaagggtgagatcagaaagccgtgcaatgctgccaacaagca

SEQ ID NO: 204153 - DNA, 277 bp, Glycine max
ctgacatggctttctgttctccaaaattcctcagcctcctcctcctactctctgccatacccatcggaatcatcgtcactctagagcgagccaaacccgccacccacgtctaccactaccacagtaacggctggttccgagaatgcgccaagtgggattctcataaccgccgcttcattgtttccttcttcgaaggtggtcttggtcaggttttgctgccggagaaggattatgagtcatcgccgccgttggaggaagtcacggtggtcaaagagac

SEQ ID NO: 204154 - DNA, 271 bp, Glycine max
ggaaaataaaaaaattatagagtattgggttgtgtctatactttgcatgcttttgtcgggtcattggatctctgttcaagctgcccctgcaccctctctcatcacacaactccctggctttaacgccaatttcccatccaagcactattccggatatataagtattgatggaaatactgaaagtgggaagaacctgttctactacttcgttagttcagaaagaagtccagagaaggacccagttgtgctatggctgaatggtggacctggg

SEQ ID NO: 204155 - DNA, 273 bp, Glycine max
ctcgcgttttccaattccccccaaatctcacgcctagggtttctatcgcaaaccctccctacctccaaccaggtcgcgtgcaaagggatttcgaagcttcggaagaaaaaaatgaaacctgttttctgtggaaacctggatttcgacgcgcgtcaatctgacgtggagaggctcttcagaagatacggcaaagttgatagagttgacatgaaatccgggtttgcttttgtctacatggaagatgaacgtgatgctgagtatgcaatcagaagg

SEQ ID NO: 204156 - DNA, 142 bp, Glycine max
tggcatccccaaggaaaccgatatcgtcgccaagtataactccaacgctgcctccgtctaccgcgaccgcatccaggccctcgccgacggctgcccctggcgggatccccccgtcgtcaaggaagccgtccgttcctcctcc

SEQ ID NO: 204157 - DNA, 263 bp, Glycine max
agagaatggacgccattgattctgtgttcgatccgctgagagaattcgcaaaggacagcgtgaggctcgtgaagcgctgccacaaacccgatcgcaaagaattctccaaggttgccgtccgtactgcaattggtttcgtcgtgatgggattcgtcggtttcttcgtgaagctcattttcattccaattaacaacatcgtcggatctggttaggtaaattatatttcttcacacaaaaatgttttttttttatattctactttt

SEQ ID NO: 204158 - DNA, 139 bp, Glycine max
cttgtcatccgacctttgccatgacaggtgcgcttgcatggcaggtcaaaaaatgttaataaaaaaagttttattggtttggggagagatcgcacgggggttgcccggggtctcttcctcttgtgtggtgtggtgtttg

SEQ ID NO: 204159 - DNA, 268 bp, Glycine max
cttgttcctctcgcccagaatccgagatcaaccctgacccctaaggccaggggtttttctcggcttcttcagattcctgaaatggcgtctgtttcagctttagccaagtacaagctcgtcttcttgggtgaccaatccgtggacaaaaccagcatcatcactcgcttcatgtacgataaattcgataacacctatcaggctacaactggtattgattttctatcagaaactatgtatctcgaagatcgaactgttcgactgcagttgt

SEQ ID NO: 204160 - DNA, 264 bp, Glycine max
gcatcttgttgctggattaccagctctggaaccatatgctcgtatatttcatagatattatgcaattgctactccaagtgctacacaaagacttcttcttggacttctagaagcacccccatcatgggctccagatgcacttgacgctgctgtgcagcttgtggagcttcttcgagctgctgaagattatgcatctggcataaggcttcctagaaattggatgcatttgcatttcttgcgtgcaatagggactgcaatgtccat

SEQ ID NO: 204161 - DNA, 250 bp, Glycine max
ctcgagccgaatcggctcgagcagggttaagcggtgagatttgcgactctgagaaatggcggattcttctcgggaggagaacgtttacatggcgaaattggcggagcaggccgagcgttacgaggagatggttgagttcatggagaaggttgcaaagactgtggaggttgaggagttgacggtggaggagaggaatctcctctctgtggcttacaagaacgtgattggtgcgaggaggcttcgtggagga

SEQ ID NO: 204162 - DNA, 150 bp, Glycine max
atgcagttcatcgttacagcttctcgcgggggtgaacaggccaatccaaacttgtacggacaatgggaatccgactgtttaattagaaccaaggattgcgatggtccctgcggatgttgacgcaatgtgagttctgcccaatgctctgaa

SEQ ID NO: 204163 - DNA, 266 bp, Glycine max
attgattacaagcaatgttctcaagcctgatattgcagccccgggagttaacattctcgctgcatggtttggaaatgacacatcagaggttccaaaaggaagaaagccctcactatatcgcatactctcaggaacttccatggctactccacatgtttcagggcttgcatgcagtgtcaaaagaaaaaaccccacttggagtgcctccgcaatcaaatctgccatcatgacttcagcaattcaaaatgacaatttgaagggtccca

SEQ ID NO: 204164 - DNA, 266 bp, Glycine max
ggatgagcctctagcattgggcatggttgatccccatgattcattatctcatccagcgggtgtctctgatgttcaagctgagtctgctacacgtgtggaccctgatcagttcactaattttgtgattccaaattggtttggagcagagtccacaggggctacaaaaggcaacccattcatgttaccagatgcctatatggcatctcagcataaaaatcaaaaaaatttaggggagataaggcaactcttacgagaagcacctttag

SEQ ID NO: 204165 - DNA, 140 bp, Glycine max
  unsure (1)..(140): unsure at all n locations
tcgganaacntgggagctatagttgactngaaaatcttgaatcatttgntccanaacaagaatgantactgnatggaggtgacncccaaaacantggctgatgtaaagggtggcactntgganntcttacgaanggnngg

SEQ ID NO: 204166 - DNA, 217 bp, Glycine max
ggaaacatgagaaggaaatatcgtatctctggtctgacttcacaggcaaccagagaattgacattcccagtagatgaaaggggaaccatgaaatctgttgtggagtacttctatgagacatatgggtttgtcattcaacatactcagtggccttgtctgcacattggcaatacacagagacctaactatttgccaatggaggcttacaagatagtgg

SEQ ID NO: 204167 - DNA, 260 bp, Glycine max
cataaatattccgttttgcgtttctctgcctaaaaggattgaaagatgggtcaagcactaggttgctatcaagttgatcagtcaaatgtggctatcaaggagcattttggaaaatttgatgatgtcctagaacctggatgtcattgcctgccttggtgtcttgggtaccagattgctggtagtttgtcactgcgtgtgcagcaacttgatgttcgatgtgagacgaaaaccaaggacaatgtctttgtcactgtggttgc

SEQ ID NO: 204168 - DNA, 161 bp, Glycine max
ctgctcgagatgggactctaggtgacatatgggaaactgtctcgggcagtgatcttgtgatgctgttaatttctgattccgcgcaggctgataactatgagaagatattgtctcacatgaagccaaacagcatacttgggctttcccatggttttcttctt

SEQ ID NO: 204169 - DNA, 281 bp, Glycine max
gttcttctgcttttgttgttgtgtgtttgtgtatgttttttctgtcacctggaaatgtcttgctgcggtggtaactgtggttgcggaagtcctgcaagtgcggcaacggctgcggaggctgcaagatgtacccagacttgagctacactgagtcaaccaccaccgagaccttggtcatgggagtggcacctgttaaggctcaatttgagggtgctgaaatgggtgtgcccgctgagaacgatggctgcaaatgtggaccagactgctgctgcaacccctga

SEQ ID NO: 204170 - DNA, 277 bp, Glycine max
ctaatcgaaccgtctagtagctggttccctccgaagtttccctcaggatagctggagcccgcgggcgagttctatcgggtaaagccaatgattagaggcatcgggggcgcaacgccctcgacctattgtcaaactttaaataggtaggacggtgcggctgctctgttgagccgcgccatggaatcgagagctccaagtgggccatttttggtaagcagaactggcgatgcgggatgaaccggaagctgggttacggtgcccaactgcgcgctaacct

SEQ ID NO: 204171 - DNA, 276 bp, Glycine max
atttctccgagaacaaaaaaaaaaaacgtgattcgctcttctctactaataaaccacaaaaccaacaaacgagaagaggagtgagaaaagatggggttgtcgttcacgaagctgttcagcaggttgtttgcgaagaaggaaatgaggattctgatggaaggtctcgatgctgctggtaagacaaccatcttgtacaagctcaagcttggagaaatcgtcaccaccatccccaccatcggattaaatgttgagactgtggagtacaagaacatcggc

SEQ ID NO: 204172 - DNA, 275 bp, Glycine max
gcatcttgttgctggattaccagctctggaaccatatgctcgtttatttcatagatattatgcaattgctactccaagtgctacacaaagacttcttcttggacttctagaagcacccccatcatgggctccagatgcacttgacgctgctgtgcagcttgtggagcttcttcgagctgctgaagattatgcatctggcataaggcttcctagaaattggatgcatttgcatttcatgcgtgcaatagggactgcaatgtccatgagagctggta

SEQ ID NO: 204173 - DNA, 273 bp, Glycine max
cttttctgccttagcagataagttgcgttctgattatgactttggtcacactctgaatgccaaactccttccaagaggagagtcatcagtttctgggcccgtagttaggctgttcaagccattcgatgaactttttgttgacttccaggatttcaatgtggaagctctagagaagtttgttgaggaatctagtacccctgttgttactgtctttaacaatgaaccgagcaatcaccctttcgttgtcaaattcttcaacagtcccaacgcaaa

SEQ ID NO: 204174 - DNA, 276 bp, Glycine max
ctagggattggatttctcttcctcccttggagaaaaagaagagccaccgctgcgacgccgttcgtgcatttttgatgtgccgctgtcatgtttgggcgtggtggaccaaggaggagtgataactccaaatattgtgatgttctcgggatttccaaaaatgccagtgaagatgaaatcaagaaggcctatagaaaggcggctatgaagaaccatccagataagggaggagatcctgaaaagtttaaggagttaggtcaagcatatgaagttttaagt

SEQ ID NO: 204175 - DNA, 274 bp, Glycine max
tggtaattgacacccccggcgtagttgcattgcttggagcacacagtgttggtcgaacccattgtgtgaagttggtgcaccgtttgtacccagagattgatccagctctgaaccctgaccacgtccctcacattctgaagaagtgccctgatgccattccagaccctaaggccgtgcagtacgtgagaaacgaccgtggcacccccatgattctagacaacaattactacagaagtatgttggacaacaagggcttgttgatagtggatcacca

SEQ ID NO: 204176 - DNA, 273 bp, Glycine max
caaattctcattttcaagctgtttggtgtaaagatgggacaagtgcttggttgtgttcaagtgaagcagtcaactgtagccgtcaaggaatgtttcgggaagtacgatgatgttcttcaacctggttgccattttgtgccatggtgtcttggctgcggtgtggctggtgtcctttctacgcgtgtcatgcagctaagtcttcgttgtgaaactaagacaaaggacaatgtgtttgttaatgtggttgcctcaatccaatatcgagcattggca

SEQ ID NO: 204177 - DNA, 272 bp, Glycine max
aggttttccaattcacagagcaacacaacgaaccaacaatggcgcacctcagccgcagtcgcagccgcagcacgggcaagcagcgctggagcaggtgcagtgcttcggtcgcaagaagaccgccgtggccgtgacctactgcaagcgcgggcgcggtctcatcaagatcaacggctgccccattgagctcgtggagccggagatcctccgcttcaaggccttcgagcctatcctcctgttgggtaagagccgttcgccggcgtcgacatgcg

SEQ ID NO: 204178 - DNA, 274 bp, Glycine max
aagctttcaagatacaaactgctttgaataatgggatccaaggttgttgcatccgttgcccttctcctctccatcaacattcttttcatttccatggttagctccagcagccactacgatccacagccccaaccttctcacgtcactgctcttattacacgacctagttgtccggatctgagtatttgcctcaatattttaggcgggtctctaggaaccgtggatgattgttgtgccctcatcggtggtcttggtgacattgaagccattgtgt

SEQ ID NO: 204179 - DNA, 155 bp, Glycine max
cacaaaatgtcctctaatccagtaatactgcagagtgtgaacttgaccaagtatgtactggagaccagcgtttatccacgagaagaagagactctcaaagagctaaggaaagccactgcaggccacccttggggctttatgggcgctgctcccga

SEQ ID NO: 204180 - DNA, 276 bp, Glycine max
gttgtgactcgttcttcttcgtcgttatcttcttcttttgttgtttgtgtgtttgttttttctctcacctgaaaatgtcttgctgcggtggtaactgtggttgcggaagcgcctgcaagtgcggcaacggctgcggaggctgcaagatgtacccagacttgagctacaccgagtcaaccaccaccgagaccttggtcatgggagtggcaccagttaaggctcaattcgagagtgctgaaatgggtgttcccgctgagaacgatggctgcaaatgtg

SEQ ID NO: 204181 - DNA, 277 bp, Glycine max
acgagattgatgcgggggttgatttggaagaaacccagctaaggtaattcctcgcaacccctaactaaaccttcaaaggatcatcatgggcagtcacaatgctttggctgccactttcggaatattaggtaacatcatttctgtgatggtgtacttggctccggtgccaacgttttaccggatatacaaaaagaaatgcacggacggtttccactcgctgccatacttgttgtcattaatgagttctatgctttggttatactacgccttcctcaaa

SEQ ID NO: 204182 - DNA, 284 bp, Glycine max
cacggagatcggctcgagcttttcgtcattctcatgtcctcaatcacccccctcgcagtctgtcttgccttcctgtggtggcgacaatgtcgactcgtgctaggaagaggctgatgaaagacttcaagaagctgcaacaagacccgcctgcagggatcagttgtgccccccaggataacaacataatgctgtggaatgctgtcatgttaagtcaagatgatagtccatgggatggaggcacgttcaagttgacactccaattactgaggactatccaaataaac

SEQ ID NO: 204183 - DNA, 277 bp, Glycine max
tacggaatctgctagaattttctagtagtggcgaaagacgttgagcaggtcacagagcaaggtgaatactccgcgaaggactaccatgaccctcctccggcaccgttgatcgacccagatgagctcacaaagtggtccttgtacagagccgccatagctgagttcatagcaacactcctttttctttacatcaccgtgttgaccattattggctacaagagacagagtgacaccaaaatccccggtaacaccgaatgtgacggcgttggcattttgg

SEQ ID NO: 204184 - DNA, 275 bp, Glycine max
aggatgcgccactggacaccccagttttgtgatgtcctgctccttcaccaaccaggtcattgctcagcttgagttgtggaaggagaagagtaccggcaagtacgagaagaaggtttacgttttgcccaagcaccttgatgagaaggtggctgcacttcacctgggcaaacttggagctaagctgacccagcttagcaagtcccaggctgattacatcagtgtgcctgttgagggtccatacaagcctgctcactacaggtactaagtgattgaga

SEQ ID NO: 204185 - DNA, 275 bp, Glycine max
acaacagagatggctcccaagggtttaatctttttggctgtgttatgcttctcagcactgtcgatgagtcgttgtcttgcggaggataatggacttgttatgaacttctacaaggaatcatgccctcatgctgaagacatcatcaaagaacaagtcaagcttctctacaagcgccacaagaacactgctttctcctggctcagaaacatcttccatgactgtgctgttcagagttgtgatgcttcgatgttgctggactccacaagaaggagctt

SEQ ID NO: 204186 - DNA, 230 bp, Glycine max
  unsure (1)..(230): unsure at all n locations
agatgacgggtcagaatgtgaccgagtgcattggtgggtcaaggacggtcacntttgntgacttgagctcacgtnaccacacacactgtgacccaaggctcantgcttcacantctcttgagnttgntntcatcntcgccgagcgtttgagaaagagcaggatcagatcgcagcaacctcttggcccctctaggagtgtaaaagtgccttcaaaaccaacaagagaaaga

SEQ ID NO: 204187 - DNA, 270 bp, Glycine max
gttttctttgcagacatgtcttggatcccatttccatcaggtcagtgcctatgtacttttttcagaaaggttggtggtgactggtgattgttgaagagaataatggcaagttcaactatggatattcttcatttccaccacactcctttttattgatcccactttggaatcaaaaggctagcaaaagagctgatggggtgattctatgggattatcatgtaatttgcattcagataaaacaaggagctgtccctccactagtgtgggact

SEQ ID NO: 204188 - DNA, 271 bp, Glycine max
tccaaaccctaacactcctcttcctcttcgatcatcacctgtccacaatgccgccgaagttcgacccctcccagatagtcgacgtcttcgtccgcgttaccggcggcgaagtcggcgcggcgagttccctggccccgaagatcggtcccctcggtctgtcccccaagaagatcggagaagacatcgccaaagaaaccgccaaggactggaagggcctccgcgtcaccgtcaagctcaccgttcagaatcgtcaggcgaaggtcacggtggt

SEQ ID NO: 204189 - DNA, 278 bp, Glycine max
tttcagtgactgatcggtgttcacttgatctcatcataatcgtcagcgtcaattgaagaagatgccgatcagaaacatcgccgtcggaaggcctgaagatgcgactcaccccgacacgttgaaggcggctttggctgagttcatctcaaccttcatcttcgtgttcgccggctcaggctccggcatcgcctacaacaagctcaccgacaacggcgctgccacccctgccggcctcatctccgcctccatcgcccatgcattcgccctcttcgtcgccg

SEQ ID NO: 204190 - DNA, 276 bp, Glycine max
agacacaagaaaagaaagagaaagagtttgcagagttgaattccgaaagacgaatggcgaacacgagggagcttgctatcccgattaacaataacctagaacccgtgtatggcggaggttccgcactcgaagaagctcagcttcgtttcgataatttgaagtccagattcgtcgaaatcttcggtcatcatcctgaaatcttcgctcgctcacctggaagagtgaacttgattggggagcacattgatatgaaggttattcggtgctgcctatggc

SEQ ID NO: 204191 - DNA, 242 bp, Glycine max
  unsure (1)..(242): unsure at all n locations
actgtcttccttntantgggtttttagctcacncantttcttcgctcnacatggttcttnaaaatgntattgntttgctaaatcctccggttgagcttgagaagaggaaacacaagctcaagcgtcttgttcagtcaccaaactctttcttcatggatgttaagtgccagggttgcttcaacataaccactgtctttagccantctcagactgttgttgtatgcggaaactgccatactgtc

SEQ ID NO: 204192 - DNA, 245 bp, Glycine max
ctgtggttcaggtagtcagaagtttggcgttgctgaggaattctatcagacaacactgcaagcccttgaagaagcaaagaatgagagattatggtttaagacaagtgctgagctttgtaagatcttctttgatattggggaatatgggcggatgagtaagatattgaaggaacttgacgagtcttgtcaaatggaagatggtacagatgatcacaagaattgaacgcaagttttggaggtttatg

SEQ ID NO: 204193 - DNA, 270 bp, Glycine max
ctttctccatccatttcttcctcctcctctcaatagcccttttcacagtttgttgcttagcagcatctcaagctcccaccaccaaatcacacccctatgtccttcccattaagaaagaccccgcaacaaatttgtactacacttcagttggcattggaactcctaggcacaactttgatttagtcattgatctttctggtgaaaacttatggtacgattgtgacactcattacaactcatcatcctacagacctatagcttgtggctcaa

SEQ ID NO: 204194 - DNA, 266 bp, Glycine max
gttcacagaacaagctggggtggtgcgacgcgctgcctggaacgggacagagacagagagggttccttccggtcgctgtaattggtttggcgttcaattgaggaagaacaatgtcggtgacagcgggtgttagtgatactgtaatagccattagggataagctcagaggtaaaattggccaaactaaagttaagcgttattggcccggtaaagttcctgaatgggctgatgatgagaacgaaaagatgctgcccctgccgatatta

SEQ ID NO: 204195 - DNA, 269 bp, Glycine max
atttctttgtatctactggtgaatgtagggctaaggttactgccgcaagactcccgtattttgatggtgactactggcctggggctgcagaggatttgatttatcagcttcgccaagaggaagatggaaggaaacaaaataaaaagggaacaactaaaaagactataacaaaaagggctttgaaagcgtctggtcagtcagatctttcagcaaatgcctcaaaggacctgctccttatgcacaaacttggtgaaccatttgcccgatga

SEQ ID NO: 204196 - DNA, 271 bp, Glycine max
ctttctcctaaaacatctcaatgggttcttcttctattacaacatcgcccgcaaccatgaccatggctgcgatcgtgctcctgttcacggtctttgccgtttcctccgccctagacatgtcgataatctcgtacgacagcgcccacgcggacaaggccgccacgttgcgcaccgaacaggagctgatgtccatgtacgagcagtggctcgtgaagcacgggaaggtgtacaacgcgctcggcgagaaggagaagcgcttccagatcttcaa

SEQ ID NO: 204197 - DNA, 270 bp, Glycine max
aattgcctgtttcgaatttcggtactttgatcagatccacaacacttcttcatccatgacgcttggttcttcaggatccagtgtcgtggttccaaggaagttcagattgctggaggagcttgagaagggagaaaaaggaataggagatggcacagttagttatggaatggatgatggtgatgacatttacatgcgctcttggactggaaccattgatggtccctatagtgctgtacatgaaggaagaatttatcgattgaagctgttttg

SEQ ID NO: 204198 - DNA, 269 bp, Glycine max
atgtgttgtgtggaagggtgctccaacaactcctttgataactaactgtgtgacaaagctagtagctgaagttcttgagaggaacaaattacctggtgcaatattcacctgtttctgtggaggtgctgacattggtcaggcaatagcaaaagacactcgcattcccctggtttcatttactggaagttcaaaggttggcttgatggtccagcaaacagttaatgagagatttggcaaatgcttgcttgagttaagtggtaacaatgcaa

SEQ ID NO: 204199 - DNA, 267 bp, Glycine max
tgtcgagccgagtcggctcggcctaaaccctactcattgtgcatacctcgacgaagaggttaaagagacggcaacactttgctgtccgccttgaccgagcagagcttcgtcttggccctcgattttgccctaaagtactctcagtcacaacagacaccgtcgtcgtcgtcgtcgtcatcaatggcaccgaagcagaccaaggctgagaagaagatcgcttacgatgcgaagctgtgcgacctgatggaggagtacggccagatcctc

SEQ ID NO: 204200 - DNA, 266 bp, Glycine max
tgggttccaacggtggaagtagtaacaacaacaataataaggtattggaaaaaccaggtcaagatcagcttgtgcagcagcagcaacaacaacaagaagcccccaagtgccctcgttgtgactcatcaaacaccaagttctgctactacaacaactacagtttgtctcagccacggcacttctgcaaagcctgcaagcgctattggacaagaggtggaactctcagaaacgttcctgttggtggaggctgcagaagaaacaagcgt

SEQ ID NO: 204201 - DNA, 267 bp, Glycine max
cacactctcttattgtctctccatcatggctcacattctccctttcctcctcctcaccctcctcgccgccaccgcctccgcccacaatatcaccgacattctcgccgccaaccccgactacagcgacttcaacggcttcctctcccaaaccggcctcgccggcgaaatcaacacccgctagaccatcaccgtcctcgtcctcaacaacgccgccctctccgccgtggccgcaaaacaccccctctccgtcgtcaaaaacctcctcag

SEQ ID NO: 204202 - DNA, 261 bp, Glycine max
ctctcccttgcgtgtcgtttgcatcgattatcctcgaccggagctcgaaaacactgttaatttcgtcgaagctgcttacttgtcttccaccttccgtgcttctccgcgtccactaaaacccttgaacatcgttattgctggcgcaggattggctggtttatcaactgcaaaatatttggctgatgctgggcataaacctatattgctggaagcaagagacgttctaggtggaaaggttgctgcatggaaagacaaggatgg

SEQ ID NO: 204203 - DNA, 265 bp, Glycine max
ctcgagccgttgtgatgcttcactgttgctggactccacaagaaggagcttgtctgagaagcaaacagatagaagctttgggttgagaaatttcaggtacattgagaccatcaaagaagctttggaaagggaatgcccaggagttgtttcctgtgctgatatcctcgttgtgtctgccagatatggcattgtttcgctaggaggtccccatatgcctcttaaaacaggaagaagggatggtagaaggagcagagccgatgtggta

SEQ ID NO: 204204 - DNA, 258 bp, Glycine max
atctctccgcaccagtttcaccgcacgaatatcttgttgtttggaccgatccgagaaaaactctgtaaacatgttggtttaccaggacctccttacaggtgatgagcttctctcttactccttccgttacaatgaaattgagaatggaatgctgtgggaagttgatgggaagtgggttgttaaaggagcagttgatgtagacattggtgcaaacccttctgctgagggtggaggagaagatgaggagttgatgatgca

SEQ ID NO: 204205 - DNA, 259 bp, Glycine max
actcgagccgaatcggctcgagcggctcgaggattgatgcggggattgtttggaagaaacacagctaaggtaattcctcgacaacccctaactaaaccttcaaaggatcatcatgggcagtcacaatgctttggctgccactttcggaatattaggtaacatcatttctgtgatggtgtacttggctccggtgccaacgttttaccggatatacaaaaagaaatgcacggacggtttccactcgctgccatacttgttg

SEQ ID NO: 204206 - DNA, 263 bp, Glycine max
ataccagtttttttgttgttttttttcctcagtctcaaccatggaaaagcagaagacactgatgagtttgattctgttgctgttgttatttacttcggatgtgagtgcttggaccggtgaaatccatggaagagttgtttgtgacgtttgtggggattcttctcttggacctgaagaccatattcttgaaggtgctgaggttgctgttctttgcatcaccaagtctggggaagttctaaattatcaggcattcactgatgcta

SEQ ID NO: 204207 - DNA, 264 bp, Glycine max
  unsure (1)..(264): unsure at all n locations
tgctcgaggcgtcttctcagaagaaaatgggaaganggaagattgaaatcaaacggatcgagaacaccaccantaggcaagttcaccttctgcaagcnccgcaacggtttgctgaaaaaagcttntganttatcagttctgtgtgatgctgaagttgcccttgttgtcttctcaacccgtggccgtttgtatgagtatgccaacaacagtgttagggccactattgagaggtacaagaagcaaatgctgctgcttcaaacgcag

SEQ ID NO: 204208 - DNA, 262 bp, Glycine max
gccatgcatgtgtaagtatgaactaattcagactgtgaaactgcgaatggctcattaaatcagttatagtttgtttgatggtatctactactcggataaccgtagtaattctagagctaatacgtgcaacaaaccccgacttctggaagggatgcatttattagataaaaggtcaacacaggctctgcctgttgctttgatgattcatgataactcgtcggatcgcacggcctttgtgccggcgacgcatcattcaaatttc

SEQ ID NO: 204209 - DNA, 259 bp, Glycine max
caacgcagcagcagcggcagcttcatgtgtttttgtgcatcggcgtgaacaatggcgacgtacgctgcgatgaagcccaataagcctggcttggaggagtcccaagaacagatccacaagatgaggatcaccctttgctccaagcacgtcaaaaatctcgagaaggtttgtggggacttggttcgtggtgcaaaggataagaggctcagggttaagggacctgtcaggatgcccactaaggttcttcacatcactacca

SEQ ID NO: 204210 - DNA, 258 bp, Glycine max
agaagaattgctcagatacctgtaagttaggcttatttgggtcgtgttataaatgccctggctaaaccaattgatggtcgaggagaaatttcagcttcggaatctcgattaatcgaatctcctgctcccggtattgtttcgagacgttccgtatatgagcctctccaaacaggacttgttgctattgattcgatgatccccataggacgtggccaacgagaattgattattggagacagacaaacgggtaaaacagca

SEQ ID NO: 204211 - DNA, 138 bp, Glycine max
tgtagaggcaagttaggttgtaaacctctttgctagctatattgaactacaccataggagtagtgtgcatgtcaattcggttttgccatgtacctcttggaatattatggtaatagttgtttgaatctctttaaggta

SEQ ID NO: 204212 - DNA, 281 bp, Glycine max
tagagaagtcgcttgaagtagatgctggagtttccctggcgtttgcgttgcaccaccccccgttgcgtatgcgatgggtgagaagatgcaagatacgcagggcatgggaattccgaatgggaatgatgagcggagaagtatccgccgccggggaccaccaccgtcaagtgaaggcggagatagccaaccacccagtctgaggagatgttgtgtctgcacacgtgtcatgcctccgcgtcgccacacctatcgatcagttgccgctcatcgacggacagtta

SEQ ID NO: 204213 - DNA, 265 bp, Glycine max
ctgcttcaagttggtcctcagaagcgaagaagaagccacagagaaccagtctcctagtgtctctcacccacaagaaaaatggcatctcgcatcgttggatacccccgcatgggtcccaagacagagctcaagttcgctgtcgagtctttgtgggatggcaagatcagcgccgaggatttgcagaaggtggctgctgatctcaggtcatccatctggaagcagatggctggtgctgggatcaagtacatccgcagcaacactttct

SEQ ID NO: 204214 - DNA, 263 bp, Glycine max
caaatacttgtgttgtgtcgattctctgccatccatcactcacaaaaaccacttacaaagtagtactacttggtttcaatcaaaacaaaaactcacactttggtggccacagcaacaataacaatggcagcctcactacaagctgcagctaccttcatgcaacccaccaaggtgggcatggccactcgcaacctcaaatctacacaatgcatttctaaggcttttggcttggaacccgctgcagctaaactcatttgctccct

SEQ ID NO: 204215 - DNA, 263 bp, Glycine max
acgttgttcgtcttcagaatcggcggtgtcggagcgaagaggaataccaggggctcagttcgtagaggatgtccaaacttacctcactcaatcgggtctcgatgttggttcagccctggcttttgtccaagagagacttcagcagtacaaggtagtagaaatgaagcttcttgctcagcaaagggatcttcaggcaaagataccagatattgaaaagtgcttagacgttgttggtacattgaaagctaagaagggtactggtg

SEQ ID NO: 204216 - DNA, 261 bp, Glycine max
agacaacaagggcttgttgatagtggatcaccaactagccaatgacaagaggaccaagccttatgtgaagaaaatggccaagagccaggactatttcttcaaggagttttctagagccattactttgctctctgagaacaaccctctcactggcacaaagggtgagatcagaaagcagtgcaatgctgccaacaagcaccatgaggagccttaattgcttcccgcttaatttgggccttgaattttcttccccttctctat

SEQ ID NO: 204217 - DNA, 257 bp, Glycine max
gcttcagaaatacaacgagctgatagaggagacaagaaaagaaagagaaagagtttgcagagttgaattccgaaagacgaatggcgaacacgaggagcttcctatcccgattaacagtaacctagaacccgtctatggcggaggttccgcactcgaagaagctatagcttcgtttcgataatttgaagtccaaattcgtcgaaatcttcggtcatcatcctcaaatcttcgctcgctcacctggaagagtgaacttg

SEQ ID NO: 204218 - DNA, 255 bp, Glycine max
aatcaggagagcatgcatgtgaacatgatgatgaagaaggtgtgtgggtttgcaatagtgatggtggcagtgcagcttctggtggaggtgagtcccaaggcagaggctgtgacttgtacccctgtggagctgagtccttgtttgggggcaataacttcctgtcaaccaccatcaacaatttgttgccagaaggtgagggaacaaaggcaatgcctctgtggttgactcaaaaacccaagtctaaggccatgatgc

SEQ ID NO: 204219 - DNA, 261 bp, Glycine max
gatcttcgatcttcgtcgctgagaatgagagagtgcatttcaatccacatcggccaggccgggattcaggttggaaacgcctgctgggagctttactgcctcgaacactgcattcagcctgatgggcagatgccaagtgacaagaccgttggtggaggtgatgatgctttcaacaccttcttcagtgaaactggggcaggaaagcacgtgccccgtgcgatttttgtagatcttgagcccactgtgattgatgaggttagg

SEQ ID NO: 204220 - DNA, 265 bp, Glycine max
acttgttgttaatttgcctataacacctcgcaggtctccgccgtggtgttcctgatcccaagatcaggatttgtgatgttggtatgaagaagaagggtgttgatgagtttcctttctgtgtccatctggttaattgggagaaggaaaatgtttcaagtgaggccctggaagctgatcgcattgcttgcaacaagtacatggccaaatttgctggaaaggatgctttccacttgagagtcagggtgcacccattccatgttcttag

SEQ ID NO: 204221 - DNA, 127 bp, Glycine max
tttccttcagggttaagcggtgagatttgcgaatctgagaaatggcggattcttctcgggaggagaacgtttacatggcgaaattggcggagcaggccgagcgttacgaggagatggttgagttcat

SEQ ID NO: 204222 - DNA, 275 bp, Glycine max
caaggaagagcatgatcaaatcagagccaagaagagttgcccagaggcaccactggagtggacagattataagtcaatggcatttactcaatgtgttgtgaatgagactttaagggtggcaaacataattgtgcgatatttaggagagcaatgacagacatcaacataaaaggttacactattccaaagggatggagggtcgttgcttcatttcgtgcggtacatctaaaccctgaccatttcaaagatgcccgcaccttcaatccatggagatg

SEQ ID NO: 204223 - DNA, 270 bp, Glycine max
gaaaccattgccaaatatactctaaccatgcttagaagaagagttcctcctgctgtccctggaatcatgtttttgtctggtggacaatccgaagtggaagcaacactaaatctaaatgccatgaaccaaatcccaacccatggcatgtttctttctcatatgcacgggctcttcagaacactgtgcttaagacatggcaaggacaccctgagaatgtggaagctgctcaaaagtcccttttggtgcgtgctaaagcaaactccttggctc

SEQ ID NO: 204224 - DNA, 267 bp, Glycine max
ctccgtcttcatcaatcagcatcaccaccgctccaacacaggggaaaatgagggagatccttcacgttcagggagggcaatgcgggaaccagatcggttcgaagttctgggaagtggtgtgcgacggcacggcatagatccgacggggaagtacgtcggaaactcagatctacaactcgagcgcgtgaacgtgtactacaacgaagcttcctgcgggcggtttgtcccacgcgcagtgctgatggacctggagcccggaaccatgga

SEQ ID NO: 204225 - DNA, 265 bp, Glycine max
agacaacagaagacaacaaaatggaagacacagtttctgcgttgaggtctttgatggtttctcactctccgccgctggatgccttagtggtgccctctgaagattatcacctgagcgaatatgtgctgcacgagacaagcgccgcgaattcgtttccggcttcactggaagtgccggcttggcacttataacaaagaaagaagcactgctgtggacggatggacggtattttttgcaggctgagaaagaacttagtgctgggtgg

SEQ ID NO: 204226 - DNA, 267 bp, Glycine max
ctctgcttcaacttgctccctcagaagcgaagaagaagccacagagaaccagtctcctactctctctcacccacaagaaaaatggcatctcacatcgttggatacccccgcatgggtcccaagagaagctcaagttcgctctcgagtctttctgggatggcaagagcagcgccgaggatttgcagaaggtggctgctgatctcaggtcatccatctggaagcagatggctggtgctgggatcaagtacatccccagcaacactttct

SEQ ID NO: 204227 - DNA, 272 bp, Glycine max
gaaagcgaaacgcatagaatcgaaagaggggaaaagaaaaagaaaagttagggttagggattttgagagatggcatcgactaagaagatcaccctgaagagttcggacggtgaggccttcgaggtggagaggcggtggcgctggagtcgcagacgatcaagcacatgatcgaggacgactgcgccgacagtggaatccctctccccaatgtcaccagcaagattctggcgaaggttatcgagtactgcaagaagcacgttgaggcgaacagt

SEQ ID NO: 204228 - DNA, 269 bp, Glycine max
catactgcaagcttgatataagcaactgctcacctgatcaactaagtaaaatgcaagacttcaagtcggaattcgaaaaggctgtgagtgtggtaggcgactcttcatctaaaggaatgttcatagatcttgctatgctcactgccaaacagaatcacaggagacatggtataagagtgactctccacagcttgccaatacgactattgccaaggcagtgggagactggttttatggtcgaagttctttccgtcacgtggattgcaatt

SEQ ID NO: 204229 - DNA, 272 bp, Glycine max
caccaacacaaaaacacttgcaaactagttttgtttttggaacatatcgcattacattacattagattggtggcaaagcaatggcatcgtcactacaagcagcagctactttcatgcaacccaccaagttttgcagctaaagtctactcaggccatatctaaggcttttggtttggaacctgctggagttaataaggtcacatgctcccttcaggctgatcttaaggacttggctcacaagtgtgttgatgctaccaaaattgcaggctttg

SEQ ID NO: 204230 - DNA, 253 bp, Glycine max
tctcgagcgaatcggctcgagggaggattttaccaagaagtaagctggaggaaaagctactacagcggctgctcatagactcaacagagagtttggacctaagttgaaggaggagatgcagtactgtgtgatcacccagaggaaattagcaagcttgctaaagtgaaagctcaggtttcagaagtcaaaggagttatgatggaaaatattgagaaggttcttgaccgtggggagaaaattgagcttttggtgg

SEQ ID NO: 204231 - DNA, 267 bp, Glycine max
aacgcggtaaccctagaatcccaaatccccaatcaatcgaccaagagcaggagcttcggtggcgatcttcatccgcctcggtgaaaaaaatgtctctggtggcgaacgaggatttccagcacattctcgtgtgctgaacaccaacgtagatgggaagcagaagataatgttcgctctcacctctatcaaaggtattggcaggcgattcgctaacatttgctgcaaaaaagctgatgtcgacatgaacaagagagctggtgaattgag

SEQ ID NO: 204232 - DNA, 267 bp, Glycine max
gaaaaatcaggcacaacaatctaaaggcaaagtctggaatttgttcaagcttcgctttctcacacctccaactctgtttcttcccttgccagatcgctcctccccgcacctcgtcgtcttaagctcatccttccaacaagctctacttcccttagccgggcaagcaggctaagagtgccgtcaggattaaaaacaccagcaaatccaatgtagctttcaagtttcaaacaaatgcacccaagagctgtttcatgcgacctcctgggg

SEQ ID NO: 204233 - DNA, 265 bp, Glycine max
ttctacccgccgctcgatgggaattgcgcttcaaggcgtctcgtagggctaatccgcctcacgagggtcaccaacggcacgtgcctttggggggccgaggcccccgactgctggtcggcaaacgacggcgggcgcacgcgtcgcttctagcccggattctgacttagaggcgttcagtcataatccaacgcacggtagcttcgcgccactggcttttcaaccaagcgcgatgaccaattgtgcgaatcaacggttcctctcgtac

SEQ ID NO: 204234 - DNA, 264 bp, Glycine max
cgacactgagcatcagcaatggcaagcgcaagtgttggtaaagaactgacgctgtattcgtattggaggagctcttgttcccaccgagtccgaaacgctctcaacctcaaagggcttaaatacgatacaagcccgtcaatctgctcaagggagaacaatctcgccctgagtttctccagctcaatcctgttggttgtgtccccgttctagtggatgaccacgttgttctctatgactctttcgccattattatgtatttggaag

SEQ ID NO: 204235 - DNA, 260 bp, Glycine max
ctctggtcgatggaacaatgtaggcaagggaagtcggcaaaatggatccgtaacctcgggaaaaggattggctctgagggctgggcacgggggtcccagtcccgaacccgtcggctgtcggggactgctcgagctgcttccgcggcgagagcgggtcgtcgcgtgccggtcgggggacggattgggaacgggcccttcggggcctcttccccgggcgtcgaacagtcaactcagaactggtacggacaaggggaatccga

SEQ ID NO: 204236 - DNA, 110 bp, Glycine max
cggctcgaggagagccttctctcagtacggcgaaatcgttgaaacgaagattatcaacgatcgtgagactggcagatccaggggttttggatttgtgaccttcgcctcgg

SEQ ID NO: 204237 - DNA, 267 bp, Glycine max
agagaagtcccttaaataaatctgaatttccctgctttgcttcaccaccccccttgcttgcgtgggtagaaatgcaagaagcagggctgggaatgggaatgggaatgatgagcggagaagtatcgccgccggggaccaccaccgtcaagtgaaggcggagatagccaaccacccactctatgaacagcttctatctgcacacgtgtcatgcctccgcgtcgccacacctatcgatcagttgccgctcatcgacggacagttatcgca

SEQ ID NO: 204238 - DNA, 268 bp, Glycine max
atcctattactcttcactgcaccaagcagaagatacaaggtgcttgaggactaccatgctacttttgtagaaacagttcctttcaagacaatagcaacattcaccatttttcaaaccatttatctcttatatgttttggactaacatgggttcctattgccggggtcatgtttcctatgatgatcatgcttttagttccggttagacagtactttctccctaagtttttcaaagggatacaccttcaagacttggatgcagcagcata

SEQ ID NO: 204239 - DNA, 205 bp, Glycine max
caagcctgttcgtctatccttataaaattatcatcaaaacttgtgggactaccaaattgcttctgtccatccctgtcattctcaagttggctgatgctcttgacatagctgtgaaatctgtgagtacactcgtggaagcttcattttccctggggcacagtcttttcctcaccgcagtttttccgaggaggtttctgttcttgac

SEQ ID NO: 204240 - DNA, 263 bp, Glycine max
cttctttattccttttgtaatttcattcattcttaatctttgtgaaaaataatgttcatcgagaattttaaggttgagtgtcctaatgtgaagtacaccgagactgagattcagtccgtgtacactacgtaaccaccgaacttgttcacgagaacaggaatggcacctatcagtggattgtcaaacccaaatctgtcaaatacgaatttaaaaccaacatccatgttcctaaattaggggtaatgcttgtgggttggggtgga

SEQ ID NO: 204241 - DNA, 263 bp, Glycine max
  unsure (1)..(263): unsure at all n locations
cacctttctcctaaaacatctccagtgggttcttcttcttctattacaacaacgtcgtccaagaccatgaccatggccatggccacgatcctgctcctgttcacggtcttcgcggtttcacggccctagacatgtcgataatctcgtacgacaacgcccacgccgccacgtcgcgcagcgacnnaggagctgatgtccatgtacgagcagtggctagtaaagcacggcaaggtgtacaacgcgctcggagagaaggagaagag

SEQ ID NO: 204242 - DNA, 258 bp, Glycine max
gttcatggcaacaataatgtctacaaggcaaccatctttcctcacaatgttgggctcggagttaccagggatccagtactgataaagaagattggagatgcaactgccctagaagttaggctactggaattcaatatgtttttgctccgtgcattgcggtctgcagagatcctagatgggggcgttgctttgaaagttacagcgaggaccctaagattgctcaagcaatgactgaaattattcctggtttgcaaggag

SEQ ID NO: 204243 - DNA, 265 bp, Glycine max
ctggtgaacaatgccgcggcggttccaaggcttgggatgaaagggtacgagtggtggtcggaggcactccacggagtttcaaatgtgggtcccggagttaagtttaatgcacagtttcccgggctactagcttccctcaagtcatcaccaccgctgcttccttcaatgcttctctctgggaggcaatcggacaggtagtgtcggatgaggcaagggccatgtacaacggtggaacagcagggctcacgtattggagcccaaacgt

SEQ ID NO: 204244 - DNA, 264 bp, Glycine max
gcagcctccaattcgtgccactctcttcaaaatggccgttaccttctcaaatctccacacagaatcaggtctcaagtccctcgacgacttcctctctgggaaggtctacgtttctggggatcgttcacaaaggacgacatcaaagtgtatggtgctgttttggagaagccaggtgactcttttcccaatgctgccaagtggtacgaggttgtctcatctcagcttgctgcaagcttccccggcaatgctcaaggggtgagattc

SEQ ID NO: 204245 - DNA, 259 bp, Glycine max
ccctctctcaagtaccctcatccttccattcactccacttcttaactcgccaaaacagacagcagcaagagaaatggtgttcgctgtccaaggcaacaacagcacaatactcctacatcagaactacatgccaacggcattctcctcaacaattcccatagtggacctctccaaaccagatgccaagaccctcatagtgcaggcttgtgaggaatttggattcttcaaagtcatcaaccatggtgttcccatggacact

SEQ ID NO: 204246 - DNA, 221 bp, Glycine max
tgttaatatgcgtttcagcactgtcactgagtccttctgttgcgggggaagggcaaaataatggccttgttatgaacttctacaaggaatcatgccctcaggctgaagacatcatcacaaacaagtcaagcttctctacaagcgccacaagaacactgctttctcctggctcaggaacatcttccatgactgtgctgttcagagttgtgatgcttcactgt

SEQ ID NO: 204247 - DNA, 264 bp, Glycine max
gaggtagattatggatttaatggctttcgagttcctgttatacctaaagctcctagatctgccagaaggagggttgctttcaacaaagcagttgaggatggtcaagtttgcgctattgaactatggcatctttagctggccaattgttgcaggagagtgaaagttctgcttccagcaatgcgtctgaaggaaatcatcagcctgccttcagccaaggtgtaattgagcaagatatacaagatgaagttaaaccattaaaaatgg

SEQ ID NO: 204248 - DNA, 263 bp, Glycine max
cccttatctttctctcttctctctccccgcccaaaccctaactccctaccctattccgctttctctcatccatcatgaaaggaggaaagtccaagaccgaatctaagagagccgatgccaacttgctgtgaataagaagggcgccgccaccaagactaggaaacccgccggaaaggggaaggcagcgaaagatcctaacaagccaaagaggcctccaagtgctttcttcgttttcatggaggaattcaggaaggtgttcaaca

SEQ ID NO: 204249 - DNA, 256 bp, Glycine max
cggctcgaggggaaaggatgaagatcacggcgttgttggtgcttaaatgcacgggcgagggatccgatccggtgattctggcaaacgcttccgatgtcagccacttcggctacttcagcgttccagcgttaaggaattcatcgttttcgttggtcgtacagtcgccagtcgcactcctcagggccaacgccaatccgtacaacacgaagagtacaaggtgcacacatacaacaggaatggtctttgcgcgttggga

SEQ ID NO: 204250 - DNA, 81 bp, Glycine max
gaaacatggcttccttaagcttcttagtgctgctccttgcagctctaattcgatcccctcaaggtcttgcaaactatgaga

SEQ ID NO: 204251 - DNA, 253 bp, Glycine max
gaaactgagagacattcgcaaaccctaatttcggaaagatcggcgatggctgcctccaaggatcgcgagaacttcgtctacatcgccaagctcgccgaacaggccgagcgatacgagagatggtggaatcaatgaagaacgttgcgaatctcgacgttgaactgactgtggaggagcggaatttactttctgttgggtacaagaatgtgattggtgctcggagagcatcgtggaggatcctgtcttccattga

SEQ ID NO: 204252 - DNA, 256 bp, Glycine max
gaagagcgaagagaatggctcccaagggtttaatctttttggctgtgttatgcttctcagcactgtcactgagtcgttgtcttgcggaggataatggacttgttatgaacttctaaaggaatcatgccctcaggctgaagacatcatcaaagaacaagtcaagcttctctacaagcgccacaagaacactgctttctcctggctcagaaacatcttccatgactgtgctgttcagagttgtgatgcttcactgttg

SEQ ID NO: 204253 - DNA, 256 bp, Glycine max
tgtgaactgtggaagcagttgcagaccgagctagctagctagcaagcaagcacatagatggtggcaaagcgaggccatgccctcatgtgcttggcacgtgtttcactcttcctctcgctctaaccctatccgctgctcacggaagcaccacggttcaagacatcgcgagatagttgaaactcggggacaacgagcttctgcgcacggagaagaagttcaaggttttcatggagaattacgggaggagctactccac

SEQ ID NO: 204254 - DNA, 229 bp, Glycine max
ttagaatggaaggaaacgccgtcgtttatgagggattttctcgataagtgtggtggctgcgccgttattgacggtggttttgccactgaacttgaaaggcatggggcggacctcaatgacgaactctggagtgccaaatgccttattagctccccacatcttgtccgaagggttcacctagattacctcgatgcaggagcaaacataatattaacagcatcttatcagg

SEQ ID NO: 204255 - DNA, 279 bp, Glycine max
cgttctgagtattctgatcgctccctgagagagctcgtcgcggcggttgcagaagaagattgcaagatgaagttcaacatcgcgaatcccaccactggatgccagaagaagctcgagatcgacgacgatctgaaactgcgagcattttgggacaagaggatctcacaggaggtcatcggagatgcactcggtgaggtgatttaagggctatgtcttcaaaattaccggaggttgtgacaaacaaggatttccaatgaagcagggagtgctgactcctgg

SEQ ID NO: 204256 - DNA, 268 bp, Glycine max
caaagatggcgtcttcataaacgcctttcttctccgtttccgtttcctcgttcgaattcgctttttgatctgcgaaaatgagagagtgcatctcgatccacattggtcaggctggtatccaggtcggaaatgcttgctgggagctctactgcctcgagcacggcatcgggcccgatgggcaaatgccaagtgacaagacagttggcggtggtgatgatgctttcaatactttcttcagcgagactggtgctggaaagcacgtgccacg

SEQ ID NO: 204257 - DNA, 269 bp, Glycine max
tgctggactccacaagaaggagcttgtctgagaaggaaacagatagaagctttgggttgagaaatttcaggtacattgagaccatcaaagaagctttggaaagggaatgcccaggagttgtttcctgtgctgatatcctcgttctctctgccagagatggcattgtttcgctaggaggtccccatatccctcttaaaacaggaagaagggatggtagaaggagcagagccgatgtggtagagcagttcctcccagaccacaatgaatcc

SEQ ID NO: 204258 - DNA, 230 bp, Glycine max
catgcattcaagaagattaggttgagagctgaagatgtgcaagggaagaatgttctgacaaatttctggggaatggatttcacaacagacaagctgaggtcattggtacgaaaatggcaaactcttattgaagcccatgtggatgtgaagacaactgataattacacattgaggatgttttgcattggatttaccaagagaagagctaaccaggtgaagagaactgttat

SEQ ID NO: 204259 - DNA, 267 bp, Glycine max
ttccaatatattccattctctctgtgtatttccctacctctcccttcaagatgcagatcttcgtcaagaccctcaccggcaagaccatcacccttgaggtggaaagctctgacaccatcgacaacgtcaaggccaagatccaggacaaggaaggaatccccccggaccagcaacgtctcattttcgccggaaagcaacttgaggacggacgtacccttgctgactacaacatccagaagggaggaaccttacactggtccccgtctc

SEQ ID NO: 204260 - DNA, 267 bp, Glycine max
ctcatcatcatccatggcggttcctccgtcggtcgccgccgctccggcgtcgctctacgtcggcgacctccaccccaacgtctccgacaaccacctcgtcgacgcattctccgacttcgagagcctcgcgtctgttcgcgtctgcaaagactcctccaccggcaaatccctctgttacggttacgtcaacttcgtttcccctcaagacgcaattcgtgcaatcgagctgaaaaataactccacgctgaatgggaaagcgatgagggt

SEQ ID NO: 204261 - DNA, 277 bp, Glycine max
ggcgcttgctttgttcaacgcgatgctactactcttagttagctagcgctggcaatgctcgtggcaggtgcttggtcattaacggatgctacctggttgatcctgccagtagtcatatgcttgtctcaaagattaagccatgcatgtgtaagtatgaactaattcagactgtgaaactgcgaatggctcattaaatcagttatagtttgtttgatggtatctactactcggataaccgtagtaattctagagctaatacgtgcaacaaaccccgact

SEQ ID NO: 204262 - DNA, 271 bp, Glycine max
  unsure (1)..(271): unsure at all n locations
gaggatgggtagacgaccctggctgcccnanaganatcaacaaaggtgcttggtctcgagaagaagatgaaaccctctccaaatatgtttccatccatggagaaggaaaatggcagaaggttgcccaaaatgcagggttaaagcgatgtggaaagagttgcagacaaagatggttgaattatctcaagcccggtataaaaagaggccacatctctgtggatgaagaggatatgattataagacttcatcgtcttcttggtaacagatgggc

SEQ ID NO: 204263 - DNA, 267 bp, Glycine max
gcttgtgtctctcacgatccattggtgatatggatgttggtgaatttattgtccctgtaccacatgtaaagcaagtgaagctttccactgctggaggcaggattattctcagcagtgatggtgtctgggatgctctaagtgcagaaatggcccttgattgctgtcgtggcatgccacctgaggctgcagcaacccatattgtgaaagaatctgtgcaagcaaagggacttagagatgacacaacctgcattgttattgacatattac

SEQ ID NO: 204264 - DNA, 270 bp, Glycine max
acttctcttctctcacaaattcgtcaatcaatctcccaccgagttcccaacatggctgaatcggtggagcttccgagtcgcttggcgattctcccctttcggaacaaggtcctcttgcccggcgccataatcagaatccgctgcacttcccccaccagtgtgaagttggtggaacaagagctttggcagcgagaagagaaggggttgattggcatcctgccggtgcgtgatgttgttgaaattaagccagtgggtcccactgtatctgaa

SEQ ID NO: 204265 - DNA, 265 bp, Glycine max
tagagagcaaggtggggtatttgcaacactgatgccaaaagaagagtattttcatgaagctttatacacatttgatataggccaaaatgatcttacagctggcttttttggtaacatgaccctacagcaatttaatgctactatacctgatataatcaaaagtttcacatcaaatataaagaacatatacaacatgggggccagatcattttggatacacaacacaggacccattggttgcctccctttaattttggccaatttt

SEQ ID NO: 204266 - DNA, 256 bp, Glycine max
aagctctttcgacgattcggtcactcacgctcgagccgctcttcttctcttgcggactgggttttagcgcagcactgtctagatttaaggaagatgggtaaggacaaggttcacatcagtattgtggtcattggccatgtcgactctgggaaatccactaccactggtcacctgatttacaagcttggaggcattgacaagcgtgttattgcgaggtttgagaaggaagctgctgagatgaacaagaggtctttca

SEQ ID NO: 204267 - DNA, 240 bp, Glycine max
tggagtagggagtgagtaattttgaaaataaagaggaaagcttgaagcagaagagagagatgtcatcatcttcagacctggacaggcaaatagagcagttgaagaggtgtgagcctcttaaggagtctgaagtgaaggtgctctgcctcaaagccatggaaatcctcgtcgaagagagcaacgttcaaagggtcgacgctcctgtcaccatatgtggtgatattcacggtcagttttatg

SEQ ID NO: 204268 - DNA, 264 bp, Glycine max
agtgccggcgcgcgctgaagtttgctaggttcatgagcaggttcgggaagagttaccgaagcgaggaagagatgagggagaggtacgagatattctcgcaaaacctcaggttcatccgctcccacaacaagaaccgcttgccctacactctctctgttaatcattttgctgattggacttgggaggagttcaaaagacacagactaggcgctgcccaaaattgctctgccactcttaacggcaaccacaagctcactgatgctg

SEQ ID NO: 204269 - DNA, 165 bp, Glycine max
cgaaattgggagctgacggcaccatggactggagtgcaaatccaagtggcggtaaaatacataacaggtgagttggacatggtatacacctcgctaggcatgaaggagtatgtccacagtggaggtttcaaacaagatgtgcccaatttacaagtggttgtgcag

SEQ ID NO: 204270 - DNA, 278 bp, Glycine max
ccggaagcacttgatcaagactcgagtgaacaaaaaaaaaatgatgggtacccttaaggtgtccaacagtagtttatacatattttcgaagttcctagtaatttgtatggtgatgatgatatctttggttgattcaagttattccttgtgtgattttgaggcaatcttcaattttggtgattcgaattcagatacgggtgggtttcatacaagctttcctgcacagcctgctccctatggaatgacttacttcaaaaaaccagtggggcgtgcttctg

SEQ ID NO: 204271 - DNA, 271 bp, Glycine max
cagagagaagcgtcttaataaacgctcttctctgaaaaacctgatttcttctcttcttctcttctctttcgtttcgatcttcgatctctgaaaatgagagagtgcatttcaatccacatcggtcaggccggtattcaggtcggaaacgcctgctgggagctctactgcctcgaacacggcattcagcctgatgggcagatgccaagtgataagactgttggtggaggtgatgatgctttcaacacttcttcagtgaactggggctggaaac

SEQ ID NO: 204272 - DNA, 266 bp, Glycine max
tgccattcgtattgtcgcagagaaagaaaaccctagctcaccgtttcaagatgcaaatcttcgttaagaccctcactggtaagaccatcactctcgaagtcgagagttcagataccatagacaatgtaaaggccaaaattcaagacaaggaagggatcccaccagatcagcaacggctcatttttgctggcaagcagcttgaggatggacgtacccttgctgattataacatccaaaaggagtccactctccacttggttctccgt

SEQ ID NO: 204273 - DNA, 267 bp, Glycine max
cgacgctttcttggaaaaatacggtatcaagttgaacgatgcgattctcgccgaggataaacacaaacctatgtatgaagaattggctaacaatcctaatgtggagtacattgctggaggtgctactcagaattcaatcagggttgctcagtggatgcttcaagcaccaggtgccacaagttatataggttgcataggaaaggacaaatttggagaggagatgaagaagaaatgtacactagatggtgtaaaggttaactattatga

SEQ ID NO: 204274 - DNA, 262 bp, Glycine max
gcaaggcgaacttctaccgtctgatgacagtgttttctggaattctctcggtggtaagatggttaggggaagtttccacatggaagcatcctataacaacagtgctggtgcacattctttttctgatgcttgtgtgtttccctgaacttatactgccaaccgtgtttctatacatgtttgtcatcggcatgtggaattggaggttccggccaaggtgccctcctcacatgaacatcagactctcctatgcagaaagggtgac

SEQ ID NO: 204275 - DNA, 262 bp, Glycine max
tctttttgtttctgttttaatggagagaaccaaatatggcaagagatttcaaggtaaggtagccattgtgacagcttccacccttggaattggctttagcatagccgagaggcttggtttggagggtgcatctgttgtcatctcttctcgcaaacagaaaaatgttgatgaggctgctggtaaactgagagctaaaggaatcgaagtattggcggttgtttgccacgtttcaaatgcgcaacaaaggaagaatttgatagac

SEQ ID NO: 204276 - DNA, 257 bp, Glycine max
taatattcgtggaagtcatgtggcctactgtcctgttgttcatgcatttgctattgtgacatccaattctgctttcatttatgtggacaaacaaaaggtttctgttgaggtacaaactcatttagtggagaatggaattgaaattcaagagtatacagccgtaagctctgatgcgacattgcttgcaactgatgagctagatgctgtatctactgccaaggctgctttagccgaaacagaggcaagaaaatcccaat

SEQ ID NO: 204277 - DNA, 272 bp, Glycine max
tggaaacttgaagaggttccaattcagagaactccagattgctactaaaaacttcagcagcaaaaacatactgggaaaaggtggttttggaaatgtctacaaaggaattctccctgatggcactcttgtagctgtcaagaggcttaaagatggcaatgccattggtggagagattcaatttcagaccgaagttgaaatgatcagcctggcagtgcaccgaaacctcctcagactgtatggattttgcatgacaccatcggaaaggcttttgg

SEQ ID NO: 204278 - DNA, 272 bp, Glycine max
gtttgatcctggctcagaaggaacgctagctatatgcttaacacatgcaagtcgaacgttgttttcggggagctgggcagaaggaaaagaggctcctagcgtgaaggttgcttgtctcgcccaggaggtgggaacagttgaaaacaaagtggcgaacgggtgcgtaatgcgtgggaatctgccgaacagttcgggccaaatcctgaagaaagctaaaaagcgctgtttgatgagcctgcgtagtattaggtagttggtcaggtaaaggctga

SEQ ID NO: 204279 - DNA, 266 bp, Glycine max
gcttgttcttaatttgcctataacacctcgcaggtctccgccgtggtgttcctgatcccaagatcaggatttatgatgttggtatgaagaagaagggtgttgatgagtttcctttctgtgtccaactggttagttgggagaaggaaaatgtttcaagtgaggccctggaagctgctcgcattgcttgcaacaagtacatggccaaatttgctggaaaggatgctttccacttgagagtcagggtgcaccattccatgttcttagga

SEQ ID NO: 204280 - DNA, 266 bp, Glycine max
tttccttctctagcacaatttacaatctcaatggctggaatttgctgtggtgttgttggagaaggtgacactccggctccactcgagcccactcctcgcccctccaggcgccggagtttggacatcttacctttaaaatatatcgccgacatgcccatgccgccgccggaggctttacggaagcgtcccaagctcaacctcagggactgcgataacgcaattgaaaattgcgacgaatccactggacacaaggtgacgaagaagga

SEQ ID NO: 204281 - DNA, 263 bp, Glycine max
gctcccaagggtttaatctttttggctgtgttatgcttctcagcactgtcactgagtcgttgtcttgcggaggataatggacttgttatgaacttctacaaggaatcatgccctcaggctgaagacatcatcaaagaacaagtcaagcttctctacaagcgccacaagaacactgctttctcctggctcagaaacatcttccatgactgtgctgttcagagttgtgatgcttcactgttgctggactccacaagaaggagctt

SEQ ID NO: 204282 - DNA, 262 bp, Glycine max
ccttactacgtcttcatgcagaacagaaacctcgtccctctcgaaaacaccctcttcaaacccctccctttctccaaacaaatgctcgaccccaacactcttcttcactacaccaacctcctcgacgccatgatcgacgctgcttacttctccatgaagaatctcaacgtcactgatgtaaccgttctcgtcaccgaaaccggttggccttctagaggggactctaaggagccctatgcaactccttccaacgcgctgacgt

SEQ ID NO: 204283 - DNA, 188 bp, Glycine max
ctacactccatgtcccttaaatgtgcaattgacttaagcataccagacatcatacacaagtatggccaacccatgccactctcacaactcattgcttcactaccaatccacccatccaagacttgctacatccatcgcttgatgcgactctttactcattccggtttcttctctcggcacgatttggt

SEQ ID NO: 204284 - DNA, 266 bp, Glycine max
gagaaagtgaaagtgtctgagagtgtgtgtgtgacttatggagtccaattcagagttcgacgtgattatcatcggagctggcgtcatgggcagctccaccgcctaccacgccaccaaacgcggccttaaaacccttctcctggaacagttcgacttcctccaccactgtggctcctcccacggcgaatcccgcaccatccgcctcacctatccccaccactactactaccctttagtcatggactcttaccgcctctggcaagagg

SEQ ID NO: 204285 - DNA, 177 bp, Glycine max
cggctcgagagatggaaagcgcatcagagcttgtggaattcccgttgttgctgacaccaatcgattccaactacagagcttgcaccattccttacagattcccctccgataaccctcgcaagcccactcccaccgaaatctcttggattgatctcttcctcaactcaatcccctctt

SEQ ID NO: 204286 - DNA, 262 bp, Glycine max
aacgaatcgaaaaaagaaagatcatggcgatggcaaacttggctcgacggaagggttacgccgtcgttttgtcgtcgaggtcgtcgctttgtctgacaaggtggagggggttcgcgtccggatctgacgaaaacgacgtcgtggtcatcggcggcggtcccggcggctacgtggcggccattaaagcggcgcagctgggtctgaaaaccacttgcatcgaaaaacgtggcactctcggcggtacctgcctcaacgtcggatg

SEQ ID NO: 204287 - DNA, 267 bp, Glycine max
gttttacattgggcttagacaaaagagggcaactgggcaggaatattctgaacttttgcacgagttcatgactgctgtcaagcaaaactacggagaaaaagttcttgttcagtttgaagattttgcaaaccacaatgcttttgagttgcttgcaaaatatggcacaactcatcttgttttcaacgatgatattcaggggactgcatctgttgttcttgctggggttgtggcagccttgaagctcatggaggtactctggctgaccac

SEQ ID NO: 204288 - DNA, 261 bp, Glycine max
ctcgagcgggtgcggctgctctgttgagccgcgccatggaatcgagagctccaagtgggccatttttggtaagcagaactggcgatgcgggatgaaccggaagctgggttacggtgcccaactgcgcgctaacctagaccccacaaagggtgttggtcgattaagacagcaggacggtggtcatggaagtcgaaatccgctaaggagtgtgtaacaactcacctgccgaatcaactagccccgaaaatggatggcgctaaa

SEQ ID NO: 204289 - DNA, 258 bp, Glycine max
gaatggagtttcaagggttaccggaaggttgcattgctagtatactctctcgcactacgccggcggacgtgtgtaggttttccgtcgtatcaaagattttccgttcggccgctgaatcggacgctgtgtggaaacgttttctcccttccgattaccattccatcatttcccagtctccttcgcctctcaactatccttccaagaaggagctctatctcgctctctcggatcgccctatcatcatcgatcagggtaaaa

SEQ ID NO: 204290 - DNA, 264 bp, Glycine max
ctaacagtaaagaagtttatatcgtgtacatgggagctgcagattcaacaaaagcttctcttaaaaatgagcacgctcagattctgaattcagtgctaagaaggaatgagaatgccctagtacggaactacaagcatggtttctctgggttcgcagctcgtctatcaaaagaggaggcaaactcaattgctcagaaacctggtgtggtgtctgttttccctgaccccattctgaagctccacactacacgttcatgggatttcc

SEQ ID NO: 204291 - DNA, 263 bp, Glycine max
aggtagttgacttgcttactcgttagagtaggggtcgcgagagagcagagcgtaccgccctgccatagtcgcgagtctgtttatagtcgcgactgttgtcatagtcaacaaggttgaaacttccaggaaaaaacttcgaattgggagggcgatcctcccggtgaactgaccgtaccccaaaccgacacaggtgaacaagtagagtacactagggcgcttgagagaaccatgtcgaaggaactcggcaaaatgaccccgtaact

SEQ ID NO: 204292 - DNA, 184 bp, Glycine max
cgctccgcaccagtttcaccgcacgaatatcttgttgtttggagcgatccgagaaaaactctgtaaacatgttggtttaccaggacctccttacaggtgatgagcttctctctgactccttccgttacaaggaaattgagaatggaatgctgtgggaagttgaggggaagtgggttgttaaagg

SEQ ID NO: 204293 - DNA, 220 bp, Glycine max
ctaggttgaaaatagtttggttttgtagtaagtgaggtgaggtgccaaaatggtgaagataactcttggtactttcgatgactcttttggtgttgcctctcttaaggcttatttggcagagttccatgcaactctgattttcgtgttcgctggtgttggttcagccatcgcttacaacgagcttacaaaagatgcagccttggatccaacggggctggtg

SEQ ID NO: 204294 - DNA, 194 bp, Glycine max
catggataggagatgacacatcagaggttccaaaaggaagaaagccctcactatacaacataatctcaggaacttccatggctactccacatgtttcagggcttgtatgcagtgtgaaaacacagaacccctcttggagtgcctctgcaatcaaatctgccatcatgacttctgcaattcaaaatgacaacttg

SEQ ID NO: 204295 - DNA, 192 bp, Glycine max
gaccaaactccatttctcactcgccgtcgtctcttccgtctagggtttctcctcttcacaaaaatggttgccgcaaaaaaaactaagaagacccatgagagcatcaacaacaggctcgctctcgtcatgaagagtggcaaattcaccctcggttacaagaccgttctcaaatctcttaggagctccaaaggg

SEQ ID NO: 204296 - DNA, 262 bp, Glycine max
ctctggttcagctagtcagaactttggccttctgcaggaattctatcagacaacactgcaagcccttgaagaagcaaagaatgagagattatggtttaagacaaatcttaagctttgtaagatcttctttgatattggggaatatgggcggatgagtaagatattgaaggaacttcacaaatcttgtcaaagggaagatggtacagatgatcacaagaaaggaacccaacttttggaggtttatgcaatagaaattcaaatg

SEQ ID NO: 204297 - DNA, 236 bp, Glycine max
gaaacttaatcgatcatcacttcacttcactaatacatcatggcagacgagacccagaacaagtatgagagctctgaggttgaggtccaggatcgtggtgtttttgactttctcggtaagaaaaaggatgaagaagacaagcctcatcctcaggaggaggtcatcgccaccgagtttcaaaaagtcactgtctcagaccaaggagagaacaagcacagcctcttagaaaagcttca

SEQ ID NO: 204298 - DNA, 261 bp, Glycine max
tgcgataccggatgatggggaggagggtgcggcggatttggataagagatttgggttctccaaggagttcactagtaggttggaggttggtgaagaagtgggtcgagggcattttgggtatacgtgttctgctaagttcaagaagggtgagctcaagggtcaacaagtagctgttaaggtcataccaaaagcaaagatgacaacagcaattgctattgaagatgtgagaagggaggtgaaaatactgcgagctttgaatgg

SEQ ID NO: 204299 - DNA, 234 bp, Glycine max
cgagattccccctaaacccgtttgcgttgttgtttgcgaagaaatggcgactaagaggagcgtgggaacgttgaaggagggtgatttgaaagggaagagggtgttcgtgagggtcgatctgaacgtgcctttggatgacaaccttaacatcaccgatgacactagagtccgtgctgctgttcccaccatcaagtacttaactggtcatggagccaaagtgatcctttctagcca

SEQ ID NO: 204300 - DNA, 245 bp, Glycine max
cacaagattgagggggcccctaaccaaacctaatagcttcagaggatccatcatgcccactcaccatgcttccgccgccatttttggtattataggtaacatgatttctgtgatggtgtacttggctccggtgccaacgttttaccagatatacaaaaagaaatgcacggacggtttccactcgctgccatacttgttgtcattaatgagttctatgctttggttatactacgccttcctcaaaa

SEQ ID NO: 204301 - DNA, 287 bp, Glycine max
ttcaaagccaaagttgatgaatttcatcaaccaggaacaaggatatcatctggaacgaaaattccttcaccggatatatttggaaaggccctttacacattctatattggccaaaatgatttcacttccaaaatagcagccactggtggtattgacacagtaaggggaacccttcctcacatcgttttacaaattaatgctgctatcaaggagctatatgcacaaggggggcgtagatttatggtattcaatcttggtcctgtgggatgctatcctggatacttggt

SEQ ID NO: 204302 - DNA, 287 bp, Glycine max
ctcgagccgcagaatcttgttgcatgggccagacccttgttcaaagatcgaagaaaattttcgcaaatggctgatccaatgctccaaggtcaatatcctccaagagggctattccaggcccttgctgttgcagcaatgtgtgttcaggagcaggccaatatgcgtccagttatagctgatgttgtcacagctttgagttaccttgcttcacaaaaatatgacccgaatactcagacattacaaagctctcgccttgctcctggtactcctccaagatccaagagggg

SEQ ID NO: 204303 - DNA, 199 bp, Glycine max
ctcgagccgcagaatcttgttgcatgggccagacccttgttcaaagatcgaagaaaattttcgcaaatggctgatccaatgctccaaggtcaatatcctccaagagggctattccaggcccttgctgttgcagcaatgtgtgttcaggagcaggccaatatgcgtccagttatagctgatgttgtcacagctttgagtt

SEQ ID NO: 204304 - DNA, 280 bp, Glycine max
acactaggtatgtggatgctattttgaccataccaaagggcactttgtttcccatgtgtggaatgaacttggcctttgatcgcgatctcataggagcagcaatgtactttggtctcatgggtgatggtcagcctattggacgctacgacgacatgtgggcaggctggtgctgcaaggtaatctgtgatcacttgggattgggaatcaagactggtctgccctatatctatcacagcaaggccagcaacccatttgtgaacttgaggaaagagtacaaagg

SEQ ID NO: 204305 - DNA, 233 bp, Glycine max
ctgtcttcaacctcttaccgtgcgaatctctcaattcatcaaaactaacaacatcatcaccatcgtcgcaccgaaatcaatcgccacaacctcggtatctcagattcgacgcgccaaatcatgtcgaaggcgcgtgtctacaccgatgtcaatgtccttcgccccaaggagtattcggattacgagtctctcacccttcaatggggtgatcaagatgattatgaggttgtgcg

SEQ ID NO: 204306 - DNA, 275 bp, Glycine max
cggcgattgagagggagagtttgagaatggtgaagaaggaggagttcttgagagaaaacggcgacaacgaaaaccgttccgtctcgcggagtgacttccctcccaacttcatcttcggagttgccacttctgcatatcagatagaaggtgcttgtaaggagggtggtagaggtcctagcatatgggatgcctttacacacacggaaggaaaaattcttgacaaaagcaatggtgatgttgcagttaatcattatcatcggtacatggaagatatt

SEQ ID NO: 204307 - DNA, 209 bp, Glycine max
atatttttcttctctcccttctttctctctctctctctcgaccattctcttcttcttctttttcttctcctctctctctctcccctccgccatggctgaggataaggagatgtctacctctgtcatcaatgggaatgattccctaactggtcacatcatatctacaactattggaggaaaaaatggggaccacaaacagactattagct

SEQ ID NO: 204308 - DNA, 282 bp, Glycine max
cacaatgtcagtaaccaaattcaatgccatggtgtccggtttgttccagttgggaagttcatatgaatggattgttaccaaaaaagcaggtcgggcatcagagcctgacctattagctgccgaagaacgggattcaaaggcaatgagtctccaacttcacagagggacttctgatagtggactttctgagcttaccaaattaaggaatgccaagaaacagtgcccgtgaaaggaaattgaccaagttatattagaaagagcttgcccttgcattcttactgc

SEQ ID NO: 204309 - DNA, 279 bp, Glycine max
gagaggatttgggattgggaaggcgagggattgcgctgcgtctcttcctcttctctttcgattcatccctcattcataatcttccaatccaacaacctcagcctcacactcacacatacacacatctgaacgcgtatcgtccctcccatggcttcaaagcgcatcctcaaggagctcaaggacttgcagaaagacccaccaacttcttgcagcgctggtccagtagctgaggacatgttccattggcaagcaacgattatgggtcctgctgatagtcct

SEQ ID NO: 204310 - DNA, 186 bp, Glycine max
ctcttcttctcttgtggtctgggttttagcgcagcttcttctagatttaaggaagatgggtaaggaaaaggttcacatcagtattgtggttattggccatgttgactctgggaattccactaccactggccacctgatctacaagcttggaggcattgacaagcgtgttattgagagatttgagaa

SEQ ID NO: 204311 - DNA, 277 bp, Glycine max
gttccatgcgtctattagtagtggcattgttgtgtgcatttgctatgcatgcaggtttttcagtctcttatgctcagcttactcctacgttctacagagaaacatgtccaaatctgttccctattgtgtttggagtaatcttcgatgcttctttcaccgacccccaatctggggcaagtctcatgaggcttcattttcatgattgctttgttcaaggttgtgatggatcagttttgctgaacaacactgatacaatagaaagcgagcaagatgcact

SEQ ID NO: 204312 - DNA, 274 bp, Glycine max
tagaaaaggaaaataaagaaattagcgtgaaaaatgttgggtgtgttcagcagctccatagtgtcgccgccggaggagctcgttgccgccgagcgccgtacaccgtcgccgaagatgacggcggcggcgctgcggaagtggttcgaggagaagaacccctccgcagtgtcggtggaggtcggagagcatgtccagctcgcttatacccaccagaacgagtcgccgtttcagcccagatcctttgctgtgaaggatactgtattctgcgtgtttg

SEQ ID NO: 204313 - DNA, 247 bp, Glycine max
cctcgagccgattcggctcgaggcaaggtgcagcatgctaatattactgcagcaaaggctgactctgatataattcgtacacccttgggacccaggtccatgttaaaaatgctacttgatgcttcaggaggcattgtggtgacaaatgatggaaatgctatcttgcgtgaaatagatcttgctcatcctgctgcaaagtctatgattgaattgagtcgcacccaagatgaagaagttggagatggac

SEQ ID NO: 204314 - DNA, 158 bp, Glycine max
ctgctcgtagggtttctccacctagagggaaatggctcccaaaccgcctagtacgggtctgtttgttggactgaacaagggtcacgtcgtcaccaagaaggaattgcctccacgccctctagatcgtaaggggaaaacaagcaagagggtgcactttg

SEQ ID NO: 204315 - DNA, 158 bp, Glycine max
cttgattatcgacatggtactggtcatggaattgggtcctatcagaatgttcatgaaggacctcacttaatcagtttcagacctcaggctcgaaatgtaccattgcaatcttcaatgactgttacagatgaacctggttactatgaggatggagagtt

SEQ ID NO: 204316 - DNA, 270 bp, Glycine max
tatttgcttcccaaagaaagagaaaataataagcaatgggtagccttgaagcggaaagaacaacagtaggattggcagcaagagacccttcagggattctctccccatacacctacaatctaagaaacacaggccctgatgatgtttacataaaagttcactactgtggaatttgccattctgatctccaccagattaaaaatgatcttggcatgtccaactatcccatggtcccaggacataaagtgtttggtgaggactgaaggtggg

SEQ ID NO: 204317 - DNA, 272 bp, Glycine max
ctcgagccgcttaaatgcaaagcttaatagaacaaaaactgaaaacccctggttcgttttaggtggctcatatgctggagcactcagtgcatggttccgtctcaagtttccccatttaacatgtggaagtctggcaagttctgcagttgttcttgctgtttataacttcacagaatatgatcacagattggtgagtcagccagtgctgaatgtaaagcagtattacaagaaactactcaactcattgagcacaaacttgcaaccaatggaaa

SEQ ID NO: 204318 - DNA, 274 bp, Glycine max
caaactcaaagaagaaagaagaaaatccagcgaaagtaaaaccagcatccgaaaaagatgagcagcatcggaacaggttacgatctctccgtcaccactttctcccccgatggccgtgttttccagatcgagtatgctgccaaagccgtcgataacagcgggactgttattgggatcaagtgcaaagatggggttgtgttgggcgttgagaagcttattccgtcgaaaatgatgcttccgggttccaatagaagaatacactccgttcatcgtc

SEQ ID NO: 204319 - DNA, 274 bp, Glycine max
ctcactcacacacacacacactctctttccatgggtccgtttcgtaaacccttccttgcatttctctcggttgttctatttctgggtctctatgaggcagcagcagaacagactcagactcacaagagtacttacattgtacacgtggcgaaatcggagatgcccgagagcttcgagcaccacgctgtgtggtatgagtcgtcactgaagaccgtgtctgactcggcggagatgatttacacctacgacaacgccatccacggctacgcgacga

SEQ ID NO: 204320 - DNA, 223 bp, Glycine max
gtaaaaaaatggaggaatcatcaacaacatgcgtgttgtgcgagaagagggcaatgatgctctgcgactcggaccaggctaagctatgctgggaatgcgacgagaaagtccacagcgccaatttcttggtcgcgaaacattctagggttcttttatgtcgtttgtgtcactccccgactccgtggaaggcttcggggatgaaactcacgcccactgtgtcgtt

SEQ ID NO: 204321 - DNA, 257 bp, Glycine max
gcgaagagaatggctcccaagggtttaatctttttggctgtgttatgcttctcagcactgtcactgagtcgttgtcttgcggaggataatggacttgttatgaacttctacaaggaatcatgccctcaggctgaagacatcatcaaagaacaagtcaagcttctctacaagcgccacaagaacactgctttctcctgcctaagaaacatctcccatgactgtgctgttcagagttgtgatgcttcactgttgctgga

SEQ ID NO: 204322 - DNA, 267 bp, Glycine max
gaataaacgacattcattcatctatggctacccttattgctcccagcaaccactctccccaagaagacgctgaggctctcagaaaggcttttgaaggatgggggactgatgagaaaactgtcatagtaatattgggtcatagaactgtttatcagaggcagcaaatcagaagagtctatgaggaaattttccaggaggatcttgtgaaacgcctagagtctgagatcaaaggagactttgagaaagccgtgtaccgatggatactag

SEQ ID NO: 204323 - DNA, 267 bp, Glycine max
ctcgagccgattttctattttcttctctcatggcttcagattccaaaaaggatttccctgatcatgacaaagctggaacagcagagaataaagcatccaaagatgaaacgtcatctaaagattctccagcagcacaaagagctactacagctacttctggacctgcaactggttttccaggcaacccttttgatttctctgcaatgtctggcctgctcaatgatccaagtatcaaggaattggctgaacagatagcaaaagatccat

SEQ ID NO: 204324 - DNA, 266 bp, Glycine max
ccctaatccctatttttcttcctcagtagtgtcatttacgcttctcttctctgcagcaactatgcctaaccctaaggtcttcttcgacatgaccatcggcggtcaatctgctggccgcatcgtgatggagctctacgccgacgtcactccccgcaccgccgagaacttccgcgcgctttgcaccggcgagaagggcgtagggcggagcggcaagcccctccactacaagggctcgtccttccaccgcgtgatcccgagtttcatgt

SEQ ID NO: 204325 - DNA, 265 bp, Glycine max
ctcactcactctgcactcaccactgccacacttcaatcgcactaatggctgtcaccttctcagatctacacaccgaagagggcatcaaatccctcgatcaattcctttctgggaaaacctatatttctggggatcagttgacaaaggatgatattaaagtgtatgcagctgttgttgaaaagccaggggacacttttcctaatgctgccaagtggtacgatgctgtctcttctcaacttgctccaagctttcctggccacgctca

SEQ ID NO: 204326 - DNA, 265 bp, Glycine max
cagagagagagataaactgagagaaattcgcaaaccctaatttcggaaagatcggcgatggctgcctccaaggatcgcgagaacttcgtctacatcgccaagctcgccgaacaggccgagcgatacgaagagatggtggaatcaatgaagaacgttgcgaatctcgacgttgaactgactgtggaggagcggaatttactttctgttgggtacaagaatgtgattggtgctcggagacatcgtggaggatcctgtcttccattga

SEQ ID NO: 204327 - DNA, 274 bp, Glycine max
gagagagagagatagagagagagaaatggcttgcaggcaattgtgggcttcaagagctgcctcttacctgaggatctctgtgtttcacagaggcttttctaatgttgttaaagatttgaagtatgctgattctcatgagtgggtgaaagttgatgaaatttctgaaaccgtcggcataactgatcatgcccaagatcatttaggtgatgttgtatatgttgaattgccagaagtgggagcagctgtaacacaaggaggtagttttggtgcagtt

SEQ ID NO: 204328 - DNA, 124 bp, Glycine max
attctctctgtgtatttccctacctctcccttcaagatgcagatcttcgtcaagaccctcaccggcaagaccatcacccttgaggtggaaagctctgacaccatcgacaacgtcaaggccaaga

SEQ ID NO: 204329 - DNA, 269 bp, Glycine max
  unsure (1)..(269): unsure at all n locations
ctctgagcgtgananagagaaggggaagaaagagagagagtgatnngaaggggaagagtggagttgaagagaattgagaacaagatcaacaggcaagtgacctttgcaaaacgaaggaacgggcttttgaagaaagcttatgagctttccgttcttgtgatgccgaggttgctctcatnatcttccccantgggggaagcctncgggttttgcagcggttcaacctggcncaaaaccctggagggttcccgaaatgccctttggggccc

SEQ ID NO: 204330 - DNA, 268 bp, Glycine max
ttggaagccaaggcgacctgacatgcttattgacccctttgggataggaaaaattgttcaggatggtctcgtgttccgtgaaaacttttctattagatcatatgagattggtgctgatcgaaccgcatctatagaaacagtaatgaaccatttgcaagaaactgacttaatcatgttaaaagtgctgggcttcttggtgatggcttcggttccacgccagaaatgtgcaaaaagaacttgatatgggtagttactcggatgcaggttg

SEQ ID NO: 204331 - DNA, 186 bp, Glycine max
atcgagccgaatcggctcgagtgcgattctagatatggaaaaaaatttgtatagaaagtatatctgattggatgggaatcaatagagaaatactaaatcgttccatatcgaatccagaattttggttcttttcaaaatttgtgatattttatgacgcatataggggtaactcgcaggttataccaa

SEQ ID NO: 204332 - DNA, 264 bp, Glycine max
cttcaagtgagggtgagagtgacacaaatctagagatagcactagtactctaaaagtctattatattcttcaaaatatgaccatgcatcgcgagtcttgggcttttgtcttcggcgttatgggcaacatcatctcctttggagtgttccttgctccattgccaaccttttaccaaatctacaagaagaaatccactgaaggtttccagtcacttccttatgttgttgcactgttcagtgcaatgctttggatttactagctttc

SEQ ID NO: 204333 - DNA, 266 bp, Glycine max
gcgactcacactggtcttcgcttctcattcatcatttctcacctaaccttctcttcctctcagtctcagatcagaaacctccgccagccatggcagcgttccagaagatcaaggtcgtcaaccccatcgtcgagatggacggagatgaaatgactagggttatctggaagtcaatcaaggacaagctcattttgcccttcttggagttggacatcaagtattatgacttaggccttccttaccgtgatgagaccgatgataaagtt

SEQ ID NO: 204334 - DNA, 257 bp, Glycine max
cgcgggtagggtttcgacgtgcttcttcttcgtgtttgctctttctctccttcttccttttcagatctccgctgaggaatcatcggagaaagagttcgtactcacattggatcactctaactttcatgacactgtcagcaagcacgatttcatcgtcgtcgagttctacgctccatggtgtggccactgtaagaagcttgctcccgagtatgagaaagctgcttctatcttgagtagtcatgatcctccgggtgttt

SEQ ID NO: 204335 - DNA, 267 bp, Glycine max
ccctacctctcccttcaagatgcagatcttcgtcaataccctcaccggcaagaccatcacccttgaggtggaaagctctgacaccatcgacaacgtcaaggccaagatccaggacaaggaaggaatccccccggaccagcaacgtctcattttcgccggaaagcaacttgaggacggccgtacccttgctgactacaacattcagaaggagagtactcttcacctcgtcctccgtctccgtggtggcatgcagatcttcgttaagac

SEQ ID NO: 204336 - DNA, 185 bp, Glycine max
tgaggagggtacgccgtgagttcaaggctaacaagatctccgaggaagagtatgttaagtcaattaaggaggaaattcgcaaagttgttgaacttcaagaagagcttgatattgatgttcttgttcatggagacccagggggaattgatatggttgagtacttcggtgagcaattgtcaggcttt

SEQ ID NO: 204337 - DNA, 264 bp, Glycine max
atcgaatgggcttgactgaccgagatattgttgcactatctggaggacatacactggggagagcacatccagagagatcagggtttgatggcccttggacggaggaccctctgaagtttgataactcatactttgtggaacttttgaaagaagattctgctgggctgcttaaacttccaacagacaaggctttattggaggatgctgaatttcgctgttatgttgagctatgatgcaaggatgaggatgcattttttcgagatt

SEQ ID NO: 204338 - DNA, 263 bp, Glycine max
ctcaaatttctcagtctccggaactcgtttctaccttcacttcgcacatctcgaaccctctctttccggcaactaggttaaagttcatcaatggcaggtcgtggcaaaaccctaggatccagcgccgccaagaaggccacctcaaggagcagcaaagccggcctccaattccccgtcggccgtatcgcccgtttcctcaaggccggaaaatacgccgagcgcgtcggcgccggtgctcccgtttacctcgccgctgtcctcga

SEQ ID NO: 204339 - DNA, 260 bp, Glycine max
actcacacacacacacactctctttccatgggtccgtttcgtaaacccttccttgcatttctctcggttgttctatttctgggtctctatgaggcagcagcagaacagactcagactcacaagagtagttacattgtacacgtggcgaaatcggagatgcccgagagcttcgagcaccacgctgtgtggtatgagtcgtcactgaagacggtgtctgactcgggggagatgatttacacctacgacaacgccatcaacgg

SEQ ID NO: 204340 - DNA, 253 bp, Glycine max
ctactaagcatagtgtgtaagaaagggagaaaaacaagtgctgtgtagagagaaaaatggctaggtggtgcatgatcttggtggttcttgctcttgccgtggttgcaagtgccagaaacatgcccaatgacgctggtttggaggaccagaagaacttccttgggtatgggttttcgggagttggcaacaatggccttccctttggtggagtgggttctgggtttgatggtaatatgggtgggccttctgggct

SEQ ID NO: 204341 - DNA, 240 bp, Glycine max
aaacaaaacccatcaaagtctttctccctcagtgatcatatattcattcagttctatacaaaatcctcaacaagtcttcctctctgccatgaccatggaatacagaaccttagaactcaacatcatatccgcaaaggacatcaagaatgttaatctcttctccaagatggacgtatacgccgccgtttcgctctcgggtgaacctctccaccctagagggcgcaaccacccaggtccaac

SEQ ID NO: 204342 - DNA, 190 bp, Glycine max
tctgagattaagcatgccaggattgctatgttggccatgctgattttctactttgaggctggacaagggaagaccccccttggtgctcttggcttgtaaattaaacatttcatgtagataattgaattgagaggctagacagttgcaaatcaacctttgtttgtcccgtgtgtgttacttcatgacaaat

SEQ ID NO: 204343 - DNA, 270 bp, Glycine max
ttcttctacacaatagatgaccgcatcgttctcttagctaccatggcgactgagaaccctttccttagcatttacgaggacgctcgagaagcccggcggcgctggcgagtgtggaaagtactttagcttgcccgctcttaacgatcctagaatcgatagacttccttactctgtgaggatacttttggaatctgcgatccgtaatcgtgatgagtttcaaagtaaagagtaacgacattgaaaaaattattgattgggagaacacccccc

SEQ ID NO: 204344 - DNA, 251 bp, Glycine max
tgagagtgttccttctaatagtgaaaaggcactcctaaaagctgtggcaaatcaaccagtttcagtttatattgatgcaggagcaattgctttcaaattttactcaagtgggatttttgaagcaagaaattgtggaactcatctagaccatgctgttgcagttgttggttatggtaaacttcgtgatggtacaaagtattggctagtaaaaaattcatggagcactgcatggggtgaaaaagggtacatga

SEQ ID NO: 204345 - DNA, 132 bp, Glycine max
gctgaacccgtttcgctttcaatcgaagggaagaacaaacattcaattcatggcagctgcaaagcttcaagctttatggaatcacccagctgggcctaaaaccattcacttctgggcacctacctttaagtg

SEQ ID NO: 204346 - DNA, 272 bp, Glycine max
tatcttgaccaagattgacaggcgatctggtaaggagcttgagaaggagcccaaatttttgaagaatggtgatgcaggtatggttaagatgattccaaccaagcccatggtggttgaaactttctctgagtatcctccccttggtcgttttgctgtgagggacatgcgtcaaactgtggctgtcggagtcatcaagagtgttgagaagaaagaccccaccggagccaaggtcaccaaggccgctgccaagaagaagtgattgcatttgggca

SEQ ID NO: 204347 - DNA, 185 bp, Glycine max
gcgaagagaatggctcccaagggtttaatctttttggctgtgttatgcttctcagcactgtcactgagtcgttgtcttgcggaggataatggacttgttatgaacttctacaaggaatcatgccctcaggctgaagacatcatcaaagaacaagtcaagtttctctacaagcgccacaagaacac

SEQ ID NO: 204348 - DNA, 201 bp, Glycine max
taaagacttgcttccaagatggttctgctagagaagctctgggatgacgttgttgctggccctcaacctgagcgtggccttggcaagctcagaaaactcaccaccctcaaaactattgatgagggagacagtagcaagctgcagaagacgttgtcgatgccgtcgacaccgacaaccccgatgactcccacgactccaacg

SEQ ID NO: 204349 - DNA, 232 bp, Glycine max
agaatggctcccaagggtttaacctttctggctgtgttaatatgcgtttcagcactgtcactgagtccttctgttgcgggggaagggcaaaataatggccttgttatgaacttctacaaggaatcatgccctcaggctgaagacatcatcacagaacaagtcaagcttctctacaagcgccacaagaacactgctttctcctggctcaggaacatcttccatgactgtgctg

SEQ ID NO: 204350 - DNA, 260 bp, Glycine max
gagcagaagagctgaaagggaagggtgtggacgaaataatctgtatcagtgtgaatgatccatttgtgatgaactcatgggccaaaacattcccagagaacaagcatgttaagttccttgctgatggtgcagccaaatacaccaatgcccttggtcttgagcttgacctcactgacaagggtctcggcgtccgctcaaagaggtttgctctgctggtggaagacctcaaggtgaaggttgcgatgttgaaatggaggaga

SEQ ID NO: 204351 - DNA, 231 bp, Glycine max
gcgccggggagtttctcgaaatgaccgaggattactccgaggacaacctcgtttcaaagacggagaggtttctatcgcagcacgtgctcaagagcctcaaggactctgtcaagacgctaaaatcgtgtgactccttgatgcctatggcggaaaatctcggaatcacgcagaggtgcgttgattccgtggtttccagaacttcgtcttcggatcctgcattgttcggttggc

SEQ ID NO: 204352 - DNA, 265 bp, Glycine max
ctgatggagggttgtttccacttgcttttggtgttgttgatgtagaaaatgatgacagctggacatggttcctgtctgagttgcataaggtacttgaggtgaatactgaatgcatgccagagtttatatttttgtcagatgggctaaacagtattacagatgcagtaagaaggaagttccctagttcttctcatgcattctgcatgcgtcacttgaccgaaagcattggcaaagagttcaagaatctaggcttgtccatcttctg

SEQ ID NO: 204353 - DNA, 263 bp, Glycine max; identical to SEQ ID NO: 203523

SEQ ID NO: 204354 - DNA, 255 bp, Glycine max
ggggcttgtaggcgcggggacatgtgtgaatatgctcatggggtgtttgagtgctggctgcacccggctcagtatcggacacgcctctgcaaagatggtaccagttgcaatcgaagggtgtgtttttttgctcacactgcggaggagcttcgtccgctgtatgtgtccactggatctgctgtcccttcgcccaggtcatctgcctcggctcctaatgtcatggacatggctgctgcgatgagcttttgccgggct

SEQ ID NO: 204355 - DNA, 267 bp, Glycine max
ctggaaaggtggctgttgtggctggatatggtgatgttggcaagggttgtgctgctgcaatgaagcaggctggtgctcgtgtcatcgtgaccgagattgatcccatctgtgcccttcaggctctcatggaaggccttcaggttctgaccttggaggatgttgtttctgaggctgatatctttgtcaccaccaccggtaacaaggacatcatcatggttgaccacatgaggaaaatgaagaacatgccattgtttgcaacattggtca

SEQ ID NO: 204356 - DNA, 258 bp, Glycine max
tgaaggtgctcatcatgaaggagaggccaaggagaagaaaggtatattagaaaagataaaagagaagcttcctggttatcactccaagacagaggaggaaaaggaaaaggaaaaggagagtggtgctcattgatatttaagattgagacaaggcttttttgttggttggagatgcatgattgtggtgtgctttgttttcatttcatcatatgacagccttgtgggtttcttgggtgttccttgatgcatactaaattc

SEQ ID NO: 204357 - DNA, 250 bp, Glycine max
ctgccttgctcatttacacacctctccaacctttcactttcagctttatttgaatccctttctctcctttccaaatggccagcgttgaggttgcacatcaaacaccaacaacagttccagaaaatgaaacaaccgaggtaatcaagacccaggaaacaaccccggaaccagtaccagccactgaggctcctgcaacagaacaagcagcagctgaggttcctgctcaagaagaacaacaagcaactgaggt

SEQ ID NO: 204358 - DNA, 223 bp, Glycine max
cattaattgcaagaatggcacttcgttgcttggtgatgtccctttctgttctcttcactcttggtcttgcgagagaaagccatgccagagacgaagatttttggcatgctgtttggccaaacactcccattccaagttcattgcgagatcttctaaagcctggccctgcaagtgttgatatcgatgatcaccctatgcaaattgaagaaacacagtaccggaa

SEQ ID NO: 204359 - DNA, 260 bp, Glycine max
cttgcggctagggttttagcgcacttcttctagatttaaggacgatgggtaaggaaaaggttcacatcagtattgtggttattggccatgttgactctgggaagtccactaccactggccacctgatctacaagcttggaggcattgacaagcgtgttattgagagatttgagaaggaagctgctgagatgaacaagaggtctttcaagtatgcctgggtgcttgataagcttaaggctgagcgtgaaagaggaatcaca

SEQ ID NO: 204360 - DNA, 233 bp, Glycine max
aagagaatggctcccaagggtttaatctttttggctgtgttatgcttctcagcactgtcactgagtcgttgtcttgcggaggataatggacttgttatgaacttctacaaggaatcatgccctcaggctgaagacatcatcaaagaacaagtcaagcttctctacaagcgccacaagaacactgctttctcctggctcagaaacatcttccatgactgtgctgttcagagttg

SEQ ID NO: 204361 - DNA, 257 bp, Glycine max
ccagacgcgttggcaaaggcattcgtggagcactactacagcaccttcgacaccaacaggaacggcttagcgaatctctaccaggagggttccatgctcactttcgaagggcagaagatccaaggcgcttccaacatcgttgccaagctcacctccctcccttttcagcagtgccaccactcaatctccaccgtcgactgccagccctccggcgtcaacgcggcatgctcgtcttcgtcagcggaaacttcagctcg

SEQ ID NO: 204362 - DNA, 236 bp, Glycine max
attctctctgtgtatttccctacctctcccttcaagatgcagatcttcgtcaagaccctcaccggcaagaccatcacccttgaggtggaaagctctgacaccatcgacaacgtcaaggccaagatccaggacaaggaaggaatccccccggaccagcaacgtctcattttcgccggaaagcaacttgaggacggccgtacccttgctgattacaatatccagaaggagagtactct

SEQ ID NO: 204363 - DNA, 263 bp, Glycine max
cttcgtctcaaatctcttcgttccttcgattcgttccatttcttccaaaatggccaaagacccagttcgcgttctcgtcactggagctgcagggcaaattgggtatgctcttgtccctatgattgctaggggagtgatgttgggtcctgaccagcccgtgatcctccacatgcttgacattcctccggcagcagagtcattgaatggggttaaaatggaattggtggatgctgacattcctcttcttaaaggtgttgttgcca

SEQ ID NO: 204364 - DNA, 216 bp, Glycine max
gtgccttttgcattctctctctaaatccaacgtttggagtgtttctctctcactcctctctgcaagatccgcaccccaaaccctagcaaacccctaccgcagagggagccgagaagaacatcaacaacacgcaccagtatacaaaccacccgtttataagccaccagtttacaagccaccagtgtacaagccaccagttgagaagccaccagtgta

SEQ ID NO: 204365 - DNA, 263 bp, Glycine max
cagaggcatgatgggaaattgtggaacttgaacaattaccgtactgatgttattcaagcccttggaggagttgaaggaattcttgaacatactttattcaaaggaacatattttccaacttgggagggtcttttctgggaaaaggcatctggctttgaggaatctatgaagtataagaagctcaccaatgctcagagatctggtctaaaccagatacccaaccgaagatttacactatggtggtccccaaccattaaccgagc

SEQ ID NO: 204366 - DNA, 261 bp, Glycine max
atgtcccctgaatatgcaatgcaaggactaatttcagagaaatcagatgtctttagctttggtgttttggtactagagattgttagtggaagaagaaactcaagattttatgatgatgagaatggtcttggccttttaggatttgcctggatacaatggaaggaaggcaacatattatctctaatagatagcaatatatgatgttactcatcataaagaaattttaaggtgcatacatatagggcttctatgcatgcaata

SEQ ID NO: 204367 - DNA, 261 bp, Glycine max
agacaggagtgttatcggcgaaggaggcattcgagaagcttgaaaaggtgggagaagggacatatgggaaggtgtacagagcaagagagaaggcaactgggaagatcgtggctctgaagaagactcgtctccacgaggacgaagaaggtgtccctcccaccactctccgtgaggtttccattctgcgaatgctctctcgcgatccccatgtcgttaggttaatggatgtcaaacaaggtcagaacaaggaagggaagacag

SEQ ID NO: 204368 - DNA, 233 bp, Glycine max
gttcattctctttgcgcagttccctacctctcctttcaagatgcagatcttcgtcaagaccctcaccggaaagaccatcacccttgaggtggaaagctctgacaccatcgacaacgtcaaggccaagatccaggacaaggaaggaattcccccggatcagcaacgtctcatcttcgccggaaagcagctcgaggacggccgtaccctcgccgactacaacatccagaaggagt

SEQ ID NO: 204369 - DNA, 240 bp, Glycine max
ttcgtagggtttgggtttctcttcctccctggaagaaaaagaagagtcaccgctacgacgccgttcgtgcttttttgaggtgccacagtcatgtttgggcgtggtggaccaaggaggagtgacaactccaaatattatgatattctcggggtttccaaaaatgccagtgaagatgaaatcaagaaggcctatagaaaggctgctatgaagaaccatccagataagggaggagatcctgaa

SEQ ID NO: 204370 - DNA, 241 bp, Glycine max
cattgcacctttctcttcctccgatggctaatctctcactcttgttcttcggtctcctcctattctccgctgccgtagccaccgtcgaacgaatcgacgatgaagacaaccttctgatccgtcaagtggtgccggacgcggaggaccaccacctgctcaacgcggagaaccacttctccgccttcaagacaaagttcgccaagacctacgccacgcaggaggagcacgaccaccgtttccg

SEQ ID NO: 204371 - DNA, 208 bp, Glycine max
gcaagcaaaaagaaagaatcccaggcgaggagaaagatggaggggaaggagcaggatgtgtcgttgggagcgaacaagttccccgagagacagccaattgggacggcggcgcagagccaagacgacggcaaggactaccaggagccggcgccggcgccgctggttgacccgacggagtttacgtcatggtcgttttacagagcaggga

SEQ ID NO: 204372 - DNA, 252 bp, Glycine max
gaggtacaataacaggtgctggaaaatatctgaaagatcagaaccctgatataaagctatatggcattgaaccagtagaaagtccaatactgtctggaggaaaacctggccctcataagatccaaggaattggtgctggcttcatccctggtgttctggatgtcgatttacttgatgaagttgttcaaatttcaagtgaagaagccattgaaactgctaaacttcttgctttgaaagaaggtttgctggtgg

SEQ ID NO: 204373 - DNA, 217 bp, Glycine max
gagaaacatggcttccttaagctccttagtgctgctccttgcagctctaattctatcccctcaagttcttgcaaactatgagaatcccccagtgtacaagcctcccactgagaaaccaccagtttataagcagccagttgagaagcctcctgtttacaagcctccagttgaaaagcctccagtttataagcctccagtagagaagccaccagtgtac

SEQ ID NO: 204374 - DNA, 261 bp, Glycine max
aaggtgtacaacgcgctcggagagaaggagaagaggttccagatcttcaaggacaacctgcgattcatcgacgaccacaactcccaagaggaccgaacctacaagctcggactgaaccggttcgcggatctcaccaacgaggagtacagggccaagtacttgggaaccaagatcgatcccaaccggaggctcggcaagaccccgagcaaccgatacgcgccacgtgtcggcgacaaactacctgaatcggttgattggagg

SEQ ID NO: 204375 - DNA, 255 bp, Glycine max
ataaaatcaagaaagcatgcatatgatgaagaaggtgtgtgggtttgcaatagtggtgatggcagcactttttctggtggagatgagtcccatggcagaggctgtgacttgtagccctgtggagttgagtccctgtttgggggcaatcacgtcctcttcaccaccatcgacaacttgttgccagaaggtgagggaacaaaggccatgcctctgtggttacctcaaaaaccctagtctgaggcctatgtcaactct

SEQ ID NO: 204376 - DNA, 264 bp, Glycine max
tgccaaacgagcttcttgccagcgccgccgcagaccagtccttcaccgatgcgtgggtccaagccaacatctccacctactaccccgccacgcaaatcgaagccatagccgtcggaaacgaagtcttcgtcgaccccaacaacacaacaaagttcctcgtacccgccatgaagaacgtccacgcttctctaacaaagtacaacctcgacaaaaacattaaaatctcctcacccatcgcactctccgcgctccagaactcgttcc

SEQ ID NO: 204377 - DNA, 260 bp, Glycine max
cttggaagaaacctcaccaaacattgcctccaagatgaattttaacaatgtgaatgtcccaaaggttcctggtggcggagtcgctgctttgcttaaagttagcattattggtgggcttgttgtttatggggctgcaaacagcttgtacaatgttgagggaggtcatcgagccattgtcttcaatcgtgttgtcggtgtcaaggataaggtttatcctgaagggacacatattatgattcctttgttcgagaggcctgtga

SEQ ID NO: 204378 - DNA, 270 bp, Glycine max
gcaattcacaataatccaatcatgggaatcaatatttgtctctctctttgcttcttctacatcactacccttcaacgcacaatttccacgttggcccagtctgagaattatatcatccacatggacatatcagacatgcccaaagcatactcctcccatcacacttggtatctctccactctctcttcagcattggagaattccaaagccaccaccgacaaccttaattctaagctgatttacatctacaccaatgtcatcaatggtttc

SEQ ID NO: 204379 - DNA, 264 bp, Glycine max
acacgataacggaaacagtcaggttttaagtatcaatcccgggactaagctttttctttatgattttgatctgaggctgttgtatgggatttacaaagcttcatcttctggtggcatgaaacttgaaccccgagcttttggtggtaactttcctgctcaggtgcggtcaaaattgctctgattggttccgctatcagagagcatttcaaaaaggcaatccaggaaaattacaatgagaagcacaagttcaaaacagaacttact

SEQ ID NO: 204380 - DNA, 236 bp, Glycine max
cttaatttctctctgccttgctcatttacacacctctccaaccattcactttcagctttatttgaatccctctctctcctttccaaatggccagcgttgaggttgcacatcaaacaccaacaacagttccagaaaatgaaacaaccgaggtaatcaagacccaggaaacaaccccggaaccagtaccagccactgaggctcctgcaacagaacaagcgcagctgaggttcctgctc

SEQ ID NO: 204381 - DNA, 262 bp, Glycine max
ctttgtttgtgatgagcatgaacatgaacatggctctgtttctaatgttccttgttctgcacatagcttggcttgtagcatcatcggatctccgagctggcttttactcaaaaacatgtccaaaagcggaagtcatagtccgagatgtgatgaagaaagcccttatgagggaagccagaagtgttgcctctgtcatgcgcttccagttccatgattgctttgtgaatgggtgtgatgggtctatgttgcttgatgacacagc

SEQ ID NO: 204382 - DNA, 262 bp, Glycine max
acacgataacggaaacagtcaggttttaagtatcaatcccgggactaagctttttctttatgattttgatctgaggctgttgtatgggatttacaaagcttcatcttctggtggcatgaaacttgaaccccgagcttttggtggtaactttcctgctcaggtgcggttcaaaattgcttctgattgtttcccgctaccagagagcattttcaaaaaggcaatccaggaaaattacaatgagaagcacaagttcaaaacagaa

SEQ ID NO: 204383 - DNA, 206 bp, Glycine max
tggcaaccggcatgacggacaacgccaccgattacgacggcgtcgagttctggtcgaaccccgagcggaccggctggctcaccaagcagggcgagtacatcaagacctggcgccgccgctggttcgtcctcaagcaaggcaagctcttctggttcaaggactccgccgtcacgcgtgcgtctcgtccacgcggcgtggtcccgtcg

SEQ ID NO: 204384 - DNA, 174 bp, Glycine max
gttcaaaccggagcaaaaaaacttgttacgatggtttcttccgacaaggatccacgagaggaagtccttcaagcatggtacatggatgatagtgatgaagatcaaagactcccccaccacaaagaacccaaggagtttgtctcgttggaccaacttgctgaacttggagtcctt

SEQ ID NO: 204385 - DNA, 208 bp, Glycine max
aacttgctccctcagaagcgaagaagaagccacagagaactagtctcctactctcacccgcaagaaaaaaatggcatctcacatcgttggatacccccgtatgggtcccaagagagagctcaagttcgctctcgagtctttctgggatggcaagagcagcgccgaggatttgcagaaggtgtcttctgatctcagggcatccatctgg

SEQ ID NO: 204386 - DNA, 265 bp, Glycine max
  unsure (1)..(265): unsure at all n locations
catactctgagcgtgaganagagaaggggaagaaagagagagagtgatgggaaggggaagagtggagttgaagagaattgagaacaagatcaacaggcaagtgacctttgcaaaacgaaggaacgggcttttgaagaaagcttatgagctttccgttctttgtgatgccgaggttgctctcatcatcttctccaatagaggaaagcagtacgagttttgcagcggttcaagcatgctcaaaacgctggagaggtaccagaaatgc

SEQ ID NO: 204387 - DNA, 262 bp, Glycine max
tagtaagcactatagaaaaaaaaggacattcattcatctatggctacacttattgctcccagcaaccactctccccaagaagatgctgaagctctcagaaaggcttttgaaggatggggaactgatgagaacactgtcatagtaattttgggtcatagaactgtgtatcagaggcagcaaatcagaagagtttatgaggaaatttaccaggaggatcttgtgaagcgcctagagtctgagatcaaaggagactttgagaaag

SEQ ID NO: 204388 - DNA, 190 bp, Glycine max
ccctactcattctccatacctcaacgaagaggttaaagagacggcaacactttgctgtccgccttgaccgagcagagcttcgtcttggccctcgattttgccctaaagtactctcagtcacaacagacaccgtcgtcgtcgtcgtcgtcatcaatggcaccgaagcagaccaaggctgagaagaagatcg

SEQ ID NO: 204389 - DNA, 261 bp, Glycine max
atcatgcttcagaagatgtgcccaaagcattggataaaacattgcaggatttgcaacttgattaccttgacctctatctgatccactggccagtgcgcatgaaaagcggatcagttggattcaagaaggaatatctcgatcaaccggacattcccagcacatggaaagcaatggaggcactctatgactcaggcaaggcaagagccataggagttagcaatttctcttcaaaaaagcttcaagatctcatgaatatagcaa

SEQ ID NO: 204390 - DNA, 263 bp, Glycine max
attcaatactacaacttctgaatcacttagttgaattgaattatcttcaaaatgagagaaatccttcatgttcaagctggtcaatgtggcaaccaaattggaggcaagttttgggaggtgatgtgtgatgaacatgggattgatgccactggaaattacgtaggcaattcccatcttcaacttgagagggttaacgtgtactacaatgaagcaagtggaggacgctatgttcctcgagctgtgcttatggaccttgaaccagg

SEQ ID NO: 204391 - DNA, 241 bp, Glycine max
tggaaaaagaaaaataaaatgggttccgataataccaacttggagttcttgaaggagatcggtttgggctcctccaacattggttcttacattaatggccaattgaaagccactggttcttctgtcacttctgttaatccttctaacaatcagagcatagctcaagtgactgaagcgactttgcaagattatgaggagggattgcaagcttgcagtgaagcagccaagacatggatgacta

SEQ ID NO: 204392 - DNA, 272 bp, Glycine max
acagaacctaaagtcatataccgtgactttaaaacttcaaatatcttactcgatacaaactacagtgccaaactttctgattttggcttggccagagatggtcctactggtgataaaagccatgtctctactagggtcatgggaacccatggatatgcagcaccagagtatttagcaacaggtcatctcactaccaagagtgatgtgtatagttttggagtagttcttttggaaatgatatcgggaagacgagctatagacaagaatcagcc

SEQ ID NO: 204393 - DNA, 269 bp, Glycine max
gagagaacaagaacataagggaaccacagcggcggtaacagaagaacaagcagagaatgggtcgagtgagaacgaagacggtgaagaaatcctctcggcaggtgatagagcgtcactactcgcgcatgaccctggacttccacacgaacaagaagcttctggaggaagtggcgataatcccgtcgaagaggctaaggaacaagatcgcggggttctcgacgcacctgatgaagcgcatccagaagggccctgtgcgcggcatctccctc

SEQ ID NO: 204394 - DNA, 266 bp, Glycine max
gctgagaaaaaaaaatggatgtagagaaagccttccacatgactggaggagatggcaaaactagctatgccaagaattcctcactacagaagaagaaatctgataaagtgaagcacataatcatacaaacagttgaggagctctaccttgcaaccactccaaagagcataggcattgctaattggggctgccccccgggccaaacaccccatcaatcatcaaaggttatctttaaggccatccaaggcataagccacaggatcatg

SEQ ID NO: 204395 - DNA, 226 bp, Glycine max
atccctacgccatggaaccatttccctcataaaattctctcttcctttttgggttctcctcaatccattccaagcttcaatcttttctctcttctgccctctgcacctcccctcacacccttcctctttcgcaggaggtgaagatgtcgaccccggcaaggaagagactgatgagggattttaaaagattgcaacaagatcctcctgctggcatcagtggggctcc

SEQ ID NO: 204396 - DNA, 249 bp, Glycine max
caaacccactaagatggcttcctttgtatccttcctagtgctgcttcttgcagcccttatcctcatgcctcaagggcttgctacttactacaaaccaattaagaagccaccagtgtacaagcctccagtgtacaagccaccagtgtacaaaccaccggtttataagccaaaaccaccggtttacaagccgaaaccaccggtttacaagccaccatataagaagccaccatacaagaaaccaccttatgg

SEQ ID NO: 204397 - DNA, 258 bp, Glycine max
tggatctatggatctatcacagaagatattctaacaggttttaagatgcattgccgtgggtggaggtccatttattgtatgccaaagagagctgcattcaagggtactgctcctatcaacttgtcagatcgtctcaaccaggttcttcgttgggcacttggttccattgagattttctttagtcaccattgccctctatggtatggcttcaaggaaaagaagctaaagtggcttgagagatttgcctatgcaaacaca

SEQ ID NO: 204398 - DNA, 191 bp, Glycine max
gaaagttcaagagaacatggtaactagaattgtggatcttcggtcagacacagttacaaagccaaccgaagcaatgagagctgctatggcaagtgctgaagttgatgacgatgttctaggctatgatccaactgcgtttcgcttagaaacagagatggcaaagacaatgggcaaggacgcagctctttttg

SEQ ID NO: 204399 - DNA, 130 bp, Glycine max
caaaaggaggaaagtgtattgttttcactcaaacaaaacgtgatgctgatcgattatcgtatgccatggcaagaagtgttaaatgtgaggctttgcatggagacatatcacaagctcaaagggagaaaac

SEQ ID NO: 204400 - DNA, 163 bp, Glycine max
ggtacggtggctcccagagttgaaagcttggcgagcagtgggataaagtgtatcccgaaggaatacgtgaggcctgaaaaagagttgaagagcatagggaacgtgttcgaggaggaaaagaaggaagggccagaggttcccacaattgacttgagagagatag

SEQ ID NO: 204401 - DNA, 129 bp, Glycine max
gtcttccatagccccccaaaaatgaagagcaccatcttctttgctctctttctcttttgtgccttcaccacctcatacctaccttcagccatcgctgatttcgtgctcgataatgaaggtaaccctctt

SEQ ID NO: 204402 - DNA, 191 bp, Glycine max
gaaaacttgtgaaccactggaggaagattccttcaggccaatccttcaccactatgatggtcccaagttccgtcttgagctgaatgtgcccgaggcgttgtctcttctggatatttttgcagaacaagacaccttcaatgacactttcgaggctttgccggcataaaaggagattaatagcaaataatgca

SEQ ID NO: 204403 - DNA, 266 bp, Glycine max
gagagagcgagcagtttcagacacagagagaggggtttgggattggagggattgacgctgcgtctcttcctcttctctttcgatccatccctcattcctaatcctccaatccaaccacctcagcctcacactcacatatacacttatctgaacgggtatggcccctcctagggttaaaaggatcctccacgaggtcgctgattgcttgcagacacaccaacttcttgcagcgctggtccagtagctgaggacatgttccattggca

SEQ ID NO: 204404 - DNA, 228 bp, Glycine max
gtaagggttttctctttgagaaaatcgtatcttacaccttttggtgaccactttgagtgagagaagagaaattaagagagatactcaaattagattcaagagagatggccatcaaccatgaaacttgggctttcattttcggtcttctaggcaacgtgatctcctttatggtgttcctcgctccattaccaactttttaccaaatctacaagaaaaaatctacggatg

SEQ ID NO: 204405 - DNA, 260 bp, Glycine max
tgggcaatggaaccacataagaaacaccattttggaacctccaacatccccatgctagtacaacattgttgtcttattagcatcttcatcttcaccttcttcactgccaccaccacccaagcttttgattatgctgatgccctttcaaagagtcttctctactttgaagcacaacgctctgggaggataccctataatcagcgtgtcacttggcgtgaccattctggcctcactgatggcctagaagaaggggtggactt

SEQ ID NO: 204406 - DNA, 263 bp, Glycine max
actcgagccgattcggctcgaggcagatccgaggagttacccttacttttcttttttcttacttctctttcctcattctacttaaaactcccaccagtgatggcaggtttggctccagagggaacacaattcgatggtcgccaatatgatgctaagatgagtgaattgctttccactgatgggcaagaattcttcacctcttatgatgaagtgtatgacagctttgatgcaatgggattgcaagagaatcttctgcgaggcat

SEQ ID NO: 204407 - DNA, 261 bp, Glycine max
ctcgagccgctcgctctttcagctttgacttttgttggaaactaaggcctaatcaaaatgagtgaagttcacagctgaagagctacgtcgtattatggactataagcataatatccgtaatatgtctgtcattgctcatgttgatcacggaaaatcaaccctcactgattctcttgtggctgctgctggtattattgctcaagaagttgccggtgatgtccgtatgactgatacccgtgcagatgaagctgagcgtggtat

SEQ ID NO: 204408 - DNA, 247 bp, Glycine max
gacgaccagcacttacaatgcgcttatgggtgcttgtatgtccaatggtcttgctgataactgccagtccttgttttgtgatttgaagagggatccgacttgtgatccttctattgccacgtacaatattcttctatctgtttttggtcgcttgatgctggttgatcacatggaagcaacatttagggagatacaaaagttaaccttcaccatgaacatctgcacttacaatcacatgattgctgga

SEQ ID NO: 204409 - DNA, 260 bp, Glycine max
tgaaaatcctgaaaagaagcccagaaggaacaagtacgctttcgcatgtgctattttggcttcaatgacttccatcctactaggttacgatattggagtgatgagtggagcagcactgtacatacaaagagatctcaaggtatcggatcttcaaatggagatcctgatcggtcccataaccctctatcccccggtgggtcctttcatcgccggcagaacctccgactggataggtcgccgttacaccatcgtcctcgccg

SEQ ID NO: 204410 - DNA, 220 bp, Glycine max
atgaagctgaaggtatatgcggaccgcatgtcccagccatcccgtgcggttctcatattttgcaaagtgaatggaatagattttgaggagatcaaagtcgatttatccaaacgtcagcagttatctcccgaattccgagcggttaaccctttaaggaaagtccctgctattgttgatggaaggatcaagctatttgagagtcatgctattctcatatatc

SEQ ID NO: 204411 - DNA, 260 bp, Glycine max
gaagagaatggctcccaagggtttaatctttttggctgtgttatgcttctcagcactgtcactgagtcgttgtcttgcggaggataatggacttgttatgaacttctacaaggaatcatgccctcaggctgaagacatcatcaaagaacaagtcaagcttctctacaagcgccacaagaacactgctttctcctggctcagaaacatcttccatgactgtgctgttcagagttgtgatgcttcactgttgctggactcca

SEQ ID NO: 204412 - DNA, 239 bp, Glycine max
  unsure (1)..(239): unsure at all n locations
atcggataaaagggccatggagacctgaagaggacgaagangttacggaggttggttcaancttacggccctaggaactggtccgttataagcaaatccattccgggtcggtctgggaaatcgtgccgcttgcggtggtgcaaccagctgtctccggaggtggagcgccggcctttcacggcggaggaagacgaggcgatcctgaaggctcacgccaggttcgggaacaagtgggccac

SEQ ID NO: 204413 - DNA, 256 bp, Glycine max
tgaaatcttgaccaagattgacaggcgatctggtaaggagcttgagaaggagcccaaatttttgaagaatggtgatgctggtatggttaagatggttccaaccaagcccatggtggttgaaactttctctgagtatcctccccttggtcgttttgctgtgagggacatgcgtcagaccgtagtggtggagtcatcaagagtgttgagaagaaagaccccacgggagcaaaggtcacaaaggctgccgccaagaaga

SEQ ID NO: 204414 - DNA, 256 bp, Glycine max
ctccgggaaaatggctcactggaagcttcaatctcaccagccatctcaccctctttttggaaaaaggtgctgtccttattggaactcaggatccatctcattgggatgttgttgaacccttgccttcttatggccgagggcttgaagttcctgggggaagatatcagagtttgataaatggatacatgttacatgatgtggtcgtaacaggtaataatggaaccattgatggcatgggaatggtttggtgggattg

SEQ ID NO: 204415 - DNA, 260 bp, Glycine max
gaagaccatgtctgatgctgaaaaagcaccttatgtggcaaagtctgagaaaaggaaagtggagtacgagaagaacatgagagcctataacaagaaacaggcggaaggtcctactggtggggatgaagaagaatctgagaagtctgtatctgaggtgaatgatgaagatgatgatgaggaaggcagtggcgaggaagaggatgacgattagagaatggactgataattgcatttatgtaggttctgatgattttgcatca

SEQ ID NO: 204416 - DNA, 130 bp, Glycine max
ttcggctcgagaagagaatggctccaagggtttaatcttattggctgtgttatgcttctcagcactgtcactgagtcgttgtcttgcggaggataatggacttgttatgaacttctacaaggaatcatgc

SEQ ID NO: 204417 - DNA, 217 bp, Glycine max
tcgcaagcaaaaagaaagaatcccaggcgaggagaaagatggaggggaaggagcaggatgtgtcgttgggagcgaacaagttccccgagagacagccgattgggacggcggcgcagagccaagacgacggcaaggactaccaggagccggcgccggcgccgctggttgacccgacggagtttacgtcatggtcttttacagagcagggataccaaat

SEQ ID NO: 204418 - DNA, 204 bp, Glycine max
attttggatgaacttctgccgatttcaattgagatggcaaagcgaaacttgaggggcatctggaacttcacaaatcctggggccgtgagccacaatgagattctcgagatgtacagggattacattgatccaagcttcaagtggactaacttcaatcttgaagagcaagccaaggtgataattgctccacggagcaacaatgag

SEQ ID NO: 204419 - DNA, 250 bp, Glycine max
ttttaccctaacccagaggagaaaacggcaagggatttcaacggacatgggactcacgtttcgtcgacggcagtgggcgtgccggtgagtggcgcatcgttctatggtctggcggcggggacggcaaggggtgggtcccctgagtcaaggttggcggtttacaaagtgtgtcggggcttttgggtcatgtcctggtgcggcatttcttgcgggtttagaatgccattcacgacggggtggatatcttgtc

SEQ ID NO: 204420 - DNA, 253 bp, Glycine max
agaacgctcgcccgcaccgtccagatcgtaatcaacagaagatcagcgagtatagctcttccttgcagtccaagccatggcgcctctgctcctgcatggtggaaaaaccaacaaaaattcttacaagacactcattgcggcggagtatgccggcgtccaagttgactttgccccaaattttgagatgggtgtctcacataaaactcctgaatttctcaagatcaatcctattggcaaggttccgtgttggaac

SEQ ID NO: 204421 - DNA, 259 bp, Glycine max
ctgagacaagaagtcccttcccttctccttcttctccaaaggcaaaggtctttgagatggaagtcttaaacccaattgaaggcaagacctacaagctcccagttggatacagatttgatccaagtgatgaaattcttgctggttactaccttaggaagaggatcatggcccaaccactccctaatgacctcattcaagactgtgatgtttaccaaacagtgccttgggagctgccaggaggtggtaataagtatttgaa

SEQ ID NO: 204422 - DNA, 258 bp, Glycine max
tttcaaggatgaccccgacctctatgttttccccaacttgaagtacgtggggattgaattgtggcaggtgaaatctggtactttgtttgacaatgtcttaattactgatgatcctgagtatgctaagcagctggttgaagaaacatggggcaagcacaaggatgctgagaaggcagcatttgaggaggccgagaagaagagggaagaggaggaatcaaaggatgacccagttgactctgatgctgatgaggaagagga

SEQ ID NO: 204423 - DNA, 239 bp, Glycine max
agacgacgccgttttgacccggcgaccgggaaatggtggagccggtggagcttcgatgcgaggagcagctctcgcttctgtcagattcgagcaatggtgatcggtcgtggcggttgaacttcgacgggtttcagctatcttcggagcacgcggagaagcaagtgaaaccccctcgcggactccacgatggtacgggggctaggtcaagaagataatattgcaggtactatcagcagcag

SEQ ID NO: 204424 - DNA, 269 bp, Glycine max
gcaaaagaagttgatgcgttggctaagaaaactcctggaaagaagtctcttgctattgaggcattctcccgtgcactcttggctattccaacgatcattgctgataatgctggtttggacagtgctgagttgatttctcaactccgggcagagcatcagaaggagggctgtacttctggaattgatgttatttctggctctgttggagacatggctgaacgcggaatatctgaagcattcaaagtcaagcaagctgtattgctatcttc

SEQ ID NO: 204425 - DNA, 267 bp, Glycine max
cacgagattgaggcgggggttgatttggaagaaacccagctaaggtaattcctcgcaacccctaactaaaccttcaaaggatcatcatgggcagtcacaatgctttggctgccactttcggaatattaggtaacatcatttctgtgatggtgtacttggctccggtgccaacgttttaccggatatacaaaaagaaatgcacggacggtttccactcgctgccatacttgttgtcattaatgagtactatgctttggttatactacg

SEQ ID NO: 204426 - DNA, 265 bp, Glycine max
gcgaagagaatggctcccaagggtttaatctttttggctgtgttatgcttctcagcactgtcactgagtcgttgtcttgcggaggataatggacttgttatgaacttctacaaggaatcatgccctcaggctgaagacatcatcaaagaacaagtcaagcttctctacaagcgccacaagaacactgctttctcctggctcagaaacatcttccatgactgtgctgttcagagttgtgatgcttcactgttgctggactccacaa

SEQ ID NO: 204427 - DNA, 265 bp, Glycine max
gaaaaacttgcagaggcacttggtttgccattcgagtttcgagcagtggcatcaaggacttccattgtcaccccatcaatgctcgactgtagtcctgatgaagcacttgtggtgaactttgcattccagcttcatcacatgcccgacgagagtgtttcaacagcaaacgaacgggaccaacttcttcgcttggtgaagagcttgaatccaaagcttgtgacagtggtggagcaagatgtgaacacaaacaccacccccttcttac

SEQ ID NO: 204428 - DNA, 265 bp, Glycine max
tctcgagccgaatcggctcgagggagaatggtactgagggaggatcacctgttttgaatgacatggagaatggcaagctggaaaaagatgtgggagctgctgcggatgccatcaaatttgggacacatggagaggaatctgcaaaacagaaagggaatgatgtttcagacgtgaatgccccgaaagatgctgctgaagattggcctgcacctaagcagattcattctttttattttgtcaggtggcggccttatgatgatccaac

SEQ ID NO: 204429 - DNA, 268 bp, Glycine max
agaatttgttcgcaatcaagactttgaaaaggctggagagctaagagacagagaaatggatcttaaggcccagatatctgcacttatagaaaaaggcaaggagatgagtaaggcagaaagcgaggcaggagatgaaggtcccatggtgactgaagttgacatacaacatattgtctcctcctggactggtattcctgtggagaaagtctcaactgatgaatctgatcgtctcctcaagatggaagagactttacacaagcgagtcata

SEQ ID NO: 204430 - DNA, 270 bp, Glycine max
gaaaaccttctcttacccttctctcaagtttcaagagatttcatcatggctccaaagaaggacaaggctccaccaccttcctccaagcccgccaaatctggcggtggcaagcagaagaagaagaagtggagcaagggaaagcaaaaggagaaggtgaacaatatggtgctgtttgatcagggcacctatgacaagctcctttctgaagctcccaaatacaagctcatcactccttccattctctctgatcgtttgaggattaatggatca

SEQ ID NO: 204431 - DNA, 264 bp, Glycine max
ctcgagccggttcttcttcgtcgttatcttcttcttttgttgtttgtgtgtttgttttttctctcacctgaaaatgtcttgctgcggtggtaactgtggttgcggaagcgcctgcaagtgcggcaacggctgcggaggctgcaagatgtacccagacttgagctacaccgagtcaaccaccaccgagaccttggtcatgggagtggcaccagttaaggctcaattcgagagtgctgaaatgggtgttcccgctgagaacgatgg

SEQ ID NO: 204432 - DNA, 264 bp, Glycine max
tcgagtttcacagcgaagtcgtaggagggtttcaaaagatggagaacatgcagagcttctggcaattgggcgatgaactccgtggacactcaaaagcatcggaggatcacaaatggttaatggttgcttcgaaattggcggaacagacaagattgaagggggagcgtgtgaacaaccttgatctttcaaagggccccattgaaacaaggtcaagggataaatttgggttccaggaagagaacaaatttgattctcttaacttaa

SEQ ID NO: 204433 - DNA, 265 bp, Glycine max
tgtttataagcgaccagtttacaagctggtggtttttcaattgggggtttatacactggaggcttgtaaacccccaattgaaaaaccacccgtttataagactctagtatacaagctagcagtgtacaagcctccagtgtataagccaccagtttagaagtcaccagtgtacaatgttgcagttgagaagccaccagtatacaaagcacccgtttataagcgaccagtttagaagctagcagtgtacaagctaccagttgagaag

SEQ ID NO: 204434 - DNA, 263 bp, Glycine max
cgtgttgatagcatatggggtgcttggtttttcttcagtttttactttaaacctgctttgaacgataagtccaaggccaagattgtcagggacagcaatggtgtctcagggttcgataagtctgatctgaagctggatgttttcatggttcagcacgacatggaaaacatgtacatgtgggttttcaaggagaggccggagaacgcacttggtaagatgcagctgaggagttacatgaatgggcattctcgccaaggggagcg

SEQ ID NO: 204435 - DNA, 267 bp, Glycine max
tgaatggccatggaaaataaaaaaattatagagtattgggttgtgtctatactttgcatgcttttgtcgggtcattggatctctgttcaagctgcccctgcaccctctctcatcacacaactccctggctttaacgccaatttcccatccaagcactattccggatatataagtattgatggaaatactgaaagtgggaagaacctgttctactacttcgttagttcagaaagaagtccagagaaggacccagttgtgctatggctg

SEQ ID NO: 204436 - DNA, 269 bp, Glycine max
gccgcagcttgaaacagagcagagcgaccttgaagagctatggctgtcggaaagaataagaggatttccaagggaaagaagggtggcaagaagaaagccgctgatccctttgccaagaaagactggtacgatatcaaggccccttccctcttccaggtcaagaatattggcaaaaccctcgtctctcgtacccagggaaccaagattgcatccgaaggactcaaacatcgggtttttgaggtctcattggctgatctccaaggggatga

SEQ ID NO: 204437 - DNA, 272 bp, Glycine max
tctgatcgctccctgagagagctcgtcgcggcggttgcagaagaagattgcaagatgaagttcaacatcgcgaatcccaccactggatgccagaagaagctcgagatcgacgacgatctgaaactgcgagcattttgggacaagaggatctcacaggaggtcatcggagatgcactacggtgaggaatttaagggctatgtcttcaaaattaccggaggttgtgacaaacaaggatttccaatgaagcagggagtgctgactcctggtcgtg

SEQ ID NO: 204438 - DNA, 207 bp, Glycine max
gatttttcctcttccatttctcttactttctcagcctttttcgattacccatttggttatttcgccctaatggctcttgctccatccaaagtttccaccttttctggtttttctcccaaacccagtgttgggggtgctcagaaaaacccaacttgctctgtttctctgagctttttgaatgagaaacttggaagccgaaaccttagg

SEQ ID NO: 204439 - DNA, 263 bp, Glycine max
aatccataaaacacacaaaaactcagggtagggcagagagagagagagaaatgggaggttgggctatcgcggtgcatggtggcgctggtgtggaccctaatcttccactcgagcgtcaagaagaagcgaaacaacttctcacgcactgtctcaatcttggaatctctgctctaaattctaatcttcccgccatagatgtcgttgaacttgtggtgagggaattggaaacggatccgctgttcaattcgggccgtggatctgcc

SEQ ID NO: 204440 - DNA, 260 bp, Glycine max
gtccattctctctctcaatctcatttctctgtctctgcttcctcttcttcgatctcaccctgaattccctggacaatcatcatggctgacaaaggaggaaaatcatgtcccatatgcactgaggagatggacctgactgatcagcagctgaagccatgcaaatgtggttatgagatttgtgtctggtgttggcatcacataatggaaatggcacagaaggatgaaactgagagccgttgtcctgcctgtcgttcacctta

SEQ ID NO: 204441 - DNA, 266 bp, Glycine max
tcttcttcaacgtcctcttacgagcagatcccaattctccttcccagtttcaaaccctaattccctcattcccatggcctcagaagagcccactgtcgcggtggaacccgctcccgaacctgccaccgccgagcctcccccggaggagaaggaggagcccaaacctgaagccaaggctaagaaaaccaaggaacccaaacctaaaaaggtttccagaccacgcaaccctcccactcatccttcctacgaggagatgattaaagacg

SEQ ID NO: 204442 - DNA, 263 bp, Glycine max
ctttgtatggtgatgatatcttctttggttgattcaagttattccttgtgtgattttgaggcaatcttcaatttcggggattcaaattcggatacgggtgggtttcatacaagctttccagcacaacctggtccctatggaatgacttacttcaaaaaaccagtggggcgtgcttctgatggaaggctcattgttgattttctcgctcagggtcttggattgccatatttgagcccatatctgcagtcaattggatcggacta

SEQ ID NO: 204443 - DNA, 263 bp, Glycine max
aaccacaccaccccttcttccttttcatcaggtttattccttttcttttggttcaattttgctgaatggagagtgcaagaatcagcaaatggttaaatcttctagtttgtgtactgctattgcttaaggcagaaggatctcttgttccattgactttggtgaagaatgcagaatcaaaaggagctgtttgtttggatggaagccccccagcataccactttgacaacggatttgaagaagggattaagaactggattgttcac

SEQ ID NO: 204444 - DNA, 264 bp, Glycine max
acaaaacagagaaaaaaaaggttgtgaattttgcagttgcgtgcgtttctgttccatacaatttcgatttcaatggcgaggcctaatcaggaggcagtcgagacgttcgtcagcatcactggcttgacagaagcagtagcgctgcaaaaattagaggagcatggcggtaatctcaatgaagcagtcaatgcacattttagtgaaggagacagaaatctaacgaccggctctcgcaacagctctgccgtatttcctcaagatgat

SEQ ID NO: 204445 - DNA, 267 bp, Glycine max
tcgctccgcaccagtttcaccgcacgaatatcttgttgtttggagcgatccgagaaaaactctgtaaacatgttggtttaccaggacctccttacaggtgatgagcttctctctgactccttccgttacaaggaaattgagaatggaatgctgtgggaagttgaggggaagtgggttgttaaaggagcagttgatgtagacattggtgcaaacccttctgctgagggtggaggagaagatgagggagttgatgatgcagctgttaag

SEQ ID NO: 204446 - DNA, 197 bp, Glycine max
cagattcaaccagttaaacttggaacccaaggctttgaggtttcaaaattgggattcggatgtatgggccttactggagcgtacaatgaccctctccaagaacaggatggcataatctgttatcaagtatgcgttcagtaagggaatcacattttttgatactgcggatgtttatggagccgatgctaatgaacttt

SEQ ID NO: 204447 - DNA, 262 bp, Glycine max
gaaaaagagtggtactttttcagccccagagacaggaaatacccgaacgggtctcgacccaacagagtagctgggtcgggttattggaaagccaccggaaccgacaagatcatcaccaccgaaggtagaaaagttggcataaaaaaagccctcgttttctacgttggcaaagcccccaagggcaccaaaaccaattggatcatgcacgagtatcgcctcctcgactcttcccgaaagaacactggcaccaagcttgatgatt

SEQ ID NO: 204448 - DNA, 261 bp, Glycine max
gaagtggacaacaatgtaagggaggatcgtgctctcttaaatggtgcacagaagctacttggcattttgatagctgttggtgaggcagttgcatatgttctttctggaatgtatggtagtgtgggtcaacttggagtgggaaatgccatcctcatcatcctccagctatgttttgcgggtattattgtgatatgtttggatgagctaccttcaaaaaggctatggcttgggatctggaatttctctgttcattgccactaa

SEQ ID NO: 204449 - DNA, 261 bp, Glycine max
atgcgaagacagcacagcactgcactcttcgcaacacaacaaaaaaagacaacccagagagcgcgtcttaataaacgctcttctctgaaaacccccatttcttttcttctttcttcttctctttcgcttcttcgatcttcgatcttcgtcgctgaaaatgagagagtgcatttcaatccacatcggccaggccgggattcaggttggaaacgcctgctgggagctttactgcctcgaacacggcattcagcctgatgggca

SEQ ID NO: 204450 - DNA, 265 bp, Glycine max
gacgtcttctccgttcccggcgacttcaacttgacgctcctcgaccacctcatcgccgagccgagtctcaacctcgtcggctgctgcaacgagctcaacgccggctacgccgccgacggctacgcgcgcgccaagggcgtcggcgcctgcgtggtcaccttcaccgtcggcggactcagcgtcttcaacgccatcgccggagcttacagcgagattttgccagtgatttgcatcgtcggaggacccaattccaacgactacggcc

SEQ ID NO: 204451 - DNA, 264 bp, Glycine max
cattaattaagcactctaaaacatatctttatttccttgtctacatatatcttgaaaaactcaatcatggctagtgtttcttcggtttcagctccatttagaaggcttgaggggaaggtggcgattatcactggtggtgcgagtggtctaggtgcagccactgcaagactcttctctaagcatggagcacatgtagtcatagctgatattcaagacgacttgggtctctctgttgccaaagagttagaatccgcttcctatgtc

SEQ ID NO: 204452 - DNA, 250 bp, Glycine max
attattttgtgcaatggcagcaaagagcaaaatcctagtcattggaggaacaggatacattggaaaattcatagttaaggcaagttcagaagcaggacaccccacatttgccttggttagagaaagcaccctttctcatcctgaaaaatttaaacttattgagagcttcaagacctctggagttactctcctttatggtgatcttactgatcatgaaagccttgtaagggaatcaaaccagttgatgttg

SEQ ID NO: 204453 - DNA, 189 bp, Glycine max
ttccaacctctcaagtccaacctacccctttttcttctcccaccaacttcaccgtcttcttcctcgatcatgtctcacttcaagggcaagtaccatgatgagcttattgtcaatgctgcttacattggcactcctggaaagggtattcttgctgctgatgagtcaacagggacaattggcaagcgtttg

SEQ ID NO: 204454 - DNA, 258 bp, Glycine max
  unsure (1)..(258): unsure at all n locations
gaaaacagaagaaaacaaaatggaagacacagtttctgcgttgaggtctttgatggtttctcactctccgccgctggatgccttagtggtgccctctgaagattatcacctgagngaatatgtgtctgcacgagacaagcgccgcgaattcgtttccggcttcactggaagtgccggcttggcacttataacaaagaaagaagcactgctgtggacggatggacggtattttttgcaggctgagaaagaacttagtgc

SEQ ID NO: 204455 - DNA, 259 bp, Glycine max
gattcggatctagagtcttcagtttctcctcgttgttcttcgctttcctgttttcaatttcgattctttcgttaatttaataagatgtttgggagggcaccgaagaagagcgataatacgaggtactacgaaatcctcggcgtctccaagaacgcttcgcaggatgatctgaagaaggcttacaagaaagccgccattaagaatcaccccgacaagggcggtgatcccgagaagtttaaagagctggcgcaagcttatg

SEQ ID NO: 204456 - DNA, 255 bp, Glycine max
caacaaccttagcagttaattagcacaacacaaaaggagagagagagagagagagagagagagagcgagagagagagagagatggggagaagctcacgttgtacaaaggagggtttgtatagaggtgcttagagagctcatgaagacaatatcctgagagtatatatgactgtccatggtgaatgtagatggagacaccttcccaagagagcatgtgtgaaaatatgcgggaacagttatagacctcgatggttg

SEQ ID NO: 204457 - DNA, 257 bp, Glycine max
ctcgagccgactcgttctagatcgagagctgccgctcggatctagcactctcgagccgctcgccccgattcggctcgagattgccgctatggccaattttctcggctatgatatttacgaactggagttgactgaggttcataacaactctgaactcaggaagcttctcatgaaaaccagctccaaatcgattcttgttattgaagacattgactgctctatcaatctcaccaacagatagaacaataacagctcga

SEQ ID NO: 204458 - DNA, 263 bp, Glycine max
ctctctgtctcgtttacacatctctccaacctttcactttcgtttctcagttttattcgaatccctctctcaatctcctttccaaatggccagcgttgaggttgcacagcaaacaccaacaacagttccagaaaatgaaacaaccgaggtaagcaagacccaggaaacaaccccagtcactgaggctcctgcaacagaacaaccagcagctgaggttcctgcaacagaacaaccagccgctgaggctcctgccccagaatcaa

SEQ ID NO: 204459 - DNA, 262 bp, Glycine max
ctttgtttgcttctcaagtctctcgaagcctctttctctctcttcacagaagctatctgtgtttggtgttactaagtctccaacaagcaaagtacatggttgatttggaaatccaggtccccaccccattcgacccgtttgccgaggcgagagaatcggatgcccccggagcaaaggagtatgtgcatattcgaattcagcagaggaatgggaagaagagtctgaccacagtgcaagggctgaagaaggagttcagctacga

SEQ ID NO: 204460 - DNA, 261 bp, Glycine max
ctcaaaaccccactcatcatccatatcacaaaaaactattttggcttctgcctttccttttccagggagctcattgacaatggctgaaacaaagtgggtcatgaaggacaaaagatggtctctccatggaatgacagctctagtcacaggaggcacccgaggcatagggcatgccattgttgaagagttagctgagtttggagcaactgttcacatatgtgcacgtaatcaagatgatattgataaatgtttagaagagtg

SEQ ID NO: 204461 - DNA, 261 bp, Glycine max
agcaaacgcagcattgggagatagaaagagagagagaaagagagagagagaaagacccttacccttctctatcgctcgctttcctttgacgcttctgacccttgctttgtctgcgtcttccttctttctttctttctttctctgtgtgtcgtaatggctctcccagactcttcttcccgtcgcaactccctgatcccctccttcatctactcctcttcctccaacacgctccctctccaccacatgctcaacaccgactcc

SEQ ID NO: 204462 - DNA, 257 bp, Glycine max
ctcggagccattccgatttgggatcggatttttacgggaagagcgttggtggtgcttcgagatctgacggtgtcgctgatgatggatacggagatggggtgtatgcttatgaagggggcaaggtggaaccctatggggcgcgtggcacggcgccaaaatcgtcgacttgggcggcgtttgatgattacgggaggtccatcagtttcccctcgcagaaggaatcttctgtggggggtaagattgtgaaagcggtgccc

SEQ ID NO: 204463 - DNA, 263 bp, Glycine max
aatatgtagatggtgggccaacagaaaatactgctccaccttctgtttatggtactctaacacagatgaattcagccgatgatccccgaagtaatttcaatgtgacttggcagtttgatgtggagcctcaatttcagtaccttgttacgacttcacttctgtgacataatcagcaaaagtctcaatgaactgtacttcaatgtttacattaactcctggtttgttgccaaggatcttgatcttagtacaataaataataatat

SEQ ID NO: 204464 - DNA, 124 bp, Glycine max
gtggggtaccagaaaatatagcaagacaggctatttcaatagcatcatccaaaatgcctatacgaactcaattcattatttcagggtaataaattagaaccaaaggaaagaggtctttaagatg

SEQ ID NO: 204465 - DNA, 268 bp, Glycine max
tctgcacccaccattactcagcactgccactcttcaatcacactaatggctgtcaccttctcagatcctcacaccgaagagggcatcaaatccctcgatcaattcctttctgggaaaacttatatctcgggggatcatttgcaaaagggtattttcaaggtgtatgccgctgttgtggaaaagccaggagactcttttccaaatgctgctaagtggtacgatgccgtctcttctcaccttgctccaagcttccctgggcacgctcaag

SEQ ID NO: 204466 - DNA, 282 bp, Glycine max
gagtacaagtaaaggatcacccaaagttcagaagggagcaggatgacctctatattgatcacaatctcagcttaaccgaggcactctgtggcttccagtttgctgtcaaacatcttgatggtaggcaactattgatcaaatcaaaccctggggaagtcatcaaaccaggtcaatataaagcaataaatgatgagggaatgccacaacacaataggccattcatgaagggtcgcctttacatccagtttaatgttgatttcccagactcagggtttctttccc

SEQ ID NO: 204467 - DNA, 277 bp, Glycine max
  unsure (1)..(277): unsure at all n locations
tccaaatgagcnatatcgtgntattcttggtgatgtccgagacaaactgtataacacacgggaacgtgctcgccaattattagccaatgggacctctgatatccccgaggagacaactttcacttacgttgagcagnctcctggagcntcttgaannatgcnatagatcactctgtgcctgtggtgacagacctatagnagatggaagcctccttgatttcctgcggcaagtttcganatttggactctcacttgtgagacttgacatccgtnaaga

SEQ ID NO: 204468 - DNA, 276 bp, Glycine max
caagccccactcaaccaccacacctctcctcgttcacgctacccctttctgctcttcttctacctttcaagttttaaaagtataaagatggcagagacattcctatttacctcagagtcggtgaacaagggacaccctgacaagctctgcgaccaaatctccgatgctgtcctcgacgcttgcctcgagcaggacccagacagcaaagttgcctgcgaaacatgcaccaaaaccaacttggtcatggtcttcggagaaatcacgaccaaggccaac

SEQ ID NO: 204469 - DNA, 275 bp, Glycine max
caccatcttattcatatgatgaggggaagaaggagacatcaagatgagcaatctcgtgctttgtacgacctctcctctctcgttctcaacctccttcgctcgcctctgacgttctccgacgaggttccgccagcgtcacggcgtccgggccaggctcagatatccccggcgggattcgcgtcgttgctgctgggaatatccctggcgttgatgctgtgtggatctgtgacgttcttcatcgggttcgtgttgatgccgtgggttctgggattggt

SEQ ID NO: 204470 - DNA, 278 bp, Glycine max
cacaccaccccttcttccttttcatcaggtttattccttttcttttggttcaattttgctgaatggagagtgcaagaatcagcaaatggttaaatcttctagtttgtgtactgctattgcttaaggcagaaggatctcttgttccattgactttggtgaagaatgcagaatcaaaaggagctgtttgtttggatggaagccccccagcataccactttgacaacggatttgaagaagggattaagaactggattgttcacattgagggaggaggatgg

SEQ ID NO: 204471 - DNA, 271 bp, Glycine max
atatagcccaagccctatacaaccaaaccctaacacacacccatttgattcagtttccatggctagcctcaaggttgcatttttggctgcagtgctctgcatggttgtggtgagtgcacccatggcacatgcagctatcacgtgcgggcaggtgacgaatagcctgatcaattgcatcggttacctccagaacggaggaacgccgccgtcgggatgctgcaacggagtgaagagcctcaatgccgccgccaagaccaccgccgaccgccag

SEQ ID NO: 204472 - DNA, 275 bp, Glycine max
ctttcaaagaaaaaaggagagtgcttagagagagagcaaacatattattttcattttcatctttttttgagtatcaacaaatggcaaccactgtgatgaccactctcccccaattcagtggtcttagaccccaattctcagctgcccctgtgaagaacttggttgctgtgcaacccatgagtcgcaaggggaagggtgcattgggagctcgatgtgactacattggttcatccactaatctgattatggtggcttctacaaccctgatgctgttt

SEQ ID NO: 204473 - DNA, 274 bp, Glycine max
agactgaaaaaccatcatctgtgtttactaagagaagttcccagactgccacattacaacataagaaaccagcttctagtgttgatgctgaaattgtaggtggatcaacgataagttctcaggctatgctgaagcaagaggtttctactgcatcgtcaaagggcactactcttaaagagggtgatcgagtaaaatttgttggtaactttccttctgccgtctcatcactgccaaattatccttcaaggggacctagctatggctcccgaggcaa

SEQ ID NO: 204474 - DNA, 289 bp, Glycine max
aattctgctcgagctcgagccgggaagatattgagaagatggttcaagaggctgagaagtacaagtctgaggacgaagagcacaagaagaaggatgaggccaaaaacgctttggaaaactatgcatacaacatgaggaacaccgtgaaggatgacaagattggtgagaaacttgactcggctgacaagaagaagattgaggatgcaattgagcaagcaatccagtggttagacagcaaccagcatgcagaagcagatgagtttgaggacaaaatgacggaattggaaag

SEQ ID NO: 204475 - DNA, 273 bp, Glycine max
gggaatgatgattccgtttatcagcgatcttcttctgttggggtcactctcatcaccggttatcttggtgcgggcaagtccactctagtgaatcatattttgaacacgcagtatgggaagaggattgctgtcattttgaatgagtttggtgaggaaaaaggcgtggaaagagcgatgatcaatgaagggggtaagggtgcactggttgaagaatgggttgagcttgccaatgggtgtatatgttgcactgtcaagcatagtttggttcaagca

SEQ ID NO: 204476 - DNA, 275 bp, Glycine max
aagacctgtggcccatagattgagctttgttgagatggtagtcccgtatggagatcctaatgatcctcactataggaaaaatgcttttgacgctggggaagatggcctgggtaaaaatgctcattctctcaagaagggctgcgattgtttaggctatatcaaatactttgatgcgcacttcacaaacttctatggaggtgttgaaacaattgagaactgtgtttgtttgcatgaagaagatcatggtattttatggaagcatcaagattggagaa

SEQ ID NO: 204477 - DNA, 269 bp, Glycine max
agttgatttggaagaaacccagctaaggtaattcctcgcaacccctaactaaaccttcaaaggatcatcatgggcagtcacaatgctttggctgccactttcggaatattaggtaacatcatttctgtgatggtgtacttggctccggtgccaacgttttaccggatatacaaaaagaaatgcacggacggtttccactcgctgccatacttgttgtcattaatgagttctatgctttggttatactaggccttcctcaaaattcatga

SEQ ID NO: 204478 - DNA, 273 bp, Glycine max
cggctcgagcagagcacaaaagaaggctgagcgtgagcagatcttgcaccaccaatttgaggagaagcggaaggaacaaatcttgaaatacaagggatcgaacatttatgtgaagaacattgatgaccatgtaagtgattaagaactgagggatcattttagtgcatgtggcattataacttctgcaaaaataatgcgagacgacaaagggataagtaaagggttcggctttgtctgcttctccactcctgaggaggccaataaagctgtgaa

SEQ ID NO: 204479 - DNA, 271 bp, Glycine max
gggaatgaaagtaacgatgacactaacagtaaagaagtttatatcgtgtacatgggagctgcagattcaacaaaagcttctcttaaaaatgagcacgctcagattctgaattcagtgctaagaaggaatgagaatgccctagtacggaactacaagcatggtttctctgggttcgcagctcgtctatcaaaagaggaggcaaactcaattgctcagaaacctggtgtggtgtctgttttccctgaccccattctgaagctccacactacac

SEQ ID NO: 204480 - DNA, 270 bp, Glycine max
ccaatatagcccaagccctatacaaccaaaccctaacacacacccatttgattcagtttccatggctagcctcaaggttgcatttttggctgcagtgctctgcatggttgtggtgagtgcacccatggcacatgcagctatcacgtgcgggcaggtgacgagtagcctggccaattgcatcggttacctccagaagggaggaacgccgtcgtcgggatgctgcaacggagtgaagagcctcaatgccgccgccaagaccaccgccgaccg

SEQ ID NO: 204481 - DNA, 275 bp, Glycine max
cggctcgagaaaatatggacccgtgatgcatcttcaacttggacaggtttcaactattgtcatttcatcccctgagtgtgctagggaagtgatgaaaacccatgcccttaacttcgccacaaggcctacacttctagctattgaaataatgtcttacaattccacaagtatcgcttttgctggctatggacattattggaggcagctacagaaaactatgcacattggagcttttaagcctaaaacgcgtcaactcattccagccaattagagaa

SEQ ID NO: 204482 - DNA, 272 bp, Glycine max
aagagaatggctcccaagggtttaatctttttggctgtgttatgcttctcagcactgtcactgagtcgttgtcttgcggaggataatggacttgttatgaacttctacaaggaatcatgccctcaggctgaagacatcatcaaagaacaagtcaagcttctctacaagcgccacaagaacactgctttctcctggctcagaaacatcttccatgactgtgctgttcagagttgtgatgcttcactgttgctggactccacaagaaggagctt

SEQ ID NO: 204483 - DNA, 267 bp, Glycine max
ctttagcaagctcattggttcattgggttgttggtattgtgtacatgctactaattagcatatttgtcagccttcttagaggggttttacgtaatggagttttatactttcttcgggaccctgctgatccaaactacaatccattccgtgatctgatagatgatcctgtgcacaaacatgctcgcagggttctgttatctgttgcagtttatgggagtctgattgtgatgctggtattcatgcctgtcaaacttgccatgcggatgg

SEQ ID NO: 204484 - DNA, 265 bp, Glycine max
acacaacccatggccaccacctccgcattcctcctccttccgctcctcctgctgctccacctcgccatcgccgctcacggcatcggcatcaactacggcacgctcggcgacaaccttccaccgcccgcggcggtggcgaacttcctgaagacgaagacgaccatcgaccgcgtgaagatctacgacgtgaacccggacatcctgcgggccttcgccggcagcggcatctccgtgacggtgaccgcccccaacggcgacatcgccg

SEQ ID NO: 204485 - DNA, 270 bp, Glycine max
ctcccctttgccgctgttgttgttgctgcaccaccgaacaacttcccctgtaaatcgcgtttcgtttgtgcaaggttttaaaagatggctgatgctgaggacattcaacctcttgttgttgataatggaactggaatggtcaaggctggttttgcaggtgatgatgctcctagggccgtgttccccagcattattgggagaccacgccatactggtgtaatggttgggatgggtcagaaggatgcttacgtgggtgatgaagcccaatca

SEQ ID NO: 204486 - DNA, 270 bp, Glycine max
attgaattctccagagagaagaagaaacttaatcgatcatcacttcacttcactaatacatcatggcagacgagacccagaacaagtatgagagctctgaggttgaggtccaggatcgtggtgtttttgactttctcggtaagaaaaaggatgaagaagacaagcctcatcctcaggaggaggtcatcgccaccgagtttcaaaaagtcactgtctcagaccaaggagagaacaagcacagcctcttagaaaagcttcaccgatctgaca

SEQ ID NO: 204487 - DNA, 271 bp, Glycine max
gcactcggttgcagaacagaacaaacttctttcactctttcgcttctgaatcttcaacaatggtgctcgaggcgacgatgatctgtatcgacaattctgaatggatgtgtaacggagattactctccttctcgatttcaagctcaagcagacgctgtcaatctcatatgcggtgctaaaacgcagtctaatccggaaaatacagtgggagttctcacaatggctgggaaaggcgttcgtgttttggttacccctaccagtgatctgggcaa

SEQ ID NO: 204488 - DNA, 272 bp, Glycine max
gcctctggaagcacttgatcaagactcaagagtgaacaaaaaaaaatgatgggtacccttaaggtgtccaacagtagtttatacatattttcgaagttcctagtaatttgtatggtgatgatgatatctttggttgattcaagttattccttgtgtgattttgaggcaatcttcaattttggtgattcgaattcagatacgggtgggtttcatacaagctttcctgcacagcctgctccctatggaatgacttacttcaaaaaaccagtggg

SEQ ID NO: 204489 - DNA, 267 bp, Glycine max
gataagattggagaatgtgcttattgtcaaggaggctgatacaactttcaattttggtgatagaggttacttatcttttgaacacattacctgggcaccatatcagacgaagttgattgacctgaaccttctaagtcccgaggagataaattggctgaactcctatcacgccacatgtaggaatattctggcgccatatttggatgaagttgaaaatgcatggctgaagaaagccactgaacctgtaggtgcatgagctgtgtttgg

SEQ ID NO: 204490 - DNA, 269 bp, Glycine max
ctttctcctaaaacatctcaatgggttcttcttctattacaacatcgcccgcaaccatgaccatggctgcgatcgtgctcctgttcacggtctttgccgtttcctccgccctagacatgtcgataatctcgtacgacagcgcccacgcggacaaggccgccacgttgcgcaccgaggaggagctgatgtccatgtacgagcagtggctcgtgaagcacgggaaggtgtacaacgcgctcggcgagaaggagaagcgcttccagatcttc

SEQ ID NO: 204491 - DNA, 217 bp, Glycine max
gtgtaagcacaacacttggctccacatcagcgtgcttgccacgtggtgacatgagaaattctgggagttgtgtattgaagtgagcaagctgctggtgctggagtttaggggtgatggtttattggcagggttacatgagtttgtgatggtgtgttactgtgtttctttaggtttgaataaatgatatttactttataatttatattgttgtttgtgc

SEQ ID NO: 204492 - DNA, 269 bp, Glycine max
gaagtgcccaaggaagctcgttctttcgtcgtcgtcacaagtcacaactcgcaaaccacaatgcctaagcagatccacgagattaaggattttcttctgacggcgcggaggaaggatgcgaggtcggtgaaaatcaagaggagcagggatgtcgttaagtttaaggttcgatgctccaagtacttgtacacgctttgtgtctttgaccctgagaaagccgataagttgaagcaatctcttcctcccggtttgagtgttcaagacctgta

SEQ ID NO: 204493 - DNA, 267 bp, Glycine max
gaaaatgttcagaaaccagtacgacacggacgtgacgacatggagcccggcggggaggctgttccaggtggagtacgcgatggaggcggtgaagcagggctcggcggcgatagggctccgatccaagacccacgtggtcctcgcatgcgtcaacaaggctaactccgaactctcatcgcaccagaagaagatcttcaaggtcgacaaccacatcggcgtcgccatcgccggcctcaccgccgacggccgcgtcctctcccgctacat

SEQ ID NO: 204494 - DNA, 269 bp, Glycine max
ctcacccgtccccaaaaccctaatcgaggttctctcctcctcactatatattgcttgtgtcgctggagtccatcgcttagaaaccaaaaggctctctcacgcagtcgcagtgagtgaaaaggaaaaccctaattgcggtattctcagtgccttcgagagaaagaaaaaatggcagataatcttgttctccgtggcaccatgcgcgcccacaccgacgttgtgacggcgattgccactcccatcgacaactccgacatgatcgtcaccgc

SEQ ID NO: 204495 - DNA, 264 bp, Glycine max
ggaggatccccgcggaattccaaacaatctcatgccatttgttcagcaagtagcagttggccgacggcctgcactgacagtttttggaaatgattataatacaactgatggcactggggttcgggattacattcatgttgttgatttagcagatgggcacattgctgcgttgcttaaactagatgatcctaatataggttgtgaggtttataacctgggaacaggaaagggaacatcagttttggagatggttcgagcttttga

SEQ ID NO: 204496 - DNA, 265 bp, Glycine max
atttagaaacaaaaacatgttggtgaaggtgtacggtccaacctatggagcccccaagagggtgctggtgtgtctgattgagaaggaaattgagtttgaaacagtacatattgatctcttcaagggagagaataaggaacctgagttcctaaagctgcagccatttggatcacttcctgttattcaagatggtgattatactctctatgaatctcgtgcaataatcagatactttgcagagaagtataaagaccaagggacagac

SEQ ID NO: 204497 - DNA, 268 bp, Glycine max
atcaaggtctcaacccctcacgctgcttccatcattctcgaccctttccctccctctcaggcttacttcaaccaatccctcgtttccgttattctccctctccttcagttcctttcacgaaccggttcccctctcatgatgaacctttacccctactacgtcttcatgcagaacaaaggtgtggttcctctcgacaatgctctcttcaaacccctcactcctaataaggaaatggtcgaccccaacaccttgcttcactacaccaacg

SEQ ID NO: 204498 - DNA, 267 bp, Glycine max
agtagctattatactctctagagtaattgcggaatctgctagaattttctaataatggcgaaagacgttgagcaggtcacagagcaaggtgaatactccgcgaaggactaccatgaccctcctccggcaccgttgatcgacccagatgagctcacaaagtggtccttgtacagagccgccatagctgagttcatagcaacactcctttttctttacatcaccgtgttgaccattattggctacaagagacagagtgacaccaaaatc

SEQ ID NO: 204499 - DNA, 268 bp, Glycine max
acgctctccaatacaaaataaccactcactgaatattcggtcgaagatgtccgccgccgaagaagctaaagttcccgccgtcgaaaagccggtggaggaggtgaaggcgccgaagcttgccaaggagaagaaacctaaggctccgaaggaaaagaagccgaaacaggccaaaactgcttctcatcctccatatctccagatgattaaggacgctttgattgctctgaacgagaaaggaggatcgagtccatatgcgatagcgaagtac

SEQ ID NO: 204500 - DNA, 268 bp, Glycine max
cttactcctcacactttctctatcgttttcatctctgtttcagatactgagctctcgtatattccccagccatggccgaaaaggtcaccataatgaggctcaaggttgatcttcagtgccacaaatgctacaagaaggtcaagaagattctctgcaaattccctcaaatccgagaccaggtgtacgacgagaagaataacatcgtgaccatcgcggtggtatgctgtaaccctgagaagctcagggacaaaatttgctgcaaaggttg

SEQ ID NO: 204501 - DNA, 263 bp, Glycine max
gtcaagaatgctattccatccggtctgattccttccaccaacatctcatcatacaagtcaagcacttccttgtaatgcccattcctaccatacacaccaaacattgaagtccataacacaacgtccctgcttcttacttcttttctaatctccatcccaaccaacttgaacacttgccaagccttctttactaatccacacttgccatacatctcaaccaacgcgctctgaagaaacacatcactctctatatcaggtgtcgt

SEQ ID NO: 204502 - DNA, 251 bp, Glycine max
atcttcttcttctttttcatcaatcatcaccagtggttcttttccttctgagaagatcgaattgtgttttgcaaaaatgggagttccagagaaagaccctctttcccaattgagtttgcctcctggttttcggttttaccccaccgacgaggagcttctcgttcagtatctgtgccgcaaggtcgctggccaccatttctctcttccaatcattgccgaaattgacttgtacaagttcgacccatgggttc

SEQ ID NO: 204503 - DNA, 264 bp, Glycine max
cagaattctctaaaagagatctttttctgctctttgaagaaagaagggtctttgctacattttggagatgtctctgctctcagatctcatcaaccttaacctctccgataccaccgagaaggtgatcgcagagtacatatggatcggtggatcaggaatggacctgaggagcaaagcaaggactctcccaggaccagttagcgacccttcagagcttcccaagtggaactatgatggttccagcacaggtcaagctcctggtga

SEQ ID NO: 204504 - DNA, 263 bp, Glycine max
cgagattgaggcgggggttgatttggaagaaacccagctaaggtaattcctcgcaacccctaactaaaccttcaaaggatcatcatgggcagtcacaatgctttggctgccactttcggaatattaggtaacatcatttctgtgatggtgtacttggctccggtgccaacgttttaccggatatacaaaaagaaatgcacggacggtttccactcgctgccatacttgttgtcattaatgagttctatgctttggttatacta

SEQ ID NO: 204505 - DNA, 262 bp, Glycine max
gagaatggctcccaagggtttaatctttttggctgtgttatgcttctcagcactgtcactgagtcgttgtcttgcggaggataatggacttgttatgaacttctacaaggaatcatgccctcaggctgaagacatcatcaaagaacaagtcaagcttctctacaagcgccacaagaacactgctttctcctggctcagaaacatcttccatgactgtgctgttcagagttgtgatgcttcactgttgctggactccacaaga

SEQ ID NO: 204506 - DNA, 263 bp, Glycine max
agaacattctacgacgacccgcaaatgggttacaccatggacaagaaagttcgcaactgggacgagaagcgcgaggagtggctgaagctccacccttccttcgccgccggagctagagagagggttttcatggtgaccggttctcagccaaagccgtgccggaaccccataggagaccacctcctcctgcggttcttcaagaacaaggtggactactgtcgtctccacgggtgcgacgttttctacaacaacgcactgttgga

SEQ ID NO: 204507 - DNA, 266 bp, Glycine max
aagcaacattttactgggtatataagtggagagtgtaactgaaattatgtggaggtgcatcaatggaagaattgccagaagatttttatccacttcttctgccagtgcccgtggttggtgggaccatgtaaggccagcaccgaaggaccccattgttcgtgtgaacgaggcatttctagctgacccttttccccataagatcaatcttggaataggtacttataagggtgatgatggcaaagctttcattcctcaaagcgttcgtg

SEQ ID NO: 204508 - DNA, 256 bp, Glycine max
  unsure (1)..(256): unsure at all n locations
tttcccaagttggtagggactggaaaacagcacacgtatgttgaaactgagaatgtgcgctatgtttaccagccaatagaagcactgtacctgcttcttgtaacaaacaaaaacagcaacatactggaagatttggaaactctgagacttctctctanacttgtacctgaatattcttactcccttgatgaagagggtatttgcacacatgcctttgagttgatttttgcatttgatgaagtcatctctcttgggc

SEQ ID NO: 204509 - DNA, 259 bp, Glycine max
gcaatagggaatcctcttcttgagtttaatactgatttcaactcaagatctgagtacctttggtcccacggactgatatcagattcaacatacgaagtcttaactagagtctgcaacttttcctcaattaggagacaaatgcaaaatgggaatcttagaggggtttgtggaaaagcaaataagctattggatagtgagattagcaactatgtagatgaatatgatgtcactcttgatgtttgtttgtcatcagtaaatc

SEQ ID NO: 204510 - DNA, 261 bp, Glycine max
cttcgcaagtgatagataacgcaaattctgcttcatgggactctccacgccaccgtcttcgacgttgataggctcaatgctggtggtggtggcggcaattttttcagcaagctcaagcaaaactttgaggagactgttggcatctgaaagggagttactaaactctatgcaaccattgatcaggagatagcaagagtaggaaggactagaatcatagaagatgaacatactaatcccagatggtatgagtcttttcacatt

SEQ ID NO: 204511 - DNA, 263 bp, Glycine max
gttttcttgcttattcttcttttctcctttctgatcactaccatggctagaaagaagctgaatcttacatacataaccaatgacccgaagaggaagacaacattgaagaaaagaaagaatggtttgatgaagaagatgaatgaaattagcactctttgtgggattgaatcatgtgctataatatatagtccaaatgatcctcagccagaggtttggccatctgactcaggagtccaaagggtgcttccaggttcatggaaatg

SEQ ID NO: 204512 - DNA, 264 bp, Glycine max
cagacttacatcaccaactacaacaaggccctcgagcagctccaagacgccatcgccaagaaagattcctccgccgtcgttaagctccagggcgccatcaagttcaacggcggaggtcatgtcaaccattctattttctggaaaaatctagctcctgttcgtgaaggaggtggtgaaccacccaagggttcactgggatgggctattgacacacattttggttcttttgaagcattaatacaaaaagttaacgcagaaggtgct

SEQ ID NO: 204513 - DNA, 263 bp, Glycine max
actcgagccgaatcggctcgagggaggggtttgcgtgtgtgagagaatatcagaatcagaagatgaagaaagaagacacagtgaagctgatcagttccgaagtttcgaatttgtggtcgacaaagaagctgcaatagtttcacagaccatacataacatgcttacttctccagggagtttcgctgagaggcagcacggcgaagttacctttcctgagatcagcaccaccattctcgagaagatttgccagtacttttattggc

SEQ ID NO: 204514 - DNA, 292 bp, Glycine max
gtacggtagtctgttagctgatgacgttgtccataccctattgacgcgcgtccctccaaccgcacctgccatccttcacgactatcacaggtttaagatcaaaggtcgcgtttatcccgctattctccctgtccagaataacacagtttatggcagggtctgtctctcttcttacatatccctacataattctaatatatgcatccatcatttaagactatttttcctcaggtgcttcttggtatctccggagtagaactagatattttagatgaatttgaggatgttgaat

SEQ ID NO: 204515 - DNA, 301 bp, Glycine max
cattcggctcgaggcaatgtgatacttgcattattggtttcatgttttgccttcaacaaattgcatgtatattctctattgttgccatgattgtgggaagcgatgcacttcaagaggcttctcagttgctgtcttgtatggctgactttgtgtaatggcacggtctgtgcatgcatgcagactcagcacaagattgagctggacacgcgagacgggacatttggcccccaaccagcaatggcagtgcctcctatgccgcagatgtcacgccttgatcaacaagttcctccttcggttgggt

SEQ ID NO: 204516 - DNA, 145 bp, Glycine max
ggaaggcccaagccgggaacatttgtgttgcatcatttgattggcgctgcagtggaatttgcaggtctactgagaggattaaagaggtacatcggaggtgtggagagggtgcgcatgctttgtggagtgcctctttctaaggggc

SEQ ID NO: 204517 - DNA, 287 bp, Glycine max
attttctggctcctctgcgtgctcgttgaatccatcctaagtgacttgcttgctgcaggcgacacgaggtcggtagaaactaagaatgggggacgagaatgcagaaacaaaaacatttaaggatttaggcttatccgagtcattggtggaagcttgcgacaaattgggttggaacaatccattaaagatccagccagaagcaattcctcttgcattggaaggccaagatgtgataggacttgcccaaactggttccggtcagactggaacttttgctcttcacatat

SEQ ID NO: 204518 - DNA, 278 bp, Glycine max
ctcgagccgtaaggtttcaaaggatgggggaccgatgagaaacccgttattgcaataatgggtcatagaaatgttcatcagaggcaacaaatcagaaaggtttatgaggcaatttaccaagaggacctcattaaacgcctggagtctgagctctctggtgactttgagagagctgtgtcaccgttggatgctggaacctgcaaatcgtgatgctgttttgggcaatgttggcctcaagaatggcagcaaaggttaccatgtgattgtggaaattgctt

SEQ ID NO: 204519 - DNA, 269 bp, Glycine max
ctcatgggtcgccagaacagaacaccaaccattgttgtagtcacgtccattcttcttgcatccattttctctctgctgtgggtccgaatcgacccgtttacgacaagagtcactggtcctgatgttgagcagtgtggaatcaactgctagagaaataacagctggcagattgaacaacagctttccactcacctgtgtcaaccaacaacataagcctgatggaatgttgtgtttgtcttccaattcttttgtttacagattttgatatt

SEQ ID NO: 204520 - DNA, 280 bp, Glycine max
gtggatacctaggcacccagagacgaggaagggcgtagtaagcgacgaaatgcttcggggagttgaaaataagcgtagatccggggattcccgatataggtcaacctttcgaactgctgctgaatccacgggcaggcaagagacaacctggtgaactgcaacatcttagtagccagaggaaaagaaagcaaaagcgattcccgtagtagcggcgagcgaaatgggagcagcctaaaccgtgaaaacggggttgtgggagagctatacaagtgtcgtgctg

SEQ ID NO: 204521 - DNA, 278 bp, Glycine max
caattctacactcattcaaactatggcagcgtcttcgctctgttcctctttcacctccaaaacgtggacgccgcacgcgcgctatcaccacaaaaccctagcacctccctattccgcctttcttcgcggagacctccagctccatccaccttcggtttccggaacgcggcggagaaggcgccgccgatcgggttcggtggcgtccctcggaggcttgttaggcggcatcttcaaaggcgccgatacgggagatgccccgaagcagcaatacgctgcga

SEQ ID NO: 204522 - DNA, 273 bp, Glycine max
tgtgagcgttatcgtggagttcaacttcgagggtttccttcacaactctgtaatttctaattccacagttactcttgtgttttagcgcgattcggagtgagtgatggctgggaaggcagagaatcgaatatttgttggaggtttatcttgggaagttacggagcgtccaatcgagcatgcctttgctcgatacggccaaattctcgaatgccagctcatgatggcaagggatacaggccgtccacgtggatttggttttatcacatttgccga

SEQ ID NO: 204523 - DNA, 173 bp, Glycine max
tactcagcaaaaattcatggcagttccaatcaagtatccggcaaaactcacccttagggtggttcttacttgtatcatggcggccaccggtgggttgatttttggctatgaccatggtgtttcaggtggagtgacctccatggattccttcctaaaagaaattcttcccatct

SEQ ID NO: 204524 - DNA, 283 bp, Glycine max
cacaaggcagaaccaaatagctcattagtgagtttttgagttcgtgtgtcctttctttgtgtgttgcaaggttacaagatggaggatcaaaatgcatcatctaatggattgggcaaggtgttccacaaggttaagccctggattgctatgatgtcccttcagtttggctactccggaatgtacatcatcaccatggtttctttcaagcatggcatgagccattgggtactctccgtgtaccgtcatatagttgccactctcatcatggccccttttgcatttg

SEQ ID NO: 204525 - DNA, 280 bp, Glycine max
tgagaacttcaactgagggtgagagtgacacaaatctagggagcactactctaaaagttctattagattcttcaaaacatgaccatgcatcgcgagtcttgggacttttgtcttcggcgttatgggcaacatcatctcctttggagtgttccttgctccattgccaaccttttaccaaatctacaagaagaaatccactgaagggttccagtcacttccttatgttgttgcactgttcagtgcaatgctttggatttactatgctttcgtcaaaagggaa

SEQ ID NO: 204526 - DNA, 276 bp, Glycine max
cacgaatcgacgatgaagacaaccttctgatccgtcaagtggtgccggacgcggaggaccaccacctgctcaacgcggagcaccacttctccgccttcaagacaaagttcgccaagacctacgccacgcaggaggcgcacgaccaccgcttccgtctcgttcagaacaacttgctccgcgccaagtcgcaccagaaattggacccctccgccgtccacggcgtacaccaggttctccgatctcactccgtctgagtttcgcggccagttcctcggc

SEQ ID NO: 204527 - DNA, 277 bp, Glycine max
tctaaatccaaatccaaatccaaatccatggactccaaaggattgttctgaaggaatttgcagcatctattgtcctcagtggtgttacaaagtgtactctcctccccctccaattctactaggtgatggcgatgatgacccttcaggctttgaattctctcctctcatagttgctgtgattggaatcttggctagcactttcatcttggtcacttactataccattatctcaaggttctgcaggcgcagaaacaacaccaatgattcaacagaagac

SEQ ID NO: 204528 - DNA, 280 bp, Glycine max
ctctttccattttttaatttatttatcttcctttaaattcaatcctcagatctttgtaagagtcatccatatcatacccttcactttcctggaaaaaaattggaacctgcctctcttaaagtttgtatttttttgagtgggtgggttgattgagagtactgtgcaagctttggaactttgtcccaacctgctacttcaatggctactgaagaggttaacaaacctcaatcacttcctaccataaccctgagatgatagtgaaagcacttgaagcactgaa

SEQ ID NO: 204529 - DNA, 282 bp, Glycine max
cgaagagaatggctcccaagggtttaatctttttggctgtgttatgcttctcagcactgtcactgagtcgttgtcttgcggaggataatggccttgttatgaacttctacaaggaatcatgccctcaggctgaagacatcatcaaagaacacgtcaagcttctctacaagcgccacaagaacactgctttctcctggctcagaaacatcttccatgactgtgactgttcagagttgtgatgcttcactgttgctggactccacaagaaggcgcttgtctgag

SEQ ID NO: 204530 - DNA, 264 bp, Glycine max
caagaatgcgcgcctccgcgagttggtaaacctcgtggtggtggccggagacaggaggaaagagtccaaagacttagaagagaaggccgagatgcagaagatgtatggcctcctcgagacctacaagttgcacggccagttaagatggaacacctctaagatgaaccgtgtgaggaacggagaactctaccgtgtcctctgtgaccacaaggggtgccttatgtgcagctaccgtttatgaggactttgggttgactgtggtta

SEQ ID NO: 204531 - DNA, 280 bp, Glycine max
atcgtggcttgtcagatgctcagagagatgaacttgctgataggatatcggtcatgggacggtcatctcccaatgacaaactattgttagtacaagcattgaggaggaagggtcatgttgtggctgtacatggggatggaacaaatgatgctcctgcacttcatgaggccgatataggtcttgcaatgggtatccaaggtacagaagttgccaaagagagctctgatatcattattttggctgacattgtgcttccgttgtgccggttgtcagatggggg

SEQ ID NO: 204532 - DNA, 278 bp, Glycine max
ctccaacctttcactttcagctttatttgaatccctctctctcctttccaaatggccagcgttgaggttgcacatcaaacaccaaccacagttccagaaaatgaaacaaccgaggtaatcaagacccaggaaacaaccccggaaccagtaccagccactgaggctcctgcaacagaacaagcagcagctgaggttcctgctcaagaagaacaacaagcaactgaggttcctgccccagaatcaaccaccgaagcaccaaaggaagaaaccaccgaagc

SEQ ID NO: 204533 - DNA, 191 bp, Glycine max
ggcttaggttcatgattcgggatgttatagagttgcgtgctagtaactgggttcctagacgggaagaggtcaaagccaaaaccattactgaaattcattcagaggcagaaaaaaatcttggtttgcggccaggagcaactgcaagtatgagacattcccgtggcggtgttcaaggaaatgccagctctggg

SEQ ID NO: 204534 - DNA, 280 bp, Glycine max
atcaagttactatctataattaattaaattcctcgtggaatattgaagacgccatgtctgacgctgggcaggtccatcaagtgcagagctgcggtggcatgggaagcagggaagccactgtcaatagaaaccatagaagtggcaccaccccagaaaggtgaagtgcgtttgaggatcctcttcaaatccctttgccgtagtgatgtttattggtgggatgctaaggaccagactcctctgtttcctcgtatcttaggccacgagacttcagggattgtgg

SEQ ID NO: 204535 - DNA, 283 bp, Glycine max
gaaaaaacgacattcattcatctatggctacccttattgctcccagcaaccactctccccaagaagacgctgaggctctcagaaaggcttttgaaggatgggggactgatgagaaaactgtcatagtaatattggggtcatagaactgtttatcagaggcagcaaatcagaagagtctatgaggaaattttccaggaggatcttgtgaaacgcctagagtctgagatcaaaggagactttgagaaagccgtgtaccgatggatactagaacctgcagatcgtg

SEQ ID NO: 204536 - DNA, 282 bp, Glycine max
cctcgagccgaatcggctcgaggttccccttattacgatcaactcgctcggatgtgtcatagcgctcatctacattctcacccacattaactatgcgcccaaggatgcacggcacttaacctataccctaatttgcggcgataaatattggcttcttggccttggtcctatcctcgcgttttgctctaaatggttcccaccgggtcaaagtcattggctggctttgtgacgccgtttcactcagtgtctttgcatcacctactaagcttatggcaaaagtga

SEQ ID NO: 204537 - DNA, 272 bp, Glycine max
gcgaagagaatggctcccaagggtttaatctttttggctgtgttatgcttctcagcactgtcactgagtcgttgtcttgcggaggataatggacttgttatgaacttctacaaggaatcatgccctcaggctgaagacatcatcaaagaacaagtcaagcttctctacaagcgccacaagaacactgctttctcctggctcagacacatcttccatgactgtgctgttcagagttgtgatgcttcactgttgctggactccacaagaaggag

SEQ ID NO: 204538 - DNA, 265 bp, Glycine max
tgtaatggcgaacatagacatcgaagggatcttgaagcagcagcagccttatgatgggcgcgttccgaagacgaagatagtgtgtactttgggccctgcttctcgatccgtagaaatgaccgagaagcttctgagggcagggatgaacgttgctacgtttcaatttctctcatggcacccacgactatcaccaggaaaccctcaacaatctcaagactgccatgcacaacactggcatactctgtgccgtcatgcttgacactaa

SEQ ID NO: 204539 - DNA, 283 bp, Glycine max
cgcacgcggctcgaaggaaggcccaagcagggaacatttgtgttgcatcatttgattggagctgcagtggaatttgcaggtctgctgagaggattaaagaggtacataggaggtgtggagagggtgagaatgctttgtggagtgcctctttctagggggcacaaaagtgacagtggagttcttcctaactcaggaagattaatactaaggcaatatgagtcaaccctgcaagattttctatttttctttttctttttctatagttttgtgcagtgtagagaaa

SEQ ID NO: 204540 - DNA, 282 bp, Glycine max
ctgatttgcgaaagatatcatgttgcagtgcttagaaggacttaagcctttatttgcgtccatattgcgatgttgtgacctggatatatataaccagccaagaggccttgaagatcctgaaacttcttgctagagagacagtgttcagtgtaagtgaaatagaagcactctacgagctcttcaaaaagattagcagtgctgtaattgacgatgggttgattaacaaggaagagtttcagttggctttgttcaagacaaataaaaacgaaagtctgtttgctg

SEQ ID NO: 204541 - DNA, 264 bp, Glycine max
atcccttcacctatcgcctctgacaaccaacccatcactcgcagcattaaagaccaacacattgaggtttcaatggctaaatacatagtgacgcagtacgtcgcggcggtgggaggtgagagtgatttgaatagtgtggtactgctgtatgctatggggaaggtgaagatggaaacatcagagttttcagcaggggaagggagtgtgaatagtagctggtgaagaattgcagtgtaaggagaggtggggggtttctggtgtggc

SEQ ID NO: 204542 - DNA, 278 bp, Glycine max
gtttttgtttctgttttaatggagagaaccaaatatggcaagagatttcaaggtaaggtagccattgtgacagcttccacccttggaattggctttagcatagccgagaggcttggtttggagggtgcatctgttgtcatctcttctcgcaaacagaaaaatgttgatgaggctgctggtaaactgagagctaaaggaatcgaagtattggcggttgtttgccacgtttcaaatgcgcaacaaaggaagaatttgatagacaaaactttcacagaagt

SEQ ID NO: 204543 - DNA, 293 bp, Glycine max
cttagaaagacaaccacttaaatcaaaatacttaatagcatggcgatacatttatacaaaacttctaccccaagcacacgcaatggagccgtagacagtcaagtaaaatccaatccacgaaatcatttgatctatggacagcatcgttgtggtacaggccgtcatgccagaggaatcattaccgcagggcatagagggggaggtcataagcgtctataccgtaaaattgattttcgacggaatgaacaacacatatatggtagaatcgtaaccatagaatatgaccctaatcg

SEQ ID NO: 204544 - DNA, 277 bp, Glycine max
cataagcaattaattaagcactctaaaacatatctttatttccttgtctacatatcttgaaaaactcaatcatggctagtgtttcttcggttttagctccatttcgaaggcttgatgggaaggtggcgattaatcactggtggtgcgagtggtctaggtgcagccactgcaaaactcttctctaagcatggagcatatgtagtcatagctgatattcaagacgacttgggtctcgctgttgccagagagttagaatctgcttcctatgtccattgcg

SEQ ID NO: 204545 - DNA, 278 bp, Glycine max
tggagaaggaagagttagttaatatagttaaactactaatgagttagttagttagttagaggggtttattagatatcaatagaggaagaaggataggagagagggggatcttatcatttgtagattgagcattatctctttgtgaaaggagaaatcctttgtgaaggggaaacccttagaggagagttttctctcctattttctgaacttttcttactagtcaataaaatcttttattttcttcctcatttcacttcttggttccaaacaattggttc

SEQ ID NO: 204546 - DNA, 234 bp, Glycine max
acactaacgactaatcacaatggtgaagttcacagatgaacagctaacgtcctattatggactataagcatccatatccgtaatatgtctgccattgctcatgttgatcacggaaaatcaaccctacactgagttctcttgtaggctgctgctcgtattattgatcaagaagttgccggtgatgtccgtatgactgatacccgtgcagatgaagctaagcgtggtattaccatc

SEQ ID NO: 204547 - DNA, 274 bp, Glycine max
  unsure (1)..(274): unsure at all n locations
gaacaagggtttctctttctctttctctgtctgcttcttcactttctctcgtttcaatcgaaaaaaatcatgggcagaaaattcttcgtcggtggcaactggaaatgcaatgggaccactgaggaggtgaagnaagattgttactaactttanatgaagctaangtccctggagaagatgttgtagaagttgttgtgagccctccttttgtgttcctccttttgtaaaaagtttgctgcgccctgatttccatgtctcggcccaaaattgttgg

SEQ ID NO: 204548 - DNA, 271 bp, Glycine max
catcagtgtagcgcgcgtgcggcccagaacatctaagggcatcacagacctgttattgcctcaaacttccgtggcctaagcggccatagtccctctaagaagctggccgtggagggttacctccacatagctatttagcaggctgaggtctcgttcgttaacggaattaaccagacaaatcgctccaccaactaagaacggccatgcaccaccacccatagaatcaagaaagagctctcagtctgtcaatccttactatgtctggacctgg

SEQ ID NO: 204549 - DNA, 275 bp, Glycine max
cgcaaattttctcccccaaatcgtagatctacggttaaattggtgtagtgtggtaagatgggaggaggatttagagtgcttcacttagttaggccatttctctcgtttcttcctgaagttcaaactgctgacaggaaagtgccatttagagagaaggtcatatacactgtgatctctcttttcattttcctggtttgtagtcagctccctctaatatgggatacactcaacaacaggtgctgatccattctattggatgcgtgttattctcgctt

SEQ ID NO: 204550 - DNA, 266 bp, Glycine max
cttcttcttctttttcatcaatcatcaccagtggttcttttccttctgagaagatcgaattgtgttttgcaaaactgggagttccagagaaagaccctctttcccaattgagtttgcctcctggttttcggttttaccccaccgacgaggagcttctcgttcagtatctgtgccgcaaggtcgctggccaccatttctctcttccaatcattgccgaaattgacttgtacaagttcgaaccatgggttcttccaagtaaagcgatt

SEQ ID NO: 204551 - DNA, 273 bp, Glycine max
ctggaaagacaattacccttgaggtggagagttctgacaccattgacaatgtcaaggctaagattcaagacaaagagggtatcccaccagaccaacagaggctgatctttgctggaaagcagcttgaggatggccgtacccttgccgattacaacattcagaaagagtccaccctccacctggtgctccgtcttcgtggtggcctgcaaatctttgtcaagaccctcactggaaagaccatcacccttgaggtggagagctctgaccctattg

SEQ ID NO: 204552 - DNA, 273 bp, Glycine max
tttcgagacaggaaaacccacgagtttccggcattattccatcatgaacgctcttcccattcttctcttctacctcttcgtttcggcattagtttatgcgaagaaaactggcgatgtgacggagttgcaaattggcgtgcagcatacaccagcatcatgtgaagttctggcccacacaggtgacagagtcaacgtacactatcggggaaaactcactgatggaactgttttcgattctagctttgaagaactaatccaattgactttgagctt

SEQ ID NO: 204553 - DNA, 276 bp, Glycine max
cacttttgcacaagcaattgcaacaaaccaacgttgaattgtgtctcactctcttttttctatatttctttctcacagtgtctctcttcttcttcaatcaagagacgaaagaacacaccctgacaccatggacggtggtgtaccagacgctgatatgtctgccttcagagaatgtttgtctctatcatggaagactccttatgttcttcgacttgctttctctgatggaattggaggccttctctttagttatgacactggagttatttctggggc

SEQ ID NO: 204554 - DNA, 278 bp, Glycine max
ggcgaatctagcacacttctccaagagagccctaagaagcgcacacgcgctcgcaaggcaccacgtgcagccgcagctgctggcagcggaacgcgcttttgcgacggaggcggcgaaatcgatatccccgtcggcggatcgcgtgaagtgggactaccgagggcagaggaagataatcccgttaaggcagtggctccccaaaatggccgtggatgcttacgtagcacccaacgtggtcctcgccggccaagtcaccgtctggcgaggaacctccgtct

SEQ ID NO: 204555 - DNA, 274 bp, Glycine max
gcgtcgctccgcaccagtttcaccgcacgaatatcttgttgtttggagcgatccgagaaaaactctgtacacatgttggtttaccaggacctccttacaggtgatgagcttctctctgactccttccgttacaaggaaattgagaatggaatgctgtgggaagttgaggggacatgggttgttaaaggagccgttgatgtagacattggtgcaaacccttctgactgagggtggaggagaagatgagggagttgatgatgcagctgttaaggtt

SEQ ID NO: 204556 - DNA, 264 bp, Glycine max
gttgttgttcccttcttatttctttctccgccccttttttgttgttccttcttctcgttcgtcgctttgtgatctctctctgcaaccatgtccgtcgagaaagagagagagacccaggtttacttggccaagcttgccgagcaggccgagagatacgaagaaatggttgagtgtatgacgaaagtagcaaaacttgatcttgatctgactgtggcagaaaggaaccttctctcagtgggatacaaaactgtgattggtgcacga

SEQ ID NO: 204557 - DNA, 266 bp, Glycine max
gtctccgccctccctcccccgccgcgcctcgcctacctcgtctccggctccaagggcgacggcgccgccgtcacccgcgtcctcctcgctctctaccaccccaacaatcgctacgtggtccacctcgacctcgagttctcggcggaggagcgctccgatttggtgaggttcgtggagagccacgcgctgttcaagcggttcgggaatgtgagggttatcaagaaggcgaacctcgtcacgtacaggggacccaccatggtcgccaa

SEQ ID NO: 204558 - DNA, 214 bp, Glycine max
cttggtgccaagggctggatgggttggcttctaggtctgctgactactacaagcaaggtgctcgatttgccaagtggaggacagttgttagcattccatgtggtccttctgcattagctgtcaaggaagcagcgtgggggcttgcacgttatgctgctatctctcaggacaatggtcttgtgccaatcgtagagcctgaaattcttcttgatgg

SEQ ID NO: 204559 - DNA, 259 bp, Glycine max
ctcattaattgcaagaatggcacttcgttgcttggtgatgtccctttctgttctcttcactcttggtcttgcgagagaaagccatgccagagacgaagatttttggcatgctgtttggccaaacactcccattccaagttcattgcgagatcttctaaagcctggccctgcaagtgttgaaatcgatgatcaccctatgcaaattgaagaaacacagtacccgaaaaccttcttctagcaagaagaccttcatccaggc

SEQ ID NO: 204560 - DNA, 259 bp, Glycine max
cttccctctttcatccccccgataagaacaagcacccaccgtttaacgctaatttttgagtgtttttgttttttgcagcaacaaacaaacatcttttaccttaaacaacaatggccgatgccgaggatattcaacccctcgtttgcgataatggaaccggaatggtcaaggctggttttgctggagatgatgcaccgagggctgtgttccctagcattgtggggcgtccacgtcacactggggtgatggttgggatggg

SEQ ID NO: 204561 - DNA, 244 bp, Glycine max
cgtgctacgacaggcactgcacgcgttggtgcaaaggaaccttcgcgacaatcgctcgcgctctcagagcgctttctgcacatcggacaattcatcgccaaagggcacaacaggtacacggagatcggaggcggacattcacgaagcgtatcagccgcctcttcgagtagaaggatatgcgaattctaatggatagacttgatgctgctggtaagaccactagcctctacaagctcaatctcgg

SEQ ID NO: 204562 - DNA, 266 bp, Glycine max
cttgaaccccgattcatttccaccagcacaagaagcttggctgcaatatcaataccttctcacatgaaagcttggacatactctgagtatggaaaatccaaggaagttctcaagtttaatcagagtgtggctttgcctgaggtgaaggaagaccaggtcctcatcaaggtcgctgctgcttcccttaaccccattgatcataagagaatggaaggctatttcaagaacagcgactcccctttacctactgctccgggttatgatgt

SEQ ID NO: 204563 - DNA, 264 bp, Glycine max
ctctcaacacagcagaagcagcaatgaagaagaagatgatggcaagcacggccatctccctcgtcttcgccgcgctcttcctcttctcctccgtccactctttctacctccctggtgtcgctcctcgcgatttccaaattggtgaccgcctctttgtcagagtgaacacgttatcatctaccaagactcaacttccatatgactactacttcttgaagtattgcaaacccaaaacgatattgaacaatgcagagaatttgggag

SEQ ID NO: 204564 - DNA, 263 bp, Glycine max
tgcaatcaaattagttcattctctttgcgcagttccctacctctcctttcaagatgcagatcttcgtcaagaccctcaccggaaagaccatcacccttgaggtggaaagctctgacaccatcgacaacgtcaaggccaagatccaggacaaggaaggaattcccccggatcagcaacgtctcatcttcgccggaaagcagctcgaggacgggcgtaccctcgccgactacaacatccagaaggagtcaacccttcaccttgtc

SEQ ID NO: 204565 - DNA, 237 bp, Glycine max
ctcgcgctcatggcgaataacccttccgacgctcccgccgacgacttcctcgaacaaattctcggcctcccgaccttcgcttccgccgactccggcctctccgccgccgatgtcggcctcgccggtgcggccactcagtctccgatgatgctgcagctcagctccgccgacgccaacgctcacctcgccggcgcatccttccacgcgccggtgtaccagctagggctgagcttggag

SEQ ID NO: 204566 - DNA, 257 bp, Glycine max
gctgttgcaaatttctactatttttcaatggcttctgcagatgttgagttccgttgctttgttggtgggcttgcttgggtcaccggcaacgatgccctcgagaaagccttttcaatctacggcgacatcgttgaatcgaaggttatcaacgaccgtgagactggaaggtccagaggattcggatttgtgaccttcgcctcagagcagtcaatgacagatgcgatcgcaggaatgaacggccaggaccttgacggtcg

SEQ ID NO: 204567 - DNA, 260 bp, Glycine max
cttccccttatctttctctcttctctctccccgcccaaaccctaactccctaccctattccgctttctctcatccatcatgaaaggaggaaagtccaagaccgaatctaagagagccgatgccaaacttgctgtgaataagaagggcgccgccaccaagactaggaaacccgccggaaaggggaaggcagcgaaagatcctaacaagccaaagaggcctccaagtgctttcttcgttttcatggaggaattcaggaaggt

SEQ ID NO: 204568 - DNA, 257 bp, Glycine max
ctagtttccttgacaatctaattctgcaaaaatggcaagcaataaggagtctaagttcccagcacagagccagaaaactcagccaggaaaagaacatgtaatgaatccactcccacaagccacaaatcctgatcacaaggccgccaataaactccagggaaaggtggcgttggtgacaggaggtgactcaggaattggcagagcggtttgcctgtgtttcgcaaaagagggtgcaacgtggcctttacatacgtaaa

SEQ ID NO: 204569 - DNA, 262 bp, Glycine max
ctaggctgcacgtaagtctgcaccaactactggtggtgtgaagaagccacatcgttatcgtcctggtaccgttgctcttcgtgagattaggaaataccagaagagtaccgagcctttgatcaggaagctccccttccagaggctggttcgtgaaattgctcaggacttcaagactgatctgcgtttccagagccatgctgtgcttgcattgcaagaagctgctgaagcataccttgttggactctttgaggatactaatctg

SEQ ID NO: 204570 - DNA, 266 bp, Glycine max
ctcactctcagtatctccgcctgctcctctgaagcttatatctgccatgaaaggtagccgtgagatacatgggggatcacaggtgaaattgcatgtgaaatgggcctctgatgtgtatgatcctatacctacattattatcacacactgttagaagcaacaagaagcagcagaaatccaggtagaagaagcctgaaaagaagaatggaaagaagggtcaaaagggaaattcatctcgagggggcagcaacaaagataagctggttc

SEQ ID NO: 204571 - DNA, 251 bp, Glycine max
aacgaagcctcctcgttcttcttcttccgccctttctctctctagaaccgtacggtcgtttctttctctctcctcaaccggagacagcgtcgccttcttttctgaatctcgcggtgttgttagttctgcggcggttgtagttccggcggcgatgggacagcaatcgttgatctacagcttcgtcgctcgcggcaccgtgatcctagcggagtacaccgagttcaccggaaacttcaccagcgtggcggcgc

SEQ ID NO: 204572 - DNA, 256 bp, Glycine max
ccgaatgagagcatcaaactcttcttcttcgatttccattgcgaacgttactatttcttcttctttctcttcattttcttcgctcttcgatcttcgtccggggactgctccgaataccaccaccaccactcgccgatggccacgatcggaggcttacacgactcccaaggctctcaaaacagcgtcgaaaccgaagccctcgctcgattcgccgtagacgaacacaacaagtaagcagaattcgcttctggagttt

SEQ ID NO: 204573 - DNA, 259 bp, Glycine max
caaccactcttaatttctctctgccttgctcatttacacacctctccaacctttcactttcagctttatttgaatccctctctctcctttccaaatggccagcgttgaggttgcacatcaaacaccaacaacagttccagaaaatgaaacaaccgaggtaatcaagacccaggaaacaaccccggaaccagtaccagccactgaggctcctgcaacagaacaagcagcagctgaggttcctgctcaagaagaacaacaa

SEQ ID NO: 204574 - DNA, 238 bp, Glycine max
cttcttcacccccatctcgcgttggtgcaaagcatccttcgctactatctctctctctctctttgcgctttctgcaaaccgaacatttcatctccaaagggatcaacaggtcgaaggagaaatggggctgacattcacgaagcttttcagccggcttttcgcgaagaaggaaatgcgaattctgatggtaggtcttgatgctgctggtaagaccactatcttctacaagcgcaagctc

SEQ ID NO: 204575 - DNA, 259 bp, Glycine max
catttcaagttctgatggtgatatatggcttctaggtgtatgtcataaaatttcacagcaagaatcatctggaggtgtagataatagtaatggattggcatcatttgaacaagatttttcatcaaaaatcctagttacatatcggaaaggctttgatgctattggagatacaaagtataccagtgatgttcattggggttgtatgcttcgaagcagtcagatgcttgttgcacaggcattactttttcataaattaggt

SEQ ID NO: 204576 - DNA, 262 bp, Glycine max
ctaaaccctatctctcaccaacttccgctacttcctactccaaccactttcttttttcccgcagtcatgggcaaggtcaagatcggaatcaacggatttggaagaattggccgtttggtggccagggtggctctgcagagagacgatgttgaactcgttgccgttaacgatcctttcattaccaccgattacatgacatacatgtttaaatacgacagtgttcacgggcactggaagcatcacgatgtcaccgttaaggatg

SEQ ID NO: 204577 - DNA, 236 bp, Glycine max
caagtgcagagctgcggtggcatgggaagcagggaagccactatcgatagaaaccatagaagtggcaccaccccagaaaggtgaagtgcgtttgaagatcctcttcaactccctttgccgtacagatgtttactggtgggatgctaagggccagactccgctgtttcctcgtatcttaggccacgaagcttcggggattgtggagagcgtgggcaagggtgtgacacatctgaaac

SEQ ID NO: 204578 - DNA, 229 bp, Glycine max
cctaggttccaggttaacaccaaacaacacatatagtgcagattcataagcttccaaccatggaggatccaaatcaagctccagaagcgtcttctcagaagaaaatgggaagagggaagattgaaatcaaacggatcgagaacaccaccaataggcaagtcaccttctgcaagcgccgcaacggtttgctgaaaaaagcttatgaattatcagttctgtgtgatgctga

SEQ ID NO: 204579 - DNA, 256 bp, Glycine max
ttactattagcaatttagcaccttctactactttgtaatcgttcaagagttgtgcaactgtgaagaatgagttcaacaagccgtgcttggacttggagcgtggcagcaagtgttggagtggtggaggccttgaaggaccagggtatatgcaggtggaacagtgtgatgagatcagcacaacaacatgctaaacataatatgaggtctttgtctcaaaccaagaagttttcttttcaatcatctgcgatggcttctg

SEQ ID NO: 204580 - DNA, 250 bp, Glycine max
ctctgttctccatgaaggatgtgtagccaagattaaccctaatgccccacttgacaaagttgctattgtcagctgtggattctgcacaggttttggggctactgtgaatgttgcaaaaccaaagcctaataatactgttgctgtctttggcttaggagctgttggtcttgctgcctgtgaaggggcaagggtttctggtgcatctagaatcatcggggttgatttacttcccaatcgatttgaacaagcc

SEQ ID NO: 204581 - DNA, 154 bp, Glycine max
ttaagttctaattgatggtccttacggagcaccagcccaagactacaagcaatatgaggtggttttgctagtggggctaggagttggagccaccccaatgattagcatactgaaggatcatagtaaataacatgaaggccatggaagatgaaga

SEQ ID NO: 204582 - DNA, 240 bp, Glycine max
cttcattctctttgcgcagttccctacctctcctttcaagatgcagatcttcgtcaagaccctcaccggaaagaccatcacccttgaagtggaaagctctgacaccatcgacaacgtcaaggccaagatccaggacaaggaaggctttcccccggatcagcaacgtcgcagcatcgccggaaagcagctcgaagacgggcgaaccctcgcagactaagacgtccagaaggagtagaccct

SEQ ID NO: 204583 - DNA, 256 bp, Glycine max
ctcgagctcgtcgatcttcatcttctgacatttttctcactagacccgtacggtcgtatctttctctctcctcaaccggagacagcgtcgccttcttttctgaatctcgcggtgttgttagttctgcggcggttgtagttccggcggcgatgggacagcaatcgttgatctacagcttcgtcgctcgcggcaccgtgatcctagcggagtacaccgagttcaccggaaacttcaccagcgtggcggcgcagtgcct

SEQ ID NO: 204584 - DNA, 250 bp, Glycine max
caatgactgtcttctggtcatctctggctcagagctttaccaagcgcccaatgaagggaatgcttaccggtcctgttaccattctcaactggtcctttgttagaaatgaccaacctagatctgagaccacctaccagattgctttggctatcaaggacgagtggaggaccttgaaaaggctggcatcactgttatccaaattgatgaagctgctttgagagagggtctgccactgaggaaatcagaacaa

SEQ ID NO: 204585 - DNA, 233 bp, Glycine max
  unsure (1)..(233): unsure at all n locations
atagtagaaggtcggggatagtaaagagaganatccgaatagaaaaagaagctagctagggtttcggcgcgaagaagaatggggaagaagaaggtggagataaagcgaatcgagaacaaaagcactcggcagataacattctccaagaggcgcaatggattgatgaagaaagctcgcgagctatccattctctgcgatgcgaaggtggcgctgctcatcttctccagcaccgg

SEQ ID NO: 204586 - DNA, 252 bp, Glycine max
ttttgctatagcagtaagctataactcatttgaggctctgtgagaattgagaaatggctaaagatgttgaggttcaagagcaaggaagtgagtactctgccaaagactaccatgaccctcctccagcacctttgttcgacccagaggagctcacacagtggtccttctatagagccctcatcgctgagttcatagcaacccttctcttcctttatgtcactgtgctcaccattattggctacaaaaggcaga

SEQ ID NO: 204587 - DNA, 248 bp, Glycine max
atataatggctcccaagggtttaatctttttggctgtagtatgcttctcagcactgtcactgagtcgttgtcttgcggaggataatggacttgttatgaacttctacaaggaatcatgccctcaggctgaagacatcatcaaagaacaagtcaagcgtctctacgagcgccacaagaacactgcgttctcctggcgcagaaacatctgccatgactgtgctgttcagagttatgatgcgtcacgggtg

SEQ ID NO: 204588 - DNA, 258 bp, Glycine max
gaaaagcgtgaatcatgtcggacgaagagcatcacttcgattctcaggcggatgcgggagcgtccaagacgtatcctcagcaggctggtaccattcgcaagaatggctacatcgtcatcaaatccaggccttgcaaggttgtagaggtctctacgtcaaagacaggcaagcatggacatgcaaagtgtcactttgttgcaattgatatttttaatgggaaaaagcttgaagatattgttccatcatcccacaactgtg

SEQ ID NO: 204589 - DNA, 250 bp, Glycine max
gttccaggttaacaccaaacaacacatatagtgcagattcataagcttccaacgctggaggatccccatcccactccagtgacgtctgctcagagatccatgggaactcccagtactgtacacatgctgactggtgggatgctaatgggcagactccgctgtgtcctcgtatcttaggccacgaagcttcggcgattgtggagaccgttcgcaatggtgtgaaacatctgcaaccaggcgaccatgctct

SEQ ID NO: 204590 - DNA, 254 bp, Glycine max
caaaaggctctctcacgcagtcgcagtgagtgaaaaggaaaaccctaattgcggtattctcagtgccttcgagagaaagaaaaaatggcagataatcttgttctccgtggcaccatgcgcgcccacaccgacgttgtgacggcgattaccactcccatcgacaacaccgacatgatcgtcaccgcctcacacgacaaatccatcatcctatggactcttaccaaggaggacaagacttacggtgtcccccgccg

SEQ ID NO: 204591 - DNA, 256 bp, Glycine max
gccgcgctttagaatccccacgcactctccctgaagaaagaacaaacaaatcaagcattccatagttcttagatagggcacgcttctctcccttgcgccgcctcacaaaaggttattggcctattattgtctgaagatggttgatggccatgagactgataagaacattgaggtgtggaaaatcaagaaattgatcaaagctcttgaggctgctagaggaaatgggacaagtatgatttcccttatcatgcctcca

SEQ ID NO: 204592 - DNA, 259 bp, Glycine max
gatgagccaagacctcaagcgagactacgtcgtttcggaggagatcggccggggaagattcggcaccgttttccgctgctcctccgcagactccggtcactcctacgccgtcaaatccatcgacaaggtggcaataaccgccgccggagactccctcgacgcgcaatgcctattgacggagcccaagatcgttcagcttctctcccctcaccctcacatcgtaaacctccacgatctctacgaagacgaaaccaacctt

SEQ ID NO: 204593 - DNA, 273 bp, Glycine max
ggcttcctttgtatccttcctagtgctgcttcttgcagcccttatcctcatgcctctagggcttgctacttactacaaaccaattaagaagccaccagtgtacaagcctccagtgtacaagccaccagtgtacaaaccaccggtttataagccaaaaccaccggtttacaagccgaaaccaccggtttacaagccaccatataagaagccaccatacaagaaaccaccttatggaaagtaccctccagtagaggacaacacccatgcctaaag

SEQ ID NO: 204594 - DNA, 271 bp, Glycine max
gcagagtgcagagccttctctcctctattttggcttccaacctttttgctccattcattctcaacaacaaaccaatctctatattttgcttagacaatgagggggagcttgtggcaacttgggcaatcgatcactcgccgtcttgcccatggagataagaaggctgttgctcgccgatgttttgcctcagaagctgagctgaaaaagacagtgtttcatgacttccatgttgctcatggtggggagatggttccatttgctggatggagca

SEQ ID NO: 204595 - DNA, 275 bp, Glycine max
aagtgattcaatcaaacggttcatgcttaatcaagttgggaacaacaacaacaacaaaaatcaagccaatgtttgtgggttttggtttcatttcattaagatgatctgtttatctcttttcttctttttaaaatttaaagtctttgtattttgtatgtaaagatgtaaaattatgattattaggtggtgcatgtgtcgcgtcatgggccaatgttatcctctgcttttaagttggaagaggcccaactcatgtgtgatgtacggctgtgattgtg

SEQ ID NO: 204596 - DNA, 266 bp, Glycine max
atacaaccagaatacactccttcaccagtgtctccaacaccaccaccagcttattcaggtaacagtaatactggagctattgctggaggagttgctgctggtgctgctctgttgtttgcagcccctgcaattgcacttgcttataggcgaagaaggatacctcaggatcatttctttgatgtgcctgcttaggaggatcctgaagttcaccttggtcagcttagaaggtttacgctgcgtgagtggcaagttgctacagataactt

SEQ ID NO: 204597 - DNA, 274 bp, Glycine max
gaattttgtttggaaataattgaggactacgttgttacggtcccaaagaacaacccttctagcaagtaaacccgagttcccttctctctctttacgattacattgctctctctctctctgttcgcattcaatctttcgcttctgaatctccaacaatggtgctcgaggcgactatgatctgtatagacaattcggaatggatgcgtaacggggattactctccttctcgatttcaagcccaagcagacgccgccaatctcatttgcggtgctaa

SEQ ID NO: 204598 - DNA, 276 bp, Glycine max
cagcggtgcaacctatcaggctccaaatccaatggcttcagagaagaaactgtcgaacccaatgagggagatgaaggtgcagaagctcgttctcagtatctctgttggagagagtggagatcgtctcaccagagccgccaaggtgttggaacagcttagtggccaaaccccagtgttttccaaagcaaggtacactgttcgttcctttgggattagaagaaatgagaagattgcatgctatgtcactgtcagaggtgacaaggcgatgcaactttt

SEQ ID NO: 204599 - DNA, 275 bp, Glycine max
atttcgatcatctttattttttagaatatccccacttaacatggatcagttaacactagcatttccatttttactaacacttcatctgttagtatcaggtgtagtagcgacaacatcgttcacactggttaacaaatgcgactacacagtgtggccaggcattctctcaaacgcaggaatcgccacgcttccaacaacaggtttcgttcttcaaaccggagagtccaaaaccgtaaccgctccaacctcttggggtggccgtttctggggccgca

SEQ ID NO: 204600 - DNA, 276 bp, Glycine max
caaaccctagaagccaacgtttttcagggttgttagagcacgatggttcagtataattttaagaagatcactgtggtgccaaatgggaaggatgtcgtcgacatcatcctctctcgcacccagcgtcagacaccaaccgttgtgcacaaaggatatgctatttcacggcttcgccaattctacatgcgcaaagtgaagtatactcagcagaattttcatgacaagctctccacaataatcgacgagttccccaggctcgacgatattcatcctttc

SEQ ID NO: 204601 - DNA, 276 bp, Glycine max
cactcacacacacacacactctctttccatgggtccgtttcgtaaacccttccttgcatttctctcggttgttctatttctgggtctctatgaggcagcagcagaacagactcagactcacaagagtacttacattgtacacgtggcgaaatcggagatgcccgagagcttcgagcaccacgctgtgtggtatgagtcgtcactgaagaccgtgtctgactcggcggagatgatttacacctacgacaacgccatccacggctacgcgacgagatt

SEQ ID NO: 204602 - DNA, 270 bp, Glycine max
cagcggtgcaacctatcagcctccaaatccaatggcttcagagaagaaactgtcgaacccaatgagggagatgaaggtgcagaagctcgttctcaatatctctgttggagagagtggagatcgtctcaccagagccgccaaggtgttggaacagcttagtggccaaaccccagtgttttccaaagcaaggtacactgttcgttcctttgggattagaagaaatgagaagattgcatgctatgtcactgtcagaggtgacaaggcgatgca

SEQ ID NO: 204603 - DNA, 273 bp, Glycine max
cggctcgagaagaaaagaaaatcctcaattttctgagcagccaaacactctctctctgtctctcgaaaattctcagtttgcagagaaaatctgaatcatgtcgtggcaagcgtatgtcgacgatcaccttctgtgtgacatcgaaggtaaccacctcactcacgctgctatcatcggccaagacggcagcgtttgggctcagagtaccgacttccctcagttcaaacctgaggagataactgccatcatgaatgactttaatgagcctggatc

SEQ ID NO: 204604 - DNA, 273 bp, Glycine max
gtgcgaacagatcttgaaaattggcgcctagagtatttgaagacgatttcgatccaattaacagcaagctggagagcggggaagcagatactgatgcatcaatttccttacctatgaatagcacaagggaaaataatgttgctaagattaaagttgtggtacgcaaaagacctttaaacaagaaggagcttgctaagaaggaggatgatgttgtaactgtagctgacaatgcatatttgacagtccatgaaccgaaactaaaggttgatttga

SEQ ID NO: 204605 - DNA, 272 bp, Glycine max
gcagaagatgatgatatacaagtgtaatctggttgggaagccagtggtgactgctacccaaatgcttgaatcaatgataaagtctcccaggccaacccgagctgaagcaactgacgtagccaatgcagttcttgatggaacagattgtgtgatgcttagtggtgaaagtgctgctggggcatacccagaacttgctgtgaaaatcatggctcgtatctgcattgaagcagaatcatcccttgactatggtgccatcttcaaagagatgataa

SEQ ID NO: 204606 - DNA, 271 bp, Glycine max
cttcactctctctctttcttccctttgcttgctactcttgtcgagtgcatgctttgctattagctccagcaagctcaacgagtgccagctcaacaacctcaacgcgttggaacccgaccaccgcgttgagtccgaaggtggtttgattcaaacatggaactctcaacaccctgagctgaaatgcgccggtgtcactgtttccaaactcaccctcaaccgcaatggcctccacttgccatcttactcaccttatccccggatgatcatcatc

SEQ ID NO: 204607 - DNA, 273 bp, Glycine max; identical to SEQ ID NO: 204603

SEQ ID NO: 204608 - DNA, 272 bp, Glycine max
gttactatctataattaattaaattcctcgtggaatattgaagaagccatgtctacagctgggcaggtcatcaagtgcagagctgcggtggcatgggaagcagggaagccactgtcaatagaaaccatagaagtggcaccaccccagaaaggtgaagtgcgtttgaggatcctcttcaactccctttgccgtagtgatgtttattggtgggatgctaaggaccagactcctctgtttcctcgtatcttaggccacgaagcttcagggattgt

SEQ ID NO: 204609 - DNA, 271 bp, Glycine max
gcaagtaaccccttgcacacgcaagctggaaacagtgatgacggagagtaccctctaaatgtgaccacctcagggaaccaagtgaatgtaacaactggggtggttgatacaacagtgtccaatactatttacagtgataaccagcttgcagtgtatcaggtagataaggtgcttcttccaatgaagcttttcggcgcgatggcaccagctgcttcaccggcggaggctccggcaccgaccaagccggagaaaaatgtccgggcaggggctg

SEQ ID NO: 204610 - DNA, 271 bp, Glycine max
gaggaatatggcttccttaagctcctcattagtgctgctccttgcagctctaattctatcccctcaagttcttgctgactatgagaagcccccaatttacaagccacctgtgtacacgccgccagtgtataagcccccagtttacaaaccaccagtgtataagcctccagtttacaagcctcctgttgacaagccacctgtttacaagcctcctgtttataagccaccagtgtacaagccaccagtgtataagcctccagtggacaaacca

SEQ ID NO: 204611 - DNA, 268 bp, Glycine max
gcgaagaaagcttggacaaattgaagattcaaatagggcagctaactctggagcaaaacggcctgatttgaaggcaggtgcaattatgatgaataaagggattcggaccaacagcaagaaacgtattggagttgtgcctggtgttgagattggggatattttctttttcagatttgaattgtgcttagtgggcttacatgctccttctatggctggaattgattacattggcaaaaccagtcaagaagaagagcctttagctgtaagt

SEQ ID NO: 204612 - DNA, 271 bp, Glycine max
ggagaagaaggtgaacgtctccggaaaacctaagcactctctcgacgtaaaccgcagcaatgacgcgaagaaggagtcgcgctccgccgccactgtgcgccgcctcaagatgtataacaccagacccgtccgcgatcgcaagggaaaagtcttatcccacgagcttcagtccaaggagcttcccagcacaagaatccaacccgaccgtcgatggttcgggaacacgcgtgttgtgaatcagaaggagcttgagtatctccgagaagagttg

SEQ ID NO: 204613 - DNA, 264 bp, Glycine max
gaaacgggcaatgggtattctccccagagatcccgacagatgtgattgttgcagttggatgatccaatttcactctccataagtttagtctggcgtgtagtagtagctacatcagagaagtgatcatggaatcagagtagagtgacctaacaagaataggtatttccagcatacctggaggacaagaagcttttgaggaagccgcgaaattctgttacggcgttagcttcgagatcaccgttcacgacgtggcgtcgctgcact

SEQ ID NO: 204614 - DNA, 270 bp, Glycine max
cgattaaagacttgcttccaagatggttctgctagagaagctctgggatgacgttgttgctggccctcaacctgagcgtggccttggcaagctcagaaaactcaccaccctcaaaactaatgatgaaggagacagtagcaagctgcagaagacgttgtcgatgccgtcgacaccgacaaccccgatgactcccacgactccaacgacaccgggatccgcgcgtaaagctgacaacgtttggaggagcgtcttccatcctgggagcaactc

SEQ ID NO: 204615 - DNA, 272 bp, Glycine max
acagaatcataagttcaaacttgaatttcactgggaaacttagcctcgatgctagtaatggaaacaccgaggtttacatgaatggtcgagagatcacaaaacttgaattgagggtactcaagctggcaaatgtgcagtgtccacgtgatacacacttttgggtctatgacgatggtcgttatgaggaggaaggtcaaaataatatcagaggaaacatttgggagaaggcctcaacaagattcgtatgtgccttattctctctaccctttccc

SEQ ID NO: 204616 - DNA, 269 bp, Glycine max
gttgaattgaattatcttcaaaatgagagaaatccgtcatgttcaagctggtcaatgtggcaaccaaattggaggcaagttttgggaggtgatgtgtgatgaacatgggattgatgccactggaaattacgtaggcaattcccatcttcaacttgagagggttaacgtgtactacaatgaagcaagtggaggacgctatgttcctcgagctgtgcttatggaccttgaaccagggaccatggatagcttgcgttctggtccttttggaa

SEQ ID NO: 204617 - DNA, 270 bp, Glycine max
ccgcaccagtttcaccgcacgaatatcttgttgtttggagcgatccgagaaaaactctgtaaacatgttggtttaccaggacctccttacaggtgatgagcttctctctgactccttccgttacaaggaaattgagaatggaatgctgtgggaagttgaggggaagtgggttgttaaaggagcagttgatgtagacattggtgcaaacccttctgctgagggtggaggagaagatgagggagttgatgatgcagctgttaaggttgttga

SEQ ID NO: 204618 - DNA, 269 bp, Glycine max
gtggagtgagagatagtgactgcaaaaccgctccagccttgtttcttctcagatcttcttccatggaacagtacgagaaggtggagaagataggcgagggaacatacggcgtcgtttacaaggctcgcgaccgcgtcaccaatgagaccatcgctctcaagaagattcgcctcgagcaggaggacgaaggcgttcccagcaccgccattcgcgagatttctctcctcaaagagatgcagcataggaacattgttaggttgcaggatgta

SEQ ID NO: 204619 - DNA, 268 bp, Glycine max
gcttgtgcaagcaacatatacctcataaatgaccacttggataagaggacctggacttacatattcggagcttgctgtgccaccacagtgttcgtaccttcatttcacaactacagaatttggtctttccttggccttggcatgaccacttacacagcttggtacatgaccatttcagccattgctcatggccaggttgaaaatgtgactcacactggcccaaaaaaattggtattgtatttcacgggcgccaccagcattctctaca

SEQ ID NO: 204620 - DNA, 269 bp, Glycine max
actcgagccgctcgagccgctcgagccgtggtcggcgacagcgaactacttccgtgtaatggcgacctccgtcgcagtcgccggacgctttgacggcgcatgatcgccggattctgacagcggtgaacgtcggagcgtcgagcctgtcgttggccggttccagcttcattgtagtgtgctacctcctcttcaaggagctccgcaagttctccttcaagctcgtcttctacctcgctctctctgatatgctttgcagtttcttcggcata

SEQ ID NO: 204621 - DNA, 266 bp, Glycine max
gttactatctataattaattaaattcctcgtggaatattgaagaagccatgtctacagctgggcaggtcatcaagtgcagagctgcggtggcatgggaagcagggaagccactgtcaatagaaaccatagaagtggcaccaccccagaaaggtgaagtgcgtttgaggatcctcttcaactccctttgccgtagtgatgtttattggtgggatgctaaggaccagactcctctgtttcctcgtatcttaggccacgatgcttcagg

SEQ ID NO: 204622 - DNA, 265 bp, Glycine max
cttgtgaattgatctgcgatgtcggacgaggtagttctgttggatacatgggctagcatgtatggtatgagggctaggattgcattggctgaaaagggtgttaggtatgaatacaagaaagagaatctcatgaacaggagtcctttgcttttgcagatgaacccaattcacaagaagattcctgttttgatccataatggcaaacccatttgtgaatctgcaataatagtgcagtacattgatgaggtctggaatgacaagtctc

SEQ ID NO: 204623 - DNA, 267 bp, Glycine max
ttcagcaagtgcgttttggaagcagagaccgaaatacttcgagatggcccgtacaaagcaaactgctcgtaagtcaactggaggaaaagctcccaggaagcagcttgcaaccaaggctgcacgtaagtctgcaccaacaactggtggtgtgaagaagcctcatcgttatcgccctggaactgttgctcttcgtgagattaggaaataccagaagagcactgagctcctaatcaggaagcttcctttccagaggttggttcgtgaaat

SEQ ID NO: 204624 - DNA, 268 bp, Glycine max
gaacgatgactatatggaactacgtcgtcacagctcacaaacccaccaacgtcacccactcctgcgtcggcaatttcaccagtcctcgagacctctatctcatcatcgcgaaatgcacgcgcatctagattcacctgctttctccccaaggcttgcaggttattttgcataccttctgagcatttattgaagcaaagtttggattatgataactacaagtgcaaagggcatctttctgtgctagttatgctatctgtaatcggtttat

SEQ ID NO: 204625 - DNA, 267 bp, Glycine max
atcaagttactatctataattaattaaattcctcgtggaatattgaagaagccatgtctacagctgggcaggtcatcaagtgcagagctgcggtggcatgggaagcagggaagccactgtcaatagaaaccatagaagtggcaccaccccagaaaggtgaagtgcgtttgaggatcctcttcaactccctttgccgtagtgatgtttattggtgggatgctaaggaccagactcctctgtttcctcgtatcttaggccacgaagctt

SEQ ID NO: 204626 - DNA, 268 bp, Glycine max
atagcccaagccctatacaaccaaaccctaacacacacccatttgattcagtttccatggctagcctcaaggttgcatttttggctgcagtgctctgcatggttgtggtgagtgcacccatggcacatgcagctatcacgtgcgggcaggtgacgaatagcctgatcaattgcatcggttacctccagaacggaggaacgccgccgtcgggatgctgcaacggagtgaagagcctcaatgccgccgccaagaccaccgccgaccgcca

SEQ ID NO: 204627 - DNA, 265 bp, Glycine max
aatggcaccaacagccaagactctgacttacctggcccaggagaaaaccctagaatcgagcttcgttcgggacgaggaggagcgtcccaaggttgcctacaacgaattcagcgacgagatcccagtgatttctcttgccggaatcgacgaggtggatggacgcagaagagagatttgtgagaagatcgtggaggcttgcgagaattggggtatattccaggttgttgatcacggtgtggatcaacaactcgtggccgagatgacc

SEQ ID NO: 204628 - DNA, 264 bp, Glycine max
tggagaagatccagcacagtgaggtggaagtgaagggactgaagcttcacgtggcagagattggaagtggctccaaaacagtggtattcttgcatggattcccagagatctggtacacatggaggcaccaaatgatttctgtggcaaacgctggttatagggctattgcctttgatttcagaggctatggactttctcagcaaccagcagagcctgaaaaggaaaccatgtttgatctggttcatgaaattgtaggccttttgg

SEQ ID NO: 204629 - DNA, 265 bp, Glycine max
aaacaaagcaaaagccatttggatcctctcttctcttctttgatctccgttacccttttcgttttctcaacacagagagagagagagagtctttcggagttcgtttgcgtgtgttgtgtgatcagtcaccgatggcagcaccacctgcgagggcacgtgccgattacgattacctcatcaagcttcttcttattggcgatacggtgtcggaaagagttgtctgcttttgcgattttctgatggttccttcacaaccagttttatc

SEQ ID NO: 204630 - DNA, 266 bp, Glycine max
gaaaccagtgactgacttttcgagaaagaaaaacaaaaatgagtttccgtcattccatcatgaacgctcttcccattctcctcttcttcctcttcgtttctgcattagtttctgcgaagaaaactggtgatgtgacggagctgcaaattggcgtgaagcataaaccagtatcatgtgaagttcaggcacacaaaggtgacagagtcaaagtacactataggggaaaactcactgatggaactgttttcgattctagctttgaaaga

SEQ ID NO: 204631 - DNA, 276 bp, Glycine max
ccgaattagggttttccaattcgcagagcaactcaacacaacgaaccaaaccaacaatgtcgcagccgcagcctcagtcgcagccgcaacacgggcaagcggcgctggagcaggtgcagtgcttcggtcgcaagaagacggcggtggccgtgacctactgcaagcgcgggcgcggcctcatcaagatcaacggctgccccatcgagctcgtcgagccggagatcctccgctttaaggccttcgagcccatcctcctgttgggaagagccgcttcgc

SEQ ID NO: 204632 - DNA, 264 bp, Glycine max
atggatcactaccgtaggcgctggtacactggatcgtgacttccccgcatacgtggcgctcggaaatggactcaacttctccggcgtttcgctttaccgcggtaacgctttgccggattcttctttgcctttggtttatgcagggaatgtgagtaatggtgctatgaatgggaacttgtgtatcacgggaacgttgtctcctgagaaagttgctgggaagatcgtgttgtgtgaccgtgggttgaccgctagggttcagaaagg

SEQ ID NO: 204633 - DNA, 266 bp, Glycine max
aacaaacacttcaacaatctactctatacccgatttacaagatgagttcatttagccaaaatccctatgttttagttctgttcctcgttctcactgtgtggatatcccgtgtaatgtctcgcgggctcattacatctgagagacatgagaaatggatggcacaatatggtaaggtttacaaggatgctgcagagaaggagaaacgtttccaagtattcaaaaacaatgtgcagttcattgagtcattcaatgctgctggggacaaa

SEQ ID NO: 204634 - DNA, 267 bp, Glycine max
gaaatctgtaagatattatgcaaaaaaataattaaggtgtttttctttaaatgggttggttgattggttcaatgaaccgatcaagaccacagacaggttcatggggatgcgaggattaagacgctttgttttttaatcttccgatgtcactcttgtttgttagtttgtttttttattttttatatcaataagtactgtgcaagtaggttagagttgggtagaagggcatgttcatggtgttaattactatgttatgtatgcatgtga

SEQ ID NO: 204635 - DNA, 259 bp, Glycine max
gtttcttacaaggctctactctactgcttcaccttctgctctagaaaattcagtggtgatacatggcttcggctactctctctgtagccaaaccagcccttcaggcaaatgggaaaggcttctctgaattctctggcctccgcagctcatcaggcttccttcccttttctagaaaatcttcagaggatttccattctgtcattgccttccagacctatgcagttggaagcagtggaggatacaagaagggtgtgacaga

SEQ ID NO: 204636 - DNA, 265 bp, Glycine max
gctacctacccatgggaaagattgccctagccaatgtcctcttggtccttctcttgaacttgagcactttgctcaatgttcttgcttgtccctattgcccttacccatctcccaagcctcctccaaaaaagcctcccattgtgaaaccaccagttcacaaacaaccaaaaccatgtccaccacccaagtcatctccaaaaccaccccatgtacacccaccctatgtcccaaaacctcctcactaccctaaaccaccagttcatcc

SEQ ID NO: 204637 - DNA, 266 bp, Glycine max
gcgaagagaatggctcccaagggtttaatctttttggctgtgttatgcttctcagcactgtcactgagtcgttgtcttgcggaggataatggacttgttatgaacttctacaaggaatcatgccctcaggctgaagacatcatcaaagaacaagtcaagcttctctacaagcgccacaagaacactgctttctcctggctcagaaacatcttccatgactgtgctgttcagagttgtgatgcttcactgttgctggactccacaag

SEQ ID NO: 204638 - DNA, 219 bp, Glycine max
tgctgctggtgctggagtttagggatgagggtttattttattggcagggttacatgagtttgtgatgatgtgttattgtgtttctttaggtttgaataaatgatatttactttaaaaaaaaaaaaaaaaaagggcgccccccgactatgaacccctccgccccgggatttaatcccggcccggaccctgagggctaccattcttcccctagagttatct

SEQ ID NO: 204639 - DNA, 264 bp, Glycine max
cggctcgagctctctctagcttggacgagtgaattagattcatcatcaagatgtcgtctctgatagcagaagatgtgaagagcagatcagaggtgtaccacggggacgaaatgtgccaagtgaagtccaaggagcttctcaaggaaatcgccctccccaacggccttcttcccctcaaggacatggaggagtgcggctacgacagacaaaccggcttcgtctggctcaaacaaaagaagagttacacccacaagttcgacaaga

SEQ ID NO: 204640 - DNA, 264 bp, Glycine max
agaaaagttagggttcacaacttttccttttccttttgcttgcgaatctgaatcaaataatcaatcatccattcattattcatcatgacgtcggcgaagaaaatcacgctgaagagttcggacggcgaggctttcgaggtggaggaggcggtggcgctggagtcgcagacgataaagcacatgatcgaggacgactgcgccgacagcggcatccctctgccgaacgtgacgagcaagatcctggcgaaggttatcgagtactgc

SEQ ID NO: 204641 - DNA, 250 bp, Glycine max
atcttctttcccactgaggaaacagaggatagcgtcatagcagcaatggcttctgcaagagaacaaatttattttctggcaatcgtccttctattctctcattcgaaactaatgttatcaaatgctgctataacaggggaaccaattcccgctgaatggccccatcagttccacgcgttgatgttcatgaaccaaagcggaactcttcagaaactggacttgtggtacgactggcccaacggccgcaact

SEQ ID NO: 204642 - DNA, 254 bp, Glycine max
cggctcgagctctctcaccaaagccttcctagaacgaaaaaaaaaagaagagcaattttccctcaccaaagaagaagaagcaaacaatggccgatcaacttaccgatgaacagatctccgagttcaaggaagccttcagcttgttcgacaaggacggcgatggttgcatcacaaccaaggagcttggaactgttatgcgttcattggggcaaaacccaactgaggcagagctccaggacatgatcaatgaagtg

SEQ ID NO: 204643 - DNA, 232 bp, Glycine max
gaatggctcccaagggtttaatctttttggctgtgttatgcttctcagcactgtcactgagtcgttgtcttgcggaggataatggacttgttatgaacttctacaaggaatcatgccctcaggctgaagacatcatcaaagaacaagtcaagcttctctacaagcgccacaagaacactgctttctcctggctcagaaacatcttccatgactgtgctgttcagagttgtga

SEQ ID NO: 204644 - DNA, 251 bp, Glycine max
tagggttatcatttctccatttccattttctctctcacttttcaagaatcgtaagctatgggaaagtcttacccaactgtgagtgctgattaccagaaggccgttgagaaggcgaagaagaagctcagaggcttcatcgctgagaagagatgcgctcctctaatgctccgtttggcatggcactctgctggaacctttgacaagggcacgaagaccggtggacccttcggaaccatcaagcaccctgccga

SEQ ID NO: 204645 - DNA, 252 bp, Glycine max
aaaaaataaaaatataaataatataaatataaaaagaacaaacacaaattttatgtgattagtcgcggtatttaaaataaaaaatgaaagtagacaaataaaaaaggaaaggagatgtttgaataaaaataattccccttcaagttcttattttttgagaggacaggacaatatgaatgttttattatgctctatcaacacattaaaaagattatatgatatatctgctgtggaagtaggtcaacatttcta

SEQ ID NO: 204646 - DNA, 248 bp, Glycine max
aaaatggatgtagagaaagccttccacatgactggagaaacaggcaaaactagctatgccaagaattcctcactacagaagaaacaatctgataaagtgaagcacataatcatacaaacagttgaggagctctaccttgcaaccactccaaagagcataggcattgctgatttgggctgctcctctggaccaaacaccctatcaatcatcaaagatatctttcaggccatccaaggcataagccacag

SEQ ID NO: 204647 - DNA, 252 bp, Glycine max
tgggacagcaagagcaagattctgttcatcggagggactggttacatcggaaaattcatcgtggaagccagcgccaaagctggccacccaactttccttttggtgagggagtccactctctccaaccccgcaaaatcacccctcatcgacaatttcaaaggcctcggtgtcaatcttgttttaggagatctatacgatcaccaaagtttggtgagtgctataaagcaggtcgatgtggtaatttctactgta

SEQ ID NO: 204648 - DNA, 246 bp, Glycine max
tcgaattcgttatcgctttgcactagcagctttgaaacccggttcatccgacgcccttcaccgaaccatgtcgaggagaaaggttagagagccaaaggaggaaaatgtgactctgggtccagctgttagagatggtgaacacgtttttggcgttgctcgcatctttgcctccttcaacgacaccttcatccatgtcactgatttgtctggcagggaaacccttgtccgaatcactggtggtatgaa

SEQ ID NO: 204649 - DNA, 249 bp, Glycine max
gtcttcaaaggggttcttacatggagatgtctttcttttatccagtgaagcttaggatcaaatcatttagagtgcccgagctttttatcgagattccagaaactgcaaccgttgggtccttgaagaggacagtgatggaggcagtgactgctgtacttggaggcggattgcgtgtgggtgtgattctccatggaaagaaggttagagatgacagtaaaactctacttcagactggaatttctcatgata

SEQ ID NO: 204650 - DNA, 249 bp, Glycine max
aaaatgtctgaagtgaatgcgacccctgaaattcctcaaagcaacaccatctacatcaacaacctcaacgagaaaattaagattgatgagttgaagaagtctctgaacgctgttttcactcagttcgggaagatacttgaggtgttagctttcaaaaccctaaagcacaaaggtcaagcttgggtggtctttgaagatgcctcttctgcttccaacgccctaaggcaaatgcaaggtttccccttctat

SEQ ID NO: 204651 - DNA, 249 bp, Glycine max
tcaagatctaccgcggcgtcgccggcctcttcgactacggccctcccggctgctccgtcaagtccaacgtgctctcgttctggcgccaacacttcgtcctggaagagaacatgctcgaagtcgattgcccctgcgtcactcccgaaatcgttctcaaggcctctgggcacgtggacaaattcaccgatctcatggtcaaagacgagaagaccggcacgtgctaccgcgccgatcacctgctcaaggact

SEQ ID NO: 204652 - DNA, 247 bp, Glycine max
ctagagtcttcagtttctcctcgttgttcttcgctttcctgttttcaatttcgattctttcgttaatttaataagatgtttgggagggcaccgaagaagagcgataatacgaggtactacgaaatcctcggcgtctccaagaacgcttcgcaggatgatctgaagaaggcttacaagaaagccgccattaagaatcaccccgacaagggcggtgatcccgagaagtttaaagagctggcgcaactta

SEQ ID NO: 204653 - DNA, 250 bp, Glycine max
gcggacgcagatgaagcgccgaaggtatcatgaagtactccagagaacacgacaatcgcaacaagtcctgcaaggtcagaggcgctgacgtcagagttcattttaagaccactagggagactgcctttgccatcaggaagttggcccttgttaaagctaaacgatacttagaggatgttttcgcccagagacaagctattccgttacgaagcttttgtggctgtgttcggaaaaccgcccaggctaagaa

SEQ ID NO: 204654 - DNA, 249 bp, Glycine max
gcttcttctccttctgaactaagagatggggttgtctttcaccaagctttttagccggctctttgctaagaaagagatgcgtattctcatggtaggtcttgatgctgctggtaagactaccatcttgtacaagctcaagctgggagaaattgtcacaaccattcccacaattggattcaatgtggagactgtggaatataagaatattagctttactgtatgggatgtgggtggccaagataagatccg

SEQ ID NO: 204655 - DNA, 235 bp, Glycine max
tgcggcgtcatcctctacaacctcctcgccggccacctccccttcgacgactccaacatccccgccatgtgccggcgcatctcccgccgcgactaccagttcccggcatggatctcgaaatccgcacggagcctcatttaccaattgctcgacacaaaccctataacacgaatttcgttagaaaaagtttgcgataacaataaatggctcaagaatattcaatggtgggagtgaa

SEQ ID NO: 204656 - DNA, 245 bp, Glycine max
gagattcaaagagatcaaagacaattaccagatcagctaaccgattcctggaccaacgatgaagtgcttgcacttttcagaatcagatctagcatggaaaattggctcccagagctcacatgggaccatgtctcaaggaggctagcagaggttgggtttaagaagagtgctgagaagtgcaaggagaagtttgaagatgagagtagatatttcgacaacatcaataactacggcaagaacaattt

SEQ ID NO: 204657 - DNA, 248 bp, Glycine max
ctcatttttcttcttctctgatatcaatcacaatttctctctacttcttcactcttcattctcatttctcttctgaattattgccatggctaagagctcattcaagatggaacacccacttgagaggaggcaggctgaagcatctcgaataagagagaagtatcctgacagaattccagtaattgttgaaagggctgagaagagtgatgttcctgaaattgacaagaaaaagtatcttgtacccgctg

SEQ ID NO: 204658 - DNA, 218 bp, Glycine max
cttcgaagtatgagcaagtaaaggccttggctgaatcatctgagttaatgcataaacatgactcagccatgaataaatctgcattaactgaatcaaggaaacgtgaagaaagtttgaagaagacagtaagcgtcaaagatgcatgcatagcaagtcttgagaaggccttgcatgagctgcgtacagaaagtgcggaaacaaaggttgcagctgagagt

SEQ ID NO: 204659 - DNA, 246 bp, Glycine max; identical to SEQ ID NO: 138483

SEQ ID NO: 204660 - DNA, 242 bp, Glycine max
ggaagggtctttggtcaccagaagaagatgaaaaacttctgaggcatattacgaagtacggtcatggatgttggagctcagttcctaagcaagcaggtttgcagaggtgcggcaagagctgcaggcttaggtggatcaattacttaaggcctgatttgaagagaggtacattctcacaagaggaggaaactctcatcattgaacttcatgcagtgctagggaacagatggtctcaaattgca

SEQ ID NO: 204661 - DNA, 244 bp, Glycine max
gaagagaatggctcccaagggtttaatctttttggctgtgttatgcttctcagcactgtcactgagtcgttgtcttgcggaggataatggacttgttatgaacttctacaaggaatcatgccctcaggctgaagacatcatcaaagaacaagtcaagcttctctacaagcgccacaagaacactgctttctcctggctcagaaacatcttccatgactgtgctgttcagagttgtgatgcttca

SEQ ID NO: 204662 - DNA, 244 bp, Glycine max
gttaggtacatagtatcagactgtgattctgttggggtgttttatgataaccaacattacacaccaacgccagaagaagctgctgctgatgccattaaagcaggtttggatttagactgtgggcctttcctagctgtgcacacgcagaatgcggtcgaaaaagggttgcttagcgaagctgatgtgaacggtgctttggtgaatacactgacggtccaaatgaggttaggcatgtttgatggag

SEQ ID NO: 204663 - DNA, 242 bp, Glycine max
gtgttttcattaatccagctttcattgagccatttggtcttaccttaattgaggcagctgctcatggtttgccaattgttgctactaaaaatggaggtcctgttgatattcatagggtacttgacaatggtctgctcatagatccccatgatcagcagtctattgctgatgctcttttgaagcttgttagcaacaagcaactttgggcaaaatgtagacagaatgggttaaagaatattcat

SEQ ID NO: 204664 - DNA, 226 bp, Glycine max
atctcgagccgctcgaccgattcggctcgagtcagaattctctaaccagagatctttttcagctctttgacgaaagaagggtctttgcacgattttggagatgtctctgctctcagatctcatcaaccttaacctctccgataccaccgagaaggtgatcgcagagtacatatggatcggtggatcaggaatggacctgaggagcaaagcaaggactctcccagga

SEQ ID NO: 204665 - DNA, 244 bp, Glycine max
tctccaaacctaattcttctctgtttttctaactctcttcaaaccttattcttccaagtccatggaaacatcattttcccttgctaggtggctattgtgtgttattctgttttagggatttgccattggttctgctgcccttgtatcactggccctctttggtgcctttgtgagccgagctgctattacaactgttgatgtgttgactccaaaggttttcattggtttgattgtgggtgcaatg

SEQ ID NO: 204666 - DNA, 241 bp, Glycine max
caaacagagtgtctaatcgaagatagaagaagagatggctaaatctccagaaactgaacttcccgtcgaagctttcggttgggctgcttcagacacttctggcacccttgcaccttttcatttctccagaagagaaaatggcgttgatgacgtcactctcaagattctcttctgcggggtttgccactcggatctccacactctcaaaaacgactggggtttcaccacttaccctgtcgtt

SEQ ID NO: 204667 - DNA, 182 bp, Glycine max
tgttgtgtgtgtgagcccatttgtatgctgctcatcgcaccagtgatacgtggtctgacagatgcctcatcagcccaatgttgtgaagcttgaggagttggttacttctagaatgtcgtgtagtctctatttggtgtttgagtatatggagcatgatcttgcagggcttgctgctggtcaag

SEQ ID NO: 204668 - DNA, 204 bp, Glycine max
attaaattcctcgtggaatattgaagaagccatgtctacagctgggcaggtcatcaagtgcagagctgcggtggcatgggaagcagggaagccactgtcaatagaaaccatagaagtggcaccaccccagaaaggtgaagtgcgtttgaggatcctcttcaactccctttgccgtagtgatgttaattggtgggatgctaagga

SEQ ID NO: 204669 - DNA, 241 bp, Glycine max
ctcgaccggttttagcgcagttcttctagatttaaggaagatgggtaaggaaaaggctcacatcagtattgtggttattggccatgttgactctgggaagtccactaccactggccacctgatctacaagcttggaggcattgacaagcgtgttattgagagatttgagaaggaagctgctgagatgaacaagaggtctttcaagtatgcctgggtgcttgataagcttaaggctgagcgt

SEQ ID NO: 204670 - DNA, 233 bp, Glycine max
gttcctcactgaccaagccatggcgatgagaaccaaactttctttagctatctttttcttttttcttttagccttattttcaaacctagcctttggcaaatgtaaagaaaccgaggtagaagaagaagaccctgagctcgtaacatgcaaacaccaatgccaacagccacagcaatacactgagggtgacaagcgggtatgcttgcaaagatgtgacaggtatcatcgtatga

SEQ ID NO: 204671 - DNA, 240 bp, Glycine max
cttagctacctagattattcacttcaattcctcacaagcaacaccgtttcttgctccaatggcagctttgtatctcccaataagcatgttggcactcattgttgttgtttctcttggtttgtggagtggtgttcaaggtgcaccacaagtgccatgctacttcatttttggtgattctttggttgataatgggaacaacaaccagctccagtctttggctagggctgattacttgcctta

SEQ ID NO: 204672 - DNA, 240 bp, Glycine max
gtggaattctcgtattttggtgcaccagagccagtttcaaaagagcagctgtacacagagatcgtagatgacttgcgtgggggcgatccatgcattggttcaggatctcaggtggcaagccaagagacatatggaactttgggtgccatcgtgaaaagccaaactggcagtcggcaagttggttttctcacaaatcgtcatgttgcagtcgacctagattatccgaaccaaaagatgttt

SEQ ID NO: 204673 - DNA, 236 bp, Glycine max
ccctctagcgattcgctgacggaaatgtcgccgacgaagaacacgggagcagcgttcgtggatccatcgatttcggcacggcggaggccgttcaatacgtccgttccctcaccgacgttggcgccatgacgcgcctccttcacgaatgcatcgctcaccagagagcggtggacgttgaactcgacgagcttctgtcgcagcgcaccgacctcgaccgccatctcctccagctccag

SEQ ID NO: 204674 - DNA, 239 bp, Glycine max
gaaattgctttgctgtaagtttctgattcctttcttcagaattccaagttttcatttcgttagggacaaaagattgtgagatagagtatggctggaaaaggcgagggtcctgctatcggaatcgatttgggaacgacgtactcttgcgtcggcgtgtggcaacacgatcgtgttgaaatcatagccaacgatcagggtaatagaactaccccatcctacgtggctttcaccgatacaga

SEQ ID NO: 204675 - DNA, 193 bp, Glycine max
ttttcatcaggtttattccttttcttttggttcaattttgctgaatggagagtgcaagaatcagcaaatggttaaatcttctagtttgtgtactgctattgcttaaggcagaaggatctcttgttccattgactttggtgaagaatgcagaatcaaaaggagctgtttgtttggatggaagccccccagcata

SEQ ID NO: 204676 - DNA, 242 bp, Glycine max
  unsure (1)..(242): unsure at all n locations
gtgaatgagaagacatacaacccaaaaatggacattgtttctaatgcaagctgtacaacgaattgtcttgctcctcttgccaaggtggttaatgaagagtttggaatagttgaaggtttgatgacaacggtacatgcaacaacagcaacacaaaagaccgtagatggtcctctatgaaggattggcgaggaggaagaggggcagctccaaatataattccagttccaanggtgctgggaagc

SEQ ID NO: 204677 - DNA, 179 bp, Glycine max
cccaactctctctctctctccacttgccaaaggaaaaaggctaaagagaaacccacacacacacacacacacagaaatatgtcttccccaagcaagcgccgagagatggacttgatgaaactgatgatgagtgattacaaggtcgagatgattaatgatggaatgcaagaattttatgt

SEQ ID NO: 204678 - DNA, 241 bp, Glycine max
attattcttgagagtctttttcagaagcagtaagacacaaaagtgcatatacttcacaaccatgggaaccgagactccgacgagtggaaatcctattgcttcagggggagaaaaggttgctttcccagcagcagagattgataaaagaacagcggagcagaaggcaattgatgattggcttcccataacttcttcaaggaacgcaaaatggtggtactcagcttttcacaacgtcactgcc

SEQ ID NO: 204679 - DNA, 239 bp, Glycine max
ccaggattctgcttttgatctcttggctaagctttggaattgcagttattttattaatcgttgccacaagcatgagcagaaggcaggactatggggaagggtggttgaatggtgagtgctaccttgtcaaaggagggatttacgttggttcagccatattgatcctagtttcagtagaatcgttaatgggttcagctttgttaacaatgaagaccaatgaagaagcagatcagggtaac

SEQ ID NO: 204680 - DNA, 239 bp, Glycine max
ttgggctgaattgattcctgatgcgctcggggtaatcttcaccaatctttctcttcaggagagggtaacagtgatccccagggtgtgcaaatcatgggctaatgcagtaactggaccttactgctggcaagagatagacatcaaggattggagcaaccgatgccagcccgaccaactcgatcggctacttgagatgcttatcacaagaagttgtggaaccctccgcaaactcagtgttt

SEQ ID NO: 204681 - DNA, 173 bp, Glycine max
gcggctaggtttagcgcacttcttctagatttaaggaagatgggtaaggaaaaggttcacatcagtattgtggttattggccatgttgactctgggaagtccactaccactggccacctgatctacaagcttggaggcattgacaagcgtgttattgagagatttaagaagga

SEQ ID NO: 204682 - DNA, 252 bp, Glycine max
gcggctatggttttagcgcacttcttctagatttaaggaagatgggtaaggaaaaggttcacatcagtattgtggttattggccatgttgactctgggaagtccactaccactggccacatgatctacaagcttggaggcattgacaagcgtgttattgagagatttgagaaggaagctgctgagatgaacaagaggtctttcaagtatgcctgggtgcttgatatgcttaaggctgagcgtgaaagaggaa

SEQ ID NO: 204683 - DNA, 246 bp, Glycine max
cataaataaaaccttgctcttttttcacgccctagctcattttcttctccgttctcttctctctgttcctcactcactcgcatttattcaccatgactaagcaacaagctaattggtctccatacgataacaacggaggatcatgtgttgcaattgctggagcagattactgcgtcatcgccgcggatacgaggatgtccaccggttacaatatcctcactcgcgattactccaaaatctcccaac

SEQ ID NO: 204684 - DNA, 243 bp, Glycine max
gttaaagttataatggcaactaacagagcagacaccttggaccctgctctgttgcgtcctggaaggcttgatcgtaaaattgagttccctttgcctgatagacgccaaaagaggctcgtatttcaggtttgcacagccaaaatgaacttgagtgatgaggtagacctagaggattatgtttctcgtcctgacaaaatcagtgctgctgagatagcagccatttgtcaagaagctggaatgcat

SEQ ID NO: 204685 - DNA, 240 bp, Glycine max
gcatcacgcacgtctctctctctctctcgccatggctatggctatgcaaagcggaatcggagtctccaagatcctcatcatagcaggagcaggttacaccggcaccgtcctcatcaaaaacggaaaactctcggatttaatcggcgagcttcagttgctggtgaagggattggaaaaatctggggagcatgctgaaggtgaaggtgaatatgctgatgccatagctgctcaggtgcgtcg

SEQ ID NO: 204686 - DNA, 230 bp, Glycine max
ctaaaacacagcattatgtccttctctacaaatatcctgaaaaactcaatcatggctagagattcttcggattcaggtccatttagaatgcttgaggggaatgtgacgattatcaatggtggtgcgagtagtctaagcgcagctactgcaagaatcttctctaaacatggatcacatgtaatcatagctgatattcaaggcgacttaggcctctctgtcgccatacagtt

SEQ ID NO: 204687 - DNA, 235 bp, Glycine max
ctaaaacatatctttatttccttgtctacatatatcttgaaaaactcaatcatggctagtgtttcttcggtttcagctccatttagaaggcttgaggggaaggtggcgattatcactggtggtgcgagtggtctaggtgcagccactgcaagactcttctctaagcatggagcacatgtagtcatagctgatattcaagacgacttgggtctctctgttgccaaagagttagaat

SEQ ID NO: 204688 - DNA, 222 bp, Glycine max
aggaacttgttcactgcacaaggaagagaagaccctaaccaaaacaccggcatttccatcttgaactgcaaggttgcagcagccgctgatttaatcccggtcaaatctcagttcaagaactacttgggtcgtccttggaagaagtattcgagaactgttttatcttaagtcttacatggaggatctgatagacgccaaagggtggttggagtggaatggcac

SEQ ID NO: 204689 - DNA, 239 bp, Glycine max
gctgaagggtatcatgaattgtctgcaaagacaaaaacattcttttctacagcagttgcaaaatgggatgctgagttctatgtcaaagtggatgatgatgtccatgttaatttaggtgtacttgcaacaacccttgctcgtcatcgttccaaaccaagggtctatgttggatgtatgaaatctggacctgttctttctcgaaaggatgttaaatatcatgaacctgagttttggaagtt

SEQ ID NO: 204690 - DNA, 244 bp, Glycine max
ctcgcatcttgttcctccgctcaacaactataataacatctttctctctccgaacagatcacactatggccacctcaagcgccaaatcagtccatgatttcaccgttaaagatgccaagggaaatgatattaatcttggtgactacaaaggaaaggtccttatcattgtcaatgttgcctcacaatgtggcttgactaattcaaattacactgagctcagtcagttgtatgagaaatacaaaca

SEQ ID NO: 204691 - DNA, 252 bp, Glycine max
cagcagggtcgggagccacagctatgcagagccaagttgtgtgcaatggttgtaggagccttctgctttacccaagaggagcaaccaatgtctgttgtgcattgtgcaacacaattacctctgttcctccacctgggatggaaatgtctcaactttattgtggaggttgtaggacattgctaatgtacacacgtggagctacaagtgtgagatgttcctgctgtcacactgtaaacctgttccaccagcatc

SEQ ID NO: 204692 - DNA, 239 bp, Glycine max
ctaaaacatatctttatttccttgtctacatatatcttgaaaaactcaatcatggctagtgtttcttcggtttcagctccatttagaaggcttgaggggaaggtggcgattatcactggtggtgcgagtggtctaggtgcagccactgcaagactcttctctaagcatggagcacatgtagtcatagctgatattcaagacgacttgggtctctctgttgccaaagagttagaatccgc

SEQ ID NO: 204693 - DNA, 235 bp, Glycine max
caccagactacattgctcctgaagtacttttgaaaaaaggatatgggatggaatgtgattggtggtcactgggagcaataatgtatgaaatgctggttggttaccctccatttttctctgatgacccaataaccacatgcagaaagattgttcattggagaaatcatttaagatttccagatgaggcccagttaacacttgaggctaaggatctaatttataggttgctgtgtga

SEQ ID NO: 204694 - DNA, 237 bp, Glycine max
gtggattctgcacaggttttggggctactgtgaatgttgcaaaaccaaagcctaataatactgttgctgtctttggcttaggagctgttggtcttgctgcctgtgaaggggcaagggtttctggtgcatctagaatcatcggggttgatttacttcccaatcgatttgaacaagccaaaaaatttggggtcactgattttgtaaacccgaaagatcacaacaaaccagtccaagagg

SEQ ID NO: 204695 - DNA, 243 bp, Glycine max
gattgacgctgcgtctcttcctcttctctttcgatccatccctcattcctaatcctccaatccaaccacctcagcctcacactcacatatacacatatctgaacgcgtatcgtccctcctctggcttcaaagcgcatcctcaaggagctcaaggacttgcagaaagacccaccaacttcttgcagcgctggtccagtagctgaggacatgttccattggcaagcaacaataatgggtcctgct

SEQ ID NO: 204696 - DNA, 253 bp, Glycine max
ctcgagccgtggcaagttcccgttcatggctaatagcagagctaaggcaattgacaatgctgcaggactggtgaagatattggctgaaaaggagacagacaagatattgggagtgcacattatggcacccaatgcaggagagcttattcatgaagcagcaatagcactacagtatgatgcatctagtgaggacattgcacgtgtgtgccatgcacatccaacaatgagcgaggctgtgaaagaagccgcaatg

SEQ ID NO: 204697 - DNA, 244 bp, Glycine max
cgcagagaaagaaaaccctagctcaccgtttcaagatgcaaatcttcgttaagaccctcactggtaagaccatcactctcgaagtcgagagttcagataccatagacaatgtaaaggccaaaattcaagacaaggaagggatcccaccagatcagcaacggctcatttttgctggcaagcagcttgaggatggacgtacccttgctgattataacatgcaaaaggagtccactctccacttggt

SEQ ID NO: 204698 - DNA, 240 bp, Glycine max
attccattctctctgtgtatttccctacctctcccttcaagatgcagatcttcgtcaagaccctcaccggcaagaccatcacccttgaggtggaaagctctgacaccatcgacaacgtcaaggccaagatccaggacaaagaaagaatccccccggaccagcaacgtctcattttcgccgcaaagcaactctgagacggccctaacttgtctgactcacaacattcagaaggagagtact

SEQ ID NO: 204699 - DNA, 236 bp, Glycine max
ctcatttctcacattattattcacatctccatctagatctctctctctctctctcccaagaaattcatcaacagacttgtgattaatttgcaattgttcaagtgatctatcaagaaattgataattcaatgggaaagtacgaaaaagagcttaatctcgaggctacagagttgagattggggttgcctggaagcgatgagcctgggaaacgttctattgttagaagcaataagaga

SEQ ID NO: 204700 - DNA, 239 bp, Glycine max
ttcaaactcatcaaaatgaatctgtaccactcctccaccaccaccaccaccaccaccatcttcaccgtcatattcctcctccttgcaatattattcactctcacaccccacaaggccaacggtgccacgtgtcaccctgaggaagaagcgggcctgttgggcttcaaatccggtatccgatccgacacgtccggcctgctcagtaactggatatcgggtacggactgctgcacatggac

SEQ ID NO: 204701 - DNA, 236 bp, Glycine max
aagcaacattttactgggtatataagtggagagtgtaactgaaattatgtggaggtgcatcaatggaagaattgccagaagatttttatccacttcttctgccagtgcccgtggttggtgggaccatgtaaggccagcaccgaaggaccccattgttcgtgtgaacgaggcatttctagctgaccctttccccataagatcaatcttggaataggtacttataagggtgatgatgg

SEQ ID NO: 204702 - DNA, 217 bp, Glycine max
  unsure (1)..(217): unsure at all n locations
ctaacctacctctttttcttctctactcaacaacttcaccttncttcctcctcgatcatgtcacacttcaagggcaagtaccatgatgagcttatcgccaatgctgcgtacattggcactcctggaaagggtattcttgctgctgatgagtcaacagggacaattggcaagcgtttggccagcatcagtgtagagaacattgaatccaacaggcgag

SEQ ID NO: 204703 - DNA, 237 bp, Glycine max
ctttctcctaaaacatctcaatgggttcttcttctattacaacatcgcccgcaaccatgaccatggctgcgatcgtgctcctgttcacggtctttgccgtttcctccgccctagacatgtcgataatctcgtacgacagcgcccacgcggacaaggccgccacgttgcgcaccgatgaacagctgatgtccatgtacgagcagtggctcgtgaagcacgggaaggtgtacaacgcgc

SEQ ID NO: 204704 - DNA, 234 bp, Glycine max
cactcaactacacttctggaactacatcaaaccccaagggtgtgatctatagccaccgaggtgcctatcttaattctctggctacggttcttcttaacgagatgaggtctatgccgttatatttatggtgtgttcccatgtttcattgcaatggttggtgcctcccttgggccattgctgctcagggtggcactaatgtctgccaaagaagtgtaaccgctgaagggatatttg

SEQ ID NO: 204705 - DNA, 247 bp, Glycine max
gcaatccttctgctctacgtgaaacggttgttgaagtgcccaatgtcagctgggaagatattggtggtcttgaaaatgttaagagggaactccaagagactgttcaatatccagtggaacaccctgaaaaatttgagaagtttggaatgtcaccttcgaagggagtcctcttttatggacctcctggttgtggtaaaacgcttttggcaaaagctattgccaatgaatgtcaagcaaacttcattag

SEQ ID NO: 204706 - DNA, 245 bp, Glycine max
ctcagaggtgtgatatgtgatgtgattcaggtttgtaaaaatatggagtgtttgaattcggtggaggaggtggtggaggagataatgaggattcacagatcccttccagcccggccagggatagacgaagtcgaagtggctagaggtttgatcgggaatgttgaagaagaagaccaggcgaggctccaagccatagcgcggcagagcaagggcgttcatgtgccccaagagctcttcatggtgct

SEQ ID NO: 204707 - DNA, 242 bp, Glycine max
ctcgagccgaaaggagagaatacacagattagttcaatctggggttgaaagtggtgccagaatactgcttgatggaagaaatatagtggtcccaggatatgaatctggcaattttattggtccaaccatcttatcagatatcaatgccaacatggagtgctacaaggaggaaatttttggcccagttcttcttttcatggaggctgatagcttggaagaagccataaacattatcaacagta

SEQ ID NO: 204708 - DNA, 248 bp, Glycine max
atctagagtcttcagtttctcctcgttgttcttcgctttcctgttttcaatttcgattctttcgttaatttaataagatgtttgggagggcaccgaagaagagcgataatacgaggtactacgaaatcctcggcgtctccaagaacgcttcgcaggatgatctgaagaaggcttacaagaaagccgccattaagaatcaccccgacaagggcggtgatcccgagaagtttaaagagctggcgcaactt

SEQ ID NO: 204709 - DNA, 238 bp, Glycine max
ggcaagtcatgcggtggttgctatcagattgtttgcgacgcaagccaagtgccccaatggtgccttaggggaacttccatcacaatcactgccacaaatttctgccctccaaactatgcactccctagtgacaatggtggttggtgtaatcctcctagaccacactttgacatgtctcaacctgcctttgagaccatcgccaaatacaaggctggaattgttccaattatctacagaa

SEQ ID NO: 204710 - DNA, 237 bp, Glycine max
ggcttcttcaatccctaatgcgccttctgcgttcaattctcagagctacgttggtctcagagcgccactgaggaccttcaacttttcttctcctcaagctgccaaaattcctcgctcccaacgccttttcgtcgtcagagcctccgattcggagttcgaagccgccgttgtcgccggtaaggttccgccggcgcctcccgtgccgcccagaccggcggctccggttggaacaccggt

SEQ ID NO: 204711 - DNA, 237 bp, Glycine max
caactatgtagatgaatatgatgtcactcttgatgtttgtttgtcatcagtaaatcaacaggcttaatgggccgaatcaactgcaagagacacagaagatagatgtttgtatcggtgataaaacaactacatacttgaacactaaagaagtccaagaagctctgcatgctaatcttgttggagtcgccaaatggtcaacttgcagctcagttctgcattatgattatcagaatctag

SEQ ID NO: 204712 - DNA, 240 bp, Glycine max
gacacctgcaggaacatcggcttcgtctcaaatgatgtgggactggatgccgacaactgcaaggtcctcgtcaacattgagcagcagagccctgatattgctcagggtgtacacggccaccttaccaaaaaacctgaagaaattggtgctggtgaccagggtcacatgtttggctatgccactgatgaaacccctgaattgatgccattgagccatgttcttgcaacaaaactcggtgct

SEQ ID NO: 204713 - DNA, 233 bp, Glycine max
gaaagataaaagaagatggcgactcttgattccgacgtgcctatggttcccgccggccagccctcgagcagcgccggtccttcttccaagacgcccaagcccttcgagatcaagaagtggaacgccgtcgctctctgggcttgggacatcgttgtcgataactgtgctatctgccggacccacatcatggatctctgcatcgagtcccaagccaaccaggctagcgccactag

SEQ ID NO: 204714 - DNA, 231 bp, Glycine max
cgggaacccagatttccaccattctgagtaacttcacacaccatataacagaaaatgaggtggggcttgtggcaacttgggcaatcaatccctcgccgtcttgctcacggtaataataaagctgttgcttgtcgatattttgcctcagatgctgagctgaaaaagacagtcctttatgacttccatgttgctaatggagggaagatggtgccatttgctggatggagcatg

SEQ ID NO: 204715 - DNA, 233 bp, Glycine max
aaacaaccttctttcttattctgtgagcctttctttcaggttcttaacttgatcagtgtgcagtgtccaaatcataagggtagttgcaaattgcaatggctaagcatgatgttgagggtggttccttctctgcaaaggactaccatgatcctcctccagcaccgttgattgatgctgaggaactcacacagtggtccttctacagggctttgattgctgagttcattgccaca

SEQ ID NO: 204716 - DNA, 233 bp, Glycine max
agaagagaacaaaatggaagacacagtttctgcgttgaggtctttgatggtttctcactctccgccgctggatgccttagtggtgccctctgaagattatcacctgagcgaatatgtgtctgcacgagacaagcgccgcgaattcgtttccggcttcactggaagtgccggcttggcacttataacaaagatagaagcactgctgtggacggatggacggtattttttgcagg

SEQ ID NO: 204717 - DNA, 235 bp, Glycine max
aagagttgctgcttcttcagccactccgcacctcgcagcctctgtgccctcaacaaccatggctgaaatcgaaactaccgttccagatcccacccaaatcgacgtcaaactcttcaatcgctggagcttcgaggatgttgaggttaaagatatgtctctggctgattacattggagtgtccccatcaaagcatgctacatatgttcctcacactgctggtaggtactcagtgaag

SEQ ID NO: 204718 - DNA, 238 bp, Glycine max
ctctttctctagtcctgttatttctcagcgcgtaaagcatggctttgttggtggagaaaaccacgagtggtcgcgagtacaaggtcaaggacctttcccaggccgacttcggccgcctcgagatcgagctggccgaggttgagatgcccggcctcatggcctgtcggaccgagttcggcccctcccagcccttcaagggggcccgcatcaccggctccctccacatgaccatccagac

SEQ ID NO: 204719 - DNA, 236 bp, Glycine max
actgaagcaagcagaatcctcagataacatgaacataatcaaactgtttaaaacgaaggctgtgaggagaggtttggtggcaggaatggggcttcaaatcttccagcaattcacgggcatcaacactgtcatgtactacagtcccacaattgttcagttagctggttatgcatccaaccagacggcattgctcctctccctcatcacttctgggcttaacgctttcggttcggtcg

SEQ ID NO: 204720 - DNA, 235 bp, Glycine max
ccaagagcgagatatctatttagatctctgaaaaacagagtttcatttcaattcagtcttattattagggtttgccgattgagagagaaagagaaatgggagaacgaaaaggaatcccaatggctttggggctcttggcgatgatcctcttcttcattgcttcctcttcctctcacctcgttcgcgcttccgatgacgccgacgacgcgatcttctacgagtcgttcgacgagga

SEQ ID NO: 204721 - DNA, 235 bp, Glycine max
gggagattgaattcgatcctgggacgttaacgttgtttcaattcaattgtggtcctgtcggtgccctatctcagacgacgatgtcatctttatatagaggggaatccaggaggtacaacaataaaccaagaggacgtcataatttgacaacgcagaagaagcaagagattaaggaagcctttgagttatttgatactgatggctcaggtactattgatgccaaggagctgaatgt

SEQ ID NO: 204722 - DNA, 167 bp, Glycine max
ctggggagtcttatgccggagtttatgtgcctactctagcttttgaagttgctaaaggaatccggagtggtacaaagcccgtgatcaattttaagggttacatggttggaaatggtgtcacggacgaaatatttgacggcaatgctcttatcccatttgtgcacggg

SEQ ID NO: 204723 - DNA, 168 bp, Glycine max
tgaagaatggtgctttcggaggaggaaatcggtcgtctataccgaataaggaagacggtgatgcagatgctgagggacagaaattttctggttggtgacttcgagatcaacatgtccaagccgagttcaagtccaagtacggcgaacacatgaagcgcgaggacctcg

SEQ ID NO: 204724 - DNA, 270 bp, Glycine max
attcatataatcatattctgaactgttttttcagtttcgctattccactctgctgtgtgcgtgtggtcggtcactgcaaacgcaaaaaccagaacattctcttcagcttaacccttctttttcgatggctaatcggcacacgattattcttatgcagacctcgcagagcagagcaactaggacgttcatggattatgaatccataactcaggccatggatggcatatgtgcactgtatgaaaggaaactgaaggagttgaacccgaccat

SEQ ID NO: 204725 - DNA, 268 bp, Glycine max
tgggattctaaaaggttgcttgattcgggtggaatgccttcgtcacattctgcaacggtctcggctctggctgttgctatatgtctccaagaaggggcagggtcacccgcctttgctatgcagtggtcttggcatgtattgtgatgtatgatgccacgggagttagacttcatgcaggtagacaagcagaattgcttaatcaaattgtgtgcgaacttcctccagaacatccttgttccaatgttagacctctgcgtgattcacttgg

SEQ ID NO: 204726 - DNA, 229 bp, Glycine max
tcgcccatcctccccaccaaggatctccccaaggatttcgattggcgagacaaaggagccgtcactaacgtcaaggaccaaggggcgtgtggttcgtgttggtctttcagtacgacgggacgttggaaggagctcattatctggccactggtgagctcgtgagccttagcgagcaacagcttgtggattgcgatcacgtgtgtgatcaagacgattatggagcgtgtga

SEQ ID NO: 204727 - DNA, 270 bp, Glycine max
tgcttttatccctgaaaatcaaatcagactcagagaaaaagagaaaatggcgctgaagtttctgaacaagaagggatggcacacggggagtttaaggaacatagagaacgtgtggaaggagagcagaagcacgaagcggagcagaagaagctggatgagctccgcaaacagatccaggaggagagagaccgcaccgtgtttcgtcttcatcaggagaaagctggcctcgttccgcatcaggaaaggttggaatttctgtacgattcggga

SEQ ID NO: 204728 - DNA, 271 bp, Glycine max
gaggaatatggcttccttaagctcctcattagtgatgctccttgcagctctaattctatcccctcaagttcttgctgactatgagaagcccccaatttacaagccacctgtttacacacgccagtttataagcccaaagttgaaaaaccaccagtgtacaaacctccagtttacaagcctccagttgaaaaaccacctgtttataagcctccagtttataagccacccatttacaagccaccagtgtataaacctccagttgaaaaaccac

SEQ ID NO: 204729 - DNA, 271 bp, Glycine max
tctctctctctctctctctctctaactctcttctaaaacttaccaacacaacaaaatcgagtttccaataaagagttttgttgaaatggaaaacgttccggcggtgtgtaaggaagatgtcagatggatttgcctcccggatttcgattccacccgacggatgaagagctcataagccattacctctacaagaaggtcattgacaccaagttctgcgccagggcaattggagaagtggacctcaacaagtccgagccttgggatttgccat

SEQ ID NO: 204730 - DNA, 271 bp, Glycine max
ctatagtaaaaaaaggacattcattcatctatggctacccttaatgctcccagcaaccactctccccaagaagatgctgaagctctcagaaaggcttttgaaggatggggaactgatgagaacactgtcatagtaattttgggtcatagaactgtgtatcagaggcagcaaatcagaagagtttatgaggaaatttaccaggaggatcttgtgaagcgcctagagtctgagatcaaaggagactttgagaaagaaatgtaccgatggatac

SEQ ID NO: 204731 - DNA, 267 bp, Glycine max
caacaacacaaggccatcatcatggcagctgcttctcctatggcaagccaactcaagtccaccttcactaaaactcttgtagctcccaagggcctctctgcctcttcaccactccacctcctgccttctaagaggcaatttagcttcactgttagggccatccattcagaaaagccaacctatcaagtgattcaaccaatcaacggtgatcccttcattggaagccttgaaaccccagttacatccagccccttgattgcatggtac

SEQ ID NO: 204732 - DNA, 271 bp, Glycine max
cggctcgagggaaaggttaactaagaagcaatacttcaatggccacccttgttgtgacctaaccaaacttcttctgctcaagatgctgaggctctccaacaggctttcaaaggatgggggctgatgacaaggccattatagcaatactgggtcacagaaatgttcatcagaggcaagaaatcagaaaagcttatgaggagatttaccaagaggatctcatcaaacgccttgagtccgagatctctggtgactttgagagagctatgtaccg

SEQ ID NO: 204733 - DNA, 162 bp, Glycine max
atgaggaatatggcttccttaagctcctcattagtgctgctccttgcagctctaattctatcccctcaagttcttgctgactatgagaagcccccaatttacaagccagctgtttacacaccgccagtgtataagcccccaactgtaaagccaccagtgtac

SEQ ID NO: 204734 - DNA, 164 bp, Glycine max
  unsure (1)..(164): unsure at all n locations
aagaaacaaataagtggaagattcgtcttcaacttacaaagccagtccacttggcctccattantttggggtgtagtntgtggagctgctgnttctggaaattttcattgganttttgaagatgttgctaaatcaattgtgtgcatgatgaatcggcccntnnt

SEQ ID NO: 204735 - DNA, 183 bp, Glycine max
aacaaacccactaagatggcttcctttgtatccttcctagtgctgcttcttgcagcccttatcctcatgcctcaagggcttgctacttactacaaaccaattaagaagccaccagtgtacaagcctccagtgtacaagccaccagtgtacaaaccaccggtttataagccaaaaccaccggtt

SEQ ID NO: 204736 - DNA, 267 bp, Glycine max
ctcgagccgttttcagaaaggttggtggtgactggtgattgttgaagagaataatggcaacttcaactatggatattcttcatttccaccacactcctttttattgtgaggagaattatacttgctttgcaaaaagttgtgcaatgatggaatagcagatgctgatggatctgatctttttgttgctttcatttccaacgaaaagaaacagatcccactttggaatcaaaaggctagcaaaagagctgatggggtgcttctatggga

SEQ ID NO: 204737 - DNA, 272 bp, Glycine max
actcgagccgattcggctcgaggcggaggaaaagaaactaacaaacgattcccttagtaacgagtgagcgaaccgggaaaagaccaccatgaaaatcggtcgccctcggcgtccgaattgtagtctggagaagcgtcctcagtggcggaccgggcccaagtcccctggataggggcgccagagagggtgagagccacgtcgtgcccggaccctgtcgcaccacgaggcgctgtcggcgagtcgggttgtttgggaatgcagccccaatcggg

SEQ ID NO: 204738 - DNA, 159 bp, Glycine max
gagcgaagagaatggctcccaagggtttaatctttttggctgtgttatgcttctcagcactgtcactgagtcgttgtcttgcggaggataatggacttgttatgaacttctacaaggaatcatgccctcaggctgaagacatcatcaaagaccaagtca

SEQ ID NO: 204739 - DNA, 259 bp, Glycine max
aagaaatttaagtgaggagctagagaatgatgatgaagtctgctatgtgtgcagtggtggttgtagcacttcttcttctggcggaagtggggcacatggctgaggctgtgacatgaccccaacagagttgagtacgtgtcttccagcaatcacttccggtgctaaaccttccaatgcttgttgcacgaagctgaagcagcaaaaaccatgcttatgtggctacctcaaaaacgctagcttgaagcagtatgttaactct

SEQ ID NO: 204740 - DNA, 158 bp, Glycine max
atttcttcttatctttcgtattcccttcgcaagtgagagatggagcaaatactgattcatgggactctacacgccaccgtcttcactgttgataggctcaatgctggttgtggtggggcaatttttttagcaagctcaagcataactttgaggagact

SEQ ID NO: 204741 - DNA, 206 bp, Glycine max
attaattgcaagaatggcacttcgttgcttggtgatgtccctttctgttctcttcactcttggtcttgcgagagaaagccatgccagagacgaagatttttggcatgctgtttggcaaacactcccattccaagttcattgcgagatcttctaaagcctggccctgcaagtgttgaaatcgaggatcaccctaggcaatttgagga

SEQ ID NO: 204742 - DNA, 265 bp, Glycine max
gtgaatgagaagacatacaacccaaaaatggacattgtttctaatgcaagctgtacaacgaattgtcttgctcctcttgccaaggtggttaatgaagagtttggaatagttgaaggtttgatgacaacggtacatgcaacaacagcaacacaaaagaccgtagatggtcctctatgaaggattggcgaggaggaagaggggcagctcaaaatataattccaagttcaactggtgctgcgaagccgttgggaaagttcttcctgag

SEQ ID NO: 204743 - DNA, 198 bp, Glycine max
aacgattaacaatggcttcaaccgacaagtcaccggacccaacgccggcgaagggtccggatccaactccggggaagccgatgagtgttggtcagcacgtgatcgacaagagtgcaatgatggtgcagtcgctggaccccattaagcagatgagtcagcacgtgtgctccttcgctatctacagccatgacatgtctc

SEQ ID NO: 204744 - DNA, 262 bp, Glycine max
caaccactcttaatttctctctgccttgctcatttacacacctctccaacctttcactttcagctttatttgaatccctctctctcctttccaaatggccagcgttgaggttgcacatcaaacaccaacaacagttccagaaaatgaaacaaccgaggtaatcaagacccaggaaacaaccccggaaccagtaccagccactgaggctcctgcaacagaacaagcagcagctgaggttcctgctcaagaagaacaacaagca

SEQ ID NO: 204745 - DNA, 260 bp, Glycine max
gagaatggctcccaagggtttaatctttttggctgtgttatgcttctcagcactgtcactgagtcgttgtcttgcggaggataatggacttgttatgaacttctacaaggatcatgccctcaggctgaagacatcatcaaagaacaagtcaagcttctctacaagcgccacaagaacactgctttctcctggctcagaaacatcttccatgactgtgctgttcagagttgtgatgcttcactgttgctggactccacaag

SEQ ID NO: 204746 - DNA, 265 bp, Glycine max
ctcatttctcatttctcacattattattcacatctccatctagatctctctctctctctctcccaagaaattcatcaacagacttgtgattaatttgcaattgttcaagtgattatcaagaaattgataattcaatgggaaagtacgaaaaagagcttaatctcgaggctacagagttgagattggggttgcctggaagcgatgagcctgggaaacgttctattgttagaagcaataagagatcttcaacagaagcaagcgagga

SEQ ID NO: 204747 - DNA, 177 bp, Glycine max
tcgggtcccttcccaaattttcttttccaacttccaaatctccaatttatctatctagaaaacaacaatctctcgggtcgaatacccgataacatcggtaaccttacccgatagatgtactcagtttaactggtaaccggttcatcggacccgtaccgagttcaataaccaagttga

SEQ ID NO: 204748 - DNA, 196 bp, Glycine max
gcctgaactagcaaaactcgaagctattgactgtggaaaaccgctcgatgaagccgcctgggacatcgacgatgttgctggttgctttgagttctatgctgaccttgctgaaaattggacgcacagcaaaaggctcatgtgtctcttcccatggacacattcaagagttatgttcttaaggagccgattggagtcg

SEQ ID NO: 204749 - DNA, 185 bp, Glycine max
agcgaagagaatggctcccaagggtttaatctttttggctgtgttatgcttctcagcactgtcactgagtcgttgtcttgcggaggataatggacttgttatgaacttctacaaggaatcatgccctcaggctgaagacatcatcaaagaacaagtcaagcttctctacaagcgccacaagaaca

SEQ ID NO: 204750 - DNA, 274 bp, Glycine max
gggaattttccgcactgacaatgttcctgaggatgaaattgtcaagcttgttgacaccttccctggccaatctattgatttctttggtgcactcagggctagagtatatgacgatgaagtgaggaagtggatttctggtgttggtgttgacttgattgggaagaagcttgtgaactccaaggaaggacctccaacctttgaccaaccgaagatgactttgagcaagctcttggagtatggtaacatgcttgtccaagaacaagagaatgtgaag

SEQ ID NO: 204751 - DNA, 261 bp, Glycine max
tttcatttctacatccctggctctgttccgtcgatgacgatggcgtttagggtgcgaaaccctgacctccgctttctcattcttctctctctcttgtacatcacttccgccaaggtcttcttcgaggagcgtttcgatgacggatggggaaatcgttgggttaaatcagattggaaaaaagatgagaacctggctggggagtggaacacacctctggccaatggaatggagacgctaacgtcaaaggtattcacaccagtg

SEQ ID NO: 204752 - DNA, 262 bp, Glycine max
cgtcgtttgcccctcgtcggcgcgttttgcatgctcagtttgggactctccaatctctacacacccctcaaaacggggtgcgttcaatctctcttacgatccaagttgggtattcgaacccagtcctgcatcagaatggaagggagtaacaccaccgtgcccagcattgttgtctatgtcactgttcccaacaacgatgcaggtaagaagttggctgaaagcatcgtcaaagagaagcttgctgcttgtgtcaacagggtac

SEQ ID NO: 204753 - DNA, 261 bp, Glycine max
cgaagagaatggctcccaagggtttaatctttttggctgtgttatgcttctcagcactgtcactgagtcgttgtcttgcggaggataatggacttgttatgaacttctacaggaatcatgccctcaggctgaagacatcatcaaagaacaagtcaagcttctctacaagcgccacaagaacactgctttctcctggctcagaaacatcttccatgactgtgctgttcagagttgtgatgcttcactgttgctggactccac

SEQ ID NO: 204754 - DNA, 278 bp, Glycine max
ttcccctatggctcgtcactccttgctcttagccctcctcctcttcgccgccgtaaccatcgccgcgatggcggtggccgcgtccgatgccgacgacatcctgatccgtcaggtggtgccagatgttggcgaaccgaaggaggaggacaacctgctgaacgccgagcaccacttcgcgagcttaatggccaagttcgccaagacctacgccaccaaggaggagcacgatcatcgcttcggcgtcttcaagtccaacctccgcagagccaggctgcacg

SEQ ID NO: 204755 - DNA, 279 bp, Glycine max
tcgaatcgaccgattcggctcgaggttcaaggttaacaccaaatacaacatatagtgcagatatctaagctttcaaccatggaggatccaaatcaagctcaagaagggtcttctcagaagaaaatgggaagagggaagattgaaatcaaacggatcgagaacaccaccaataggcaagtcaccttctgcaagcgccgcaacggtttgctgaagaaagcttatgaattatcagttctgtgtgatgcggaagttgcccttgttgtcttctcaacccgtggc

SEQ ID NO: 204756 - DNA, 266 bp, Glycine max
attgaatctcaagattataagagagattttgctgctctttgaagaagggtgtttgcatgattttggagatgtcgctgctctcagatctcatcaaccttaacctctcagacactactgagaaggtgatcgcagagtacatatggatcggtggatcaggaatggacctgaggagcaaagcaaggactctcccaggaccagttagcgacccttcaaagcttcccaagtggaactatgatggttccagcacaggccaagctcctggagaa

SEQ ID NO: 204757 - DNA, 210 bp, Glycine max
accatttacaagtctccagtgtataaacctccagttgaaaaaccaccggtttacaagcctccagtttatattgccacctgtttacaagcctccagtgtataaacccccagttggcaaaccacccgtttataagccaccagtttactagccaccagtgatgaagcctccagtgtataattcagcagtgtacttgccatcagtgtactagcc

SEQ ID NO: 204758 - DNA, 272 bp, Glycine max
tgccttatctgctgttctagtttattagcattgggatcagtaactgcaattcccaatgcaaattttcatcgggcgccaaggagcactagtgtgcttctggttgttgtctgtgttttttgtggtaacaggattcaacaatgatgagcacaggacagtggaggtagttggcctaggagaatgcgcagactgcaggcagaacaatattaagaataaccacgctttctcagggttacgtgtgacggtagattgcaagtcacgacatggacacttca

SEQ ID NO: 204759 - DNA, 272 bp, Glycine max
ctcgagccgccaaaagatgcatgctaatcattttcttgtcactaattacctcaagaacaaactgaagttcaggggttatgtcatatcagattggctaggcattgacaagattacttctcctcctcattctaactattcatactctattcaagttggtgttggtgctggaattgatatgatcatggttccctttaatttcactgaattcattgatgtcctgacttatcaagtaaagaacaatattatcccagtaagtaggattgatgatgctg

SEQ ID NO: 204760 - DNA, 274 bp, Glycine max
aattagttcattctctttgcgcagttccctacctctcctttcaagatgcagatcttcgtcaagaccctcaccggaaagaccatcacccttgaggtggaaagctctgacaccatcgacaacgtcaaggccaagatccaggacaaggaaggaattcccccggatcagcaacgtctcatcttcgccggaaagcagctcgaggacggccgtaccctcgccgactacaacatccagaaggagtcaacccttcaccttgtccttcgtctccgtggtggca

SEQ ID NO: 204761 - DNA, 271 bp, Glycine max
ggagtaggtgaacgtactcgtgagggaaatgatctttatatggaaatgaaagaatctggagtaattaatgaacaaaatattgcagaatcaaaagtagctctagtatatggtcaaatgaatgaaccgcccggagctcgtatgagagttggtttaactgccctgactatggcggaatattttcgagatgtcaatgaacaagatgtacttctatttatcgacaatatctttcgcttcgtccaagcaggatctgaagtatctgccttattgggtc

SEQ ID NO: 204762 - DNA, 276 bp, Glycine max
taaattcctcgtggaatattgaagaagccatgtctacagctgggcaggtcatcaagtgcagagctgcggtggcatgggaagcagggaagccactgtcaatagaaaccatagaagtggcaccaccccagaaaggtgaagtgcgtttgaggatcctcttcaactccctttgccgtagtgatgtttattggtgggatgctaaggaccagactcctctgtttcctcgtatcttaggccacgaagcttcagggattgtggagagcgtgggcgagggtgtga

SEQ ID NO: 204763 - DNA, 271 bp, Glycine max
cgagaagaacaaacctagggtttacgattggagagggtatgaggaactcgtcgcgatggcgtgcaagtgtggacttaaggttcgagtggttctcgcctttcatcagcatggcacgggacctgatgatcccagttggtaggtattttcctagtcatgagcctcatactgtggaagtttgtcccccttgtgtaggatacctcttcctctatgggtgcttgatgagatacagaaagatatagagttagcgtattcgtgacaggtttggaagaag

SEQ ID NO: 204764 - DNA, 271 bp, Glycine max
cggctcgagcttgcttccaagatggttctgctagagaagctctgggatgacgctgttgctggccctcaacctgagcgtggccttggcaagctcagaaaactcaccaccctcaaaactattgatgaaggagacagtagcaagctgcagaagacgttgtcgatgccgtcgacaccgacaaccccgatgactcccacgactccaacgacaccgggatccgcgcgtaaagctgacaacgtttggaggagcgtcttccatcctgggagcaactccg

SEQ ID NO: 204765 - DNA, 263 bp, Glycine max
ggccacctctgctattcagcaatcagcattcgcaggtcaaactgctctgaagcagctcaatgagttggtccgcaagaccggtggcgccggcaaaggtcgcaccaacatgcgccgtaccgtcaagagtgctcctcagagcatttggtatggccctgatcgtcccaagtacctgggtccattctcagagcagattccgtcatacctgaccggagaattccccggtgactacggatgggacactgctggactatcagctgacccgg

SEQ ID NO: 204766 - DNA, 272 bp, Glycine max
tgagtgagtgagtgagcaagagtgaagagcgaagagaatggctcccaagggtttaatctttttggctgtgttatgcttctcagcactgtcactgagtcgttgtcttgcggaggataatggacttgttatgaacttctacaaggaatcatgccctcaggctgaagacatcatcaaagaacaagtcaagcttctctacaagcgccacaagaacactgctttctcctggctcagaaacatcttccatgactgtgctgttcagagttgtgatgctt

SEQ ID NO: 204767 - DNA, 266 bp, Glycine max
cagtttcaacctcatcgtcatcgaactacccacgttctgctccttcgcagatcatttcgcgtttagcttccacgaaagatggcagacaatgaggatggaggggataagacatctcgtgggaatgaatgggaggttgtatctctcacagcatcaacatatgcagctgctcctggtcctgatgaagttgagatgaaggatgatgggaaagaagatgtatatgggcaggatgaaggagaaacgtcacatgctttattcatgtctagaca

SEQ ID NO: 204768 - DNA, 276 bp, Glycine max
tctaaatccaaatccaaatccaaatccatggactccaaaggattgttctgaaggaatttgcagcatctattgtcctcagtggtgttacaaagtgtactctcctccccctccaattctactaggtgatggcgatgatgacccttcaggctttgaattctctcctctcatagttgctgtgattggaatcttggctagcactttcatcttggtcacttactataccattatctcaaggttctgcaggcgcagaaacaacaccaatgattcaacagaaga

SEQ ID NO: 204769 - DNA, 273 bp, Glycine max
gacctgaaaaaccatcatctgtgtttactaagagaagttcccagactgccacattacaacataagaaaccagcttctagtgttgatgctgaaattgtaggtggatcaacgataagttctcaggctatgctgaagcaagaggtttctactgcatcgtcaaagggcactactcttaaagagggtgatcgagtaaaatttgttggtaactttccttctgccgtctcatcactgccaaattatccttcaaggggacctagctatggctcccgaggca

SEQ ID NO: 204770 - DNA, 270 bp, Glycine max
cttaaatcagttttggtttttcatccccaaaaggaagcaattaaaattatgggagccaacttttccactttcgagtttgtagaaaaatcatcacactcatcgctggtcctcaccttccattccactgctaaatggaaggctcactttgatgcctccaaagaaacaaacaagctgatggtcatcgacttcactgctacgtggtgtggaccttgcaaatacatggacccaattatcaaagaatttgctgcaaaatacacagacgtcgagttc

SEQ ID NO: 204771 - DNA, 270 bp, Glycine max
ctaacatattgacattatttttatcttagagaagctctaatcattagacaaagagagaaaaatggatgttttctgatgggtgtagaaggtctagtagaaattgatgtgaaaaaatcagcactcatcactcatgtaagcccaattgactactcttttgttaattatgtaggtgataagtgatcatctaggattgggggtgaagacaggattgccttacatctggcacagcaaagccagcaacccatttgtaaacctaaagaaggagtacaa

SEQ ID NO: 204772 - DNA, 268 bp, Glycine max
gtcagtagtcatatgcatgtctcaaagattaagccatgcatgtgtaagtatgaactaattcagactgtgaaactgcgtatggatcattaaatcagttatagtttgtttgatggtatctctactcggattaccgtagtaattctagagctaatacgtgcaacaaaccacgacttctggaagggatgcatttattggataaaaggtcaacacaggctctgcctgttgctttgatgattcatgataactcgtcggatcgcacggcctttgt

SEQ ID NO: 204773 - DNA, 269 bp, Glycine max
ggttgattcggatctagagtcttcagtttctcctcgttgttcttcgctttcctgttttcaatttcgattctttcgttaatttaataagatgtttgggagggcaccgaagaagagcgataatacgaggtactacgaaatcctcggcgtctccaagaacgcttcgcaggatgatctgaagaaggcttacaagaaagccgccattaagaatcaccccgacaagggcggtgatcccgagaagtttaaagagctggcgcaagcttatgaggttc

SEQ ID NO: 204774 - DNA, 274 bp, Glycine max
tgagtttgtgaaggtattacaggcaaccttcattaaccaagacattcaaatgtatgatgatgaatctggtactccagctgaagcacggacttcaaatttgaatgaagagttgggtcaggtagacactatcctatctgataaaactggcactttaacctgcaaccagatggactttttgaagtgctccattgctggtactgcgtatggtgttcgttccagtgaagttgaacttgctgcagcatatcagatggcttctgatcttgaggagcaggaa

SEQ ID NO: 204775 - DNA, 269 bp, Glycine max
cgacggtattgcctccccatattatctggaccccatcgcaatcggatcctacggcgcagtttccagaggagtgttcgtgtcctcttccgccggcaacgatggtcccagcggaatgtcagtgacgaaccttgctccatggttaacaacagtaggcgcaggcaccattgatcgtgacttcccctcacaggtgattctgggcgacggtcggagactctccggcgtgtcgctatacgccggagcagctttgaaggggaaaagtatcaacttgt

SEQ ID NO: 204776 - DNA, 271 bp, Glycine max
gagaaaggaaaggttaactaagaagcaatacttcaatggccacccttgttgttcataaccaaacttcttctgctcaagatgctgaggctctccaacaggctttcaaaggatggggggctgatgacaaggccattatagcaatactgggtcacagaaatgttcatcagaggcaagaaatcagaaaagcttatgaggagatttaccaagaggatctcatcaaacgccttgagtccgagatctctggtgactttgagagagctatgtaccggtg

SEQ ID NO: 204777 - DNA, 266 bp, Glycine max
tcttgcggctagggttttagcgcagttcttctagatttaaggaagatgggtaaggaaaaggttcacatcagtattgtggttattggccatgttgactctgggaagtccactaccactggccacctgatctacaagcttggaggcattgacaagcgtgttattgagagatttgagaaggaagctgctgagatgaacaagaggtctttcaagtatgcctgggtgcttgataagcttaaggctgagcgtgaaagaggaatcacaattga

SEQ ID NO: 204778 - DNA, 271 bp, Glycine max
tgacccagaaaagaagattcaacaggtacctaagagaaggaaagagggggatagaaagaaagaaaaagaaatagaaactgcacgtataaaagaagaaagaaagaatcaaagaaaataggaaaaaagggcaaatattttgtttgaataagatataaggcaatagtaatattagtattgttgataataattaggtagaaaaaatattatggggaggggaagagtggaactgaaaaggatagagaacaagataaacaggcaggtaacgtttgca

SEQ ID NO: 204779 - DNA, 189 bp, Glycine max
cagcagtgaagttggctgtgaagattaagggacagagcaaaggaacaaagctgaaggacttcttggccgcaattcaatcatcttctacctttcaatcggagatagcaaagctccgccttgatgttgaggactatgcaaaacaatttccaaccattggttttgagaaagctaccatgaagtacaagaatt

SEQ ID NO: 204780 - DNA, 273 bp, Glycine max
cacctcttcatcttcttcttccttacctttgaccagagacagagcagcactcacattcacaacgaaggtttcctattcatcagacatggtgaaggcaatcagagttcacgaactcggtggccctcaagttctgaagtgggaggatgtggaaattggagatccaaaagaaggcgaggtccgtgtgaggaacaaagccattggggttaatttcattgatgtctactttcgcaaaggagtttacaaagccccttcttttcccttcactccaggtat

SEQ ID NO: 204781 - DNA, 274 bp, Glycine max
cacaaggcagaaccaaatagctcattagtgagtttttgagttcgtgtgtcctttctttgtgtgttgcaaggttacaagatggaggatcaaaatgcatcatctaatggattgggcaaggtgttccacaaggttaagccctaccttgctatgatgtcccttcagtttggctactccggaatgtacatcatcaccatggtttctttcaagcatggcatgagccattgggtactctccgtgtaccgtcatatagttgccactctcatcatggcccctt

SEQ ID NO: 204782 - DNA, 270 bp, Glycine max
actcgttcttcttcttttgttgttctgtgtttgtgtttgttttttctctcacctgaaaatgtcttgctgcggtggtaactgtggttgcggaagctcctgcaagtgcggcaacggctgcggaggctgcaagatgtacccagacttgagctacactgagtcaaccaccaccgagaccttggtcatgggagtggcacctgttaaggctcaatttgagggtgctgaaatgggtgtgcccgctgagaacgatggctgcaaatgtggaccaaactg

SEQ ID NO: 204783 - DNA, 270 bp, Glycine max
ctcgagccgctccgatggctaatctctcactcttgttcttcggtctcctcctattctccgctgccgtagccaccgtcgaacgaatcgacgatgaagacaaccttctgatccgtcaagtggtgccggacgcggaggaccaccacctgctcaacgcggagcaccacttctccgccttcaagacaaagttcgccaagacctacgccacgcaggaggagcacgaccaccgcttccgtatcttcaagaacaacttgctccgcgccaagtcgcacc

SEQ ID NO: 204784 - DNA, 262 bp, Glycine max
cgcaggcagttccatggagcaaaggagctgtttttgtctgaccattatgatgttcagagtgctcacacaattgaagggaagtgtgttgtgcactcttttaagaactataccaagcttgagaatgtaggtgctgaggattactattgtaactttgagtacaaggctgctactggggctttcacgcctgaccgtgttgctgtgtattgcaagtgcgagatgccttataacccagatgacctcatggtgcagtgtgaggggtgca

SEQ ID NO: 204785 - DNA, 269 bp, Glycine max
taaaaccgccacaaatttctccatagttatgggcacttccattctcgacgccctgaacgttcgcgtggaaggttccggcgacaagtaccttgtcctggcccacggcttcggcacggaccaatccgcgtggcagcgcgtgctcccttacttcacccgcaactacagcgtcattctctacgacctcgtctgcgccggtagcgtcaaccccgaccacttcgactaccgccgttataccaccctcgacgcctacgtcgacgagctcctcaaca

SEQ ID NO: 204786 - DNA, 268 bp, Glycine max
tgagtttgtgaaggtattacaggcaaccttcattaaccaagacattcaaatgtatgatgatgaatctggtactccagctgaagcacggacttcaaatttgaatgaagagttgggtcaggtagacactatcctatctgataaaactggcactttaacctgcaaccagatggactttttgaagtgctccattgctggtactgcgtatggtgttcgttccagtgaagttgaacttgctgcagcatatcagatggcttctgatcttgaggag

SEQ ID NO: 204787 - DNA, 267 bp, Glycine max
atctagggttatcatttctccatttccattttctctctcacttttcaagaatcgtaagctatgggaaagtcttacccaactgtgagtgctgattaccagaaggacgttgagaaggcgaagaagaagctcagatgcttcatcgcttagaagagatgcggtcctcaaatgctccgtttggcatggcactctgctggaacctttgacaagggcacgatgaacggtggacacatcggaaccatcaagcaccctgccgaactggctcacagc

SEQ ID NO: 204788 - DNA, 267 bp, Glycine max
ccgatggctaatccctcactcttgttcttcagtctcctcctattatccgccaccgtagccgccgccgaacggatcgacgatgaagacgaccttctgatccgtcaagtggtgccggatgcggaggaccaccacctgctcaacgcggagcaccacttctccgccttcaagacaaagttcggcaagacctacgccacgcaggaggagcacgaccaccgcttccgtatcttcaagaacaacttgctccgcgccaagtcacaccagaaattg

SEQ ID NO: 204789 - DNA, 267 bp, Glycine max
ctgctcgagcttcttgttcctctcgcccagaatccgagatcaaccccgacgaacgcaaggggattttctcggcttcttcagatttctgaaatggcgcctgtttcagctttagccaagtacaagctcgtcatcctgggtgaccaatccgtgggcaaaaccagcatcatcactcgcttcatgtatgataaattcgataacacctatcaggttaaaattggtattgattttctatcaaaaactatgtatcttgaagatcgaactgttcga

SEQ ID NO: 204790 - DNA, 265 bp, Glycine max
ctcgagccgctcgatttgctctctgttcatgaaacctcgcaggagccattgcctgagtcgcaggatgatattaactctgcccattcgttgagcgttgaggctgcttatatcaaccagaatttctctcagcaggtgcttattagggatgggaataaggttacttttgatgaggctaacccttttgctaatgaaggtgaggaggttgcttctgtcgcttataggtataggaggtggaagcttgatgatgatatgtatcttgttgcga

SEQ ID NO: 204791 - DNA, 267 bp, Glycine max
gaaagacaatgccgaagtctcaatttcgaaccccatttctggtttctcttccccttttgttattcatcttcaacctcaccccttcgcatgcactctatggagcatcctcacccgtacttcaactcactccctctaacttcaagtccaaggttctgaattcaaatggacttgttcttgttgaattcttttctccatggtgtggacactgttaggctctgactcctatatgggagatggcagctactgtgttgaagggtgttgttactg

SEQ ID NO: 204792 - DNA, 269 bp, Glycine max
ggtattgggagctctcgttgtttcggagttagggaccttacgcagccatggccactgctacgaatgccgccgccgccccaccacgccagctctcccagaaggaagctgacatccagatgatgttggccgccgacgtccacctcggcaccaagaactgcgacttccaaatggaacgttacatcttcaagcgccgcaacgacgggatttacattattgaccttgggaagacgtgggagaagcttcagctagcagctagggttatagttgca

SEQ ID NO: 204793 - DNA, 268 bp, Glycine max
cgtgtttctaacgtcgtgttcgtatccgatcgaggacgacgtactctaccaccactactacgaggcctgcccttacttgaagttcgcgcatttcactgcgaaccaggctattttagaagccttcaacggccatgattgtgtccacgtgattgacttcaacctcatgcaggggctccagtggcccgcgctgattcaggccctggcgcttcggcccggtgggcctccgctgttgaggctcacgggaattgggcttccctcgtccgacaac

SEQ ID NO: 204794 - DNA, 268 bp, Glycine max
taggcttggtcctcttgaagaaaatgctgccatcacaggtgcagggtcaccaaaccttgtccccatagaggaaattgaagctgttggatttttaacagattgactatagcttctaatagttttacttgctgaagcccctaaggaagtggctggcaaaatatgagggtcagcgaaaagctcttctccttgatattctttgttgagtagtatcattcctgcgcctcctgacactttcacttcctctcccttctcagttctaccatttata

SEQ ID NO: 204795 - DNA, 268 bp, Glycine max
gttctctgttagtccttgatctggttctaaagttataatttacaggaaaagcagagggcgtcatattactatgaaggcactaattcttgttggagggtttggaacaaggttgaggccattgacactcagtgttcccaagcctcttgttgattttgctaacaagcccatgattctgcatcagatataagctctcaaggccattggcgtcaatgaagtggtactagctatcgattaccgaccagaggtcatgttgaatttcttgaaggag

SEQ ID NO: 204796 - DNA, 266 bp, Glycine max
aatggctcccaagggtttaatctttttggctgtgttatgcttctcagcactgtcactgagtcgttgtcttgcggaggataatggacttgttatgaacttctacaaggaatcatgccctcaggctgaagacatcatcaaagaacaagtcaagcttctctacaagcgccacaagaacactgctttctcctggctcagaaacatcttccatgactgtgctgttcagagttgtgatgcttcactgttgctggactccacaagaaggagct

SEQ ID NO: 204797 - DNA, 272 bp, Glycine max
agtcgagccgctatttctcagtctctgtgtttgcggctgaggattccgaacgagtgaccttcttcgtttctcgcaaagtttaagtaatcatgggtaaggaaaaggttcacatcaacattgtcgtcattggacatgtcgactctgggaagtcaactaccactggtcacttgatctacaagcttggaggtattgacaagcgtgtgattgagaggttcgagaaggaggctgccgagatgaacaagaggtcattcaagtatgcctgggtgctcgac

SEQ ID NO: 204798 - DNA, 262 bp, Glycine max
ggatccagtactgataaagaagattggagatgcaactgccctagaagttagagctactggaattcaatatgtttttgctccgtgcattgcggtctgcagagatcctagatgggggcgttgctttgaaagttacagcgaggaccctaagattgctcaagcaatgactgaaattattcctggtttgcaaggagacatcagtagcaattcaagaaagggggttccctatgtttctggaaagaacaaggttgcggcttgtgctaaa

SEQ ID NO: 204799 - DNA, 265 bp, Glycine max
ttttcctgttgaagtctttccctagccaatggccaccgatcgtttgacccgggttcacagtctccgtgagaggcttgatgaaaccctcactgccaacaggaatgaaattttggcccttctgtcaaggatcgaagccaagggcaagggcatcctgcaacaccaccaggtcattgctgagtttgaggaaatccctgaggagaacagacagaagctcactgatggtgcctttggagaagtcttgagatctacacaggaagccatagtt

SEQ ID NO: 204800 - DNA, 264 bp, Glycine max
tattactcagcaaaaattcatggaagttccaatcaagtatccggcaaaactcacccttagggtggttcttacttgtatcatggcggccaccggtgggttgatttttggctatgaccatggtgtttcaggtggagtgacctccatggattccttcctgaagaagttcttcccatctgtatatgaaaaggagtctaacgtgaagccttcttcaaaccagtactgcaaattcaacagtcagatactgacactgtttacatcttccct

SEQ ID NO: 204801 - DNA, 260 bp, Glycine max
  unsure (1)..(260): unsure at all n locations
ctcgagcgctcgtcactagctctgtgcattcttctctcgctctctgccttccatcacactcggcatttcctttcccaagatagtagaagatggcagacactgaggatattcaacctcttgtttgttacaatggaacaggaatggttaatgctggatnttctngagatgatgcgccacgtgctgtgtttcccagcattgtaggtcgtcctcgtcacactggtgtgatggttggcatgggcaaaaaagatgcatatgttggt

SEQ ID NO: 204802 - DNA, 266 bp, Glycine max
cgagcgagcagtttcaaagagaggatttgggattgggaaggcgagggattgcgctgcgtctcttcctcttctctttcgattcatccctcattcataatcttccaatccaacaacctcagcctcacactcacacatacacacatctgaacgcgtatcgtccctcccatggcttcaaagcgcatcctcaaggagctcaaggacttgcagaaagacccaccaacttcttgcagcgctggtccagtagctgaggacatgttccattggca

SEQ ID NO: 204803 - DNA, 267 bp, Glycine max
cacaggctctgcctgttgctttgatgattcatgataactcgtcggatcgcacggcctttgtgccggcgacgcatcattcaaatttctgccctatcaactttcgatggtaggatagtggcctaccatggtggtgacgggtgacggagaattagggttcgattccggagagggagcctgagaaacggctaccacatccaaggaaggcagcaggcgcgcaaattacccaatcctgacacggggaggtagtgacaataaataacaataccg

SEQ ID NO: 204804 - DNA, 272 bp, Glycine max
  unsure (1)..(272): unsure at all n locations
gttttgttctcattctgtgactctgtgcttagttaacgttaacagtgacttaagatggcggattctgcagatgtcacccacgatgttgtgtcnctcctctcttctcctcaaagggactttcttcttcgaaacaacggcgatcaggttaaaattgacagcttgaagggtaagaaacttggtttgtatttttcggcatcctggtgtggtccatgtcaaacatttacgccaactttggtggatgtgtacaatgaggttgcaaaaaaaggtgactt

SEQ ID NO: 204805 - DNA, 264 bp, Glycine max
ctcgagccggtcgacatgaaatccgggtttgctttcgtctacatggaagatgaacgtgatgctgagtatgcaatcagaaggcttgatagaacagaatttggtagaaagggtcgccggattcgtgttgagtggactaagcaagaacgtgacagtagaaggtcaggtggtgattccagaaaatcttcatctaattcaagaccatccaaaactttgtttgttataaattttgatcccgttaatgccaggacaagggatctggagaga

SEQ ID NO: 204806 - DNA, 263 bp, Glycine max
ggtcaagagattgcaggaatctcaatattcagagaaagaatttctgtctgagatgaatatactagggtctgtcaaacatcgtaacttggttcctcttttaggtttttgtgtggctaaaaaggagaggcttttggtctataaaaatatgccaaatggtaccctccatgatcaactacatcctgatgctggtgcatgcaccatggattggcctctaaggctcaaaattgcaattggagcggccaaaggattagcatggcttcatc

SEQ ID NO: 204807 - DNA, 260 bp, Glycine max
cgagattgaggcgggggttgatttggaagaaacccagctaaggtaattcctcgcaacccctaactaaaccttcaaaggatcatcatgggcagtcacaatgctttggctgccactttcggaatattaggtaacatcatttctgtgatggtgtacttggctccggtgccaacgttttaccggatatacataaagaaatgcacggacggtttccactcgctgccatacttgttgtcattaatgagttctatgctttggttata

SEQ ID NO: 204808 - DNA, 264 bp, Glycine max
agccgcgaccacggcctcattctcatcaactacgccaccggttgcattttcgagtacgactccgatcaccccctcggatccggtatcggcttcaaagaaaccgactctcccaatttcaccggttctttttactccaagaccaaggcaatggtagaggatctgctgaagaactatgataatgtgtgcacattgcgagtgaggatgcctatctcatccgatttattgaacccgcgcaattttatcactaagatcactcgatatgag

SEQ ID NO: 204809 - DNA, 263 bp, Glycine max
ctcgcacggatccacccgaaatctgagattccttcgaattgttaactctctttcagtttcaagttggaaactttttcgattttcgctttctggaggtgtgaattgttgtttgaaagtcacaagcaatggtgaaggacactgcgtattatgacatattaggtgtcaattatgatgcatctgctgcagagatcaagaaagcttattatgtcaaggctagaattgttcaccccgataaaaatcctgaggatcctaaggccgcagaa

SEQ ID NO: 204810 - DNA, 267 bp, Glycine max
ggtcaagagattgcaggaatctcaatattcagagaaagaatttctgtctgagatgaatatactagggtctgtcaaacatcgtaacttggttcctcttttaggtttttgtgtggctaaaaaggagaggcttttggtctataaaaatatgccaaatggtaccctccatgatcaactacatcctgatgctggtgcatgcaccatggattggcctctaaggctcaaaattgcaattggagcggccaaaggattagcatggcttcatcatag

SEQ ID NO: 204811 - DNA, 272 bp, Glycine max
tctaattctaatgaggaacaggggtgtgtgggaagatgcaagcacagcaacagtgcttgtacttgtgctatgttcatcgtatggaattgcagaagtaaagtcacagtcacagaaggtatctggtttgtttgtttttggagattcattggttgaagtaggcaacaataacttcctaaacaccatagcaagggcaaattactttccttacggcatcgacttcggcaggggttccactggccgattttctaatggcaaatccctcattgacttca

SEQ ID NO: 204812 - DNA, 263 bp, Glycine max
caagattgtggaacaaggcacctttgacaaactcatggactatgccattagcttaggggcatcaattaatcagtataaggcaccaaggtgcgtcaagtttgcccccattgtggaattgttgaactcgagggtaacatccaactatttcagtcctaagtgtccaaagtgggttcctggacacaaacagtggatccatcagaattgaagaatctaaacatggcacattattatatgttttcatgcgagagtgaatctttttatgt

SEQ ID NO: 204813 - DNA, 262 bp, Glycine max
ggtcaagagattgcaggaatctcaatattcagagaaagaatttctgtctgagatgaatatactagggtctgtcaaacatcgtaacttggttcctcttttaggtttttgtgtggctaaaaaggagaggcttttggtctataaaaatatgccaaatggtaccctccatgatcaactacatcctgatgctggtgcatgcaccatggattggcctctaaggctcaaaattgcaattggagcggccaaaggattagcatggcttcat

SEQ ID NO: 204814 - DNA, 257 bp, Glycine max
ctcgagccgctgaaattgagcatattgcttcaaacagaacccatttaacctgtgttgaatcatcaagcgcctcaacttctgctcctccacatatgcatgatgaaatcactggtagttctggttctagtgcacttattgaatcaaatcgtactggacaaagtggcatttccattttacaaagcctaattgatcgtgctcgaaggactgtgcgtggatctgccgatgatataggatggcttcaacgtgatcctggaatg

SEQ ID NO: 204815 - DNA, 260 bp, Glycine max; identical to SEQ ID NO: 204411

SEQ ID NO: 204816 - DNA, 265 bp, Glycine max
gctaaaccagctttgaggatatcacaagctgaagaaccattgaattttaactaaccaaactaataagcaaaaatgttggcggtgtttgcaaaagccattggaaaaccaccggaggaactgaggcttccggcaatggggtccaataattcaaagaccccagaagaaattgtacagaaatttcaatctttgtggccagattctgcagtttacaaccttccacatgggaattttatggctctgtctcatgaagatgaaagtccaatac

SEQ ID NO: 204817 - DNA, 267 bp, Glycine max
caacttctgaatcacttagttgaattgaattatcttcaaaatgagagaaatccttcatgttcaagctggtcaatgtggcaaccaaattggaggcaagttttgggaggtgatgtgtgatgaacatgggattgatgccactggaaattacgtaggcaattcccatcttcaacttgagagggttaacgtgtactacaatgaagcaagtggaggacgctatgttcctcgagctgtgcttatggaccttgaaccagggaccatggatagctt

SEQ ID NO: 204818 - DNA, 266 bp, Glycine max
aacataaacattacaagaagctatggaaaccaactcagtttccaagcttctgttgcttgtcttcagtgttctctttgttggttctgagttgatccattgctgtgtcacgtatgataggaaggccattatcatcaatggccaaaggagaatcctcatctctggctccattcactaccccagaagcacccctgaaatgtgggaggatctaattcggaaggcaaaagacggaggccttgatgtcatcgacacttatgtctgttggaatg

SEQ ID NO: 204819 - DNA, 266 bp, Glycine max
agcacgggctgcaataagagctcggtgtcattatgttaataaaaagtggctcggcggtatgttaacgaattggtatactacagagacacgacttcaaaagttcagggacttgagaatgcaacaaaagacggggagactcaatagttttccaaaaagagatgccgctatattgaagagacatttagctcatttggaaacatatcttggcggcattaaatatatgacggggttacctgatatcttaataatcgtcgatcaacaagaag

SEQ ID NO: 204820 - DNA, 263 bp, Glycine max
attaaatttttcttctctcccttctttctctctctctctctctgaccattctcttcttcttctttttcttctcctctctctctctcccctccgccatggctgaggataaggagatgtctacctctgtcatcaatgggaatgattccctaactggtcacatcatatctacaactattggaggcaaaaatggggaacccaaacagactattagctacatggcagaacgggttgtaggaactggatcatttggaatcgttttccag

SEQ ID NO: 204821 - DNA, 260 bp, Glycine max
gatttgatagcctcaactcaagtaagggttttctctttgagaaaatcgtatcttacaccttttggtgaccactttgagtgagagaagagaaattaagagagatactcaaattagattcaagagagatggccatcaaccatgaaacttgggctttcattttcggtcttctaggcaacgtgatctcctttatggtgttcctcgctccattaccaactttttaccaaatctacaagaaaaaatctacggatgggtttcaatca

SEQ ID NO: 204822 - DNA, 258 bp, Glycine max
gagaacttcaactgagggtgagagtgacacaaatctagggagcactactctaaaagttctattagattcttcaaaacatgaccatgcatcgcgagtcttgggcttttgtcttcggcgttaagggcaacatcatctcctttggagtgttccttgctccattgccaaccttttaccaaatctacaagaagaaatccactgaagggttccagtcacttccttatgttgttgcactgttcagtgcaatgctttggatttact

SEQ ID NO: 204823 - DNA, 258 bp, Glycine max
gagcgaagagaatggctcccaagggtttaatctttttggctgtgttatgcttctcagcactgtcactgagtcgttgtcttgcggaggataatggacttgttatgaacttctacaaggaatcatgccctcaggctgaagacatcatcaaagaacaagtcaagcttctctacaagcgccacaagaacactgctttctcctggctcagaaacatcttccatgactgtgctgttcagagttgtgatgcttcactgttgctgg

SEQ ID NO: 204824 - DNA, 258 bp, Glycine max
gggatttccaatggcctgccggatgttgattcggtattttattttactaggaagtcggtgttggagacgtttgatatccggtttgatgagcatgcaccgaagtggcgctgccgcagggcatgatggtgccggttaattcgtttaacacgatgtaccattcgtctgcgttttgggccttgatgctcccggtgtcggtcagcacgatggcgtccgatgtgttgagaggttactgggggcagaggctgctttgggaggttg

SEQ ID NO: 204825 - DNA, 271 bp, Glycine max
agagaatggctcccaagggtttaatctttttggctgtgttatgcttctcagcactgtcactgagtcgttgtcttgcggaggataatggacttgttatgaacttctacaaggaatcatgccctcaggctgaagacatcatcaaagaacaagtcaagcttctctacaagcgccacaagaacactgctttctcctggctcagaaacatcttccatgactgtgctgttcagagttgtgatgcttcactgttgctggactccacaagaaggagctt

SEQ ID NO: 204826 - DNA, 261 bp, Glycine max
ttccacgttattctctctccgagcttcactctcttttcgcctctgctaaagggagaaaaatggggttctcctcctttctgggtcgtgttctctttgcctccctcttcatcctctccgcatggcagatgtttaatgaatttgatgccaatggtggacccatctcgaaagagttgattcccaaactcagtgtggtgaagaataatttatcctctaaattgggggtagcgctaccagatattgatgcccggcaattcattgcta

SEQ ID NO: 204827 - DNA, 257 bp, Glycine max
ctactcactcacacacacacacactctctttccatgggtccgtttcgtaaacccttccttgcatttctctcggttgttctatttctgggtctctatgaggcagcagcagaacagactcagactcacaagagtacttacattgtacacgtggcgaaatcggagatgcccgagagcttcgagcaccacgctgtgtggtatgagtcgtcactgaagaccgtgtctgactcggcggagatgatttacacctacgacaacgc

SEQ ID NO: 204828 - DNA, 255 bp, Glycine max
cacgagattgaggcgggggttgatttggaagaaacccagctaaggtaattcctcgcaacccctaactaaaccttcaaaggatcatcatgggcagtcacaatgctttggctgccactttcggaatattaggtaacatcatttctgtgatggtgtacttggctccggtgccaacgttttaccggatatacaaaaagaaatgcacggacggtttccactcgctgccatacttgttgtcattaatgagttctatgcttt

SEQ ID NO: 204829 - DNA, 257 bp, Glycine max
cttcttcccaaccactactactcactcactgcagatctcaattgcatcgctgtccatggctaccatcgttagcatcaaggcccgccagatcttcgacagtcgtggcaatccaactgtcgaggtggatttgacttgctccgatggtacttttgccagagctgctgttccaagtggtgcatccactgggatttatgaggcccttgaattgagagatggaggatctgactaccttggaaagggtgtatcaaaggctgttg

SEQ ID NO: 204830 - DNA, 242 bp, Glycine max
  unsure (1)..(242): unsure at all n locations
ctaactttcgcatattcgaaaaccaaaagcatgggtcagggaacancggaangnctgnncnngcannntcttncgnngnnncggnagccgganggcggcgacaagaaggagaagaagttcgagccggcggcgccgccggnccgcgtgggccgtaagcagcgtaagcagaagggcccggaggcggcggcgcggctgccgacggtgacgccgctgtcnaatgcgagctanngctgctgaaagct

SEQ ID NO: 204831 - DNA, 262 bp, Glycine max
aagaaaaaaacttaaatcaaaatacttaatagcatggcgatacatttatacaaaacttctaccccaagcacacgcaatggagccgtagacagtcaagtaaaatccaatccacgaaatcatttgatctatggacagcatcgttgtggtaaaggccgtaatgccagaggaatcattaccgcagggcatagagggggaggtcataagcgtctataccgtaaaattgattttcgacggaatgaaaaaaacatatatggtagaatcg

SEQ ID NO: 204832 - DNA, 255 bp, Glycine max
aattctcatcgcaacacaacactctcatccacactccaaaatggtgacctcgtcgcaaaagattctggttaccggcggtgccggtttcataggcacccacaccgtggtccagcttctcaaaggaggcttcagtgtttcaataatcgacaatttcgataactccgtcgtggaagcagtggaccgcgtccgccaagtggtgggccctcagctttctcagaacctggaattcacccagggcgatctcaggaataggga

SEQ ID NO: 204833 - DNA, 254 bp, Glycine max
attctctctgtgtatttccctacctctcccttcaagatgcagatcttcgtcaagaccctcaccggcaagaccatcacccttgaggtggaaagctctgacaccatcgacaacgtcaaggccaagatccaggacaaggaaggaatccccccggaccagcaacgtctcattttcgccggaaagcaacttgaggacggccgtacccttgctgactacaacattcagaaggagagtactcttcacctcgtcctccgtct

SEQ ID NO: 204834 - DNA, 255 bp, Glycine max; identical to SEQ ID NO: 201659

SEQ ID NO: 204835 - DNA, 255 bp, Glycine max
gtgagtctgtctcttccggcgagcatgcccatcagatgtattctgcattggcaaccgaaccaaggaagcgttgtgaacagccaagtcctgaatgagatctcgcagtgcgtcgaaagcctcaacggcgtcaaagaaggaagatgcaaagcctccctcactttctacagacccaatttacgagaccagtcggtgaccatcgatttcccgcgcgattttctggggatatcgatgctggagcagccgaacaaatactac

SEQ ID NO: 204836 - DNA, 256 bp, Glycine max
ggccatataatttttttttatttgaaataatgtccgggatcatccacaagattgaggagaccctccatgtgggagggcacaagaaagaggagcacaaaggagaacaccatggtgagcacaaaggtgaacacaaaggagaacaccatggtgagcacaaaggtgaacacaaaggagaacaacaccatggggagcacaaggagggacttgtggataagatcaaggacaagatccatggtgatggccatgacaagggtga

SEQ ID NO: 204837 - DNA, 256 bp, Glycine max
atggctttacagaacattggtgctgcaaacagtgatgatgccttctacaggtataagatgcctaggatgattaccaaaattgagggcagaggtaacggcatcaaaactaatgttgtcaatatggttgatattgccaaggcattggcaaggcctgcgtcttacacgaccaagtattttggttgtgaacttggggcccagtcaaaatttgatgagaagaccggcacttctcacgtcaatggagcacatgatactgtta

SEQ ID NO: 204838 - DNA, 257 bp, Glycine max
  unsure (1)..(257): unsure at all n locations
gaggtccccatatccctcttaagactggaagaagggatggtagaaggagcagagctgatgtggttgagcagttcctcccagaccacaatgagtccatttctgcagttcttgacaagtttggtgccatgggaattgacacccctggcgtcgttgcactgcttggagcacacagtgttggtcgaacccattgtgtgaagttggtgcaccgtttgtanccagaggattgatccagctctgaaccctgaccacgtccctca

SEQ ID NO: 204839 - DNA, 268 bp, Glycine max
gcaaagataagcttgttgtgtccacctcctcctcccttcttcacactgctgttgatctagttaacgagaccaagttggatgatgagatcaagtcatggctagcttttgctgcccaaaaaattgttgaagttaacgcattggctaaagcattgtctggccacaaggatgaggccttcttctctggtaatgctgctgctctggcttcaaggaagtcttctccaagagtgaccaacgaggctgttcagaaggctgctgctgcattgaaggg

SEQ ID NO: 204840 - DNA, 272 bp, Glycine max
tgatgcttcactgttgctggactccacaagaaggagcttgtctgagaaggaaacagatagaagctttgggttgagaaatttcaggtacattgagaccatcaaagaagctttggaaagggaatgcccaggagttgtttcctgtgctgatatcctcgttctctctgccagagatggcattgtttcgctaggaggtccccatatccctcttaaaacaggaagaagggatggtagaaggagcagagccgatgtggtagagcagttcctcccagacc

SEQ ID NO: 204841 - DNA, 299 bp, Glycine max
ctcgagccgcaagaccaggccgcagttgagtctcacaggcgagctaccgcagctactgcttctggtaaatataaagatgaaattgtcccagttaccactaagattgaggacccaaaaactggtgaggagaaatctgtcaccatttctgttgatgatggaattcgacctggcacaacagagtctgatctaggaaggctcaaacctgtgttcaagaaagacggaagcactactgctggtaattctagtcaggtgagtgatggtgctgcagctgttctgctgatgaaaagaagtgttgcgtt

SEQ ID NO: 204842 - DNA, 302 bp, Glycine max
taagaatgttgcagttaaggatttgaagcgtggttatgttgcctcaaactcaaaggatgaccctgcaaaggaggctgctaacttcacagcccaagtcatcatcataaaccaccctggtcagattggaaatggctatgcccctgtcctcgactgccacacttctcacattgctgtcaagtttgctgaactcatgaccaagattgacaggcgatccggcaaagagcttgagaaggagcccaagtttttgaagaacggtgatgctggttttgttaagatgattccaaccaaacctatggttgttg

SEQ ID NO: 204843 - DNA, 283 bp, Glycine max
cacggacgcagagccttcgatccagaaaccatgactaagagaacgaagaaggcaggcattgtcggaaaatatggtacccgatatggtgctagtttgcggaagcagattaagaagatggaagttagtcagcatagcaaattcttttgtgaattttgtgggaagtatgctgtgaagaggaaggctgtgggaatatggggatgcaaggattgtggtaaagtgaaagctggcggtgcctacactttgaatactgcaagtgctgtcactgtgcgcacaccatccggag

SEQ ID NO: 204844 - DNA, 277 bp, Glycine max
tgtaaaattagtttatgatgtgaagctatggagtggaaaatatgtggatgtaggagatttcgggatgaatggcctcaaaacgctttgtcgtttgtggttattgagtcctgagtgatcttgtcatccgacctttgccatgacaggtgcgcttgcatggcaggtcaaaaaatgttaataaaaaaagttttattggtttggggagagatcgcacgggggttgcccggggtctcttcctcttgtgtggtgtggtgtttgctgtgctctccttttcgttatg

SEQ ID NO: 204845 - DNA, 279 bp, Glycine max
ggattctcttctttattccttttgtaatttcattcattcttaatctttgtgaaaaataatgttcatcgagaattttaaggttgagtgtcctaatgtgaagtacaccgagactgagattcagtccgtgtacaactacgaaaccaccgaacttgttcacgagaacaggaatggcacctatcagtggattgtcaaacccaaatctgtcaaatacgaatttaaaaccaacatccatgttcctagattaggggtaatgcttgtgggttggggtggaaacaacgg

SEQ ID NO: 204846 - DNA, 282 bp, Glycine max
gagaagatgagctcttcaatcttgtcaaatggattgattcaaagaaaggatccaccatcaacctcactgaagcagtacttacatcaatttacacaattgcttcaagggctgcctttggcaagacattgcaaagaccaagaaaaatttatatcagtggttaaaaaaacatcaaaacttgctgcaggttttggcattgaagatttgtttccttctgttacttggcttcaacatgtcactggcttgagggctaagcttgagaggttgcatcgacaggctgatcag

SEQ ID NO: 204847 - DNA, 293 bp, Glycine max
ctcgagccgctctcttcaaaaaccaatatggtcgcattcgcgtcctccagaggttcaaccaacgctccccacaacttcagaatctccgagactaccgcattttggagttcaactccaaacccaacaccctccttctccccaaccatgctgacgctgattacctcatcgttatccttaacgggactgccattctttccttggtgaacaacgacgacagagactcctacagacttcaatctggtgatgccctgagagtcccctcaggaaccacatactatgtggtcaaccctgac

SEQ ID NO: 204848 - DNA, 288 bp, Glycine max
gtgatttcagtgagtgatcggtgttcacttgatctcatcataatcgtcagcgtcaattgaagaagatgccgatcagaaacatcgccgtcggaaggcctgaagaggcgactcaacccgacacgttgaaggcggctttggctgagttcatctcaacctgcatcttacgtgttcgtcggttcaggctccggcatcggctacaacaagctcaccgataacggcgctgccgaccctgccgggctcatcttcgcctccataggccatgcattcgccctctacgtggccgactcc

SEQ ID NO: 204849 - DNA, 214 bp, Glycine max
ggtcaagagattgcaggaatctcaatattcagagaaagaattactgtctgagatgaatatactagggtctgtcaaacatgcgtaacttggttcctctattaggtatttgtgtggctaaaaaggagaggcttttggtctataaaaatatgccaaatggtaccctccatgatcaactacatcctgatgctggtgcatgcaccatggattaggctct

SEQ ID NO: 204850 - DNA, 289 bp, Glycine max
gtggtgccggacgcggaggaccaccacctgctcaacgcggagcaccacttctccgccttcaagacaaagttcgccaagacctacgccacgcaggaggagcacgaccaccgcttccgtatcttcaagaacaacttgctccgcgccaagtcgcaccagaaattggacccctccgccgtccacggcgtcaccaggttctccgatctcactccgtctgagtttcgcggccagttcctcggcctgaagccgctccgccttccctccgacgctcagaaggctccgatccttccga

SEQ ID NO: 204851 - DNA, 280 bp, Glycine max
cggctcgagctgcaaaggattctacccgccgctcgatgggaattgcgcttcaaggcgtctcgtagggctaatccgcctcacgagggtcaccaacggcacgtgcctttggggggccgaggcccctactgctggtcggcaaacggacggcgggcgcacgcgtcgcttctagcccggattctgacttagaggcgttcagtcataatccaacgcacggtagcttcgcgccactggcttttcaaccaaacgcgatgaccattgtgcgaatcacggttcctctcgt

SEQ ID NO: 204852 - DNA, 278 bp, Glycine max
tgataatggatttcctagatgtaactgtgatgatgaggccagcttttggactattgaaagcattctggagtgtcagagagttggtgatttcttgattgctgtggcctacttctctatccctattgagctgctttatttcatcagttgctcaaatgtcccattcaaatgggtcctgattcagttcattgccttcattgtactatgtggattgacacatttgctcaacgggtggacctatggccctcacactttccaacttatggtggcacttactgtct

SEQ ID NO: 204853 - DNA, 286 bp, Glycine max
gttcccaagcttgctgggcttcggcgttgtggtaagagttgtcgtcttcgttggactaattatctaaggcctgacttgaagagagggctcctcacacaggctgaagagcagcttgttatcgatctccatgcccgtcttggcaacaggtggtccaagattgctgccaggttaccaggtaggacagacaacgaaattaaaaatcactggaacacccacatcaagaaaagctccttaagatgggtattgatcctgttactccacggaacctcttaacaaacaagtctct

SEQ ID NO: 204854 - DNA, 284 bp, Glycine max
tacctctttttcttctctctcaacaacttcaccttcttcctcctcgatcatgtctcacttcaagggcaagtaccatgatgagcttatcgccaatgctgcgtacattggcactcctggaaagggtattcttgctgctgatgagtcaacagggacaattggcaagcgtttggccagcatcagtgtagagaacattgaatccaacaggcgagctcttagggagctgcttttcactgctcctggtgttcttcaatatctcagtggtgtcatcctctttgaggaaaccc

SEQ ID NO: 204855 - DNA, 286 bp, Glycine max
gggaattgacacccccggcgtagttgcattgcttggagcacacagtgttggtcgaacccattgtgtgaagttggtgcaccgtttgtacccagagattgatccagctctgaaccctgaccacgtccctcacattctgaagaagtgccctgatgccattccagaccctaaggccgtgcagtacgtgagaaacgaccgtggcacccccatgattctagacaacaattactacagaaatatattggacaacaagggcttgttgatagtggatcaccaactagccaatgac

SEQ ID NO: 204856 - DNA, 278 bp, Glycine max
attgatgtgcagcatcagtgagaaagccaaaaggaagcgccaatctgcattccgcggagtgcgcaaacgcagctggggacgctacgtatctgagataaggaacccgggccagaaaacacgcatatggatcggctccttcggctcgcctgagatagcggctcgcgaatatgacaccgctgctttcttcctgaaaggaacatctgccactcttaatttccccgaactcgtacactccctgactcgacctctctcatcttcccggagggacatacagtccg

SEQ ID NO: 204857 - DNA, 286 bp, Glycine max
ggaccaccttttccctgtgaatgatcctgctccagtttccactgagacaactccccaagctgaaggttttgatccttcaacttcaaccactaccaagagtgatggtttggtgattccgaagaattagctgagatcgagtacatggagagcctttatatgaagagtactgtatcagcattgcatgttttgcaggaaattagaagtggaagctcaacagttagcatgttttcattgccaccgttgaagataagtggttcagaagaagaaacatggaagaaaatccctg

SEQ ID NO: 204858 - DNA, 283 bp, Glycine max
tttcgcttcaaatttcatttagatccaaaatttctgaatcagtgaagaatcttagattctgtgggaaaagcttctcaatctttgacgaagataaacaacaatgtcttcacttgcggctgctagagcagacaacttttactatcccccagaatgggaaccgaatcagggttcgctgaacaagtttcatggtcaacatgccttgcgagagagggcgagaaaattagatcagggtatcctgattataaggtttgagatgccttttaatatatggtgtggaggatgc

SEQ ID NO: 204859 - DNA, 281 bp, Glycine max
  unsure (1)..(281): unsure at all n locations
ctaattttcgtttccatccaaaaaatggctctatcgcgcgtggctcaatcgtcgccatcacagtcgaatcttttgaaacccctctcgtcgtacttatccctacgacgccgttcggtgtcgacctcgtcggagcccctcaccgtggagacctcggtgcccttcacctcccacaactgcgatgcgcctccacgcgccgtggagacgtcctcggcggagctcttctcgttcttccgtgacatngcgctgatgcggcggatggagatcgcggcggactcgctcta

SEQ ID NO: 204860 - DNA, 282 bp, Glycine max
ctttactacgtgaacctcaccggcgtcaccgtgggccgggttaaggtcccattacccatagaatatctggcgttcgacccgaataagggctccggaaccatcctagattctggcacggtcataacccggttcgtaggaccggtttacagtgcaataagggatgagtttagaaaccaagtgaagggaccgttcttcagcagaggtggtttcgacacgtgctttgtgaaaacctacgagaatttgacgcccttgatcaagcttcgcttcacgggcttggatgtg

SEQ ID NO: 204861 - DNA, 281 bp, Glycine max
ctcgagccggtccaactatcccatggtcccaggacatgaagtggttggtgaggtactggaggtgggatcaaacgttagcaggttcagagtgggagagttggtgggagttggactcctcgtaggttgctgcaaaaactgccagccatgccaacaagacattgagaattactgcagcaagaagatctggtcttacaatgatgtttatgtcgatggaaaacccacacagggtggctttgctgaaaccatgatcgttgagcaaaagtttgtggtgaagattccag

SEQ ID NO: 204862 - DNA, 287 bp, Glycine max
ggaagagacaataaagatgcagatgttgcagtcaatgggcaagaaacacccatggctaagagacccacatatccaaccctgcctgaagaacccaaggttgaaagaaatctcctatgcagagttggtgttcggcttccagatggacgccgggttcagcgaaacttcttacgcactgatccaattcagctgctgtggtctttcatttctgctcaactaggggaagatgaaacaaattcatttagattaacacatgcaattcctggagcatctaaaattctggactatga

SEQ ID NO: 204863 - DNA, 290 bp, Glycine max
caacaacatggcggacaaggcagtcaccatccgaaccagaaagttcatgacgaacaggcttctctccagaaagcaattcatcgttgatgtccttcatccagggagggctaatgtttccaaggctgaactgaaggagaaattgggcagaatgtatgacgtgaaagacactaacactgtatttgtcttcaagtttcgaactcattttggtggtggcaagtccactgggtttggtttgatctatgattcagttgagaatgccaagaagtacgagcccaagtacaggcttatca

SEQ ID NO: 204864 - DNA, 283 bp, Glycine max
tctcgagccgattcggctcgagcaacaatggtgccgcaacccattatgcatctaaccctttagtcattaataatctctctgaccactctttccttggtcgatgccgccgatcccacatttggcttcacccctcttggattatctagtagctcaaacttgcaaatccaaaagccttacgacgttgcagtcaacgagcgctacagcttttcaaatggagtgcacagattttgggtatactccacggacaagcctcatatgcaaggcagcaatacgaagccacgaa

SEQ ID NO: 204865 - DNA, 208 bp, Glycine max
atcacttcttcttgtgctggcataacttcaacaacttattctttgttctcgatctcacgatggctcatttggccctgtctcagatggctgtaactgttcctgttggcagcgatttgtctctcagaagatctgcggttaaggcacctaactttaacttttgggataaatcatgggcaccagtatttacttggtacttgaaggcaaacaa

SEQ ID NO: 204866 - DNA, 281 bp, Glycine max
atctgaaaggtactagctagctagctagtacttctacactgtgaggtagcatcatgaggaagcgccaagtagttgtgagaagagaggagcctcaaaggagacgctaggacggtgaaatacggcgagtgccagaagaatcacgccgcgaatgtgggagggtatgctgttgatggctgcagggagttcatggcgagtggcgccaccggagaaggaacaagtgctgctctcacttgtgccgcctgtggttgccacaggaacttccacaagagacaggaaaccga

SEQ ID NO: 204867 - DNA, 281 bp, Glycine max
caagcaaaaagaaagaatcccaggcgaggagaaagatggaggggaaggagcaggatgtgtcgttgggagcgaacaagttccccgagagacagccgattgggacggcggcgcagagccaagacgacggcaaggactaccaggagccggcgccggcgccgctggttgacccgacggagtttacgtcatggtcgttttacagagcagggatagcagagtttgtggccacttttctgtttctctacatcaccgtcttaaccgttatgggagtcgccggggctaat

SEQ ID NO: 204868 - DNA, 286 bp, Glycine max
cgagaaactctaacgaaagagcgagaaagcgaagacagccatggcgtcgtttcttcaatcgtttctggatccgaagaagaactggttcgccgctcagcacatgaaatccctctccaaacgcctccgcaaatatgggctccgatacgacgatttgtacgatccttactacgatctggatgtgaaggaggcgctgaatcggcttccgaaagaggtggtggacgctcgccacgcgcgtcttaaacgcgccatcgatctttccatgaagcacgagtacctccctgacaat

SEQ ID NO: 204869 - DNA, 283 bp, Glycine max
tgacctcatataggtatgagggtgatgagatcaatgtaaaattttcacaaactgaagctaatgttcttcatgaatctgtcaaggagaagaaaggcaacagtgaagaagtcatcaggatccttactacaagaagcaaaactcaacttgtggcaactttcaaccgctacagagatgaacatggaatttccatcagtaagaaattgttggatcaaacatctgatgacttccacaaggtgttgcacactgctattcgctgcatcaatgaccataagaagtactatga

SEQ ID NO: 204870 - DNA, 280 bp, Glycine max
ggcaccgaagaagagcgataatacgaggtactacgaaatcctcggcgtctcgaagaacgcttcgcaggatgatctgaagaaggcttacaagaaagccgccatcaagaatcaccctgacaagggcggtgatcccgagaagtttaaagagctggcacaagcatatgaggttctgagtgaccctgagaagcgtgagatatatgatcagtatggtgaagatgcgcttaaggaaggaatgggtggtggcggtggccatgatccgtttgatatcttttcatctttc

SEQ ID NO: 204871 - DNA, 279 bp, Glycine max
gtcatatgcttgtctcaaagattaagccatgcatgtgtaagtatgaactaattcagactgtgaaactgcgaatggctcattaaatcagttatagtttgtttgatggtatctactactcggataaccgtagtaattctagagctaatacgtgcaacaaaccccgacttctggaagggatgcatttattagataaaaggtcaacacaggctctgcctgttgctttgatgattcatgataactcgtcggatcgcacggcctttgtgccggcgacgcatcatt

SEQ ID NO: 204872 - DNA, 273 bp, Glycine max
gacaagtgcttggttgtgttcaagtgaagcagtcaactgtagccgtcaaggaatgtttcgggaagtacgatgatgttcttcaacctggttgccattttgtgccatggtgtcttggctgcggtgtggctggtgtcctttctacgcgtgtcatgcagctaagtcttcgttgtgaaactaagacaaaggacaatgtgtttgttaatgtggttgcctcaatccaatatcgagcattggcagaaaaggcatcagatgcttactacaaactcaccaata

SEQ ID NO: 204873 - DNA, 274 bp, Glycine max
ctcgagccggtcttgggaacctttccagggagaaaattcctcaaatacctctggaattggttttggaaaaggagtttgagctttcccacaactcaaagaatgccagtgttcatttctgtggatacaaggcattttatgatgctggcgatgatagcgaggaggatgaatttactgatagcgaagaggatgttccattgcttaaagcagagaatggaaaacctgaaacaaaagctgaagagttgaaggtacctgaatctaaaaaagctgttgccaa

SEQ ID NO: 204874 - DNA, 277 bp, Glycine max
gcttgtctgagaaggaaacagatagaagctttgggttgagaaatttcaggtacattgagaccatcaaagaagctttggaaagggaatgcccaggagttgtttcctgtgctgatatcctcgttctctctgccagagatggcattgtttcgctaggaggtccccatatccctcttaaaacaggaagaagggatggtagaaggagcagagccgatgtggtagagcagttcctcccagaccacaatgaatccatttctgcagttcttgacaagtttggtgc

SEQ ID NO: 204875 - DNA, 223 bp, Glycine max
ctcgagccgcgcaatcttcactacattcaccgagcatttgcattcacattgaatatggctgagactacacaatctaatgctgagttgttggagtggcctaagaaagataagcgccgcttcctgcatgttgtgtatcgtgttggtgatcttgatcgcaccattaagttttatactgaatgttttgggatgaagcttttgaggaaaagagatattccagaggaga

SEQ ID NO: 204876 - DNA, 285 bp, Glycine max
cttcatcatagtcgtggccgtgtcgcagcaaaaccaaaccacatattaacttgtttgctctaagtcatggctctgatcttgcacgcaaccaaagcaaacaagaatgctttcaagactctgattgcggcagagtacagtggcgtccaagtggaattggcccctaatttcgagatgggtgtctctaatagaactcctgaattccttaaaatgaatcccataggaaaggttcctgtcttggaaacgcccgatggtccagtctttgagagcaatgccattgctcgttac

SEQ ID NO: 204877 - DNA, 276 bp, Glycine max
attatcaaataattaattaaattcctcgtggaatcttgttgaagccatgtctacagctggtcaggtcatcaagtgcagagctgcggtggcatgggaagcagggaagccactatcgatagaaaccatagaagtggcaccaccccagaaaggtgaagtgcgtttgaagatcctcttcaactccctttgccgtacagatgtttactggtgggatgctaagggccagactccgctgtttcctcgtatcttaggccacgaagcttcggggattgtggagag

SEQ ID NO: 204878 - DNA, 279 bp, Glycine max
tcaatttcaatcaacggttatacccttttctatttgagcatcatcatgtccaccgcagcgcacccaaggccaagaaaacggcgtcgtccaagaagcccctctcccatcctaccttcgccgcgatgatagcggaggcgatagcgagtctgaaggagagaaccggttcgagccaatacgcgataaccaaattcatcgaaggcaagcacaaggagttgcctccaacctacaagaagcttgttctcgttcatctcaagaagtctgttgctgctggcaagctcg

SEQ ID NO: 204879 - DNA, 271 bp, Glycine max
gctgattcgatcgcatcagaacattcattcacattcatatcctctctctccgatcccaatggcggatgagagccccaaaccagagaccttcgaactcaacaatggaagcatgcaggtcctcctcaccaatctcggctgcaccatcatctccttatccgtacctggaaaagatggtgtgttatctgacgttgttcttggccttgaatctgttgaatcctatcagaaaggtcttgctccttattttggctgcattgtgggtcgagttgctaac

SEQ ID NO: 204880 - DNA, 273 bp, Glycine max
tctgtattttgtctttcttttaaatttttctttaaatttctcaattgatcaaagatcttcagcaaaccggtcaagtttgtgtagtttggccagatgggaggtgggtttagagtgctacacttagttagaccttttctctcgttcctacctgaagttcagactgctgataggaaagtgccatttagagagaaggtcatatatactgtgatctctctgttcattttccttgtttgcagtcagcttcctctgtatggaatacactcaacaacaggt

SEQ ID NO: 204881 - DNA, 277 bp, Glycine max
aatctctcttcttacccatttcctccccccctctttctcttttcttgttctgtttttattttcactgttctctgataacaacgttgttagttgtcaccatggttgttctgtctcagccagcattaaaccagtttttccttctgaaaacatgcaagcccacgcccttgttcgcggggattcctgtggtcgacctcacggaccccgatgccaagacccacatagtcaatgcctgcagggacttcggcttcttcaagctcgtgaaccacggtgttccgtt

SEQ ID NO: 204882 - DNA, 277 bp, Glycine max
gtggagcttcctcatgctacttccgactatgatgagtttggatgcattgtttctcacaacaatgctgtaaatgattataacaaactgttgagggatacattgactcaaaccggagaaagtttagtagatgcttcccttatttatgcggacacacactctgctctcttagagctctttcaccaccccacattctatggactaaagtataataccagaacatgttgtgggtatggaggcggtgtctacaactttaaccctaaaattttgtgcggccata

SEQ ID NO: 204883 - DNA, 281 bp, Glycine max
cgcacatcgctattctcttcattccatggctttgcccaaccagcaaaccgtggattaccctagtttcaaactcgttatcgtcggcgatggtggcacaggaaagacaacctttgtgaaaaggcatctcaccggagaattcgagaagaaatatgagccaaccatcggtgtggaggttcacccattggattttttcacaaactgtggaaagattcgattttactgctgggatactgctggacaggagaaatttggtggcctcagagatggatactatatccatg

SEQ ID NO: 204884 - DNA, 284 bp, Glycine max
aagcgccaaatcagtccatgatttcaccgttaaagatgccaagggaaatgatattaatcttggtgactacaaaggaaaggtccttatcattgtcaatgttgcctcacaatgtggcttgactaattcaaattacactgagctcagtcagttgtatgagaaatacaaacagaaaggtctggaaattctggcatttccatgcaatcagtttggggcacaggaccctggatctaatgaacagatacaagagtttgtttgtactcgcttcaaggctgagtttcccgttt

SEQ ID NO: 204885 - DNA, 272 bp, Glycine max
ctaaagccgagcagcgagagagagaaaccctagcaaaaatgccggctggtcacggtttgagatcccgcaccagagattccttctctcgtcccttcaggaagaagggtaccatcgccctcaccacatacctcagaacctaccacgtcggcgattatgtcgacgtcaaggttaacggcgccgtccacaagggaatgcctcacaagttctaccatggccgcaccggtcgcgtctggaatgtcaccaaacgtgctgttggggtcgaagtcaacaag

SEQ ID NO: 204886 - DNA, 266 bp, Glycine max
agcgagggactgacagatgcagggcttcttccactccttgagagttccgaggctggtttggttaaagtgaaccttagtggttgcacaaacgttaccaataaagtagtttcgtccttggccaatctgcatggttggactcttgagaatctaaaccttgatggttgcaaaaacatcagtgatgctagcttgatggcaattgctgaaaactgtgcattgctatgtgatctcgatgtctccaagtgtgctataaccgatgctgggattga

SEQ ID NO: 204887 - DNA, 259 bp, Glycine max
gatgggttggtttccaatctttcgcttgcagatgacatgccagatgttagtgattcgattgagctactcaagaccaagtttctcaacaaaggtctcacagtgaaagaccttgttcttcttagtggtgcacatacaattggaaccacagcgtgcttctttatgaccagaagactgtacaactttttcccaagtggtgagggatcagacccagcaattagacaaaacttcctccctcggctaaaggcaaggtgccctcaga

SEQ ID NO: 204888 - DNA, 260 bp, Glycine max
ctttgaggaaactctctaccagagcacagctgcaggcaagccctttgtggaagtcttgaaggaggctggtgtgcttcctggcatcaaggttgacaagggcacagttgagcttgctggcactaatggagaaaccaccactcagggtctagatggccttggtcagcgttgcgccaagtactatgaagccggtgcacgttttgccaagtggcgtgctgtgctgaagattggtcccaacgagccatctgagctggctatccatg

SEQ ID NO: 204889 - DNA, 255 bp, Glycine max
gaaagggtgtgagaagagaatggagagtaaagaggaagatgttaacgttggagcaaacaagttctcagaaaggcaaccaattggtacagcagctcagggtggtggtgacaaggactacaaggaggcacccccagctcctttgtttgaacctggtgagctcaaatcatggtccttctacagagctggaattgctgagtttgtggcaactttcttgttcctctacattaccatcttaactgtcatgggtgtcaacag

SEQ ID NO: 204890 - DNA, 261 bp, Glycine max
gacaagtgcttggttgtgttcaagtgaagcagtcaactgtagccgtcaaggaatgtttcgggaagtacgatgatgttcttcaacctggttgccattttgtgccatggtgtcttggctgcggtgtggctggtgtcctttctacgcgtgtcatgcagctaagtcttcgttgtgaaacgaagacaaaggacaatgtgtttgttaatgtggttgcctcaatccaatatcgagcattggcagaaaaggcatcagatgcttactaca

SEQ ID NO: 204891 - DNA, 263 bp, Glycine max
gtgatttcagtgagtgatcggtgttcacttgatctcatcataatcgtcagcgtcaattgaagaagatgccgatcagaaacatcgccgtcggaaggcctgaagaggcgactcaccccgacacgttgaaggcggctttggctgagttcatctcaaccttcatcttcgtgttcgccggctcaggctccggcatcgcctacaacaagctcaccgacaacggcgctgccacccctgccggcctcatctccgcctccatcgcccatgca

SEQ ID NO: 204892 - DNA, 257 bp, Glycine max
ggcgggaagaagcacggcgccgcgcactcagggtttacaatctcggcaacacctcgccggtgccggtggggaaactcgtttccgtgttggagacgttgctcagggtgaaggcgaagaagcacgtgatcaaaatgccgcgaaacggcgacgttccattcacgcatgctaacgtgagcctggcgtggagggacttcgggtacaagcccaccactgatctcgccactggtctcagaaagttcgtgcagtggtacgttggg

SEQ ID NO: 204893 - DNA, 254 bp, Glycine max
caaatttctgccctatcaactttcgatggtaggatagtggcctaccatggtggtgacgggtgacggagaattagggttcgattccggagagggagcctgagaaacggctaccacatccaaggaaggcagcaggcgcgcaaattacccaatcctgacacggggaggtagtgacaataaataacaataccgggctcattgagtctggtaattggaatgagtacaatctaaatcccttaacgaggatccattggagg

SEQ ID NO: 204894 - DNA, 260 bp, Glycine max
cagtttctcaatcgttagatctcatcttatactcaccggcgagtccatctcgcgccagcgtcgacgccgctccggccaccgctccggccaccgcctttggttccctcactttctcgtccttcttcttctcagaaatatgccttctcagaaagttgaaacgggtcatcaagacacggtccatgatgttgcaatggattactatggtaagaggctggccacggcttcatcagatcacacaattaagataatgggggtgagta

SEQ ID NO: 204895 - DNA, 262 bp, Glycine max
tcgcgtcgctgctccgtaccagtttcactgcataaatttgagagaaaactctgcaaacatgttggtttatcaggacctccttacaggtgatgagcttctctcggactccttccgttacaatgaaattgagaatggaatgctgtgggaagttgaggggaagtgggttgttaagggagcagttgatgttgacattggtgcaaacccttctgctgagggtggagaagatgagggagtcgatgacgcagctgttaaggttgttgac

SEQ ID NO: 204896 - DNA, 265 bp, Glycine max
gcctaaagatgttaatgcagctgtgggaattatcaagaccaagcgcactattcaatttgttgactggtgccccactggtttcaagtgtggaatcaattaccagcctccaactgttgttcctggcggtgatcttgccaaggttcagagggctgtgtgcatgatctccaattccaccagtgttgttgaggtcttctctcgcatcgaccacaaatttgacctcatgtatgccaagagggcttttgttcattggtatgttggtgagggt

SEQ ID NO: 204897 - DNA, 265 bp, Glycine max
tcaaaagggagaagaaaaggaaagaaaactctcaaaaaactattatagcaatggcagaacaaaaccaaaaccaaacaactgaagctggaaggcaccaagaggttggtcacaagagccttctccagagtgatgctctttaccagtatattctggagacaagtgtctacccaagagaacctgaatccatgaaagaactgagagagttgacagcaaaacacccatggaacatcatgacaacctctgcagacgaagggcagttcttgaa

SEQ ID NO: 204898 - DNA, 264 bp, Glycine max
gcatcaccaccgctccaacacaggggaaaatgagggagatccttcacgtgcagggagggcaatgcgggaaccagatcggttcgaagttctgggaagtggtgtgcgacgagcacggcatagatccgacggggaagtacgtcggaaactcagctctacaactcgagcgcgtgaacgtgtactacaacgaagcttcctgcgggcggtttgtcccacgcgcagtgctgatggacctggagcccggaaccatggacagcgtgcggactg

SEQ ID NO: 204899 - DNA, 273 bp, Glycine max
agctcgagcgaatcggctcgagctttaattttctgattttagcaaattaaaatagtagtgttattacgtaggttttggcaaagatgttttcagttccaggggtgtcgggaatcctgaacagaggaggagggcataagataaaagggacagtggtgttgatgaggaagaatgtgttggacttcaacagcgtggctgatcttactaaaggaaatgttgggggactcataggcaccggcctcaacgttgttggctcaacacttgataacctcactg

SEQ ID NO: 204900 - DNA, 254 bp, Glycine max
aagatgactcttcccatcttcctgaggatagtggcacttggtttccttgagccagtgctagatcagaacttgtacaacatggggatgaagatgacctcaacaacgtttgcatctgccactgttaatgtcctcccggccattacttttgtaatggcactcattttcaggctagagaaggtgaacttgagaaaatttcacagtgtagccaaagtcattggaacccttataacagtttcaggagctatggttatgac

SEQ ID NO: 204901 - DNA, 252 bp, Glycine max
aaaatattaagatgataaacattggagcacttgttgtactctttgcatttctcttcctcagttgtgcctatgcacaagacacaacaacccttgtgcctgcaatcataacttttggtgactcagccgtggatgtagggaataatgactatcttcccacccttttcaaggctgattaccctccttatgggagggactttgctaaccaccaacctactgggaggttttgcaatggcaaattagctactgatttta

SEQ ID NO: 204902 - DNA, 256 bp, Glycine max
tgaaaagtgaaaatggacttggaagcagtgaagaggtacttagagaaaggaggagaaacagcatcggcggtggatgggttgcctccgaggtttctggaaccgttaataatgaacgctcttaaggtcgatctcatcgaaactggtcgcgttgtctgctccatgaagatacctccgcgtttactcaatgctgggaattcgttacacggtggcgccatcgctgctctggtcgacgtggtggggtccgctgcgattccca

SEQ ID NO: 204903 - DNA, 255 bp, Glycine max
aaaggtcactacaccgaagcgccgagctcatcgactccgtcctcgacgtcgtacgcaaagaagccgagaattgcgactgcttgcaagggtttcaagtgtgccattcgcttggtggaggaacgggttccggcatggggacgcttctgatctcgaagattcgggaggagtatccggatcggatgatgttgactttttccgtgtttccttctcccaaggtttctgataccgttgtggagccttacaatgctactcttt

SEQ ID NO: 204904 - DNA, 255 bp, Glycine max
ctcgagcgaatcggctcagttagttcttttccatggctcacttattcttctacttacttggttcttatttccttagccttcacaaccattatagtacaaaaaataagaaagaaacccaagaaaactgatgacacaacttgtaaaataccccatggtcctagaaagctacctattataggaaatatatacaatctgctatgctctcaaccccatagaaaattaagagacctggccataaaatatggacccgtgatg

SEQ ID NO: 204905 - DNA, 254 bp, Glycine max
gtaaaagaacgtgaaggaaagagacctttgttaactggggacctgcaagtgacactcaaggaaggagttgggacattaggggaactgacgtttacagataattccagctggataaggagtcggaaattcaggcttggcttgaaggttgcatcaggtttttgcgagtccttacgcattcgtgaagctaagacagtggctttcacagttaaagatcatagaggagaactatataagaagcattatccaccagcatt

SEQ ID NO: 204906 - DNA, 254 bp, Glycine max
attttacacaaggaaatggaatgggtggagaatcaatttacggagagaagtttgctgatgagaacttcaagttaaagcatactggaccaggacttctatcaatggcaaatgctggtcctaataccaatggttcacaatttttcattacaactgtgacaactagctggttggacggaaggcatgttgtttttggtaaagttctttctggaatggatgttgtttacaagattgaagctgaaggaacacaaagtggc

SEQ ID NO: 204907 - DNA, 255 bp, Glycine max
gcctttggaaggcttgggacaatgtttggatgtgacaagtacaacattaagccagaccttgtatccctggctaaggcactatcttctgcatatttgccaattggagctgtccttgtaagcccggaaatatcagaagttatacatgatcaaagcaacaaactaggttcattttctcatggttttacttattctggacaccctgcagcctgtgcagttgcaattgaagcactcaagatctataaggaaagaaatatt

SEQ ID NO: 204908 - DNA, 251 bp, Glycine max
agagagagagcgagcagtttcagacacagagagaggggtttgggattggagggattgacgctgcgtctcttcctcttctctttcgatccatccctcattcctaatcctccaatccaaccacctcagcctcacactcacatatacacatatctgaacgcgtatcgtccctcctatggcttcaaagcgcatcctcaaggagctcaaggacttgcagaaagacccaccaacttcttgcagcgctggtccagtag

SEQ ID NO: 204909 - DNA, 246 bp, Glycine max
ctttaagtagcattgaagttttcaaagatgtaggaccatctatggtgatggcaagccctggtgggcttcagagtggcttgtcgcgacaattgttcgataagtggtgctctgataagaaaaatacttgtgttttaccaggatttgttgttgaagggacattggcaaaaaccatcatgactgaaccaaaggaagtgactctcatgaatggactctctgcacctcttaacatgcaggtgcactacattt

SEQ ID NO: 204910 - DNA, 273 bp, Glycine max
cgcgctcgaggtgacggagaattagggttcgattccggagagggagcctgagaaacggctaccacatccaaggaaggcagcaggcgcgcaaattacccaatcctgacacggggaggtagtgacaataaataacaataccgggctcattgagtctggtaattggaatgagtacaatctaaatcccttaacgaggatccattggagggcaagtctggtgccagcagccgcggtaattccagctccaatagcgtatatttaagttgttgcagttaa

SEQ ID NO: 204911 - DNA, 256 bp, Glycine max
atcaaatcaggagagcatgcatatgaacatgatgatgaagaaggtgtgtgggtttgcaatagtgatggtggcagtgcagcttctggtggaggtgagtcccaaggcagaggctgtgacttgtacccctgtggagctgagtccttgtttgggggcaataacttcctctcaaccaccatcaacaatttgttgccagaaggtgagggaacaaaggcaatgcctctgtggttacctcaaaaacccaagtctaaggccatat

SEQ ID NO: 204912 - DNA, 258 bp, Glycine max
ccctgttgagcttgactctagtccgactttgtgaaatgacttgagaggtgtaggataagtgggagctggaaacagcgaaagtgaaataccactacttttaacgttattttacttattccgtgaatcggaagcggggcactgcccctctttttggacccaaggtcggcttcggccggtcgatccgggcggaagacattgtcaggtggggagtttggctggggcggcacatctgttaaaagataacgcaggtgtcctaag

SEQ ID NO: 204913 - DNA, 253 bp, Glycine max
gcaaagagtgttgtgttggtaattaagaaagagaggaaaaatgccgctcaagttggcgggaggagccactgtcggttcccttctcctatgtgttgctatttctctctttcacatcgctggggccgaagatccctacaggttcttcaactggaatgttacttatggtgacatttaccctcttggtgttcgccaaacgggaatattgatcaacgggcaattcccaggtccagatattcattctgttaccaacgac

SEQ ID NO: 204914 - DNA, 255 bp, Glycine max
ctttactacgtgaacctcaccggcgtcaccgtgggccgggtaaaggtcccattacccatagaatatctggcgttcgacccgaataagggctccggaaccatcctagattctggcacggtcataacccggttcgtaggaccggtttacagtgcaataagggatgagtttagaaaccaagtgaagggaccgttcttcagcagaggtggtttcgacacgtgctttgtgaaaacctacgagaatttgacgcccttgatc

SEQ ID NO: 204915 - DNA, 254 bp, Glycine max
gctcgagcggctcgagcggctcgaggggacgagttggtgcgggtcattatattaaccgggtcgggccggtcattctgttagggcgtggatctcacggccgctgaggacgtgttcaagggcgatgtgaaggacccggagagcgatccggtggtgcaaatggagctctgccgcaagccaattatcggagccatcagaggattcgccgtcactgctggcttcgaaattgccctcgcctgtgacatcttggttgctgc

SEQ ID NO: 204916 - DNA, 248 bp, Glycine max
catgaccctcaattcaaatttctgaatcttcccagttgaagtctttggcagctcctccatgaacttcaccaccttaggcaccataaagtgtggcaaattcttcctgcaatatgcaattatctcagcctcagtgacatgatcaattttttttgatgagttgttgttgttgttgttcttcctcaatgacacaaaagcacaaggactttcaccccacctaggatgtggcattgccaccacagcagcctcca

SEQ ID NO: 204917 - DNA, 238 bp, Glycine max
gggtgggttgatagtactgtgcaagctttggaacttcttcacaagctgctacttcaatggccactgaagaggttaacaaacctcaatcgcttcctccataccctgagatgatagtgaaagcacttgaagccttgaatgaggctgatggatcgaataaatcagcgatatcaaagtacatagaaaccacctacggtgagttgccagatgaaactgttttggggagtcacctgaacaagat

SEQ ID NO: 204918 - DNA, 276 bp, Glycine max
agatgtcggctcgaggttgaggtttgttgtagcagaattcagtgcggtgtgttgtagcagcgattagaaggaaggaggaaagatgaacacagacatcactgcatcgacgaagccagagtacccagtcattgatcgcaaccctcctttcaccaaagtcgtcggcaacttcaacaccctcgactatctccgattcgtcacaatcaccggcgtttccgtcaccgtcgggtacctctccgggattaagcctggaattagggggtcttcgatggtgacagg

SEQ ID NO: 204919 - DNA, 253 bp, Glycine max
cacagtgtatgcaaaagcaaaggaatgctcagacatactctctgctgaggactttgctattttgcttgctaagcactttgtatcattttacaagaaggttactggtgctattgtgaatattgtggaaaaaccatgggagcgtgtcattgtggatggtcaacctcatgaacatggtttcaaacttgggtctgagaagcatacaacagaggcaatagtacaaaagtctggttcacttcagttgacttctggtatt

SEQ ID NO: 204920 - DNA, 248 bp, Glycine max
ctcgagccgctcgagccgaatcggctcgagctaacgcgtgcagagcagagagagacgcacgccatggggcgaagacccgcgaggtgttataggcaaattaagaacaaaccataccccaagtcacggttttgccgtggtgttcctgatcccaagatcaggatttacgatgttggtatgaagaagaagggtgttgatgagtttcctttctgtgtccatctggttagttgggagaaggaaaacgtttctag

SEQ ID NO: 204921 - DNA, 249 bp, Glycine max
cggctcgagatcctgcgcaatatcagtcaatagttgatgcagaatggaatattatttatgacaagttggataaatgtgtcagcagtggtgccaaagttgttctttcacgactggctattggtgatctagctacacagtattttgcagatcgagatattttctgtgctggtcgtgtagctgaagaagatctgaaaagggttgctgctgcgactggtggaaccgtacaaacatctgtgaataacattattg

SEQ ID NO: 204922 - DNA, 300 bp, Glycine max
tacggctctcgagcaatctcagatagctgattcacacaatccctttctctgctgctaattggcatcggcatggtccaaccggcgccggcgatgactcagttcctcaactccgtcctctcccagcgcggcccctccgccgtcccctactccgaggacaccaagtggctgatccgccagcacctcgtggccctcaccaccgccttcccttccctcgagcccaaaacggcgtcgttcactcacaacgacggccgttccgtcaagctcctccaggccgacggcaccatccccatgacgttccaa

SEQ ID NO: 204923 - DNA, 285 bp, Glycine max
aacgaagatagcactggtgatcgatggcagagggcatcttcaaatatcatgtccacacatgtcatcaaggtcgtcacactcgaagcatgataagagtagcccttcataccatagaatcagttccgatttgaagcctggaatggtgtttgttgtccctcccggtcatcccttcgtcaccatagcttccaataaagagaatctcctcatgatttgcttcgaggttaacgctcgagacaacaagaagtttacatttgcagggaaggacaacattgtgagttctctgga

SEQ ID NO: 204924 - DNA, 284 bp, Glycine max
aaaccctaacacacacccatttgattcagtttccatggctagcctcaaggttgcatttttcgctgcagtgctctgcatggttgtggtgagtgcacccatggcacatgcagctatcacgtgcgggcaggtgacgagtagcctggccaattgcatcggttacctccagaagggaggaacgccgtcgtcgggatgctgcaacggagtgaagagcctcaatgccgccgccaagaccaccgccgaccgccagacggcgtgcaactgcctcaagtcggccgccagccaaa

SEQ ID NO: 204925 - DNA, 281 bp, Glycine max
attgctgtctacaacaatgatagggacagagttgttgaggccagagatgagttgcataggatgttgaatgaggatgaactgagagatgcagtattgcttgtgtttgccaacaaacaagatcttcctaatgcaatgaatgctgctgagattaccgacaagttgggtctacactctctcagacagcgccactggtacattcagagcacctgtgcaacctctggggagggcctttacgaaggtctggactggctttccaacaacattgccaataaggcttaatg

SEQ ID NO: 204926 - DNA, 278 bp, Glycine max
gagaatgggcggggcaatttgcaaagcctcgttcggattcgtttgaggagaagaatggcgtgaagcttccgagttacagaggggataacattaacggagactctttcgacgagaagtcgaggattccggatccgcagaggatgattagggcttattgccaagccgcggccacgctgaatcttctcagagcttttgccaccggtggttatgctgctatgcagagggttactcagtggaatttggacttcacggatcacagcgaacagggagataggtac

SEQ ID NO: 204927 - DNA, 278 bp, Glycine max
ttctgttgccgctggtgaggatgttggccagaaaattatgttatttatgcaacaaagtaggcgtgagatgtgtattctgtctgcatctggttccatctctaatgcctctcttcgccagccagcaacctcaggaggcagcattacctatgagggtcggtttgagattatttcacttactggttcttatgtccgtaatgaacttggaactcgaactggtggtctcagtgtatgcttatctaatactgacgggcaaatcataggtggtggagttggtgggc

SEQ ID NO: 204928 - DNA, 278 bp, Glycine max
tgccttttgacactgctgcccgcgaggaacagttaagcagttctgcagattcatctgaacagaaaactcctttaggtaagacccttaagttaatatcaggatcatgctacttgcctcatcccgataaagaagaaactggtggagaagatgctcattttatatgttctgaagaacaagcaataggggtggcagatggtgttggtggctgggcagatcttggtgttaatgctggatattactctcgtgagctcatgtccaaatcagtggaagctattcag

SEQ ID NO: 204929 - DNA, 286 bp, Glycine max
aagagaaagaccaatcacagcatcatgactaaagttgtgtgtgcacttcttcttatttttgtcatggcttttgtgactcaagttgcttatggtggcggcgaaggatcacttacgccccaagaatgtccgggggcttgcgattatcgttgttcaaaggctgatcggactaagaaggcgtgcctgaacttctgtaacatgtgctgtgcgaaatgtctgtgcgttccatcaggaacctatggtcacaaggaagaatgtccatgttataacaattggaaaacaaagagag

SEQ ID NO: 204930 - DNA, 290 bp, Glycine max
gttactatctataattaattaaattcctcgtggaatattgaagaagccatgtctacagctgggcaggtcatcaagtgcagatctgcggtggcatgggaagcagggatgccactgtcaatagaaaccatagaagtggcaccagcccagaaaggtgaagtgcgtttgaggatcctcttcaactccctttgccgtagtgatgtttattggtgggatgctaaggaccagactcctctgtttcctcgtatcttaggccacgaagcttcagggattgtggagagcgtgggcgaggg

SEQ ID NO: 204931 - DNA, 273 bp, Glycine max
gtgatttcagcgagtgatcggtgttcacttgatctcatcataatcgtcagcgtcaattgaagaagatgccgatcagaaacatcgccgtcggaaggcctgaagaggcgactcaccccgacacgatgaaggcggctttggctgagttcatctcaaccttcatcttcgtgcatcgccggctcaggctccggcatacggtacaacaagctcagcgataacggcgctggaacccctgccggcctgatctcggcctccatcgcccatgcattcgccctc

SEQ ID NO: 204932 - DNA, 274 bp, Glycine max
  unsure (1)..(274): unsure at all n locations
atttctttggattagaaatttttcccaaagctgatcgagaagccagccaggccagaaagagttgaagaagaatgggaagggggaagatcgaaatcaaaaggattgagaacacaanaaatcggcaagtgaccttctgcaagagaagaaatgggcttctgaagaaagcttatgagctgtcagtgctgtgtgatgcagaagttgccctcatcgtcttctccagccgtggccgtctctatgagtattccaacaacaacataagatcaanaatagagag

SEQ ID NO: 204933 - DNA, 267 bp, Glycine max
cggatttctgagctatcaagtttcgctggtaggatagtggcctaccatggtggtgacgggtggacgggaattagggtttgatttcggagagggatcctgagtaacggctaccacatccaaggaaggcagcaggcgcgcaaattacgcaaaataatggaaaagaggtagtgacaataaataacaataccgggctcattgagtgctggtaattggaatgagtacaatctaaatcccttaacgaggatctcattggagggcaagtctggt

SEQ ID NO: 204934 - DNA, 275 bp, Glycine max
cctcgatcacttgtgggatgataccctcgccggtcctcgcccggagaacggcctcggcaagctccgaaagcaccactccttcgctttccgatctgcctccgccaaggaatcagacagcggaagcgtgaaatcgtacggtgaggattcgcccaagaatgcggtgagagtgacgcgaagtataatgatcgtgaaaccacctggtaaccagagtcccagtggatccgctccggcttcccccgccggttctactcctccggtgtctccgttttcgggag

SEQ ID NO: 204935 - DNA, 283 bp, Glycine max
ttcgagactcacggtaacagccttggtgctgatagctttggcaacagtttctctccaaacctcagcttcatcagtgggtaaattcatcgacgaaaccatcacttcccacaagatcgtcattttttccaagacctattgcccgtactgtagaagggcaaaagctgttttcaaagagttgaaccaagttccacatgttgttgagctcgacgagagagaggatggttcaaagattcaggatatcatgattaatattgttgggaggcgtactgtgccacaagttttc

SEQ ID NO: 204936 - DNA, 282 bp, Glycine max
caacaacatggcggacaaggcagtcaccatccgaaccagaaagttcatgacgaacaggcttctctccagaaagcaattcatcgttgatgtccttcatccagggagggctaatgtttccaaggctgaactgaaggagaaattgggcagaatgtatgacgtgaaagacactaacactgtatttgtcttcaagtttcgaactcattttggtggtggcaagtccactgggtttggtttgatctatgattcagttgagaatgccaagaagtacgagcccaagtacag

SEQ ID NO: 204937 - DNA, 284 bp, Glycine max
ccatatttgtttagatatattgtatgattcatggtcccctgcgatgacagttagttctatctgcatcagtattctctcaatgctttcaagctcaaccacaaagcaacgccctgaagataatgaccgctatgtaaagaactgcagaaatggcagatcacccaaggagacaaggtggtggttccatgatgacaaagtataataaaccagtttctctaataagtccacaaaagtagagtagaggattatccttttgaaaacaaaatgaagaaatgggaaaatgcatt

SEQ ID NO: 204938 - DNA, 280 bp, Glycine max
aatcgagccgaatcggctcgagcactccccttgctgcggttgctacatcacctaatcactaccccacttcccctgtaaataccgtttagttcgcacaaggttttaaaaaatggctgatgctgaggacattcaacctcttgttgttgataatggaactggaatggtcaaggcgggttttgcaggtgatgacgctcctagggccgtgttccccagtattattgggcgaccacgccataccggtgtaatggttgggatgggtcagaaggatgcttacgtgggt

SEQ ID NO: 204939 - DNA, 277 bp, Glycine max
cggtgattcgcgctcagcgtaagggtgctgggtcggtgttcaagtctcacactcaccaccgcaagggtccggcgaggttccgcagcctcgacttcggcgagcgcaacggctacctcaagggcgtcgtcaccgacatcatccacgaccccggtcgcggcgcccctctcgccaaggtggcattccgccaccccttccgctacaagaagcaaacggagctcttcgtcgccgccgagcgcctctacaccgggcagttcgtctactgcggcaagaaggccac

SEQ ID NO: 204940 - DNA, 283 bp, Glycine max
ctcatctgcttgccctagcaaccttgcggcttacttctcgccgcttgctgatctccagattgctggggcggaagcacaaccgttgactagtctcaagcttaactctcatattcttcaggagtctactgctaaagagcttaatgaaaatcccgaggcaggatgggaggctgctataaatcctgcgtttctgccaattatacagttgaacaatttaagcgccttcttggagtcaaaccaatgcctaagaaggaacttagaagtacacctgctatatctcacccaa

SEQ ID NO: 204941 - DNA, 269 bp, Glycine max
caaggctgagcgcgaaagaggaattaccattgatattgctttgtggaagtttgaaaccaccaagtactactgcacagtcatcgatgcccccggacatcgtgactttatcaagaacatgattactggtacctcccaggctgattgtgctgtccttatcattgactccaccactggtggttttgaagctggtatttctaaggatggacagactcgtgagcatgctcttcttgctttcacccttggtgtgaagcagatgatctgctgctgta

SEQ ID NO: 204942 - DNA, 270 bp, Glycine max
gcttctctcactctcaaatggtcagctgggaacctcaaccgtgacttcgattctgccactctcaacgatttcgatgtcctggaagtggaggagagggagaaagtggtgaggcgcatgtgggatgtgtatactcaaagcaagagtggcaggggaagtggcttacctcgtttttggagtgatgcttttcatgcggcttacgaccacttggccagtgatgttcagagcgtccgagatgctgctgtctccgaaattgccaagatatccctccat

SEQ ID NO: 204943 - DNA, 271 bp, Glycine max
tgaggcgggggttgatttggaagaaacccagctaaggtaattcctcgcaacccctaactaaaccttcaaaggatcatcatgggcagtcacaatgctttggctgccactttcggaatattaggtaacatcatttctgtgatggtgtacttggctccggtgccaacgttttaccggatatacaaaaagaaatgcacggacggtttccactcgctgccatacttgttgtcattaatgagttctatgctttggttatactacgccttcctcaaaa

SEQ ID NO: 204944 - DNA, 276 bp, Glycine max
gcaagagagagcatgttgttgcatgagctgaaccttggtatgagggagttccaaccagggaacttcgtgtacgatgctgaggatattccatttgggacgctgtggtggttcttttatgctggaatctcttgtttgctcgttctattcgctgggatcatgtctggtctcacccttggattaatgtctctgggtctcgttgatcttgagattctccaacagagtggctcctccactgagaagaaacaagctgctgctattttgccggttgtacagaaa

SEQ ID NO: 204945 - DNA, 282 bp, Glycine max
ctcgctcttctccgccacttctgaatctattgaatcaacaatcatgtcggacgaagagcaccatttcgagtccaaggccgacgccggagcctccaaaacctaccctcagcaagccggtaccatccgcaagaacggctacatcgtcatcaaaggccgcccctgcaaggttgtggaagtttcgacttccaaaactggaaagcacggtcacgctaagtgtcactttgttggaattgatattttcactgccaagaaacttgaggatattgtgccctcttctcacaa

SEQ ID NO: 204946 - DNA, 279 bp, Glycine max
cgttgatgtccttcatccagggagggctaatgtttccaaggctgaactgaaggagaaattgggcagaatgtatgacgtgaaagacactaacactgtatttgtcttcaagtttcgaactcattttggtggtggcaagtccactgggtttggtttgatctatgattcagttgagaatgccaagaagtacgagcctaagtacaggcttatcaggaatggacttgatactaaagtagagaaatcaaggaagcaaatgaaggagagaaagaatagagctaagaa

SEQ ID NO: 204947 - DNA, 277 bp, Glycine max
gagaacttcaactgagggtgagagtgacacaaatctagggagcactactctaaaagttctattagattcttcaaaacatgaccatgcatcgcgagtcttgggcttttgtcttcggcgttatgggcaacatcatctcctttggagtgttccttgctccattgccaaccttttaccaaatctacaagaagaaatccactgaagggttccagtcacttccttatgttgttgcactgttcagtgcaatgctttggatttactatgctttcgtcaaaaggga

SEQ ID NO: 204948 - DNA, 277 bp, Glycine max
cctactttcagctcctaagagcacgcatcactgttgcacttcttactcgttctccctcttttttttcttcttcttcttcttcgctaaacccccccctttatttttcctatctcactaacatcgatgggagacgagaataagaccaagtcccctgcttccggcgtgtggtccaccatcaagcctttcgtctatggcggagcctccggcatgctcgccacctgcgtcattcaacccatcgatatgatcaaggtgaggattcaacttgggcaaggatcag

SEQ ID NO: 204949 - DNA, 275 bp, Glycine max
gggaatagagcacaggacagttgaagtaaatggcataaaaatgcacattgcagagaaaggagaaggccctgtggtgttgtttctccacggcttccccgaactctggcactgttggcacaaccagattgtggctcttggttccctcggataccatgcggtggcaccagatctccgaggctacggtgacaccgatgcaccaccttcaatagacagctacacatgctttcatatagtggctgatctcgttgcgcttattgattctcttggtgcagagc

SEQ ID NO: 204950 - DNA, 276 bp, Glycine max
gtgcgaaggctaatattcacgtcctcagccggaaccctcaacgttattgagcgccaaaagcccgttttcgacgacacatgctggagtgacgttgagttttgccgtagagttaagatgactggttggatgtattttgtttctaaaacactggcggagaaagaagcatggaaatttgccaaagagcagggcctggacttcatcactatcattccacctcttgttgtcggtccctttctgatgccaaccatgccacctagcctaatcacggctctatcg

SEQ ID NO: 204951 - DNA, 269 bp, Glycine max
aaaaggtcttccagtatacattgaaactccaatatataatgtaaaccgtgctgtgggaactatgcttagccatgaggtgactaaactgtaccacctagctggtcttccaaatgacaccatccatattagatttactggcagttcaggccagagctttggtgcattcctctgtcctggtatcactttggaacttgaaggtgatagcaatgactatgttggtaaaggattatctggtggcaagattgtagtgtatcctccaaaagaaagta

SEQ ID NO: 204952 - DNA, 268 bp, Glycine max
gaaaagcgtgaatcatgtcggacgaagagcatcacttcgattctcaggcggatgcgggagcgtccaagacgtatcctcagcaggctggtaccattcgcaagaatggctacatcgtcatcaaatccaggccttgcaaggttgtagaggtctctacgtcaaagacaggcaagcatggacatgcaaagtgtcactttgttgcaattgatatttttaatgggaaaaagcttgaagatattgttccatcatcccacaactgtgatgttccaca

SEQ ID NO: 204953 - DNA, 272 bp, Glycine max
ctcaattgctcagaaacctggtgtggtgtctgttttccctgaccccattctgaagctccacactacacgttcatcggatttcctcaaaagccaaactcgtgtcaatatcgacaccaaaccaaatacgctgtccggttcttctttttcttcatcagacgtcattcttggcgtcttagacacaggcatatggccagaggcggcgagttttagcgacaagggtttcggtcctgttccatcccgatggaaaggcacctgcatgacatcaaaagact

SEQ ID NO: 204954 - DNA, 278 bp, Glycine max
cttggctgcagcaatcatgtctctcagctactcaaccattgcatgggtggcttccgtggacaaaagagttcataatcacgtagatgtggctgttgagtatggctacaaagccagcacttcagcaggaaacgttttcaattttttcaatgccttaggagatgttgcttttgcctacgctggacacaacgtggtgttggagattcaagcaaccatcccttcctccccagagaagccatcaaaaggtcccatgtggaggggggtgctaatagcatatttag

SEQ ID NO: 204955 - DNA, 277 bp, Glycine max
gcgaagagaatggctcccaagggtttaatctttttggctgtgttatgcttctcagcactgtcactgagtcgttgtcttgcggaggataatggacttgttatgaacttctacaaggaatcatgccctcaggctgaagacatcatcaaagaacaagtcaagcttctctacaagcgccacaagaacactgctttctcctggctcagaaacatcttccatgactgtgctgttcagagttgtgatgcttcactgttgctggactccacaagaaggagcttgt

SEQ ID NO: 204956 - DNA, 275 bp, Glycine max
aaaccaccatagagattgattccttgtacgagggtattgacttctacacaaccattacccctgcccgttttgaagagctaaacatggatttattcaggaagtgcatggagcccgtggagaagtgtttgcgggatgccaagatggataagagtaccgtccatgatgttgttcttgttggtggttctactaggattcccaaggttcaacagttgttgcaggacttcttcaacggaaaggaactttgcaagagtattaacccagatgaagctgttgct

SEQ ID NO: 204957 - DNA, 275 bp, Glycine max
gaaaagcgtgaatcatgtcggacgaagagcatcacttcgattctcaggcggatgcgggagcgtccaagacgtatcctcagcaggctggtaccattcgcaagaatggctacatcgtcatcaaatccaggccttgcaaggttgtagaggtctctacgtcaaagacaggcaagcatggacatgcaaagtgtcactttgttgcaattgatatttttaatgggaaaaagcttgaagatattgttccatcatcccacaactgtgatgttccacatgtgaat

SEQ ID NO: 204958 - DNA, 274 bp, Glycine max
ctcaccccagtttcactttctcattattttctctcctattgataaagaaacagagagagagagaaaaaaatgcctgcggtaggaggtattagcaacggagggggcaaggagtaccctggaagcctcactccttttgtgacggtaacatgtatagttgcagccatgggtgggttaatcttcggttacgatatcggaatttcaggtggggtgacatccatggatccgtttctgctcaagtttttcccgtcggtgttccggaagaagaattccgaca

SEQ ID NO: 204959 - DNA, 269 bp, Glycine max
gagtttcacagccaagtcgtaaaagggtttcaagggatggaaaacatgcagagcttctggcaattgggtgatgaactccgtgggcactcaaaagcatcggaggatcacaagtggttaatggttgcctcgaaactggccgaacagacaagcattgaagggggagcgtgtgaacaaccttgatctttcaaagggacccattgaaacaaggtcaagggataaatttgggttccaggaagagaacaaatttgattctcttaacttgagcatgt

SEQ ID NO: 204960 - DNA, 266 bp, Glycine max
cactctccccgaggtttgagagggtactggcatccaaaaaatgggttctaaaactaatgcttcgggccatagagcacgaaggccgctgtcaatatttgctgtgcttggtctttgctgtttcttttatcttttgggagcatggcaaagaagtggatctgggaagggagataaccttgcattgaaagttaataacctgatgactgactgcactgttttacccaatttgagttttgaatctcatcacaatgatgtagaaattgtcgaac

SEQ ID NO: 204961 - DNA, 266 bp, Glycine max
atcaagcttttgatgcaacctcaccccaattgtgatggcgatggagataaaagtttgtgttattcccatagtgggtattggaggcttagggaagaccacacttgcaaagttggtgttcaatgataataggatggatgaacttttcccattgaagatgtgggtgtgtatctccgacgaatttgacattaggcagattataattaaaattatcaactccgcttctgcttcagctccaattattgctctttctcaccaagaaaacatta

SEQ ID NO: 204962 - DNA, 271 bp, Glycine max
aaaaaattgaatggccatggaaaataaaaaaattatagagtattgggttgtgtctatactttgcatgcttttgtcgggtcattggatctctgttcaagctgcccctgcaccctctctcatcacacaactccctggctttaacgccaatttcccatccaagcactattccggatatataagtattgatggaaatactgaaagtgggaagaacctgttctactacttcgttagttcagaaagaagtccagagaaggacccagttgtgctatgg

SEQ ID NO: 204963 - DNA, 277 bp, Glycine max
ccctaatccctctttcttcctcttcctcagtagtgcgattttcgattctcttctctgcaactatgcctaaccctaaggtcttcttcgacatgaccatcggcggtcaacctgccggccgcatcgtgatggagctctacgccgacgtgactccgagcaccgccgagaacttccgcgcgctctgcaccggcgagaagggcgccgggcggagcggcaagcccctccactacaaaggctcgtccttccaccgcgtgatcccgaacttcatgtgccagggcgg

SEQ ID NO: 204964 - DNA, 276 bp, Glycine max
attgggaagcagagaaagaaaaggaggaaatggaggaagcactttttaagacggtgaagaagagcaaaggtgaaattatgggttcttctccggcaacatattgtgttaccggagcaacagggtatattggttcatggcttgtggaggctcttcttgaaagagggtacactgttcatgctactgttagagatcctgaaaagtcactacacctgttgtcattgtggacaagaggtgaccgattgagaattttcaaggcggatttgaatgaagaaagaa

SEQ ID NO: 204965 - DNA, 273 bp, Glycine max
cttctttattccttttgtaatttcattcattcttaatctttgtgacaaataatgttcatcgagaattttaaggttgagtgtcctaatgtgaagtacaccgagactgagattcagtccgtgtacaactacgaaaccaccgaacttgttcacgagaacaggaatggcacctatcagtggattgtcaaacccaaatctgtcaaatacgaatttaaaaccaacatccatgttcctaaattaggggtaatgcttgtgggttggggtggaaacaacggc

SEQ ID NO: 204966 - DNA, 273 bp, Glycine max
gtttccgttaacgctctccaatacaaaataaccactcactgaatattcggtcgaagatgtccgccgccgaagaagctaaagttcccgccgtcgaaaagccggtggaggaggtgaaggcgccgaagcttgccaaggagaagaaacctaaggctccgaaggaaaagaagccgaaacaggccaaaactgcttctcatcctccatatctccagatgattaaggacgctttgattgctctgaacgagaaaggaggatcgagtccatatgcgatagcga

SEQ ID NO: 204967 - DNA, 271 bp, Glycine max
cttgatcaagactcaagagtgaacaaaaaaaaatgatgggtacccttaaggtgtccaacagtagtttatacatattttcgaagttcctagtaatttgtatggtgatgatgatatctttggttgattcaagttattccttgtgtgattttgaggcaatcttcaattttggtgattcgaattcagatacgggtgggtttcatacaagctttcctgcacagcctgctccctatggaatgacttacttcaaaaaaccagtggggcgtgcttctga

SEQ ID NO: 204968 - DNA, 266 bp, Glycine max
agaagaaaaatcaatgatatagaattctaatatgtaaaggtctatgggttatctcataaaaggtagtgtaataaagcatcaatctaaatcaattcatatctatttatatatgaattaatttataacgtaaacaaattaagagctctgaatcaataaaaactgagaatattgattcacgaaaaaacaaatcaatattcgaaaaaaaaaaagattattaattttaagatatgagaaaggctccattgtcgaattcagacctaaccatt

SEQ ID NO: 204969 - DNA, 267 bp, Glycine max
ccaaagttcaaattaagactgaggggtgagaaagatagaattgatatgggtgccggtctagttgcgttcctcttaatggttcttgtgcaattggtctatgcagtgatgaacattacttcaaagcttgcaatagaatctggaatgagccctcttgtccttgttgcttatcgacaactctttgctactgtgtccattgctccctttgcttattggctcgagtggaatacgcttcccaggattacacagcgtcttatgattcagatatta

SEQ ID NO: 204970 - DNA, 261 bp, Glycine max
gtgcgttgaatggtggtgccaactttgttgcccctggttacaccaagggtgatggtcttggtgctgagattgttggcactttcatccttgtttacaccgttttctccgccaccgatgccaaacgtagcgccagagactcccacgtccccattttggcacccttgccaattgggttcgctgtgttcttggttcacttggcaaccatccccatcaccggaactggtatcaaccctgctcgtagtcttggtgctgctatcatct

SEQ ID NO: 204971 - DNA, 262 bp, Glycine max
cctctctctgcgttcggcaccagcgaaacgctcttcgttatctttttctcgactccgcggcgtagatccgaggagttcgggaaaccctaactcatcttccttcacaacagaacaatgcttcttttccctatccatcatctcaactgaagtcatggctggactagcacctgaggggtcacagttcgatgctcgtcaatatgattccaaaatgagtgacttactttcatctgatggacaggacttcttcacatcctatgacgag

SEQ ID NO: 204972 - DNA, 267 bp, Glycine max
gatgggttggtttccaatctttcgcttgcagatgacatgccagatgttagtgattcgattgagctactcaagaccaagtttctcaacaaaggtctcacagtgaaagaccttgttcttcttagtggtgcacatacaattggaaccacagcgtgcttctttatgaccagaagactgtacaactttttcccaagtggtgagggatcagacccagcaattagacaaaacttcctccctcggctaaaggcaaggtgccctcagaatggagat

SEQ ID NO: 204973 - DNA, 266 bp, Glycine max
gaaataacctcaacggccgcaagcacatttattagaggcgtggttttgttgtgagtactgagctgagaagagggagaagatgatcatccccgttcgttgttttacctgtggaaaggtaattggaaacaaatgggatacctatttggaccttctccaggcagattacagtgaaggagatgcactggatgcattgggactggttcggtattgttgtaggcgcatgcttatgacccacgttgatctcattgagaagttgctcaattaca

SEQ ID NO: 204974 - DNA, 266 bp, Glycine max
gggaattgacacccccggcgtagttgcattgcttggagcacacagtgttggtcgaacccattgtgtgaagttggtgcaccgtttgtacccagagattgatccagctctgaaccctgaccacgtccctcacattctgaagaagtgccctgatgccattccagaccctaaggccgtgcagtacgtgagaaacgaccgtggcacccccatgattctagacaacaattactacagaaatatattggacaacagggcttgttgatagtgga

SEQ ID NO: 204975 - DNA, 241 bp, Glycine max
cacaccttcaggagcagtcatggtgctcaaaaccgagctgtgccgattcagcggtgccaagatctacccagggaaaggcatcagatttgttcgtggtgattctcacgttttcctgtttgctaactcaaaatgtaagaggtatttccacaacaggttgaagccgtcaaagctcacgtggactgcaatgtaccgatagcagcataaggaggatattgctcaagaagctgtgaagaagagaaga

SEQ ID NO: 204976 - DNA, 184 bp, Glycine max
aaaggagggtgtttcagctctgacattcttgccgcaattgaaagggcaatattggacaacgtgaatgtgctttctttatctctcggtggtggcatttctgattattacagagacagtgtcgctattggagctttttcatcgatggagaaagggattttggtttcatgctccgctgggaactcgg

SEQ ID NO: 204977 - DNA, 267 bp, Glycine max
ctgaaaacaggctgtcacagagtgtggatactgagggttccagcgacggaagtgatggcaacactgcaggggctaatcaaacaaaaaggaaaagaagccgagaaggaacaccgatcactgatgcagaagggaaaactgagctacaaaatggtccggcttccaaagagactgcatcttccaaaaagattgtgtcagctaccccagctagtgttgcaggaacattagttggacctgtagtttcttcaggtatggccacagcactggagc

SEQ ID NO: 204978 - DNA, 265 bp, Glycine max
cggctcgaggcgagcagtttcagacacagagagaggggtttgggattggagggattgacgctgcgtctcttcctcttctctttcgatccatccctcattcctaatcctccaatccaaccacctcagcctcacactcacatatacacatatctgaacgcgtatcgtccctcctatggcttcaaagcgcatcctcaaggagctcaaggacttgcagaaagacccaccaacttcttgcagcgctggtccagtagctgaggacatgttc

SEQ ID NO: 204979 - DNA, 257 bp, Glycine max
ttcccctatggctcgtcactccttgctcttagccctcctcctcttcgccgccgtggccaccgccgcgatggcggtggccgcgtccgacgccgacgacatcctgatccgtcaggtggtgccagatgttggcgaagcgaagaggaggacaacctgctgaacgccgagcaccacttcgcgagcttcaacgccaagttcgccaagacctacgccaccaaggaggagcacgatcatcgcttcggcgtcttcaagtccaacct

SEQ ID NO: 204980 - DNA, 261 bp, Glycine max
ctttgttcttctaccttattttctttccctagtcaaggagattcatctctgcagcaggttgttttagaaaagaaaaaatgctgaagatttgctgcattggggctggatatgtggggggtccaacaatggcagtcattgcactgaaatgcccctcaattgaagtggctgttgttgacatctctaaatccaggattgcagcatggaacagtgaccagctccctatctatgagccaggccttgatgatgtggtgaagcatgtcg

SEQ ID NO: 204981 - DNA, 259 bp, Glycine max
ttcccctatggctcgtcactccttgctcttagccctcctcctcttcgccgccgtggccaccgccgcgatggcgtggcgcgtccgacgccgacgacatcctgatccgtcaggtggtgccagatgttggcgaacgaagaggaggacaacctgctgaacgccgagcaccacttcgcgagcttcaagaccaagttcgccaagacctacgccaccaaggaggagcacgatcatcgcttcggcgtcttcacgtccaacctccgca

SEQ ID NO: 204982 - DNA, 200 bp, Glycine max
gtggaatgtcacgattgttcggtttgtttgatcgagttccaagagaatgaaaacttgagattgttgccaaaatgcaaccatgcttttcatctcccttgcattgatacttggctcaagtctcatgctacttgccctttgtgtcgttcttctgtcaccgcttgtccaaatccgaatccaaattcttccatggaacccccacc

SEQ ID NO: 204983 - DNA, 261 bp, Glycine max
ggttgatttggaagaaacccagctaaggtaattcctcgcaacccctaactaaaccttcaaaggatcatcatgggcagtcacaatgctttggctgccactttcggaatattaggtaacatcatttctgtgatggtgtacttggctccggtgccaacgttttaccggatatacaaaaagaaatgcacggacggtttccactcgctgccatacttgttgtcattaatgagttctatgctttggttatactacgccttcctcaaa

SEQ ID NO: 204984 - DNA, 251 bp, Glycine max
gtatatccaaagaacagatacttgactctacagttccctaaaggtggaaagagtgtaatgtgtgaggattattttgataacatgattgtattttcggatgcatggtggatcgggaggaaagatgaaaacccagaagaatccaagctggaatttcctaatgaattgtatgagggacaccaagctgagtatgactttaaagggggtgcaggtgcaggtgcagcttctgtagttaatcaaggggttcccagaac

SEQ ID NO: 204985 - DNA, 263 bp, Glycine max
gattgaacaaaatgtacacctcgaggaagaaaattcacaaggataaggatgccgagcccactgaatttgaggagacagttggacagtacttgttcgacttggagaacaccaatcaggatctgaaaagtgacttgaaagatctctacataaaccaagctattcaaatggatgtggctggtaatcgcaaggctgtagtcatctatgtgcctttcagattgaggaaggcattccgcaagattcatcttcgacttgtcagagagttg

SEQ ID NO: 204986 - DNA, 253 bp, Glycine max
atctctctctctctctctctctgaattttctcctctctccgattccttttattaattggagtttactcgctccttgtcctttccctgaaaacatttcctcgtcgtattgatgtcggaaaagggccggccacttccaaaatttggtgaatgggatgtcaatgatccaacctcagctgaggggttcacagtgattgttaataaggccagggatgagaaaaagacaggtggtaacccagattcaccaggaaagact

SEQ ID NO: 204987 - DNA, 245 bp, Glycine max
ttaagattttataatttaacttttttggggtgtgattaaaagagaagctagctaaaaaaaatgggttcagcatccgaaagtgtttgcgttacaggagcttctggtttcatcgggtcatggcttgtcatgagactcatcgagcgtggctacaccgttcgagccaccgtacgcgacccagtaaacatgaagaaggtgaagcatttggtggaactaccaggcgcaaagagcaaactgtctctgtggaa

SEQ ID NO: 204988 - DNA, 253 bp, Glycine max
cttcttcctttcaccaaaggcgaagatcgatcggcttctattcgactctggttttgttttttcgtgctgttttgctttagatctgataattgttttactgtcttatgttcagattatcaacgatcgtgagactggcagatccaggggttttggatttgtgaccttcgcctcggagcagtccatgaaagatgcgatcggagcgatgaatggacagaacttggacggccgtaatatcactgtcaatgaagctcag

SEQ ID NO: 204989 - DNA, 259 bp, Glycine max
gcactgttgaggaaacttgtgtgagagataaagctgtggaatcactatgtaggattggattgcaaatgagggagagtgatttggttgagtatttcatccctttagtgaagagattggcatcaggtgaatggttcactgctcgagtgtcttcatgtggactatttcatattgcttaccctagcgcacctgaaatgtcaaagatagaattgagatcaatgtacagtctgttatgtcaagatgacatgccaatggttagaag

SEQ ID NO: 204990 - DNA, 256 bp, Glycine max
caatagaattcagagagagagagaaagagagtctcttgctctgtatctttgatttgatcattccaatcttcaatttttctatatatccatcaatccgctgagtgcaaagttctaatctttcgcctattgggttctactcctttctctcttcgtttccgatcgatccaattttcttcccatggtctacgatcggacacaacaatctcaatgccaaattggttcttctcggggacatgggtgctgggaaatccagcct

SEQ ID NO: 204991 - DNA, 257 bp, Glycine max; identical to SEQ ID NO: 153017

SEQ ID NO: 204992 - DNA, 258 bp, Glycine max
gtggaaggtcacgattgttcggtttgtttgatcgagttccaagagaatgaaaacttgagattgttgccaaaatgcaaccatgcttttcatctcccttgcattgatacttggctcaagtctcatgctacttgccctttgtgtcgttcttctgtcaccgcttgtccaaatccgaatccaaattcttccatggaacccccaccaagagtcattgttaatgccttgggacaccaacttaggagtaaccatgttgttgttgtt

SEQ ID NO: 204993 - DNA, 258 bp, Glycine max
  unsure (1)..(258): unsure at all n locations
gttgaaaagggtggttacaccatttcggacaactccactggcaacaagcctgatgtcattttgatcggaactggttcggaattggaaatcgctgccaaagctgctgatgacctaaggaaggaagggaaggctgttagagttgtttcccttgtttcttgggaactttttgatgagcaatcagnagcctacaaggagagtgttttccctgctgctgtttcagccagagttagcattgaggcaggatcaacatttgggtgg

SEQ ID NO: 204994 - DNA, 260 bp, Glycine max
ctcgagccgaatcggctcgaggcggaatctgctagaattttctaataatggcgaaagacgttgagcaggtcacagagcaaggtgaatactccgcgaaggactaccatgaccctcctccggcaccgttgatcgacccagatgagctcacaaagtggtccttgtacagagccgccatagctgagttcatagcaacactcctttttctttacatcaccgtgttgaccattattggctacaagagacagagtgacaccaaaatc

SEQ ID NO: 204995 - DNA, 260 bp, Glycine max
gcactttcgctctccctcgtcgcgtgctcgttctcgctatcgtgctctcgcgctctctcggatctaactctgtctgtaatcatgtcaggcaagtatatcgtttctgctattcttggatcatttggagttgcatgggtttgtgattattatgtttcagaaaaaaagctatttggaggtactacccctggcactattacaaacaatgagtgggcagaagagaccgacaaaaaattacaggcatggcctcgtactgccggtcc

SEQ ID NO: 204996 - DNA, 256 bp, Glycine max
aggaggagtgacaactccaaatattatgatattctcggggtttccaaaaatgccagtgaagatgaaatcaagaaggcctatagaaaggctgctatgaagaaccatccagataagggaggagatcctgaaaagttcaaggagttaggtcaagcatatgaagttttaagtgatcctgagaagaaagacctgtatgaccagtatggtgaagatgcccttaaagaaggaatggggggaggaggctcgtttcataatccat

SEQ ID NO: 204997 - DNA, 238 bp, Glycine max
atcactctcaactttactcctcttcaatcagttgcatattctttgctattccaatggccactgttgaggttgtgtcagccaaggttgccctcccagaggacacaaaagaggcatcattgaaggttgacgaggagaagaacacagaagaagttgttgagactccaacaccagaaactgtggttgctgagcaaaccaaggaggaaagtactgaggcgccacgacctgcagcttcagaaga

SEQ ID NO: 204998 - DNA, 259 bp, Glycine max
tctagctcttcaagtgaggaggaaggagaagatggagagaaaaggatgaagaagacaagcctcatcctcaggaggaggtcatcgccaccgagtttcaaaaagtcactgtctcagaccaaggagagaacaagcacagcctcttagaaaagcttcaccgatctgacagcagctctagctcttcaagtgaggaggaaggagaagatggagagaaaaggaagaagaagaagaaggaaaagaaagggctgaaagagaagatcga

SEQ ID NO: 204999 - DNA, 257 bp, Glycine max
ggaagagagaaaaaccatggcaataacactcaacaatggcttcaagatgcctatcattggattgggcgtgtggcgcatggaaggaaacgaaatcagggacctaattctcaattccatcaaaattggttatcgccattttgattgtgctgctgactacaaaaacgaagcagaagttggagatgcgcttaaggaggcttttgatagtggccttgtgaagagagaggatctcttcattaccaccaagctttggaattctg

SEQ ID NO: 205000 - DNA, 256 bp, Glycine max
ctccgatttggtgaggttcgtggagggccacgcgctgttcaagcggttcgggaatgtgagggttatcaagaaggcgaacctcgtcacgtacaggggacccaccatggtcgccaacacgctccacgccgccgcgatcctgcttagggagctcggggattgggactggttcatcaatctcagcgcctccgattacccacgtgtcacacaggatgatctgctgcacacgttttcctacttgccgcgggatctgaatttc

SEQ ID NO: 205001 - DNA, 253 bp, Glycine max
gaccaagtcccctgcttccggcgtgtggtccaccatcaagcctttcgtcaatggcggagctccggcatgctcgccacctgcgtcattcaacccatcgatatgatcaaggtgaggattcaacttgggcaaggatcagctgcgcaggtcacttccaccatgcttaagaatgagggtgttgctgccttctataagggtctatctgctggattactcaggcaggctacatacaccactgcccgtcttggatcattta

SEQ ID NO: 205002 - DNA, 249 bp, Glycine max
ccattttccctctgtcttccccccctcctctacacaaaaatatattattagcatggagaaggtgaattttgtgaagaatggagagcttagattgcctccggggttccgtttccacccgactgatgaggagctggttctgcaatacttgaagcgcaaggtcttctcctgccctttgccagcctctatcattcctgagcttcatgtttgcaagtctgatccttgggatttgccaggtgatttggagcaaga

SEQ ID NO: 205003 - DNA, 253 bp, Glycine max
attaatatttacagagtgaagattttatttttctttctttctttggaagataaagaatgggttctaagtccgaaaccgtttgcgttactggggcttctggttacatcggatcatggcttgtcatgagactcatcgagcgtggctataccgttcgagccaccgtactcgacccagctgatatgagggaggtgaagcatttgctggatctgccaggtgcagagagcaagctgtctctgtggaaggcagaacttac

SEQ ID NO: 205004 - DNA, 255 bp, Glycine max
ctcgagccgaatcggctcgagcgcaggaggaggagattgatcgagacgaagagaagatgactacacgcttcaagaagaacaggacagaagagaggccacgtgagtgccggccatggccgcatcgggaagcaccggaagcaccctggaggacgcggtaatgccggaggcatgcaccaccacgggatcctctttgacaagtaccaccctgggttcttcggcaaggtcggaatgcgctattttcacaagctccgcaac

SEQ ID NO: 205005 - DNA, 204 bp, Glycine max
ttcgatggtttgggtttctcttcctcccttggagaaaaagaagagccaccgctgcgacgccgttcgtgcatttgtgaggtgccgctgtcatgtgtgggcgtggtggaacaaggatgggttataacgccaaatatgatgatatgctcgggatttccaaaaatgcgagtgaagatgatatcaagaaggcctataagaaggcggcta

SEQ ID NO: 205006 - DNA, 250 bp, Glycine max
cttccccgttattctctctccgagcttcactctcttcgcctctgccaaagggagtaaaatggggttctcctcctttctgggtcgtgttctctttgcctcccttttcatcctcactgcatggcagatgtttaatgaatttgatgccaatggtggacccatctcgaaagagttgattcccaaactcactgtggtgaagaaaaatttgtcctctaaattgggggtagcactaccagatattgatgcccggcat

SEQ ID NO: 205007 - DNA, 252 bp, Glycine max
gtcaatccctccttaagcagacttctcgtgttgctcttgaggagatcaaactcaagtttatcgatacctcttcaaagtttgggcatggtcgcttccagaccacacaggagaagcagaagttctttggacgcctcaaagcataattatgttaattggatggaaatgctggaattctatttggttgccatcacttataaactttgtagtgtttctgttttgatattatggattctcgggtagtgagtttttttt

SEQ ID NO: 205008 - DNA, 251 bp, Glycine max
ggctctttcacgcacaatcagcttaaaccaacctttcttgtaaactttattgattttgagaattaaagagggtatagacatggctagagcaattgcagtttctttcttggttctgcttctggctttccccactgtatttggagctgaccatgaagttggtgacactggtggatgggccctaggggttaattacaacacctgggcctctgggaaaactttcagaattggtgacaatttggttttcaagtatg

SEQ ID NO: 205009 - DNA, 249 bp, Glycine max
aaaaaattgaatggccatggaaaataaaaaaattatagagtattgggttgtgtctatactttgcatgcttttgtcgggtcattggatctctgttcaagctgcccctgcaccctctctcatcacacaactccctggctttaacgccaatttcccatccaagcactattccggatatataagtattgatggaaatactgaaagtgggaagaacctgttctactacttcgttagttcagaaagaagtccaga

SEQ ID NO: 205010 - DNA, 253 bp, Glycine max
gagagagaaacagaaacaacaaccaaccatcaagggaagttagtgagagagagagagagagagagagagcggaagatgaatggtggtgaatcttatggtgctattgagacacagtacataagaaggcatcacaaacatgaaccaagggaaaaccagtgcacctctgcacttgttaaacacataagagctcctgttcaccttgtgtggtcgctggttagaagatttgatcaacctcagaaatataaaccatttg

SEQ ID NO: 205011 - DNA, 251 bp, Glycine max
attaatatttacagagtgaagattttatttttctttctttctttggaagataaagaatgggttctaagtccgaaaccgtttgcgttactggggcttctggttacatcggatcatggcttgtcatgagactcatcgagcgtggctataccgttcgagccaccgtactcgacccagctgatatgagggaggtgaagcatttgctggatctgccaggtgcagagagcaagctgtctctgtggaaggcagaactt

SEQ ID NO: 205012 - DNA, 251 bp, Glycine max
gaaagactttaggtttggaattgggaattagggttgttcgcgtcacgaagatgatcgaggtggtgttgaacgatcgattggggaagaaggtgcgcgtgaagtgcaacgacgatgacaccatcggcgacctgaagaagctggtggcggctcagacgggcacaagagccgacaagatccgcatccagaagtggtacaccatatacaaggatcacatcactctcaaggattacgagatccacgacggcatgggt

SEQ ID NO: 205013 - DNA, 254 bp, Glycine max
gtatcctcacaatcctttgctccctcatgatatttacaagagagcaatcaatttccaggctgctagtgttgtttcctcaacaatacaacctcttcataacttgagtttactgaactacattggggagaaagttggccctgatgaaaaacttccttgggcccaaagtataattagaagaggctttaaagcactggaaaagctattgaaagaccacacaggaagatatgcaactggagatgaagttttcctggcag

SEQ ID NO: 205014 - DNA, 240 bp, Glycine max
gcaaggtctaaggataaagcaaattgcctgtggggatagccactgtttggcagttaccatggaaggcgaggttcagagttgggggaggaatcaaaatggtcaacttggacttggcacctcggaggattctcttgtgccacaaaagattcaaacatttcagggagtacctatcagaatggttgctgcaggtgcagaacacagtgtagctattactgaaaatggagaactgtatggaggggg

SEQ ID NO: 205015 - DNA, 247 bp, Glycine max
ttcctctgcaactctctctctctcatcttacgtgtttatcatcgtcactcaaacgacgccgtctcctctccgattcctaagccacgtttatcaggtttcttggtgctgtttgtgcattgtacattattatttctacatgttctggttgtgaattatttgcagatctgattcaactacagtgtctattttgacacccaagattgcaagtggcagttatggggcatagacagttccataacacatcttc

SEQ ID NO: 205016 - DNA, 251 bp, Glycine max
caaactctgacttattttaatttgaactttaaagttttgttattttgtgcaatggcagcaaagagcaaaatcctagtcattggaggaacaggatacattggaaaattcatagttaaggcaagcgcagaaacaggacaccccacatttgtcttggttagagacaacaccctttctcatcctgaaaagtctaaacttgttgagagcttcaagagctttggagttactctgctttatggtgatcttactgatca

SEQ ID NO: 205017 - DNA, 250 bp, Glycine max
gaagaatgttgcagtcaaggatctcaagcgtggttttgttgcatccaactccaaggatgaccctgccaaggaagctgccaacttcacatctcaagtcattatcatgaaccaccctggccagattggaaatggatacgcaccggtgcttgattgccacacttctcacattgctgtcaagttttctgaaatcttgaccaagattgacaggcgatctggtaaggagcttgagaaggagcccaaatttttgaag

SEQ ID NO: 205018 - DNA, 272 bp, Glycine max
attctgatcgctccctgagagagctcgtcgcggcggttgcagaagaagattgcaagatgaagttcaacatcgcgaatcccaccactggatgccagaagaagctcgagatcgacgacgatctgaaactgcgagcattttgggacaagaggatctcacaggaggtcatcggagatgcactcggtgaggaatttaagggctatgtcttcaaaattaccggaggttgtgacaaacaaggatttccaatgaagcagggagtgctgactcctggtcgt

SEQ ID NO: 205019 - DNA, 270 bp, Glycine max
atcactctcaactttactcctcttcaatcagttgcatattctttgctattccaatggccactgttgaggttgtgtcagccaaggttgccctcccagaggacacaaaagaggcatcattgaaggttgacgaggagaagaacacagaagaagttgttgagactccaacaccagaaactgtggtcactgagcaaaccaaggaggaaagtactgaggccccacgacctgcagcttcagaagacaagccctcggttgaagttcagactaaagagg

SEQ ID NO: 205020 - DNA, 269 bp, Glycine max
ccattttccctctgtcttccccccctcctctacacaaaaatatattattagcatggagaaggtgaattttgtgaagaatggagagcttagattgcctccggggttccgtttccacccgactgatgaggagctggttctgcaatacttgaagcgcaaggtcttctcctgccctttgccagcctctatcattcctgagcttcatgtttgcaagtctgatccttgggatttgccaggtgatttggagcaagagagatacttctttagcacca

SEQ ID NO: 205021 - DNA, 266 bp, Glycine max
ctcgagccggcaggttctgctcgcaagccaccggcagcatccggtggctggcctttgatcggtcatcttcacctcttgggtggctccggtcagcctctttacgaaaccctaggaacgttagcagacatgtaacgcccaatattcagcatccgaattggtgttcaccctgccgttgtggtgagctcttgggagttagcaaaagagtgtttcaccactcttgacgtcactgtctcctctcgtcccaaattcaccgccgcaaaaatctt

SEQ ID NO: 205022 - DNA, 262 bp, Glycine max
ggatgccattgtgccaagagtcagtgtagaagtcgacaatgcccatgttttgctgcaggacgggaatgtgatccagatgtctgtcggaattgctgggttagttgtggggatggttcgttaggggagccacctcggcgtggagaagggcaatgtggaaatatgaggcttctattgagacaacaacaaaggattctcttggcaaagtctgatgttgcaggatggggagccttcttgaagaacccggttaacaaaaatgattact

SEQ ID NO: 205023 - DNA, 262 bp, Glycine max
aaaagttagggttagggattttgagagatggcatcgactaagaagatcaccctgaagagttcggacggtgaggccttcgaggtggaggaggcggtggcgctggagtcgcagacgatcaagcacatgatcgaggacgactgcgccgacagtggaatccctctccccaatgtcaccagcaagattctggcgaaggttatcgagtactgcaagaagcacgttgaggcgaacagtgctgatgagaagcccagtgaggatgtgctca

SEQ ID NO: 205024 - DNA, 263 bp, Glycine max
gagactttgccgaactatacatgttcaaatggaccacccttcttattcctccaacaacccttctcataataaacttggtgggggtggttgctggcatctcctatgccatcaacagtggctaccaatcttggggacccctctttggtaagcttttctttgcattttgggtgatcatccatctataccctttcctcaaaggtctcatggggcgccaaaacagaacaccaaccattgtggtggtgtggtccgttctgcttgcatcc

SEQ ID NO: 205025 - DNA, 266 bp, Glycine max
cagacacacccttccatcaacgttaactccgtcaaaatcaacggcaaaaaggtttctttcgacacccccttgggtgggggtgctcagctgagcacggtggtgccttacaccactctccaaacctcgatctatgcaaacttcgaaagcgcttatttgaaagccgcttcgtctatgagcatgaaaagggtcgatccagtttccacctttgggctctgcttcgaatccaacggcgttggaagctcccaagtggggcccaacgtgccggt

SEQ ID NO: 205026 - DNA, 265 bp, Glycine max
agtttatgggctcgtagttaggctgttcaagccattcgatgaactttatgttgatctctaggatttcaatgtggaagctctagagaagtttgttgaggaatctagtacccctgttgttactgtctttaacaatgaaccgagcaatcaccctttcgttgtcaaattcttcaacagtcccaacgcaaaggcaatgttgttcatcaacttcactgccgaaggtgctgaagctatcaaatcaaaataccgtgaagctgctgagcaatat

SEQ ID NO: 205027 - DNA, 272 bp, Glycine max
tgcccacgaagctgtaccggggcgtaaggcagaggcattgggggaagtgggtggcggagatcaggctcccgaagaaccgaaccaggctctggctcggaaccttcgacacggcggaggaagctgctttggcttacgacaaagccgcgtataggctccgaggcgacttcgcgaggctgaacttcccgagcctgaaaggtcgtgccccggggaggagtacaagcctgtgcattccgcggtggacgctaagctcgacgcgatttgcgccaacttgg

SEQ ID NO: 205028 - DNA, 268 bp, Glycine max
agtttctgggcccgtagttaggctgttcaagccattcgatgaactttttgttgacttccaggatttcaatgtggaagctctagagaagtttgttgaggaatctagtacccctgttgttactgtctttaacaatgaaccgagcaatcaccctttcgttgtcaaattcttcaacagtcccaacgcaaaggcaatgttgttcatcaacttcactgccgaaggtgctgaagctatcaaatcaaaataccgtgaagctgctgagcaatataaa

SEQ ID NO: 205029 - DNA, 268 bp, Glycine max
aaaaccacaaattacaaaatcccctcatattatctctctctctcttaaaccatcatgtcctccaccgcgcctcccgtcctccccatctccaacccccaaaccaccgcgggaaccaccggtgcaggcggcggcgccatcgaggctccggccaacaacccggccttccgcgctttcatcaacaacctctccaactccctccgccacggcctcgaccagcgccgcccctggtcggagctcgcggaccgctcagcgttctcgaaacccgagt

SEQ ID NO: 205030 - DNA, 266 bp, Glycine max
caattttgaacctgcaggggcaaaccctttaacctttactgttaaatctgcagctctgaaggaagctattgaggatcttgaatggcctggatcaagcatcaagattactctagagccagatcctccttctgtttcattaagagctgaaggacatggagacttgcagatagacttcatgtattatgtgaattccgaactcctggtggcatttcagtgtgatcatcaagcttctttcaagtacaaatataagttcctcagagcaacaa

SEQ ID NO: 205031 - DNA, 264 bp, Glycine max
gttgaaaagggtggttacaccatttcggacaactccactggcaacaagcctgatgtcattttgatcggaactggttcggaattggaaatcgctgccaaagctgctgatgacctaaggaaggaagggaaggctgttagagttgtttcccttgtttcttgggaactttttgatgagcaatcagaagcctacaaggagagtgttttccctgctgctgtttcagccagagttagcattgaggcaggatcaacatttgggtgggagaaa

SEQ ID NO: 205032 - DNA, 263 bp, Glycine max
gtgacagaaagttctctctctttgactcacaaccctattgcgtgctttgcaatcgaccccgcttatggccaacagtaacctccctcgaagaatcatcaaggaaacgcagcgtttgctcagtgagccagcgcctggaattagtgcgtccccttcggaggacaatatgcggtatttcaatgtgatgatccttggcccgactcagtcgccatatgaagggggagttttcaagttggaattatttttgccagaagaatatccaatgg

SEQ ID NO: 205033 - DNA, 262 bp, Glycine max
gtttagtagatgcttcccttatttatgcggacacacactctgctctcttggagctctttcaccaccccacattctatggactaaagtataataccagaacatgttgtgggtatggaggcggtgtctacaactttaaccctaaaattttgtgcggccatatgctagcaagtgcttgtgatgaaccccagaactatgtgagctgggatggcatccatttcacagaagcagcaaacaagattgttgcacatgccattctaaatgg

SEQ ID NO: 205034 - DNA, 264 bp, Glycine max
tgaaattctttagttgtaactgacaaagttttctgagaaaataaggattattattgagagaatggctggctcatcggaagagggacaagtcattagctgccacaccgttgaagaatggaacgatcaactccagaagggcaacgaatccaagaaactcattgttgtggattttactgcttcttggtgtggaccatgccgtttcattgcaccattcttggctgagctggctaagaagttcacaagtgtcatattcctaaaggtgga

SEQ ID NO: 205035 - DNA, 247 bp, Glycine max
ctcgagccgtccgcatccgctagctcgcgcaggcaccagcaggtgaggttattgtgatttgactggagggaagtggaggtggcggtgcttcaccgtctgcaccgttgaagcaatacttacaggaattctcgaagctgtttcagtactatctggataaatccactccccatcccccctacaggtggattgggactttcgtcattgcatccatctacgttttgcgtgttggttatgtgcaggggtttta

SEQ ID NO: 205036 - DNA, 265 bp, Glycine max
attctgatcgctccctgagagagctcgtcgcggcggttgcagaagaagattgcaagatgaagttcaacatcgcgaatcccaccactggatgccagaagaagctcgagatcgacgacgatctgaaactgcgagcattttgggacaagaggatctcacaggaggtcatcggagatgcactcggtgaggaatttaagggctatgtcttcaaaattaccggaggttgtgacaaacaaggatttccaatgaagcagggagtgctgactcc

SEQ ID NO: 205037 - DNA, 263 bp, Glycine max
gttactatctataattaattaaattcctcgtggaatattgaagaagccatgtctacagctgggcaggtcatcaagtgcagagctgcggtggcatgggaagcagggaagccactgtcaatagaaaccatagaagtggcaccaccccagaaaggtgaagtgcgtttgaggatcctcttcaactccctttgccgtagtgatgtttattggtgggatgctaaggaccagactcctctgtttcctcgtatcttaggccacgaagcttc

SEQ ID NO: 205038 - DNA, 272 bp, Glycine max
tctcgagccgaatcggctcgagcgcaggaggaggagattgatcgaaccaagagaagatgactacacgcttcaagaagaacaggcagaagagaggccacgtgagtgccggccatggccgcatcgggaagcaccggaagcaccctggaggacgcggtaatgccggaggagtgcaccaccaccggatcctctttgacaagtaccaccctgggttcttcggcaaggtcggaatgcgctattttcacaagctccgcaacaaattctactctccgatc

SEQ ID NO: 205039 - DNA, 268 bp, Glycine max
gaaattcccaattacccttcccaattttcaccaaaacctaatactcccacaccaatcttcgatcatggacgccgattcacaacctcaacaactcgaagagagaacagaggagcaagaactgaagtacctggaattcgtgcaattcgcgaccatacaggctctgatgcgctgcgccatcctctactcatacgccaaggagcgcgcgggtcctctgaagcccggtgtcgacaccgtggaggaggccgtgaagaccgtcgtggctccggtc

SEQ ID NO: 205040 - DNA, 266 bp, Glycine max
cggattctgacttagaggcgttcagtcataatccaacgcacggtagcttcgcgccactggcttttcaaccaagcgcgatgaccaattgtgcgaatcaacggttcctctcgtactaggttgaattactattgcgacactgtcatcagtagggtaaaactaacctgtctcacgacggtctaaacccagctcacgttccctattggtgggtgaacaatccaacacttggtgaattctgcttcacaatgataggaagagccgacatcgaa

SEQ ID NO: 205041 - DNA, 263 bp, Glycine max
gttagacgtgtgttcatttcagatgaatttaatgaactgttgcccaagtacctaaactttttgctgggtcttgttgattctgacactttgccacttaatgtatcacgagaaatgcttcaacaacatagtagtctgaagacaatcaagaagaaacttattaggaaagcccttgatatgatccgcaggattgctgatgaggatcctgacgagtcaactgacaaagaaaagaaagatgcatcctctgacaatgatgagaagaaagg

SEQ ID NO: 205042 - DNA, 259 bp, Glycine max
ggacattgtgccgtttaatttcttgacgcccatgaggattataagggatgccattgcgggtttggggagccctgctcccattgtggtttcggaaggggcgaataccatggatgtgggaaggtgtgtgttggttcagactgagccccggacgaggttggatgctggcacgtgggggaccatgggggttggtcttggttactgcattgctgctgcggttgctgagcccgggcggctcgtggttgctattgaaggagattct

SEQ ID NO: 205043 - DNA, 262 bp, Glycine max
ctcttcttctcttgcggctagggttttagcgcacttcttctagatttaaggaagatgggtaaggaaaaggttcacatcagtattgtggtcattggccatgtcgactctgggaaatccactaccactggtcacctgatttacaagcttggaggcattgacaagcgtgttattgagaggtttgagaaggaagctgctgagatgaacaagaggtctttcaagtatgcctgggtgctggacaaacttaaggctgagcgtgaaagag

SEQ ID NO: 205044 - DNA, 270 bp, Glycine max
cttaatttctctctgccttgctcatttacacacctctccaacctttcactttcagctttatttgaatccctctctctcctttccaaatggccagcgttgaggttgcacatcaaacaccaacaacagttccagaaaatgaaacaaccgaggtaatcaagacccaggaaacaaccccggaaccagtaccagccactgaggctcctgcaacagaacaagcagcagctgaggttcctgctcaagaagaacaacaagcaactgaggttcctgccc

SEQ ID NO: 205045 - DNA, 263 bp, Glycine max
cataatttgattgatgaacttgacaacatccctggcgatgatcaagcaatagtggatcttaaaaatggtccctttggtgaaatcgtcaagtctgcaaaggaagccatagttttgcctccttttgtggcaatagcagttcgtccaagacctggtgtttgggaatatgtccgtgttaatgtctctgagctcagcgtggagcaattaagtgtttctgaatatctcagcttcaaggaagaacttgtagatggaaagattaatgacaa

SEQ ID NO: 205046 - DNA, 261 bp, Glycine max
gaaagccaaggatgaccaaagtgaagcagaagaagatcttgtggatgttctcatacaatatgaggatgggagcaagaaggatttttccttaactagaaacaagatcaaggccataattctggacatttttgctgctggaggtgagacaacagcaacaaccatagattgggcaatggctgaaatggtaaagaatccaacagtaatgaagaaagcacaatctgaggtgagagaggtatgcaatatgaaagcaagggttgatga

SEQ ID NO: 205047 - DNA, 263 bp, Glycine max
ggaacagcttatgcaatatcgttctgatgttcagaaagtggaggattggctgaagcctaatgcagtgttgggagcatttgaagctagggctgctaagaaggtggttgcttgtgctcaaaatctcagcaagtttaccaatcccgaagaaggtttccaagaactctcagtcgatctagttgaggcagctgttgctcattgccagttaattgttgtttccaaatttattgagaagttgcagcaagatatccctggaaagggagtga

SEQ ID NO: 205048 - DNA, 263 bp, Glycine max
cttctttccagaacaacaccacaacacaaacagagcaaaaaaagctccaccaatggcgggttacagagccgacgacgactacgactacctcttcaaggtggtcctgatcggcgattccggcgtgggcaagtccaacctcctctctcgcttcaccaagaacgagttcaacttggagtccaagtccaccattggcgtcgagttcgccacccgcaccttgaacgtcgattccaaagtcatcaaggcccagatctgggacaccgcag

SEQ ID NO: 205049 - DNA, 260 bp, Glycine max
aaaggattctacccgccgctcgatgggaattgcgcttcaaggcgtctcgtagggctaatccgcctcacgagggtcaccaacggcacgtgcctttggggggccgaggccccctactgctggtctgcaaacggacggcgggcgcacgcgtcgcttctagcccggattctgacttagacgcgttcagtcataatccaacgcacggtagcttcgcgccactggcttttcaaacaagcgcgatgaccaattgtgcgaatcaacgg

SEQ ID NO: 205050 - DNA, 261 bp, Glycine max
gggtttctttccatggattccgattcttggatttccacgcgcatgtcgtcctcttcacgccgctatcattcgcgatctgatctgtacgtggaggagagtgaagggagcgatgatttcagggcggagtttctgtgccctttctgcgccgaggattacgacgtcgtttccctctgttgccacattgacgaccaccaccctatccaagccaaaaacggggtgtgtcccatttgtgggaagaaggtgggattggatctcgttgga

SEQ ID NO: 205051 - DNA, 262 bp, Glycine max
gttgagtgcactgctttgttgttggcggaggagctgaagaacgaacgcagcgagcggcgagtaacgatgtgcggtgacgccacgaactgggacgaagacgcatacagagaaaccattctcaaggagagggaaatccaaacccgaaccgttttccgaaccgcttgggccccaccctacacctctaacctcgacactctcatccttgcctctagcgacggttccgtcgcatcctactccatctcttcctccatcgccgcctcta

SEQ ID NO: 205052 - DNA, 231 bp, Glycine max
gtttcccaagtggctcagctcagaaaagagaaccaacaaatactcacaagcgtcaacatcaccacgcaacagtacttaagcgttgaggctgagaactcggtgcttagggctcaggtgggtgagttgagtcacaggttggagtctctgaacgagatcgttgacgtgttgaatgccaccaccactgtggcgggttttggagcagcagcatcgagcaccttcgttgagccaatg

SEQ ID NO: 205053 - DNA, 256 bp, Glycine max
ctcgagccgcgctgcacgacggtaaccctccaacaacaacacttccgctgcgaaaaatgtctctggtggcgaacgaggatttccagcacattctgcgtgtgctgaacaccaacgtggatgggaagcagaagataatgttcgcaatgacctccatcaagggtattggaaggagattcgccaacatcgcttgctagaaggctgatgttgacatgaacaaaagggctggtgagttgactgctgctagagttggatagtg

SEQ ID NO: 205054 - DNA, 264 bp, Glycine max
ccagctccatgctctgggagttattgaccacccaaaaattgatcttgatgaccctgtagcagatgatttgatggggttttatgagcggatgggtgatacactcgcacatcagtatggtggttctgctgctcacaacaagattttctctgagaggaggggccagtggagagctgcaacacagtctcaggagttttttaggactcttcaacgctattatagcaatgcatacatggatgctatgaaacaggatgcaatcaatgtatt

SEQ ID NO: 205055 - DNA, 262 bp, Glycine max
gtttcttctcaaagttcaagtgtacctgcaaacagtactgaggatgacatggatgattttgatccaagaggaacttctaccaaaacttcagctggaaactctaaccaggttgatctctttggacaagatttaatcggtgacctcatggatgctccaacatctgttcctgtagaaaagccagcaactagtaatgtaccagaggttgatctttttgcagatgcagcatttgtatcagcagaacctcatgtggacaaaggagcca

SEQ ID NO: 205056 - DNA, 261 bp, Glycine max
gaagaatgttgcagtcaaggatctcaagcgtggttttgttgcatccaactccaaggatgaccctgccaaggaagctgccaacttcacatctcaagtcattatcatgaaccaccctggccagattggaaatggatacgcaccggtgcttgattgccacacttctcacattgctgtcaagttttctgaaatcttgaccaagattgacaggcgatctggtaaggagcttgagaaggagcccaaatttttgaagaatggtgatgc

SEQ ID NO: 205057 - DNA, 260 bp, Glycine max
gaagaaggtgaagcatttggtggaactaccaggcgcaaagagcaaactgtctctgtggaaggctgatcttgctgaagagggaagctttgatgaagccattaaaggctgcaccggagttttccacgtggccacccccatggactttgaatccaaagaccctgagaatgaagtgataaagcctacaataaatggggtactagacatcatgaaagcatgcttgaaggcaaaaactgtgcgaaggctaatattcacgtcctcag

SEQ ID NO: 205058 - DNA, 262 bp, Glycine max
ctcgagccgctcccttagctagtttttaccaatggctgctgcggttcagtgctgcagtctcttctccatccaccaagtctacctctctcccaagcaggacctccatcattaccccagagagagttgtattcaagaaggcttcattgcaatacacgagatgtttgtagcagtggaagggtagtttccatcagagctcaagtcaccactgaggctccagccaaggttgaaaaagagtccaagaaacaggatgaaggtgtggttg

SEQ ID NO: 205059 - DNA, 260 bp, Glycine max
gaaagaaagaaatggaggagaaagaagagctcaaaaagtctaaggttattaaaatagactctcaaaaatcatgggaacaccacatctcttatgctaccaatcaaaagtaccctattgtagttcatttctctgctttctggtgtgtcccttctttagttatgaatcctttctttcaagaattggcctccacttatgaagatgttttgtttctgacgttggatgtggatgaggttaaggaaattgcctccaagatggaaatc

SEQ ID NO: 205060 - DNA, 259 bp, Glycine max
ccaaaagcatcatcaccaaatcccaaacgcatatcataacaacgggatcggaggctaatctattaggcgctgttctctcgtcttctacaaaattttctgttcgatctcaaccaaggttgttccttccaccgccatgagtttcatcttcggaaagcgaaaaacacccgcagagcttctgcgggaaaataagaggatgctggacaaatcaatcagagaaattgagcgcgagcggcaaggcttgcaaacgcaagagaagaaa

SEQ ID NO: 205061 - DNA, 261 bp, Glycine max
gaatacaataacatagcatagagtgagaagtgagaagagaaaaatggcaatctccatacccagtagacaacttttcatagatggagagtggaaagtccctcttctcaacaatcggtttcctatcatcaaccccgctactgaagacatcatagggcatattccagccgctactaaggaagatgttgaccttgcggtggatgctgctaaaagagccttttcccataacaaaggcaaagattggtctacagctcctggctctgt

SEQ ID NO: 205062 - DNA, 247 bp, Glycine max
cagctttgactttggtggatactaaatactagtcaaaatggtgaacttcacagctggagagctgcgtcgcattatggactataagcataatatccgtaatatgtctgtcattgctcatgttgatcacggaaaatcaaccctgactgattctcttgtggctgctgctggtattattgctcaagaagttgcaggtgatgtccgtatgactgatacccgtgcagatgaagctgagcgtggtattacaatc

SEQ ID NO: 205063 - DNA, 246 bp, Glycine max
aagctttcaagagacaaactgctttgaaaaatgggatccaaggttgttgcatccgttgcccttctcctctccatcaacattcttttcatttccatggttagctccagcagccactacgatccacagccccaaccttctcacgtcactgctcttattacacgacctagttgtccggatctgagtatttgcctcaatattttaggcgggtctctaggaaccgtggatgattgttgtgccctcatcggt

SEQ ID NO: 205064 - DNA, 281 bp, Glycine max
attcggctcgagggagaacccgacaccatatgaagatgatacttctaaagctgaaagtcaacccaacattctgaatctatttctcaattagttaacttaaaccaaactgcatatgaaaatccaaatctgggaaccttgagtcatgaagaatatttcagagtcttggatgagatgacaaccaagagctactcgtatgacactgataaggacacaaacatctatgatggaaacacctcatgtcttgcaacatgcacaaccagcgacatagatgatgatctttg

SEQ ID NO: 205065 - DNA, 217 bp, Glycine max
ggcaaatgctagctcatatacaatatctgaggagacagatcccgagaagctgattccaagaggaactcgccttacactgtatcttaagagggacgacaaaggttttgctcatccagagcggattgagaagcttgtgaaaaactattcacaatttgtttcattcccaatatacacatggcaggaaaagggatacaccaaagaagtggaagttgatgaa

SEQ ID NO: 205066 - DNA, 269 bp, Glycine max
cacaaatcttagccgccattgatttttcctcttccatttctcttactttctcagcctttttcgattacccatttggttatttcgccctaatggctcttgctccatccaaagtttccaccttttctggtttttctcccaaacccagtgttgggggtgctcagaaaaacccaacttgctctgtttctctgagctttttgaatgagaaacttggaagcagaaaccttagggtttgtgcctcaacggtgcctctcactggggtgatttttgaa

SEQ ID NO: 205067 - DNA, 257 bp, Glycine max
aaccaaagaagtgcaattcgaagataggcttttcaccttacagatttgggatacagctggccaagaaagattccaaagccttggagttgctttctatcgtggtgctgattgttgtgttcttgtatatgatgttaattcgatgaaatcatttgacaaccttaataactggagggaggaatttctgattcaagcaagtccttctgatccagagaattttccttttgttgtcataggaaacaaaatagatattgatggtg

SEQ ID NO: 205068 - DNA, 265 bp, Glycine max
gccgattttaaaagatgagtaagcttcagagtgatgctttgcgtgaagccatttcaggaatcatggccgattccaaggagaagaatcgcaaatttgtggagaccatcgaactccaaatcgggttgaaaaactacgatccacagaaggacaagcgtttcagtggctctgtcaagctgccccacatccctcgccccaagatgaaaatttgcatgcttggtgatgctcagcatgttgaagaggcggagaagataggactggactggat

SEQ ID NO: 205069 - DNA, 265 bp, Glycine max
aagccctatacaaccaaaccctaacacacacccatttgattcagtttccatggctagcctcaaggttgcatttttggctgcagtgctctgcatggttgtggtgagtgcacccatggcacatgcagctatcacgtgcgggcaggtgacgaatagtctgatcaattgcatcggttacctccagaacggaggaacgccgccgtcgggatgctgcaacggagtgaagagcctcaatgccgccgccaagaccaccgccgaccgccagacg

SEQ ID NO: 205070 - DNA, 264 bp, Glycine max
gtgagccatcaagtcatccatataacaaccttggtccaagagatgtgtgcacccaaagtcaccaagagcttgcccttgaagccgcaagacaagggattgtgcttcttaaaaacaaaggtccttctttgcctctctccactaggcgtggccgcactgtagctgttattgggcccaattctaatgtcactttcacaatgattggcaactatgctggtattgcttgtggatacactagtcccttacaaggaatagggacatacacca

SEQ ID NO: 205071 - DNA, 276 bp, Glycine max
ctactcactcacacacacacacactctctttccatgggtccgtttcgtaaacccttccttgcatttctctcggttgttctatttctgggtctctatgaggcagcagcagaacagactcagactcacaagagtacttacattgtacacgtggcgaaatcggagatgcccgagagcttcgagcaccacgctgtgtggtatgagtcgtcactgaagaccgtgtctgactcggcggagatgatttacacctacgacaacgccatccacggctacgcgacg

SEQ ID NO: 205072 - DNA, 269 bp, Glycine max
ctcgagccgtgggaattgcgcttcaaggcgtctcgtagggctaatccgcctcacgagggtcaccaacggcacgtgcctttggggggccgaggccccctactgctggtcggcaaacggacggcgggcgcacgcgtcgcttctagcccggattctgacttagaggcgttcagtcataatccaacgcacggtagcttcgcaccactggcttttcaaccaagcgcgatgaccaattgtgcgaatcaacggttcctctcgtactaggttgaatt

SEQ ID NO: 205073 - DNA, 267 bp, Glycine max
gtgaggctcacaatctaaaaagggaatccgtgaaacaacaatacaaatcggtaaagcaacggacttcaaatttcaacaactatgcgatgggttctcatgtgatgcaatatggtgataccaacatcacagctgaaaagctttatttataccaaggttttgatcctgccactgtgaacttccctccacaaaacggcaggctagaaactaaaatggaagttgttaaccaaagagatgcagaacttttgttcatgtggcaaatgtatcaga

SEQ ID NO: 205074 - DNA, 264 bp, Glycine max
ctcattaattgcaagaatggcacttcgttgcttggtgatgtccctttctgttctcttcactcttggtcttgcgagagaaagccatgccagagacgaagatttttggcatgctgtttggccaaacactcccattccaagttcattgcgagatcttctaaagcctggccctgcaagtgttgaaatcgatgatcaccctatgcaaattgaagaaacacagtacccgaaaaccttcttctataaagaagaccttcatccaggcaaaac

SEQ ID NO: 205075 - DNA, 262 bp, Glycine max
ttgtttgttgttgtaactcgttcttcttcttttgttgttctgtgtttgtgtttgttttttctctcacctgaaaatgtcttgctgcggtggtaactgtggttgcggaagctcctgcaagtgcggcaacggctgcggaggctgcaagatgtacccagacttgagctacactgagtcaaccaccaccgagaccttggtcatgggagtggcacctgttaaggctcaatttgagggtgctgaaatgggtgtgccgctaagaacgatg

SEQ ID NO: 205076 - DNA, 263 bp, Glycine max
gtaacccagagctccttcgcctcatcgatagtttaaagtctcgttttgacaatggtgagggttagtgtgttgaatgatgctctgaagagcatgtacaacgccgagaagcgcgggaagcgccaggtcatgattaggccatcctccaaggtcatcataaaattcctattggtcatgcagaagcacgggtacattggtgagttcgagtatgttgatgaccacagggctgggaaaatcgtggttgaattgaatgggcggctgaataa

SEQ ID NO: 205077 - DNA, 263 bp, Glycine max
gcacctctcaaagctgaaaaaatatttgctgtatttttctttcttattactacgacccactatctcaaaaaccaaaacacatgctttccctcatcatcacctttacatctctcactcttgctcattccttgtccgtactcacaaagcacttgaagtgaaagaagcagaaaaatgataacgttaaccgacttttaccatgtgatgaccgcaatggtgccactgtacgtggccatgatactcgcctacggctccgtgaaatggtg

SEQ ID NO: 205078 - DNA, 277 bp, Glycine max
cattcggctcgagaattgccacttatgtcaataatgtttttgaggatgtcagaaatggatgggttctattagaagttcttgacaaggtttcacctgcatctgtcaattggaagttggccacaaagcctcctataaagatgccgtttcggaaagttgagaactgcaaccaagttataaagattgggaaggaactaaacttttcattagtgaatgttgctggtaatgatattgtacaagggaataagaagctcttattggcatttttgtggcagctgat

SEQ ID NO: 205079 - DNA, 276 bp, Glycine max
ctcgagccgtgggaattgcgcttcaaggcgtctcgtagggctaatccgcctcacgagggtcaccaacggcacgtgcctttggggggccgaggcccccaactgctggtcggcaaacggacggcgggcgcacgcgtcgcttctagcccggattctgacttagaggcgttcagtcataatccaacgcacggtagcttcgcgacactggcttttcaaccaagcgcgatgaccaattgtgcgaatcaacggttcctctcgtactaggttgaattactattg

SEQ ID NO: 205080 - DNA, 272 bp, Glycine max
tctctctctctctctctcgtgcggacacaatttttgatggggatatacctcagcactcccaaaacagagaaggcctctgaagatggtgagaacgacaagcttcgcttcggtttgtcttccatgcagggctggcgtgcttccatggaagatgctcatgcagctcatccatatttggacgagtctacgtcatactttggtgtttatgacggccatggaggcaaagcagtttcaaaattctgtgccaagtatctacaccagcaggtgcttaagag

SEQ ID NO: 205081 - DNA, 255 bp, Glycine max
gaactttttcctgttaaggggaaaccatgaatgtgcttctataaaccggatatatggattttatgatgagtgcaagagaaggttcaatgtaaggttatggaagacatttacagactgcttcaattgcctgcctgtggcagcccgtgttgatgaaattatttaagtcgggagaaagtcctccatgcatacacaaaatcttttggatcagattagaaatttacagcggcccacagatgttcctgatacaggtttgct

SEQ ID NO: 205082 - DNA, 266 bp, Glycine max
cgccaagatggttctcaatcagtcgctggttccttcaccgccaccggcggtgactttctcagccgtcgtcttcttcttcggccgcggtagatccgtcatcggcggtggttgatgacgcgccacgcgaggcggaggaggttaaggacccgcagcagaaccggtgtatgacgtgcaggcggcgcgtggggctcacagggttcaagtgtcggtgcgggatgatgctgtgcgggacacaccgttatccggagcagcacgcgtacgagttc

SEQ ID NO: 205083 - DNA, 264 bp, Glycine max
atttcattcattcttaatctttgtgaaaaataatgttcatcgagaattttaaggttgagtgtcctaatgtgaagtacaccgagactgagattcagtccgtgtacaactacgaaaccaccgaacttgttcacgagaacaggaatggcacctatcagtggattgtcaaacccaaatctgtcaaatacgaatttaaaaccaacatccatgttcctaaattaggggtaatgcttgtgggttggggtggaaacaacggctcaaccctca

SEQ ID NO: 205084 - DNA, 260 bp, Glycine max
attctccgtcgccacgacaacaatggctccaaagaaaggtgcgaaaggtggagttgtagcagcaaagaagaaggttcaggagaaggtaacgaaccctttgttcgagaagcgtccgaagcagttcgggatcggaggcgcgctgccgccgaagcgggacctgacgcgcttcgtgaagtggccgaagaacgtccaaatccaacgcaagaagcgcatcctcaagcagaggctcaaggtccctccggctctcaaccagttcacca

SEQ ID NO: 205085 - DNA, 264 bp, Glycine max
  unsure (1)..(264): unsure at all n locations
aacaagtagttgagaactaaganggagaagcaaatggcttcctcaatgatctcttccccagctgttaccactgttcaaccgtgccggtgccggcatggttgctccattcactggcctcaagtccatggctggcttccccaccaggaagaccaacaatgacattacctccattgctagcaacggtggaagagtgcaatgcatgcaggtgtggccaccagttggcaagaagaantttgagactctttcctacctgccagaccttga

SEQ ID NO: 205086 - DNA, 261 bp, Glycine max
agatgcatcaagagacaagcttgaaaagcttgccttcaaagatcaagctagttcattctggcgacttgcaaaaatgaactctcctgaatggctttatgccttaattggttctgtaggatctgttgtttgtggatcccttagtgcattttttgcttatgtccttagtgctgtcctcagtgtctattacaatccaaatcacagacacatgatccaagaaattgaaaagtactgctacttgttgattggactatcatcagctgc

SEQ ID NO: 205087 - DNA, 261 bp, Glycine max
caagaactcttcatattttgtcgagtggattcccaacaatgtcaagtcgagcgtgtgtgacattgctcctagagggctctccatggcgtccacattcattggaaactcgacctcgattcaggagatgttcaggagggtgagtgagcagttcacggccatgtttaggaggaaggctttcttgcattggtacaccggggaaggcatggacgagatggagttcacagaggcagagagcaacatgaacgaccttgtttcagagta

SEQ ID NO: 205088 - DNA, 272 bp, Glycine max
atatttttgtgtaaatagaggaaaaactcgatggaaaaatggtggtttaattctatgttgtttaataggaagttagaatacaggtgtgaattaagtaaatcaatggatagtcttggtcctattgaaaataccagtctaagggaagaccctaaaattttaaccgatatagaaaaaaaaattcacagggatttggattatttagaaatggaaggttttttttctaagcgatctgaatactgtttctaagaatgatgatgatcattacatgtatg

SEQ ID NO: 205089 - DNA, 259 bp, Glycine max
gtagacttgaagaattactctacatatccagaattatcttctgctctagaaaagatgttcagctgttttactataagtaaatgtggatctcatggaattctgggcagggagatgctgaatgaaaccaagctgaaggaccttcttcatggatcagaatatgttcttacatatgaggacaaagatggcgattggatgcttgtgggtgatgttccctgggagatgtttattgaaacatgcaagaggctgaggatcatgaaga

SEQ ID NO: 205090 - DNA, 243 bp, Glycine max
ctcaaaccctcggttccgatgagccaccccaaaccaccgattcccacaccccctccctcctccacctctccttcaaccaggactccggttgcttcgccgccgccaccgaccgcggcttccgcatctataactgcgaccccttccgcgagatcttccgccacgacttcggctccggcggcggtggcgtcgccctcgtccacatgctcttccgctgcaacatcctcgccttcgtcggcgcctcct

SEQ ID NO: 205091 - DNA, 258 bp, Glycine max
gtttcttctcaaagttcaagtgtacctgcaaacagtactgaggatgacatggatgattttgatccaagaggaacttctaccaaaacttcagctggaaactctaaccaggttgatctctttggacaagatttaatcggtgacctcatggatgctccaacatctgttcctgtagaaaagccagcaactagtaatgtaccagaggttgatctttttgcagatgcagcatttgtatcagcagaacctcatgtggacaaagga

SEQ ID NO: 205092 - DNA, 261 bp, Glycine max
  unsure (1)..(261): unsure at all n locations
tctcgagccgattcggctcgacggctcgagtcttaagcctgaaaacttgctggtcaccaagggtgtcatcaagattgctgattttagcctagcccgggagatcagttcacaaccaccatatactgagtatgtctccacacggtggtatnctgctcctgaagtcctgcttcagtcccatctatatatctctaaagttgatatgtgggcaatgggtgctataatggctgagttgttcactctgcgtcctctattccctggttc

SEQ ID NO: 205093 - DNA, 260 bp, Glycine max
caaacacaattcagcttctcctccgaggaaacgctgctgacatggcgttcgggtcttccgaggatgtctcaggtgtcaaattgcttgtccttctggcggttatgtacggactcttctcggcgctgacatactccgtcatccacatgaagttcgtgaagcctctcgggaatgacgcgccgctcgatcgattctctgaagccagaaccgtacaacacgttcgaattttgtcgcaagagctcgacggtcgtcaagaagggcgt

SEQ ID NO: 205094 - DNA, 268 bp, Glycine max
tgtggactcgtgctgaaaagcgtacctttctgagacagcgagttgaggcaaggcttgcagcacttctgatggaaagtaaggagtattcagaagctttgactcttctctctggcttggtcaaagaagttaggagattagatgacaagcttcttcttgttgacatagatttgctggaaagcaagctgcacttctcattaagaaaccttccaaaggcaaaagctgcactcacggctgcaagaaccgctgcaaatgctatatatgtgccccc

SEQ ID NO: 205095 - DNA, 242 bp, Glycine max
acaaggaccgattgaggtttaggcaacatctcgccaatgagatggcccactatgctgctgactgttgggatgccgagattgagtgctcctatggttggattgagtgtgttggcattgccgatagatctgcatatgatttgcgtgctcactcggataaaagtggtgttccgttagtggctcatgaaaaatttgcagaacctaaggaagtggagaaattggttataactccagtaaagaaagag

SEQ ID NO: 205096 - DNA, 262 bp, Glycine max
agacgaccctgctgccccaaagagatcaacaaaggtgcttggtctcgagaagaagatgaaaccctctccaaatatgtttccatccatggagaaggaaaatggcagaaggttgcccaaaatgcagggttaaagcgatgtggaaagagttgcagacaaagatggttgaattatctcaagcccggtataaaaagagggccacatctctgtggatgaagaggatatgattataagacttcatcgtcttctggtaacagatgggcat

SEQ ID NO: 205097 - DNA, 263 bp, Glycine max
tctcgagccgattcggctcgagtggcactctgctggaacttacgacatgagctcgaagaccggtggtcccttcggaaccataaagcacccctccgaactcgctcacggcgctaacaacggtcttgacatcgctgttaggcttttggagccactcaaagcggagtttcctattttgagctacgccgatttctaccagttggctggcgttgttgccgttgaggtcaccggtggacctgaagttcccttccatcctggaagagagg

SEQ ID NO: 205098 - DNA, 258 bp, Glycine max
ctcgagccgattcggctcgagtggcactctgctggaacttacgacgtgagctcgaagaccggtggtcccttcggaaccataacgcacccctccgaactcgctcacggcgctaacaacggtcttgacatcgctgttaggcttttggagccactcaaagcggagtttcctattttgagctacgccgatttctaccagttggctggcgttgttgccgtagaggtcaccggtggacctgaagttcccttccatcctggaaga

SEQ ID NO: 205099 - DNA, 217 bp, Glycine max
gggctgcaagaggacttgaatacttgcatgagaaggctgatccacatattattcaccgggacatcaagtcaagtaatgtgctaatctttgatgatgatgttgctaaaattgcagattttgatttatcaaatcaggctcccgacatggctgcacgtcttcattctactcgtgtccttggaacctttggttatcatgctccggaatatgcaatgactgg

SEQ ID NO: 205100 - DNA, 259 bp, Glycine max
gttgattttccgatcagaaaatctgaatcatgtcgtggcaagcgtacgtggatgatcacctgctgtgtgaaatcgaaggtaaccaccacactcacgccgctattatcggccacgacggcagcgtttgggctcagagcgccaacttccctcagttcaaagctgaggaaataactgctatcatgaatgactttaacgagcctggatcacttgctccaactggattgtttctcgctgccaccaaatacatggtcatccaggg

SEQ ID NO: 205101 - DNA, 258 bp, Glycine max
gtgccaccatgcatggccctaagccccgaagccatgctttcaaagtcaataagaaggttcggcgtctagggctgaagattgctttgtcagctcgtgcagcagaaggaaagcttcttgtgtttgaggatctggaggttcccacacataaaaccaagaacattgtgaattattacagtcaaatggaggataccaagaaactgctgcttgtagatggcactatagatgaaaagttaaaattatctacgcaaaatctacact

SEQ ID NO: 205102 - DNA, 259 bp, Glycine max
catccactcacctcattgaagtggttaaaactgctgcacagactggttctcaggttgtgatggaagctgttaataagcctcggaatattacatataaaggattaactgacttagtgactgagacagataaaatgagtgaagctgccatattagaagtggtgaaaaagaattttgaagatcatcttattcttggggaagaaggaggagttataggagatgcagcatctgattatctctggtgcattgatcctctagatgg

SEQ ID NO: 205103 - DNA, 270 bp, Glycine max
aggaaacagatagaagctttgggttgagaaatttcaggtacattgagaccatcaaagaagctttggaaagggaatgcccaggagttgtttcctgtgctgatatcctcgttctctctgccagagatggcattgtttcgctaggaggtctccatatccctcttaaaacaggaagaagggatggtagaaggagcagagccgatgtggtagagcagttcctcccagaccacaatgaatccatttctgcagttcttgacaagtttggtgccatgg

SEQ ID NO: 205104 - DNA, 253 bp, Glycine max
gtctgtgagtctttcttagctgatatggcggttgatcgctcccttacgaggtgctgtagcctcgtactgtggtcgtggatgttgctgaggatgatgatggcgcagggtgcagccgcgagggccaaccggaaggagtgggactcggtcataaagttaccggctgaaccggtcgatgctgactcggatcatgaagtgggaacacgatgggcggttcttgtggctggttcaaacggctatggaaactagaggcatc

SEQ ID NO: 205105 - DNA, 251 bp, Glycine max
cgctggccctggcaactgaaccaccaactgatcacctcatggatcgaactccagtgggtcgaagagaacctctcataacaaatattatgtggaggaatttgctgatacaggcaatgtaccaagtgtctgtcttgcttgtactcaatttccgaggcataagcatactgggtctgagccatgacagaaaagaccatgcaatcaaagtgaagaatactttgatattcaatgcatttgttctctgtcaaatcttt

SEQ ID NO: 205106 - DNA, 265 bp, Glycine max
aattaattaaattcctcgtggaatattgaagaagccatgtctacagctgggcaggtcatcaagtgcagagctgcggtggcatgggaagcagggaagccactgtcaatagaaaccatagaagtggcaccaccccagaaaggtgaagtgcgtttgaggatcctcttcaactccctttgccgtagtgatgtttattggtgggatgctaaggaccagactcctctgtttcctcgtatcttaggccacgaagcttcagggattgtggaga

SEQ ID NO: 205107 - DNA, 235 bp, Glycine max
ccaatatagcccaagccctatacaaccaaaccctaacacacacccatttgattcagtttccatggctagcctcaaggttgcatttttggctgcagtgctctgcatggttgtggtgagtgcacccatggcacatgcagctatcacgtgcgggcaggtgacgaatagcctgatcaattgcatcggttacctcaagaacggaggaacgccgccgtcgggatgctgcaacggagtgaag

SEQ ID NO: 205108 - DNA, 236 bp, Glycine max
ctttttggctgtgttatgcttctcagcactgtcactgagtcgttgacttgcggaggataatggacttgttatgaacttctacaaggaatcatgccctcaggctgaagacatcatcaaagaacaagtcaagctctctacaagcgccaaagaacactgcttctctggtcagcacatctccagactggatgtctaagttgagctcactgagtggactccacaaagagtgtctagaggat

SEQ ID NO: 205109 - DNA, 258 bp, Glycine max
tctctctctagggtttgatcagactcaagggtttaagccatgggaaaaaggaaggcaaaggcaaagcctcctccaaagaagcgaatggataagctcgataccgtcttcagctgccctttctgcaatcatggcagcagcgtcgaatgccgccttgacatgaagaacgtgataggggaagctatttgcgggatatgccaagagagctttagcactaccatcacagctttatcagagccaatagacatatacagtgagtgg

SEQ ID NO: 205110 - DNA, 255 bp, Glycine max
cccaacacaaatcttagccgccattgatttttcctcttccatttctcttactttctcagcctttttcgattacccatttggttatttcgccctaatggctcttgctccatccaaagtttccaccttttctggtttttctcccaaacccagtgttgggggtgctcagaaaaacccaacttgctctgtttctctgagctttttgaatgagaaacttggaagcagaaaccttagggtttgtgcctcaacggtgcctct

SEQ ID NO: 205111 - DNA, 252 bp, Glycine max
aaaaaatcaagaacaatggcttatgctaggcttgctcctatggctgtcttcttgcttgccacttccaccataatgttcccaacgaagatagaagcagcagattgtaatggtgcatgttcacctttcgagatgccaccgtgccgctcacgtgattgtcgttgtgtccctataggactagttgctggtttctgcatacatccaactggactttcatctgttgcgaagatgatcgacgaacatcccaacttatgt

SEQ ID NO: 205112 - DNA, 248 bp, Glycine max; identical to SEQ ID NO: 150991

SEQ ID NO: 205113 - DNA, 251 bp, Glycine max
tctgcttcgtgttgtagctagctcctcgaaaatgctggcacgcctcgccgcgagtcgcttcaacgagatccgtcagattttccgtcagccttctagggctttctcgaccgctctgaactaccaccttgacacaccggacaacaaccctaaacttccatgggaattcaccgaggccaatcaagcaaaggttaaggagattttgtctcactatccatccaactataagcaatctgctacaattcctcttttgg

SEQ ID NO: 205114 - DNA, 246 bp, Glycine max
gaggttttgatgcaacgctgtcactgagaaaggatctctatctacgaaggagcggaataaaacccttctctctgagaatggcttcagatcggaaacttcacacttttgaggaggtggcaaagcacaaccagaccaaggattgctggctcatcatttctggcaaggtgtatgatgtcacccctttcatggaggatcatcccggaggtgatgaggttttgttatctgcaacagggaaagatgcaacca

SEQ ID NO: 205115 - DNA, 241 bp, Glycine max
cttctctttcaagggtagatttctgaagaagaagaaaacccttacaaatctaactccgattgaaatttgaaagcgttaaaccctaaacccccaaattgattcattccgctcgttggtgtcatggcttcttcatcgagtagcggattgacgttcaagctgcaccctctggtgatcgtgaacatctccgaccactacaccagggtcaagtctcagatgaacccaacccacgcgccaccgcaca

SEQ ID NO: 205116 - DNA, 240 bp, Glycine max
atccctcttaaaacaggaagaagggatggtagaaggagcagagccgatgtggtagagcagttcctcccagaccacaatgaatccatttctgcagttcttgacaagtttggtgccatgggaattgacacccccggcgtagttgcattgcttggagcacacagtgttggtcgaacccattgtgtgaagttggtgcaccgtttgtacccagagattgatccagctctgaaccctgaccacgtc

SEQ ID NO: 205117 - DNA, 293 bp, Glycine max
gcatgcacgattcacgcagtatgtaagctccggcatctcggatcctctctccgagcttcactctcttttcgcctctgctaaagggagaaaaatggggttctcctcctttctgggtcgtgttctctttgcctccctcttcatcctctccgcatggcagatgtttaatgaatttgatgccaatggtggacccatctcgaaagagttgattcccaaactcagtgtggtgaagaataatttatcctctaaattgggggtagcgctaccagatattgatgcccggcaattcattgcta

SEQ ID NO: 205118 - DNA, 249 bp, Glycine max
ccatggtgatcaacgattgcagtgagtatgatgttgatggggctgaagaagagccgaacttcgatgttgaggaccggaagcccgaccatcttcatccatcaaaccttgggatggagagaatgatgggaaggatgccaattcagcaaccttctcatcccatgaagggagatgttgtcacaaacctagatttcatccggaagaggaagatttctagtgacttcaacatgatgatggatcagaaaatctaca

SEQ ID NO: 205119 - DNA, 249 bp, Glycine max
cgcctttctctctcttctttttactctctctctgtctctctctacgctttctcgttcgagatccctcaagggatccactaactgaaggagaaatggggttgacattcaccaagcttttcagccggcttttcgccaagaaggaaatgcgaattctgatggtgggtctcgatgcagctggtaagaccaccatcctgtacaagctcaaacttggagagatcgttaccacaattcccaccattgggttcaatg

SEQ ID NO: 205120 - DNA, 249 bp, Glycine max
cgggacgtggcggctgacggcaacgttagggagtccggagacgtcggcgggggccccggaaagagttatcttttctgtttaacagcctgcccaccctggaaacggctcagccggaggtagggtccagcggctggaagagcaccgcacgtcgcgtggtgtccggtgcgcccccggcggcccttgaaaatccggaggaccgagtgcctcccacgcccggtcgtactcataaccgcatcaggtctccaaggt

SEQ ID NO: 205121 - DNA, 243 bp, Glycine max
gctacgacgacttcgtcttccatgatgcgcaattaccctctcatttccgccatcgttgctttcgccatcgcacaattcatcaagtttttcaccgcctggtttaaggaaaaaagatgggatcccaagcaacttgttggatctggtggaatgccttcatcccattcggctactgtcactgctcttgccgcggcaatcgggttccatgaaggctttggaggacctctttttgctactgctttggtt

SEQ ID NO: 205122 - DNA, 241 bp, Glycine max
ctcaaatgggatgtcatggttgatctgttcttctatagagaaccagaggaggctaaacaacaagaggaggaggaagctccggcggttgattatgccatcacggatttcaatgcaggtgctattgctgctgatggccagtggcctggtacaattgatcaatcatggagtgatgcagttcctcaacctattccagcagtacctggtgtcaactggggggcacctgcagaagcacctgctgctg

SEQ ID NO: 205123 - DNA, 235 bp, Glycine max
ctttctcctaaaacatctcaatgggttcttcttctattccaccttcgacaccaaccatgaccatggctgcgatcgtgctcctgttcacggtcttagccctttcctccgccctagacatgtcgataatctcgtacgacagcgcccacgctgacaatgccgccacgttgcgcaccgaggaggagctgatgtccatgtacgagcaatggctcgtgaagcacgggaaggtgtacaacgc

SEQ ID NO: 205124 - DNA, 250 bp, Glycine max
tcgggactttcactagccgcagcagcctcaggaggagaataaggatgtctcacaggaagttcgagcacccaaggcacgggtcactgggatttctccccaggaagcgtgctgctcgtcacaggggaaaagtgaaggcattccccaaggatgacccatccaaggcacccaagctcactgcattcttgggttacaaggctggtatgactcacattgttagagaggtcgagaagccaggatcaaagcttcacaa

SEQ ID NO: 205125 - DNA, 249 bp, Glycine max
  unsure (1)..(249): unsure at all n locations
caattgtctgaccttgagttgcaggttgaaaaactgaaagtggaaaatgcaaccctatacaagcagttcacggatgctagccaacattttcgtgaggcagatacgaataaccgagtgctgaaatcagatgtagaagctttgagagccaaggtgaagttagcagaggatatggtgactaggagctctngtactacgttaaacaatcagcttcttcagacacaacatcatcaaatgagcacaccccagcaa

SEQ ID NO: 205126 - DNA, 247 bp, Glycine max
aaaagaacaaggagacaggttgggataccccaattcatgtagatgctgccagtggggggtttattgccccatttctatatcctgatttagagtgggacttccgtttgccgttggtgaaaagcatcaatgttagtggccacaagtatggtcttgtctaccctggtgttggttgggttgtctggaggagcaaagatgacttgccagatgaacttgtttttcacataaattatcttggatctgatcagcc

SEQ ID NO: 205127 - DNA, 238 bp, Glycine max
attgttcgttcgacccttttacttagtattccctgtttccggtattcgctcccttttttctgcattctggttttacttagatctctgtcccgcaccagatctggtgcagggtgagagggttgggttcattaattttgtatcaatcttccttctgagcggtaggcgtggggataccagagtcttttcgggaagcaagagagggttctctccgttttcaatagatctctcactgtcttct

SEQ ID NO: 205128 - DNA, 244 bp, Glycine max
ctcgagccgctgcaatatgccccatggcattgttagaaagaatgagtgaccttcttagatggcaacaaaaagacccttcattcgttttgccatggaagcaagattcccttccaattttcgctgagtctagtcctttgtaccacacacagaagagaccggagcctctaaccccagaagaagagagtgatcttcaacttgccaaccagagactccttgaactttgccaaaaatgtgaggaagccaa

SEQ ID NO: 205129 - DNA, 241 bp, Glycine max
gtttcaaagatgcctcgtggaacgcttgaagttgttctgatcagcgccaaaggaatcgatgacaatgattttctctccagcattgatccttatgtgattctcacatacagggcacaggagaaaaagagcactgtgcaagaagatgctggatccaagccacaatggaatgagagctttcttttcactgtctctgacagtgcatctgaacttaatctaaagataatggataaagacaacttta

SEQ ID NO: 205130 - DNA, 241 bp, Glycine max
actcgagccgaatcggctcgaggtttgagagggtactggcatccaaaaaatgggttctaaaactaatgcttcgggccatagagcacgaaggccgctgtcaatatttgctgtgcttggtctttgctgtttcttttatcttttgggagcatggcaaagaagtggatctgggaagggagataaccttgcattgaaagttaataacctgatgactgactgcactgttttacccaatttgagtttt

SEQ ID NO: 205131 - DNA, 247 bp, Glycine max
cttgttgcataacaccaaagaactacaaatagttctcattgcatagccatagatggaatttcccaacgaagcaataccagaagggtgttcacagaagaaaacgggaagggggaaaatagaaatcaagcggatcgagaacacaacgaataggcaagttaccttctgcaaacgccgtaacgggttgctcaagaaggcttatgaattgtctgttctgtgtgatgctgaggttgctcttgttgtcttctca

SEQ ID NO: 205132 - DNA, 248 bp, Glycine max; identical to SEQ ID NO: 161698

SEQ ID NO: 205133 - DNA, 245 bp, Glycine max
gttgagaactaagaaggagaagcaaatggcttcctcaatgatctcttccccagctgttaccactgtccaaccgtgccggtgccggcatggttgctccattcactggcctcaagtccatggctggcttccccaccagaaagaccaacaatgacattacctccattgctagcaacggtggaagagtgcaatgcatgcaggtgtggccaccagttggcaagaagaagtttgagactctttcctacctg

SEQ ID NO: 205134 - DNA, 206 bp, Glycine max
cttctttttactctctctctgtctctctctacgctttctcgttcgagatccctcaagggatccactaactgaaggagaaatggggttgacattcaccaagcttttcagccggcttttcgccaagaaggaaatgcgaattctgatggtgggtctcgatgcagctggtaagaccaccatcctgtacaagctcaaacttggagagatcg

SEQ ID NO: 205135 - DNA, 239 bp, Glycine max
gaaagagagagagagagagagaaactgagagaaattcgcaaaccctaatttcggaaagatcggcgatggctgcctccaaggatcgcgagaacttcgtctacatcgccaagctcgccgaacaggccgagcgatacgaagagatggtggaatcaatgaagaacgttgcgaatctcgacgttgaactgactgtggaggagcggaatttactttctgttgggtacaagaatgtgattggtgct

SEQ ID NO: 205136 - DNA, 239 bp, Glycine max
gtgcagtcaaattcttgctgcagcacttacttctattatgcctcttcaactatctacctttttctcaaggtaagcagaactggaatgaagggtacccgtttataagaagagcaagttcattgggttataatgggaaaagtggtgggtatgattatataatagtggggggtggaacagcagggtgtccattggctgcaacactgtcaaagaagttcaaagttctggtgcttgagagagga

SEQ ID NO: 205137 - DNA, 237 bp, Glycine max
gggttcgcagctcgtctatcaaaagaggaggcaaactcaattgctcagaaacctggtgtggtgtctgttttccctgaccccattctgaagctccacactacacgttcatgggatttcctcaaaagccaaactcgtgtcaatatcgacaccaaaccaaatacgctgtccggatcttctttttcttcatcagacgtcattcttggcgtcttagacacaggcatatggccagaggcggcg

SEQ ID NO: 205138 - DNA, 234 bp, Glycine max
gccctcactatatcgcatactctcaggaacttccatggctactccacatgtttcagggcttgcatgcagtgtcaaaagaaaaaaccccacttggagtgcctccgcaatcaaatctgccatcatgacttcagcaattcaaaatgacaatttgaagggtcccataacaacggattcagggttgatagccacaccttatgactatggagcaggggcaattacaacatctgaaccatt

SEQ ID NO: 205139 - DNA, 245 bp, Glycine max
tcgatcgggtatcacatctgaattgggactgctcctattctgggtactattctgagaataattatggctcaacccacaacaagaataggccttgctggattggctgttatgggccaaaatctggcactcaatattgctgagaaaggctttcccatttctgtttacaaccgaaccacttccaaggttgatgagacagtagaacgagcaaaacaagaaggaaatcttccagtttatggctaccatga

SEQ ID NO: 205140 - DNA, 263 bp, Glycine max
tgaattcggctcgatgaatggctcccaagggtttaatctttttggctgtgttatgcttctcagcactgtcactgagtcgttgtcttgcggaggataatggacttgttatgaacttctacaaggaatcatgccctcaggctgaagacatcatcaaagaacaagtcaagcttctctacaagcgccacaagaacactgctttctcctggctcagaaacatcttccatgactgtgctgttcagagttgtgatgcttcactgttgctg

SEQ ID NO: 205141 - DNA, 244 bp, Glycine max
agaagtggttccaagggaccgccgatgctgtaagacaatttatatgggtttttgaggtaaaaacttatgatgttgtgtattttgctgaaaatactagtttgatacacggagtagtgaacgtgggcatgtatcatcttccaggatgccaagaacaagaatgttgagcatatattgatactttctggtgatcatctttaccgaatggactacatgaactttgtacagagacatgttgacacaaatg

SEQ ID NO: 205142 - DNA, 212 bp, Glycine max
caccaaacccaagtgattatgtgttccttcaaaacatggttcaatttgttcatcattttccttgcctcggctgcaacacccatcttctcattaacagattccccaaatcaactctccacaaactttctagaaattgccaagaaacctgaagtatttgattggatggtgaaaatcagaaggaagattcatgagaatccagaattgggttatga

SEQ ID NO: 205143 - DNA, 237 bp, Glycine max
cgagagcagtgctattgttggctatgtgtgtgcttccggccatggttgtggccattcgcccagcaaagaaccctttttgcgtgaagggtcgcgtctactgtgacccttgccgtgctggttttgagacctcagcaaccacctacattgccggtgctgagattatgttgcaatgcaagagcagggttagcaacgaggttgtgtacaccaagaaggggtacactgactcaactggagcat

SEQ ID NO: 205144 - DNA, 223 bp, Glycine max
gtgattgttgtgactcgttcttcttcgtcgttatcttcttcttttgttgtttgtgtgtttgttttttctctcacctgaaaatgtcttgctgcggtggtaactgtggttgcggaagcgcctgcaagtgcggcaacggctgcggaggctgcaagatgtacccagacttgagctacaccgagtcaaccaccaccgagaccttggtcatgggagtggcaccagttaa

SEQ ID NO: 205145 - DNA, 238 bp, Glycine max
cccaaggctgctgagtgttgcagaggcatgtctgagtcggacacgaagaagaagaagcagcagcagcgcacgatcggaaagcatgaaggagaagaagggttgatgatcaagccccagagcttcactccccccatcgacacctcccaatggcccattctcctcaaaaactacgagcgcctcaacgtccgcaccggccactacacccccattccctccggctactcccccctgaagcgcc

SEQ ID NO: 205146 - DNA, 239 bp, Glycine max
ctcttcttcgtctcaaacctcttcgttccttcgattcattccatttcttccaaaatggccaaagacccagttcgcgttctcgtcactggagccgcagggcaaattggatatgctcttgtccctatgattgctaggggagtgatgctgggtcctgaccagcccgtgatcctccacatgcttgacattcctccagcagcagagtcgttgaatggggttaaaatggaattggtggatgctgc

SEQ ID NO: 205147 - DNA, 246 bp, Glycine max
ctttttggctgtgttatgcttctcagcactgtcactgagtcgttgtcttgcggaggataatggacttgttatgaacttctacaaggaatcatgccctcaggctgaagacatcatcaaagaacaagtcaagcttctctacaagcgccacaagaacactgctttctcctggctcagagacatcttccatgactgtgctgttcagagttgtgatgcttcactgttgctggactccacaagaaggagctt

SEQ ID NO: 205148 - DNA, 243 bp, Glycine max
aagagaatggctcccaagggtttaatctttttggctgtgttatgcttctcagcactgtcactgagtcgttgtcttgcggaggataatggacttgttatgaacttctacaaggaatcatgccctcaggctgaagacatcatcaaagaacaagtcaagcttctctacaagcgccacaagaacagtgctttctcctggctcagaaacatcttccatgactgtgctgttcagagttgtgatgcttca

SEQ ID NO: 205149 - DNA, 214 bp, Glycine max
ggctcccaagggtttaatctttttggctgtgttatgcttctcagcactgtcactgagtcgttgtcttgcggaggataatggacttgttatgaacttctacaaggaatcatgccctcaggctgaagacatcatcaaagaacaagtcaagcttctctacaagcgccacaagaacactgctttctcctggctcagaaacatcttccatgactgtgct

SEQ ID NO: 205150 - DNA, 241 bp, Glycine max
ctcgagccgctctcttcaaaaaccaatatggtcgcattcgcgtcctccagaggttcaaccaacgctccccacaacttcagaatctccgagactaccgcattttggagttcaactccaaacccaacaccctccttctccccaaccatgctgacgctgattacctcatcgttatccttaacgggactgccattctttccttggtgaacaacgacgacagagactcctacagacttcaatctgg

SEQ ID NO: 205151 - DNA, 236 bp, Glycine max
tgcagataccaggcgtttgagttgattcatgccagatgggcaatgcttggtgctgctggattcatcattcctgaggcctttaacaaatacggagctaactgtggtcctgaggctgtttggttcaaggtttgcaagatctgtcaattgtcacccctgttaaattcattaatacactgattttatgactcaacaaattaagtatttagaaatacctgataacacaattctaagctaag

SEQ ID NO: 205152 - DNA, 238 bp, Glycine max
cgaagagaatggctcccaagggtttaatctttttggctgtgttatgcttctcagcactgtcactgagtcgttgtcttgcggaggataatggacttgttatgaacttctacaaggaatcatgccctcaggctgaagacatcatcaaagaacaagtcaagcttctctacaagcgccacaagaacactgctttctcctggctcagaaacatcttccatgactgtgctgttcagagttgtga

SEQ ID NO: 205153 - DNA, 237 bp, Glycine max
cttctttccagaacaacaccacaacacaaacagagcaaaaaaagctccaccaatggcgggttacagagccgacgacgactacgactacctcttcaaggtggtcctgatcggcgattccggcgtgggcaagtccaacctcctctctcgcttcaccaagaacgagttcaacttggagtccaagtccaccattggcgtcgagttcgccacccgcaccttgaacgtcgattccaaagtcat

SEQ ID NO: 205154 - DNA, 250 bp, Glycine max
gtgtccaacagtagtttatacatattttcgaagttcctagtaatttgtatggtgatgatatcttctttggttgattcaagttatgccttgtgtgattttgaggcaatcttcaatttcggggattcaaattcggatacagggggtttcatacaagctttccagcacaacctggtccctatggaatgacttactgcaaaaaaccagtggggcgtgcttctgatggaaggctcattgttgattttctcgctca

SEQ ID NO: 205155 - DNA, 266 bp, Glycine max
gagagattgtgaagtagaaatcggtgcaagaaattctccactttatctaaaaaaattcggtgagtttgtgaagacaaaaaatcactagctactcaaaaatggccacagtaggaaggaacgttgcagctcctttgctgtttctaacttgatcatgtattttattgttcttggctttgctagttggtgcctcaacaggttcatcaatggccaaacttaccaccctagttttggtggagatggtgcaaccagtttttcttaccttctcc

SEQ ID NO: 205156 - DNA, 132 bp, Glycine max
gttggcacagacacaaggattggaccgaaattcctcaatgctagtgttggttttggtggatcctgcttccagaaggacatcttgaaccttgtctacatctgtgaatgtaatggccttccagaggtggctgag

SEQ ID NO: 205157 - DNA, 237 bp, Glycine max
ctcgcaagcaaaaagagagaatcccaggcgaggagaaagatggaggggaaggagcaggatgtgtcgttgggagcgaacaagttccccgagagacagccgattgggacggcggcgcagagccaagacgacggcaaggactacaggagccggcgccggcgccgctggttgacccgacggagtttacgtcatggtcgttttacagagcagggataccaaagtttgtggccacttttctgt

SEQ ID NO: 205158 - DNA, 264 bp, Glycine max
tggatgattcttaccctctctatgactcttcaacctgccctcacattcgtaaggaatttgattgcttgaaatatggtcgtcctgatcaacaatacctcaaatacagatggcaacccaacgaatgcgacttaccaagatttgtgggaaagatttcttgacaaaacttaaggggaagcagatcatgtttataggagattcagtcagtctcaaccaatggcaatcacttatatgcttgcttcgttcttctgtgccctcaactgaaat

SEQ ID NO: 205159 - DNA, 261 bp, Glycine max
atcgattaaagacttgcttccaagatggttctgctagagaagctctgggatgacgttgttgctggccctcaacctgagcgtggccttggcaagctcagaaaactcaccaccctcaaaactattgatgaaggagacagtagaagctgcagaagacgttgtcgatgccgtcgacaccgacaaccccgatgactcccacgactcaaacgacaccgggatccgcgcgtaaagctgacaacgtttggaggagcgtcttccatcctg

SEQ ID NO: 205160 - DNA, 260 bp, Glycine max
acggccccaggatttgtgagatgtacagggattacatcgatccaagcttcaagtgggctaacttcaatcttgaagagcaagccaaggtgataattgctgcacggagcaacaacgagatggatgcatccaaactgaagaacggttccctgagcttctttccatcaaggaatcactgatcaagtatgtctttgagccaaacaagaaaactgcttaaatatattaaagcggtttcatgttttagacatcacagattatgcatt

SEQ ID NO: 205161 - DNA, 265 bp, Glycine max
gagaatggctcccaagggtttaatctttttggctgtgttatgcttctcagcactgtcactgagtcgttgtcttgcggaggataatggacttgttatgaacttctacaaggaatcatgccctcaggctgaagacatcatcaaaaacaagtcaagcttctctacaagcgccacaagaacactgctttctcctggctcagaaacatcttccatgactgtgctgttcagagttgtgatgcttcactgttgctggactccacaagaagga

SEQ ID NO: 205162 - DNA, 256 bp, Glycine max
gtgggttcttgacccactgcggctggaactctattctggagagcgtggtgaacggtgtgcctttcatagcctggcctctgttcgcggacagaggaccaacgcctttatgctcacgcatgacgtcaaggtggcgctgaggcccacgttgcagagagtggcttggtggagagacaggagatagccagcctagtcaagtgcctcatggaaggtgaacaagggaagaggcttcgttaccgaatcaaggatatcaaggagg

SEQ ID NO: 205163 - DNA, 264 bp, Glycine max
ctcgagccgggcttatggtggatacctaggcacccagagacgaggaagggcgtagtaagcgacgaaatgcttcggggagttgaaaataagcgtagatccggggattcccgatataggtcaacctttcgaactgctgctgaaccacgggcaggcaagagacaacctggtgaactgaaacatcttagtagccagaggaaaagaaagcaaaagcgattcccgtagtagcgccgacgaattgggatcagcctaaccgtgaaaacgggg

SEQ ID NO: 205164 - DNA, 242 bp, Glycine max
atggtttcagtgttacaaatgctgggtgctgtggggtaggaaggaacaatggtcaaattacatgtcttccaatgcaaacaccatgccaaaacaggagagagtacttgttttgggatgcttttcatcctactgaagctggcatgttgttgtggctcagagagcttacagtgctcaatctgcatcagatgcttaccctgttgatatccaacgcttagctcagatatgatctctggacaatcaac

SEQ ID NO: 205165 - DNA, 250 bp, Glycine max
ctcgagccgaatcggctcgagcggctcgagcgaagagaatggctaccaagggtttaatctttttggctgtgttatgcttcacagcactgtcactgagtcgttgtcttgcggaggataatggacttgttatgaacttctacaggaatcatgccctcaggctgaagacatcatcaaagaacaagtcaagcttctctaaaagcgccacaagaacactgctttctcctggctcagaaacatcttccatgactgt

SEQ ID NO: 205166 - DNA, 265 bp, Glycine max
gcgaagagaatggctcccaagggtttaatctttttggctgtgttatgcttctcagcactgtcactgagtcgttgtcttgcggaggataatggacttgttatgaacttctacaaggaatcatgccctcaggctgaagacatatcaaagaacaagtcaagcttctctacaagcgccacaagaacactgctttctcctggctcagaaacatcttccatgactgtgctgttcagagttgtgatgcttcactgttgctggactccacaag

SEQ ID NO: 205167 - DNA, 266 bp, Glycine max
ttccttttcatcaggtttattccttgtcttttggttcaattttgctgaatggagagtgcaagaatcagcaaatggttaaatcttctagtttgtgtactgctattgcttaaggcagaaggatctcttgttccattgactttgtgaagaatgcagaatcaaaaggagctgtttgtttggatggaagctccccagcataccactttgacaacggatttgaagaagggattaagaactggattgttcacattgagggaagaggatggtgc

SEQ ID NO: 205168 - DNA, 263 bp, Glycine max
aaagacgccataagtaagagcaagtcgaaaagttcctctctctctcacacacacacatcccagccatgagcctcttcggtataggcagaaaccagagaacattccgcccgaaaaaaagtactccttctggaagtaagggagacaacttcgaaaacatattgatgccacgttaggtagtggaaatctgagggaagcagtaaagctacctcctggggaggatttagatgagtggctagctgtcaacactgttgatttcttcaatc

SEQ ID NO: 205169 - DNA, 265 bp, Glycine max
cccatttctcaatgtgctgcactgatcatggacaagaagagcaggaggaaagaagaatccaatgttgaaatgaggagaaacccatcaatgcttcggaagctgcaagagaacaagctcagggaagcacttgaggaagcttctgaaatggctcactctccaaatctcaagacatagaccagcatgactctgctgccaaccaggatgatggccttgggagatcccgatcgctcacccggatccatgcccagcgcgaattccttcgcgc

SEQ ID NO: 205170 - DNA, 225 bp, Glycine max
gcgaagagaatggctcccaagggtttaatctttttggctgtgttatgcttctcagcactgtcactgagtcgttgtcttgcggaggataatggacttgttatgaacttctacaaggaatcatgccctcaggctgaagacacatcaaagaacaagtcaagcttctctacaagcgccacaagagcactgctttctcctggctcagaaacatcttccatgactgtgctg

SEQ ID NO: 205171 - DNA, 243 bp, Glycine max
accgcaccgcaccgcacgtaagcacccacggagatgaagaagggagtccatccacagaagcaatggatatcctacgttacacaaacgggtaggttgatgcatgtgatgatgacaaagatacaccctgttgggaaggttttcacttccgggctaagcgtcaaatggccgagagtttaggacagattgctaagttcagacgccgctttgggctagaaaatccagagggcaatgaaaaatgacagc

SEQ ID NO: 205172 - DNA, 265 bp, Glycine max
cggctcgagcaaactcacacactttgtactctccgtccttccttcttcgatccagatctctctccttctccctcaaatggcttcccttctgcaatgttccatgcccctcgtctctctttccaatcgagctctggtacccgtaccaggatctccaacccaagttcagtttccctttcaattaagggaagaagtttcccatccgttacattgcagcccagagggcgtcggtttcagcttagatgtgcggcaaaaccagagacagtga

SEQ ID NO: 205173 - DNA, 265 bp, Glycine max
catatgcttgtctcaaagattaagccatgcatgtgtaagtatgaactaattcagactgtgaaactgcgaatggctcattaaatcagttatagtttgtttgatggtatctactactcggataaccgtagtaattctagactaatacgtgcaacaaaccccgacttctggaagggatgcatttattagattaaaggtcaacacaggctctgcctgttgctttgatgatccatgataactcgtcggatcgcacggcctttgtgccggc

SEQ ID NO: 205174 - DNA, 258 bp, Glycine max
ggaaaaatcaaatcaacatgctgagagtgggcgcaaagatggttttggaaacgacgttgtttggggttagggttccggcgaggctgtaccacgagagggttgtggatcactacgacaacccccggaacgttggatcgttgacaagaaggacccgagcgtggggacgggtttggtgggggccccggcgtgcggcgatgtgatgaagctccagattaaggtcgacgacaaaccggaaaaatcgtcgatgctcgattcaaa

SEQ ID NO: 205175 - DNA, 264 bp, Glycine max
ctcgtttacacatctctccaacctttcactttcgtttctcagttttattcgaatccctctctcaatctcctttccaaatggccagcgttgaggttgcacagcaaacaccaacaacagttccagaaaatgaaacaaccgagtaagcaagacccaggaaacaaccccagtcactgaggctcctgcaacagaacaaccagcagctgaggttcctgcaacagaacaaccagccgctgaggctcctgccccagaatcaaaccacgaagc

SEQ ID NO: 205176 - DNA, 209 bp, Glycine max
caaaaacctcgagcacatcctcaagctccgcttcgacaactaccccaaaggccccacgtggcagtccgcgttccacgatttgctcggcgaaggcatcttcaactccgacggcgacacgtggctgttccaaagtaaaaccccgcactggaattcaccaggcgcactctgcgccaagccatggcgcgttgggtgaaccgagccataaagca

SEQ ID NO: 205177 - DNA, 207 bp, Glycine max
ataaagcacagaacagttgaagtgaatggcataaaaatgcatgttgcagagaaaggagagggtccagtggtgttgttcctccacggcttccctgagctctggtactcatggcgccatcagattctctctctcagctccctcggctaccgcgcgtcgctcccgatctccgtggctacggtgacaccgaagcactaccttcaatcagca

SEQ ID NO: 205178 - DNA, 260 bp, Glycine max
caagactccaaaatattaatctgtgcttccactttgaggttgagcagcaggttaatggggtcttcctcaatttctttggttttaatggaactgctggtgtttggagaataaaagcacttgaagaatccggtggctggctgagcggacaactgtagaagacatggatatagcagtccgagcccatctgaatggatggaaatttgatcttctcaatgatgtaaaggtgctttgtgagctgccggaatcatatgaagcttata

SEQ ID NO: 205179 - DNA, 222 bp, Glycine max
tggaacttctaaagaaacattttcaggaatttatctcaggcctcatgtctctaccaataaaactaccaggaactaaactctatcaatctttgcaggctaaaaagaaaatggtgaaattagtgaagagcattatcctagtaagagaagtaatggcttctgcaaagttccaaaagatgtggtggaagtccttcctagtgatgctaatgaaaaattaacggatga

SEQ ID NO: 205180 - DNA, 258 bp, Glycine max
gaatatttgtattctggcataccagagcaagccgaagctccaccagttaccggagtgcctgcaagtgctcaaccttcaaatcctccagctgatactccacaggcagcacaaccagcatctgttccttctagtggactaatgctaatcctttagacctctttccccagggccttcctaatgttgggtctggtgctgctggtgctggttccttagactttcttcgcaacagtcaacagttccaagcttacgcgctatggt

SEQ ID NO: 205181 - DNA, 260 bp, Glycine max
gagaatggctcccaagggtttaatctttttggctgtgttatgcttctcagcactgtcactgagtcgttgtcttgcggaggataatggacttgttatgaacttctacaaggaatcatgccctcaggctgaagacatctcaaagaacaagtcaagcttctctacaagcgccacaagaacactgctttctcctggctcagaaacatcttccatgactgtgctgttcagagttgtgatgcttcactgttgctggactccacaag

SEQ ID NO: 205182 - DNA, 214 bp, Glycine max
ggcgactgagaatcctttcaatagcattttgacgacgctcgaaaagcccggtggtgctggcgagtttggaaagtactttagcttgcctgctctcaacgatcgtagaatcgatagacttccttactctgtgaggatattttggaatctgcaatccggaactgtgatgagtttcaagttaagagtaacgacgttgaaaaatttattgattgggaga

SEQ ID NO: 205183 - DNA, 245 bp, Glycine max
ctctcttctctctccccgcccaaaccctaactccctaccctattccgctttctctcatccatcatgaaaggaggaaagtccaagaccgaatctaagagagccgatgccaaacttgctgtgaataagaagggcgccgcaccaagactaggaaacccgccggaaaggggaaggcagcgaaagatcctaacaagccaaagaggcctccaagtgctttcttcgttgtcatggaggaattcaggaaagtg

SEQ ID NO: 205184 - DNA, 260 bp, Glycine max
cgctgttccaagatgggtgtggctgagaacattcccgatatggaggagggtaccttggagattggaatggaatacagaactgtatctggagttgctggaccattggtcattcttgacaaagttaagggacccaaattcaagagattgttaatattcgtttaggagatggaactactcggcgtggacaagttctagaggttgatggtgaaaaagctgttgttcaggtatttgaaggtacatctggaatcgacaataaattt

SEQ ID NO: 205185 - DNA, 259 bp, Glycine max
ctcagacacgcggagaggccgttgatagtgttcggaaaaggagcggagtatgcacgtgcggagcactgttaacgaagctggtgaattcgactgggattccgtttctcccaactccgatgggtaaaggaattttaccagtaatcacgagcttgcggctactgcagcaaggtcactagcgattgggaagtgtgacgtggcgcttgttgttggagcgagactcaactggcttctacacttcggtgagccaccaaaatggtcg

SEQ ID NO: 205186 - DNA, 257 bp, Glycine max
gaagaagtggttccaagggaccgccgatgctgtaagacaatttatatgggtttttgaggatgccaagaacaagaatgttgagcatatattgatactttctggtgatcatctttaccgaatggactacatgaactttgtcagagacatgttgacacaaatgctgatatcacagtttcatgtgtacccatggatgacagtcgggcatcagactatggactgatgaacattgacaaaacaggacggattatacagtttgc

SEQ ID NO: 205187 - DNA, 250 bp, Glycine max
ggtttctcttcctcccttggagaaaaagaagagccaccgctgcgacgccgttcgtgcatttttgaggtgccgctgtcatgtatgggcgtggtggaccaaggaggagtgataactccaaatattatgatattctcggatttccaaaaatgccagtgaagatgaaatcaagaaggcctatagaaaggcggctatgaagaaccatccagataagggaggagatcctgaaaagtttaaggagttaggtcaagca

SEQ ID NO: 205188 - DNA, 236 bp, Glycine max
gacacactcgtgaatcgtgatttagcatttaccacaccaaaatcaatctgcggagtcagaaagccatggatccctacaagaatcggccatcaagcgccttcaattctcccttctggactacaaattccggtgctccctctggaacaataactcatcgctgactgttggatctagaggtccaattctgctggaggattaccatctggtggagaagcttgcaacttttgacagggaac

SEQ ID NO: 205189 - DNA, 236 bp, Glycine max
gtttgtgggtgttcctcagacaaatactctagatctccttgaagcataaggtgggttaatgctttgctttctttgaattattgtcaactctaatagtcaaatttgcatttcatggttcccacctttttttcctatactttcgttttgatttatgtattaatagactggaatatcccagttaggataacgaccttgtttgcttgagatatatattggaagtatattattgttcaaaa

SEQ ID NO: 205190 - DNA, 267 bp, Glycine max
  unsure (1)..(267): unsure at all n locations
gcaccaattgcagagtgcctggtgaaagaaatagcaaagccagccaaagatgctgttacagaggttgtaagatctggggatctggtttcttatactgctgaagaaggtgtaaggattctgggagagggaaagttcttgtgtcggatagctttcctgggaantgaaaggacgaaatattgcctcacattccangattccacttggagtgattttaggccattccacctttnnnctatcccgtcaatcttgctgttnccaaaanttgcc

SEQ ID NO: 205191 - DNA, 254 bp, Glycine max
ctcgagccgattcggctcgagcggctcgagcaaccgcatcgccaatggcgacacttctccaatcctttgctccaaacccatttcagaattcctcactagttctgggacatcaggaggtgagaggaagctgatgccacaattgaagaagagctagggagaaggagtttgctctacagtctcttgatgccagtgatgtcccagttcgtccccggtttagaaaagggcaaaggatgtacctaatgttcataagatcc

SEQ ID NO: 205192 - DNA, 262 bp, Glycine max
ccaccccttcttccttttcatcaggtttattccttttcttttggttcaattttgctgaatggagagtgcaagaatcagcaaatggttaaatcttctagtttgtgtactgctattgcttaaggcagaaggatctcttgtccattgactttggtgaagaatgcagaatcaaaaggagctgtttgtttggatggaagccccccagcataccactttgacaacggatttgaagtagggattaagaactggattgttcacattgagg

SEQ ID NO: 205193 - DNA, 256 bp, Glycine max
ctcttctttattccttttgtaatttcattcattcttaatctttgtgaaaaataatgttcatcgagaattttaaggttgagtgtcctaatgtgaagtacaccgagactgagattcagtccgtgtacaactacgaaaccacgaacttgttcacgagaacaggaatggcacctatcagtggattgtcagacccagatctgtcaaatacgaatttaaaaccaacatccatgttcctaaattaggggtaatgcctgtgggt

SEQ ID NO: 205194 - DNA, 264 bp, Glycine max
gggaccaactctccttgaggctcttgaccaaatcaatgagcccaagaggccctcagacaagccactcaggcttccattgcaggatgtctacaaaattggtggtattggtaccgtgccagtgggacgtgttgagactggttcgtgaagcccggtatggtggcgacttttggtcccactgggctgacaactgaggttaagtctgttgagatgcaccatgaggctctcacagaggctcttccaggtgaccatgttggctttaatgtg

SEQ ID NO: 205195 - DNA, 271 bp, Glycine max
gagaaagagaagagatggaagaagatggcaagagagacaacactgattcacccaccaattcgcaacaaacagtttctgatgatgatgaaatagactacacaaccaaaccagagttttatgacccagatcttgatgataacgatgaaaagtggattgataaatatttgcatggacatgactctgatgctgtgcttagctgccctgcttgcttcaccaccctctgcctagaatgccaaaggcatgaaaaatatttgacccagtatagggcagt

SEQ ID NO: 205196 - DNA, 269 bp, Glycine max
agcgaatccctctctctatctctcacacacactttctctctctctctctctcacccagatcttgtagcaatggcgagcgctcccactccacgcgaagagttcgtgtacatggcgaagctggcggagcaggccgagcgctacgaggagatggtggagttcatggagaaggtctccgcctccgccgagagcgaggagctgaccgtggaggagcgtaacctcctctccgtcgcctacaagaacgtgatcggcgctcgccgcgcctcctggcg

SEQ ID NO: 205197 - DNA, 268 bp, Glycine max
caaaaccactcgtcgaccgcaaaagagaagaaaacacaaatgctgagaatcgctgctagcgcgaagacaattgttcgaacggggtcgtttgaggcgccaccattggggattagggttctgcctcggctctaccacgagagggtggttgaccactacgataacccccgcaacgttggatccttcgacaagaacgaccccaccgtcggaacgggtcttgtcggagcacccgcgtgtggtgacgtcatgaaactccagattaaggttgatg

SEQ ID NO: 205198 - DNA, 270 bp, Glycine max
gcactatagtaaaaaaggacattcattcatctatggctacccttattgctcccagcaaccactctccccaagaagatgctgaagctctcagaaaggcttttgaaggatggggaactgatgatcacactgtcatagtgattttgggtcatagaactgtgtatcagaggcagcaaatcagaagagtttatgaggaaatttaccaggaggatcttgtgaagcgcctagagtctgagatcaaaggagactctgaggaagccgtgtcaccgatgg

SEQ ID NO: 205199 - DNA, 271 bp, Glycine max
tcggctcgagctcgagccgccaatatagcccaagccctatacaactcaaccctaacacacacccgtttgattcagtttccatggctagcctcaaggttgcatttttggctgcagtgctctgcatggttgtggtgagtgcacccatggcacatgcagctatcacgtgcgggcaggtgacgaatagcctgatcaattgcatcggttacctccagaacggaggaacgccgccgtcgggatgctgcaacggagtgaagagcctcaatgccgccgc

SEQ ID NO: 205200 - DNA, 272 bp, Glycine max
ctttgttttcaattccttatctcaataagactctttctccttctactataactctcctctgtttactctgtttttttcacaaaacaacatggctgcatacagagaacccatgaacatgaacatgagcgacagagccccggtttctccgcagcaaccacactcgccgtggcattctccggttccgtaccttttcggtggtttagcagcgatgttgggtctcatagccttcgctctgttgatccttgcatgttcctattggaagctctccgggt

SEQ ID NO: 205201 - DNA, 276 bp, Glycine max
gaagagaatggctcccaagggtttaacctttctggctgtgttaatatgcgtttcagcactgtcactgagtccttctgttgcgggggaagggcagaataatggccttgttatgaacttctacaaggaatcatgccctcaggctgaagacatcatcacagaacaagtcaagcttctctacaagcgccacaagaccactgctttctcctggctcaggaacatcttccatgactgtgctgttcagagttgtgatgcttcaatgttgctggactccacaag

SEQ ID NO: 205202 - DNA, 281 bp, Glycine max
  unsure (1)..(281): unsure at all n locations
aanaanaggncaaaggaaagtaaataaaatataaagatggcagatgatgaatatagtttctggatgcataaancacgatggatgaaagttgattcaggttgcaaacatggcttttccagacccatccatgtcantttctccacagaggaagatgggaagggggaagattgagatcaagaggattgagancactaccaatcgccaagtcacattctgcaggcgcaggaacggcttgntcaaggaagcatatganttatcgtggctttgtgatgcagaggttg

SEQ ID NO: 205203 - DNA, 274 bp, Glycine max
gagaatggctcccaagggtttaatctttttggctgtgttatgcttctcagcactgtcactgagtcgttgtcatgcggaggataatggacttgttatgaacttctacaaggaatcatgccctcaggctgaagacatcatcaaagaacaagtcaagcttctctacaagcgccacaagaacactgctttctcctggctcagaaacatcttccatgactgtgctgttcagagttgtgatgcttcactgttgctggactccacaagaaggagcttgtct

SEQ ID NO: 205204 - DNA, 270 bp, Glycine max
gtgaatgtctataatgatggaaatgtcttaagcatggtaacaggtagctcccctcatggaacccatgttgctggtatagctgctgcattccacccagaggaacctttgttgaatggagttgctcctggagcacgattaatatcttgtaaaattggggactctcgattaggtgcaatggaaactggaactggtttgactcgggcactgatagctgctgtggagcatcaatgtgcatcttatcaatatgagttatggtgagcctacatcact

SEQ ID NO: 205205 - DNA, 265 bp, Glycine max
gcgatcgaagtttcacatcagccttatccagtttagggtttcggttccttaccctacctttgacgtatcgaaaccttaaatttgggattaggtctgagcaatctggttggtagaacctttggtcttagagagtcaagttttatgtctggattagacgatcaaattcctactgccttcgatccttttgctgatgcaaatgctgatgactcgggtgctgggtcaaaggagtatgtgcatattcgcgttcagcagcgaaatggtagga

SEQ ID NO: 205206 - DNA, 264 bp, Glycine max
ctttcctcttctttctttctctcactttccgccaccttccttttactctgctcctaaaacccttcgattttgtgcctctgattggatctgcagctcgaaaattttccaatttaatggttccaattcgtctattcaagaaagggctaaagctttggaagttgtacagtatattaaggatacctaccatgaagggaaatgttaggtagctgctgttgaggatggcaagttgatggctgatcctgaaactggggaattctggggttt

SEQ ID NO: 205207 - DNA, 269 bp, Glycine max
cacaaatggatgattctggaagtaaaactaaactgttgaatccatggatgctccacttccagaaactcgctctcgaactcaagtgccctctctgtttgagtttgttcaagaggccggtgttacttccatgcaaccacttgttatgcaattcatgtttggctgattgcataacggctgggcctggatgtgctgtttgtaaggcaacgtatgctcaaacagatgttaggcatgtgccttttgtggagaacgtggtggcaatatatagaagc

SEQ ID NO: 205208 - DNA, 271 bp, Glycine max
cttgcttccaagatggttctgctagagaagctctgggatgacgtagttgctggccctcaacctgagcgtggccttggcaagctcagaaaactcaccaccctcaaaactattgatgaaggagacattagcaagctgcagaagacgttgtcgatgccgtcgacaccgacaaccccgatgactcccacgactccaacgacaccgggatccgcgcgtaaagctgacaacgtttggaggagcgtcttccatcctgggagcaactccgccacaaaga

SEQ ID NO: 205209 - DNA, 276 bp, Glycine max
cgacattcattcatctatggctacccttattgctcccagcaaccactctccccaagaagacgctgaggctctcagaaaggcttttgaaggatgggggactgatgagaaaactgtcatagtaatattgggtcatagaactgtttatcagaggcagcaaatcagaagagtctatgaggaaattttccaggaggatcttgtgaaacgcctagagtctgagatcaaaggagactttgagaaagccgtgtaccgatggatactagaacctgcagatcgtga

SEQ ID NO: 205210 - DNA, 278 bp, Glycine max
atcagctacaatctttgaaccttggatggtgtgataatgttggcgatgttggagtgactactttagcatatgggtgtcctgatcttaggatagttgacttgtgtggctgtgtccgtataacagatgacagtgtgattgctttggcgactagatgcccccatctgaggtccctaggactgtactactgcaagaacatcacagatagagcaatgtattccttggcacacagcaaggtgaacaacaggatgtggggaactgtgaaaggaggaggaaatgat

SEQ ID NO: 205211 - DNA, 281 bp, Glycine max
tgtgaattaagtaaatcaatggatagtcttggtcctattgaaaataccagtctaagggaagaccctaaaattttaaccgatatagaaaaaaaaattcacagggatttggattatttagaaatggaaggttttttttctagcgatctgaatactgtttctaagaatgatgatgatcattacatgtatgatactcaattaagttttaacaataatattactagtttcattgatagttgcattgagagtttcaatttaggtgatattgacaaatacaatgatat

SEQ ID NO: 205212 - DNA, 277 bp, Glycine max
  unsure (1)..(277): unsure at all n locations
aacttctggctacttcctantccaaccgcacttctgctccgcaattatcatgggcaaggtcaaggatcggaatcaacggatttggaagaattggccgtttggtagccagagtggctctgcagagagacgatgttgaactcgttgccgttaacgnccctttcatcaccaccgattacatgacatacatgtttaaatacgacagtgttcatggacactggangcatcacgatgtcaccgttaaggacgaggaagacccttctcttcggtgacaagccag

SEQ ID NO: 205213 - DNA, 269 bp, Glycine max
gctgaatctctgaaagattacgaggaggattttgaaaatcctgaaaagaagcccagaaggaacaagtgcgctttcgcatgtgctattttggcttcaatgacttccatcctactaggttacgatattggagtgatgagtggagcagcactgtacatacaaagagatctcaaggtatcggacgtgcaaatcgaaatcctgaacggtatcataaacctctactctcccgtcggttctttcatcgccggcagaacctccgactggataggtcg

SEQ ID NO: 205214 - DNA, 267 bp, Glycine max
ctcgagccgcggaccatgtgacggcgttggccttctcggcatcgcataggccttcggtggcatgatctttgtcctcgtctactgcaccgccggcatttctggtggacacatcaaccctgcggtgacttttggcctgttcctggcccgcaaggtgtctctcattcgtgccctgttctacatggtagcgcagtgtttgggtgctatctgcggtgtcgggttggtgaaggccttcatgaagcactcctacaactccctcggcggcggtgc

SEQ ID NO: 205215 - DNA, 267 bp, Glycine max
gctggttattctccatccacctctctccccctccctcttaaatattactaatcatgcgtattcattcttaggtcggagctgaaagattcaattcgggaagggggtattccattcaacagggtttatggcactcatgcttttgagtatccaaggttggacgcaaggttcaatcaagtttttaacacagcaatgatcaatcacaccactatagtgatgaagaaggttctggagtgctacaaaggttttgagaacataaaaatgcttgtg

SEQ ID NO: 205216 - DNA, 268 bp, Glycine max
tgttgttgagtattctaattctaatgaggaacaggggtgtgtgggaagatgcaagcacagcaacagtgcttgtacttgtgctatgttcatcgtatggaattgcagaagtaaagtcacagtcacagaaggtatctggtttgtttgtttttggagattcattggttgaagtaggcaacaataacttcctaaacaccatagcaagggcaaattactttccttacggcatcgacttcggcaggggttccactggccgattttctaatggcaa

SEQ ID NO: 205217 - DNA, 251 bp, Glycine max
tttagcttcttcctcttcacttcgttcttctggcctctacaatgaggcaacgacaaggacaccttcaacgtcgctgatctcacttccgctctcagctgggacaatagagcagaccttgtcaatgctctcaagagcaagatacagagttttgctggacagcattctgatattctagagtctctgtcgcccaatgtcaggaagcgtgtggatgttcttacagagatccagggtcaacatgatgagttagaggc

SEQ ID NO: 205218 - DNA, 268 bp, Glycine max
  unsure (1)..(268): unsure at all n locations
gtgttcagttaagagtttccgcgtgagagtggccatgggaagagctccttgttgtgacaaagcaaacgttaagagagggccatggtctccangagaagatgctacactcaaaaattatgtagagactcatggcactggtggaaattggattgcattgcccaaaaaagctggccttagacggtgtggcaagagttgccggctacggtggctcaattntctgangccagncatcaaacatggaggctttactgaagaagaggacaacatc

SEQ ID NO: 205219 - DNA, 265 bp, Glycine max
gggcaccaccgtgtcaacaagtagaagcagaagctgtttttgttcttcgccgctgacactaatcgtttcttcaatgccttacgagaaggaattcgccgctgcaaaaaaagcagccactctcgctgctcgtctctgcaagaaagtacagaaggctcttctgcaatccgatgtgcactcaaagtcagacaaaagtcctgtcacagtggctgattatggttcacaagcattggtcagctttatacttgagagagaacttccttctgaa

SEQ ID NO: 205220 - DNA, 267 bp, Glycine max
gaaaaaataaaaatcaaagagcataatgtcagggatcattcacaagattggggagacccttcatgtgggagggcacaagaaggaggaggagcataagggtgagcaccatgctggagaatacaaaggggagcaccatggtgaacacagtagtgagtacaaaggagagcatcatggtgaacacaaagctggagagtaccatggtgagcacaagccagagcacaaagaggggttcctagacaaagtcaaggacaagatccatggtgaggg

SEQ ID NO: 205221 - DNA, 266 bp, Glycine max
cctctctccgccatggttctctccaaaaccgcctccgaatccgacgtctctgtccactcaaccttcgcttctcgctatgtcagaacttcgcttcccaggttcaagatggcggaggagtcgataccgaaggaggcagcataccagatcataaacgacgagttgatgttggatgggaacccaaggttgaatttggcatcatttgtgacgacttggatggagccagagtgtgataaactcatcatggctgccattaataagaactatgt

SEQ ID NO: 205222 - DNA, 270 bp, Glycine max
atcaagactcgagtgaacaaaaaaaatatgatgggtacccttaaggtgtccaacagtagtttatacatattttcgaagttcctagtaatttgtatggtgatgatgatatctttggttgattcaagttattccttgtgtgattttgaggcaatcttcaattttggtgattcgaattcagatacgggtgggtttcatacaagctttcctgcacagcctgctccctatggaatgacttacttcaaaaaaccagtggggcgtgcttctgatgga

SEQ ID NO: 205223 - DNA, 272 bp, Glycine max
ctttctccgagaacaaaaaaaaaaacgtgattcgctcttctcttcaagtaaaccacaaaaccaacaaacgagaagaggagtgagagaagatggggttgtcgttcacgaagctgttcagcaggttgtttgcgaagaaggaaatgaggattctgatggtaggtctcgatgctgctggtaagacaaccatcttgtacaagctcaagcttggagaaatcgtcaccaccatccccaccatgggatttaatgttgagactgtggagtacaagaacatc

SEQ ID NO: 205224 - DNA, 279 bp, Glycine max
aaaaaattgaatggccatggaaaataaaaaaattatagagtattgggttgtgtctatactttgcatgcttttgtcgggtcattggatctctgttcaagctgcccctgcaccctctctcatcacacaactccctggctttaacgccaatttcccatccaagcactattccggatatataagtattgatggaaatactgaaagtgggaagaacctgttctactacttcgttagttcagaaagaagtccagagaaggacccagttgtgctatggctgaatgg

SEQ ID NO: 205225 - DNA, 264 bp, Glycine max
aagaaactgtaggattggagggaagttctgttgggcagtggtggctggatatgataggcaaaacattagatgaaggttcaacatttgaacgtattggatccaggcaacttgctggcttggtcattgctgtgtgggttaaaaccaacattagatttcatgttggggatgttgaagtggcagcagttccatgtggcttcggacgtgctattggcaataagggagctgttggtttgagaattagagtgtatgatctgataatgtgct

SEQ ID NO: 205226 - DNA, 264 bp, Glycine max
ggggcttcaaattttcaggttaacgaagtaaagccggtcatattcccccagtcctttgttcagccgaaacctactactcagtctgttaacttggttccatctgttattgatctaaccggactcggagttccaggagatggccagaaaatgatcagtgaccttatgtcaatctatgatacaaattttcaaagcaacaagaacctaagttccagtaaccatgtagctgcagaaaatcccagccttcctcagccaggcattcggcag

SEQ ID NO: 205227 - DNA, 262 bp, Glycine max
tgagtgagtgagcaagagtgaagagcgaagagaatggctcccaagggtttaatctttttggctgtgttatgcttctcagcactgtcactgagtcgttgtcttgcggacgataatggacttgttatgaacttctacaaggaatcatgccctcaggctgaagacatcatcacagaacaagtcaagcttctctacaagcgccacaagaacactgctttctcctggctcagaaacatcttccatgactgtgctgttcagagttgtg

SEQ ID NO: 205228 - DNA, 265 bp, Glycine max
gcagtatgaaactgaggacggaaagaaaaacattgaggcgcagctggagaaactgaagaagtatgctactgtggttcgtgttttggctcacactcagatcaggaaaatgaaagggttgaagcagaagaaagcccatatcatggaaattcaggttaatggtggtagtattgcacaaaaggtggactttgcatacagtttctttgagaaacaggttcctattgatgcagtgtccagaagggtgagatgattgacatcattggtgtga

SEQ ID NO: 205229 - DNA, 264 bp, Glycine max
gacaaccttaataactggagggaggaatttctgattcaagcaagtccttccgatccacagaattttccttttgttgtcataggaaacaaaatagatattgatggtggaaacagcagagtggtgtcagaaaagaaggctcgggcttggtgtgcatcaaaaggaaatattccatattttgagacatctgccaaagaaggtattaatgttgaagaagcattccaatgcatagcaaagaatgccctgaaaagtggagaagaagaagaa

SEQ ID NO: 205230 - DNA, 268 bp, Glycine max
cactgcacaattgccacatgaatcattagttagggtttattctccaagaaaagcaatgagtgcgtccaggttcatcaagtgtgtcactgtgggtgacggtgccgttggcaagacttgcatgctcatctcctacaccagcaacacttttcctacggactacgtgccaactgtctttgacaatttcagtgcaaatgtagttgtggatggaagcactgtgaatcttgggttgtgggatactgctggccaagaagattacaatagattaaga

SEQ ID NO: 205231 - DNA, 276 bp, Glycine max
aaggattctacccgccgctcgatgggaattgcgcttcaaggcgtctcgtagggctaatccgcctcacgagggtcaccaacggcacgtgcctttggggggccgaggccccctactgctggtcggcaaacggacggcgggcgcacgcgtcgcttctagcccggattctgacttagaggcgttcagtcataatccaacgcacggtagcttcgcgccactggcttttcaaccaagcgcgatgaccaattgtgcgaatcaacggttcctctcgtactaggt

SEQ ID NO: 205232 - DNA, 280 bp, Glycine max
acttcccctatggctcgtcactccttgctcttagccctcctcctcttcgccgcagtgaccaccgccgcgatggcggtggccgcgtccgacgccgacgacatcctgatccgtcaggtggtgccagatgttggcgaaccgactaggaggacaacctgctgaacgccgagcaccacttcgcgagcttcaaggccaagttcgccaagacctacgccaccaaggaggagcacgatcatcgcttcggcgtcatcaagtccaacctccgcagagccaggctgcacgc

SEQ ID NO: 205233 - DNA, 266 bp, Glycine max
caatatagcccaagccctatacaaccaaaccctaacacacacccatttgattcagtttccatggctagcctcaaggttgcatttttggctgcagtgctctgcatggttgtggtgagtgcacccatggcacatgcagctatcacgtgcgggcaggtgacgaatagcctgatcaattgcatcggttacctccagaacggaggaacgccgccgtcgggatgctgcaacggagtgaagagcctcaatgccgccgccaagaccaccgccga

SEQ ID NO: 205234 - DNA, 262 bp, Glycine max
agagaatggctcccaagggtttaatctctttggctgtgttatgcatctcagcactgtcactgtgccggtgtgctgcggaggataatggacttgttatgaacttctagaaggaatcatgccctcaggctggagacgtcatcgaagaccgagtcgagcttctctacaagcgccacaagaagactgcgttctcctggctcagaaacatctcccatgaatgtgctgttcagagttgtgatggttcaccgtagctgtactccacaag

SEQ ID NO: 205235 - DNA, 264 bp, Glycine max
attttatccaattgaaattttaaaaatgactgggataaacttaagaattcaattattgaaattgaataagtaaacaatttaattggattggtcgaatggtatcaaaaaaatggagtactaactcccatttcttatttattattgaattaaccgatcaacttgctttgttatcgaacattgctttctgatttcaaaaattttccggacaaaatttgaatctatttttatatgcgaatcaatcctactacttctggtcctgaggtt

SEQ ID NO: 205236 - DNA, 266 bp, Glycine max
ctggctggataagaagatgcaggatattttgggagcttctggttactttttcgagaacgattctgtgaaaaaggattgacatttgcaggctttgaaattgactgatgtgactgtaagtggccatcttgaaggttttcgagcatcaggagagcatttcataggattgagtttcgccactatttcttcagttggcccaaatgcagctataattcattattctccaaaggcagaaacatgtgctgaacttgatccagacagaatttatc

SEQ ID NO: 205237 - DNA, 269 bp, Glycine max
cagttttcaacacagcgaggcatcatgctcgaagctctctgatgaagatgactgccgtaaacagtgcatatgaatggcagtcatacaatgaagagggtgcatcgtccaatgaggatgattccttgacagcatatgcactctgggagcagattaatgtcacccgagattctacagattatttgtggtatatcgcagatgtcaacattgatgcaaatgaaggtttgataaagaatggacaatctcgtgttcttaccgtaatgtcagcaggc

SEQ ID NO: 205238 - DNA, 272 bp, Glycine max
aacactcataacacaaagcacaaagcaaagctcatccttgagttaaaaaatggcagcagcttcttccatggctctctcatccccatccttggctggcaaggccgtgaagctgggcccatcagccccagaagtgggaatggtgagcatgaggaagaccgtcaccaagcaggtctcctcaggaagcccatggtacggcccagaccgagtcaagtacttgggcccattctctggcgagcccccgtcctacctaaccggtgagttcccaggcgact

SEQ ID NO: 205239 - DNA, 273 bp, Glycine max
actcgagccgattcggctcgagaagaaagatgaagctcgagttcgcaaatgtgctacttctgagccttgtccttagctcttcattcttggaaatatcaatggctggttctcctttctgtgactcaaagtgcgcgcagaggtgtgccaaagctggggttcaggacagatgcttgaggttttgcgggatctgctgcgagaagtgcaactgtgtcccatctgggacttacggaaacaaggacgagtgcacttgctacagggacatgaagaactcca

SEQ ID NO: 205240 - DNA, 278 bp, Glycine max
catcgagccgaatcggctcgagaaaaataaaaatccttctttcttcacaatcttcaatcttgaattgatccatggcagccaaaacatctaccaacggcactcattattctcgctctcgccccgagtacattccaaaccgcatccccgacccgcattatgtccgcatcctggacaccacgcttcgcgacggcgagcaagcccccggagcctccatggtttccagccagaagcttgctcgccagctcgcgaacttggcgtcgatgtcatcgaaggaggct

SEQ ID NO: 205241 - DNA, 282 bp, Glycine max
ctcgagccgttagaggggttttctctttgagagaatcgtatcttacaacttttcgtgaccacttttagtgagggaagagaagctaagagagagactccaattagattcaagagagatggccatcagccatgaaacttgggctttcattttcggtcttctaggcaacgtgatctcctttatggtgttccttgctccattaccaactttttaccaaatctacaagaaaaaatcatccgaagggtttcaatcactaccttatgttgttgcactgttcagttcaat

SEQ ID NO: 205242 - DNA, 280 bp, Glycine max
gagtcttccacgttattctctctccgagcttcactctcttttcgcctctgctaaagggagaaaaatggggttctcctcctttctgggtcgtgttctctttgcctccctcttcatcctctccgcatggcagatgtttaatgaatttgatgccaatggtggacccatctcgaaagagttgattcccaaactcagtgtggtgaagaataatttatcctctaaattgggggtagcgctaccagatattgatgcccggcaattcattgctaccatcatatttctt

SEQ ID NO: 205243 - DNA, 273 bp, Glycine max
gaagagaatggctcccaagggtttaatctttttggctgtgttatgcttctcagcactgtcactgagtcgttgtcttgcggaggataatggacttgttatgaacttctacaaggaatcatgccctcaggctgaagacatcatcaaagaacaagtcaagcttctctacaagcgccacaagaacactgctttctcctggctcagaaacatcttccatgactgtgctgttcagagttgtgatgcttcactgttgctggactccacaagaaggagctt

SEQ ID NO: 205244 - DNA, 267 bp, Glycine max
aatcaagctccagaagcgtcttctcagaagaaaatgggaagagggaagattgaaatcaaacggatcgagaacaccaccaataggcaagtcaccttctgcaagcgccgcaacggtttgctgaaaaaagcttatgaattatcagttctgtgtgatgctgaagttgcccttgttgtcttctcaacccgtggccgtttgtatgagtatgccaacaacagtgttagggccactattgagaggtacaagaaggcaaatgctgctgcttcaaac

SEQ ID NO: 205245 - DNA, 263 bp, Glycine max
ctgtggtatttgtatgaggaggtatctcctcaggttgttgatcaggaccaagtaaataaaatacttactgccgttgttcaaggtatgaacgcgtctgaagggaacaatgatgttaggcttgctgctacaagggcattatataacgctcttgggtttgctcaggctaattttggcaatgatatggagcgtgattatatcatgagagttgtttgtgagacaactgtgtgccctgaagtgaaaatacgtcaagcagcctttgaatg

SEQ ID NO: 205246 - DNA, 265 bp, Glycine max
caccaacagccaagactctgacttacctggcccaggagaaaaccctagaatcgagcttcgttcgggacgaggaggtgcgtcccaaggttgcctacaacgaattcagcgacgagatcccagtgatttctcttgccggaatcgacgaggtggatggacgcagaagagagatttgtgagaagatcgtggaggcttgcgagaattggggtatattccaggttgttgatcacggtgtggatcaacaactcgtggccgagatgacccgtct

SEQ ID NO: 205247 - DNA, 257 bp, Glycine max
agatgggaccccaataagagaattcaagaacatggaatcgaaaagagtttcattcccaaaggagcagccaatgaggatatactcaagcctatggaatgctgatgactgggcaacaagaggtggcattgtgaagactgattggagccaagctccattcacagcatcatataggaacttcaatgccaatgcctgtgtccattctggagcatcatcttgcacttccaactctgcctcctccaatgcctggttcaaccaac

SEQ ID NO: 205248 - DNA, 259 bp, Glycine max
cgatacatctttgtacctggctctgctgatcccagtgatagttggaatagctgcaaggttaatatgagcaactgctcgcctgatcaactaagtaaattgcaaggcttcaagagtgaattcgaaagggcattgagtgaggtaggagattctccatctaaaggaatgtttattgactcttgctatgcccactgccaaacagaaccacaggagacatggtttaagactgactctccaaagcttgccaatacaactattgcca

SEQ ID NO: 205249 - DNA, 262 bp, Glycine max
gtacggtggctcccagagttgaaagcttggcgagcagtgggataaagtgtatcccgaaggaatacgtgaggcctgaaaaagagttgaagagcatagggaacgtgttcgaggaggaaaagaaggaagggccagaggttcccacaattgacttgagagagatagattcggaggacgaggttgtccgaggcaagtgtcgccagaagctgaagaaagcggcggaggaatggggtgtgatgaacttggtgaaccatgggatccagga

SEQ ID NO: 205250 - DNA, 268 bp, Glycine max
accactcttaatttctctctgccttgctcatttacacacctctccaacctttcactttcagctttatttgaatccctctctctcctttccaaatggccagcgttgaggttgcacatcaaacaccaacaacagttccagaaaatgaaacaaccgaggtaatcaagacccaggaaacaaccccggaaccagtaccagccactgaggctcctgcaacagaacaagcagcagctgaggttcctgctcaagaagaacaacaagcaactgaggt

SEQ ID NO: 205251 - DNA, 271 bp, Glycine max
caagaagggaaagcacagtttgttttcattgggtgctgatcggaacaaacagggaatagaagagaggagaagatgggtttcataatggaatttgcggagaacttggtattaaagttgatggaagatccgaaggaaagggatcggaggttcagggagcacgtttatagagtgaaggacaggtgcgagaagacgaaggagatgtggagctaccctatgcgaccctatgggttttggacattcgaacgccacaattctcagcttgcttgggatg

SEQ ID NO: 205252 - DNA, 268 bp, Glycine max
ctttcttccaacctctcaagtccaacctacccctttttcttctcacaccaacttcaccgtcttcttcctcgatcatgtctcacttcaagggcaagtaccatgatgagcttattgccaatgctgcttacattggcactcctggaaagggtattcttgctgctgatgagtcaacagggacaattggcaagcgtttggccagcatcagtgtagagaatgttgaatccaacaggcgtgctcttagggagctgcttttcaccgctcccggtgc

SEQ ID NO: 205253 - DNA, 263 bp, Glycine max
caagcttgggagacagagaaagagaaagagaatggacgccattgattctgtgttcgatccgctgagagaattcgcaaaggacagcgtgaggctcgtgaagcgctgccacaaacccgatcgcaaagaattctccaaggttgccgtccgtactgcaattggtttcgtcgtgatgggattcgtcggtttcttcgtgaagctcattttcattccaattaacaacatcattgtcggatctggttaggatgaagggaactacaattgcc

SEQ ID NO: 205254 - DNA, 259 bp, Glycine max
aactgacctcagcggcggcggcggcggcaacagaagaacaaccaccaccacacacaatgggtcgcgtgagaacaaaaacggtgaagaaatcctcccgccaggtgattgagcgttactactcgcgcatgaccctcgacttccacacaaacaaaaagcttctcgaagaagtggccatcatcccttccaagaggctgcggaacaagatcgcgggtttctccacgcatctcatgaagcgcatccagaagggtcccgttcgcgg

SEQ ID NO: 205255 - DNA, 261 bp, Glycine max
tagcagcagaacagagagagcaaaaccctagagcatccatcacaagcagaggaagaagatggtgaagttcctgaagcctaacaaggcagtgatcgtcctgcagggccgctacgccgggcgcaaggcggtgatcgtgaggaccttcgacgagggaaccagggagcgcccctacggccactgcctcgtcgccggaataaagaagtacccaagcaaggtcatcaagaaggactccgcgaagaagaccgcgaagaaatctagggt

SEQ ID NO: 205256 - DNA, 269 bp, Glycine max
gcaaaaggccatataatttttttttatttgaaataatgtccgggatcatccacaagattgaggagaccctccatgtgggagggcacaagaaagaggagcacaaaggagaacaccatggtgagcacaaaggtgaacacaaaggagaacaccatggtgagcacaaaggtgaacacaaaggagaacaacaccatggggagcacaaggagggacttgtggataagatcaaggacaagatccatggtgatggccatgacaagggtgagaaaaag

SEQ ID NO: 205257 - DNA, 262 bp, Glycine max
cgcaacacaacaaaaaaagacaacccagagagcgcgtcttaataaacgctcttctctgaaaacccccatttcttttcttctttcttcttctctttcgcttcttcgatcttcgatcttcgtcgctgaaaatgagagagtgcatttcaatccacatcggccaggccgggattcaggttggaaacgcctgctgggagctttactgcctcgaacacggcattcagcctgatgggcagatgccaagtgacaagaccgttggtggagg

SEQ ID NO: 205258 - DNA, 258 bp, Glycine max
gcttttcattttttttctcccttttcgctaacctcaaagagagttcagtatttatacaaataaaagttttttctttttttatttctggttttcgttttggaatggctgggatttgctgtggagttgttggagaagccgccgagacttcttctcccatcgaacccacctcacgcccttccgcacgccggagtttggaccttttgcccttgaaatacatagctgctgacgtgtcagtcccgccgctggagaacagccgga

SEQ ID NO: 205259 - DNA, 260 bp, Glycine max
aatactctatggcttctgaagtaatagagtaccgatgctttgtaggtgggcttgcttgggccaccgacagcgatgctctcgagaaagccttcactcattatggtgagatcgtcgaatcgaaggttatcatcgatcgtgaaactggaagatcgagagggtttggatatttgaccttcgcctcggagcaggcgatgaaagacgcaatcgaaggaatgaacggtcagaacctcgacggtcgtagtatcacagtgaacgaagca

SEQ ID NO: 205260 - DNA, 256 bp, Glycine max
ctttattttctccttcctcttccttcttcttgtttcatcttccactgcttgtgatcgctgcttgcaccaatccaaggcttcctatttctccaaagcttctgctctttcatctggggcatgtgggtatggctctttggcactagacataagtggtggacaccttgcagctggtgtggcttctctcttcaaagatggagcagtttgtggtgcctgctttcagataagatgcaagaacccaactctatgcagcaaagaa

SEQ ID NO: 205261 - DNA, 261 bp, Glycine max
cttttcttcccaaaaaattgaatggccatggaaaataaaaaaattatagagtattgggttgtgtctatactttgcatgcttttgtcgggtcattggatctctgttcaagctgcccctgcaccctctctcatcacacaactccctggctttaacgccaatttcccatccaagcactattccggatatataagtattgatggaaatactgaaagtgggaagaacctgttctactacttcgttagttcagaaagaagtccagag

SEQ ID NO: 205262 - DNA, 273 bp, Glycine max
atttttcattcgttgtgatcttcctcttcctcgtacacagagtttatcacaggtgagcgactgaaaggtagcaatggcgaacaggaacctggaaaagatggcatccatcgatgcacagcttaggcaattggctcctgccaaagtgagtgaggatgacaaactgattgagtatgatgctcttctgttggatcggttccttgatattcttcaagatttacatggggaggatctgaaggaaacagtccaagaagtatatgaactttcagctgagta

SEQ ID NO: 205263 - DNA, 270 bp, Glycine max
ctcactttcatttctacatccctggctctgttccgtcgatgacgatggcgtttagggtgcgaaaccctgacctccgctttctcattcttctctctctcttgtccatcacttccgccaaggtcttcttcgaggagcgtttcgatgacggatggggaaatcgttgggttaaatcagattggaaaaaagatgagaacctggctggggagtggaaccacacctctggccaatggaatggagacgctaacgacaaaggtattcaaaccagtgagg

SEQ ID NO: 205264 - DNA, 265 bp, Glycine max
ggaaaccaaaggaatttgataacgaatctccatattctatcatgtttggtcctgataagtgtggtgctacaaacaaggtgcacttcattttcaagcataagaatccaaagagtggggagtatgttgaacaccatctcaagtatcctccttctgtcccatctgacaaactaactcatgtatacactgcaattctgaagcccgataatgaattgcaaattttgattgatggtgaggagaagaaaaaggcaaatttcttgtcttctga

SEQ ID NO: 205265 - DNA, 249 bp, Glycine max
  unsure (1)..(249): unsure at all n locations
ctcttctcactgcatcgcttcaggttcttctgaaaagatgtctcgcgtgtatgttggtaacttggattcacgagtcactgagagagatctcgaagacgaattccgcgttttcggagttattcggagtgtttgggttgcacgtagaccacctggtnatgcttttattgactttgatgaccgcagagacgcacaggatgctatccgtgaattggatggcaagaatggttggagggttgagctttctcacaa

SEQ ID NO: 205266 - DNA, 257 bp, Glycine max
agcgggtggtggaaaggtttcgttcaaagtcacactcacctccgatccaaagttacccttcaaagtgtttagcgttccagatgcggcaccttttactgccgttctcaaattcgccgccgaagaattcaaagtcccgccccagaccagcgctatcatcaccaacgatggtgttggcataaatccccagcagagcgcaggcaatgtcttccttaagcatggttcagaactgcgcctgattccgcgtgatagggtcggtg

SEQ ID NO: 205267 - DNA, 257 bp, Glycine max
acttcttattgtgatgtctaaaagcgaagacttgaagcttttgggaggctggttcagcccatttgccctgagggtgcagattgcccttaacctcaagggtctagaatatgaggttgttgaagagaccttgaatcccaaaagtgacctgcttcttaagtccaaccctgtgcacaagaaaatcccagttttcttccatggagataaagtcatttgtgaatctgcaatcatagttgagtacattgatgaggcttggacta

SEQ ID NO: 205268 - DNA, 252 bp, Glycine max
gttccatctcaaacctatcaagtggagtggctaacatggagaacctagtaaagggtctgttgtgtgaggatgaaaagagtgagagctttgtcatttctatgaagtggtttttgaattatgcagagagaaaggtacgggacttgcaaggagatgaagggagagtcatggctcgtgtcaaagaaataactgagtattttcatggggatgtgagtaaagaagagtcgaatccacttcgaatctttgtgatcgtga

SEQ ID NO: 205269 - DNA, 259 bp, Glycine max
ctgagaaagaatttaaaatagaggtagaagcaattggtcgagtgcgacacaaaaatcttgttaggctgcttggatactgtgttgagggagcctacaggatgcttgtgtatgagtatgtagacaatggcaatctagagcaatggctgcatggggacgttggagctgtaagccctttgacatggaacatacggatgaacattatattgggaactgcaagatcgttggcctatcttcatgagggtcttgaaccgaaagttgt

SEQ ID NO: 205270 - DNA, 265 bp, Glycine max
cacagaagttgtgcttgttcgcaaaaccatcaatggcatcagcattatcttctctctcctccacctcttcttcactgttacagcacagtttcaccggaaactcgaaggctcctcccactactcaattccccaacaaaaatgtacgcttttcggtcttcgctcaaaagaaggcaaagaaacttcgaaagattattttgaaggaagatgtggcttatgtaggaaagcaagggcaacttcttgatgtgaaggctggctttttcagaaa

SEQ ID NO: 205271 - DNA, 271 bp, Glycine max
ctcaagactaattcccagcttgaaaaccttacacggtacactaaactcaaagtcaattgaattcaaagatattgtcaagattggacgcactcatactcaagatgcaacacctttgactcttgggcaagagtttagtgggtatactacacaagtgaagtacggtattgatcgagtaattggcactttgccgcacctgtatcagcttgcccagggtggtacagctgtagggactggattgaatacaaagaaggggtttgatgccaagatagca

SEQ ID NO: 205272 - DNA, 266 bp, Glycine max; identical to SEQ ID NO: 103801

SEQ ID NO: 205273 - DNA, 261 bp, Glycine max
gtttatgccaaatgaaactctctccaaacatctctttcactgggagagccagccaatgaaatgggcaatgaggctgagagtggccttgtatttagcacaagcattggagtactgcagcagtaaaggaagggcattgtatcatgatcttaatgcttatcgagttttgtttgatcaggatggaaaccctaggctctcttgttttggactcatgaaaaacagcagagatggcagaagctatagtacaaatttagctttcacccc

SEQ ID NO: 205274 - DNA, 256 bp, Glycine max
caattttctagggttttattcattttccgatggcttctgcagatgttgagtaccgttgctttgtcggtgggctcgcttgggccactgacgaccatgccctcgagagagccttctctcagtacggcgaaatcgttgaaacgaagattatcaacgatcgtgagactggcagatccaggggttttggatttgtgaccttcgcctcggagcagaccatgaaagatgcgatcggagcgatgaatggacagaacttggacgg

SEQ ID NO: 205275 - DNA, 254 bp, Glycine max
attttatacattctaaattttgtgagtgtggacatactctgagcgtgagaaagagaaggggaagaaagagagagagtgatgggaaggggaagagtggagttgaagagaattgagaacaagatcaacaggcaagtgacctttgcaaaacgaaggaacgggcttttgaagaaagcttatgagctttccgttctttgtgatgccgaggttgctctcatcatcttctccaatagaggaaagcagtacgagttttgcag

SEQ ID NO: 205276 - DNA, 255 bp, Glycine max
gttcaagttctaactaaacacttcgtcgctgcttttgcttctgtagaagatgtctctgcgagtgctgaaccctaacgccgaagtgctgaacaaatcggcggcacttcacatgaacatcaatgccgccaagggtctgcaagatgtcctcaaaaccaacctcggtcccaaaggaaccatcaaaatgctcgttggtggtgccggtgatatcaagcttaccaaagatggcaacactatcttgaaagagatgcaaatcca

SEQ ID NO: 205277 - DNA, 250 bp, Glycine max
gtgcatttggattcttgtatgctgcacaaagtacgaaccccaacaaggttgatcatggttacccaactggtattggggttaagaactccctcattgtgcttggtgtgatcaacttctttggaatggtattcaccttgttagtaccagaatcaaagggaaaatcactggaagagttgagtggggagaatgaagatgatggtgctgaggctatagagatggcagggtctgctaggacggttccagtttaacc

SEQ ID NO: 205278 - DNA, 250 bp, Glycine max
aagagaatggctcccaagggtttaatctttttggctgtgttatgcttctcagcactgtcactgagtcgttgtcttgcggaggataatggacttgttatgaacttctacaaggaatcatgccctcaggctgaagacatcatcaaagaacaagtcaagcttctctacaagcgccacaagaacactgctttctcctggctcagaaacatcttccatgactgtgctgttcagagttgtgatgcttcactgttgc

SEQ ID NO: 205279 - DNA, 251 bp, Glycine max
  unsure (1)..(251): unsure at all n locations
tcacacctcatcgtttctctctctagatctctgtttcttcttttnctccaaccttcgtttcaccaccacacttacattactttgtcgaaatggctccaccaattgagaccccaaacaaggtttccagctatcaacagtccccaaaccctcgtcttaacgagaggattctttcatccatttccaggagacacgttgctgcacacccgtggcacgatcttgagatagganccgaagctccaaagatcttcaac

SEQ ID NO: 205280 - DNA, 251 bp, Glycine max
atggcgggtggcaaagaagaggatgaaagtaaatctgctattaagtggacagaggatgaccaaaagaatctcatggatctgggaaatttagagctggaaaggaataaaagattggagaatcttattgctaggagaagagcaaggagattgatggatgagaagaatctaatagacttagattgtgttgatattccctgtaatgttgcacctattgctacgaccaggcataacccatttgattttcctgatga

SEQ ID NO: 205281 - DNA, 259 bp, Glycine max
agtagatattcattccccttatctttctctcttctctctccccgcccaaaccctaactccctaccctattccgctttctctcatccatcatgaaaggaggaaagtccaagaccgaatctaagagagccgatgccaaacttgctgtgaataagaagggcgccgccaccaagactaggaaacccgccggaaaggggaaggcagcgaaagatcctaacaagccaaagaggcctccaagtgctttcttcgttttcatggagga

SEQ ID NO: 205282 - DNA, 265 bp, Glycine max
atgagttgttgctccttcgccacaactctctgccaacatgggtatctccagagattctatgcacaagaggcgtgccactggtggcaagaagaatctctggaggaaaaagagaaagtatgagcttggtcgccagcctgctaacactaagctgtcaagcaacaagacagtcaggaggatccgtgttagaggtggaaatgtgaaatgcgagtgcattgagattggatactggaaattactcctggggaagtgaagctgtaactcgcaa

SEQ ID NO: 205283 - DNA, 261 bp, Glycine max
tagagaagcagcggtgaagaaagaggaataccaagtgttggaagaactcgggcgaggccgtttcggcaccgtgttccgctgcttccaccgcacttcaaacaaattctacgcggctaaactcatcgagaagcgcagactcctaaacgaggacaggcgctgcatcgaaatggaggccaaggccatgagcttcctctctccacacccaaacatcctctaaatcatggacgccttcgaggacgccgactcctgctccatagtcct

SEQ ID NO: 205284 - DNA, 264 bp, Glycine max
attaaatgtcaaagttctttcagaaactgaagtaatgactattgtatctttgagtttgaaggactaaaacatggattcactctacaatgatcttattcttaacttagctttactttgaagtctagacttgcaatgatttttgatatcgcgcaatcacaagtgcatattacagaggagctgttggtgcactgcttgtgtatgatgttaccagacatgtgacttttgaaaacgtggagagatggttaaaggagcttcgcgatcaca

SEQ ID NO: 205285 - DNA, 260 bp, Glycine max
gaaggtcttaaggctatgcgtgatgttattggattctacaaggaaaatactaacataataatggagacatttgattctcttgggtttaaagtctatggagggaaagatgcaccatatgtgtgggtccattttcccggccgaagctcatgggatgtattcgctgagattcttgagaagactcatgtggttacaacccctggtagtggttttggacctggtggtgaaggttttatcagggttagtgcttttggtcacaggga

SEQ ID NO: 205286 - DNA, 165 bp, Glycine max
atcttatccctctaatcactctagctgttgcaaatttctactatttttcaatggcttctgcagatgttgagttccgttgctttgttggtgggcttgcttgggtcaccggcaacgatgccctcgagaaagccttttcaatctacggcgacatcgttgaatcgaagg

SEQ ID NO: 205287 - DNA, 233 bp, Glycine max
cgtgccaccatcttctccaaagttatcatattcgaagagaaaaaaggagtgactgtccaggttgggcaattagggacggaaaaggagaaacacgaaaatgtttttccacatagtactggagcgaaatatgcagcttcatccacgctactttggtcgtaaccttcgcgataatctcgtttccaagcttatgaaagacgtggaaggcacttgcagtggccgacatggatttgtgg

SEQ ID NO: 205288 - DNA, 262 bp, Glycine max
atagcccaagccctatacaaccaaaccctaacacacacccatttgattcagtttccatggctagcctcaaggttgcatttttggctgcagtgctctgcatggttgtggtgagtgcacccatggcacatgcagctatcacgtgcgggcaggtgacgaatagcctgatcaattgcatcggttacctccagaacggaggaacgccgccgtcgggatgctgcaacggagtgaagagcctcaatgccgccgccaagaccaccgccga

SEQ ID NO: 205289 - DNA, 258 bp, Glycine max
caagatcaaccctgctgcccctcttgacaaagttgctgttgtcagttgtggattctgcacaggttttggggctactgtgaatgttgcaaagccaaagcctaataatactgttgctgtatttggattaggagctgttggtcttgctgcctgtgaaggggcaagggtttctggtgcatctagaatcatcggggttgatttacttaccaatcgatttgaacaagccaaacaatttggggtcactgattttgtgaccccgaa

SEQ ID NO: 205290 - DNA, 226 bp, Glycine max
ctttcacactctttctctctctctctctctctctcagaattttctcctctctccgattccttttattaattggagttttctcgctcctttttctttccctgaaaacatttcatcttcgtattgatgtcggaaaagggtcggccacttcccaaatttggtgaatgggatgtcaatgatccagcctcagctgaggggttcccagtgatttttaataaggccagggatg

SEQ ID NO: 205291 - DNA, 141 bp, Glycine max
gagaagatgacccaaattatgtttgagactttcaatgtgcctgccatgtatgttgcaattcaggctgtcttgtctctgtatgccagtggaagaactacaggtattgtgcttgattctggtgatggtgtgagccacacagtt

SEQ ID NO: 205292 - DNA, 194 bp, Glycine max
ctttgttgagtggattcctcacaacgtgaaatccacagtctgtgacattcccccaactggcttgaagatggcttcaacattcattggtaactctacctccattcaggaaatgttccgtagagtgagtgagcaattcactgctatgtttaggaggaaggctttcttgcattggtataccggggaaggcatggacg

SEQ ID NO: 205293 - DNA, 259 bp, Glycine max
cttgcttccaagatggttctgctagagaagctctgggatgacgttgttgctggccctcaacctgagcgtggccttggcaagctcagaaaactcaccaccctcaaaactattgatgaaggagacagtagcaagctgcagaagacgttgtcgatgccgtcgacaccgacaaccccgatgactcccacgactccaacgacaccgggatccgcgcgtaaagctgacaacgtttggaggagcgtcttccatcctgggagcaact

SEQ ID NO: 205294 - DNA, 255 bp, Glycine max
gcatcttgttcctccgctcaacaactataataacatctttctctctccgaacagatcacactatggccacctcaagcgccaaatcagtccatgatttcaccgttaaagatgccaagggaaatgatattaatcttggtgactacaaaggaaaggtccttatcattgtcaatgttgcctcacaatgtggcttgactaattcaaattacactgagctcagtcagttgtatgagaaatacaaacagaaaggtctggaaa

SEQ ID NO: 205295 - DNA, 219 bp, Glycine max
ctcatctggttgatagcaccaaccaagttggtcacttccagaaagtgcttacagcaattggtaacttctgcatttgctccatcgcggttggaataatcattgagctcatagtcatgtacccaatacagcaccgcaagtacagagatgggattgacaatctgttggttctcttgattggaggaattccaattgccatgccaactgttctgtctgccacta

SEQ ID NO: 205296 - DNA, 188 bp, Glycine max
ggcaaagatagtggcagagctccaagctgtgaagcacaacagtggcaagtcctacaatcagttagcggaggagactggactcaccaacgtctatgttgctcagcttctcaggagacaggctcagctcaatccccaaactgcccctctacttcgggcagcgctgcccgacttgccccaagaccttgttt

SEQ ID NO: 205297 - DNA, 244 bp, Glycine max
gggagattaactcagtcaatgacaaccctttgattgatgtgtcaaggaacaaggcacttcatggtggtaacttccaaggaactcctattggagtctccatggataatacacgtttggctcttgcttcaattggtaaactcatgtttgctcaattctctgagcttgtcaatgattattacaacaatggtttgcctacaaatctcactgccagaagaccccccagctttgattatggattcagggg

SEQ ID NO: 205298 - DNA, 258 bp, Glycine max
ggaaataattgatctttgaaaatgcagggaggaaagaaagctggagagtccatcaaggaaacagctgcaaacattggtgcttctgccaaggctggcatggagaaaaccaaggccactgtccaggagaaggcagaaagaatgacggcacgtgatccgatgcaaaaggagttggcaacccagaagaaagaggcaaagatgagccaggcagagcttggacaggcaggcggcgcgtcagcataacacggcggcggaacaggc

SEQ ID NO: 205299 - DNA, 262 bp, Glycine max
tctcgagccgaatcggctcgaggtgaaagagaacaatggaaggcataacagagggtgtgaacaacatcaacattaacatctccgattcgtataagaagaatcgcattcaggtctctaacaccaagaagcccctcttcttctacgttaatctcgccaagagatatatgcaacagcatgatgaggtcgagctctcagctctaggaatggctattgccacagtagtaactgttgctgaaattttgaaaaacaagggacttgctaa

SEQ ID NO: 205300 - DNA, 251 bp, Glycine max
cgaaccgaaccgaaccggcggatctcggttgttccatggaggctcacggcggcgggctccgccgagtccttgttctcgccttctgcgtcgctggaatctggtcggcatacatctaccaaggcgttctgcaggaaaatgtgtcgacgaagcgattcgacggtgaaaggttcgagcaccttgcgtttctgaacttggcacagaatgtggtgtgtttaatctggtcttttataatgataaagatgtggtctagt

SEQ ID NO: 205301 - DNA, 259 bp, Glycine max; identical to SEQ ID NO: 148587

SEQ ID NO: 205302 - DNA, 257 bp, Glycine max
ggagtgggtgaggagaatcgagatgatgcagctgcggccgaagattttggcggcggtggagagtgcgtggcggcgggttccgccgtggagggaggcgttttacggcgccggaatgaggccggtgcagttaagccagtttgcggattttcaagcagagtgcctgttagcgaagtctcaaatcagaggatttcacgtggcaaaacgccagaacgaactggtgcttttctggcatgatagggccattgttgccacgtcag

SEQ ID NO: 205303 - DNA, 235 bp, Glycine max
cgcaacaaaaagaaagaatcccaggcgaggagaaagatggaggggaaggagcaggatgtgtcgttgggagcgaacaagttccccgagagacagccgattgggacggcggcgcagagccaagacgacggcaaggactaccaggagccggcgccggcgccgctggttgacccgacggagtttacgtcatggtcgttttacagagcagggatagcagagtttgtggccactttcctgt

SEQ ID NO: 205304 - DNA, 260 bp, Glycine max
gcgagcgagcagtttcaaagagaggatttgggattgggaaggcgagggattgcgctgcgtctcttcctcttctctttcgattcatccctcattcataatcttccaatccaacaacctcagcctcacactcacacatacacacatctgaacgcgtatcgtccctcccatggcttcaaagcgcatcctcaaggagctcaaggacttgcagaaagacccaccaacttcttgcagcgctggtccagtagctgaggacatgttcc

SEQ ID NO: 205305 - DNA, 181 bp, Glycine max
cgacaatgtcgactcctgctaggaagaggctgatgagagacttcaagaggctgcaacaagacccgcctgcagggatcagtggtgccccccaggataacaacataatgctgtggaatgctgtcatatttggtcctgatgatactccatgggatggaggcacgttcaagttgacactccaatt

SEQ ID NO: 205306 - DNA, 207 bp, Glycine max
gatcatcacttcacttcactaatacatcatggcagacgagacccagaacaagtatgagagctctgaggttgaggtccaggatcgtggtgtttttgactttctcggtaagaaaaaggatgaagaagacaagcctcatcctcaggaggaggtcatcgccaccgagtttcaaaaagtcactgtctcagaccaaggagagaacaagcacag

SEQ ID NO: 205307 - DNA, 257 bp, Glycine max
ctctttttagttgtgaaccattgtccatatagttttatgtcaagcagcaatattacaaacgaaaaggccaagcaaagaactccgtagcaagaagttgaatgaacgatgatgggtgctgattgaagcatgagaagccaagaaatccaaggagcatacatgcagttcactccaacatgatgtgagaactcctccttcaccatgtccaagtgaaagatgcacttgagcacgtaaagtaaagacaaagtagtggcagtgag

SEQ ID NO: 205308 - DNA, 225 bp, Glycine max
cctttcctctccgaaccctcgatcactctcacgcgctcctatattcgctcctccaccgtcgctctctcgaacaaccacaacaccatcttcatcacatggcaaacgcagcatctggtatggcagtccatgatgactgcaagttgaggtttttggagctgaaggcaaaaaggacacaccgttccatagttttaaagtttgaggagcagcagaagcaggtcattgtgg

SEQ ID NO: 205309 - DNA, 186 bp, Glycine max
ccagcagccgcggtaattccagctccaatagcgtatatttaagttgttgcagttaaaaagctcgtagttggaccttgggttgggtcgatcggtccgcctccggtgtgcaccggtcggctcgtcccttctgccggcgatgcgctcctgtccttaactggccgggtcgtgcctccggtgctgttactt

SEQ ID NO: 205310 - DNA, 253 bp, Glycine max
tgggaccggagttggtgcatctcagggtgtgctcatcaaaggaggccaagcattagagagtgcacataaggtggactgcattgtttttgataagacgggtactctcactgttgggaaacctgtgatagtgagaacagaactattgacaaaaatggtgctccaggagttctatgaacttgtggctgcagctgaggtgaatagtgagcatccactggccaaggccgttgttgagtatgctaaaagatttagagat

SEQ ID NO: 205311 - DNA, 246 bp, Glycine max
ggagaaagagaaagatgatgaggttaaggtggagtttagtcgtaacggtcacgttcgctgttttgctgttttggattggatcgctgcaagttcaagcctctaattctgtttccgccttcgttcaaaacgccatctactccaacagaatcgccgttttctccaaatcctattgcccctactgtttgcgcgccaaacgcttgcttgctgagctcaatgagaaaccgtttgtggtggagctcgatttgc

SEQ ID NO: 205312 - DNA, 262 bp, Glycine max
aattgtgatcttcacaaatcaacaacgtctctctctgttactctgaaaattgacttcaagttagtataactggctgtcaagttgtaatggcattggtctctggaagaagttctgcactgaacccaaatgcacctctattcatacctgctgctcttcggcaggtggaggatttttcacctcaatggtgggatcttgtgaaatcttcaacatggtttcgtgattattggttgagccaacataaggaggaagaatttgaagttgc

SEQ ID NO: 205313 - DNA, 138 bp, Glycine max
ggaagaactaaaaggtgcagttgttctcattttcgcaaacaagcaggaccttcctggtgcacttgatgatgctgcagtgaccgatgctctagagttacacaagatcaaaaatcgccaatgggctatttttaaaacttc

SEQ ID NO: 205314 - DNA, 257 bp, Glycine max
ctcgagccgcactaaccaacttctttctttgttccgttctactttcccttcccaacaacaacaagaagatgccttctgcagaagcttcctccgaaaccatttgtgtcaccggcgctggtggcttcatcgcctcttggatggtcaaactcctcttggacaaaggctacactgtccgaggaaccctcagaaatccagatgatcccaagaacgggcacttgaaggagtttgaaggagcctccgagaggttaactctgcat

SEQ ID NO: 205315 - DNA, 212 bp, Glycine max
gggaatgcccaggagttgtttcctgtgctgatatcctcgttctctctgccagagatggcattgtttcgctaggaggtccccatatccctcttaaaacaggaagaagggatggtagaaggagcagagccgatgtggtagagcagttcctcccagaccacaatgaatccatttctgcagttcttgacaagtttggtgccatgggaattgacacc

SEQ ID NO: 205316 - DNA, 181 bp, Glycine max
cggctcgagggcggagtaggtgaacgtactcgtgagggaaatgatctttatatggaaatgaaagaatctggagtaattaatgaacaaaatattgcagaatcaaaagtagctctagtatatggtcaaatgaatgaaccgcccggagctcgtatgagagttggtttaactgccctgactatgg

SEQ ID NO: 205317 - DNA, 252 bp, Glycine max
gacgaacactatcatggcttcttcactcagaatctcaagacttatctctcgctccttttcttctacttctttcttttcacgaggtgggaatggtttccttggttcaagacaaagtaaattcagcacttctgctgccattgaggaagaacccattaaaccatcaatacaagtagaacacacccaactcttaattgatggaaaatttgtagatgctgcttctggtaaaacttttcaaactttagatcctaggac

SEQ ID NO: 205318 - DNA, 252 bp, Glycine max
cgaagagaatggctcccaagggtttaatctttttggctgtgttatgcttctcagcactgtcactgagtcgttgtcttgcggaggataatggacttgttatgaacttctacaaggaatcatgccctcaggctgaagacatcatcaaagaacaagtcaagcttctctacaagcgccacaagaacactgctttctcctggctcagaaacatcttccatgactgtgctgttcagagttgtgatgcttcactgttgc

SEQ ID NO: 205319 - DNA, 252 bp, Glycine max
ccaatatagcccaagccctatacaaccaaaccctaacacacacccatttgattcagtttccatggctagcctcaaggttgcatttttggctgcagtgctctgcatggttgtggtgagtgcacccatggcacatgcagctatcacgtgcgggcaggtgacgaatagcctgatcaattgcatcggttacctccagaacggaggaacgccgccgtcgggatgctgcaacggagtgaagagcctcatgccgccggc

SEQ ID NO: 205320 - DNA, 136 bp, Glycine max
gggttccatgcgtctattagtagtggcattgttgtgtgcatttgctatgcatgcaggtttttcagtctcttatgctcagcttactcctacgttctacagagaaacatgtccaaatctgttccctattgtgtttgga

SEQ ID NO: 205321 - DNA, 133 bp, Glycine max
gattgtttgttgttgtaactcgttcttcttcttttgttgttctgtgtttgtgtttgttttttctctcacctgaaaatgtcttgctgcggtggtaactgtggttgcggaagctcctgcaagtgcggcaacggct

SEQ ID NO: 205322 - DNA, 226 bp, Glycine max
caaagccatacgggattctcaacttataggaatgtctggttactcaaaggaggatctacctgtcattgctgttggtgttgggctcagtacatatgataaagcatctgacaaatactatatacaatcacacatccaactgaatgaatatagggatcgagtgatcttgccaacagctacaaggaaacatggacgatacattggcacctgtgttaaagtgttggatatg

SEQ ID NO: 205323 - DNA, 252 bp, Glycine max
gtagatcgaaagggaatcttcttccatggcctccaagcggattctgaaggagcttaaggacctccagaaagaccctccaacctcttgcagcgccggtcctgtagcggaagatatgtttcattggcaagcgactataatgggtccccctgatagcccttatgctgggggtgtttttctagttactattcattttcctccggattatccattcaagccacccaaggttgcgtttaggactaaagttccccaccc

SEQ ID NO: 205324 - DNA, 223 bp, Glycine max
atggctcagcaaagaatttgccctcatcctgcacttcaaaattcagcccagaactatgctttttcccacaatatgtggcatcacatatcagtactccaatcttcgttgtaaatgcagcctatgactcatggcagattcagaacatctttgtacctggctctgctgatcccagtgacagttggcatagctgcaagcttgatataaagcaactgctcacctgatc

SEQ ID NO: 205325 - DNA, 251 bp, Glycine max
catgggtacggtggctccaagagttgaaagcttggcgagcagcgggataaagtgtatcccgaaggaatacgtgaggcctcaagaagagctcaagagcatagggaacgtgtttgaggaggaaaagaaggaagggctaaggttccgacaattgacttgagagagatagattcggaggacgaggttgttcgagggaaatgtcgtgagaagctgaagaaagcggcggaggagtggggtgtgatgcacttggtgaa

SEQ ID NO: 205326 - DNA, 232 bp, Glycine max
aaattagccccctaccagtgctcaaggaaatcttccgcactgatggtgaactagtcctcaagtttccaccacctcatgtcatttaagttagtaagtctgcatggatgactgatgaagaatttggaagagagatgttgctggtgttaatccatgcctaattgagtgccttcaagtgttccctccaaagagcaagctagatcccacagtgtatggtgatcaaactagtacaata

SEQ ID NO: 205327 - DNA, 232 bp, Glycine max
cagttggaaaaaaaaaaaaagttgttcgagatggcacgtacgaagcaaactgctcgtaagtccacaggaggaaaggcacctaggaagcagctcgcaaccaaggctgcacgtaagtctgcaccaccacggcccaccggcccaccgcatgcttatccaactcctccgcctcctgggcctccacaccaccatcccggcccacccgaaccaggctttcatcaacaccatggcccac

SEQ ID NO: 205328 - DNA, 242 bp, Glycine max
  unsure (1)..(242): unsure at all n locations
ttcttttttcccgcagtcatgggcaaggtcaagatcggaatcaacggatttggaagaattggccgtttggtggccagggtggctctgcagagagacgatgttgaactcgttgccgttaacgatcctttcataccaccgattacatgacatacatgtttaaatacgncatgttcacgggcactggaagcntcacgntgtcaccgttaaggntgagaagaccttctnttgggtaacangcnatt

SEQ ID NO: 205329 - DNA, 243 bp, Glycine max
ctttttctgtgagcctttctttcaggttcttaacttgatcagtgtgcagtgtccaaatcataagggtagttgcaaattgcaatggctaagcatgatgttgagggtggttccttctctgcaaaggactaccagatcctcctccagcaccgttgattgatgctgaggaactcacacagtggtccttctacagggctttgattgctgagttcattgccacaatgctcttcctttacatcacagtgc

SEQ ID NO: 205330 - DNA, 240 bp, Glycine max
  unsure (1)..(240): unsure at all n locations
ttccccttcacncnttccttttttgcgttcattctgttttcatagtgncgancttctgaagantggcaaatcatcctttgacacactctcactctttccgcgagaggtttgatgaaactctcactggtcaaggaacgaaattttggcccttctgncaaggcntgaagccaagggcaagggaatcctgcaacatgcaccaagtggttgcagantttgannaatccctgaggnngcnagaaa

SEQ ID NO: 205331 - DNA, 241 bp, Glycine max
ctcgagccgcttcgtctcaaatctcttcgttccttcgattcgttccatttcttccaaaatggccaaagacccagttcgcgttctcgtcactggagctgcagggcaaattgggtatgctcttgtccctatgatgctaggggagtgatgttgggtcctgaccagcccgtgatcctccacatgcttgacattcctccggcagcagagtcattgaatggggttaaaatggaattggtggatgctg

SEQ ID NO: 205332 - DNA, 214 bp, Glycine max
ctccgatggctaatccctcactcttgttcttcagtctcctcctattatccgccaccgtagccgccgccgaacggatctacgatgaagacgaccttctgatccgtcaagtggtgccggatgcggaggaccaccactgctcaacgcggagcaccacttgcccgccttcaagacaaagttcggcaagacctacgccacgcaggaggagcagtaccac

SEQ ID NO: 205333 - DNA, 190 bp, Glycine max
ctcgagccgctcgagccgaatcggctcgagctggagttgcagggaaaaagaaaaatagaatacgttccgaacataccaacttggagttcttgaaggagatcggtttgggctcctccaacattggttcttacattaaggccaatggaaagccactggttcttctgtcacttctgttaatccttctaacaat

SEQ ID NO: 205334 - DNA, 245 bp, Glycine max
accactcttaatttctctctgccttgctcatttacacacctctccaacctttcactttcagctttatttgaatccctctctctcctttcgaaatggccagcgttgaggttgcacatcaaacaccaacaacagttccgaaaatgaaacaaccgaggtaatcaagacccaggaaacaaccccggaaccagtaccagccactgaggctcctgcaacagaacaagcagcagctgaggttcctgctcaag

SEQ ID NO: 205335 - DNA, 220 bp, Glycine max
aaaaaaaaaccctctctttctctctcttccaaaacctaattttcattttttctcttcaaacaaattttcaaaatgcgtgagatccttcacatccagggtggccaatgcggcaaccagatcggcgccaagttcgggaggtggtttgcgcggagcacgggatcgaccccactggaaggtacggtggggactcagagcttcagctcgagaggatcaatgtcta

SEQ ID NO: 205336 - DNA, 238 bp, Glycine max
cctcaattcagcgtaactttcccaaacccaaataagaatcttccagaaacttcttttctttcaggagccaccatggccgagactcggagatccacgggcaccgttaagtggttcaacgcgcacaaaggttcggattcataactccccaagatggaaccgatgatctcttcgtgcacttcacttccatccgatccgacggctaccgttctttgtccgacggtcagtccgttgagtttct

SEQ ID NO: 205337 - DNA, 231 bp, Glycine max
attttattgtgcaggcaaaagctgctcttgtatctgttggaatagtaagggacactcttggtaatggtaaatctggtcgtattattgattcagatatgcacgaagttggacggttcctcaaccggattttggactacctcctgatattcagaatgggttatttgagttatttgtgagtatcttggatcttcttgttcggaatgctcgcattgaaggtaaccttgacacggg

SEQ ID NO: 205338 - DNA, 245 bp, Glycine max
  unsure (1)..(245): unsure at all n locations
gagctgggaaattaccaggtgacacaacatcggtttnaaaggcctggtggcagcaacatgctaagtggccctacccaactgaagatgacaaggcaaaacttgtggaggagacagggttgcagctgaagcaaacaataattggttcatcaatcaaaggaaacgcaactggcacagcaactctcaatcggttaactctctgaagtccaagcgcaagagagantatgccccactaaggnttccagtnc

SEQ ID NO: 205339 - DNA, 234 bp, Glycine max
cgcaaccatcggccgcacttactcttgttctcaagggattcgattttctctgcactcacttctagggtttcctccgcgctatcagcaatcatggccgacgaaacaccaaatgagatgaaggaggaggtccagaaattgttccttttgatcctaccaagaagaagaggaagaagaagattacaattgtagatcctgctgatgaccctgtggagaaattggctgagaagacagaaa

SEQ ID NO: 205340 - DNA, 237 bp, Glycine max
tttggcaagaggagaccaccatcgcaatgtctgcattatacctgtctcagcacatggtacaaatcctgccagtgctgctatgtgtgcaatgaaaattgtatctgttggaactgatgccaagggaaacatcaatattgatgagttgaggaaggctgctgaaacacataaggacaacctagctgctctcatggtaacatatccttcaacccatggtgtttatgaagaaggtattgatga

SEQ ID NO: 205341 - DNA, 233 bp, Glycine max
ggaagcagttgcagaccgagctagctagctagcaagcaagcacagagatggaggcaaagcgaggccatgccctcatgtgcttggcacgtgtttcactcttcctctgcgctctaaccctatccgctgctacggaagcaccacggttcaatacatcgcgagaaatttgaaactcggggacaacgagcttctgcgcacggagaagaagttcagggttttcatggagatttaggggg

SEQ ID NO: 205342 - DNA, 241 bp, Glycine max
gttttctacgattattcatagtgaggcaatagtagcagcaattcacactggtctttgcttctcgttactcatttctcacctaactttctattcttctcagtctcagatcagaaccttagccatggcagcgtccagaagatcaaggtcgccaaccccatcgtcgagatggacggagatgaaatgactagggttatctggaagtcaatcaaggacaagctcattttgcccttcttggagttgg

SEQ ID NO: 205343 - DNA, 238 bp, Glycine max
ggagcactagctaagttcacaatttcaaaatggctaggggactaaagaagcatttgaaaaggctcaatgctcctaagcattggatgcttgacaaactgggtggtgcatttgcgcctaaaccctcattggaccacacaaatcgagggagtgcctccccctcattcttattctgcgaaaccggctgaagtatgctctgacataccgtgaagtcattgctattctgatgcagcgccatgtt

SEQ ID NO: 205344 - DNA, 238 bp, Glycine max
aagaagagaaggagttgaagtggttgttgtattgtagtagtgtgtaaagtcttggtgatggatagacacaaatgcaagctttgttcaaggtctttcagcaatggcagagcccttggtgggcacatgaggctcaccttgcttctctccctctccctctccctccaaagcttcactcttgtttctcttcctctgactcagaacaagaacaatctttaagggagaatcctaagaaaacctt

SEQ ID NO: 205345 - DNA, 244 bp, Glycine max
  unsure (1)..(244): unsure at all n locations
gcacctttntgactgggagtgaacacaatgatgagttctatatagatgaacatggnaacacaagaacaagaacaaatcgctcnggtgggatacagggtggaatttccaatggggaaatcattncatatgagaatagctttcaagccaacatcaacaantggantaagtncttaatcncttctcgttctgtcttgcatcactcatcncagtcnnncagcncgcgnnggnnnntngnnnagcaggt

SEQ ID NO: 205346 - DNA, 237 bp, Glycine max
attcactggggagtgtggtgaatgcacttattgtaagtctgaagagagcaacctgtgtgagctactcaggatcaacactgacaggggtgttatgctgagtgatggaaaaacaaggttctccaaaaatgccaacccatttaccacttcgttggaacctccactttcagtgaatacactgttctccatgaaggatgtgtagccaagattaaccctaatgccccacttgacaaagttgct

SEQ ID NO: 205347 - DNA, 224 bp, Glycine max
tcccggattgtggggccacacgctctcatgcttaaatggttcttggttggtggtttttggtgggtgtggtaggcagggattgctcaatgatgtgtttgtgcttgatttggatgctcaacagccaacaggagggaggtttgtggtggaacacaccacttcctagatcatggcatagctcttgcacaattgaagggtccaaattggttgtctccggcgggtgcaca

SEQ ID NO: 205348 - DNA, 224 bp, Glycine max
gccacagccaaagaaaatggaagcttaccaaagagtttcaagcaattgggggttactgagaggcctcttccagtgaggaatagaatgtttggtagagcttggccttttagagcaccagtcaaacctggcttgttacattatggccccaattgacagaaaccagtcatgtcgcctgtgttagcgatgaagtagcaagttcatggctaaacaacgttgcagtcagg

SEQ ID NO: 205349 - DNA, 242 bp, Glycine max
gcgaagagaatggctcccaagggtttaatctttttggctgtgttatgcttctcagcactgtcactgagtcgttgtcttgcggaggataatggacttgttatgaacttctacaaggaatcatgccctcggctgaagacatcatcaaagaacaagtcaagcttctctacaagcgccacaagaacactgctttctcctggctcagaaacatcttccatgactgtgctgttcagagttgtgatgct

SEQ ID NO: 205350 - DNA, 212 bp, Glycine max
tggtggcttctccacgagttacctctcccaaagccgcgtcttcccggattgctcatattcacaaggatgttggctacagaccagagccaactttgaggcaacagcatgccacagctactaagatccgtctgtttacagaggctatatggccaggaggagttttagagctctaaagggtctggtgaggcttcaaggagtggtaagaggacaga

SEQ ID NO: 205351 - DNA, 233 bp, Glycine max
cacaggggggctgatgaacaaaatgaccggtcgcatcggtgactcgccgctgataggcgctgggacctacgcgtgcgacgtgtgcggtgtatcgtgcacgggcgagggcgaggccatcatacgtgcacgctggcgcgtgaggtggcagcggtgatggaatacaaagggttgaagcttcaagaagctgtggattttgttatcaagcaccgtctcgatgaagggatggctggtct

SEQ ID NO: 205352 - DNA, 233 bp, Glycine max
gccacagccaaagaaaatggaagcttaccaaagagtttcaagcaattgggggttactgagaggcctcttccagtgaggaatagaatgtttggtagagcttggccttttagagcaccagtcaaaccggccttgttacattatggccccaattgacagaaaccagtcatgtcgcctgtgttagcgatgaagtagcaagttcatggctaaacaacgttgcagtcaggaaagcaatt

SEQ ID NO: 205353 - DNA, 236 bp, Glycine max
ctcgcaagcaaatcagaacaagagaagagaatggcaggagcagaggggctaaacagagaacagtacgtgtaccttgcgaagctgtcggagcaggcggagcggtacgaagagatggtggagttcatgagaaggtggtggtggggtggacgccggcgtcggagctcacggtggaggagcgcaacctcctctcggtggcctacaagaacgtgatcgggtctctgcgtgccgcgtggcgc

SEQ ID NO: 205354 - DNA, 234 bp, Glycine max
ataaccttacatgatgaattgaatgtacgctgtaggttagtcatgaagctcctataactggaggttttggtgctgaaatttcagcttctattgttgagcgttgcttctcaaggttagaggcccctgagcaagaatttgtggtctggacactccttttcctttggtttttgaacctttctacatgccaaccaaaaataagatattggatgcaattaaatcaactgtgaagtacta

SEQ ID NO: 205355 - DNA, 241 bp, Glycine max
gtcctgaccagcccgtgatcctccacatgcttgacattcctccggcagcagagtcattgaatggggttaaaatggaattggtggatgctgcattccctcttcttaaaggtgttgttgccacaactgatgtgttgaggcatgcactggggtcaatattgccgtgatggttggtggattcccaagaaaagaaggtatggagaggaaggatgtgatgactaagaacgtctccatttacaagtcc

SEQ ID NO: 205356 - DNA, 223 bp, Glycine max
cacaactccactcttagctgccattggtttttcttcttccatttctcttcctttctaagcttttttcgattacccatttggagattctgtcctaatggctcttgctccttccaaagtttcctcctttccgggttttctcccaaacccagtgttggggatgctctgaaaaacccaacttgctctgtttctctgagctttgcgaatgtgaaacttggaagcagaa

SEQ ID NO: 205357 - DNA, 239 bp, Glycine max
  unsure (1)..(239): unsure at all n locations
caaggcttgaccgtgtgaagaacatcacggggcttgtcgagtggtacgggaagaacgcacgcctccgcgagttggtgaacctggtggtggtggctggagacaggaggaaggagtcgaaggacttgaagagaaggccganatgaagaagatgtatggcctcattcgagacctaacaagttgaacggccaattcagatggatatcctctncagatgaaccgtgtgaggaacggagagctct

SEQ ID NO: 205358 - DNA, 234 bp, Glycine max
gtttataaaacgacagtaggagcctggtctggtcggtgtggcactcaaacattgtttgttgtaggaagaggaatcttgagaaatggcaggggacagcaagagcaagattctgttcatcggaggactggttacatcggaaaattcatcgtggaagccagcgccaaagctggacttgcaactttccttttggtgagggagtccactctctccaaccccgcaaaatcacccctcatc

SEQ ID NO: 205359 - DNA, 236 bp, Glycine max
gatggctaatccctcactcttgttcttcagtctcctcctattatccgccaccgtagccgccgccgaacggatcgacgatgaagacgaccttctgatccgtcaagtggtgccggatgcggaggacaccacctgctcaacgcggagcaccacttctccgccttcaagacaaagttcggcaagacctacgccacgcaggaggagcacgaccaccgcttccgtatcttcaagaacaactt

SEQ ID NO: 205360 - DNA, 233 bp, Glycine max
ggagattgttccaaccatggatgcggaggtccggaagcagtttcagcgttctcttgagaagcaaggcatgaaattcaagctgaagactaaggtggttggagttgatacttctggggatggtgtgagctaactcttgaaccagcagctggtggtgatcagactacacttgaagtagatgttgtcctggtatctgctggtaggaccccattcactgccgaacttgggttggacaa

SEQ ID NO: 205361 - DNA, 237 bp, Glycine max
  unsure (1)..(237): unsure at all n locations
tactttttggttcttatttcctttgccttcacaaccattatagttcaaaaaataagaaagaaacccaagataactgatgacacaacttgtaaaataccccatggtcctagaaagctacctattatagaaatatatacaatctgctatgctctcaaccccatagaaaattaagacaccnggccataaaatatggacccgtgatgcatcttcatcttggacaggtttcaactattgtca

SEQ ID NO: 205362 - DNA, 281 bp, Glycine max
cacaactccactcttagctgccattggtttttcttcttccatttctcttcctttctaagcttttttcgattacccatttggagattctgtcctaatggctcttgctccttccaaagtttcctccttttccgggttttctcccaaacccagtgttggggatgctctgaaaaacccaacttgctctgtttctctgagctttgcgaatgtgaaacttggaagcagaaaccttagggtttgtgcctcaactgtgcctctctcaggggtgattttcgaacccttcg

SEQ ID NO: 205363 - DNA, 273 bp, Glycine max
agcaatcccacacacttcataatacacaaaaacaccacttttctgctcccccttgatatagaatttgcatcatcataattacaaactcgcaccaacaatggccccaagagacagccgtgccaccgcgttcgccggaccaggcccaggcccatcaccggcccacaaatagatccgctaccgaggcgtccggaaacgcccctggggccgctacgccgccgagatccgcgacccccgcacgaaaacgcgcgtctggctcggcaccttcgacacagc

SEQ ID NO: 205364 - DNA, 254 bp, Glycine max
  unsure (1)..(254): unsure at all n locations
ctgaactttgatgagatggaganccctcttcaacactgagatcaacaagaacctcaaacaggatgagtttgaggcactgctccaggagttcaagactgactacaaccagacacactttgtgaggaacaaggagttcaaggaagctgctgacaaacttgaggggccactcaggcagatctttgtggagttccttgagaggtcctgcactgctgaattctctggcttccttctctacaaagagcttggaaggaggc

SEQ ID NO: 205365 - DNA, 273 bp, Glycine max
tgctgctgcagtttatcttagaatggcaggaaggccacctgtgcttccatccaaccacctttcttacacagagaacttcctatatatgctagattcttttggtaatcggtcatataaacccaatcctcggctaactcgtgtgctagacattatcttcatcctgcatgcagaacatgaaatgaattgttctacatctgctgtccgacaccttgcatcaagtggcgttgatgtatacactgctattgccggggctgttggagctctatatggacc

SEQ ID NO: 205366 - DNA, 195 bp, Glycine max
tcttcctcttcctcagtagtgcgattttcgattctcttctctgcaactatgcctaaccctaaggtcttcttcgacatgaccatcggcggtcaacctgccggccgcatcgtgatggagctctacgccgacgtgactccgagcaccgccgagaacttccgcgcgctctgcaccggcgagaagggcgccgggcggacg

SEQ ID NO: 205367 - DNA, 269 bp, Glycine max
ggggccactaatcgaccagatattattgacccagctcttctgcgtccaggtcgtctcgaccagttgatttatatccctctcccagatgaggactcccgtcatcagatatttaaagcttgcttgaggaaatccccagtctcgaaagatgttgatcttagggcgcttgccaagtacactcagggtttcagtggtgctgatataacagagatttgccagcgcgcgtgcaagtatgccattagagagaacattgagaaggacattgagagaga

SEQ ID NO: 205368 - DNA, 271 bp, Glycine max
gaccttctaagatccagggagttaagactggaggtccggagtggagcagcacaggttgaaggtggagttcatgggctggtttcttatgaaaagaaatacttttgaagtatgaaaccatccaaaatcataagcggtgctataatcccttgctgcagttcagcataaaagaagggaacacactgttattggttagtggcaacttgttgctactctgtcaagcgaattgaagtttataccaatagaacatcgtgggaattttcttccctgaggt

SEQ ID NO: 205369 - DNA, 270 bp, Glycine max
gcgaagactatggctcccaagggtttaatctttttggctgtgttatgcttctcagcactgtcactgagtcgttgtcttgcggaggataatggacttgttatgaacttctacaaggaatcatgccctcaggctgaagacatcatcaaagaacaagtcaagcttctctacaagcgccacaagaacactgctttctcctggctcagaaacatcttccatgactgtgctgttcagagttgtgatgcttcactgttgctggactccacaagaagg

SEQ ID NO: 205370 - DNA, 268 bp, Glycine max
ctggctgtgttaatatgcgtttcagcactgtcactgagtccttctgttgcgggggaagggcaaaataatggccttgttatgaacttctacaaggaatcatgccctcaggctgaagacatcatcacagaacaagtcaagcttctctacaagcgccacaagaacactgctttctcctggctcaggaacatcttccatgactgtgctgttcagagttgtgatgcttcactgttgctggactccacaagaaggagcttgtctgagaaggaaa

SEQ ID NO: 205371 - DNA, 271 bp, Glycine max
cggacgtactacaggtattgtgcttgagactttcaatgtgcctgccatgtatgttgcaattcaggctgtcttgtcttcgtatgccagtggacgtactacaggtattgtgcttgattctggtgatggtgtgagccacacggtgcccatatatgaagggtatgctcttcctcatgcaattcttcggttggaccttgctggccgtgatttaacagagtacttggtgaaaatccttaccgagagaggatactccttcagcacctctgccgaaaag

SEQ ID NO: 205372 - DNA, 277 bp, Glycine max
ctgtgattgaaccatttgtcatagcaacaaacaggcatcttagtgtgctccaccctatttataaacttttgttgcctcactatcgtgacaccatgaacatcaatggactcgcaagacaatcactcatcaatgcaggtggcattattgagcaatcatttctgcctgggccatttgctgtggagatgtcttcggcagtttacaaggggtgggttttcactgatcaagcccttcctgcggatcttatcaagagaggaatggcagtggaggatccatcctc

SEQ ID NO: 205373 - DNA, 274 bp, Glycine max
aggacttgaacctttcagtggatttactgaagaaggagaatgcaaaattgcttcaaaggacaactcttgctgagaaggaaatgaaatatgggcatacggaactagtgagtgccggaacccaatttcaacagctggcaaaatcagcatacaaggttgaaacccgagctgctgatttgcttgacaagctgcggtatatacctagtcgtgaagctctggcacttcgagctgaggttgcttccatggcttcaaatttgaagcgtcagagatcttcgct

SEQ ID NO: 205374 - DNA, 271 bp, Glycine max
gtctctccgcagcagccacacttcttcgccgtttcagctgaagagccatccgcaggtaagcaatggttaagcataataatgttatccccaatgggcacttccggaaacactggcaaaactatgtgaagacttggtttaatcaaccagcccgaaagaccagaagacggttggctcggcagaagaaggctgtcaagattttccccaggcctactgctggatctctcaggcctattgttcatggccagactctgaaatacaacatgaaagtcag

SEQ ID NO: 205375 - DNA, 272 bp, Glycine max
accagcgccgcctccactatgttccacgacttctgcgccgccatgtccgccgccgtccccgccgtggtggcctctgtcgaataccgcctcgcgccggagcaccgtctcccggcggcgtatgacgacgcggcggaagccttggagtttatccgagacagcagcgaggaagaagaatggttgaccaaacacgccgacatgtctaattgctatctcatggggagcagtgcgggggccacaatcgcctacttcgcgggtctacgcgcgaccgacac

SEQ ID NO: 205376 - DNA, 268 bp, Glycine max
aaaccatccaatccaattgaattctccagagagaagaagaaacttaatcgatcatcacttcacttcactaatacatcatggcagacgagacccagaacaagtatgagagctctgaggttgaggtccaggatcgtggtgtttttgactttctcggtaagaaaaaggatgaagaagacaagcctcatcctcaggaggaggtcatcgccaccgagtttcaaaaagtcactgtctcagaccaaggagagaacaagcacagcctcttagaaaa

SEQ ID NO: 205377 - DNA, 269 bp, Glycine max
cttgtgactgctaataccgtactatctattcttgcagttgactatccagtggataaggtctcctgctatgtgtctgatgatggtgctgctatgttgacatttgaagcacttgctgagacatcggaatttgcaaggaaatgggttccttttagcaagaagtatagcattgaaccccgtgcgcctgagtggtatttttctcaaaagattgactacttgaaagataaggttcatccatcatttgtcaaggatcgtagagcaatgaagagaga

SEQ ID NO: 205378 - DNA, 276 bp, Glycine max
  unsure (1)..(276): unsure at all n locations
gtgcaaagtgtgagagaaagacaatgccgaagtctcaatttcgaaccccatttctggtttctcttccccttttgttattcatcttcaacctcaccccttcgcacgcactctatggagcatcctcacccgtgcttcaactcactccctctaacttcaagtccaaggttctgatttcttatggtgttgttcttgttgaantctttgctccatggtgtggacactgtcaggctctgactcctatatgggagatggcagctactgtgttgaagggtgttg

SEQ ID NO: 205379 - DNA, 276 bp, Glycine max
gagtgagtgagtgagcaagagtgaagagcgaagagaatggctcccaagggtttaatctttttggctgtgttatgcttctcagcactgtcactgagtcgttgtcttgcggaggataatggacttgttatgaacttctacaaggaatcatgccctcaggctgaagacatcatcaaagaacaagtcaagcttctctacaagcgccacaagaacactgctttctcctggctcagaaacatcttccatgactgtgctgttcagagttgtgatgcttcactg

SEQ ID NO: 205380 - DNA, 271 bp, Glycine max
gaggagagagaaagtagcagatcctccatggcctccaccaaggaacgtgaaaacttcgtctacgtcgccaagctcgccgaacaagccgaacgctatgaagaaatggtggaagcaatgaagaatgtggcgaactaaacgtggaattgacggtagaggagcggaaccttctgtcggttgggtacaagaacgtggtgggtgctcgtagggcttcgtggaggattctttcctcgattgaacagaaagaagaagctaaagggaacgatgtgagcgt

SEQ ID NO: 205381 - DNA, 270 bp, Glycine max
aggacttgaacctttcagtggatttactgaagaaggagaatgcaaaattgcttcaaaggacaactcttgctgagaaggaaatgaaatatgggcatacggaactagtgagtgccggaacccaatttcaacagctggcaaaatcagcatacaaggttggaacccgagctgctgatttgcttgacaagctgcggtatatacctagtcgtgaagctctggcacttcgagctgaggttgcttccatggcttcaaatttgaagcgtcagagatctt

SEQ ID NO: 205382 - DNA, 265 bp, Glycine max
cttagttgcttccaattaagatggttctgctagagaagctctaggatgatgttgtggctggccctcaacctgagcgtggccttggcaagctcagaaaactcaccaccctcaaaactattgatgaaggagaaagtagcaagctgcagaagacgttgtcgatgccgtcgacaccaacaaccccgatgactccgacgactccaacgacaccgggatcggcccgtaaagctgacaacgtttggaggagcgtcttccatcctgggagcaa

SEQ ID NO: 205383 - DNA, 266 bp, Glycine max
ctcgagccgttgtaatctccgcattaggtgcagaacagatcgatgatcaagtgaagatcatagcagcaataaaagaagccggaaacatcaagaggctcctcccatcggaatttgggcacgacgtggatcatcacaatgcagtggaaccagtgagtagcttcttcgagaaaaaagtgaaaatccgaagggcaattgaagctgaaggaattccatacacttacatcagttcaaattcctttgctggacacttcctacctaacttgtta

SEQ ID NO: 205384 - DNA, 270 bp, Glycine max
  unsure (1)..(270): unsure at all n locations
tgcgtacattggcactcctggaaagggtattcttnctgctnatgagtcaacagggacaattggcaagcgtttggccagcatcagtgtagagaacattgaatccaacaggcgagctcttanggagctgcttttcactgntcctggtgttcttcaatatctcagtggtgtcatcctctttgaggaaaccctctaccagagcacagctgcaggcaagccctttgtgaatgtcttgaaggaagctggtgtgcttcctggcatcaaggttgacaa

SEQ ID NO: 205385 - DNA, 268 bp, Glycine max
tgaattcatcgatgcgattgtggaaggagaaaggctgattgtggatgtggattttagatctgagtttgagatagcgcgatcgacgggaacgtacaaggcgatgctgcaatcgctgccgttcatcttcgtcggaaactcggagaggctgacgcagatcttggcgattgtttccgatgcggcgaacagagtctaaagaagaaagggatgcacgttccgccgtggaggaagcgcgattacatgcttgcgaagtggctctctccatctagca

SEQ ID NO: 205386 - DNA, 267 bp, Glycine max
gtgataggggcagaagggtggttggagtggaatggaaactttgcattggacacattgtactatgctgagtacatgaacactggagcaggtgctggagttgctaaccgtgtgaagtggccagggtaccatgcattgaatgattcgagtgaggctagtaacttcaccgtgtctcaatttattgaggggaatctatggttgccttcaactggagtaaccttcactgcgggactcacagtttaacagaaataaactactgccacgccttgg

SEQ ID NO: 205387 - DNA, 265 bp, Glycine max
gatttaatgagccattcgcagttatagtttgtttgatggtattctactcggataaccgtagtaattctagagctaatacgtgcaacataccccgacttctggaagggatgcatttattagataaaaggtcaacacaggctctgcctgttgctttgatgattcatgataactcgtcggatcgcacggcctttgtgccggcgacgcatcattcaaatttctgccctatcaactttcgatggtaggatagtggcctaccatggtggtg

SEQ ID NO: 205388 - DNA, 266 bp, Glycine max
cagagtcagagacagagacgcagccatggggcggagacctgcgaggtgttataggcaaattaagaacaagccataccccaagtcacgtttctgccgtggtgttcctgatcccaagatcaggatttatgatgttggtatgaagaagaagggtgttgatgagtttcctttctgtgtccatctggttagttgggagaaggaaaatgtttcaagtgaggccctggaagctgctcgcattgcttgcaacaagtacatggccaaatttgctg

SEQ ID NO: 205389 - DNA, 268 bp, Glycine max
tcttattttgcaacacaattcaattttgagcacttaccaacaccacttccaatggcttcatatcatgaagaagaagtgaggctattgggcaagtgggccagcccatttagcaacagagtagaccttgctctcaagctcaagggtgttccctacaaatactccgaggaagatcttgctaacaagagtgctgatcttctcaagtacaaccccgttcacaagaaggttccggttttggtccacaatgggaacccattgcccgagtcactca

SEQ ID NO: 205390 - DNA, 267 bp, Glycine max
atctaatctcgccggccgccaccgttcgtcatggttctgtccaaaaccgcctcggagacagacgtctctgttcattccaccttcgcctctcgctatgtccgcacctcccttcccaggttcaagatggcggaggaatcgatcccgaaggaagccgcgtaccagatcatacacgacgagctgatgctggacgggaatccgaggctgaacctggcgtcgtttgtgacgacgtggatggaacctgagtgtgacaaactcatcatggctgcc

SEQ ID NO: 205391 - DNA, 265 bp, Glycine max
ctcactttcctattacagtatctttacctcaatggcaccaagttctgcagtgccagatgaacaggttgttgttggagaggagattgagcatgtaagagtggtcactttgaacaggccaaggcaattgaatgccatctcaccagaactggtttctcagctagcaacatatttggaaaagtgggagaaggatgagaaagcagaactagttattataaagggagctggtcgggctttttgtgctggaggagatttgagagtcttctat

SEQ ID NO: 205392 - DNA, 264 bp, Glycine max
gctgctgttgcaaaacttagggttgggcctttttttgaggttttcagcgcttctttctcacaatggttcttcagaatgatattgatttgctgaatcctccagcagttggagaagagaaagcacaaactcaagcgtcttgttcagtcaccaaactctttcttcatggatgttaagtgccagggatgcttcaacataacaactgtgtttagccactctcaaactgttgtggtgtgcggaaactgccagactgttttgtgccaacca

SEQ ID NO: 205393 - DNA, 181 bp, Glycine max
cttcagagaagaaactttcgaacccaatgagggagataaaagtgcagaagctcgtcctcaatatctctgttggcgagagtggagatcgtctcaccagagccgccaaggtgttggaacaacttagtggccaaaccccagtgttttccaaagcacggtacactgttcgttcctttgggattag

SEQ ID NO: 205394 - DNA, 268 bp, Glycine max
ctgctcgaggtgattcctctcgccgtagatctgttccatttcgccgttcatccatggccgacgacttcgaattcgccgacaaagtccctccttccttcgatcgcgcgggttcacaagggttcaacccagctttaattgttctcctgcttgttggtgggttgctgttgacattcctcattggaaactatgtactctacacatatgcacagaagaccctccctcctagaaaaaagaagccagtctcaaagaagaagatgaaaaaggagag

SEQ ID NO: 205395 - DNA, 276 bp, Glycine max
tgagtaagttctctctgcttctctctcttagactcaaaaccctattgcgtgctttgcaatcgaccccgattatggccaacagtaacctccctcgaagaatcatcaaggaaacgcagcgtttgctcagtgagccagcacctggaattagtgcgtccccttcggaagacaatatgcggtatttcaatgtgatgatccttggcccaactcagtcgccttatgaagggggagttttcaagttggaattatttttgccagaagaatatccaatggctgctc

SEQ ID NO: 205396 - DNA, 268 bp, Glycine max
gtacagcactagggtgaaggatgaagaggggtgccctgctttctctttgatcaacaaggccactggtgaagccttgaagcactccatcggtgccactcatcctgttcggctgataccttacaagcccgactatcttgatgagtctattctatggactgaaagccgtgacttaggagatggccacagagctataaggatggtcaacaatgttcatcttaatgtggatgcttttcacggtgacaagaattctggaggtgttcgtgatggc

SEQ ID NO: 205397 - DNA, 267 bp, Glycine max
ctgctcgaggtgattcctctcgccgtagatctgttccatttcgccgttcatccatggccgacgacttcgaattcgccgacaaagtccctccttccttcgatcgcgcgggttcaaaagggttcaacccagctttaattgttctcctgcttgttggtgggttgctgttgacattcctcattggaaactatgtactctacacatatgcacagaagaccctccctcctagaaaaaagaagccagtctcaaagaagaagatgaaaaaggaga

SEQ ID NO: 205398 - DNA, 264 bp, Glycine max
ctcgagccgttctattctggttgacgcttctctcaccatccccatttcgctttggtgcaacgcatccttcgtttcaatttctctctctcagcgctttctgcaatcgatcctttcatctccaaagggatccacaggccgaaggagatatggggctgacattcacaaagcttttcagtcggcttttcgcgaagaaggaaatgcgaattctgatggttggtcttgatgctgctggtaagaccactatcctgtacaagcttaagctcg

SEQ ID NO: 205399 - DNA, 265 bp, Glycine max
gttcttgcaagttccaagttccaagttcatgcacaaccgatcttttcctctgagaagacgtgtcggtagctgaagcattttataagcctccactttcctgaactagttttaacatacaatctttcaagtacacctccccagcttccatttaagaatggagatcactagaataggccaatggttaagtcttctgatatgtgtactactattactgcagacagaaggggttcctgtgggaatcacttttgttgaaaatgcagtggca

SEQ ID NO: 205400 - DNA, 262 bp, Glycine max
ctacactgttaggattagtgttgtgccttttttggaatgttatagctgttactgcagcttggattaagggtgaaggtgtaaaaatatggtttcttgccattatctacttcatagcaggggtccctggagcatatgttctgtggtatcgcccattatatcgtgcttttaggaatgaaagtgctttgaaatttggatggtttttcatgttttatctgcttcacataggattctgcatcttagctgcagttgctcctcctatagt

SEQ ID NO: 205401 - DNA, 262 bp, Glycine max
ctcattcacacattcacagttatactctctctctctttgtcgcttggatcactgatctcatctcaattttcagatatgtcgacatctgataagccagaagtggtggaaaggggtagcaaggatgaaaaacacaaggaagatgatcaagaggaggggaagggtggattcattgagaaggtgaaggatttcattcatgacattggtgagaagattgaggaagctattgggtttgggaagccaactgctgacgttactgcgattc

SEQ ID NO: 205402 - DNA, 259 bp, Glycine max
gccgagatgaagaagatgtatggcctcatcgagacctacaagttgaacggccaattcagatggatatcctctcagatgaaccgtgtgaggaacggagagctctaccgtgtcatctgtgacacaaggggtgcctttgtgcagcctgcagtttatgaggcctttgggttgactgtggttgaggccatgacttgtgggttgccaacgtttgccacatgcaatggtggtcctgctgagatcattgtgcaggaaaatctggtta

SEQ ID NO: 205403 - DNA, 264 bp, Glycine max
gcaaaaccctagcggcgcctgctttctttgttcgtgttttgcatcaggatggagtctcaggtgaagtgcgcacttgttgtcaaagttatgggtcgtactggatccagaggacaagtgacccaggttagagtgaagtttttggatgatcagaaccgtcacatcatgaggaatgtgaaaggacctgtgagagaaggagacattctcaccctactcgagtctgaaagggaagcaagaagattgcgctagatggtctcttttttttgg

SEQ ID NO: 205404 - DNA, 266 bp, Glycine max
aaattgaatggccatggaaaataataaaattatagagtattgggttgtgtctatactttgcatgcttttgtcgggtcattggatctctgttcaagctgcccctgcaccctctctcatcacacaactccctgtatataacgccaatttcccatccaagcactattccggatatataagtattgatggaaatactgaaagtgggaagaacctgttctactacttcgttagttcagaaagaagtccagagaaggacccagttgtgctat

SEQ ID NO: 205405 - DNA, 264 bp, Glycine max
cacccccggcgtagttgcattgcttggagcacacagtgttggtcgaacccattatgtgaagttggtgcaccgtttgtacccagagattgatccagctctgaaccctgaccacgtccctcacattctgaagaagtgccctgatgccattccagaccctaaggccgtgcagtacgtgagaaacgaccgtggcacccccatgattctagacaacaattactacagaaatatattggacaacaagggcttgttgatagtggatcacca

SEQ ID NO: 205406 - DNA, 263 bp, Glycine max
cttcgtcgcaaattcaaaggaggatctctcttgcgttttctctaggttttcgctatggcgtcgaagcgaattttgaaggagcttaaggatttgcagaaggatcctccaacatcttgcagtgccggtcctgttgttgctgaagatatgttccattggcaagctacaattatgggtcctccagacagtccctatgcaggaggtgttttcctagtgaccattcatttccctccagattatccctttaagccacccaaggttgcatt

SEQ ID NO: 205407 - DNA, 261 bp, Glycine max
cacatcagaggttccaaaaggaagaaagccctcactatatcgcatactctcaggaacttccatggctactccacatgtttcagggcttgcatgcagtgtcaaaagaaaaaaccccacttggagtgcctccgcaatcaaatctgccatcatgacttcagcaattcaaaatgacaatttgaagggtcccataacaacggattcagggttgatagccacaccttatgactatggagcaggggcaattacaacatctgaaccatt

SEQ ID NO: 205408 - DNA, 255 bp, Glycine max
gtagttattatttattaagagatggtgctaaagggtaaagtgattacagaacttgagatccgatcacctgctgccaagttcttcaatgcttatgcaaggcaacttcacaatttgccgaacattgttgacaatgtacatgagggccagttgcatgaaggtgattggcatggcattggccccgtgaagagcgggacttttaccaccgaagggaaagttactacatataaggagagcattgaagctatagatgatgag

SEQ ID NO: 205409 - DNA, 260 bp, Glycine max
actcttcttcgtctcaaacctcttcgttccttcgattcattccatttcttccaaaatggccaaagacccagttcgcgttctcgtcactggagccgcagggcaaattggatatgctcttgtccctatgattgctaggggagtgatgctgggtcctgaccagcccgtgatcctccacatgcttgacattcttccagcagcagaatatataaatggggttaaaatggaattggtggatgctgcattccctcttcttaaaggtg

SEQ ID NO: 205410 - DNA, 261 bp, Glycine max
ctctttctccgagaacaaaaaaaaaaacgtgattcgctcttctcatcgaataaaccacaaaaccaacaaacgagaagaggagtgagagaagatggggttgtcgttcacgaagctgttcagcaggttgtttgcgaagaaggaaatgaggattctgatggtaggtctcgatgctgctggtaagacaaccatcttgtacaagctcaagcttggagaaatcgtcaccaccatccccaccatcggatttaatgttgagactgtgga

SEQ ID NO: 205411 - DNA, 260 bp, Glycine max
gttttgtttatttgaaattaacaagtagcaaagatgtttggaatcatcggaggaaacaagggtcacaagataaaggggaacttggtgattatgcgaaagaatgtgttggatatcaacagcattaccagtgttaagggtgtcatcggaaccggcattaacatcattggaggagtcgtcgacaccgttactgctttggcgtcccacatctccatccagctcattagtgccaccaaggctgatggacatgggaaaggaaaagt

SEQ ID NO: 205412 - DNA, 89 bp, Glycine max
agagaatggctcccaagggtttaatctttttggctgtgttatgcttctcagcactgtcactgagtcgttgtcttgcggaggataatgga

SEQ ID NO: 205413 - DNA, 259 bp, Glycine max
gaaagaaacagtcagaatcagaatcagaagaagcgagcaaagatgtcgggtcgtggaaagggagtcaagggtttgggtaagggaggagccaagaggcacaggaaggtgctccgcgataacatccagggaatcacaaaacccgccattcgccgtttggctcgcagaggcggcgtcaagagaatcagtggcctcatctatgaagaaacccgcggcgtccttaagatcttcctcgagaacgttattcgcgacgctgttacct

SEQ ID NO: 205414 - DNA, 268 bp, Glycine max
ctctgctcgtgcctctagggttatcatatctccatttccatttcctctctctcagtttccaagaaacttaagctatgggaaattcttacccaaccgtgagcgctgattaccagaaggccgttgagaaggcgaagaagaagctcagaggcttcatcgctgagaagagatgccctcctctaatgctccgtttggcatggcactctgctggaacttacgacgtgagctcgaagaccggtggtcccttcggaaccataaagcacccctccga

SEQ ID NO: 205415 - DNA, 268 bp, Glycine max
aaaatgatgggtacccttaaggtgtccaacagtagtttatacatattttcgaagttcctagtaatttgtatggtgatgatgatatctttggttgattcaagttattccttgtgtgattttgaggcaatcttcaattttggtgattcgaattcagatacgggtgggtttcatacaagctttcctgcacagcctgctccctatggaatgacttacttcaaaaaaccagtggggcgtgcttctgatggaaggcttattgttgattttctcg

SEQ ID NO: 205416 - DNA, 293 bp, Glycine max
agagctgcagcagtagtagttcagtttttgaggaggcgaatggagtggaggatgaggccgaacctcaacaaccttcatcttgtgcagcagcagcacttgatgagttgcataaagagaaaaatgagaatggagaagaaaccctcgtgcctcccaatcccaatcttgacgatggcttctatgaaatcgaaacaatacgccgtaagatgctacgcaagggtcagctccagtacctaatcagatggcgtggatggcctgagactgccaacacttgggagcctcttggagatctacag

SEQ ID NO: 205417 - DNA, 289 bp, Glycine max
attgatccttctttttctcctttaactcaaacatggcagatgaggtggttctgctagatttctggccaagtccatttgggatgagggtcaggattgcacttgctgaaaagggtatcaaatatgagtacaaagaagaggacttgaggaacaagagtcctcttctcctccaaatgaacccggttcacaagaagattccggttctcatccacaatggcaaacccatttgtgaatccctcattgctgttcagtacattgaggaggtttggaatgacagaaatcccttgttgcc

SEQ ID NO: 205418 - DNA, 309 bp, Glycine max
acgtaagctcggtgaactcatcaaaaccactactagatgaaatgggtaaccaactacttgatcaactattggagaaacctgctaatgaattgaaatggcaacaaaaaagccttgagaatgagcttgagttggccaaggtaaccttaaaagaaaaggagatggaagttcttgctgcacagagggctctaacgataaaagatgaggagctgaagatgacactttcaagattggactcaaaagaggaagagttgaaaaaagtaagggaagcagtgacagaagactccaatgatcttaaaaggctgtatgctt

SEQ ID NO: 205419 - DNA, 277 bp, Glycine max
atacctgcacatatgaaggagacaacactgtgctgcttttacaggtggctaggcatctcatcaagactatttctcagttgggctccagaaacaagcctgttggtacaacatcttacattggacgagtggaacagcttatgcaatatcgttctgatgttcagaaagtggaggattggctgaagcctaatgcagtgttgggagcatttgaagctagggctgctaagaaggtggttgcttgtgctcaaaatctcagcaagtttaccaatcccgaagaagg

SEQ ID NO: 205420 - DNA, 273 bp, Glycine max
  unsure (1)..(273): unsure at all n locations
attgtattgttgaacaagggtttctctgtctgcttcttcactttctctcgtttcaatcganacnaggtnngagaacatgggcagaaaattcttcgtcggtggcaactggaaatgcaatgggaccactgaggaggtaaagaagattgttactactttgaatgaggctaaagtccctggagaagatgtcgtagaagttgttgtgagccctcctttgtgttcctcctgttgtaaaaagtttgctgcgccctgatttccatgtttcggcacaaaact

SEQ ID NO: 205421 - DNA, 264 bp, Glycine max
tgttcaccattacacatcaagttgagctttccagctgcaggtaagatttagacgtgattcaataacggatgcctaattcggggcttggccattctatcaagcacgtcaaaaaccctcgagaaggtttctgcggacttggttcgtggtgcacaggacaagcgcctcaaggttaagggacctgctaggatccccactacaggttctcacatcactaccaggaagtccccctgtggtgaacgtaccaacacatgggatagatttgaa

SEQ ID NO: 205422 - DNA, 289 bp, Glycine max
  unsure (1)..(289): unsure at all n locations
tagaagaatggcacttcgttgcttggtgatgtccctttctgttctcttcactcttggtcttgcgagagaaagccatgccagatacgaagatttttggcatgctgtttggccaaacactcccattccaagttcattgcgagatcttctaaagcctggccctgcaagtgacgaaatcgatgatcagcctatgcaaattgaagaaacacagtacccgaaaaccttcttctatagagaggaccttcatccaggcanaacaatgaaagtacaattcagcaagcctccctttcaa

SEQ ID NO: 205423 - DNA, 288 bp, Glycine max
acgcatctaacctcgcagttccttgatctctcctctcaagatgcagatattcgtgaaaactttgaccggcaagaccatcacccttgaggtggaatcctccgacaccattgacaacgtaaaagctaagattcaagacaaggaagggatcccacctgaccagcagagacttatctttgcgggtaaacaacttgaggatggtcgcacccttgccgattacaacatccaaaaggaatcaaccctccatctcgtgcttcgcctcaggggtggcatgcaaatctttgtcaagac

SEQ ID NO: 205424 - DNA, 286 bp, Glycine max
cagatttccatttcctctctctcagttttcaagaatcctaaggtaatgggaaagtcttacccaaccgtgagcgctgattaccagaaggccgttgagaaggcgaagaagaagctcagaggcttcatcgctgagaagagatgcgctcctctaatgctcgtttggcatggcactctgctggaacttacgacgtgagctcgaagaccggtggtcccttcggaaccataaagcacccctccgaactcgctcacggcgctaacaacggtcttgacatcgctgttaaggcttt

SEQ ID NO: 205425 - DNA, 274 bp, Glycine max
tagctttactgaatatcgacttcatcttcactcttccttcaaatttcctacaagggttcaagcttattatgcttgctggattcattctcttgctgaaatgcagtctttctagaaagtttgttcaactgtccctttattggcgttagtatgctacctattggagcaaaagagacccaattacgtgagaacaacagcctgaaggtccatcctcaaccaatggaagaggtcatgaatcagaatccagaagcaatggaaaccctaatatctaaagttt

SEQ ID NO: 205426 - DNA, 271 bp, Glycine max
cggctcgagctttcagaggctctacaccatcactcccgtcgccagattctttgctcgcaattctgatggggtttccttgtgacccttgatggccttgcttcaagacaagatcttcctacatagctggtcggagctgaaagattcaattcgggaagggggtattccattcaacagggtttaaggcactcatgcttttgagtatccaaggttggacgcaaggttcaatcaagtttttaacacagcaatgatcaatcacaccactatagtgatg

SEQ ID NO: 205427 - DNA, 276 bp, Glycine max
ctacggagaagttgagttgtttggtgtggggggaagcccttttgccagaagggtgcagattgccctggaactgaagggagtccaatacacttactttgaagaagatcttaggaacaagagtgatcttcttatcaaatacaaccctattcacaagaaggtacctgtgcttgtccacaatggaagaccattggctgagtcccttgtgatccttgaatacattgatgagacatgggagaaccaccaccccatcttgcctcaacaaccttatgatagagc

SEQ ID NO: 205428 - DNA, 275 bp, Glycine max
atcacattagttcattctctttgcgcagttccctacctctcctttcaagatgcagatcttcgtcaagaccctcaccggaaagaccatcacccttgaggtggaaagctctgacaccatcgacaacgtcaaggccaagatccaggacaaggaaggaattcccccggatcagcaacgtctcatcttcgccggaaagcagctcgaggacggccgtaccctcgccgactacaacatccagaaggagtcaacccttcaccttgtcctgcgtctccgtggtg

SEQ ID NO: 205429 - DNA, 276 bp, Glycine max
  unsure (1)..(276): unsure at all n locations
attcaatcaagatcaagatctagatcaagatcgcgatctcttgttcaggaaccgggttccagaggcgttaatgaatcgccggcggatttgattattccgatctccgacgacggacggcgagggttctggttcaaattggaggaagaaaaaggttcttgttcaaagacaattcgaattccgcggaacacttaccgagcggtgcttgagttatacgtttctttccacggaacatacgagttttngnnatcgaacccgccgaattcgtacataaaggcg

SEQ ID NO: 205430 - DNA, 277 bp, Glycine max
atagcattctccactacgattcgctcttccagaagcttccagaaaactccagatggcgcgtacaaagcaaacagcccgtaagtcgaccggcggcaaggctccccggaagcagctggcgactaaggccgcccgcaagtctgctccggcgaccggcggagtgaagaagccacacaggttcaggccaggaaccgtggccctgagggagatcaggaagtaccagaagagcacggagcttctgatccgaaagcttccgtttcagcgtttggttcgtgaaatc

SEQ ID NO: 205431 - DNA, 271 bp, Glycine max
tggaacaactacaacaccccgtgtgttggttcttctattttgctgccttgtttctgttttacaagcagaatacttgaagtacaaagacccgaaacagccactgaatgttagaatcaagaacttgctgaagcgaatgaccctggaggagaagatatgccaaatggtgcagattgaacgaagtgttgccaccccacaagtgatgaagaagtacttcattgggagtgtgctgagtgggggagagagtgttccagccacaaatgcatctagtgag

SEQ ID NO: 205432 - DNA, 246 bp, Glycine max
  unsure (1)..(246): unsure at all n locations
cttatttagggtttttgtgactganntccacaaccgagtnnccatggcgtcgcaggagannntcgaaaagatgcaggcacggcagaattaccggaatttatggcacaccgatctcatgagatccattcaggccgatactccttattgttgcctcgcgttgtggtgtgcaccatgtgtgtcttaccttcttcgcaaacgagctctctatgatgatatgtcaaggtacacatgttgtgctggctacag

SEQ ID NO: 205433 - DNA, 269 bp, Glycine max
attagacaacaaaagcactttttcaccaattaagctttcaagagacaaactgctttgaaaaatgggatccaaggttgttgcatccgttgcccttctcctctccatcaacattcttttcttttccatggttagctccagcagccactacgatccacagccccaaccttctcacgtcactgctcttattacacgacctagttgtccggatctgagtatttgcctcaatattttaggcgggtctctaggaaccgtggatgattgttgtgccc

SEQ ID NO: 205434 - DNA, 272 bp, Glycine max
gtaactctttattttattttctttctttctttctccgatcgcatagctcgctcgcaaccaccatgccttcccgaagaagaactctcttgaaggtcatcattctcggtgacagtggggtggggaagacatctttgatgaaccaatatgtgaataagaagtttagtaatcagtacaaggcaaccattggagcggattttttaaccaaagaagtgcaattcgaagataggcttttcaccttacagatttgggatacagctggccaagaaagattc

SEQ ID NO: 205435 - DNA, 313 bp, Glycine max
cgcccacgtaacgtcggacttcgcctccagatactcactcacacacacacacactctctttccatgggtccgtttcgtaaacccttccttgcatttctctcggttgttctatttctgggtctctatgaggcagcagcagaacagactcagactcacaagagtacttacattgtacacgtggcgaaatcggagatgcccgagagcttcgagcaccacgctgtgtggtatgagtcgtcactgaagaccgtgtctgactcggcggagatgatttacacctacgacaacgccatccacggctacgcgacgagattaa

SEQ ID NO: 205436 - DNA, 286 bp, Glycine max
  unsure (1)..(286): unsure at all n locations
aattattctttcgcaccttcgaaaatcaattttctgtcttctctgcgtcttcttcctctatcaatcgttttccatggctcgtaccatgctaactgctcgctaattcaccggtggaaaggctcctaggaagcaactcgccaccaaggctgcaaggaaatctgcaccgacaaccggtggagtcaagaagcctcatcgctatcgccctggaactgttgctcttcgtgagatccgaaaataccaaaagagcacagtgcttctgatccgcaagctcnccttccagcgtctt

SEQ ID NO: 205437 - DNA, 278 bp, Glycine max
  unsure (1)..(278): unsure at all n locations
aggaagattgaaatcaaacggatcgagaacaccaccaataggcaagtcaccttctgcaagcnccgcaacggtttgctgaaaaaagcttatgaattatcagttctgtgtgatgctgaagttgcccttgttgtcttctcaacccgtggccgtttgtatgagtatgccaacaacagtgttagggccactattgagaggtacaagaaggcaaatgctgctgcttcaaacgcagaatccgtatctgaagctaacacacagttttaccagcaagagtcatccaa

SEQ ID NO: 205438 - DNA, 267 bp, Glycine max
tagagaaagtacagtgtctggattggtggttctatcttggcatcacttagcaccttcaaacagatgtggatctccaagggtgaatatgatgaatctgggccagccatcgttcatcggaagtgcatctaaagttgggtcaagtcgagctggatggagatcaagttcttcatgcacccagtcctgtgccatatttcagtaaagtttggttgacatatttggtatttgaagcattgggtttttaatagatatatctagtttaatgaatgg

SEQ ID NO: 205439 - DNA, 152 bp, Glycine max
tgaaaggaggaaagtccaagaccgagtgtaagagagccgatcccaggagttggtgtgggataagaagggagccgccaccaaggctaggaaacccgccggcaaggcgaaggcagctaaagacggtgacaagccaaagaggggtgcaggtggtt

SEQ ID NO: 205440 - DNA, 267 bp, Glycine max
accccttcttccttttcatcaggtttattccttttcttttggttcaattttgctgaatggagagtgcaagaatcagcaaatggttaaatcttctagtttgtgtactgctattgcttaaggcagaaggatctcttgttccattgactttggtgaagaatgcagaatcaaaaggagctgtttgtttggatggaagccccccagcataccactttgacaacggatttgaagaagggattaagaactggattgttcacattgagggaggag

SEQ ID NO: 205441 - DNA, 255 bp, Glycine max
  unsure (1)..(255): unsure at all n locations
agaaaaaattggaaaatgaatatgttaaagtttgtatttttatgagtgggagggtagattgagagtgatgtgaaagatttggaaatttttaacaacatgataattcaatggaaaatgaagaggttaacaaaccaaaatcncttcaaccatacaatgagatgatagtgaaagcacttgaagaaatgaatgagacaaatggatcgaacaagtcagcaatatcaaagtacatagaaaccacatacggtgagttgaaag

SEQ ID NO: 205442 - DNA, 279 bp, Glycine max
tgagagtgttccttctaatagtgaaaaggcactcctaaaagctgtggcaaatcaaccagtttcagtttatattgatgcaggagcaattgctttcaaattttactcaagtgggatttttgaagcaagaaattgtggaactcatctagaccatgctgttgcagttgttggttatggtaaacttcgtgatggtacaaagtattggctagtaaaaaattcatggagcactgcatggggtgagaaagggtacatgaggatcaagcgagacatacgtgccaagaa

SEQ ID NO: 205443 - DNA, 279 bp, Glycine max
gtttcatgaaatggcttaataagcttttcagaggtgggcccaatagaggaaggggtggtcgccacctgcatgagccagcagaggaaagcagagtttggggtgctccatctagagcgttggatgatcgtgctagagctcagaaggagaaagaggatctaggccatgcaatggcactttcttcagccgaagatttaaagagaccaaacgctcatcaaggatataactggggagaagacactggtgatgattactcgaaggcacctcgtgatacccttaact

SEQ ID NO: 205444 - DNA, 267 bp, Glycine max
ctgcgatatcttcctggtgctattgtggctgcggttcttgggatcattattgacatgcctgttatatcagttgttgccatatttaaaggcccttacatgcttttcaaagggtggaagcgtttgtttcatgatctcatgggtcgtgaaggccctttcttggagacaatatgtgtgccttttgctggccttgctattgttctgtggccactggatgttgttggggcagttctggcataagtgttagccagtttcgttcatggtggatat

SEQ ID NO: 205445 - DNA, 267 bp, Glycine max
gaaagattacgaggaggattttgaaaatcctgaaaagaagcccagaaggaacaagtacgctttcgcatgtgctattttggcttcaatgacttccatcctactaggttcttttattggagtgatgagtggagcagcactgtacatacaaagagctctcaaggtatcggttgttctaattgagatcctgatcggtatcataaacctctactctcccgtcggttctttcatcgccggcagatcctccgactggataggtcgccgttacac

SEQ ID NO: 205446 - DNA, 270 bp, Glycine max
agccatttcacacttggggtaacagaattattgtataactgggcccttgaatgtcatgagctccctgtagtacagatgatggaacacatccgccagcagatggtatcgtggtttaatgatcggcaggatatgggcatgaggtggacatcaattcttgtaccatctgctgagaagcgaatcttggaagcaattgctgatgctcattgctatcaagtgctccgggcaaatgaagttgagtttgaaattgtgtcaactgagaggaccaatatt

SEQ ID NO: 205447 - DNA, 281 bp, Glycine max
agttgctaaagtccttacttgcaacaatgaagcttgtctttggcaccctactattatgttctcttcttctaagcttctcattcttggagccagtcatagcctatgaagactcatcttattgcagcaacaagtgtgcggacagatgctcatcggcaggggttaaggataggtgtgtgaagtactgtggaatatgctgtgctgagtgcaaatgtgttccttctgggacctatgggaacaagcacgagtgtccttgctacagggacaagctcaacaagaagggc

SEQ ID NO: 205448 - DNA, 275 bp, Glycine max
aatggctcggagctccacaagaatgaaatgggtctctatcttcacacttctattcctctcccactcgcccctcacaatctccgcagaagatgggctagtggcgaatggagattttgaggctaccccaagaaacgggttcccaaacgaggcgattgtggagggccccagcgaggtcccaaactggaagtcaaacggcaacgttgagcttgtggaatcggggcaaaaacagggtgggatgatcctcatcgtaccgcaggtagacacgcggtcaggct

SEQ ID NO: 205449 - DNA, 273 bp, Glycine max
aagagaatggctcccaagggtttaatctttttggctgtgttatgcttctcagcactgtcactgagtcgttgtcttgcggaggataatggacttgttatgaacttctacaaggaatcatgccctcaggctgaagacatcatcaaagaacaagtcaagcttctctacaagcgccacaagaacactgctttctcctggctcagaaacatcttccatgactgtgctgttcagagttgtgatgcttcactgttgctggactccacaagaaggagcttg

SEQ ID NO: 205450 - DNA, 265 bp, Glycine max
agaagatggagatgtatcagatctggagcaggagaatagcgttgggagcgttcgcgtttgttctgcttttcctatcggcctcagcagacgacgtcgttgtgctctctgaagataacttcgagaaggaagttggtcaggacagaggagctctcgttgagttctatgctccttggtgtggacactgcaaaaagcttgctccagaatatgaaaagcttcgtagcagcttcaagaaagccaaatctgctttaatcggcaacgttgactg

SEQ ID NO: 205451 - DNA, 256 bp, Glycine max
ccactttcttttttcccgcagtcatgggcaaggtcaagatcggaatcaacggatttggaagaattggccgtttggtggccagggtggctctgcagagagacgatgttgaactcgttgccgttaacgatcctttcattaccaccgattacatgacatacatgtttaaatacgacagtgttcacgggcactggaagcatcacgatgtcaccgttaaggatgagaagacccttctcttcggtgacaagccagtcatgtt

SEQ ID NO: 205452 - DNA, 256 bp, Glycine max
gtttttgtattgcaagtaaaggatcacccaaagttcagaagggagcaggatgacctctatattgatcacaatctcagcttaaccgaggcactctgtggcttccagtttgctgtcaaacatcttgatggtaggcaactattgctcaaatcaaaccctggggaagtcatcaaaccaggtcaatataaagcaataaatgatgagggaatgccacaacacaataggccattcatgaagggtcgcctttacatccagttta

SEQ ID NO: 205453 - DNA, 256 bp, Glycine max
gttcatcatggttcggttcagcaacaacgtgatcggactcctgaacttcctgaccttcctcctctccatcccgatcctggtggccggagtgtggctgagcaagcagggcgccaccgagtgcgagcggtggctggagaagccggtgatcgcactcggcgtcttcctcatgctcgtctcactcgccggcctcgtcggcgcgtgctgtcgcgtgtcgtggctcctctggctctacctcctcgtacatgttcgacctcat

SEQ ID NO: 205454 - DNA, 251 bp, Glycine max
ctcgagccggaaccaataatttgagttttgtcggtggtgacatgttcaactctttccctacaaactgatgcagttctactaaagtgggttttacataattggaatgacgaaaattgcataaagatcctgaaaaagtgtaaagattctatttcaagcaaaggcaacagaggaaaagtgattatcatagatataataataaatgagaagctagatgacccggatatgactcgaacaaagcttagtttggatat

SEQ ID NO: 205455 - DNA, 256 bp, Glycine max
tggagagcttgtgtttttctgatcccttatcttaattaatttaatcaccaatggctcgttctatcgctaacgccaagactttctccgctctcgtgctagacggattctccaacactctcaccagacgtggctactctcaaagcgcaacaaggggaggagttgcctccatagcacccaaatcaggggaagacaaaggtgtctcatcatacaaggtttcctgggtgccagatcccgtcaccggttactacaaaccgga

SEQ ID NO: 205456 - DNA, 263 bp, Glycine max
cgcttgagctctgcgagatcttgagtcgccgatttgaaaagatgagtaagcttcagagtgatgctttgcgtgaagccatctcaggaatcatggccgattccaaggagaagaatcgcaaatttgtggagaccatcgaactccaaatcggtttgaagaactacgatccacagaaggacaagcgtttcagtggctccgtcaagttgccccacatccctcgccccaagatgaaaatttgcatgcttggtgatgctcagcatgttgaa

SEQ ID NO: 205457 - DNA, 266 bp, Glycine max
ggtacggtggctcccagagttgaaagcttggcgagcagtgggataaagtgtatcccgaaggaatacgtgaggcctgaaaaagagttgaagagcatagggaacgtgttcgaggaggaaaagaaggaagggccagaggttcccacaattgacttgagagagatagattcggaggacgaggttgtccgaggcaagtgtcgccagaagctgaagaaagcggcggaggaatggggtgtgatgaacttggtgaaccatgggatccaggatga

SEQ ID NO: 205458 - DNA, 255 bp, Glycine max
ctacggagaagttgagttgtttggtgtggggggaagcccttttgccagaagggtgcagattgccctggaactgaagggagtccaatacacttactttgaagaagatcttaggaacaagagtgatcttcttatcaaatacaaccctattcacaagaaggtacctgtgcttgtccacaatggaagaccattggctgagtcccttgtgatccttgaatacattgatgagacatgggagaaccaccaccccatcttgcc

SEQ ID NO: 205459 - DNA, 253 bp, Glycine max
caagattctaagagagattttgctgctctttgaagaagggtgtttgcttgattttggagatgtcgctgctctcagatctcaacaaccttaacctctcagacactactgagaaggtgatcgcagagtacatatggatcggtggatcaggaatggacctgaggagcaaagcaaggactctcccaggaccagttagcgacccttcaaagcttcccaagtggaactatgatggttccagcacaggccaagctcctgg

SEQ ID NO: 205460 - DNA, 249 bp, Glycine max
ctatggtccagtggtgttgttcctccacggcttccctgagctctggtactcatggcgccatcagattctctctctcagctccctcggctaccgcgccgtcgctccctctctccgtggctacggtgacaccgaagcaccaccttcaatcagcagctacaactgcttccacatagtgggtgatctcgttgcgcttattgactctctgggtgtccaacaagtgttccttgtggctcatgactggggagccat

SEQ ID NO: 205461 - DNA, 253 bp, Glycine max
ttcaactctgcttcccctggcaaccttcttcttagttctctccgcttcttatctccagattgctggggcgaaagcacaaccgttgactagtctcaagcttaactctccgatccttcaggagtctattgctaaagagatcaatgaaaatcctgaggcaggatgggaggctgctataaatcctcatttctccaattatacagttgaacaatttaagcgccttcttggagtcaaaccaacgcctaagaaggaactg

SEQ ID NO: 205462 - DNA, 257 bp, Glycine max
ttcaggtactgcgtttcggaagcagacacagatggctcgtacgaagcaaaccgctcgtaagtccacaggaggaaaggctcctaggaagcagcttgcaaccaaggctgcacgtaagtctgcaccaactactggtggtgtgaagaagccccaccgatatcgtcctggtaccgttgctcttcgtgagattaggaaataccagaagagtaccgagcttttgatccggaagctccccttccagaggctggttcgtgaaattg

SEQ ID NO: 205463 - DNA, 258 bp, Glycine max
ccgatggctaatccctcactcttgttcttcagtctcctcctattatccgccaccgtagccgccgccgaacggatatacgatgaagacgaccttctgatccgtcaagtggtgccggatgcggaggaccaccacctgctcaacgcggagcaccacttctccgccttcaagacaaagttcggcaagacctacgccacgcaggaggagcacgaccaccgcttccgtatcttcaagaacaacttgctccgcgccaagtcacac

SEQ ID NO: 205464 - DNA, 263 bp, Glycine max
agaatggctcccaagggtttaatctttttggctgtgttatgcttctcagcactgtcactgagtcgttgtcttgcggaggataatggacttgttatgaacttctacaaggaatcatgccctcaggctgaagacatcatcaaagaacaagtcaagcttctctacaagcgccacaagaacactgctttctcctggctcagaaacatcttccatgactgtgctgttcagagttgtgatgcttcactgttgctggactccacaagaag

SEQ ID NO: 205465 - DNA, 258 bp, Glycine max
ggaaaaactaaggttgcaatcttgttgctttgggtcttgtgtatcaaattgcagttgaatgttgaagcaagaacatcatcagctttagaaacagaaatcgaagccaaattgaagcaactcaacaagcctgccgtgaaaaccattaagagtgaagatggagatattattgattgcgtcaacatctacgatcaacctgcttttgatcatccagccttaaaaaaccacactattaagatgatgcccgattttttgctagaa

SEQ ID NO: 205466 - DNA, 252 bp, Glycine max
atcccaactactactcacattcactgcagatctcaatccatggctaccattgttagcatcaaggcccgccagatctttgacagtcgtggcaatccaaccgtcgaggtggatttgacatgctccgatggtacttttgctagagctgctgttccaagtggtgcatccactgggatttatgaggcccttgaattgagagatggaggatctgactaccttggaaagggtgtatcaaaggctgttgacaatgtgaac

SEQ ID NO: 205467 - DNA, 252 bp, Glycine max
gcaagaaggattagcccatatcctccttgttggtagaagtatgactgttactcgttcgcggatagaaacatcaattcctcgcaaacatgggcctgcaattgctggttatgagaaagctttggataagttctttcagaatgttttgcaggctttcttgaaacatatagatttcaatgtggttcgttgtgctgtaattgcaagtccaggatttacaaaggatcagtttcaccgtcacttatttttggaagcaga

SEQ ID NO: 205468 - DNA, 248 bp, Glycine max
gttgcggctcctcccttccagataggggctcaaggcagttgggtcgacccaattcagagaatggtggagggcaggacgccaagaatctgagggtcaagcttgttctcttaggtgattctggtgttggtaaaagctgtattgttctacgatttgttcgtggtcagtttgatccaacatctaaggtaactgttggagcttcttttttgtcgcaaacaatagctctgcaagactctacaacagtcaagttt

SEQ ID NO: 205469 - DNA, 249 bp, Glycine max
gccagtactcatatgcttgtctcaaagattaagccatgcatgtgtaagtatgaactaattcagactgtgaaactgcgaatggctcattaaatcagttatagtttgtttgatggtatctactactcggataaccgtagtaattctagagctaatacgtgcaacaaaccccgacttctggaagggatgcatttattagataaaaggtcaacacaggctctgcctgttgctttgatgattcatgataactcg

SEQ ID NO: 205470 - DNA, 256 bp, Glycine max
gaaaatgtcgcagttgttggaaaaggccaaaaactatgttgcggagaaagtcaccaacatgcccaagccagaggcgagtgtcaccgacgtggacttcaagcgcgtgagccgcgacagcgtcgagtacttggccaaggtctccgttcagaacccttattccacttccattcccatttgtgagatcaagtactccctcaaaagtgctggcagggagatagcagcaggaacaatacctgacccagggtcattgaaggca

SEQ ID NO: 205471 - DNA, 246 bp, Glycine max
gtccagattagtaccacaaaaatggagaaatagaataactgaatatcgtatagctcaaaataaagatttaaccaaatgcaattcatatgaaaaaagccaattaattctttacaaagaacaacaagtaaacgcattaaaaaaaaaaattagaaaacaatatagatacgatcttttatcctataattttatcaattatgcagataagaaagactcatatatttatggatatagatccctatttcaagt

SEQ ID NO: 205472 - DNA, 251 bp, Glycine max
ctccctcgccgatttccataatagcagagaaccttcagaaaccctaatttctcaaaatcttcagaggacacacagcacaaccaacacctccacagcctctcctacctcccggagccatggccgccgccgactcctccgccgctccatcgcaccagttgtcgcagagggagacggacatccagatgatgctcgccgccgacgttcacctcggcaccaaaaactgcgactttcagatggaacgctacgtcttc

SEQ ID NO: 205473 - DNA, 249 bp, Glycine max
gcagaagcaggcgagtgaggtagagcgaagagtgaagagaatggctcccaagggtttaacctttctggctgtgttaatatgcgtttcagcactgtcactgagtccttctgttgcgggggaagggcaaaataatggccttgttatgaacttctacaaggaatcatgccctcaggctgaagacatcatcacagaacaagtcaagcttctctacaagcgccacaagaacactgctttctcctggctcaggaa

SEQ ID NO: 205474 - DNA, 250 bp, Glycine max
gtgagaaagagagagagagagagagaaactgagagaaattcgcaaaccctaatttcggaaagatcggcgatggctgcctccaaggatcgcgagaacttcgtctacatcgccaagctcgccgaacaggccgagcgatacgaagagatggtggaatcaatgaagaacgttgcgaatctcgacgttgaactgactgtggaggagcggaatttactttctgttgggtacaagaatgtgattggtgctcggagac

SEQ ID NO: 205475 - DNA, 247 bp, Glycine max
ctcgagccgttactatctataattaattaaattcctcgtggaatattgaagaagccatgtctacagctgggcaggtcatcaagtgcagagctgcggtggcatgggaagcagggaagccactgtcaatagaaaccatagaagtggcaccaccccagaaaggtgaagtgcgtttgaggatcctcttcaactccctttgccgtagtgatgtttattggtgggatgctaaggaccagactcctctgtttcc

SEQ ID NO: 205476 - DNA, 253 bp, Glycine max
ctcggattggtatattatctaattatatttgtaacgctgtatcaacgtctgacaagtggcaatcagtttcccactgtgctaaggccaacttacttgttgttttttgctgcaccaagcatggcaagtctagcctggaaatccatcacaggtgcttttgtcaccccatcaaagatgctcctctttctgtctttattcctttttatgtctcaggcttgcaggccagccatgttcaagaaatccatgaagaggttaa

SEQ ID NO: 205477 - DNA, 257 bp, Glycine max
cgctcgagcctctcgagccgctcgagccgtcagtatgcaatcccaaatggtgtgggaacagtgcgtggggagcatccctatggcgagcatccatcaaggacattatttgttcgaaacatcaatagtaatgtcgaggactctgaattacgaacactatttgagctatatggggacatttgaactttatacacagcatgcaagcttaggggctttgtgatgatatcttactatgatattcgagctgctcgcactgccat

SEQ ID NO: 205478 - DNA, 251 bp, Glycine max
atcggataagctcaagaatcaacaccgcgagaagcagtcgatgaaaccttaccgtggaataaggatgcggaagtgggggaagtgggtggcggagatcagagaacccaacaaaaggtcgaggatatggttgggttcttacacgacacccgtggccgccgcacgtgcctacgacgccgctgtcttttacctccggggtcccaccgcgcgccttaacttccccgaactcttgttccaggacgacgaccaggagg

SEQ ID NO: 205479 - DNA, 250 bp, Glycine max
aatgcgtagaaaaggaaaataaagaaattagcgtgaaaaatgttgggtgtgttcagcagctccatagtgtcgccgccggaggagctcgttgccgccggcagccgtacaccgtcgccgaagatgacggcggcggcgctgcggaagtggttcgaggagaagaacccctccgcagtgtcggtggaggtcggagagcatgtccagctcgcttatacccaccagaacgagtcgccgtttcagcccagatcctttg

SEQ ID NO: 205480 - DNA, 249 bp, Glycine max
ctttctcatcaagttactatctataattaattaaattcctcgtggaatattgaagaagccatgtctacatctgggcaggtcatcaagtgcagagctgcggtggcatgggaagcagggaagccactgtcaatagaaaccatagaagtgtcaccaccccagaaaggtgaagtgcgtttgaggatcctcttcaactccctttgccgtagtgatgtttattggtgggatgctaaggaccagactcctctgttt

SEQ ID NO: 205481 - DNA, 249 bp, Glycine max
tcagatcattctgcgcaggtaagacagagagaaagaactgacctcagcggcggcggcggcggcaacagaagaacaaccaccaccacacacaatgggtcgcgtgagaacaaaaacggtgaagaaatcctcccgccaggtgattgagcgttactactcgcgcatgaccctcgacttccacacaaacaaaaagcttctcgaagaagtggccatcatcccttccaagaggctgcggaacaagatcgcgggttt

SEQ ID NO: 205482 - DNA, 246 bp, Glycine max
tctcgagccgaatcggctcgaggggagccatatcaaaggcctgacatgggtcatgctgtcaacgtgctttcttctcttgtggcactctggaaaccatctgatcagaattctgaagatatatatggaattgagcttgacatgtccctaccacatgcacttaagaagtggcaagcttacgaaggtagaagtcaaatggagtcatctgcttcctcttcgcttcttccaagcttggataacacacagaca

SEQ ID NO: 205483 - DNA, 246 bp, Glycine max
ggaatcttgagaaatggcaggggacagcaagagcatgattctgttcatcggagggactggttatatcggaaaattcatcgtggaagccagcgccaaagctggccacccaactttccttttggtgagggagtccactctctccaaccccgcaatatcacccctcatcgacaatttcaaaggcctcggtgtcaatcttgttttaggagatctatacgatcaccaaagtttggtgagtgctataaagca

SEQ ID NO: 205484 - DNA, 246 bp, Glycine max
cggagaagttgagttgtttggtgtggggggaagcccttttgccagaagggtgcagattgccctggaactgaagggagtccaatacacttactttgaagaagatcttaggaacaagagtgatcttcttatcaaatacaaccctattcacaagaaggtacctgtgcttgtccacaatggaagaccattggctgagtcccttgtgatccttgaatacattgatgagacatgggagaaccaccaccccat

SEQ ID NO: 205485 - DNA, 240 bp, Glycine max
gacgagaccaaaaccaaagtgcatctcttcagtctccattgattaagcactcacactcatcattctcagggagggttattgagagaagggaagttatagaagaagtgaagaagcagttatggcttgcagggcctttgatatcagtgacccttttgaatttttgcctcagtatcatatctgtcatgtttgttggccatcttggcgagttgtctctctctggtgcttccatggccacttctt

SEQ ID NO: 205486 - DNA, 246 bp, Glycine max
cagtcccgtatttatgaaaggcccatcaactattgcacatttgtactctgatggcaaggcaagcgcttctcctctttgtgttctggctatgcttcttggcaagagttagatcggacgaggattgcgtgtacacggtgtacgttcggacgggttcgatcatcaagggaggcaccgattcagctcttggtctgaagctatacgacaagtccggctacggcatatacatcaccaacctcgaggcatggg

SEQ ID NO: 205487 - DNA, 252 bp, Glycine max
agacaaccagaacattctcttcagcttaacccttctttttcgatggctaatcggcacacgattattcttatgcagacctcgcagaacagagcaactaggacgttcatggattatgaatccataactcaggccatggatggcatatgtgcactgtatgaaaggaaactgaaggagttgaacccgaccataagaaatctctcgtatgacattactgatctctacaacttcatagatggtcttgcagacatgagt

SEQ ID NO: 205488 - DNA, 257 bp, Glycine max
aacaaacacttcaacaatctactctatacccgatttacaagatgagttcatttagccaaaatccctatgttttagttctgttcctcgttctcactgtgtggatatcccgtgtaatgtctcgcgggctcattacatctgagagacatgagaaatggatggcacaatatggtaaggtttacaaggatgctgcagagaaggagaaacgtttccaagtattcaaaaacaatgtgcagttcattgagtcattcaatgctgct

SEQ ID NO: 205489 - DNA, 259 bp, Glycine max
tcggctcgaggcgaagatgtcgggtcgtggaaagggaggcatgggtttgggaaaggatggagccaagaggcacaggaaggtgcttcgtgacaacatccagggtatcaccaaacccgcaattcggcgtttggctcgcagaggtggtgttaagagaatcagtggtctcatctacgaggagacacgtggcgtcctcaagatcttcctcgagaacgttattcgcgacgctgttacctacaccgagcacgctagaagaaagacc

SEQ ID NO: 205490 - DNA, 248 bp, Glycine max
ctccctcgccgatttccataatagcagagaaccttcagaaaccctaatttctcaaaatcttcagaggacacacagcacaaccaacacctccacagcctctcctacctcccggagccatggccgccgccgactcctccgccgctccatcgcaccagttgtcgcagagggagacggacatccagatgatgctcgccgccgacgttcacctcggcaccaaaaactgcgactttcagatggaacgctacgtc

SEQ ID NO: 205491 - DNA, 241 bp, Glycine max
cttcttcttactgggtgtgtgggttttggtagctttgtgagggagctggaatttgtaggttctatgctaatagtttgtgtatgtttgtcagctttgtagtgagcagatataatggctgttgaaaggtccggaattgccaaagatgttacggaattgattggtaaaaccccattagtatatctaaataaacttgcggatggttgtgttgcccgggttgctgctaaactggagttgatggagc

SEQ ID NO: 205492 - DNA, 245 bp, Glycine max
tgagaatggctcccaagggtttaatctttttggctgtgttatgcttctcagcactgtcactgtgtcgttgtcttgcggaggataatggacttgttatgaacttctacaaggaatcatgccctcaggctgaagacatcatcaaagaacaagtcaagcttctctacaagcgccacaagaacactgctttctcctggctcagaaacatcttccatgactgtgctgttcagagttgtgatgcttcactg

SEQ ID NO: 205493 - DNA, 248 bp, Glycine max
ctctcgagccgctcgagccgctcgagccgtcagtatgcaatcccaaaacgtgtgggaacagtgactggggagactccctatggcgaacatccatcaaggacattatttgttcgaaacatcaatagtaatgtcgaggactctgaattacgaacactatttgagctatatggggacattagaactttatacacagcatgcaagcataggggctttgtgatgatatcttactatgatattcgagctgctcg

SEQ ID NO: 205494 - DNA, 243 bp, Glycine max
gaagagaatggctcccaagggttcaatctttttggctgtgttatgcttctcagcactgtcactgagtcgttgttttgcggaggataatggacttgttatgaacttctacaaggaatcatgactacaggttgaagacatcatcaaagaacaagtcaagcttctctacaagcgccacaagaacactgctttctcctggttcagaaacatcttccatgactgtgctgttctgagttgtgatgcttc

SEQ ID NO: 205495 - DNA, 244 bp, Glycine max
gaatctcagaattctctaaaagagatctttttctgctctttgaagaaagaagggtctttgcttgattttggagatgtctctgctctcagatctcatcgaccttaacctttccgataccaccgagaaggtgatcgcagagtacatatggatcggtggatcaggaatggacctgaggagcaaagcaaggactctcccaggaccagttagcgacccttcagagcttcccaagtggaactatgatggt

SEQ ID NO: 205496 - DNA, 247 bp, Glycine max
ctttcgtgctagtgagcgaaagttctctctgcttctctctcttagactcaaaaccctattgcgtgctttgcaatcgaccccgattatggccaacagtaacctccctcgaagaatcatcacggcaacgcagcgtttgctcagtgaggcaacacctggaattagtgcgtccccttcggaagacaatatgcggtatctcaatgtgatgatccttggcccaactcagtcgccttatgaagggggcgttttc

SEQ ID NO: 205497 - DNA, 248 bp, Glycine max
gtagcagcaattcacactggtctttgcttctcgttactcatttctcacctaactttctattcttctcagtctcagatcagaaccttagccatggcagcgttccagaagatcaaggtcgccaaccccatcgtcgagatggacggagatgaaatgactagggttatctggaagtcaatcaaggacaagctcattttgcccttcttggagttggacatcaagtattatgacttaggccttccttaccgtga

SEQ ID NO: 205498 - DNA, 249 bp, Glycine max
cctcaaactgctgttggactccctagtctcggtgtcggcacagaagggtttcgccgcgactacccaaaacgcgctcaccggcgcgtaccaatgcaggggagacctctccaactccgactgctacacctgcgtgagcaagattccggggatggtgaagcgcctctgcggcggagatgacgtggcggcggcgcgggtccagctgagcgggtgctacctgcggtacgaggtggtcgggttcaaggtggtctc

SEQ ID NO: 205499 - DNA, 477 bp, Glycine max
cttgctagtttgtttatcactcactcactcactctttgaaatgggtaaacaagtattgaattcctttcctctcatcgttttcttcttcattttgttttccactgtttccgctgatgaagtttccaagaccttcatcttccgcgtggattcccaatccaagcccaccgtgttccccactcactaccattggtacacctccgagttcgcccaagaaaccagcatcctccacttatacgacaccgttttctgcggcttctccgcagtgctcacaagccaccaagtcgcgtccataagccaacacccttccgtcctcgccgtcttcgaagaccgccgccgtcagcttcacaccacgcgctccccgcagttcctcggcctccgcaaccagcgcggcctctggtccgaatccgactacggctccgacgtcatcgtcggagtcttcgacaccggcgtctggccggaacgccgcagcttctccga

SEQ ID NO: 205500 - DNA, 514 bp, Glycine max
acactaaaaacagtttctcttttatacatactctctgttgtcatttgtcaacactacaaaaaatgaaaaagtaaggtagaatctttaatcattcacaaatatggagcaggctgcagagggcattctgtattctaagataatacatatgaaagatgttacatatataggctattcaaacagtggctggtactggagttgaaggagcaacacggttttcagctggaatttcaacaaactcagacaatatagcacggaattcatctccgctcagagtctccttctccagaaggacttccacaatcttgtcaatggcctcacggttgttccttatatgctccagtgcaatttcatatgcttcatctgagatcctcttgatggcagcatcaatgtcttctgcaagcctctctgacattgagttccttgccatcattctcatgatgacatccccaccttgtgctgatggttccataagtgaccaaggaccaatatcagacattccaaatgtggtcaccat

SEQ ID NO: 205501 - DNA, 474 bp, Glycine max
agagggggtcagagtgagaaagagaaagagagaattcgtaaaccctaatttcggaaagatcggcgatgactgcctccaaggatcgcgagaacttcgtctacatcgccaaactcgccgagcaggccgagcgttacgaagagatggtggaatcaatgaagaacgttgcgaatctcgacgttgaactgacggtggaggagcggaatttgctttctgttgggtacaagaatgtgattggtgctcgcagagcgtcctggaggatcctgtcttccattgagcagaaggaagaaacaaaagggaacgagttgaatgcgaagcggattaaggagtacagacagaaggttgaattggagctatcgaacatctgtaatgatgttatgagagtgattgatgagcaccttatcccttcggctgcaacttgtgaatccactgcgttttactataagaagaaaggagattattatcgttatcctgctg

SEQ ID NO: 205502 - DNA, 510 bp, Glycine max
gcttatatcttccattgtttcaattgtataatttcatctaaacaatattcagaaaaaatgaaagaaaatatcctcataaatcatgtttgctatctcccctactaaataattagactccatctatacctcaaaccccacgtaggatttatgtacaaacagacgaaagagggggcaaaaaataagtgaaatttaaagaggaccttggacaactttcaataaccaagtttagtcccactctgcctatctacccatgcatcgttaagctaagctatgtactcattcaccttttggctttactttgtattgtttggacctgaagtgacgattgtgatccaccactgagtgcagcagcagcagattcaacatgtgtaagaagatattcatatatcttcttcctcaaccggtcaattgtctctgctgatatctcgcatgattctccctcatccttgctcgatcctatctcatctaaccaatcattaacactctttagttgagtgagcattcctgcta

SEQ ID NO: 205503 - DNA, 530 bp, Glycine max
catgttccctcaaggagcagatgcatatattgatgaacttgcatcagttattccaattgcagatggttctgtcagaacagcactggacactggttgtggggttgcaagctggggagcctacttgctaaagagaaatgtcctggctatgtcctttgctccgaaggacaaccatgaagcacaagttcagtttgctctagaacgaggggtacctgctgttattggtgttcttggcaccatccgccttccatacccatcaagagcattcgatatggcccagtgttctcgatgtctgataccatggacttcaaatgagggaatgtatctaatggaagttgaccgagtcttaaggcctggtggatactggattttgtctgggcccccaattaattggaaaacatactaccaaacatggaagcggtccaaggaagatctgaaggcagaacagacaaaacttgaggagttagctgaaagtctttgttgggaaaagaagtacgaaagggtgatattgctatttggagaaagataataat

SEQ ID NO: 205504 - DNA, 433 bp, Glycine max
cggattcgcttgctcgttacaagtcttatagtaaatgcagaccggtaccatccatgaagaaaaaaaattggctgccgtgccgacgctgtttatggactgctgttgcggctcgacctgccgaagtcatctttcatcccatgcactgaacgcctaatgctcgtcgtaatccgtcgcttaaaagaccatctggtgtggcctgtttgagctgcggaggctgaagctggcaccgaggtagtcggcaaggtgggcctccttcttgatgggggctaaaagtgccttgtcgacagacttttggtcctcaatacgggcctttgcggtctccttcttctcgggcttctcgccctgcttgaagaacgagtccttaccgggcttgcgggcggccttgtccttggtgaagtaaccattctctgtgaccttgtccaagaccttggag

SEQ ID NO: 205505 - DNA, 545 bp, Glycine max
  unsure (1)..(545): unsure at all n locations
gttctaattacattgactataacggcatagagaagtcccttgatgaagatcggagtaaacttgagaagataattcaaggcatggctgctagtagccttagatgtattgcttttgcttgcatgaaaatttcagaagacattgattataacgataaggagaaagtgcatcaaatccttagaaaagatggcttgaccttgctaggtattgttggcctaaaggatccatgccgaccagacgtcaagaaggctgtggaaacttgtaaacttgcaggtgttagcatcaagatgatcactggagacaacattttcactgcaaaggccatagcaacagaatgcggaattttagaccttgatggccatgtgaatgcaggagaagtggttcaaggtgtggaattcaggaactacacagaggaagagagaatggagaaagtcgagaagatccccgtgatggcaagatcgtcccctttggacaaacttttgatggtgcaatgcttgaaaaagaaaggtcatgttgttgcagtcacaggagattgcacanatgatgca

SEQ ID NO: 205506 - DNA, 545 bp, Glycine max
  unsure (1)..(545): unsure at all n locations
agtaaaacaccttctattatttgaagccacaaagttcagcagaaccacaatgaacaccaggaaatattaattgattatctcaagtgttttttttagtagtgagacaatgtaactcaaaattataaaggataacaatccaatatgaacaagataaattatttgattatatcaagtcatagcttctcttcaagtggagaatgcttaggttctcagggtgtgtataagcaggttccatcatcacttcttgcagttgggtcgaagtttgaggcatttggatcagtacaaccttcaggaacgggaatttttacttgctgggctgctttgccatagaaagttcctcttttgatggcatcctgattagcatcaccaagagcagcctcgttcaagtacttgtctgccagttgtactctcttcacattctcttgntcttggacaagcatgttaccatactccaagagcttgctcaaagtcatcttcggttggtcaaaggttggaggtccttccttggagttcacaagcttcttccaatcaagtcaacaccaaca

SEQ ID NO: 205507 - DNA, 506 bp, Glycine max
aaagcttagagaataacaatatatttatataattttactcgtgagtaacaacaaccacttgtttaccaacattgcgaccggtatagaggccaaccaaggctgcagggcccttctcaaggccctcagcaatgtcttccacatacacaaccttcccttctctgatatgaggcaggacaaactccaagaattttggatataaatgatagaaatcagttgcaataaaaccttccattttaacccgcttaaatatgagatttgccaaatttgttacaccatcgaactgagtaagattgtactgcgagatcattccacagacaggtatgcggccatgaaatttcatgtttgggagtactgcatcaagtgtcttgcccccaacattctcaaagtaaatgtcaatgccttctggaaagtaccttttcaaagctgcattgaggtctggctcttcttgtagttaaaagcttcatcaaatcctaatttattcttcagcagatccaccttctctttac

SEQ ID NO: 205508 - DNA, 575 bp, Glycine max
gagcaaagcgtcttgctatcataggatggatttgccttgttttcaacatcagtgtctttgctgcgcctctcttcattattaggcgtgtcataaagacgaggagcgtggaatacatgccatttactttgtcaatgtttttaaccatcaatgctgttatgtggttcttctatggccttctcctcagggattattacgttgctcttccaaacacacttgggtttgtcttcggcataattcagatggggatgtatttgatgtacagaaacgccaccccagtggcactagaggagccagtgaaggctcaagaattgaatggccacatcattgacgttgggaagatgggaacaatggaaccgaatcacgcagctactgctggtgctgttggcaaagtttgaatatcaccattgagattatatgaatgtggagaaacaagggatcaatgacaagaaaagttaaaaaaagggaataacctaaacttcaattactttactgagtgaggtcacatctaatatcactcatatctacaatgcacgaatagtaagtagtatttggtataagtgtaaattagttcgatt

SEQ ID NO: 205509 - DNA, 502 bp, Glycine max
  unsure (1)..(502): unsure at all n locations
aggacttaaaagaattatcacttgaatgaattattagttcaccaaactgtgaaagctagactttcataattacaaactgtaactaacatcgaccccttatagatatgttcaatatttgttcaataacaagtatatttctcaactgcctgaaggtctagttagtgtataccaatgtgactagcaattgacaggaaatttgccaagagaaaacctttcaggaagaagctgaatgacatgcattttgcgggcaaaattttgatagatcatatttccttatgtgctggcactagacaccaattccgaactttcaacattgcttcctacatttttctgaattactggaggagatgaaggtgtccttgcttcagccaaattcaaccgcaagggccgaccttgtacctncacaccattcatgatgtccaaagcagcccgtgcagattcggcagtttcaaaagaaacaaacccaaaacctcgagatcttccactgtccctctcatagatg

SEQ ID NO: 205510 - DNA, 528 bp, Glycine max
ttcatataatattgcttcttggttcattctagctaattttgatggctcttccaatttgtctcaccgttattgcaattttcaccctttgctgtgtcattaattgtaacaatggcgttgaagcgtttcatgacatatacccggatcttcaatccatttcagcacgttcggtgagcaaacttcagagaactggataccattttcaacctcgtaagaattggatcaatgatccaaatgggcccatgtactacaatggaatctaccatctattttaccaatacaacccaaaaggagcagtttggggcaacatagtgtggggacacgcagtatcaaaggacctcatcaattggaaagaacttgaacctgccctatacccatcaaaaccctttgacaaatactgggtttggtccgggtcagccactgtactcccgggttaaggacccgtaatcctttatactggagtcattgacaagcaaagcaatgaggttcacattgatgccatacttgaaacaaaatccacccaatttttag

SEQ ID NO: 205511 - DNA, 535 bp, Glycine max
ctcccacaccacacccatgacactcctcctgctccttattctcctctttcacgcggcggaagccaagggacagtggcagctcctccacaaaaacatcggcattgtcgccatgcacatgcagcttctccacaacgaccgcgtcatcatcttcgaccgcaccgacttcggactctccaacctaaccctccccgacggaagatgccgcaacaacccaaacgagttggtcgtcaaacgcgactgcaccgcgcactccatcgaatacgacgtcgcagccaacacattccgcgctctctttgtccaaaccaatgtctggtgctcctccggttcggtctctcccgacggaacattagtccaaaccggtggcttcaacgacggctaccgtgcggtcagaaccttcaccccgtgccgctcgtgcgactgggcagaagttcagcatggactcgcggtgcatagatggtacgccaccaatcacatcttgccagatggacgtcaaataattatcggaggaagaagacaattcaactacgagttttac

SEQ ID NO: 205512 - DNA, 344 bp, Glycine max
agaaacgggaaaacatattttttttttatataaaatcccttggaaccccattaaacggaaaaaccccggaggggataaaccagggtaaaaaaaaggctggcagaaccaatttatgcaaaccccccagcatttttatccttcccaaaaaaaaccctttttttttactagcaaagggaagggcttccttagcaaggggatttacatccggaaccggggggtggaccttagcaactttagcaatagcctgggttttttaagggggtccacctttcaaaaagaccccgaaaacttttccgtgtttaaaccagtatggcccaaactttggctttgaaaaccccggattg

SEQ ID NO: 205513 - DNA, 455 bp, Glycine max
agagggggtcagagtgagaaatagaaagttagaattcggcaaccctaatttctgaaggatcggcgatgactgtctccaaggatcgcgagaacttcgtgtacatggtcaaactcgtcgaacaggccgtgcgtctcgaagagatggaggtatcacagaagaacgttgctaatctcgacgttgaactgacggtggaggagcggaatttgctatctgatgggtacaagaatgtgattggtgctcgcagagcgtgctggaggatcctgcctttcattgagcagaaggaagaaacaaaagggaacgagttgaatgcgaagcggattaaggagtacagactgaatggtgaattggagctatcgaacatctgtgatgatgatatgagagtgactgacgagcaccttatcccttctgctgcaggtggtgaatccactgaggattactatacgatgaacggagat

SEQ ID NO: 205514 - DNA, 541 bp, Glycine max
aaaatcagaatatttcttcggagtggatataataattgttgaagcgtacaaaatttaacaaatccaaaaaagataagatgatttgggtgagctttcactgtgacttacgtctatagtgaagagagctacactgaaagcttaggccatagaaatagagctacagaatacacttatacacctaggcattagtaacttatataagtgaatattatggcactattctgagaccttaatgctttcacttgtgagccacatcttcttttgaattataagcactacttcatcatcatcatcatctttaccttgatctacatcatatatggtcacagcattccagtgtaatgctgacaggtatttctttatgtactccaccatggaacgcttatcatggatgatgatgaaaccctttggccttaggattctgtcaatctcaattaataaatcctctggactgcattctttcttaataatatcagaaaacacagtccatgcatggagtagatcgtacgttcgagggtaggttgaaaatgcttcacaccag

SEQ ID NO: 205515 - DNA, 519 bp, Glycine max
gtaggttgctgcaaaaactgccagccatgccaacaagacattgagaattactgcagcaagaagatctggtcttacaatgatgtttatgtcgatggaaaacccacacagggtggctttgctgaaaccatgatcgttgagcaaaagtttgtggtgaagattccagagggtttggcgccagagcaagtggcaccattactgtgtgcgggtgtgacagtgtacagtccactggtacactttgggctgaaagagagtgggctaagaggtggaatattggggcttggaggagtgggacacatgggggtgaagatagcaaaggcactgggtcatcatgtgactgtgatatgctcttctgacaagaagaaacaagaggcacttgaacaccttggagctgatcaatatctcgttagctctgatgccactgccatgcatgaagctgctgattcacttgactacatcattgacactgtgcctgttggtcacccttttgagccttatctcttcttgctcaaacttgatggc

SEQ ID NO: 205516 - DNA, 592 bp, Glycine max
aaaatcagaatatttcttttgagtggatataataattggtgaagcgtacaaaattaacaaattcaataaagataagatgatttgggtgagctttcactgtgacttacgtctatagtgaagagagctacactgaaagcttaggccatagaaatagagctacagaatacacttatacacctaggcattagtaacttatataagtgaatattatggcactattctgagaccttaatgctttcacttgtgagccacatcttcttttgaattataagcactacttcatcatcatcatcatctttaccttgatctacatcatatatggtcacagcattccagtgtaatgctgacaggtatttctttatgtactccaccatggaacgcttatcatggatgatgatgaaaccctttggccttaggattctgtcaatctcaattaattaaacctctggactgcattctttctaataatatcagaaacacagtccatgcatggagtagatcgtacgttcgatggtaggttgaaatgcttacaccagttgtaactggtctattagtcctctgtcgatattatcttgagatttttgtcattttt

SEQ ID NO: 205517 - DNA, 557 bp, Glycine max
  unsure (1)..(557): unsure at all n locations
attcatcacaacttctctcgtacctctgcagagaagtaaacatataggagtgagagggagggagagagaaggaaagcttggtagcgatggggaaggagcaagttcaggtgctgaatgccctggacgtggcaaagacacaatggtatcatttcacagcaatcatcattgctggaatgggcttcttcactgatgcttatgatctgttctgtatatcactagtcacaaagctacttggtcgcatttactaccacgttgatggggctgcaaagcctggttcattgcctcccaatgtgtcagctgcagttaatggtgtagcttttgttggaacactttcaaggcaactcttctttggctggctcggcgacaaaatgggccgaaaaaaggtctatggcatgacccttgcgcttatggttatagcttccattgcttcgggtctatccttcggacacgatgcanagactgtgatgacaactctatgcttctttcgcttcttgcttggttttggcatggtggagactaccctattcgccaccataatgctgagattcttaatagag

SEQ ID NO: 205518 - DNA, 515 bp, Glycine max
gaagaaacttaatcgatcatcacttcacttcactaatacatcatggcagacgagacccagaacaagtatgagagctctgaggttgaggtccaggatcgtggtgtttttgactttctcggtaagaaaaaggatgaagaagacaagcctcatcctcaggaggaggtcatcgccaccgagtttcaaaaagtcactgtctcagaccaaggagagaacaagcacagcctcttagaaaagcttcaccgatctgacagcagctctagctcttcaagtgaggaggaaggagaagatggagagaaaaggaagaagaagaagaaggaaaagaaagggctgaaagagaagatcgaggagaaaatagagggtgatcatcatcatcacaaggatgaggacacaagtgtccctgttgagaaagttgaggttgttgaaacagcacatgctgaggaaaagaaggggtttctcgacatgattaaggagaagctaccagggcacaagaagacagatgaggccacagctactac

SEQ ID NO: 205519 - DNA, 404 bp, Glycine max
ttgtcttttttttttttttttttttttttttttttttttttttttttttttattttttttttttttttttttttattgtacagagccaaattccaggcttacaaaccggggaatccgaattaaaagatctcatgaagggtaacctaaagcaaattcaggggggggtgttttaaaaggtcataatggggaaaacctggggggtccccaaataaaatggcacgagacatatgcccattgtgccaagtggggaaagaacgaaaagggcctgaccgatggcccttaccaaaaggagcgcaaactgaatgggaaaggggaccccccttgtgcaggctgcttaaacgcggccgaggggggggtaacctccggcaggaacgctgcaatagccggggtcttaaagcccgtta

SEQ ID NO: 205520 - DNA, 494 bp, Glycine max
gcaattttataggtcctccaagaaagagagagagagagaggaaaacgaaaccaagggagaaaaacaaccaccgtccaaaccaccaccaacaacgtacgtcttacgttgttacatggccactcgtgttatcccaccaagaatcctaaggaagcttcgctacaacaccgtcacaaaacccctcaactcctctcaccctcctctctccccgtctctctctccttctccctgcctcctacctgctccgctgccgtcccccgccgtgctccgtccctccgccgccgcctccgacgacctcagcttccgcgacgtcgaaaagctcttctcctctgtctccaccaccagcctcctccgctcctccgccgtgctgcacgccaccgtcgtcgagcccatggttgacttcggcacatggctcttgcgatcaaatctcatgcacgtgcatggcatccgcgacctcatcctcgccaccgtccgcaacaccttcttcgaccactttt

SEQ ID NO: 205521 - DNA, 406 bp, Glycine max
aaggggcccctgtaactcaaaatttttgaggaagacggtccaatttgaaaaattttgtaggatcatctcaaacttagcatcttttttttgcccctaaaacattgaaaatgctaaaaatgttacccgcaagttccattacaacttttaccccttggattagtccaacaacctttacgaacagaaatttttacttgccaagtttgctttgcctccaattcaagactggaaaaaagttcccctctgaatagcatcctcgttagcatttccaagagcagcctcgttcaagtacttgtcagccaattggacttttttgacattctcttgttcttggacaagcttgttaccatacagcaagagcttctccagagtcattttgggctgctcaaaggttggaggcccatctttt

SEQ ID NO: 205522 - DNA, 459 bp, Glycine max
gcattaaaatcctatatttaggagcaagagtattgaaaaaataacacaagctttctcacttgcgagtgagtacctatacttactgaccctttttgaggtcaaatcaaatccacatgccatttgctcccccatacttggaaccaaaagatgatgcatgaaaataactagactctctttcagaatggggaaacccccctctctgcctcattgacaagattacaaaatctttacaacctatacaaaatttaacagattcagtaactgaagttagaagatgagatcctccattctttctaagtggagtctggataatgaagccatgtaaatgaatgccattacttttttgagaaagtgagatatgggtcttgagcaatggttaatacatctggtctctcagcctgggtatatgttagacaccgtcgaataaaatcctttgcctcattagaaatggtaggtcta

SEQ ID NO: 205523 - DNA, 491 bp, Glycine max
gcataaacgcagttcatagtttcatatatatctttataaatatcatatggtgatgaaggtggctaggcctcttcattgcagatacacacgacctctaagcatggcccctatagcttccaatggagaatggtggccacatctttaacctaacaaagaagaaaaatgcagtggtgaaagaccataaaaatattacacgttccttgaacaaaacggattgaacttcaatttggaatagagggtgatatgtggagaaatctccatatccacttttattattaggaaattcagcacatgcatgcattataacaagagcaattaattacagagtacattttagataggagaatacttagggaaccaagatgaggtcattgataatggttgatgttcatacggagaaagaggatgcaaggccaaactgaaggccccaaagctcaaaagatcctttaacaaagtcataggatcctcctttcagtgacaatggttttggt

SEQ ID NO: 205524 - DNA, 548 bp, Glycine max
  unsure (1)..(548): unsure at all n locations
aagaacactctcttgaacattcatggatccagtgagcgtgtggggtaacacgcccttggcgacggtggatcccgagatccatgacctcatcgagaaggagaagcaccgccaatgccgcggcatcgagctcatcgcctccgagaacttcacctccttcgcagtcatcgaggccctcggcagcgccctcaccaacaaatactccgagggcatgcccggcaaccgctactacggcggcaacgaattcatcgaccagatcgaaaacctctgccgctcacgcgccctccaggccttccacctcgacgcccaatcctggggcgtcaatgtgcagccctactccggctcccctgccaacttcgccgcctacaccgtcgtcctcaacccccacgaccgcatcatggggctggatctccccttcggcggccacctcacccacggctactacaccttcggcggcaagaagatctccgncacctncatttacttcgagagcctnccttacanagtaaactccaccaccggctacatcgactacgaccgcttggaggaaa

SEQ ID NO: 205525 - DNA, 426 bp, Glycine max
aaaaccatgtgcaccagagaggtttacatcttgttccaacacacttatttcattagataccgccgttccatccaatgaatctagtgtagacaaagcttttttgggtgcaccaacaagttccataaaatcagcaccactattaagcagatctgtatattttccacattgagtaattttcccatctttcatgaccaatataaggtcagcagcaggtaagaactccacttgatgagtgacataaaccactgtctttgaacataaaaggcctagcaagcattccttaaagaggtgagatcctgtgtgagcatccacagcactgaaagggtcatcaaatagatatatatcagcatcttggtaaagtgcacgtgcaatttgtattctttgcttctgtccaccactcaaatttattccacgttctcctataat

SEQ ID NO: 205526 - DNA, 605 bp, Glycine max
tggctcccagaaggccctttcccttcccactgggataggtattgtggttgcaggccctaaagctattgaggcctcaaaacatgctaaatcacttagagttttctttgactggaaagactacctcaaattctaccagctaggaacctattggccatacactccttccatacatttgctgtatggtctgagagctgctcttgatctgatttttgaggaaggactcgaaaatgtgatcgcaaggcacagtcgtttaggcaaagcaaccagacttgctgtagaggcatggggtttgaagaattgcacccaaaaggaagagtggtacagtgacactgtgactgctgtttttgttcctgcttacattgatagtactgaaatagttaggagggcatggaagagatacaatttgagcttatgtcttggactgaacaaagttgctgggaaggttttcagaattggacatcttggccacttgaatgagttgcaactgttgggatgtctagctggtgtagagatgatactcaaagatgtgggttatcctgttaagcttggaagtggagatgcttgttgcagtgcttactaccgaacactatttctatgatcccttt

SEQ ID NO: 205527 - DNA, 537 bp, Glycine max
aagtacacaactcacagcaaaaaggtttataagctgtaaaggtacatgtaaccataaacaaaaatagtctccaagactataaaaacattacattttagacaaattagtcttcttccacttcatcctccgtcaacacctactacaactgctggtgttgctgctgcctaacatgtatcatattcactacaaacatcttagtaggagtagcctttgacgaacaactccttcttggcttcctcagattcaccctcaccggtgtacttcccaagctgggcgagcgagttggacttggcacggaaaagaagtgcatcttgtgccgccttcacattctctgggcggcctccccatgtcttcaaggcagtgttttggagggctctggcatacgagaacgacacgtgccacgggtttggagattggttcatggcattcaagttgagggtagcttcaacctcagactgtccaccagacaaaaacataattccagggacagcagggggaattctcctgtgaaggagcttgagggtgtaatcagcaact

SEQ ID NO: 205528 - DNA, 511 bp, Glycine max
cccattctctcgcatctcaatacccttttgatttgtgaaaggaaagcaaacatgcttgatcaggtccaacaccctacaatcatggacaaggttgctggccagctccatctccgttctggtgtttctggtattaggagttatgaaggagcctactgccaccccacaatgtaccaaagaccctcttttgggaattactcgaatgctgcattgcagtatcctgtgatgccctcatgcaaagctactatggatttgtctgctgctgcaacaactgcctcccccgtctttgttgctgctccagcagagaaaggccattttcttatagactttctcatgggaggtgtttcagcagctgtctcaaaaactgctgctgctcccattgaacgtgttaagcttttgatccagaaccaggatgagatgatcaaaactggtagactttctgagccctacaagggtattggtgattgctttaagagaacaatggcagatgagggtgttgtttcttatggagagg

SEQ ID NO: 205529 - DNA, 574 bp, Glycine max
  unsure (1)..(574): unsure at all n locations
ctatcgtagcaaagaaagaaagaaagaaaaccctagcttaccttttcaactttcaagatgcaaatcttcgttaagacactcactggtaagacaatcacccttgaggtggagagttcagataccatagataatgtaaagtccaagattcaagacaaggaagggatcccaccagaccagcaacgtctcatttttgctggcaagcagcttgaggatggacgtacacttgctgattacaacatccaaaaggagtccactcttcacttggtgctccggctccgtggtggaatgcaaatctttgttaagacattgaccggaaagacaatcacccttgaggtcgagagctctgacaccattgacaatgttaaggctaagattcaggacaaagagggtatcccaccagaccaacaaaggcttatctttgcaggaaagcagctagaagatggcagaaccttggctgattacaatatccagaaggaatctaccctncacttggtgctccgtcttcgtggtgggatgcaaatcttttgccagaccttgacttggaagacaattacccttgaagtggagagttctg

SEQ ID NO: 205530 - DNA, 554 bp, Glycine max
cattattaagaaaaggtaacgaagataaaatacgagcttgttttatagcaattgttattaatcgttgttgttttaaggtcaatctatttacgcgtctggataatatttttccttgttcactaataaatcgactaattaaacccatgtttttataatcaattcggtcccccgattggatcgggggcaaacgcctacgaaaagatcgcttggatttcataaagagtcgcttagatttttccatggtttatttatccctattccaaaaatcacatttattacaagaaatactataaaggatttgtttttttattctgacttttttaatatatgttgctatttttttaatatatgtcgctatatactgatatttgtatatattcaactgttaatgatagaatacagatagatctatctatttagataagaaaaatagatcattttacatgttaagttctttggttcgaagggtaacacacaagcgatcaatttgatctacttctttatttctgcgtgaattgatgttagcaacacggggacaaaatttttaattccat

SEQ ID NO: 205531 - DNA, 503 bp, Glycine max
ggtgcatcaaatcaacagagataactctctgaatctttatattatagatctattattgattcattacatacataattcagaaggaaaaaaaaaaaaacataacaaaaaaaaaagtgtccgcttcagatttgatcgcatttttcctattgcacaaagcctgcgcatttcattcaagtttcaacagaagcgtaaaaattgcacaagtgtcttagataaccacattagaaaatgaaaagggcaaccaccacccatcattataataagtaaacaatacctacaaattgcactattgcaaggcattggcaccagccacaatttccagaatttcaccagtgatcttagcctggcgctccctattgtacacaatggacaagttcttcttcaactcaatagcattatctgtggcattgctcatggcactcattctggcggcgagttcactcgccaaggactcctgcaatgccctcagaacctggctgttcaaatacaagtgcagcagtgca

SEQ ID NO: 205532 - DNA, 524 bp, Glycine max
gaaaaataaatttcagttttttttcataatgggttccaccaatgccaataatgaaacggccgcagagattccggagtggatccgcgtcttcaaagatggctccgtggaacgcccacttgattttccgatcgtgccaccgactctcaacactggactctcatccaaagacatcaccatctcacaccacccttcaaaaccaatttctgcacgcatttacctttcaaacatcaccaattcccagactaagaaactttccatctacgtctactttcacggtggtggcttcttctttgaatccgctttctccaaacttttcagtgaccattttctcaaggtggtccctcaagccaacattatagaggtttccgttgagtacagactcgctccagaacaccctctccctgcagcttacgatgattgttgggactctctcaaatgggtcgcattccattctacttaagacaccaccctcaacaacactgaatcttggttgactgagcactgtgacttcacagagtgttcat

SEQ ID NO: 205533 - DNA, 378 bp, Glycine max
  unsure (1)..(378): unsure at all n locations
atgagattgagttgagacaaagagatgattctcattaaggtcctagagtcctatcttatccaaaaattaggacatgttaacatgcacactagcagtcttataggatttacaaatgggacaaatgtggagtgaagacccacacacagtacacaagcacaaatgacggcacggcaaaatcagcacacaagactcttccttcctacagttcctgcacaacctcccattaccaccaccctccttatccttcacccctgcgcaccccgctaacgtgcgccaaccccccgtttccttttctaaaccgtcctcctcggtgctcccgcagcaggactcggcgtcgtccatctccgcgccgtcgacacggtggcgccttcgncgacg

SEQ ID NO: 205534 - DNA, 580 bp, Glycine max
cggattagcatcaaagcaagtttacaaaatttgggtgcgtcctggattgacccttttgccccctctccctcaccctccactaactcctcctttttggtttttataaagcacattcccaatagaggagggtccctacacaacacaacccttcaatgacgtccatggccactttcttcgcccaaacctccttcccctcccactctctctccaaaaccttcgatacccatttcgcccctgccccgaaagtcaacgtctttgtgaacttcagggcgaggaggcacgttggggtgcgagtttcgaacgcgctgatcgaaccagatggagggaagctcgtggagcttgtggtgacggattttgagagggatttgaagaagggtgaggctctttcgttgccgaggatcaagctctcaaggattgaccttgagtgggtccatgttctcagcgaatgatgggccacacccctgaaaggcttcatgagagaagccgagttcctccaaacgcttcatttcaactcgctccgactcgatgatgggtccggtcgtgaacatgtcagtgcccatcgtgcttgctattgatgatg

SEQ ID NO: 205535 - DNA, 555 bp, Glycine max
agaagctgaatagtgcaggaatagtcacagttgaagactttcttcggcttgtggttaaagatcaacaaagattgcggaatatccttgggagtggtatgtcaaacaagatgtgggaggctcttttagaccatgcaaaaacatgtgttctaagtgggaagctctatgtttattatccagaagatgcaagaaatgttggcgttatttttaacaacatctatgagctgcgtggccttatatcaggagaccaattctattctgctgattctctcactgatagccagaaggtttatgtagattcattggtgaagaaagcatatgaaaattgggatcaggttgtggattatgatggcaaatcactcgtgaatgctaaaatttcttctgaaaatgaacttcatgtggagtcaattgattatggtagtggtttagatcatcaactgcaactgccggtccttccagtgtctgttccttctgaacagcaatcaattcagggatacctgttggaggttacaacgataataatatagtaacaccgattccaacccaatctttgatttc

SEQ ID NO: 205536 - DNA, 486 bp, Glycine max
tcctcttcaaaaaaccccacagccactcttgatttcaaaggcactatcttaggaatcaaaccggcgccggttatagcttctttctcagcgagaggacccaacggtttaaaccctgagatacttaaaccggatttgattgctcccggtgtgaacatcctcgcggcttggaccgaagctgtcggcccgaccggtttggactctgatacgaggagaaccgagttcaacatcctgtctggtacctccatggcttgccctcacgtgagcggcgccgcggctttgctcaaatcggctcaccctgattggagccccgccgtcataaggtccgccatgatgaccaccgccaccgtcctcgacaaccgtaacaaaaccatgaccgacgaagccaccgggaacagttccacgccttacgatttcggcgctggccatcttaacctaggaagagccatggatcctggtttggtgtatgatatcacaaacaatgattat

SEQ ID NO: 205537 - DNA, 489 bp, Glycine max
actgaaagaatataatgcatttaatcataaatccgcaaaaacatggtacgttttggagtctaaatcaataagtcgcagggctgcaatagccgccgcagcagacatgagggcaaagaaacaaatattgatccaatgccagagcttttgggtggatgttagtttgttctcatttgtcactaggtacatatggtttgcaaggataaatgtgaggggaaatgtgctgatagctccagtgaggctcatgaaatctccaagaaatggcaacagagctgatacaaatgtgtttacagtcaggtagccacctcttaccaagactcgaaatgacaagttcttgaaagccagggcactccctttgatcccatatttggtatccaaatactcatacattggacttgcaaatatatgcaatgcaatgactgattgaagaaaggctgcaatattggccatggccttagcccaaactggaccattcacatcactcatcaaata

SEQ ID NO: 205538 - DNA, 509 bp, Glycine max
aatccaatactcagcattttagcttattgtactagaaccacaggaacaaacctcagagttgtaaattgtaatttaaagtgagctgtcacaaagagaataactctggcacagtgtcaagtcatttctgattgaaaacatcagaacttaaatactgctaaggaccaatttggtccatttgctacataaacaaaatgcacttctattttggaatttcatcaagcgcaattaaaaaagaaattgggtctttctaccagaacacttactcggcttcaaatacctagacatgctttaatttcaaatgatcatagtatataaactattagaaacaaaaaaagatgtttatgtaaaaaaataaggtggaaaaatgaaaatggagcctatacctgtatatctatgtcagtttgtcctccttgagctccaccaagcggttggtgaatcattatccttgaatttggcaagctatatctatttcctttagtccctgcgctaagcagaatggcacccatact

SEQ ID NO: 205539 - DNA, 571 bp, Glycine max
tggggcactcgcacacaccctttctttccgttctcaaactcactcacactctctctactgctagattcgacgattcccgaagtgccttcctcctcctcctccttcttcccctctaatcggatccaaatccaaatccaaatccagttcaaagaagatgcaatacaagaacctggggcgatctggcctgaaggtgagccagctctcctacggcgcgtgggtgagcttcgggaaccagctggacgtgaaggaggcgaaggccctcctacagtgctgccgcgaccacggcgtcaacttcttcgacaacgccgaggtctacgccaacggccgcgccgaggaaatcatgggccaggccatccgggagctcggctggaagcgctccgacatcgtcgtctccaccaagatcttctggggcgggcagggccccaacgacaagggcctctcgcgcaagcacgtcgttgaggggaccaaggccttactgaaacgcctcgaaatggaatatgtcgatgttctctactgccaccggccggatacctctactccgatcgaggaaaccgtgagggccatgaatcat

SEQ ID NO: 205540 - DNA, 521 bp, Glycine max
aatataattatattcatatttatttatataaaatgaaatacaagtgcaacagcctcatataagagtttcccatatgagttggcagtagaaacgaaataacatctgcataatcacacaagtgaagtgaagctacacaacaagttcattgcttcactcacatcataacccccatatttatttatttaggtaataacacactcgacagtaaagataaataacaacagaacataaaaaccagaagtacttatatctccctcacttcatcttcgttctcgtcctcactccagcagcatttcagaatagacctaggagatgcactaccatcgcagccttgaacaaatgtttggtacacaactgcaccacctactccaagctcttcagtgctcctctcaccacagtagtatcctttgatgtctaagggaaatttattaagtttctcaccatgcatgtcaatgtgcaaagcaacagaaaactctgctggacaaaagcaagctaaaatcctttccacaagttcacctaga

SEQ ID NO: 205541 - DNA, 568 bp, Glycine max
tcttaacaaagcgccccacgttctgagacaaacccagtatgctgtctgccatggaggatgagaaagtttcgatttttcattgattgggtataactgcacaaagaggttagtgaagcaatgcatagagcgatcgtgtttctcattcacccacgattcctcctcctcttccttgtcctctcaattttcctcattttcacattttctggttctactactaccagtggttttgctacacctcaacaggttgttgagatcattgaggagaaaccagaagaggagcctgaaattacacacagagtattcttggatattgatattgataaacagcgtttaggtaggatagtgattggattatatggcaaagttgtaccgaaaactgtggaaaattttagagctttgtgtacaggggagaaaggcaagagtgaaaatggcataaagcttcattacaaaggaacaccatttcatcggataatatctggttttgtgattcacggtggagacattgttcatcatgatggctaagggtctgaatctatttatggcgggcacctttctgatgatattttca

SEQ ID NO: 205542 - DNA, 592 bp, Glycine max
aaagaaacatatatcaagtagattacacaccttcacgttaatggattcccaaatgacgaagcttggaacctctctattggttccttctgttcacgagctagctaagcaacccatgaccaaagttccagaacgatatgttcgtctaaaccaagatcctgttgtatctgacacaatctctctaccacaagtcccagtcattgatctgaacaaattgttttctgaagatggaactgaggtagagaagctaaaccaagcatgcaaagaatggggtttcttccagcttataaatcatggggtcaaccctttattggtgcaaaatgtgaagataggtgttcaagagttcttcggtcttcaaatggaagagaagaggaaactttggcaaaaacaaggagagttggaggggtatggtcaaatgtttgttgtatctgaggaacaaaagttagaatgggcagatatattctacattaatacgctaccatcatgcgcaaggaatcctcacatatttgctaggaattcccaaccattcagaaatgatctagagagctaatctttagaattgtgaaaacttagcatcgcaatcattaaacttatt

SEQ ID NO: 205543 - DNA, 513 bp, Glycine max
gcgttcccatggacccgccaccatcttggccttcggcaccgccacgccgtccaactgcgtctcccaagccgattaccctgactactacttccgcattaccaacagcgaacacatgactgatctcaaagaaaagttcaagcgcatgtgtgaaaagtccatgataaagaagcgatacatgcacctgacggaggagtttctgaaagagaacccgaacatgtgcgagtacatggcgccatcgctggacgtgagacaagacgtagtggtgatggaggtgccgaagctgggaaaacaagccgcaacgaaagcgattaaggagtggggtcaaccaaagtcaaagatcacacaccttgtgttctgcaccacttcaggcgtggacatgcccggagcagattaccagctcacgaagcttctcggcctgaggccctccgtgaagcgcctcatgatgtatcagcagggctgcttcgccggcggcaccgtactccgacttgcgaaggaccttgccgagaacaacaa

SEQ ID NO: 205544 - DNA, 511 bp, Glycine max
aatccaaaaacttaaatttgaatatttctagttctactttctggataggaaaactcagtatacaaacattggttttaatgcatcacttatttctggaatttcagaaactagtccgtcgacaaagataaatacttgctgtcaaaattctgttacaagtgtaaataaaaaggtttgagtagtaatgttttccatcatcttcatcatcctttttctatatttgccagcaacattttaattgcacattgaaaaattaagcaaatggagaataataaattaataatactaccacttttcagctaccttcattttctttattaattggatctgagctcacagttggaagattccttctgtactgctgagacgtcaatctcctttccaatggtgttttcctcttgcttacaacaaatctgttcacccctttgcgcataggcattattgaaggaaaatcttcgtctggaatctgactgagctcagaaatatccttaatctgtgcgacgcgacggaacca

SEQ ID NO: 205545 - DNA, 600 bp, Glycine max
agagtttgttgtgagctataagctagtttatcgtgaggagaatatgaagttgtttgttttctttgttgctgcagtagttttggtagcatggccatgccatggcgcaggctaccaaaggttccctctccgaatgaaaactggctatggtgagcgttcttcggaggtaaaatgcgcaagttttaggcttgctgtggaagcacacaacatccgagcctttaaaaccattcctgaagagtgcgttgaaccaacaaaggactacattaatggcgaacaatttagatcagactctaaaacagttaaccaacaagctttcttttatgctagtgaacgcgaagtccatcacaacgacatatttatattcggcatagataacaccgtactctctaatatcccatactatgaaaaacatggatatggggtggaggaatctaatgaaaccttatatgatgaatgggttaacaagggcgacgcaccggcattgccagagactcttaaaaattacaacaagctgttgactcttggcttcaagatgtattcttgcacgaagattcttgacaaatggccgaacagaacaaacctaaagaagctggtttcacacat

SEQ ID NO: 205546 - DNA, 455 bp, Glycine max
ttttctttctttttttttttttttttttttttttttttttttttttttttttttttttttttttttttttttcttttttttttttcctttttcttttattcttaaaaaaccaaaacctacaatttcaccccaacaggggggaacctttttaaaaacacgtttcccaacccatttaaaaaccaggccaacccccaaatccacccataatacccccccaaacgcgaaccaatcgaaccacctcccttaccccaagcgccccactgtccaaccccccaaagaaaccccggggttctctcccagacccgggcgaacccttctcaagaacccaaccacctgctgaacccacttaatcaccacccatcgaaacttacgccccccccaatgactgctccttagaccccccacatccaaaacccccccccgtgaatcttccaccctaaagggcgccccattcc

SEQ ID NO: 205547 - DNA, 524 bp, Glycine max
ctcacggccagggttttagggcagcttctttctttgagattaagtttcagtagtaatgggtaaggaaaaggttcacattaacatcgtggtcattggccatgtcgactctgggaagtcaaccaccaacggtcaccttatctacaagctcggaggtattgacaagcgtgtcatcgagagatttgagaaggaagctgttgagatgaataagaggtctttcaagtatgcctgggtgcttgacaagctcaaggctgagcgtgaaagaggaatcaccattgatattgctctgtggaagtttgagaccacaaagtactactgcacagtcattgatgcccctggacatagggatttcatcaagaacatgattactggaacatcccaagctgactgcgctgttcttattactgattccaccactggtgcgtttggagcttggatttccaaggatggacagacttgtgagcatgctctccttgcattcactcttggtgcgaagcacatgatttgctgttggaacaagatggatg

SEQ ID NO: 205548 - DNA, 389 bp, Glycine max
agagaatccaaaaccagattttattagattgaaaagcgtaactgtacattgatagaaacagtaaatcctttatctaatgaacagagttacccccctacaatccccattccagtgatgactccccgtgccaattcaattacattgcccctcatgcataccttttacagtctccactaatcattatatagcatctcaccagcagaaaggaaagtctactgtctggctgcgacaactggccctttcaccttgaaagtggcttcccagatttcctcctcatttgcaggaactgcagtaatcttatttttaggattctcatagcacattaatccttcaacagctggagaggtcaaacattcttgagggaaagaagcaagtgactttgccacaag

SEQ ID NO: 205549 - DNA, 523 bp, Glycine max
gtcccatagcagctatgggaatcgatcttaaggctgggggtaagagcaaaaagaccaaaagaacagcaccaaaatccaatgacatctacctcaaattacttgtcaagctttatcggttccttgttcgaaggactggcagcaatttcaatgctgttatactcaagcgcttgttcatgagcaaggttaacaagcctccaatttctttgtcaaggttaattaagtatacaaaggggaaggaggataaaattgctgtaatagtggggactgtaactgatgatatcagagtatatgaagttccagcattgaaaattacagcactcaagtttactgagagagcacgtgcaagaatagaaaaggctggtggtgaatgcttgacatttgatgagcttgcccttagggctcctttgggacagaatacgggccttcttagaggccccaaaaatgctcgggaagctgtgaaacactttgttccttgttctggtgtgccacacagccataccaagccctatgtacgagcaaaggg

SEQ ID NO: 205550 - DNA, 371 bp, Glycine max
gaaaaaataaagggtaacttagggactagcaaagaatgtacatgtcttatccaaaagtgtacatgcatatgatataatgcctgtttaaggaccatccctttttctttaatggaaaggacactgatacttttgatcaaggacaatggtaaatttagtaaagaaactaaaattgccaaaggccataaagtggaatgttccccttgctgtgtattcctttggaccgcaccaaaatgctttactaggctgtctaccacaatggggcccaaattcttttaaggcccaacctttttatacacctaaggtagatgggaatcactttcaattctggctttccaggaaagtttccacaccttcagtggccttaccattct

SEQ ID NO: 205551 - DNA, 517 bp, Glycine max
acaaagcgaacaacaattgatcatcaacatataaaaaataatcagaagacactcaatggtacatggcacacattgcaacaccagatggtggatgctacataatacatattattgtcttaaaatatactactacttaccaacccattaaggttcttcgaaccctatttacaatcttatttctagcagcaacacctgttaattgaaactcacagttctcatccaagagaaatctgtacacctcccattcacgctctgaagttgaatgccgtcctacttcagccgagaaaacacaaattccaactgttttgagagcaaatgtgacatcataaaaaactcgaggtcttcccattccagatagctcaactggattagcgaccaacagttcagtatctggtcctcggtttgcaatgattactcgcaatggatgaagcatttcttgtttcaaacgagagcagagtgcactctgcttctccggatccaaaatctttttcccatctttctgctgaataaatatatc

SEQ ID NO: 205552 - DNA, 555 bp, Glycine max
  unsure (1)..(555): unsure at all n locations
agcaatttgaagaaatgactttaaatctttgtgtactgacccccaatcgaattgtttgggattcggaagtgaaggaaatcattttatctactaatagcggacaaattggagtattaccaaatcatgcgcctattgccacagccgtagatataggtattttgagaatacgtcttcttaaagaccaatggttaacgatggctctgatgggcggttttgctagaataaacaataatgagatcactgttttagtaaatgatgcggaaaagggtagtgacattgatccacaagaagcacagcaaactcttgaaatagcagaagctaatttgaataaggcggaaggcaagagacaaacaattgaggcaaatctagctcttagacgagctaggacacgagtagaggctatcaatgtgatttcataacaagttgatgcgtncgaatatcggaataactaaaaaatggaaaatgaaacagtaagaatagatagaataaaaatataagatgagtagaaaaacttattagatacccgagtgaatggtatcttataagttctaacta

SEQ ID NO: 205553 - DNA, 468 bp, Glycine max
caattgtgttgcctcaggcagcgcatcagttaaattttgattgagacaataattagacttgtgtatgcttattgactttttttttttttaaactcagcccaaaggaaatattgttggcattattttcttatgaaaaaaaatctatatcaattccatttcaataatgtaatacataattataaataaaaataccaaataaaaaataaaaaaaaaaaaaaaaaaaaaaaaaaaaaaaaaaaaaaaaaaaaaaaaaggggggcccccccatataggaacccttccccccggaaattattccccccccggttcctgggggggtccccattttcctttagggggggccttaaaaaattggggataataaggggaataattttttcccggggaaaatttttttcccctcaaatttcccccaaaattttatgccccgagattaaaaggttaaacctcgggggtcccaaagggggg

SEQ ID NO: 205554 - DNA, 616 bp, Glycine max
ttatgcacctctctaattttcctcgaacaactatactctctctatcgcactcactccctccgtcgcccgaacgcatctccgatcaaccaaccgccgcatttccagtgattagccactttgatcctcctgcagcgccgtcgtttcctcagatccgtggctgtaatgcgaaagtcgttggaggcgaagcagcagcatccgcggattaggaagatccttcttcccaattcgttatcctagttagggttagggtttcaataatcattcccaagaaatgttcaagcgaatcatgaagggagggcagaagaagccctccaagacggacccgagcgatccgtcgcccttggctccggcggcggcgggtgcggcagccgctccggcgctggtggttcctccgtcgtcgggcaccatagagcctctgcctctcttccgcgacgtggcggtctcggagcggcagaacctcttcatccggaagctccagatatgctgtcacgtgttggacttctccgacacgctgaaatccgttcgggagaaggaaatcacgagacagactctaatggagctcgtggagtcatccaatccggtcgagaagataccgagacttgccggaagagatgat

SEQ ID NO: 205555 - DNA, 375 bp, Glycine max
gtgtggtaccctgacccgaactagttgccggcgccgcttcacctaccgcaacacccatgatcattcccgagccgaaccttgtagtgatctgtaatttcgtttttgaagatggagtaaggtgcgctaagaaagacttctgtctggcagatcgcccatagattgatgtgccatatctgcacgtgatgaagctgatgcagcgctattaatccagactagatctcgagggacacatttccgtggatgcactattcctggtggctgaccaggcgacggaaacgagatactcatgacatacctgaaccttccttacgaaataggccctgccacttgtgacaatcaggccgagcccgctggacgaccattctgcggcccacc

SEQ ID NO: 205556 - DNA, 554 bp, Glycine max
ggtggagatgactcaaacacaaatgcatgcctccttgctgagcatttcaggagtaaaaatatgaaaactcgtgtgattgggtgccctaaaaccattgatggtgatttgaaatgcaaagaagttcccacaagttttgggtttgatacagcatgcaagatatatgcagaaatgattggcaatgttatgatagatgctcgatcaactggaaaatattaccattttgttcggcttatgggacgtgcagcttcgcacattacactggaatgtgctttgcaaactcatccaaacattactattattggagaagaggttgctgccaagaagatgacactgaaggatgtcactgactacattgttaatatcatttctaaaagagctgaggataattataactatggggtcattcttatccctgaaggtctaattgattttattcctgaggtccaacaccttattgcagaactcaatgaaattctggcaaatgacgctgtggatgaaggagggctatggaagaagaaactcaccgatcagtcattaaagctttttgaatttta

SEQ ID NO: 205557 - DNA, 537 bp, Glycine max
  unsure (1)..(537): unsure at all n locations
actcatgtaaaaagaaaattttatttctccctctcactgtatttgtgacgcctaactatgtttggaaacacagtagatacatgggcaaccacgtccatttaccagaagatgcagaagcaatacctaccagctctgatctaactgtgaaattacgtcaacatgataccaaacatgctaaaaggcaaggaaaggaaacaaagaaaacaactgaaattttttgacattagatcatcagattcacttcgaaaagtgaatgcatccttaccaaccaagaagcaatacctttaagagagccatcctaatatatagaccattctttgcctgcctaaagtaagcagctcttggatctctatcaacttccactgtgatctcgtcaagtcttggaagtgggtgcataaccacagcatgtttttgcatcgcatctagaacatcttgatttacaatatacttgcctcttgcctcctcataaagttcaattttctctctaaatctttctttctgaatgcgagttngataaaccacatcgcacttagaagc

SEQ ID NO: 205558 - DNA, 554 bp, Glycine max
agccttcaatcatatagcattctaagaaatgaagagccctaccattttcattctctttctactttctgccttctacacctcactcctaccttcagccaccgctcaagtcgtggttgacatggaaggtaatgatcttcaaaatggtgggaaatattatgtgttgccagtaatagagtcatcatatggtggaataagagtagccgcaactggaaaagaaagatgccctctcactgttgtacaatctgccgatccgtatgataaggggattgcaacaattatttcaaccccatatcgagttcctgttatccgcgaaggctttcctttgaacattacgttcggtaattttgcagttatactgccttgtgtcccccttcgtactgagtggaccgtcgttaatggccaaccagaaggacccgcagttaaaattggttcgcccccaaatgcagaaaatggttggtttgaaattgagaaattggtaacttcgggctataagctcgtgttctgtacgctgcctgagcgtagctattgtcacgatattgggattcatgtcgatg

SEQ ID NO: 205559 - DNA, 543 bp, Glycine max
  unsure (1)..(543): unsure at all n locations
gatatacaggacaataaaagaagcaatgcattaaagctgaaagtagagtgtatgttcatcttcaaaggagtgtaaaagagggtaatatatattttacagaatttccgaaagagcagaaaaaaggaagtaaagacaagaatgacttgtgactcaaatcctggaagggatcataggaatagtgtcctgtaagtatgcactggcagcagcaactccacttccaagctttacaggatagcccacatctttcagtatcatctccacaccagctagacatcccaacagttgcaactcattcaagttgccaagatgtccaattctgaaaaccttcccagcaactttgttcagtccaagacctaagctcaaattgtatctcttccatgcccttctaactatttcagtactatcaatgtaagcaggaacaagaacagcagtcacagtgtcactgtaccactcttncttttgggtgcaattctttaaaaccccatgcctctacagcaagtctgggttgctttgcctaaacgactgtgtcttgcaatcacattt

SEQ ID NO: 205560 - DNA, 530 bp, Glycine max
cacacatccactactcaacacaaaaaatagtcttaattagttagtgtgtcaatttgtgcctcaaattgaaactagctatagatatggccaattcccttaataaccacctgtttgttgtagtatctattctttctctcttagccttttctagcaacgcacaactatctcccaccttctatgccaaaacttgccccaaccttcaaaccattgtgcgcagtgcaatgaggcaagctgttgctaaagaagccaggattggtgcctctattcttcgcttgttctttcatgattgctttgtaaatggctgtgatggatcaatcttattggacgacactgccaccttcactggcgagaaaaatgcaggacctaacagaaattcagcgaggggcttcgaagttattgataccattaaaaccaacgttgaagcttcttgcaatgccaccgtttcttgtgctgatatcctagcacttgccacaagagacggagttgtgctgctaggaggaccctcgtggagcgttccacttggaagaaga

SEQ ID NO: 205561 - DNA, 510 bp, Glycine max
ataatactctatttgtattatttggtacattaataacttttaagcaaataacaacataccctaagatacctttcaaaccttttgttttcctgaatcgcgccctcaaaccttatgttaacacttcctataagaaagacaaaagtaatggttaaaaaagtaagatttgcttgcataattacactatatataggagaaggaatttgctcatttttttctataatactcttaattaattactattttttttctataacatttaaatcttatttttataaaaatatatatatatataaatttgaagttaattaattattgtttttatagggtattttattgatgttgtttgctgaatggggtgatagaaaaaacagacatatctaattttcttggcttggtaactaactgagtaatcaatatatctcaagccaattttatcaatctgcaatacatatgttgaaagtgggtggaagtggattgtttatgaagaaaacaaaactttgcccaatattt

SEQ ID NO: 205562 - DNA, 607 bp, Glycine max
tctgagtattctgatcgctccctgagagagctcgtcgcggcggttgcagaagaagattgctagatgaagttcaacatcgcgaatcccaccactggatgccagaagaagctcgagatcgacgacgatctgaaactgcgagcattttgggacaagaggatctcacaggaggtcatcggagatgcactcggtgaggaatttaagggctatgtcttcaaaattaccggaggttgtgacaaacaaggatttccaatgaagcagggagtgctgactcctggtcgtgttagacttttgcttcacaggggaactccttgcttccgtggatatggaaggcgtaatggagagcgttggagaaagtctgttcgtgggtgcattgtcagcccagacctctctgttttgaacttggtaattgtgaagaaaggtgagaatgatttaccaggattgactgatgttgagaagcccaggatgagaggcccaaagagagctttcaaatccgtaaactgttcaacctgtctaaggaggatgatgttaggaagtatgtcaacacctaccgtcgtacatttacgacaaaagctgggaaaatgtgagcaaagcttcaagatacaagact

SEQ ID NO: 205563 - DNA, 581 bp, Glycine max
ttagttcttgttattcattattcattctcagcttcttttcttctggggggcaaaaggggtcacttttcagatccgagattgagctcctttacccatcatcatcatggagctcctcgggtacctgaatcagggtcacccttctagaggaacaacacttgttattactctttcattggtgctttcgacacttgtgtccttctccactttcacacatgccttctcttcttctgcgtttccggaactgaatcctataaaacctaggcactcacgtcttctcaggagtgccgtgcaacatgaaactcctacatcacagctttctgaaatatggtcacctctggaaagccaaggatggaaaccttatgttgaatcaaataagccaacattaccagagaagtccgagggatatatccaggtctttcttgatggaagtttgaaccaacaaaggatggggatatgtgatgcaattggtgttgcaaagatactggatgctactctggtgatccataccttggattaaatcctgtatggcgagattcaagcttcttcatggatatatttgtagtggatcatttcattgatga

SEQ ID NO: 205564 - DNA, 495 bp, Glycine max
agaatataaatttgtttattttgatagctttatcatatgaatttttatcatatgataaagctatcaaaataaacaaccacgctgaataaaaaaaaatgattctttgttacctattatcttttttcttaccacataaaaacccaaattgaattgtcgtaattttcaaacaaaacatcaatcaatatttcattcaaatctcaattcaaaattggatttagaattcttaatttctatattttttttttcttaaagtagtagttctagcggttgactcgcttttttcaaattgtctttcattattaagaaaaggtaacgaagataaaatacgagcttgttttatagcaattgttattaatcgttgttgttttaaggtcaatctatttacgcgtctggataatatttttccttgttcactaataaatcgactaattaaacccatgtttttataaataattcggtcccccgattggatcgggggccaacgcctacgaaaag

SEQ ID NO: 205565 - DNA, 442 bp, Glycine max
  unsure (1)..(442): unsure at all n locations
ggaactggcaaagatagtctcacatttatattcatgcatgtttatagtatttataaaatgaaagttgaactatggttcttgcggagaatgaattcaattaagtgttagaaaagtgcttgtatcacacgcattaacacctttctttcaacacattctccctcattggtaaaacccataattcttggcattgagtatgatactccttaatccaccaattggtgacagaatcatgagtaggaggccaaatataatgcagatccagttggtgatccaggataagctgaacttcttaggtttgtaaatagcaagccagataatacaggggagaaagtatgttgttggcgcaaatgcaaatcctccaaaaaatccgaggagggcaccaaagaaagggaacgtaatgcccacaaacatttgtaatgcaacatanacattgcgcacaaca

SEQ ID NO: 205566 - DNA, 530 bp, Glycine max
aaccttcaagtgctacaaagacgtcatgcgcatgttcttcctcgtcgtcggccccctccaactcatctcttacccttccatccagatgattgggatcaggacgggcttgccattaccttcgtggcgggagatcctctcgcagcttctggtgtactttctcgtagaggattacaccaattactggatccacaggtttctgcacaacgattgggggtacgagaagattcaccgcgtccaccacgagtaccatgcgcccattggattcgccgcgccctatgcccactgggccgagatcttgatcctcgggattccctcctttcttgggcctgccatggttcctggccacattatcaccttctggctctggatagccttgcgccagattgaagccattgacacgcacagcgggtatgactttcctaggagtatcacaaaatatatttcattttatggtggtgctgagtatcatgattaccatcattacgttggaagacaaagctcaagcaattttgcttcaggtttcacatact

SEQ ID NO: 205567 - DNA, 467 bp, Glycine max
ccatggcctccgtagcactcaccaccaccgcactcccctacctccgcctccgccgcaacaccgccgccaccctcaaacccaaccgccactcttccatttcactctcctcactcaaaccaaccctcaacgcttcaatttcctccttcccaaatttctcactaaaaaaaccaagcctagttttcaatcaaaaaccctcctctctaaccgtcagagcctccgcagcctccatcactccggcgacgggacggagcacaggttgggggcgtggctcatgctcacgtgctttcagaccttcgtcattacgtcggcgatgttcttgacggcgatggcggcgaatccgctgtgcgcgactcttactctgaattccattaatcaaactattgggtggttggattgtgctaaagccgcaattggtcctggcttggccgtcgtggtgttggtgcccgtgattttgaatggtatatatc

SEQ ID NO: 205568 - DNA, 446 bp, Glycine max
  unsure (1)..(446): unsure at all n locations
agaagaggttttcgtttggttaagcaagatggatttggaagcagagaaagagcatgaagctgcatttgcagtggcctcactctccctctctctccccaccattttccccttcgtccaacccaagaatatcccatcaaccacccttcaaccaaccaagctcaaagtcccaacccaagcctcatccctcacacacctttctctctccaccaccactcctcctccttccaaaacctccttcaaatccaccgtctccgccaaccccctccacgcccctctctccctcgctccccaccgcccccgcgacccttccaacgccgccgccctccgccgcgccgccgtcgtctggttccgcaacgacctccgnctcctcgacaatgagtgcctcaccgncgncaacaacgactccctctccgtcctccccgtctactgcttcgacccctccgact

SEQ ID NO: 205569 - DNA, 343 bp, Glycine max
acaggacaataaaagaagcaatgcattaaagctgaaagtagaaagtacgttcatcttcaaaggagtgtaaaagagggtaatatatattttacagaatttctgaaagagcagaaaaaggaagtaaagacaagaatgatttgtgactcaaatcctggaagggatcataggaatagtgttctgtaagtatgcactggcagcagcaactccacttccaagctttacaggataacccacatctttgagtatcatctctacaccagctagacatcccaacagttgcaactggaaaatatttaaagaattaacaatatcaaaggttgggaatgtcaatataaggttaatt

SEQ ID NO: 205570 - DNA, 440 bp, Glycine max
tcactctgttacggtgcaacctagcttcctccaaatccaatggcttcagagaagaaactttgggaacccaatgagggagataaaagtgcagaagctcgtcctcaatatctctgttggcgagagtggagatcgtcttaacagagccctctaggtgtcggaacaacttagtggccaaaccccagtgttttccaaagcaaggtacactgttcgttcctttgggattagaagaaatgagaagattgcatgctatgtcactgtcagaggtgacaaggctatgcaacttttggagagtggtttgaaggtgaaggaatatgaacttctcacaaggaacttcagtgatactggttgctttggctctggtaatcacgagcatatcgattttggaatccaagtattatcctttcaactggcatttaatgaatggatttctatgctgttct

SEQ ID NO: 205571 - DNA, 571 bp, Glycine max
attgtccctaaatggcggaaaccctgatccaaatcggcgtggttgggtgcgccgacatagcccggaaggtctcccgcgccatcacgctcgcccccaacgccgccctctgcgccgtggcgagccgctctcacgacaaggcagccgcattcgccgccgccaacggcttccctctctcagccaaagtgtacggctcctacgagtcccttctggaggaccccgacgtggacgccgtctacatgccactccccaccagcctccatcttcactgggccgtgctcgcggcccagaacaagaaacacttgcttctggaaaagcccgtcgcgctcgacgtggcccagttcgaccgcattctcgaggcctgtgaatccagtggggcgcagttcatggataacaccatgtgggtccataacccaaggactgctgccatggcccacttcctcaacgatgctcaacgttttggtaacctcaaatcggtatttattccattctgcttttcttatcgcaatgcagctagcaaatgctcctggactttagtcttttatcctacattttcttcacttcaactttattt

SEQ ID NO: 205572 - DNA, 569 bp, Glycine max
aggaaagataagatgtcgtctctgggcacttccaaagggattctagaaattgccaagttcggcgtctatgtcaccgttcccatcattctcatgtacactttcgccaacaatcccagcaacctccgcaagttcatgggacataggtcatacattgaatatcccccagaggcagaaaagccaccatcaccggaggaacttagggaaatggcacgggagaaagctcaaggaagcagtggacagtaagagctccacttagaagatgggccttctacattaggtcatgcttattgtattcataacagtcaccaagatattgcaaatcatcattccgggttccaaaaactagaaacccttgtatatagtgatatccattggtcatttgttgaggctaattccttgtttaactttcctcaaccaaggaattgaatggatgatgctcattttctatcaactaggattttcttgattagatggtattttggctgtttatgaaagaaatggttgggaattgattaccttcccaatgtgtagttgaaaaatgagacccaatttttttaccctgtatgaat

SEQ ID NO: 205573 - DNA, 530 bp, Glycine max
aatatgaatgctttttcttatattaactcattttacatcaatatgaacaaaggaaaaaaagaagggcagaaccaaaaatatagttgcctaggcctgatgccaagttgccaacagaaacgtcagaaaagcttctgtagatgttaagatccaagtgtaataaattccaaactaacgaaattcactaaaagtggtggacctgctgcctatggacttttccttcactgttatctggaaaccagtgactaactttaggatttcaaatcagtaacacattctatttgtagatccactcgttggaacgagcacccgactgatccatatctataaaaatgcttactgccttccctatacgaggtcgttccttcgacttttctaggctgatccgaatatgagacacagctccccaacattttaagttgtttgcaatatcatcaagcctcaaaatatactcttcttcggtcaatgggaaggatctctgcttcatgtactttcacatgacattcatcgcacggagatttcttccatgaact

SEQ ID NO: 205574 - DNA, 541 bp, Glycine max
ctggctgcaaattccttgtggtatccagatttaacttcccaacaatttttaatgccacttatcatgtggaattgctgggtgaacatgacgccctttctttgttctgtcaccatgcttttggacagaaatcaatttctatgggtgctaatgtgagtttggtgaagcaggttgtggctgagtgtggaaggcttccactggctctgaaggtgattggagcttctttgcgagaccagaacgaaatgttttggttgagtgttaaaagcaggctctcccaaggccaaagcattggtgaaacctatgaaaccaatctgattgatagaatggcaattagtactaactacctgccagaaaagatcaaggagtgcttcttggacctgtgttcttttcctgaggatagaaagattcctctagaagttttaatcaatatgtgggttgaaatctatgacatcgatgaagctgaagcatatgccattgtggttgagctttcaaacaagaatcttctcaccttagtacaagaagcacgtgtcgggtgcatgtatag

SEQ ID NO: 205575 - DNA, 547 bp, Glycine max
aattgcaacatctgatcctctccattttccatggtacacagtcccaaatgtaccagaacccagctctcgcaactcttcaagatcttcattctttatgaactgcacagtactggtgtcaaattcccctgctacaaccacattcctcggttcattcttgtcatcctggtattcagactcctgtggtcgtatgttttccattatggcatccatgttcttattttcattgccctttagttgggaatgctcatatttttggtgaaagatacttgcttctgttttagttgctacaggtacatttttctgattttcttcaccaatatttaggtgggaatctgtgcgtcctgccaaaacaccaccagctggttgaggagcagatggctgagatttactatccccctcttgtacttttctcacagcagacgaaaaaccaagattatcctgatcaattagagatacattatcaaacccctctagagccaagttctgaaaatatgaccaacgtttaggctcatgattgtccatatttaagctcaaacctggtctatct

SEQ ID NO: 205576 - DNA, 544 bp, Glycine max
ctcgaagatcgagatatctatttagatctcagaaaaacagtgtttcatttcaattcattcagtcttattattattagggtttggcgattcagagagaaagagaaatgggagaacgaaaaggaatcccaattgctctggggctcttggcgatgctcctcttcttcattgcttcttcctcttcctctcacctcgttcgtgcttccgatgacgccgacgacgcgatcttctacgagtcattcgacgaggattttgacggacggtggattgtgtccgacaaggaggattacaacggtgtctggaagcatgctaagagtgatgggcatgatgattatggacttcttgttagtgaacaagcccggaaatatgctatagtcaaaaaacttgacgagcctgtcagtcttaaggatggaacagttgttcttcagtttgagactcgccttcagaatggcctcgaatgtggtggcgcatatattaaatatcttcgaccccaggagagcggatggaaaccacaggaatttgataacgaatctccatattctatcat

SEQ ID NO: 205577 - DNA, 557 bp, Glycine max
gccggcggcgtcgccatgccgccgacgctggcgaccgaggcgctcgacacggacgccggcagcgtggccgcgtggctgagcggcgaggcgagcggcgaagtgcgtggcgagacgcgcggcgaagaggaggcggcggcggcggcggcggcgtcgagcgaggcgcgcgcagagagctccaaggcctcgagcggcggcagcctaggactggcgagcgccgcggcggcactgctgcgcgctggggcagtgaggggcgcagacagcggcgaggcggagccggcgggctcgacgatcagtggagcgtcgtgcagcgtgctgttgttgcacacctgcggactctgctcggcagactcgaagccggacacgccatggctcgtcgagctcgacaccgtcgattcgcgtctctgctcgccgagcgcgcgcggcggcgcgtccgcaacagctggagacgcagcggcgctgctgctgggcgcgtcttgcggcggcgcaagcgccttctcgctgatcagcggcgaaggctcgaggccggacgccgggagcatgcctcgtcgacttggcgt

SEQ ID NO: 205578 - DNA, 559 bp, Glycine max
aagaaatttaagtgaggagctagagaatgatgatgaagtctgctatgtgtgcagtggtggttgtagcacttcttcttctggcggaggtggggcccatggctgaggctgtgacatgcaccccaacagagtttgagtccgtgtcttccagcaatcacttccggtgctaaaccttccaatgcttgttgcacgaagctgaagcagcaaaaaccatgcttatgtggctacctcaaaaacgctagcttgaagcagtatgttaactctcctaatgcccgaaaaaccgttgcttcttgtgggattccctttccaacttgttaattaaataagccttcttataattaaagtgtgggatatatatatatatatagataaacagtttaatttatacacactctgatcctacaaagcatcttgacacaagcattcataggatttcaccattttatcgcaacattttaacatgaagcgggaataaaggaaatccttgttgaataattggataacgatgtttatactaatagtatggggtttaattaaacttatattaataattaccctatat

SEQ ID NO: 205579 - DNA, 500 bp, Glycine max
ggttcatcaatctcatcgccttcgattacccacttgtcacacaagatggtacgagatctgctgcatacgttttcgtacctgccgcgggatctgaatttcattgatcatacgagtgacattggatggaaagatcatcagcgtgcgaggccgatcatcgttgatccgggtttgtatatgaataagaagcaagatgtgttttggattacacagaggaggagtaggccaacggctttcaagcttttcacaggttcggcttggatggcactgtcaaaatctttcattgattactgcatatggggatgggacaacctaccttgaaccgtactcatgtactattcaaatttcatatcttcccctgaaggatacttccacacagttatttgcaatgcacaagagttcatgaacacaactgtgaacagtgatttacatttcatctcttgggacaattctcccaagcagcatcctcactaccttacagttgatgacatgaaagggatggt

SEQ ID NO: 205580 - DNA, 451 bp, Glycine max
ataataataatttactttattttcatacatttgattcaaacacaacaatatttccttgaggagaaaacaaaatatgtgtaaacactaatcatctcccgttgtaaataaatcaataagttaatttctcattcttgaattacttccaattccaaaggtagtcttgccgaagtcaatccactaggaatagtggaagtggatgagtgaaatggattaggaggaacagttaataggtcttcctctttactttccaacatttgtatgacagattttatggatggccggttcaatggctgccactgaatgcaccaaagtccaacaattgctagttttcttgcaattttaacatcaccttcatcctcaacatggatatgtacatctccatgaactaggtcatgcatccaatctgggtacaacacatggaaatcttctgcagaagacgtgtctacattct

SEQ ID NO: 205581 - DNA, 474 bp, Glycine max
cttggccggtcctccaggcacaggaaaaacccttttagcaaaagctacagcaggggagtctggtgtaccctttctttgtttatctggttctgatttcatggaaatgtttgttggtgttggaccatctagggtgagaaacttgtttcaggaagcaagacagtgttcacctagtatcatatttattgatgagattgatgcaattggtcgatcaagggggcgtggtggtttttctggtgcaaatgatgaacgtgaaagtactttaaatcagctgttggtggagatggatggttttggaaccacttctggagttgttgtgttggcaggaacaaataggcctgatatcttagacaaagctcttcttaggcctgggcgatttgaccgccagataacaattgacaaacctgatattaaaggtcgtgaccagatatttcagatctacttgaagaaaatcaaacttgatcacgagccttcata

SEQ ID NO: 205582 - DNA, 565 bp, Glycine max
tcgcgatctatactaaaaaagggtatcctgagcaatttcaataatagggttcattgatattcctagtatagtagatgctatcacacatacaatcatacttaattcgatggaattgtttgatcttaaagggggccttcgataatttcgcacgtgaggagttatttcttggtttcgtccagtcattaataacttgattatttttaaataatagtagatagaaacaacactcgtaaggagtcctattgaaactaagaaatataagcctgcctgccatccacaccagaataaataaagttttccgaaaaaacctgatagtggaggaagacctcctaaggataagagacatagggctaaagagagagccaaataaggatctttcgcgtataatcctgcataatctcgaatgttatcagttccggtacgtagaccaaatgatacaatgcaagcaaaagttcctagattcatcgagatatagaacagcatataagttatcatgcttgcatatccaccatttgagtctccaacaattatatcaataattacatatccgatttgacctatggac

SEQ ID NO: 205583 - DNA, 598 bp, Glycine max
ctgaaacaaagaagtgaaaataacagcaaaaagtaggagctgcagcagctcccccgaagcttatctcagcggcagactctgaaagctgtttgagtagcctcaacccggagaatagcaccaatgggagaggaggaaaacaaaccagaggaacccatggcaaaggagaaaaacccagaggaagaagcaacccaagagaaaaaaccggagcaagagtccaaagaggaagttgctgctgctgctgctgctccgccaccgccaccgtcaccgccaccgcccgagattgtgctcaaagtgttcatgcattgcgagggttgcgcccgcaaggttcgtcgctccctcaaaggattcccaggtgtcgacgatgttgtcaccgattgcaaatctcacaaggtggtcgttaagggagagaaagcggatccgctcaaggttttggagagaatacagaggaagagtcacagacaggtcgagcttttttctccgatcccgaaacctcaagaggagaagaaggtccaagaggaagagaagcccaagcccaaccccgaagagaagaaagaagagcctcagattgtgacggttctgaaagttacatgcattgcga

SEQ ID NO: 205584 - DNA, 483 bp, Glycine max
tttcttttttttttttttttttttttttttttttttttttttttttttttttttggtttttgtttttttttttttttttttttttttttttttttttttttttttaaaaaaaaaaccccccccccaggggggggccctgtttgggaatccccccccaaagcccgggaaaaaaggggggttttttaacccaggggaaccccaggccccggggggggacccccaaagggaaaagggggaagggggggcggggggagaggtccccccccccctttttaacccaccccagggggtaaaaaccccccaaaccccgggtccgaaaaaaaccccccctttaaaaaaacccagattacagaaaacccccctttgggggggggggccccaattccccccccggggggtcccacaaagggggcaaagggacccccccggggacaaaggggggggccccttgggcccctttcccccggggggacccccttaccc

SEQ ID NO: 205585 - DNA, 566 bp, Glycine max
aaaaacgctgcaataatattctattttcaaagggaaacccaaaaactgaagcgcgaggaagctaaaagtagcaacgagggatgagagaacaagaggattggaggattacgacagcgctgttaacgttgttgttggtgtttgtttcttcttttccggcgttgagctacggagttgttcctcctcgtactctgctcaataagctgtctcagggcagttatctcaccactcaggagcaatggttcaatcaaaccctcgatcacttctctccctatgatcaccatcaattccgtcaacgttacttcgagtttctagactatttccggattcctgatggaccaattttcttggtaatcggtggtgaaggtccatgtaatgggataacaaatgactatattggtgtactggcaaagaagtttggagcagctatggttactcttgaacatcgctactatggaaagagttccccatttaattctttggagacagaaaatttgaaatatctttcattcaagcaggcactctttgattcggctgttttcgtcagtattatcacgattccttaaatg

SEQ ID NO: 205586 - DNA, 539 bp, Glycine max
gccattcgcatgaagactggtgcccaaagaatgtgcatggcatcgccttccattgatcattttgttgatgctttgaagcaaactgtcttggctaataagcgttgggttcctccaccgggcaaaggatccttgtaccttaggcctctgctcctaggaactggtccggttttgggtttggctcctgcacctgaatacacattcctcatatttgcttcccctgttcgcaactatttcaaggagggctctgctccactcaacttgtacgtggaggaaaactttgaccgtgcttctagccgcggcactggaaacgttaaaaccatttccaattatgcaccggtcttgatggcacaaattcaagccaagaaaagaggattttcggatgtgctataccttgattcagacaccaagaaaaatctcgaggaggtctcttcttgtaacatttttattgccaagggcaaatgcatctcaacacctgctactaatggaactattctttccggaattacccgaaatagtgtcattgaaattgctcgcgatca

SEQ ID NO: 205587 - DNA, 524 bp, Glycine max
gctacttcctactccaaccgcacttctgctccgcaattatcatgggcaaggtcaagatcggaatcaacggatttggaagaattggccgtttggtagccagagtggctctgcagagagacgatgttgaactcgttgccgttaacgaccctttcatcaccaccgattacatgacatacatgtttaaatacgacagtgttcatggacactggaagcatcacgatgtcaccgttaaggacgagaagacccttctcttcggtgacaagccagtcactatttttggacacagaaaccctgaagagatcccatgggggtcaactggagctgacatcattgctgagtccaccggagttttcaccgataaggacaaggtcgccgcacatttgaagggtggtgcaaagaaggttattatttctgccctcagtaaggatgcccccatgtttgttgttggtgtcaacgagcaccagtacaagccagagtttgatatattttccatgctagctgacaaccaacttgcttgcccactt

SEQ ID NO: 205588 - DNA, 497 bp, Glycine max
gtctataacaatttcattaaaacaaagagaatatgaatacattacactgagttaggagaataatagaccccccttaagataaattttcataacaaaccaagcaatacatcaatgaaacaaatcaatccaattcctcaacaaaagaaacaagccctccaaaaagctcaagcatctgtgtattctatctatttacaaaagcagcatgtatgtagttgtctaatgggtcactttttttttattttgatgatggtggtgtcttggggtgtgaagacttgcctgtaatggccttcttcactttggaaattgaatgcttcacctttgaccctacacctgataggatgccatgagattttttgtgtgaaactttcgtgtcggtgtcttgagagtctctggatatcacactcacactagatgatgggcttattttctcgaattcgtctcctgcttcgtcttctttgtgatgcccggttgagtgatttcggcctctggagtttccg

SEQ ID NO: 205589 - DNA, 507 bp, Glycine max
ataattttttttctccattagattaccaagctctgcaactttgcttctcaacatggagtatcgtctcctacccatttttactttactcaatattgcactggtggcaacccatgctgctttaccccctgaagtttactggaagtcggtgcttcctactacgccaatgccaaaagccatcactgatatcctttactctgattgggtggaagagaaaagcagctcagtgcatgttggaggtggaggcgtgaacgtgcatacaggaaaaggaggtggcagtggcaccactgtcaacgttggtggaaaaggaggcggaggcgtaaacgtgcatgcaggccacaagggaaagccagtgcatgtttcagttggctcaaagtctccatttgattacgtctacgccgccacggaaacttaattacacgatgaccccaacgtggcactcttcttctaggaaaaggacttgcattctggaacataggtggacttgcactttaccaggagttcatttaa

SEQ ID NO: 205590 - DNA, 592 bp, Glycine max
agttattccgatattcggacgcatcaacttgttatgaaatcacattgatagcctctactcgtgtcctagctcgtctaagagctagatttgcctcaattgtttgtctcttgccttccgccttattcaaattagcttctgctatttcaagagtttgctgtgcttcttgtggatcaatgtcactacccttttccgcatcatttactaaaacagtgatctcattattgtttattctagcaaaaccgcccatcagagccatcgttaaccattggtctttaagaagacgtattctcaaaatacctatatctacggctgtggcaataggcgcatgatttggtaatactccaatttgtccgctattagtagataaaatgatttccttcacttccgaatcccaaacaattcgattgggggtcagtacacaaagatttaaagtcatttcttcaaattgctctccatttctaagttcgtagctttcgcagtagcttcatcgatattacctaccaaataaaaggcttgttcaggaagaccatcctattcttcagaagaatcaatttaaacccttctaatgttctgtagactaacatatttcccc

SEQ ID NO: 205591 - DNA, 493 bp, Glycine max
caacatctctatcgagtaaattaactatgaagcctaccctactattatccctttccttcctgcctctctttgctttcctggctctttcagaagatgttgaacaagttgtggacataagtggcaaccccattttcccaggtggcacatattacattatgccatcaacttggggcgctgccggtggtggattgaaactaggccggacaggaaactcaaactgcccagttactgttttgcaagattactcagaaatcttccgtggcacaccagtcaaattcagcatacctgggataagccctggaatcatctttacaggtactccacttgaaatcgagttcgcagagaaaccttattgtgctgaatcctccaaatgggtggcgtttgtggacaatgaaatccaaaaggcatgtgtgggtattggtggtcctgaaagtcatcctggtcaacaaacatttagtggcacatttagcattcagaaatataaatttggata

SEQ ID NO: 205592 - DNA, 507 bp, Glycine max
ctcgcttccttctcttccttctctaactatatatattttctttttctctctgtttcttcctttttattttatgcttttttctccgatgtgactggcgtttgtttggtgtgtttttcgtgtgcgtcgaaccctctgcgttcgttaattttgttttgtgttttcggatcgacttgtttcgcgttcggttgcggggatcttcggtttaggtaaatgagtggtaaatgagtggtttttgagcagaagcagttaaaagagaaagggattcagcgaagatgacatcggttggtgtggcaccaacttcgggtttgagagaagccagtgggcatggagcagcaggtgttgatagattgccagaggagatgaacgatatgaaaattagggatgatagagaaatggaagccacagttgttgatggcaatggaacggagacaggacatatcattgtgactaccattgggggtagaaatggtcagcccaagcagactataagctacatggcagagcgtg

SEQ ID NO: 205593 - DNA, 412 bp, Glycine max
gcaaagaagagtaatgaagcagtgttgaaggattggtcaaagaagtccaatcttaaggcagagagagttaattacacggctgaattcatagttgactctagttttggggagccaggagctattactgtgacaaacaaacaccagaaagaagtctttctggaaagcataacaattgaaggatttgctagtggaccggttcatttcccctgcaattcatgggtacaatcaagaaaagatcttcctggaaagaggattttcttttccaataagccttatttacccggggatacacctgctggacttagattattgagggagaaagagctgagaaatcttagaggtgatggcaaaggagttagaaacttatctgacagaatatatgactatgatatatacaatgatttggggaatc

SEQ ID NO: 205594 - DNA, 556 bp, Glycine max
  unsure (1)..(556): unsure at all n locations
gcgacaatgtctggtgtcacttgttgttttttccctggtcagttaaactctgatctgcgaaagcttgcagtgaacctcattcccttcccgcggctccactttttcatggtgggatttgctcctttgacatctcgtggctctcagcaatacagagccttgagtgttccagagctcacccagcaaatgtgggattccaagaacatgatgtgtgctgctgaccctcgacacggccgctacctcactgcctcagccatgtttagaggaaagatgagcaccaaggaggtcgatgaacaaatgatcaatgtgcagaacaagaactcctcatactttgtggaatggattccccacaatgtgaaatccacagtctgtgacattcccccaaccggcttgaagatggcttcaacattcattggcaactctacctccattcaggagatgttccgtagagtgagtgagcaattcactgctatgttcaggaggaaggccttcttgcattggtataccggngaaggcatggacgagatggagttcactgaggctgagagcaacatgaacg

SEQ ID NO: 205595 - DNA, 525 bp, Glycine max
cacatgtgaagttggattcatctatattgcatcatccctcaaaaatagtactagtaaaactggcaatgaagttgttcatgaacagtataaaaatcgtcaaagaaaaattacagggtcgtcatatatctacacaacgcaggagggttgatagacttgctgcagcataaagtaggagatgatatttgtgcaagtgaacagaaattaatagacttcgacattccattgctctgctatcttcaattgcctcttgtactcagtccaatcaatgccatctttggcagccaatgacaccataatgtcatcaattcccttttccattccttttagtccacacatgtacacaaaagtgttatccttcttcagtaattcccaaagctgttatgcgtattgagccattcgggtttggatgtacatcttctcccctttctcgtatgtttgctctcgactcacagcgaattcaagcctgaagttttcaggacttttctcttgcatcttctcaaacttctccttgaaaacaatgagctg

SEQ ID NO: 205596 - DNA, 453 bp, Glycine max
gataaaagctgttacgtaatatttgaataattattagtatgtcagcataaaagcaatgattagggaggaaagatttttaaagccatgcattctatatagtcaatgaatctatgcaaagatcaatttaagatgatcaaatggattatgatgtcaagttatcttggacatggttctcatgcttatcttagttcccttatcggcaaggcacgtccaaagagcttttctacttcaccggcttccattttgagcccatcaagaatctccattccttcttttgataaccctcttaagaaattctcctcatcttcttggaatacttcgaacccttctgccaatttctgaaacaaggtggcctccgttttccccaccttctacacctcttcttctaactgttcaacttcccttacaatggtctattctacttcctctacctttctgttcagcctttccacc

SEQ ID NO: 205597 - DNA, 530 bp, Glycine max
agaggtctttcaagtatgcctgggtgcttgataagcttaaggctgagcgtgaaagaggaatcacaattgatattgccttgtggaagtttgaaaccaccaagtactattgcacagtcattgatgcccctggacacagggatttcatcaagaacatgatcactgggacatcccaagctgactgtgctgttcttatcattgattccactactggtggttttgaagctggaatttcaaaggatggacagactcgtgaacatgctctgctttcattcacccttggtgtgaaacagatgatttgttgctgtaacaagatggatgctactacaccaaagtactccaaggccaagtatgatgaaattgtgaaggaagtttcttcctatttgaagaaagtaggatacaaccctgacaagattccttttgttcctatatctggttttgagggagacaacatgattgagaggtccacaaaccttgactggtacaagggtcctactctgctagatgcacttgaccagatctctgagcccaag

SEQ ID NO: 205598 - DNA, 629 bp, Glycine max
  unsure (1)..(629): unsure at all n locations
caccgccgctgcacccaaatgcgccttcgtcaatagcctttaccgctccagcttcagtttgttgattgaagacaacaacttccagcgaagcagcgtaagtgttagtaaaagattttatttttctctctctctcttccttctaaacgccgcttccgcatctctcttccttttctaactatagattttatttttccctctgattcttcctttttattttatgtttttttctccgatgtgactggcgtttgttttgtgtgtttttcgtgtgcgccaaagcctttgcgttcgttaattttgttttgtgtattcggatcgagttgtttcacgttcggttacggggatcttcggtttaggtttgtttagggattttttgtttctttgtttatgttgtggatgagtttttcgttggatttgttgtgttctgtgagattgatggattttttctaatttatattccttcaatgttttttcttttttggcaaaatgaatattttatttatggacagaatagatttgcgattnttggctcttaaattcatgtttgaacggtggtgtgactttcctatttggttctatttttatgaagcctgttgactgcaatttgttcttgaaaaatataagggaatgtg

SEQ ID NO: 205599 - DNA, 484 bp, Glycine max
aaggttaaatttgtcacatttattcattatcatatatgcatcacctagtatcagctggattattcttaattaagagaaaactaagatccaatatcttacatgctatgtttgatgttcttgaattagaataatttcaccttgataactttcaaaatcctttaatgcaaattaccgaaataaaactctagttctagtacaaacaacacctagctataataattaggggttgataccatagagctttcgaatcccgtctatatcatcttgcgctagattcaccttactagttcgaggtggtatagaaggatacatgatggctcttaggtccgacgagtggcctaatccgagcaagtgcccgatctcgtgcactgtcacagattcaaggtcaaacgcacttgtcaccggtgatttggtgacatcgtcagacgccacccaatattcgtcggctggaaagtggcaccttccatcagtgggagcgaatgca

SEQ ID NO: 205600 - DNA, 496 bp, Glycine max
gagatggattgtttggtgatgccagtttcattgatccgtcgtcgttccacgggttcacggatgggttacatggcacttcctaaggaggagcccgtaaaggtggtggtgggaaaagagaagagggtgtttctggtggagcctttcatattgcaagagaacccgtttcagattttgatggatatctctatgaagaaggacccagccgggcacttcacgtcgaatcatagtcagagtgagaggagagtgatctttgtggatgtggatgacattttgttcgaacacatgctgtggctcatgcacaacgatgcttcttctttgttccagctcaatttgaaggagattattgacttctacactcacgatatctaaatgtaatcacaggtactctggtttataaatttcagatacggaaagaacacttactaatatatatatatatatatatatatatatatgtatatatatactattattatacgcacaccatggttgattt

SEQ ID NO: 205601 - DNA, 595 bp, Glycine max
ttcttatattcaggaaagtaagatcatctgcatcgccgacgcttccaacaataacaatggccgataatgcaacaacgcaaggaagcaacaccctattttctccttacaagatggccaaattcaacctctctcatagggtggtgttggctcctatgacaagatgcagagcgttgaactggattccacaggcagcgcttgctgaatactacgctcaaagatcaacaccaggtggatttctcatcagcgaaggcaccttgatctcccccactgctcctgggtttccccatgttcccgggatatattcagatgaacaagtggaggcgtggcgaaacatagtggatgccgtgcatgccaaaggcagcattatcttctgtcaactttggcatgttggccgtgcctctcatccagtgtatcaacctggtggagctccaccaatttcgtccaccagcaagcccatatcggcgaagtggaagattctgcttcccgatgggtcctatggtgtgtacccagagcctcgtgcacttagcacttctgagatacctgaaatagtgcagcattatcggcaagcaacaattaatgcatttcgagcagtttt

SEQ ID NO: 205602 - DNA, 306 bp, Glycine max
ggggaaaaaaaccggctcccttaatcgaaaaaaaagaggccagggccaacaggctaaaaccccccggggcccaaaaaccggggaaaatgcccccccccggacaaaaaaaactttgccctttttgaaaggggggaaaaaagaaaaacccgaaaaccgggggccccccaaaggagcccacgccccaaactatacgggggggcagagctgccacaaagggggccccctttaaaaaaaaacctccccccctgacaggttacgcccagggccccaaagcccccggcacaaaggccgcccccatagggggcc

SEQ ID NO: 205603 - DNA, 539 bp, Glycine max
ggaaaaagctaacaaattcgttaatttctagaaacctctcatcaaaagtgtctttgatccgtgagaacttaaactcagactcctaaaatagtttgatcactttcgcattgacctgtaaccttttctctccggttaccaaaaccgtaagttgctgaacatggacccgcaatcgccggttcgggcggaactggagcctccggttccgacgttctccccacggttcgcgctcacatccagttcgcagcggaaaatcgcgatcgcggtcgatctgagcgacgagagtgcctacgcggtacgctgggcggtgcagaactacctgcgaccgggcgacgccgtgatcctcctgcacgtgcgtcccacgagcgtcctctacggcgcggactggggctccgtggatctgagcgcggcggaggacggcggcgacgaggagtcgcggcggaagctggaggacgacttcgacaacttcacggcgacgaatgcgagcgacctggcgcagccgctggtggaggcgcagatacccgtcaagatctacattgtga

SEQ ID NO: 205604 - DNA, 526 bp, Glycine max
ctaatcttcgagatgatgcatttttccactcaacaccatgaccatggccaaacccagcgactcctcgtctattcatctcacctcaacctgcatccctctcaccccgatcttcacttcttccgccagatttaagcggagaagtcagaaacgtgagcgccaatgatcttcttcatttcctcctcaatctcctttgtcaagacaccgccagtgagcttttcgaggaaggccgaatgggtagatttcaattgctcggtgaatgacctttcccaagcgccaatcttgtcaacagggacattgtcgagcataccgttaacaccagcgtaaatcaaaggggccataacctcggtaggcataaggttgtactggggctgcttgagcaactcggtcaacctagaaccttggttcaagaggtatcgagtcgaagcgttcaagtcggaaccgaattgagcgaaagcagctacttctcggtactgagccaagtagagcttgagcgaaccagcgacggatttcatgagtttggtttggg

SEQ ID NO: 205605 - DNA, 521 bp, Glycine max
  unsure (1)..(521): unsure at all n locations
gttttgggcagatgcaagatcaaggacttcttacagtcattttggtgatgcagttactctggacacaacatacagaataaatcaatatggagtgccatttgctccattcactggggtaaaccatcatggtcagatgattttgtttggctgtgcacttcttttggatgattctgaagcttcttttgtgtggctttttaagacatttctgacagcgatgaatgaccgataccctgtctctatcactactgatcaagacagagccatacagacagccgtttcacaagtttttcctcaaacacgccactgtataagcaaatggcatgtcttgcgagaaggccatgaaaagttggcccatgtatgcaacatgcatccaaattttcagattgaactttataattgtattaatctgacggaaacaattgaggagtttgattcatcttggaattttatcatcaataaatatgaactcacanaaaatgattggcttcagtccttgtacagtgctcgtgctcaatgggttc

SEQ ID NO: 205606 - DNA, 452 bp, Glycine max
cattcgaattcattttatttatatattaatattatattcaaatgaaataaaaagatattaaaagatactaattataagaatttgaaagtgaaattataaagttattaaatgattaatcaatttttttctacctgttcctgtagtaaaaagagttccatctgttcttgaatagcttccttcaaaaggacttctgcttccccagtgaatgtcttggtagaagatatgatttctttgaattgaggtttattcgtgtttaagtaagcacgtaactcaacaagaaatttccttacctgtccaatttctaatgaatcaagataaccattcgttccagtataaatagttattatctgttcttccacggtaagaggagctgattgggattgtttaagcaactcgcgcaatcgttgacctcttgctaattgattttgagtagctttatcgagatcagaagc

SEQ ID NO: 205607 - DNA, 419 bp, Glycine max
caacatcgctatcgagggaattaactatgaagcctaccctactataatccctttcgttgctgcctgtatatgcttacctggctctgtcagaagacgctgaccaagatgaggacattggtgaccaccccattctgccagaagggacatattacattatgccatcaacttggggcgctgccggtgatggattgaaactaggcctgacgggaaactcactctgcccagatactgttttgggagattactcaaaagtcctccgtggcacaccagttaaattcatcatacctgggataagcactggaatcatctttacaggaactccacttgaaatcgagttcgcactgaaacctaattgtgctgcatcctacacatggatggcgtttgtggacaatgagatccaaaaggcatgtgtgggtatt

SEQ ID NO: 205608 - DNA, 480 bp, Glycine max
tccatagttgcttcctcctcctcattctcctctattctcaccactcaatttctcactccctcttcattttcttctctctttctcaaaaccctcactttaaggtcctccacgccgtttcagcgtctttcttttgcgtcacaaccactgcgcaggctcatggctcgcgccaccctcggcctcactctcccagccaacaccgaatcccttaaggtttctttcgcggcaaaggagcttgacgtggcggaatggaaaggggaccttctcgccgctggcgtaacggagaaggacgtcgcgagaaacgtggaatcgagattcgagaacgcgattctgagcgcgttggactccaagctgggcgggttgttgggccaggtctcgttcgaagaggacttcagcggcaaacttgggcagtccacggttctaagaatcgcttccggactcggattcaagcgcgttgccttgcttggcctcggcgcctccgcg

SEQ ID NO: 205609 - DNA, 467 bp, Glycine max
ggccaaagtgaatctaattattcaaatatttccgtttaggcacactacaaatggtaagaagctgttgctgttgatatatctatcttctatacaaaacataacaaactggaaaataacactaaaaccctaagaaacaagaaatgtattgcaaaacgaaaaggcgacaactatgctattatcattattataagcctaagcacgttctccacggatgcggcgtgcgagttgaatgtccttgggcatgatggtcactctcttggcgtggatcgcacaaaggttggtgtcttcaaacaaacccaccaagtaagcctccgcagcttcctgaagcgcaagaaccgcgtgactctggaacctcaaatcagtcttgaagtcttgcgcgatttcacgaacaagacgctgaaaggggagcttgcggatcagaagctctgtgctcttttgggtatttcggatctcacgaagagcaacag

SEQ ID NO: 205610 - DNA, 524 bp, Glycine max
ttgttattggagatttcaattctttgtctttcaaactcctcaagttgggtttatgtgatgatggctctcaacatctcttctccagctgaagtcaagtccatttttttcgctgattccttcaagtctaactgcctcacagcaaaattctcaggtgggtttgcttttaagagaaaagagcgtagagcagcatctggaggacgggtttattgctcagtgcaggcaacaccaccaccaccagcctggccgggacgagcggttccggaacaaggtcgcaagacttgggatggaccaaaacccatttcaattgtggggagtactggttcaattggaactcagacactagatattgtggcagagaatccagataagtttaaagttgtggcacttgcagctggttcaaatgttactcttcttgcagaccaggtaaaaagatttaagcctcaacttggtgctgttagaaatgagtccctaattgctgaacttgaagaggccttgcatgatgttgaagaaaaacctgagatcat

SEQ ID NO: 205611 - DNA, 464 bp, Glycine max
cgaaaagtacacaaagatcccatcttttcacgatttggagcagaacaacaattctgggtatcttcatatctgtgccaatgagaccatccatggggtggagttcaaggactaccctgttcccaagagtggtgttttggttgctgatatgttctcaaatttctgctccaagcctgtggatgtgtcaaggtttggggttatctatgctggggcccagaagaatgtggggccctctggtgtcaccattgtgatcatcagaaaggacctcattgggaatgcacagggtgtcacacctgtgatgtttgattacaagatccatgatgagaacgattcactctacaacacccctccttgctatgggatttacatgtgtgggttggtgtttgaggacttgttggagcaaggtgggttgggggaaggtgagaggaggaacaagatgaaagctgagattctttacatgcattgat

SEQ ID NO: 205612 - DNA, 388 bp, Glycine max
tttttttttttttttttttttttttttttttttttttttttttttttttttttttttttttttttttttttttttgggggggccttaaccaaaaggggccttaattttttaaaaaaattttcaagccccaaaatttttttttcggggccccccaaaaaattttgaccaaaaaaaagggggtttaccccccgaatttttaccccccttttaaccaaaaaggcaattttccccccccatttccggggttcccttggacccttggaccttaaaaaaaaaaaaaggttccccccctttttccgaattctcccccggttcccctttttgggcccctaaaaactttgggttttaccccggggcccttaacctggggcccccaaatttcccttct

SEQ ID NO: 205613 - DNA, 581 bp, Glycine max
  unsure (1)..(581): unsure at all n locations
aaagcagccatgggttttttcttgaaatgggtcaacttgtttgtcttttttcatttccttgctgcaacacccatcttctcagattcctcctccagctcaaatgcaatcgccaccaccaagttccttgatttagccaaggatcctcgggtttttgattggatggttggtatcaggaggaagattcatgagaatccagaactgggttatgaggaatttgagaccagtaagctgattagagctgaattggataaactgggcatctcatataaacacccagttgcagtcacgggtgttgttggcttcatagggactggacnttctccttttgatgcattaagagctgacatggatgctcttcctatgcaggaaatggtggagtgggagcacacgagtaaagtaccctgaaagatgcatgcatgcggtcatgatgctcatgttgccatgcttcttggtgctgcaaagatcctcaaagagcatgaaattgagatacgaggaactgttgttcttgttttcaaccagcagatgatgaggtggtagggctaagataattttagatgctgaagtcttgaaaacatttttgc

SEQ ID NO: 205614 - DNA, 479 bp, Glycine max
aagaaaaaagaaagttctaattattaataaattatatctatatatatatatatacagatagatattctatatcttttatcttaattaatatttgacccctccttataatgtgttatagatttctttatttttaggaacttatccattccttttttaatgggcccgacaatccgaaagaattctgggggaggggtcatttcgcttttgatctaaaataaatagagcttcaagaaatgagagaattaagaatacccacgagaaacactaatccaatccataatgatgtaccggaaaatacaacatttttgttattcgaccaacctttaggagaagcaaatacaacaggtacactaatcaataaaataaatgaaatagcaattaatgcaaaaacagctaattggaaagcaatagtcatgtttctaatcctccaatttaccaacaaaagaactttaccatttgatcccccaaccccttgatcc

SEQ ID NO: 205615 - DNA, 462 bp, Glycine max
agttgatataagcgaagaaacatcaagcttggttattgcttcaaattctgcggcttttggtggcagcccgcttgttagtattaatttttttttcccttttgaatttccaattttgtctgtattctttccttggatattgcttaagaaaaatccttattagttattacccatcttttatttttctacacatggggagggacaccgtctattgatatgagaatcaatctagtgactatttgttctggttggccttgcatacatatgttcgcgtgtcttaggataataatcattaatgataaatggtagttgtcacgtgaaaaaaaaaaaatataataaaaaaacaaaaataaaaataaataaaaatttataaaaaattaaaaaaatatagataactcatctatttaataatatctactaccatttaatatatttctaactcaaaataaaaagggggcccccccc

SEQ ID NO: 205616 - DNA, 585 bp, Glycine max
tgctgttgttctctaggagaaaggtgccagatagagcctttaacataatggggatccttgtgttttgggtttggttccctctgttgatctcttcactaccaaattggggagaaagggtcatgtttgtgttggccagttttgctgtttgttcaatccagcaccttcaattttgtttgaaccatctcttagcagatgtgtatgagggcccaccaaatggcaatgactggtttgagaagcaaactggtggcacattggacatttcttgctcctcatggatggattggttctttggtggcttgcaattccagcttgagcaccatttgttcccaaggcttccaagggcacaattgaggaaaatctcacctttggtgattgatctttgcaagaagcacaatttgccttacaggagtttgacatttgttgaggccaatctttggactcttaagaccctcaggactgctgctcttcatgccaggaatctcagtaacccttcttcccagaatttgttgtgggaagcttttaacacttattgattgattttgtgaaaagatcgatgatcatcaatctagtttctctctctttttt

SEQ ID NO: 205617 - DNA, 598 bp, Glycine max
tttcggctcgaggttgatgtatactttcctcctcggaagagatcgcgtgtcaatgctccattcgtttttgatggagaatggttcgagcaaaagcagaaaacctctattgaagccttgccagatgagtgtctctttgagatctttagaaggttgcctgctggcgaagacaggagtgcatgtgcctgtgtttccaagcgctggcttatgcttctaagcagtatttgcaaaagtgaaatctctgttaacaaaaataccacagtagagaaccctgaaaaggagggtgatgatgtagaatttggaggtaagggatacctctctcgaagcttggaaggaaagaaggcaacagatgttagactggctgccatagctgttgggacttcatctcgaggaggattggggaagctctcaatccgtggaagcaacattgtttgtggggtgactagtcatggtctcaaggctgttgctcgtggatgcccttctttgaaggctctttctctatggaacgttgctaccgttggtgatgaaggccttattgagatggcaaatggatgtcaccaactagagatacttgatctttgcagtgccccgcattactgat

SEQ ID NO: 205618 - DNA, 478 bp, Glycine max
tggtcgattgatcaaagtaagagatggtggaactgattggggctggggtgttgctgtcaatgttgttaagaaaccttctggaggcggttatatagttgatactttacttcattgctcacctgtttcaaatgagaacagttttcggtctaaaccatgcccgccttgacctgtagagaaaggtgaaatgcatgtggcttctgttcaattaccattgatctctgccctcggtcaactgagggtatccataccttccgatcttcgacccttggaagcaaggcaaagtatattgcttgctgacaggagctgggcaaccgtttttcccagggtcttccaaagcttaaccctgtaaaggacatggacgtacgggactcagaaatagctgaactagtgaatcaagttgatgaacttgagataaaattgaccactcgtcctatgcataagcatcaagatatggatcaaattagatgctttgagagga

SEQ ID NO: 205619 - DNA, 560 bp, Glycine max
ccaagttccaagatgaagatgattcactttcttttcctctttgctcttgtctcgttcacttcccatgcttctgtcaatgatttctgtgtagcagacctaaaaggtccagatagcccttcaggctatcagtgcaagccacctaacacagtcacagtggatgactttgtgttctctggctttgtagctggaaacaccacaaacactttcaatgctgcattaacctccgcatttgttactgattttccaggtgtgaatggtcttggtgtatctgcggcacggttagacatagccaaaggtggatcaatcccaatgcacacacaccctgctgccactgaacttctaataatggtggaaggtcaaatcactgctggttttatgaccccaactgcactttataccaagacactgaaacctggagatattatggtttttccacaaggacagttgcattttcaggttaattctggaaacggaaaaaccactgcttttctgcattcagtagtgcataccctggagcacaactacttgaccttctgttatttggcaacaccttgccttct

SEQ ID NO: 205620 - DNA, 559 bp, Glycine max
cttcaagattcaggtactgcgtttcggaagcagacacagatggctcgtacgaagcaaaccgctcgtaagtccacaggaggaaaggctcctaggaagcagcttgcaaccaaggctgcacgtaagtctgcaccaactactggtggtgtgaagaagcctcaccgttatcgtcctggtaccgttgctcttcgtgagattaggaaataccagaagagtaccgagcttttgatccggaagctccccttccagaggctggttcgtgaaattgctcaggacttcaagactgatctgcgtttccagagccacgccgtgcttgcattgcaagaagctgctgaggcataccttgttgggctctttgaggacactaacctgtgtgccattcacgccaagcgtgtaaccattatgcccaaggatattcagctggcaagaaggattcgtggtgagccgtgcttgaattggtggtttggaagatgatgatgattggtggcttgctgtggtgttttgttattagattccttttatatctaaagatggtgttgtagggatggaggtttctgctggt

SEQ ID NO: 205621 - DNA, 501 bp, Glycine max
cattcgaattcattttatttatatattaatattatattcaaatgaaataaaaagatattaaaagatactaattataagaatttgaaagtgaaattataaagttattaaatgattaatcaatttttttctacctgttcctgtagtaaaaagagttccatctgttcttgaatagcttccttcaaaaggacttctgcttccccagtgaatgtcttggtagaagatatgatttctttgaattgaggtttattcgtgtttaagtaagcacgtaactcaacaagaaatttccttacctgtccaatttctaatgaatcaagataaccattcgttccagtataaatagttattatctgttcttccacggtaagaggagctgattgggattgtttaagcaactcgcgcaatcgttgacctcttgctaattgattttgagtagctttatcgagatcagaagcgaattgggcaaaagcttctaattctgcgaattgtgctaattccaattta

SEQ ID NO: 205622 - DNA, 465 bp, Glycine max
tctttctgcactcttgagtccttcccaagctcgtttcgttggaaattggaattcattctctccccgagtcagagtcatgtatggcggtgacgaagtatcagcaatagtgatagacctgggttcccacacttgcaaagccgggtacgcctggcgaagatgctcccaaggccgtctttccctctgttgttggtgcaattgatcaaatggacattgatggaactgctgatattaatgatgagaactctgacaaaaccaagggaaaatgcaaactttatgtaggatctcagtcactaggataccgcagagaccatatggaggtgctgtcacccttgaagaatggagttgttgttgactggaatattgcagattacatatgggatcatgctatgagggaatgcctcctagtcgaccctaaagaacgttcaatgctacttgccgaaccatgcttcaacactcaagaacaga

SEQ ID NO: 205623 - DNA, 551 bp, Glycine max
gggaagctctgcaagtccacgggcatgtagtgaaattagggatggggcacaaggatgcgtcgcgtaagttgtctaaggtcttcaccttcgccgctctctccccctttggcgacctcaactacgctcgtcttcttctctccaccaatcccactctcaactcttactactacaacaccctccttcgcgccttctcccaaacccccctccccacccctcccttccacgccctctcccttttcctctccatgccctccccacccgataacttcactttccctttcctcctcaaatgctgctctcgttccaaactccctcctcttggtaaacagctccacgctctcctcaccaaactcggcttcgccccggatctttatatccagaacgtcctccttcatatgtactccgagttcggcgacttgctcctggctcgctccctgtttgatagaatgccttacagagacgttgtttcctggacctccatgattggcggcctttgtaatcatgacttacccgttgaggccatcaatttgtttgagagaatgcttgcatgt

SEQ ID NO: 205624 - DNA, 458 bp, Glycine max
cagtgattaaatacttcaatcaaaaattggtcagggatacaataacaaaacccaaatgggccatatagaaataccaaggtgaacaaaatctcatcccctgcctacaacgtcttgaaaggaatttagtacgtcatgggagccttcaatttattcttacaacaacatggtctctggattttcaatatagcctttgaatgcttttaaccattcggcaccaattgcaccatctataacacgatgatcacagctgagggtcacagacatgaaggaagcaaacttgaactcttcagcacctgaacccggaacgaccctcctctcagaagatccaacggcaagaatgccagcctgaggaggattgatgattgcacagaattgtctgacaccaaatggccctcccaggttagacactgtaaatgtacctccctcataatcttggggtttcaagctgttttctttgg

SEQ ID NO: 205625 - DNA, 575 bp, Glycine max
ggctattgaccacaaggccttacatgatacttttactgcttttggactcattctttcttgcaaaatagcaactgatgcttctggtctgtctaagggctatggatttgcatcaattggacaatgaataggctgcacagaatgctattgacaagtcaaatggcatgctgatcaatgataagcaggtctatgtaggccatttcctgcgaaagcaggatagagagaatgctctcagcctgacaaaattgaataatgtctatgtgaaaaacttatcagagtcaaccacagatgaagagttgatgataaattttggagaatatggtaccattactagtgctttaataatgagagatgctgatggtaaatcaaggtgttttggctttgtcaattttgaaaacccagacgatgctgccaaagctgttgagggacttaatgggaagaaatttgatgataaggaatggtatgttggaaaagcccaaaaaaaatctgaacgtgaacaagaactgaaaggacgatttgagcatagcataaaggaagctgcttgcaaatattcaagtttgaacttgatctcaagaact

SEQ ID NO: 205626 - DNA, 415 bp, Glycine max
gattgccgaaattcaaccatgttatattgagacaatgaatcaagtacacaactcacagcaaaaaggtttataagctgtaaaggtccatgtaaccataaacaaaaatagtctccaagactatagaaccattacattttagacaaattagtcttgttccacttgatcctacgtaaacacctactacaacgggtggggttactgctgcctaacatgtatcatattcactacaaacattttaataggagtagcctttgacgaacaactgcttcttggcttcctcagattcacccttaccggtgtactttccaagctgggcgagcgagttggacttggcacggaaaagaagtgcatcttgtgccggcttcacattctctgggcgggctccccatgtcttcaaggcaatgttttggagggc

SEQ ID NO: 205627 - DNA, 540 bp, Glycine max
taaaaatgaaaagaagcactcactcgtgaaccccacgcagtgttcgataatcaaatcttctttctttttcttccgcagtcccaaccttcatggattctcactcacacatcattgcttggggctctggtgaagatggtcagctaggaatcggaagcaacgaagagaaagaatgggtctgcctcgtcaaagccctccagccccaccgtattcgctccgtcgtcgccggcagcagaaactccctcgccatcgctgacgacggcaaattgttcacttggggttggaaccaaagggccacacttgggcaccctgctgagaccaagtctgagaacaagactgagaacactcccagccaggtcaaggctctttccagtgttaaaattgttcaggcggctattggggggtggcactggttggccgttgatgatcagggcagagcttatgcttggggtggaaatgaatacgggcagtgtggcgaagaacccgagcgcaaggatggcactggtagacctttaatgagagatatagagatccctcagcgct

SEQ ID NO: 205628 - DNA, 498 bp, Glycine max
gagagaacatttttttttgtttcatcatataaaatatatatgttctgaaagaacacatacaagtacacaaaaaaaagggggaaattcataaaaaaatacagaaaaaaaaaaacagaattgagtaagagggaaggaaacatagagaaaattttagcaatcagataataagaagccagtagtagtgcaaaagtcccttgccaagagtgttggaaccccttttagttaagcaggtaccttctcccccttgagtggcttcaccacttcccatgtgaagtcagggtcatctctgccaaagtgtccatatgcagcagtcttcaagaacctgccatttccacccctcttgagatcaaggttgatggagatcatgccaggcctgaagtcaaaactctccttcacaatgctgaggatttccttgtcagggatcttcccagtgccataagtgtcaacaaacacagacaagggctcaggcacaccaatggcatatgaaacttgcacaat

SEQ ID NO: 205629 - DNA, 546 bp, Glycine max
  unsure (1)..(546): unsure at all n locations
nnnttgagcagccatgccagcaattgcgatgaccggagcatctttccccacttattcacactatttttccagggccccaggagtaccagaacaaaagatgaatattggattgcttggcaatggtgcaccatcacagtcactgcatttaaactccaattggcctgttcctggagcagataagtacggtgtccagccactttccatatggctacctggtggaaattatggcactgtgcatcatcatgaaaattctaccaaccagaacctatctgttccaaagggatggcgcaatggggactggatctgtaactgtggcttccacaattactcatcccgctctcagtgtaaaaagtgcaatgcttttcctcctgcacttgggacaaagcggttagcttcagaagagttggtttatgattgggacaacaagagattgaatataggaactacaaatgatcagcatcaaatatatacaagtttagagcaagtggtagggacaggtgcagatccaaaacctggactcttncnctcttattccagcatgaactc

SEQ ID NO: 205630 - DNA, 569 bp, Glycine max
taggatagtgctttgaaaatgggaaagtttagttcaagttacagtacttctgattttgttcactttggagttctacttccctttcttctgttatcacagttgttctttcaacttgcatggtgtggctccatagtaaagttccttcctggattagagggaccccttccttttgttcttgaaaccgggtatgtgggagtgggtgaatcagaggatgtgcaggcattctactacttcattgagtcagagaacaatccaaaggaggatcctctcatgctttggctcactggtggccctggttgctcagctttctctggccttgtcattgaaataggtccaattgcatttaaaaatgaggaatacaatgggagcctgcccaatttggtcttgaggccacactcatggacaaaggttagtagcattatatttgtagacttgcctgtttccacgggcttcacttatgccacaacagagtttgctactcaacgaagcgactggatacaagttcaccaagtccatcaatttcttaggaagtggttgattgaacattcaaattttttgtcactgatgtt

SEQ ID NO: 205631 - DNA, 450 bp, Glycine max
gaacacgaaacagagatcataatcaaaataaattgcaaattaatacatagtacacttcaaaatccagcatgcatttattagtatattcccataccctgcggctcaaaatttaaggacttacaaaacattaagaaacaagacccttttgcaattcacactgactgatacagatgcagatagccactcttaactatctagtatcctagctacaccgctgcaaagtagtctttgctaagtttagggtctggtttcatggacttctccccaggcttccacccagcagggcaaacttcatctgggttctcctgcacatactgtaaggcctggagagttctctttggctcgtaacacttttaccaattgccaagttgtaatggtagaatgctgaataaccccttccttgtcaataatgaacaaacctctcaatgcaattccctgatcaggaatgag

SEQ ID NO: 205632 - DNA, 519 bp, Glycine max
ccaagttccaagatgaagatgattcactttcttttcctctttgctcttgtctcgttcacttcccatgcttctgtcaatgatttctgtgtagcagacctaaaaggtccagatagcccttcaggctatcagtgcaagccacctaacacagtcacagtggatgactatgtgttctctggctttgtagctggaaacaccacaaacactttcaatgctgcattaacctccgcatttgttactgattttccaggtgtgaatggtcttggtgtatctgcggcacggttagacatagccaaaggtggatcaatcccaatgcacacacaccctgctgccactgaacttctaataatggtggaaggtcaaatcactgctggttttatgaccccaactgcactttataccaagacactgaaacctggagatattatggtttttccacaaggacagttgcattttcaggttaattctggaaacggataagccactggctttcttgcattcagtagtgcataccctggagca

SEQ ID NO: 205633 - DNA, 451 bp, Glycine max
aagaaactcgagggatacgttcttttagcgttttcaaattttccttaactaattcccccacatcatatgcacaaatacatgtcaaaataactacctatttgaattacagggtagatgaatgcactgaagccccttttaagctttggctgagatgaagcaccttaaaaaaatcctttctattcctcgtcatcatcgtcttcttcaggtgcctcttttagccattgaattaacttttgggcctgcttaacaaaaactttatctgcctcgtcagcatcttttaactcggcttcccaactcaaaatagcatcttcttctacaacatcttcattgtacaagtagtgcaaaatccttgtgaacaatggagcaaattccttagcagattcctcacatatttcttcaaatttaagtattacttcgatctgctcatctatgtcagtcagataggatgtaa

SEQ ID NO: 205634 - DNA, 487 bp, Glycine max
gtgcaaaagaaaactcaagctcccagattctgttccaatgcctcccgtaccaatttcccccatcaaagttgggcacattgatgatgtccaagagctaagaaaaaccaagccaaggacaattcctcaaagatttgtacgagacttgacagaaagaccaacactcactacacctcttcccccaccacatagtgacatgccagtcattgatttctctaagcttagcaaagggaacaaagaggaagtcctcactgaacttttcaatcttgcaactgcttgtgaagagtggggattttttcaggtaattaatcatgaaattgacctcaatctgctggagagcatcgagaacctgagcagggagtttttcatgctacctttggaagagaaacagaaataccctatggctccaggaacagtccaagggtatggacatgcttttggtttctcagaggaccaaatactggactggtgcaacatgtttgctcttgga

SEQ ID NO: 205635 - DNA, 600 bp, Glycine max
gagatatgataaagacaataatttgtgggtcactattggaagattacctgaccgaatagtctcaatgaatggctgggggttagcctttcgtgcatgtggaaatcgcctaattgttattggtgggccaagagctttagatggaagggtaattgagatcaatgcttgtgtcccaagtgaaggtgtgccagagtggaacctgcttgctagcaggcaatcagggagctttgtgtataactgtgcagtgatgggatgctgaggcatttgcttttggtgaatagtgctatatggatttattctgaatggaattaacattcttcactttcaaggagagatgattctggctcttgggtaatcagcccacctttgggggtaaatatttactcctatttagagtaacagatacagttttagaaggttcacaaaactgagtcttttcattttaagttatcatgatgggttttcaaatgttggcacagtgacaggtgaataattagctcatgttgggttgcaatcacctttttcataagttcaattgaagtgttgcagaattgtaactggtctcaatctttgcctccttgctttctgtgcgcccccttttta

SEQ ID NO: 205636 - DNA, 599 bp, Glycine max
atgaattcttgttgggtgttcgagttctgggcaaatcaatacggaacactggatccaacaaggacatggtcgtgttggtctccgatggtgtgtctgattatgccaaaagcctactccgggctgatgggtggatagtggagatgattagtttactggctaatcctaatcgagtgcgtccaaagagattttggggtgtctacacaaagctcaaaatatttaacatgactgactacaagaaagttgtttaccttgatgcggacactattgtggttaaaaatattgatgatcttttcaagtgtgggaaattctgtgctaattttaagcattctgagaggttgaattcgggagtcatggttgtggagccatctgcaactctttttaatgacatgatgagcaaaataaaaactactgcatcttacactggaagcgatcaaggatttctcaattcatattactctggatttcccaatgcacatgtttttgagccaaatttgagcccagagatgtttagttccagacccattcctgaaatggagcgactatcaacactgtataatgctgatgttggtctttacattgcttgctaacaagtggatggt

SEQ ID NO: 205637 - DNA, 451 bp, Glycine max
aaacttctctacgcttaatacaacatatttaacccttataatgggtgtatatatgttaaaaacgtaaaaacatggtaaaaaaccgtgttgcataatacaaagcccaagcatatctcactgaacttggacatcaataaccttacgttcaaccttggtcttaggaatggtgatataaagcacaccatttttcaactctgccttaaccttgtccttctcgcaattatccggcagctttaaacgggtatcataggaactataggtcctgcttgaccaagaatcatctccaccatgttcttgttcacttttgtggccaccttttataacaagcatatcatcctccactgataccttaacatcttccttggcaagacccggcatgtcaaacctcattctgatttcatgttcttcatctttgatgtcccaaggggcacggaacttccctcctcctatg

SEQ ID NO: 205638 - DNA, 513 bp, Glycine max
ggaagaaggagtatacggcatcccattcgaggaatggccaggagaacccagactggaagtatgaacagacactgggacagagaattcaccaattgagccttcagaagcactgtccgagagaagttccattacagctgtgtgccatgccctgattgtaggaaaggggcttgtaggcgcggggacatgtgtgaatatgctcatggggtgtttgagtgctggctgcacccggctcagtatcggacacgcctctgcaaagatggtaccagttgcaatcgaagggtgtgtttttttgctcacactgcggaggagcttcgtccgctgtatgtgtccactggatctgctgtcccttcgtccaggtcatctgcctcggctcctaatgtcatggacatggctgctgcgatgagccttttgccgggctcgccttcttcggtctctgccatgtcgacatcccactttgggcaacccatgtccccatctgcaaatggcatgtcactgtcttctgcttgggcacag

SEQ ID NO: 205639 - DNA, 380 bp, Glycine max
gttgaatgttgtctggggtaaagtcacaggcatatagtagtatatagtacatacaagagagaaacatttagcgcggtaacaaatacatgatgagattcatagtatgatactattacacatgcggagggatgaagtggttggttctggatcaagaataataaaaagtagttagaagaaattttagaaaatgtcgagaatttcgaggatggagcgattgcaaaggggacaagagcctcgattaagccacagttccctggaacacaccctgcaaaaagtgtgtccacatgggatgaacgctgcgcctttcttcctttccatgcacacgcaggacaccgaatcattccccacaacattctcctctttctctttctccttctcct

SEQ ID NO: 205640 - DNA, 464 bp, Glycine max
ttttttttttttttttttttttttttttttttttttttttttttttttttttatttttttttttttttttttttttttttttttttttttttttttttcaccaggggaaaaagaaaaccctctagggggattaaaaaaaggccccgcacccccaaaaaaaaaaaaagaaaaagcgacaactaaaaaaaaaaaaaaaaaaagccccccccccttttaatatgccccacagggggaaaaaaaaaacaaaaaccggggaaaaagggaaaaaaaaaagcattgaaaaaaccccaatttttaaaaaaacccggccaagaccccctaggaacccccttaagggggggcaaaaaaaaaatttgggggggaggggggaatttggggaaattttcaaaaaaccggggccccgggacaagggggggggaaaaaagtggaccccccccggggggggccggggggggtatccccct

SEQ ID NO: 205641 - DNA, 465 bp, Glycine max
ttctcctcttttttttttccttttcttctctttttctttttttctttttttttctctctcctcttccctctttttccttcccttccctacaccctaatccaccaacccgcccatgaaacccccaaacacaccccacccaccccacaaaaccccggccccaaaggcccacccccaaaacaaaacaaaaaaaaaaaggcacccccgggccagataacaaccccaagaccaggcccccaacccccaacaccccccacccccccacaacagcccccccccccccggcgggggggggaacccaaaaccccccgccccccacgacaatcccccacccgccccacccgccccccccccacccaccacccggccccctggcgcaaccacaggaccgcgaaccaactcccccgcggccgcacaccccaacaaaaccgggacccctgctggcacaaaaagcccagcggcccccac

SEQ ID NO: 205642 - DNA, 572 bp, Glycine max
aatggcttggcactcgttcctcttattagcgacggccattctcgccgttgtgtgctccgccgtgagcggttgctcgccatcggatagggcggcgctgctggccttccggaaggcgctgagcgagccctaccttggcctcttcaactcgtggacgggctccaactgctgcctcgactggtacggcatcagctgcgacgccaccaccggccgcgtcaccgacatcaacctccgcggggagtccgaagaccccatcttcgagaaagccggtcgctccggctacatgaccggaaaactctcagaggcgatctgcggcatcgacaccctcaccaccctcgtcgtcgctgattggaaagacattgccggggagatccccacctgcgtcaccgcgctttcctccctccgcatcctcgacctcatagggaacaagctctccggcgagatcccggccgacgtggggaaactctcacgtctaaccgtcctgaacctggccgacaacgccctatgcgggcaaattccagcgttcatcacccagctgggctcactcaaacacctggacctcagcaataatcagc

SEQ ID NO: 205643 - DNA, 405 bp, Glycine max
ggacaataatttattttatttcaagtccatatcgggtctacacatagacacaacataactcatgttgctagagtagttttctcacaaccatcgtgcacacaggccaaaacatctctgtagtctcttgaaatggtaaaggagtcgtagaccttttcatcactacttttcttgtactcaaacaagagatatgaatgattgaaagcagtcaatttgccaaacccatagtcaacgtccctataaagactccaaatagggggtgatggtgtgaagtctgacaggtgacttcccccttcaccaacaaccacatgaattgttccattcacagtgccagagtagtgatgcttttcttcattcacacattgattctgataaatggggcatactctttcatagttatggacatga

SEQ ID NO: 205644 - DNA, 573 bp, Glycine max
cttccttttctcttctctgtctaaggggtgccctgagatcacattgaacaatggtgaaggctgtggccgttcttggcagcagtgagggtgtcactggaactattcacttcgttcaggagggaagtggtccaaccaccgtaactggatctcttgctggacttaagcctggtctccatggcttccatgttcatgccttgggggacactaccaatggttgcctctcaactggatcacatttcaatcctaataacaaggagcatggtgcccctgaggatgagaatcgtcatgctggtgatcttgggaatgttaatgccggtgatgatggtactgacagcttcactattactgacagccagattcctctcactggaccaaacaacatcatatgaagggcggttgttgctcatgctgatcctgatgatcttgggaaaggtggtcatgagcttaacaaaactactggtaatgctgggggcagagtagcttgtggtattattggtctgcaaggatatactaatcacatgaagttgaaacttgctttatatttgtggataaatagcacccattaaacccgtt

SEQ ID NO: 205645 - DNA, 582 bp, Glycine max
aacaaataaaacagtagtcttcaattacttcaaccaaaaggtctaacaaactacacgattataagcttaaggcaagtaataaccaactaaaattcaagtttgcaaaactatgatttcttattataaagcccctaccctacattcggggaaacttcaaaaccactatttttcatccaaattattcaatgcaaaggggaagcaacatcattgcctcagatagttgtcgtcgtcattatctgtatattaacctccaccaccagaaccgtatttctttccgaacaagacgagctgtagcttatcataaccagcgagcactccagcacctgcaacagcacgtaatatgtttgcaccggcacctttaaagagtgacttagtaccctcttttgcgacaattatcttgaatgcttccaaagagctcttgtattttacagcttcttcagatgtcatcatcattcttctacgcacagtatcaatggggtaagaggccaagccggcacctattgtgatcccccatcccaagagaaactcgcaaagagctattctgcaatcaccaacaagaccactgttcagagatcttctttc

SEQ ID NO: 205646 - DNA, 427 bp, Glycine max
aaacatcacaactcaaatagtaaccactatttcagttaacactttgccatgccctaatggcagaaacgactgccaggggctaaatggaaccattttctctgctagcatgaacaacataagctttcgaatccccaccattgacatactaaaagcctattactaccatatcaacggggtatacgaacctggatttccaacatttccaccgtttatatttaacttcactggggattttttgcctataacactgaatacaccaaagcaagggactagggttaatgtgctgaactatggtgcaacagttgaaattgttttccaagggacaaaccttgttggcgggatagaccatcccatccatcttcatggctacagtttccatgttgttggatatgggctaaggcaatttaaccaaagcgtggatcccatg

SEQ ID NO: 205647 - DNA, 597 bp, Glycine max
gaactcttcgtaagttccggaatctacaccacccctaggctcttcgctccaaactccgaaccctaacctaacccaaccatcttcttcgcctcgagcacatcttaccctaattcgattattccccaatttcatcgaaccaatcaataaatcatatacacattgtttgtttaatttttgatgccgataaaaaatgccgccgaagcagcagcaatcgaaagctgatttagcgaagaagcagaagattgtagaggacaaaaccttcggtctcaagaacaagaacaagagcaaaaatgttcagaagtatgtccagaacctcaagcaatccgtgcagcccaggcccgatgccgccaaagtcgatgccaagaaaaagaaggaggaagataaggccaaggagaaggagctgaatgagttgttcaaaatcgctgttactcagcccacagtgccagttggtgctgatcccaagtccatattatgtgagtcttttaaagtggtgcagtgtgccaagggcttcagatgcaagttctcgcatgatttgaatgtcagaggaaaggggagaagattgcatttacagtgataagcgtgacgaggtaaacatgg

SEQ ID NO: 205648 - DNA, 519 bp, Glycine max
gttgtcccagacccaaaacctctaccagtccacattctcctactgcttgcccagcttcaaatcacttaacttctctgggtcgctaagacttgggcctgtggcccagcccataaggattaagtatacccctcttctcaagaatcctagaagatcttcactctattatgtcaacttggttgcaattagggttggtcggaaagttgtcaatattcctcctgaggcgttggcgttcaatgcggccaccggagccggcaccgtctttgattctggcacggtgttcacccggctagttgcacccgcgtacacagcggtacgggatgagttccagcgacgagtcgccatcgcagcaaaggcaaacctgacagtgacatccctaggaggctctgacacatgctacacagtcccaatagttgcacccaccataacattcatgttctcaagcatgaacgtgaccctgccagaggacaacattctcatacacagtactgcgggcagcaccacatgcttggccatggcttc

SEQ ID NO: 205649 - DNA, 514 bp, Glycine max
  unsure (1)..(514): unsure at all n locations
catacttagaaacagcaactatgtctctcatgcagcttactagctcccctgttggctcactggtccgtttcattgtaatatttgctttatggtacagaaccatggctttggccaagttgccaccaaacgcttcatcagttccagcagttttagcgtttggagattccatcgtggacccaggcaacaacaacaacataaaaacattgatcaagtgcaacttcccaccttatggaaaggattttcagggaggaaacccaacgggtcgattttgcaatggaaaaattccttctgacttaatagttgaacaattgggtattaaggagtatttgcctgcatatttggatccgaatctcaaatctagtgatcttgttaccggcgtctgctatgcctccggtgcttcaggatacgatcctttgacacccaaaataacgtcagttctatcngtatctactcaactagacatgttcagggaatacataggaaagctgaaaggcattgttggagagagcagaac

SEQ ID NO: 205650 - DNA, 552 bp, Glycine max
caatagtgtcccatcatttcaatttgaaaccatccctgatggtctctctgataaccctgatgttgatgccacacaagacgtagtttctttaagtgagtctactacaaggacttgtttaactcccttcaaaaatctcctttcaaaactcaatagtgcctcggatactcctcctgtgacttgcatagtttctgacggtggcatgtccttcactttggatgctgcccaagaattaggcatccctgacgtgattttgtcgacagctagtgcatgtgggtacatgtgttacatgaaatatccaagacttgttgatatgggcttaacacatctcaaagactcaagttacttagaaaattccatcgattgggtaccaggcatcaaagaaattcgattaaaggacttgcctagcttcatgagaaccacaaacccacaagatctcatgatgatggatttcatatatagccagtgtgagagagctcaaaaagcttcagcaatcattgtgaacacgtttgatgcattagagcatgacgttttggatgcattctcattcatatt

SEQ ID NO: 205651 - DNA, 465 bp, Glycine max
gcaagaacaatctgatcttctttattgtggctaaaagtgatatctcaaaaaacaaataatgtaatagtaacccaaagccaccaccagtgaaaaccacaagttctagatgagataaaacttaaaagaaagtcaacaaatagatctacgaaagttctttggcagcagcaataacagcttccttggtgataccaaactccttgtatatttttcctgctggagcacttgctccaaatcgatcaatgcctatggcctttccttggcttccaacaatcttttgccaaccaaatgttgatcctgcctcaatgctaactctaactgttaccgaagcagggagaacactctctttgtattcatctgactgctcatcaaaaagttcccagctaacaaaagaaacaactctaacagcttttccttccttccttagatcctcagcagcagcagcagcaatttccaactcagaaccag

SEQ ID NO: 205652 - DNA, 589 bp, Glycine max
gctttgaagtatgtgatgttgtgctgcacgctgatgctatccacagaggaggtggtcaaatcattcctactgccaggagagtcttctatgcttcccagattactgccaaacccaggcttcttgagcctgtctacctggttgaaatacaggcttctgaacaagctcttggtggaatctacagtgttcttaaccagaagcgtggacacgtgttcgaggaaatgcagaggccaggtaccccactatacaacatcaaggcatacctccctgtcatcgagtcctttggtttctcgagcacattgagggctgcaacatcaggccaggccttcccacaatgtgtgtttgatcactgggacatgatgtcttctgacccattggaggctggatcacaagctgcacagcttgtcactgacattcgcaagaggaagggcttgaaggaacagatgactcctctctccgagtttgaagacaagctttaaatttgtttcatgaattattttactttgaacttagtcgaatttattttctcttgtgaacaatgctactttagatttaatttctgttagttttggttgtggttttgcccgtgaat

SEQ ID NO: 205653 - DNA, 450 bp, Glycine max
aacacgaggaaccaaagttgctttttcaattcatatatgaaatttgacataatgttgcctttgggtatcaattatgaatatgaagcatgagagtcaaacatgctgtcgtttttcacctaagtctcaaacacacctctatcaagatgaaagcaacctactaacggaaataaatggatatctgagggatgtcgatgtcattatcctcatcatcctcgcatgccacaacaacgtccaaatggcgacggtacgcaagaatttcaaacttggctacttcccttgccagatctgcaacctttttgtccattcgatctttatgccgagggaacatgctattatagagcaggcaactcccacaagaaatactgtaagcattcaagccctttgccttcagccactctagaagttccctgagggtaggattgtctccgagaatccatctatcccaaaccg

SEQ ID NO: 205654 - DNA, 445 bp, Glycine max
atattattatataaagatagtctataatcactagaatttctatatatttatacttagtatataataattctagtgattatagctaagccaatatatatcataatataatatacccttttcttattcaaagaatttatggctatgccttatcatttttagtcaaagaaaagaaattatggaattgaaataactcactcagaacgccctttaaaagattacgcggtacgattgaatcaaataagcccttatggaataaatattcagctgcttgtgaaccttcaggtactgccttattcaatgtttgttcaattactcttttaccagcaaatgcaatataagcatttggttcggcaataatgatatcccccaacatgccaaaactagcagttacccccccagtagtgggagatgtaagtatggatacatagaataactttttattttt

SEQ ID NO: 205655 - DNA, 525 bp, Glycine max
aaaaagtcaaatttcaatactttttttagtgtaaaacaacaaacttaagacctcatataaattacttaaactcgtctctagactgaccttagtagattcaaaattaatacaataattcccagcagaaattaatggagacatatatttccctttttgctgattgccatccgatactgagcgttgctagtaataagcatcaattaagaatctttgcagcagcaatttgagacgtgaattgcacaggtcccccaaaaaattgaaaatatcgataggatattatttttcatgaacgagaggagaatacacaggataccacatattgcttcgcacatactccacagcctgatcttttgacatatgggaaagttccttgggccccacatcaccatgtccttctgccagttcttcttcaactgctgctcgaagcacagcagccccgacctgtgccgtaacatctcgtatgctatcaacggatggatacacaattgctttcaagatatcttccgtcgccatgtatgaagcaag

SEQ ID NO: 205656 - DNA, 593 bp, Glycine max
ctcttcccagcgctcattctctctctctctctatctccgtgtttcattccaactgcaaaacaacaactcaattaagaaattcttctccggagccatggcagatctcaagtctacattcttgaacgtctattccgttctcaaatctgaacttctccacgaccccgccttcgagttctccgatgatgctcgccattgggtcgaccggatgctagactacaatgtgcctggaggaaagttgaaccggggactgtcagtcattgacagctacagattgttgaaagaaggacaggcattaaatgatgacgaaattttccttgctagtgctcttggttggtgtattgaatggcttcaggcatattttcttgttcttgatgacattatggataactctcacacacgccgcggccagccatgctggtttagagtgcccaaggttggaatgattgcagccaatgatggagttctactaagaaaccatattccacggatccttaggaagcacttcaggggaaagcctattacattgatcttcttgatttggttaatgaggttgagtctcagactgcttcaagacagatgatagatctgatcac

SEQ ID NO: 205657 - DNA, 373 bp, Glycine max
cacccgcacggaccctgcaaacacatagcatccaaggcctgctattgctcaaggcgagcactgacacctcacaagcacgccacgtagagatatggacgctggatgaccaacgccatatgatctgcattcaccgtgacgaaactatccaagctcatgccctctagccttagcgctggtcaccaagcactgtgcctgacgcacctccgttcatatgaacgggacgtgcccttggctgacacctgatggcaagacccatgtcactgacgagcctactacgacatgtgagccatggtgacaatccttgtccacactgagctcaattcccacagcatgacgacgactgcacacgagatgagactgcagtacgaacatg

SEQ ID NO: 205658 - DNA, 601 bp, Glycine max
cttgatagaacattataacatgcattattttattattttgatcacaaagtccatctagtagttatatatggctcctagtcttggcacaaagacaaagatcgttcttcttgtgttgggtgagtcctggcaatacttgaacatcaatgtcttcctttatcatcccttgtggcaattcccaatcaaaggaatgaagaagattagcacgaacaagttctaatatcacaactgccataggtaaacctgggcaacttctgcgacctgatccaaaaggaattagttggaaatcttgtccacgaaaatctacgtcgctatccaagaatctttcgggaataaactcttgaggatttttccaagattcgggatctctatgaataacccaagcattcacgtataatattgtcttagctggaattcgatagccatgtataatgcactcttcatttgatactcttggtacaagtagtgtggctggtgggtacaatctaaatgtctcctttatcattgccttgaataggaaagttttgaacatcatttcatctaagacatttttgtgcctccacatttctactactttctgactttctcatactctaggttttat

SEQ ID NO: 205659 - DNA, 542 bp, Glycine max
ggcatctggaagatgcgtacaggtaatccagttgatggctgtgcaatcttttggcgtaactcaaggttcaaactgttatacgaagaatgcattgagtttaataagctgggactcagggataatgttgctcaactatgtgtactagaattcattaatcaaaatggatctctcccatccagcttgacagggtctagtaaagttgtggtttgcaacattcatgtgctttacaatcctaacaggggagaaattaagcttggccaggttcgagtgctgcttgataaggctaaagccgtttctaaactctggaatgatgcccctgtagctatctgtggggattttaattgtactcccaagagtccattatataactttatatcagaacagaagttagatctgtccggaatagataggaataaggtatcaggacatgcttctgctacaattcatgcatctaagctctattatggtcctaattctagtgaaatatctgctaatggttcagttcaggcaacatccactgaaggttgacaagaagacattga

SEQ ID NO: 205660 - DNA, 610 bp, Glycine max
  unsure (1)..(610): unsure at all n locations
agagcaaaggcttttcaacacaagaacttgtggctttgtctggagcccacactattggaagtaaaggttttggaagcccaatttcttttgacaattcatattataaggttcttttggagaagccgtggacgtcttcaggtggtatgccgagtatgattgggcttccttcagatcacgctcttgttgaggatgatgaatgcttaagatggattaaaaaatacgcagacagtgagaatctattctttgaagatttcaaaaatgcgtatgtcaagctggtgaattctggtgtgaggcggaatagcttataaattcaagagttgaatgttccaacttccactgaaggggcaacttgcatttttattgactttctaacagtgtttatgcacagttgccatgaagttttgggtgctttattattgatttgaacatcaagatctactaccccctaaaaatcaaccaacgaagtatgtgcatgcagggccaatanatctcatggaaaagtcgtttaagtgtgttttgattaagatttanacgactatttaacctaatttttttttgaatttaagatatgtaaatatatgattatatattctttcagatttatgtaaaa

SEQ ID NO: 205661 - DNA, 530 bp, Glycine max
aatatatgttgttatatactgatatttgtatatattcaactgtaaatgatagaatacagatagatctatctatatagataagaaaaatagatcattttacatgttaagttctttggttcgaagggtaacacacaagcgatcaatttgatctatttctttatttctgcgtgaattgtatgtttgcaacaacggggacaaaattttctcaattccaatcgactaggcgtattctgtcgattctttttagttatatatctagaaatacccgttgattccttattaacactctttttatcacaaccggtacattccaaaataacaattactcggatatctttacctttggccatgaacctcccttgggtttttaattcacttaactcttttggtttcggattataatctaagaaaaagaaaagaacgaaaaaacgaaaatataaattaagaattagaaatccaattttgaaagatttcgttccatttaagattaggattaatatagtacaaaaataatacaatgatctcgaact

SEQ ID NO: 205662 - DNA, 586 bp, Glycine max
  unsure (1)..(586): unsure at all n locations
attcggctcgagatagcttcaatttataagaatggcactttctcctattcgttcttcttctttctcttcatcagctattgttgcattggctgtgttactgcttcttacagggacctcttcagctaacctctcaaagaacttctattccaagacatgtcccaacgttttcaacactgtaaaatctgtagttaaatctgctgttgtcagagaacctcgcattggggcatctattgttcgtctcttcttccatgactgctttgttcaaggctgtgatgggtcaatactacttgatgacactccaaccttccagggggagaaaactgcagctgctaacaacaattcagtgagaggctttgaagtaattgatgctatcaagtctgaggtcgagaaaatatgccctggtgtggtctcatgtgctgatatcttggacattgcttctcgtgactctgttgttcttcttggagggccattttggaaagttagacttggaagaagggattcagaactgccaactntactgctgctaacactggtgttattccaccttccacatctaacctcaccaaccttatcacaaggtttcgag

SEQ ID NO: 205663 - DNA, 480 bp, Glycine max
ggtgtaatcatccttttatatttccgtaaatgagttagtgaatagatacatgattatacaaaggctgtgtagcttaacccaatatgctagctacatcaccttctggcggtaaattagtgtaacaatgaaatggttcactcaattccatctcttggcatttttcacgcctttggacttctgttttgctgcctgaaaggcctgcatcttttgtttcttccgtgcctctttctcagccttggacatcttagatttggctttcactttaggagctttgctatcaagctcagcctcgcgttcaagttctctttccctagcatcaaaattcttctctaaataataatcgtaatcacctgcataatcctgtatggtgccatctttaatttctatcactctattaactatttgctttataaagtatcggtcatgagatactgtgataacagtgccctggtattcatttattgcttcctcgagcatttc

SEQ ID NO: 205664 - DNA, 552 bp, Glycine max
  unsure (1)..(552): unsure at all n locations
cagatgtccaagctcttatggaagctggtgatgtagatggggatgggcacctagattatggagagtttgtagccatttctgttcatctaagaaagatgggaaatgatgagcatcttcgcaaagccttccaattttttgatcagaacatacgtgagtatattgagattgaggagctgcgtagcgccttatctgatgatcttgacacaaacagtgaagaagttatcagtgcaattatgcatgatgtggacacagacaaggatggaaggataagttacgacgaatttgctacaatgatgaaggctggcacagattggagaaaagcatcaaggcagtattcgcgagagaggtttgccagtctgagcctaacgttgatgagggacgggtcattgcatttaaacaatgaaaaacaataacggtagatgactactttagaaatgccaatttttactttggaaaggaaaattcgataaagaagtctatttttttaatttaactctcttcattgtaattctnttctctaatacctccattttgggtgaaaaagatacgata

SEQ ID NO: 205665 - DNA, 482 bp, Glycine max
gaagatgaaggcatcttcgtggcccaggattttgtatacaaatatatcactatagcaagtaagcacctcaagtttgagataaaattttgaagcagtagtgcattcaggtcaaaaatgacagacaaggctggcaacccagtccctgtagacaaatatgaatatacaaaatgtagcaaagctaagatggcgaaaaactcacacatgttgagccggttatgtatgacacaacaactgttatgtcatcaagtttgccaccataataacggaacccagcctcttgagcagccgtagaaaatggtgtcggcctattcctgtccagtgctcgttgacgagccagtactgctatcttctgagcagttacttggggttctagtccagctctaactgaatgtaaaacaacttcagtgacctcatcattgtacagattgtcaaacaatccatctgttccagcaacgacaacatctcctggggcaacaggtatt

SEQ ID NO: 205666 - DNA, 605 bp, Glycine max
atcaattataagcatgggtttgtggaacacaacgaatgcagtgtcttgccgctttcacaagtttggtgatgaccaaaagaatctggtcttccaaggtgatgccacgtcttcttccaggggcatagaactcacaaagttagacggtggaggaaaaccagtgggtggcagtgtggggagagtgttatactcttctccagtgcacctttgggaaagctctacagtggtcgcaagctttgaaaccgacttcaccttttccatctcatcagactctactactccaggtgatggccttgccttcttcattgcaccatttgacactaaaatccctccaaactctggtgggagcaaccttggactcttcccatcagacaatgttgttgctgtcgagtttgacacctaccctaatcgtgataagggggatccagattatagacacattggtatcgatgtcaactctattgtctccaaggcaactgctaagtgggagtggcaaaatggcaaaatagccactgtacatatcagctataactctgcctctaagagactcactgttgctgctttctatcctgccactcaactgtgacacttttccatgatattgagct

SEQ ID NO: 205667 - DNA, 460 bp, Glycine max
attaaaaaaaatagtcattaattccttcatagatggatgtcttctataacgatttataaacatacattaataaaggaagagtaaaaagtaattctaatcagcggttacaaatttctacagtatattagttaattacacctttagccttttttcactggttcataagacgtatccctcaaccaaaaaaatacaaaggttgtgggggaactcttctttggttgccttttgttttttttaatgaaaactaaaagcctaattataataacaatatcaatcaacatgctgcagaaggattggcgaaggggttgaagaagtgaggcttaggggccatggagaatgatgtcttgggggaaccgacggcaccgttgacggcgctgacgacgagcctctctgaagaggggcacatggcgagtgttgcccgaggcataggcatgttcaacggctgagccagtttcagtgc

SEQ ID NO: 205668 - DNA, 434 bp, Glycine max
aacttgaacactctctttttgatattgatattaagagacacattggtagggcatacatacaaacagagagtacatgtttttagttgatcacgtaaaaaattacaaaagaacatacaaataacaaaataggaggaagaggagagaaacacacagagtaagagacgtggaaagttatggatattagacatattataagggcaacgctcaaaaaacttccagcatagagcagtggaatgaattacttaggccttctaccacttgaggggtttgaccacttcccatgtgaagtcagggtcttctcttccaaagtgtccataggcagcagtcttcaaaaacctgttatttacacccctcttgagatcaaggttgatggagatcataccaggcctgaaatcaaagttttccttcacaatgttgagaatttccttatcatg

SEQ ID NO: 205669 - DNA, 583 bp, Glycine max
gaagcacacaagactctcttatcccttggaaaagtttcactcagatgttgctggcagaagctttcacaatgggcgttttattcagaggatgagagagaaggctgcctccctttccaatgtacgactggagcaaggaacagtcactttcctacttgaagagaagggggttattaaaggtgtgcactacaaaacgaaggatagtcaagaattatcagcttgtgcaccccttaccgttgtttgtgatggctgtttctcaaacttgcgccgatctctttgtaatcctaaggtagatgttccctctcatttcgctggcttaattttggagagttgtgaacttccttatgctaatcatggccatgtcatactgggagatccttcgccagttctgttctatcggataagtagttcagaaattcgttgtctggttgatgttcctggtcagaaggttccatctatttcgaatggtgaaatgacaaattatttgaagacagtggtagctccacagattccacctgagcttcatgactcattcgtagctgcagtggacaaaggccacattaggacaatgcccaacagaagcatg

SEQ ID NO: 205670 - DNA, 479 bp, Glycine max
tcgcgatctaggaacttaatttctaattaagttcaattctcatcagtaaaaaagtggtacacccaaaaatacagataattcgccagctttatgtgcaatttgtgtcccattcaaattatcttcaatacgagtcaagggaataaacccctgttctatggtttccagataaacgatactctcaaaagtactggtacgagtaaaaataccctcttctttaacttctgttattattctgatggagtgaagctcgttcataggtatttcgagaataatacgacgattttttccaggaaatccccaacgaacaaaacgtacctttttcccttttttattgaagatatcaaaaccaccacctatatcccaaaaaataatcgacccaaaataaaaactactaaagagacccgcgattccataaaaagccatcgtggccccttgtggaataaatggaaaataaataaagtccggaataaaagaaaaat

SEQ ID NO: 205671 - DNA, 544 bp, Glycine max
aacagcacatagcgggttactgtctgttgaagctaccatctctctctctctttcttagtgcctccttgccagaagttaaaatggcccaagaaactttcctattcacatctgaatcagtgaacgaggggcaccctgacaagctctgagaccagatctccgatgctgtgctcgatgcatgcttggagcaggaccctgacagctaggttgactgtgaaacctgcaccaagaccaacatggtgatggttttcggagagatcacaaccaaggccaacgtggactatgagaagattgtgcgtgacacatgcaggaacattggttatgtctctgatgatgtcggtcttgatgctgacaactgcaaggtcctcgtcaacattgagcaacagagtcctgatattgctcaaggtgcgcacggtcacctcacaaagaggcctgatgagatcggtgctggtgaccaaagtcatatgttccgctatgccactgacgagactcctgagctcatgcacttgagccatgttcttgccacgaagctcggtgccaagctcac

SEQ ID NO: 205672 - DNA, 552 bp, Glycine max
aatattaaacaataattttggcatcataaattcttccggaataattatacaaaagtgaccagggaaaacccgatctgccagttgcccactgaataaaaacacacatcatattactatgtgttgtcatacatgcattgtaatgagtggatattccaaagcaattggtccctttatccctccttaatccttatgccgtaaatggcaccatcccttgtaaattgtaattgcttcttcagaaatagaattatacaaaggtagttgcaatatctatttgccaaactataaatgtaaagacccttcttcccaatcctagtagtgtcccaattgtatttacaaaggtgggacaagatatgtatatacaagtacaaccatgtaacataatgtaacaataatcatactttggtctttactagtgcacattacagggagttattatgcactgaaacccctttgcagagaactccagggattggaaggaatactgacacacgcttgtgctgaagcctcagccatctggtcattctttatccctacatcgcagatgtttgcaag

SEQ ID NO: 205673 - DNA, 385 bp, Glycine max
catgggtcagaggatagagacgtgagttcgatgtagaacgtgtcgagataaggcttgaatgcggaatgaaagagtatcataaaatgggtacctcgattcactatacgtaccttatatatatcatggggatatctatctagattcttgacccgatcttatatgctgatccctattgcatgctagtatcaggagattgactataatggactacaatgactatatgtccatacctagcatataagaagtctagtgataatagataagccaagatatctcatactatgatatacccgtgcgttacatcaaagaagttctggctatgccttattattattagtcaacgaaatgaaacaatggaattgaaataactcactcagaacgccct

SEQ ID NO: 205674 - DNA, 503 bp, Glycine max
gttgcattaaaagtgtcgtttaaaagggctattgttaatacatgtgcttcatcacaaaactgaaatgagaaacattgattcataacctgcctgaaaattaagatactatcccagaaagatagttgacaaaactgataaaaacactcccctgaaatgaactcagtctaactaaacaatcgcctgagacttgctaaggatcactccctcatatttcacctggaaccacttcatagcatcctcctttgtgacacggtgctggattccaacacgggacttgcaccttcggcgacgtcccacacgatagccaggacgctccagaacaactaagaagtccattccataaataccagttgaaggatcatacttgattcccaaatcgatatgctcctgaatgccaaagcccaagcaaccagtatcactgaagttccttctgagaagttcatattccttcacctttaaaccactttccaacagatgcattgccttgtcacctctgacagtga

SEQ ID NO: 205675 - DNA, 567 bp, Glycine max
ccacattcaaatccaaatggccctttacattacactaataattggcctcctagtaaacaccctagtactctataaatagcatttgcatgcaccttagtcttcaccaaaatactcctcttggcatcttgtgttgtgtccctcttttaagctatttccttctcttaacacaattggttgtgccaattgccatagtcaccaaccaattaacaaaggtatatatatcatcatatcatcaccaaatgaaaaatattgggttgttttttcttgtggtggtggctacttttgtggtggcagccacagctggtagcttttaccaagactttgaaataacgtggggtggtgagcgtgccaaaatctatgagaatggaaaccttctcacactctcccttgacagagcctctggctctggctttcgttccaaaaaagagtacttgttcggaaaaattgacatgcagctcaagcttgtgcctggtaactctgctggaacagtaactgcctattatttatcttctctgtagcctactcatgacgaaatagactttgaagttttgggtaacttgagtggtg

SEQ ID NO: 205676 - DNA, 566 bp, Glycine max
ccaaaaggcttaaacctgccaataaagatgatcattaattagtactaattactaaacctgtctagagatatatatagacagaaatatcccaagcaacaattctagtaaaattaacctggcccagtaatattatttactagtatttatataatacaggctatatatacgtacatatatatagccaaaccaagtattaacccaaatttgcagaaaaagcaaagatggatccgctaattgattgatgtcagtggtaagcaggaaaagcattggctccaacaaagcatgtcctcttcacaaaacgacctttcattctaggccttttctctgcgttcaacttccttacttcatatcttatcttctttgcaaacaaacgagtccttctcttctctctataccttgacactcttgcttctcttccaccatctaggtgccctcttaagcttcttactttcccacctacaccactcaaacccaaggagaagtcataatcagaattgaacttaggtgggtttgaagttgtccatggagaagaaccttggctagaccgcagtaataacctcatcata

SEQ ID NO: 205677 - DNA, 574 bp, Glycine max
gcacggtggggacgaccatggttagagacgatctatgcatcaccgttcccagcttcttccggtgccctatatccctcgacgtcatgaaatcccctgtgagcctctgtaccggcgttacctacgaccgttccagcattcaacgctgggtttactacggggacatcacctgtcccgccaccatgcaggttctccaaaccagagatttcgttcccaaccgaaccttacagaggctcatccagatctggtctgactcggtcaccctccgagtggactcgcccgagtcacctacctccacccagtccgaatcagtcctctccaaggaccaaattctcgtcgccatcttcgagttgcagactcactgcgcgaaccgcttcgactcgctcgccaaaatcgcgcgtttcgcgcaagattccgaggagaacctcgattttctcgttagaaccggatgcttcgtgccggtgcttggttgctttctcgacaatgtcaatgacggcgtcgaaattctcggacaggtcgttacggcgtggattatgttgtcagaaaaatggaagattgcgagggctcgaaaatttga

SEQ ID NO: 205678 - DNA, 357 bp, Glycine max
ttttttttttttttttttttttttttttttttttttttttttttttttttttttttttttttttttttttattgagccattactcactcttttaatggtggcaagcttcaggcaaaccctcccggatgtctctggacccccacctcctttatcactgaacggtcatttacgggccttaacagaagaacccggctgtagaccccgcacccacaaagggcataatttatcccctaaaggcccccccaagaccctcgctcatttaaggccacacctagccctcacagccagacccccaaaacccccccggtaaaatggataaccccccccgaccaaaaattctaaaaacctggggtaccg

SEQ ID NO: 205679 - DNA, 551 bp, Glycine max
caaatcccgcatctttctccgtgttcttgtgcaagcaagaaagcacttaaccaaactctctgtttcagctttctctgttttttcggcacaaacagatttcggctgtttttaagtatggccataaagacaatggaactattgaaagggtgccgatcacaggaagagataatggaagtgctttctgcagtggcttcggatttgggggatgtgatcgatgatgtgaacaccttgcaggtgattccactgaatggtgcattgaccaatgaagtttttcagataaactggccaaccaaaaatgatggtgaggtcagaaaggttctgattcgtttatatggggaaggtgttgaagttttctttgacagggaagaagaaattcgaacctttgagtgcatttcaaagcatggtcagggtccacgccttcttggccgattcacctctggcagagttgatgagtttattcatgccagaactctatcagctgctgacctacgtgaccttgaagtttctgctatgatagcatctaagatgagagagttccataatcttcatat

SEQ ID NO: 205680 - DNA, 464 bp, Glycine max
tgaaatgttgtcaccccttcttctatttctatgcctaactcttcctttgtttctgttgtccttcttcaaataccgtaaaaccttcaagaatccaccactttcaccaggtcctagaggccttcccataatagggaatctttaatcaacctagattagctcctttctcttcatgagcagctatggcatctctcaaagaaatatggtcctttattttcccttcaatttggattaaggccagccatagttgttttctctccaaaattggccaaagaggtaatgaaagacaatgaccttgagtgctgtggacgacctaaattactaggccaacagaaactaacctataatgggttagacatgggattttcctcatacgataggtattggagagaaatcagaaaaatttgtgttgtccatgttcttagcttcaaacgtgtccaaagctttacctcaattagacattttga

SEQ ID NO: 205681 - DNA, 444 bp, Glycine max
ggctcgagatttatgtggagccagatcaaagtaccgagagcaaaggtgtattttggtacaacaataagttgtgatgattaatgtagccgaggcttctttgaactttcccttgtgactgtttagtatcatggttgcttattgggaataatttcgttgaaccctgatgttggtagtaagtatctagacagttgcatagcggttttgtttacagaataagatatagcctctctgaacagtttgattattgcaccatggtttgcaatcggtgcatgtcgaccaagtttctcaagactgtggagaagcttattcttgttccagttcttgaatccaagttgttaccgtattctgttattattgacttagaatccttaaccttttctgctgttatctcatgatcgtcactcgcaaatgaatcacatttcaaacttataaaaaaaaaaataa

SEQ ID NO: 205682 - DNA, 568 bp, Glycine max
ttcggctcgagcagtcatggatatgacagccgtacaacaatcttctccccggaaggacgtctttaccaagtggaatatgcaatggaggctattgggaatgctggtaccgcaatagggatcttatcaaaagatggggtagtgctggttggtgaaaagaaggtcacattcaaactgctccaaacctcaacttccaccgagaaaatgtacaagattgatgatcatgttgcatgcgctgtggctgggataatgtctgatgccaacatcctaatcaataccgcaagggtccaagcccaacgctacacatacgcctatcaagagcccatgccagttgagcagttagttcagtctctctgcgataccaagcaaggttacacccaattcggtggtcttcggccatttggagtttcgttcctatttgcaggatgggacataaactttggctttcagctttacatgagcgaccctagtggaaattatggtggctggaaagctggagccatttggtgcaataaccatgcagcacaatcaatactgaaacaggacttacaggatgacatcacatgagaag

SEQ ID NO: 205683 - DNA, 560 bp, Glycine max
caaacgctttgcttggcagggtattgctaagttgccatttattgatgaagtgcgtcttcttgcagaagttcaaaagattgaaaacttgttaacaccagaggaaaagcgacggaatgctataatgttcgacttgctctttgtgaattcttgtcatcctctctctgcgtgcataagtacacttgacaacaagtgtaaaaacatgcccaacagtgaacgggctgtggtcaaggaaaaaatcaatcccaaagaaagggatacatgcagtggtggaatgaatggttacatatccttatgtggtggagaaccttgccctcctatctttaggtctcctgttgcaagcatggaagatatcatggacaatcatgttatatgtgcaatatacagactcccagatgcacatacacacattacccgaccacctcaaggagttaaatttccaaaaaagattgttggaattgaggatttaaaacctgaacctgttttgtggcatgaagattcaagcaggaaacaccatgctgaaaatgggaggaaaaaccctccaggatctatttttgtcggga

SEQ ID NO: 205684 - DNA, 540 bp, Glycine max
gaaggtgcaagggctgctttgaacctgtctggaaccatgcttggatattacccgttgagagtgctaccttcaaaaactgctattgcccctgttaatccaacatttttgcccaggtctgaagatgaaagggagatgtgttcaagaacaattttattgcacaaatattgacaagaagcttactcaagccgatgtcaaacacttctttgaatctatttgtggagaggttcaacggttgaggcttcttggagattaccatcattcaactcgaattgcttttgttgagttcacagtggctgagagtgcaattgcagctctaagctgtagtggggtgattctgggttcactgcccataagggtaagtccatcgaagacaccagttcgatcacgtgctcctcgccctactatgcactgaatcaactttccatgtttctggggttgattgctgctgagatatatttacatatatatatatacatagaaacagctgtgttctaaggaacatgtggcatttagttggtacttttgtcctcatgtcttaca

SEQ ID NO: 205685 - DNA, 458 bp, Glycine max
aggacaaaaggaaaaggcaccaaattcaatttaagtggacactttaactcaaaattatagaggaagacagtccaatatgaaaaatatagtaaaatcatctcaaacttggcatcttctctttgcacctaagacattgagaattctaagaatgttacacgcaagtcccatcacaacttctagcacttggatcagcacaaccttcaggaacagaaatatttacttgccaagtttgctttgcctccaattcaagattggaagaaagttcccctgttaatagcatcctcgttagcatttccaagtgcagcctcgttcaagtacttgtcagccaattggactctcttgacattctcttgttcttggacaagcatgttaccatacgtcaagagcttctccagagtcatcttgggctgctcaaaggttggaggtccatcttttgagttcacaagcttcttcccaat

SEQ ID NO: 205686 - DNA, 573 bp, Glycine max
gagagagtgtagcacagagagaaagagagagagaagcattggttgttattaatggcggagggtaaggaagagagtaaatctagcgaggagagcgtgaagctgttcgtaggtcaagtgccgaagcgcatgtcggaagacgaaggtgcttgcaattgttcaaggagctcgctttggttgacgaggtcaacatcatcagagacaaagccactcgtgcctcccgaggttgttgctttgtaatttgtccgtccagggaagaagcggataaggcggtcaatgcatgtcataacaagaaaacgctccctggggtgagtgagtgggcttcggtcccgcacgcatcttcattctttgcttttcagaacgttcagagtggaatggatttttttttctttcttttaaccctctggtttatcaggaaaaagatgacatgattaatgcagagttcagccagaagaaaaattaagcctgaccaataattatttctcccaaagatggaatgaaatgttttgaatcctagtttggaatagcagaatgagtggctgcttctataaaagtcgctgatgctgaccaccacca

SEQ ID NO: 205687 - DNA, 547 bp, Glycine max
agctcctccagtgccacctgcaccgcccatagtggccatgctgccatcccctggcatgggccacctaatcccaatgatcgagttcgccaagcgagcggtgcgctaccataacctggccgtcaccttcgtcatccccactgacggcccaccttctaaagcccaaaaggccgtcttccaggccctcccggactccatttcccacaccttcctccctccggtcaatctctccgactttccaccgggcaccaaaattgaaaccctgatctcccacaccgtcctcctctccctcccttccctccgacaagccttccactccctctccttcacatacaccctcgccgccgtcgtcgtcgacctcttcgccaccgacgccttcgacgtcgccgccgaattcaatgccttcccctacgtcttctacccctccacagccaccgtactctccatcgccctgcaccttcccaccctcgacaagcaggtccagtgcgagttccgagacctccggaaccggtcaccaatcccgttgcattcttcttccgtcaggactttt

SEQ ID NO: 205688 - DNA, 567 bp, Glycine max
aaaattcaacttacttcttaaatacatggcttttcccaccatcgtgtggggataatgtataaatattatagtcatacagctgcagctttcagggaaagaaaatctgaaattttattggtataaaagtctggctgtatggagttgttagggctctgaagcatggccagtgtggtgacccctgagagcacaagaagagtttcgcaaccaacatggctcccaccatctataatttttcgtattctaaaaggttttcagagtcattcaattcttcaaaatcaaaaagagagtcatccagttccaacatccttgctttccactccacagctcaatggaatgctcattataaagccaccaaagaaactaacaaactgatggtacttgatttcacagccacatggcgtggaccttgcaaactcatggacccagttatccaagagtttgctggaaattacacagatgttgacttcatcaagattgatgtggaggagttaacggaagtgtctcaagcactccatgtctaccaattgccaacattcatactcgttaagaaaggcaagttgctgatag

SEQ ID NO: 205689 - DNA, 506 bp, Glycine max
gtcaactaccactggtcacttgatctacaagcttggaggtattgacaagcgtgtgattgagaggttcgagaaggaggctgccgagatgaacaagaggtcattcaagtatgcctgggtgctcgacaagctcaaagctgaacgtgaaagacgaattaccattgatattgctttgtggaagtttgaaaccaccaagtactactgcacggtcattgatgctcctggacatcgtgactttatcaagaacatgattactggtacctcccaggccgactgtgctgtccttattattgactccaccactggtggttttgaagctggtatttctaaggatggacagacccgtgagcatgctcttcttgctttcaccctaggtgtgaagcagatgatctgttgctgtaacaagatggatgccactaccctcaagtactctaaggctaggtatgatgaaatcgtgaaggaagtctcttcttacttgaagaacgttggttacaacccagacaagattc

SEQ ID NO: 205690 - DNA, 600 bp, Glycine max
  unsure (1)..(600): unsure at all n locations
gttctcaacatcagctagctagccactcactcacaataaataaaataaaaagggttttacaaaatataaacaatatctagggtttctctttctcttttgcattctctctgaattcgtatgccatggagtcacccggtaacgagcatgtggtgggtggcgcagaacccaacgacgtcgttacgcccttttcccacagagaagaacctcacaattcccaacccctcaccggcgacggtgccagtcccggaaagatatttataggtggtttagcgagagaaacgaccattgcccaatttatcaagcactttggtaagtatggtgagatcacggattcagttatcatgaaggacaggaaaactgggcagcctcgtggattcgggtttataacatatgcggatccctctgtggtcgataaagtcattgaggaacctcatgtcatcaatggcaaacaagttgagattaagcggacgataccgaggggagctgttggctctaaggatttaggacanagaaaattttgtaggtgtattccttcaatgtgactgaagatgaattagagactccttacacgctaccgcgaaattaagatcaccaataatg

SEQ ID NO: 205691 - DNA, 596 bp, Glycine max
cacacaatcagaatacataagttgaataacttcaagagctatacattgctaatcaatacaaagaagaaaatccataacataaaatgtttgaacattggcattcataattgggaaaggtcaaccaatcctagtaccaaacctgcatttcacaattgtagcacttttcattctcaacctctctctgacatacattttttcgtcatcatcttcacttttaccacaaggataggagcccatacgcactgagccacctttcccttaactttcaccagaggagcttcccctgatcaaggagccacgacggttgccaccaacaatcacatctttgagtcgatatatgggagcaagcaccctgctcctcgcctcatcatttatactgatttgccatttaagttgtaaagctctttcctgctgccagcgttgaccaagcattacaagacccatcacagcagctgcaatgaagacagaccagaatgcatttgcctctttggcatgagcatataaggaggcagctctccgcttccaccaagcttcacaaggaagatctgaggagttgtattcattatctttgggaagagagtttgacaatgatagat

SEQ ID NO: 205692 - DNA, 556 bp, Glycine max
gagaaaggactcgaatagttggttattcatggaagacaccgcacaacaaatcaagcgtccttttggtgttcctgaaggaccagaattcactgttgggttggatgtacctttgagcgagttgaaggtggagcttcttaaagaaagtgtgtccatcattatgctgactggtttaggtggatcaggaaaaaccactttggctacaaagctttgttgggatgaacaagtcataggtaaattcaaggaaaatattttatttgtcaccttctcaaaaaagcctaagttgaagattattgtagaaagactatttgaacattgtggatatcaagtgcctgagtttcaaagcgatgaagatgcagtcaatcaattgggacttttgctgaggaaaatggatgcaagtcctatgttgctggtcctggatgatgtctggcctggctcagaagccttagttgagaaattaaagttcagatatcagattataaaattttggtgacttcaagaatagcattccatagaattggcactccattattttaaaacctcttgttcacaatgatgc

SEQ ID NO: 205693 - DNA, 533 bp, Glycine max
cgttcacataccacgtagaaacagttcaatcattcttagccctaagcagacttcacatactcatccacttagtggcagtgttgtctctctgttactaccgcatcacccacttcttcctccaacctccaacagcgccatggcttttcatgactgctgcggagcttcttctctcgctgctctggttcttcaaccaagccttccggtggcgaccggtgtcgcggagcgtcatgactgagaagctctcgagtgaggagaagctgccggggcttgacatcttcgtgtgcacgctcgatcccgagaaggagcccaccgtggaggtcattgacaccatcatctccgccgtgtccatggattaccccttcgacaagctttccgtctatctctccgacgacggcgggtgcgacgtgactctctatgggatccgagaggctgctgaattcgtcaaggagtgggttccgttctgtaaaaagtatggtgtgaagtcaaagtgtcccaaagtcttcttctcttccttcgcggatgaggatcaagag

SEQ ID NO: 205694 - DNA, 483 bp, Glycine max
gacaattcaacttaagagatcaatatggccaccaccactacccagcctccctctaatatctgctttttccttctgttgttgcttctagcacactttcatttgggcataagccaacttgagctgaattactactctaaaagctgcccaaaagctgaagagatcatcaaggaacaagtcacacaactatataacaagcatggaaacactgccgtttcgtgggtcagaaatctcttccacgattgcgtggttaagtcatgcgatgcatcattactgttagcgacggagagcgatgtagtgtcggagcagacattggatagaagttttgggatgagaaacttcaagttcgtaaacactatcaaagcagcggttgagaaagaatgccccttcacagtgtcatgcgctgacattgatgctctttctgccagagatgccattgctatagttgggaggacccaacattgaaatgaagacagggagaaagga

SEQ ID NO: 205695 - DNA, 467 bp, Glycine max
gtgctacaccagaaggaaacattccattccttgatctgtttgacataaatacaggtaaaaaaatggaacgaatctgggagagcgataaggagaagtattatgagactgttgttgctctaatgtctgatcaagaagaaggggatttgtatttagataaactgaagatactgacttctaaagagtcaaaaactgaaaacacccaatactactttgttagctggccagataaaaacatagttcaggttacaaatttccctcatccataccctcagcttgcatcattgcagaaagagatgatcagatatgaaagaaaagacggggttcaacttactgctacattatacctaccaccaggttacaatccatcaacagatggccctttgccatgcctggtttggtcttacccaggagaatttaagagcaaagatgctgctggacaagttcgtggttctccaaatgaatttgct

SEQ ID NO: 205696 - DNA, 592 bp, Glycine max
cgagaatgggatccatatggacggtgttgttttgttttgcatcggttttcgcgatcgtttctgcagaacgaagcattgtgaaaatggaagtgccgagattcaatgtcaccagccgagagcctcaacagagtttcctcaccaaagctttgaatttcttatggcaatctggagaatcagggtaccaacacgtgtggccggatatggaatttggatgggaaattgtgttgggtacttttgttgggttttgtggtgccgcgtttggaagtgttggtggagtaggcggaggtggcatattcgtccctatgcttagcctaatcattggatttgatccaaaatcatccacagctatctcaaaatgtatgatcatgggtgcagctgtgtcaactgtttactacaaccttaagctaaggcatcctacgttgaatatgcccatcattgactatgatttggcacttctcattcaaccaatgctcatgcttggcatcagcattggagtggtccttaacgttgtatttcctgattggattgtgactatattgcttattggtctcttcttaggcacatcaacaaaagcattctttaaaggggttga

SEQ ID NO: 205697 - DNA, 462 bp, Glycine max
gaggaccatataccaaatcactatagctttggaaattaacacgaaaattagccgctaagaaaaccaaacttaaccaacaaagtaaactcatttggaaatgaacattgttcaagaacaattagatcaaagctcaatgcaacaccaaggatgccacaaaaccctcttattttgaaacctatcctatattaagcctctacaggagcaagagctcgcagctctcattgtaccttaatccactgttggctgaaacccaaccataataataatataaagcacaaacttcaaaggaacgaatgatttttgctcaagcatcatcaagagcaaggacaccagggagttgctttccctcaagaagctctaagctggcaccaccaccagtggagatgtggctcatcttgtctgcaagtccaaccttcttcacagcggcaacggagtcaccttcttcaatgatggttgtcactc

SEQ ID NO: 205698 - DNA, 619 bp, Glycine max
cttacctcttggcatgaccattcaaatgtcttcttttctcttagcttctcttgctgctttctttttcttctcctccttggagaagagttttgcctttcaagcagcaagaaaggaggacacagaaagcaacaatcttcatcaatatacttcatcttgttcacctcagctcactccttccttcatcttcttgcagctcttctaccaaaggtcccaaaacaaaagcatcattagaagtggtacacaaacatgggccatgctcccaactaaatgatcatgatggcaaagctaagtctacaacaccacacagtgacattctgaaccaagacaaagaaagggtgaagtacattaactcaaggctctctaagaacttgggccaagatagtagtgttgaggaattggactcagctaccctaccagccaaatctggtagccttattgggtctggaaattactttgtggttgtgggtcttgggacacccaagagggacttgtcactcatttttgacactggcagtgatctcacttggactcagtgtgaaccttgtgctcgttcttgctactagcagcaagatgtaatatttgatccattcagtctacatcatattccaatatacatgtc

SEQ ID NO: 205699 - DNA, 480 bp, Glycine max
tcgcgatctagactaaaaaagggtatcctgagcaatttcaataatagggttcattgatattcctagtatagtagatgctatcacacatacaatcatacttaattcgatggaattgtctgatcttaagggggcccttcgataatttcgcacgtgaggagttatttcttggtttcgtccagtcattaataacttgattatttttaaataatagtagatagaaacaacactcgtaaggagtcctattgaaactaagaaatataagcctgcctgccatccacaccagaataaataaagttttccgaaaaaacctgatagtggaggaagacctcctaaggataagagacatagggctaaagagagagccaaataaggatctttcgtgtataatcctgcataatcttgaatgttatcagttccggtacgtagaccaaatgatacaatgcaagcaaaagttcctagattcatcgagatatagaacag

SEQ ID NO: 205700 - DNA, 618 bp, Glycine max
atttatgcatgcttccaccattatttcttcttaatcttaattatattaacaattacaattaacatcatgcacctgtgactgtgattcaatattaatggtttgtcaagggtattaagaaatttgttccgttaaaaaaatatcatgtattagaaattgaggctaagaataatttataaaaacttttttaaaatcatctaaattattttaaggacaaaattgtgcatgaaagtaaaataaataaaaggcacaataccttaaatgtgtaagcctaataatatgaaggacgcgagtttagaacattgacactaggaaggctaagccatacatgtgagctgcaataccgcaagagcttctagcctctttacctttattgggaggtgttattctagtatactaaaagtgtctcacgtcttaccagaattgaagttaaaaaatttaaacacccttctttctttaaagacaaaaccattagaccttcatgagagttaatgtggacaacactacactcgagtgagattatatatttcttattgaaaataaaaaatactttaccaaataatatcatgctttaaatcttttaagatttaattacacatttaatctctataatttttaaat

SEQ ID NO: 205701 - DNA, 464 bp, Glycine max
aaaataataatatgaaaagaaaacattaactataacaatagtactagttaaaaaacaataaataaaaaaacttaaaattataaatataattttaaattaattatgaatttatttacataatttattaaaataatatataatttatattaaatatagaatatcttttatatataatttatttacattattattaatttttatatttaaaaaattatttcaaatatttgataataaaaatagttttgttttctttgttgttaaattaattaaattttttaatttttttttaaataaattgactgaatttttatttaatttttaaaaatactagattaattaattttatcttaatattttgattaattttaatattgaattaaattattaaaaaattaaatatttttaaatttagttgtttatttttaatttttataataattgaaatatttttttttatttgataa

SEQ ID NO: 205702 - DNA, 569 bp, Glycine max
  unsure (1)..(569): unsure at all n locations
atcaaactcttcttcttcgatttccattgcgaagcgttactttttcttcttctttctcttcattttcttcgctcttcgatcttcgtccggggactgctccgaataccaccaccaccactcgccgatggccacgatcggaggcttacacgactcccaaggctctcaaaacagcgtcgaaaccgaagccctcgctcgattcgccgtagacgaacacaacaagaagcagaattcgcttctggagtttgctagggtggttagggcacaggaacaggttgttgctggtaccctgcatcaccttactcttgaggctattgaggctggtgagaagaagctctatgaagccaaggtgtgggtgaaaccatggctgaatttcaaagaactccaagagttcaagcctgctggtgatgcaccatcgtttacctctgctgatcttggcgtcaaaaaggatggtcaccaaccaggatggcaatctgtgccaacacatgaccctcaagttcatgatgcagcatatcatgcgatcaagaccatncagcacacgtctaattcactagtaccctatgagcttcatg

SEQ ID NO: 205703 - DNA, 636 bp, Glycine max
  unsure (1)..(636): unsure at all n locations
cttccattcacaaccttaaacctttctttcttgtaaactttattgattgattctgagaatagaactaagagggtatagacatggctagcgcaattgcagcttcttttttggttctgcttctggctttccccactgtatttggagctgaccatgaagttggtgacactagtggatgggccctcggagttaattacaacacctgggcctctgggaaaactttcacagttggtgacactttggtgttcaagtatgactccactcatcaagttgatgaggttgatgagagtggatacaacagctgcagctcaagcaacagcatcaagaactaccaagatggaaactccaagattgaattgacttcaccaggcaaaaggtacttcttgtgccccatttcaggccactgtgctggaggcatgaagctgcaaattaatgtggctgctgctagtgggacccccccaacaaccccaagtggcaccccaccaaccaccccatcaaacccttctncttcntctccctctgagtcaggatccaccaacaccactttaccaccaaagcctagtggagctgtactggtttcagtggcattggccctttggtggggtcttcttgtgtcaacattatgttggttcatggcta

SEQ ID NO: 205704 - DNA, 566 bp, Glycine max
  unsure (1)..(566): unsure at all n locations
cagaaattcagtacagtattattcagtgcagagaacaaatagggttatatattaaactcaacaaaaacaaataatatgagatgtttatgagaatttcatccacccaagaccgttgtgttccttaattaatggacaaaagctaaacttagctcaatttcttctatcccaagcatttgagtttcaagcacaggcaaatttccatcttatgaagtttattttgcacacatgtatcggagaatatactacctgttagcaacatatgaagaaaaagcgtgctatcagctatagctacagccatagcatcatattaatttttgggaccgatgtccttcagtgaacagatctgttcttctcccattgcagacataacagaaaccacaagatcttttccttcagaaaatccatctttaatctgagcaagcaatgcctcatcagtaggaagcttcagatcatccttggtatttccattatcagtcaacagactcacaaagccgtcttcagagatatcaataagctgatagtcagtgcgattcacatgtggaacatcacangtgtgggatgatgga

SEQ ID NO: 205705 - DNA, 635 bp, Glycine max
gttaccaatggctccctcatcaaactacatttctttccttttcctcactacgcttttgtttgctcttcaaatcactgctagagacagccagttcttcagcaaagtcacccatttcgacaaagacaatgccaaagtgacagaactttcccaacaaagaagcaccagaagtaaacaagccagagcaacaaccacctttcattcccgagactgaaaacagctatggcctatatggtcatcatgatgagtctaaccaagtcccctccaccaccccgacttcttaccacccctacaagaccaagtttgagaactccaacaacaagtactacaacaatgatgcctataacacaaggttctccgaaaccagttacaacaacaacaacaacaagtattacaacaaggattcttatgagggtaaccaatatgagttaagtgacacaaagtacacagaagaaggatacaacaacaagtatcacaactcctatcagaacaactacaacaacgatgctgccaatgacaaatacttctacaacaacaacaacaacaacaaaaattacaatgctcacaataacaggtacaatacttacaacaacaatgctgttagcaggtacaatggtgagaggcatggaatgagtgac

SEQ ID NO: 205706 - DNA, 551 bp, Glycine max
  unsure (1)..(551): unsure at all n locations
ccagtcttctatcatcatcgaatccactccagcgttgttgcattgtagaaggcgatggccgcgcgagctctgttgaccagaaaaaccctagccaccgtgctccgcaacgacgcgaagcccataatcggagttggcataacaagcagcggctactcattcacgcgggttgcacgtgtacacgctacccgatctggattacgactatggcgcactggagccagccatcagcggcgacatcatgcagctgcaccaccagaagcaccaccagacttacatcaccaactacaacaaggccctcgagcagctccaagacgccatcgccaagaaagattcctccgccgtcgttaagctccagggcgccatcaagttcaacggcggaggtcatgtcaaccattctattttctggaaaaatctagctcctgttcgtgaaggatgtggtgaaccacccaagggttcactgggatgggctattgacacacattntggttcttttgaagcttaatacaaaagttaacgcagattgtgctgactacaggggtctggatggttgt

SEQ ID NO: 205707 - DNA, 530 bp, Glycine max
ctagactcttccttttctcttctctgtctaaggggtgccctgagatcacattgaacaatggtgaaggctgtggccgttcttggcagcagtgagggtgtcactggaactattcacttcgttcaggagggaagtggtccaaccaccgtaactggatctcttgctggtcttaagcctggtctccatggtttccatgtccatgccttgggggacactaccaatggttgcctctcaactggatcacatttcaatcctaataacaaggagcatggtgcccctgaggatgagaatcgtcatgctggtgatcttgggaatgttaatgtcggtgatgatggtactgtcagcttcactattactgacagccagattcctctcactggaccaaacaacatcataggaagggcggttgttgtccatgctgatcctgatgatcttgggaaaggtggtcatgagcttagcaaaactactggaaatgctggtggcagagtagcttgtggtatcattggtctgcagggataactaatcacatgaag

SEQ ID NO: 205708 - DNA, 339 bp, Glycine max
acgatattctgacgcattaactagtaaagaaataccattgatagccattactattggtctaactagtcacagagctcgataatgtctaaatgggtgggccataggcttagggtaacttcaaatactgtccgctgtttcaatagattattgcgcttcattgtggatcaatgatgctacaattttccgtataatttactaaaacagcgatctcattattgttcatcttagactaaacgctcattagatgcatcattgaccattgggctttaagaagacgtattataaaagtacctatgatatacagttgtggcaaaaggcgcaagaaatggtaatactcca

SEQ ID NO: 205709 - DNA, 585 bp, Glycine max
gaagcctcctctgcctcgcaatcatcggcattgtcgtcgccgccgtcggaggtcagtctccagcggcggctcccaccacttcctcggcatccccagccacagccccttctaaacctaaaccaaaatcacctgcgccagttgcttctcccacttcatctcctccagcttcatcccccaatgctgcaaccgcaacccctcccgtttcgtctcccacggtagcatctcctccgtctaaagctgctgctccagctccagcaaccactcctccggtggccacacctcccgcggccactcctcctgcggctacacctcctgctgtgacaccagtgagctcgccgccagcgccagttccggtgagttctccaccagcgcctgttccggtgagctctccccctgcactggcaccgacaactccggcacccgtggtagcacccagcgctgaggttcccgctcccgctcccaagtcgaagaagaagacgaagaagagtaagaagcacactgcaccagcaccgtcgccggcattgcttggccctcccgctcctacggtaggagctcctggatcaagccaggatgcgtcggcttctg

SEQ ID NO: 205710 - DNA, 463 bp, Glycine max
cgcaatggataaaagcaccaaaatgcaattatagaagcacaaattttttagggtaatgaattacagaaaatgtcatgctgtgtattttgaccaaaaattgtgcgtgctcctacaaatcattttactatttagtcatataagggagaaagggaaacagtatgtggtggataatatcagggccatcataacctacacaactctgaacaactcttcataaatatcactgacttaaaatgcaattaggccttcgatttcttccctttggcttcattagatggttggctcttgaaaggcaggaaagtctttccacccatgaatggtctgaggacttctggtatctctaccccatcttccttctggttgttctccagtatgcagcaaatggtcctcttagtagccgttagagtagagtttaacaagtgaacatattgcttcatctgctcattgctctttttctgaccat

SEQ ID NO: 205711 - DNA, 394 bp, Glycine max
attaagctgtaaaggggcatttaaccataaacaaaaatagtctccaagactataaaaacattacattttagacaaattagtcttcccacttatcgtccgtcaacacctactgtaactgctggggttgctgcctaacaagtatcatattcactgcaaacattttagtaggagtagcttttgacgaacaactccttcttggcttcctcggattcacccttaccagggtacttcccaagctgagcgagtgagttggacttggcacggaatgcgagtgcatcttgtgctgcctttacgttctctgggcgggcttcccatgttttcaaggcagtgttttggagggctttggcatacgaaaatgacacgtgccacgggtttggagattggttcatggcat

SEQ ID NO: 205712 - DNA, 584 bp, Glycine max
cttctttctgccacttctcttctatataataacacccacttctttggttcaacttcccttcaattcatcacataataacaacactataaacattgattttggctctttgttgcagcgagaccaaaatgtctttcactgcaaccaagtttttaatcttctcctctccctctcacttccaccacccccagatccaatgacaagcctctctctttctccttcgatcactccaaacccaacccttcttcctccttccttggatccactcgcaagcttcttcgcttcaatgctctcgctaggcctcatgctcaccctcgtgcttcttcttcccctgctgctgctgttcttctcgaacgaacctccaatctgcttgtcacaaaagaggaagggttggaactctatgaagacatgatattagggaggtttttttgaggacaagtgcgctgagatgtattataggggcaaaatgtttggttttgttcacttgtacaatggccaagaggctgtgtcaactgggttcatcaagcttctgaagaaagaagattctgtagtgagcacctacagagaacatgttcatgcattgagta

SEQ ID NO: 205713 - DNA, 525 bp, Glycine max
tgcagattgaacgaagtgttgccactcctcaagtgatgaagaagtacttcattgggagtgtgctgagtgggggagggagtgttccagaaacaaatgcatctgctgagacttggatccaaatggtgaatgggatccaaaatggatcttttgctaccccgtcttgggattccaatgatttatggaatagatgcagttcatggccacaataatgtctacaaggcaaccatttttcctcacaatgttgggctaggagttaccagggatccaatgctgataaagaagattggagatgcaactgcccttgaagttagagctactggaattcaatatgtgtttgctccatgcattgcggtctgcagagatcctagatggggacgttgctatgaaagctatagtgaggaccctaagattgttcaagcaatgactgaaattattcctggtttgcaaggagacatcagtgacaatttcagaaagggggttccctttgtcgctggaaagaacaaggttgcagcttgtgcttaacac

SEQ ID NO: 205714 - DNA, 518 bp, Glycine max
taagaagcttaaagctgtgtctcgagtgagtgagacagacccagatggtggcaatcttcgccctcatattgtctatctcatggaccttggtatggatattgagcagattacgagtatcacacgactatctccatcatttgcctactatagcttggacggtcaaattcacccagtggttgagttttttcttgaacttggagtgccaaaagagaacattcttactatcctcactaaaagacctcaattatgtggaatcagtctatctgaaaatcttaaacccaccatgaagttctttgaatctttgggtgttgacaaaaaccaatggccaaaggtgatctatcgcttcccagcactgctaacttatagcaggccgaaagtgatggaaagcatagattttctccttgaattaggcctctcagaagagagtataggtaagattttaactcgctgccccaacattgttagttacagcgtataggacaatcttcgacccacgctaagtactttcattcttgggg

SEQ ID NO: 205715 - DNA, 567 bp, Glycine max
  unsure (1)..(567): unsure at all n locations
gcatgtaataaaggtatcatagcatatagcatagcataggtatttcatacattgttcttttgaggagcacatgcagcaattcagtcttactacatgattctctttatttagaaaacaaagttttaccaattaaacaaactgatcagctaggctttgcaccttagacaaactgattaaggtactcatccacagtgatgtatttcacatcaggatatagagctgaagcttccactccaaaagaagactcaatttcaaagttagtatgatccccctttacataagaagagtggttaattgacaggatcacattcacgggtggtgcggactcttcaatttgcttcaggagttgttcttctggaacatagattctttcaagagttttaccaatctttccctcccagagagtaacaagctcattaaacgacaaggtattagctggtggtctaatgtagagaattttgttcaaggttcttggatcatccacagaattgattgtataagttccaatatcctcttccttggtaaaacagctttgggggtttcatctnctaggataataactctgtc

SEQ ID NO: 205716 - DNA, 561 bp, Glycine max
  unsure (1)..(561): unsure at all n locations
ncttcggctcgagagagaatcagaatcacttgtcctcctcttccactataaatacgctcacaagtcacaattctccctcatctcacaatggtttctcattactatcttgcctctcttcttctgctactgctgctcaacccacacaccaccctgggagcgcaaaaccttatgctaccctaccataacggcgccctcctcaaaggaaccattaccgttaacctcttatggtacggcagcttcaccccaatccaacgctccataatcctcgacttcattaactcgttaagttccaccgcgggggccccacttccctccgtagcatcgtggtggaagaccacggacaagtacagggggggatccactacaatcgtcctagggaaacaaatcctagaacaaacttattccctcggaaactacctcaacggaacacaactagtctctctctcctcacgcttcgaccacctcaacgccatcaacgtcgttctcacatctagcgacgtangggttgacggcttctgcaggagccgatgtgggacccacgggtccattactaacgggcag

SEQ ID NO: 205717 - DNA, 544 bp, Glycine max
tttttatattaaatattttaatttatattcttaattaacgaaggcattatgacaactaattttgtgtgtgtgaatttatagatacgttacccaagcatatgctatcaggttcaagtcatatgttaatatttaaaattaagatattaagacggttaagaaagaaagcaattactactaggaattaaaataactcaaaatcaagacaagtaaaacttgtggactgcatgcaggttttttttcgtatatatagattgcatattatttatgtacttgtacaccaaaagcataattatctagactttatattattaaaaaaagtaatagtatgcaaggaagaatttaattttaaatgaattgaagagatattttcctgacaagattaaaaagattaaattaaaaatatttttttggcaaaaatttctaatcattttaaatttttttctttctttcttactctcaagtttataggtgagaatggattacgtgatcgttgtacattccattgttcaagtaagtgtggttttttatttaagtgtcgaaattt

SEQ ID NO: 205718 - DNA, 520 bp, Glycine max
gaattgtgtttattataaataagaattaattaataatacatggtgtctgatgtacgtaacagaaggtaaaagtaatagatgcatgcatgtaactttggaatgactgagttcagtcatcaattatcataggtgcggcactcatcagtctctggattgtccttgcagtaattttcgagcgggtcagactgcttctgcttctccctggcgtggctcgccgccgcgctcagctcctccacctcgtcccaggccgtcgcgcattccgcgtcaccgccgtctcccgagcacgcctcctccgcgctctttatgctctcctctaccttctccgatatcttctccggcgtcgcccgaacgggccgggtcttcaccaaaccaggccacttttgaatgggcctcgacagagctggaaacctcacggcctgggccttttgtgctgagtctattcccttagcattagcaaataccctggtaaggcgttgaaagacttacaccaccagctattgtacccatctttcttcatttt

SEQ ID NO: 205719 - DNA, 441 bp, Glycine max
aaaaggaaaaggcaccaaattcaatttaagtggacactgtaactcaaaattatagaggaagacggtccaatatgaaaaatatagtaagatcatctcaaacttagcatcttctctttgcacctaagacattgagaatgctaagaatgttacacgcaagttccatcacaacttctagcacttggattagtacaacaaccttcacgaacagaaatatttacttgccaagtttgctttgcctccaattcaagactggaagaaagttcccctctgaatagcatcctcgttagcatttccaagagcagcctcgttcaagtacttgtcagccaattggactctcttgacattctcttgttcttggacaagcatgttaccatacagcaagagcttctccagagtcatcttgggctgctcaaaggttggaggtccatcttttgagttcac

SEQ ID NO: 205720 - DNA, 597 bp, Glycine max
ggcatgaccattcaaatgtcttcttttctcttagcttctcttgctgttttctttttcttctcctccttggagaagagttttgcctttcaagcagcaagaaaggaggacacagaaagcaacaatcttcatcaatatactcatcttggtcacctcagctcactccttccttcatcttcttgcagctcttctaccaaaggtcccaaaacaaaagcatcattagaagtggtacacaaacatgggccatgctcccaactaaatgatcatgatggcaaagctaagtctacaacaccacacagtgacattctgaaccaagacaaagaaagggtgaagtacattaactcaaggctctctaagaacttgggccaagatagtagtgttgaggaattggactcagctaccctaccagccaaatctggtagccttattgggtcttgaaattactttgtggttgtgggtcttgcgacacccagagggacttgtcactcattttgacactggcagtgatctacttggactcagtgtgaaccttgtgctcgtcttgctacagcagcaagatgaatatttgatccatcccgtctacatatattcaatttacat

SEQ ID NO: 205721 - DNA, 524 bp, Glycine max
ggaaaattactatgattctggctggcacatgggcaccagcaactgggctcaatgcagtgatcattcttcttcttcttcctttgcagtgcctacacaacaaatactccctcatcatgtcactgacgctgcctctcttcaatttggtgagtttcactcatggtcacttcccattgaaggggctgcagaagagagagcaataagtgcttccaagagtcacaggcaagctgagaaaaggcgcagagacaggatcaatgcacagcttgcaactcttagaaaacttattcccaagtctgataagatggacaaggcagctttactagggagtgtgatagaccaagtgaaagatctaaagcgaaaagccatggatgttagcagagccttcacagttccaactgaaatcgatgaagtatcaattcatcatgaccatgttcttcaagatgaaagctgcactgtaaaagtgaacaaattgaaggacaatattgtgatcaaggcttttgtttgctgcgatgatcgaccagaacttt

SEQ ID NO: 205722 - DNA, 284 bp, Glycine max
gatcgccacccttacggcatagggatttgacatcttatataaccagaaaaaatgcgatatattttctgtgaccacatccatagacaccagttgctaacaccagcccgactagaaactatacgccataagccagggattgaacaaaccaacataaaggcttacaaaaggaactttgcttaaatagaaacaacaggctgccagcaccaaaagctagttctatggcccaatatccctcacggcgcaaatctgctcctcacccatagcagacatgacagacacaacaa

SEQ ID NO: 205723 - DNA, 596 bp, Glycine max
tccgcgaggagagagaaagtgcaagaattggaagagagagagagagagaggtttggtttgtgatgtggtagctttgaagatctagttcactgttgctcattttagtgtgtatctaatcgaagacgagggggttccgatgtcttctctcagtagggaattggtgttcctgatcttgcagtttctcgatgaggaaaagttcaaggagactgtgcacaagcttgagcaggagtcagggtttttctttaacatgaaatattttgaggatgaagtgcacaatggcaattgggatgaggtggagaaatacctctttggtttcacaaaggtggatgataataggtattccatgaagatattttttgagataaggaagcagaagtatctggaggctttagataagcatgaccggtccaaggctgtagaaatattagtgaaggatttgaaagtgtttgctacatttaatgaagaattgttcaaggaaatcacacagcttcttacattggaaaatttcacggaaaatgagcaattgtctaagtatggtgatacaaaatctgcacgagcaatcatgttggttgagcttaaaagctaattgaagcgaa

SEQ ID NO: 205724 - DNA, 566 bp, Glycine max
cgtatttgttgtttcagtgctgtgatggggaaggtcgcggtgggagctgcggttgtctgcgccgccgccgtctgcgctacggcggcactggtggtgcgccaccgcatgattagttcccggaagtggagtcgcgccatggcgatactgaaggagtttgaggacaagtgtgggaccccaattgtgaagcttagacaagtggctgatgccatggatgttgagatgcacgcaggtctcgcatctgaaggtggtagcaagctcaatatgttgatcagttttgtcgataatctcccaactggggatgaggaaggactctattatgcactggatcttggaggcacaaacttccgtgtccttcgtgtacatttaggcgggaaagacaaaggtgttatcggccaggagtttgaagaagtttcaattcctccaaatttgatgactggctcttcagaagcattgtttgattttatagcagcagctcttgcaagtttgttggttcagaacctgaaggttttcatcctccccctggcagacaaagagaactgggtttacattctattcccaatgaggca

SEQ ID NO: 205725 - DNA, 459 bp, Glycine max
agcaactaaaatagtactatcatacgagttatagtgtgattatacatatgatgtgcaaacaaatcaatcaaatttcaaatacacactatacataatcaacatttagatacgcatgccttactgcatcataattctgaattcttcaatgcttagcacaccattcccattcaaattaaactgtttgatcatggctttgcactcatcaatggacttggactctcccatcttcttaagcatacttttcaagctcttgggggttataaacccacaccctttagtgtcatacatctcaaaagccaccttcaagtcattcaacttctgatcctctcccccagcttccataagagcaatcaaatccttcaaactcagcaacccatcttcatcagaatccaatgccgtaattgccatttcagatttcttcatcaaaagctccccacccattattcgaagcccgtgctt

SEQ ID NO: 205726 - DNA, 611 bp, Glycine max
cggagacgttcacttcgacgacgtcgccgcaaagccttgcggcgttcacttccgcggcgaaacgcggcgaggcgcgctccgagccaccgtgaatctccgaaagccgaaaacgttgagcggtattctgaatttcgggtgttccacatcggatgcaagttggaggagctggaatccgagttcgctccacaggaactcgtccttcgcttgctgctccgccgagacaacgccgcatgttcagcacctcgcaacctccaccttctcgattgaccagactaattttggtggcgagaggttgaagctgttttcggggtcatgttacctaccacatccggataaggaggacacaggtggagaggatgcacattttatttgcacagatgaacaagcaattggtgttgcagatggtgtaagtggctgggcagatgttggtgttaatgctggactctttgctcgagaactcatgtctcattctgttagagcaattgaagaggaacccaaaaattctattaatccggctagggttttagagaaagctcactcatgtacaaaggccaagggttcatcaacagcttggatcattacccttactgacacgggactacatgccatta

SEQ ID NO: 205727 - DNA, 556 bp, Glycine max
cttgcggcagcgcaggtgtccctattacctgacttcttaattctcccgcttcttcttcttcttcttcttccgtccagtgcttgttctcttctcaagatagaatagaagggttgttcgattcgatgacgactcgaattgcgcccggtgtgggaacccaatttgctgggtcaacacgccgccgagaggaatcaagacgccactgcttatgtcggcaatctcgaccctcagataagtgaggagttgttatgggaattgtttgttcaggctggtccagttgttaatgtctatgttccaaaggatagagtcaccaaccaacatcagggttatggatttgttgaattccgcagtgaagaagatgctgactatgccatcaaggtgcttaacatgattaagctttatggcaaacccatccgtgtcaataaggcatcccaagataaaaagagcttggatgttggggcaaatcttttcattggcaatctagatcctgatgtagatgacaaccttaaccaaattcaggacttatacatgagtgtcaccaaattatacccggagtcgt

SEQ ID NO: 205728 - DNA, 461 bp, Glycine max
ggcaaaatctaaaaaagtagattatgatagtgaagaaacaacataatacaaccataactctactcatctaacaaaacaggaaatcacatcctcctcatagaatgactactacaattatatttgtgaggaaggttatctaaatctatacagggatactgctagctgagaatcttcgttttgctatcaaaaactgccattcccattttcagtgaattgcccaaatctgtgaagaaatttattgccggtatggtacgacggaacattgagcaagatactcaattgaccatcaccgtaaggcattcacgaatgccgtcaatgaatcaacatctctcttttctgaagggtacttaattggttgagaagagtgcttggggaagagaagtattgtggggaagcttcccaactgcagttcactctttgcatattccttctgctctccatcggctctgaattttgcaacc

SEQ ID NO: 205729 - DNA, 523 bp, Glycine max
agcagcccttgcaatctcaatcttctcttctttgttcaggatacccatttcgctaatcttctcaactggccctttcttgttccaaagtttcaagctcttctctctcacccgttgcgggtggtggtgaatggtctaaaaactctcactttcgcttccgttactatgagaaatcctaataagcgtgatcatggactcaataacttgcaggtgcctgctgctgctgtaaacgcaccagatccactcgctggggtcatatttgaacccttgcaagagctaaagaaggaatatcttgctgtcccaattgcacacaaagagtgcttggctcggccgatctatgctgacgagttcgaatctgcaatcaacgagcagatcaatgtggaatacagcgtttgctatgtgtaccattccttgcatgcgtacttcgacagagacaacatagctctcaagggacttgccaagttcttcaaggaatcacgtgaagaagagagagagcatgctgagaagcttatacagtatcagaaca

SEQ ID NO: 205730 - DNA, 543 bp, Glycine max
  unsure (1)..(543): unsure at all n locations
ctagctattcattaattattagctcataatggaagtggaaagaatacaaaccttgtctttgaaccagctcaaggagcttccaccccagttcatccgtccagccaatgaaaggccagagaacaccaaagccatagaaggtgtcattgtgcctctcatctcactgtctcagtcacatcatcttttggtgaaggaaatagctgaagctgcttctgagtggggatttttcgtcataaccgaccatggtatgtcacaaacattgatccaacgtttgcaagaggttggtaaggagttctttgccctccctcaagaagagaaagaggcttatgcaaatgactcttccgaaggtaagtttgagggatatggcacaaaaatgaccaaaaaccttgaagaaaaggtggagtgggttgattatttttttcatctaatggctcctccttctaaggtcaactatgacatgtggccgaaacacccttcttcctacagggaagtgacacangaatacaacaaggagatgttaaaggtaacaaacaaggttttggagct

SEQ ID NO: 205731 - DNA, 452 bp, Glycine max
agataagatttttttttttacagcattagatatgaattatttattctacactgttcggcatcaatacaatttgattccttttatcatgtcagcacctcaaccgatgatgatctcaccaattatatttcagcaataaaaaaaaagcctaataaaatatttttttttcataaatttattctaaaatctaaaaatgtcatggaggggctgtggcatatcctacatgcaaatatgcttcctcttacattcttactcatcgcttctatcataaataggacacaccctcctaatttcgttgttcctatcataaataggacttttctcaagtagaaggaggaacttcccaattctttggcacaggcccaaaatcatagattatttctctgtggcaagaccatacaagttttatagcctctggtgttccaattcctgcacctctagcatcaccagcgggt

SEQ ID NO: 205732 - DNA, 567 bp, Glycine max
gtagcaatcagagactgaagacgagcttccccttgcgccgaagggccaccgatggttgaaaccgagatggatgcagaaactgttgcaaatgtggttccaccaaaggagactccaaatagtgtttccatttctcatcattcctcacaccctcccttaatgagaggattatttcatccatgaccaggagatctgttgctgcacacccatggcatgaccttgagataggacctggtgctccaattatcttcaattgtgtgattgagattgggaaagggagcaaggtgaaatatgaactggacaaaaagtcggggcttatcaagatcgaccgcgtgctttactcatcagttgtttatcctcacaactatgggtttatccctcgtactatttgtgaggacagtgatcccctggatgtcttgattattatgcaggagccggttcttccaagttgctttcttcgggccaaagcaattggtctcatgcccatgattgatcaaggggagaaagatgataaaattattgctgtctgtgctgatgatcctgagtttagacattacaatgatttcaaag

SEQ ID NO: 205733 - DNA, 425 bp, Glycine max
atattgatacatattgaagttcacaacttatagcaaaaggtttattaagctgtaaaggtgcatttaaccataaacaaaaattgtctccaagactttaaaaacattacattatagacaaattagtcttccacttcatcgtccgtcaacacctactgtaactgctggtgttgctgcctaacaagtatcatattcactgcaaacatcttagtaggagtagcttttgacgaacaactccttcttggcttcctcggattcaccctcaccagtgtacttcccaagctgagcgagtgagttggacttggcacggaatgcgagtgcatcttgagctgccttcacgttctctgggcggcctccccatgtctgcaaggcaatgtttaggagggctctggcatacgagaatgacacgtgccacgggtttggagatt

SEQ ID NO: 205734 - DNA, 557 bp, Glycine max
gaattcagcaacaagggtaagacactagtctttcaattttctgttaagcacgaacagaagcttgactgtggtggtggctacatgaagttgctcagtggggatgttgatcagaagaaatttggcggggatactccttacagtatttatggttgggcccatatatctgcggttacagtaccaagaaagttcacgctattcttacctacaataacacaaaccacttgataaagaaggatgttccttgtgagactgaccaacttactcatgtttacacatttatcctccgtccggatgcaacctacagcatcctgattgataatgtggagaagcaaactggtagtctctactctgattgggatcttctccctccaaagacaatcaaggatcctgaggctaaaaaaccagaagattgggatgacaaagaatattttcctgatcctgaagataagaaaccagaggggtatgatgacatcccaaaagagctcccagaccccgaagccaagaagcctgaagattgggatgatgaggaagatggtgagtggacaccccctaccatt

SEQ ID NO: 205735 - DNA, 510 bp, Glycine max
ctttgcaccatactcagtgtttaacaaactactccttgtttatgcctctttatgactacatgctatggcaccacagacaaagcttacgataaattacacgagtcagcattaaaacaagaggaagaaatccctaatgttgtacacctaacacatctcacgacccctgaatccatatatcatctcaggcttggatttgcttacttggcttctaagccttacacgtcaaaatggtacctttgtttgatgtggccagtaacagcttggtccatgatcctcacatgggtttatggccgtacatttattgaggaggggaatcgttttgacaaactgaagttgcaaacttgggcaatacccaagtacagtctccaatacttcatgcaatcacaaaaagtggctatcaacacaatgatagaggaagcaatactcgatgctgacagaaaaggcatataagttttgagcttaggcctaaggaatcaaggagaggacctttacatctatggaggactatat

SEQ ID NO: 205736 - DNA, 565 bp, Glycine max
gatcaatgatatttgtataattcacaaaatttatattgtaaattttttcttagttggacttagacctttcaacaatagacctaacatccaccttgattatcaacaccaattgtatttaccatgccttgtcatctaacaataaccttccaaatcctgctatccaaaaaaatgtggggttttaggaaaagcaattatgtgtcatttttgtgatgaccatgacctggctgaaaatttgtgtcacccctttaaacgaaagttttatttgctagtgttagcagccttgtacattcttggttaacgacgataataaggaagattttccgacttcatcttctttgatcatccgattcttgggattcaacattgttggggggatattatgcaaccccataagtcctctgttagatgatttaatttcaatctgtgtagagaaaagtgctgaaacggggcgatgatcagagaacttgctttcactccgaaaatagtgaagttgctccactcctttaccataccatagaattctatcacaccatgctggagatcttagatttttcccggatctact

SEQ ID NO: 205737 - DNA, 559 bp, Glycine max
tccgtatcgtagcaaaacgcacgagttaggggcggcgatgggaggttcatcggaggatttctcggtggtggtgctggcgtcggacctcggcgtcgatgcgcgacctttcctcgaacacgatcaacagcaagaagaagagaattggcacgactgttcccagtacctctcccccgacgaggacttctccgatctcgatcagttgcaattcctccgcctccaaggctccgacaagaactccaatcgcattctccgcatcgtcggcaagtactttcccgcaactgttgtgagtgcggagcggctcaagcggtatgtgttcaacaaaatttgcagtgagttgcctgaggggcccttctgtattgcttacatgcacagcaccgttcagaaggaggataattcccctggcatcaccatcttgaggtggatctatgaagaacttcctgctgatttcaaggacaggcttcagactgtgtatttcgtccaccctggctttcggtcccggctagtcatcgctactcttggccgcttattctagagtggagggtaactcatctatcaatgc

SEQ ID NO: 205738 - DNA, 369 bp, Glycine max
tgatcgatcggtattcccggtacatcagctactcctcgtcggacgaccctttattttcaatttcatatatgaacattgttgcctccttatttcttgaatatgtggaattggaatgccccgaggaattccgatctcattcactttggcttcaggataggcctactaagaaaacaaataattccccttcatatatgaacatttttgcctccttattactcgccaatgtggaattggaattccccgaggaatcccgaactcatttcctttggcttcaggatacgcctaataagataacaaataattccaattcatatatgaacatttgtgcctccttatttcttgaaaatgtggaattggaactccccgaag

SEQ ID NO: 205739 - DNA, 568 bp, Glycine max
atggcgaagcgaaacgctgtcgttgcggcactcgcggcgttggtgctactcgcggcgagtgtggcggtggatgctcaggagaactcggacgtgaagacgctggtgaagtacaagcacgggaagaagtactgcgacaaaggatgggaatgtaagggctggtcaatttactgttgtaacctcaccattaccgattatttccagacctaccagttcgagaatctgttctccaagcggaactcgccggtggcgcacgcggtcggattttgggactaccactccttcatcgccgccgccgcgctttttgagccggaagggttcggcaccaccgggaacaagacgatgcagatgatggagatcgccgccttcttcggacacgtcggcagcaagacctcttgtggttatggagtggccactggaagacctttggcctggggtctttgttacaatcatgaaatgagtcctatgcagtcatactgtgatgactactttaaactcacatacccctgtactcctggtgctgactactatggacgtggagccatttccattttctggaactacaactatg

SEQ ID NO: 205740 - DNA, 568 bp, Glycine max
atggcgaaccgaaacgctgtcagagcggaagtcgcggattgggtgctactaacggttagtgcggcactgaatgctaaagagcaacttggacgtatatgactctggttaagtgcaagcacagcaagaatgactgggactcaggatgtgaatgtaacggctgatcagatttactgtgggacctgagcattacctgatattatcatacctaccagtgggagaatctggtctccaagcggtactcgacggtggcgcacgcggtcagattttgggactaccactccttcattgccgtcgacgagctttttgagccggaagggttcagcaccaccgggaacaagacgaagcatatgatggagatcgccgtcttcttcggacacgtcggcaacaagacctcttgtggatatggaatggccactggaggacctttggcctgtggtctttgctacaatcatgaaatgagtcctatgcagacatactgtgatgactacttcaactcacatacccctggactcctggtgctgactactatggacgtggagcctttcccatgttttggaactacaactat

SEQ ID NO: 205741 - DNA, 552 bp, Glycine max
aaatcttaaaaatattcagtgaagatcaacctcaatggcatctcttggcgtgcgaccagttcttccccctccattaacttccatctccgacccacctcctcttttcgatggcaccaccaggttgtacatcagttattcttgcccctatgcacaacgtgtgtggatcgctaggaactacaaggggctacaagataagatcaattcggtccctattaaccttcaagacaggccagcttggtataaggagaaagtctaccctgaaaataaggtgccatccttggagcacaatggcaaggtgttgggagaaagtcttgatttgatcaaatatgtagatgcaaactttgaagggacacctttgcttcccagtgatcctgccaagaaagagttcggtgagcaattgatatcccatgttgatacattcagcaaagacctgttcgtttcatttgacggggatgctgtacagcacgccagtcccgcttttgaatacttggagaatgctcttggtaatttgatgatgggccattcttgcttggccaattcagttggtgatat

SEQ ID NO: 205742 - DNA, 381 bp, Glycine max
aagaaatcaattatgaacttgaacctttatttgttcaccggggttggagttcaaaactgcacaaaggagacttgatctcaaaaaatgagaaaaggaaaacaaaaatcacatttaaaggatgctcttcttttcactggtgggggctcttttcaataatagctattaacttcagggatcaatgccttcaattttggcttccacttctgaatacaactggctgagcttctcaatattatcttctgaaggttcccaaaaaccacgtccattggcttccaagaatgtctgcaccagtttcctgaaggagtttggattaatgctcatgagcttgttcagaatttgctcattttgaatgaaaactgtgttggcttttttataccccca

SEQ ID NO: 205743 - DNA, 386 bp, Glycine max
aaatcacaaaagcaccaacattatataatatttttgcaagaacattatatagtcactgaattgatcgaccaggaaacaacagaaggaattcagcatttctaaagtttaccactccctaatggtggtcaaaagcaccaacatgctcatttcatttcctaaacgttgtgcttcatatctccccaagataaatctgcttgtcactgctgcaagatccaataataggctcattgggatgaaaaacacactcattaacagatccattgtgaccgggaagcttatacaagatgcggcgagaagtggtatcccagatgtaaaccattcgatcagaactaccagctgttaccttgcttccatcaggagaccaaccacacttcaacaagttcttt

SEQ ID NO: 205744 - DNA, 539 bp, Glycine max
cgcgatttcaagccaaagaacaaggatcagaatcgtttaatcaagttgaggaagatggcactagtctccggaggaagatcaacactgaaccctaacgcccctctttacattcccgccgcgttccgccaagtggaggatttttctccagaatggtggcagctggtgacgacactgacatggtaccatgactactggctaagccagcagcacgatgatggagccttctatggcgaggatgggtttgatggcaatgatgtggttgatttgcttcctgattcgttcgattttgatgctggtgaagatctttttgaagagtttattcgatcttctgaatcccaagaagaaactggacccaaaggaactgcatgagcttttagagatgaacccttttaaaagaagctaccaacctaagagactggacccaaggccttagctttaggtcatttagctgatatgtttggatcatgttgttatccgtagcttcaacttcctgtaacttcttgataggcaaggattcaaacttccaatctatccttctc

SEQ ID NO: 205745 - DNA, 603 bp, Glycine max
gaatagctggtcgacacgccagccagatccacaaatcggaaagaatcagagcgccgtcaaaaaccgccgtccacggcggtgaaactcgccttcgaatccagagcctctctcggttcctcactcttctcacatcgagcgcaacgccaaaaaatcgaatttcacgatggaagagttggagcagtggaaggaacaactttctcacttcgctaacctagctttggatcgtcttctcgaggttcctccgaatcagctctacgcagctgctgcaatcgtgattttcacaacgctgcttcttctctcaattcggttgttcaagcgtgcgaagtcaaacactgttgtgttggccgggctcagcgggagtggaaaaactgttatcttctatcagcttagggatggctctactcatcagggtactgttacatcaatggagcctaatgaaggcacttttattcttcacaacgagaaaacaaggaagggcaagattaaacctgttcatgttcgtgatgttcctgggcattctcggcttcgaccccaactggatgagtacttggcctcagcagctgggataggttttgtcgtagatgcttttgactttttaccaac

SEQ ID NO: 205746 - DNA, 524 bp, Glycine max
  unsure (1)..(524): unsure at all n locations
gcaagattagaacagcatgtcgagagaggggttgcagatggccttcttattagttgtgtgtcttcttgttgcaatctttgggcccttattatggatgctggaactggttttacagctcaagtttacaagttgtcaacctttttcttgcacaaggaatggattatggagcagtgggataaaaacttttacatcacttctattgcagggagcaacaatggcagctctcttgtggtgatgtcaaaaggtacgcagtatactcaacaatcttacaaagtgagtgaatctttccccttcaaatggataaacaagaagtggagagaaggttttcatgtcacttcaatggctactgctggaagtcgctggggtgttgttatgtctcgaaatgctggattcagtaaacaggtggttgaacttgattttctctatccaagtgagggcattcataaacgttggngataaaggttataggattacagcaaccgcagctacattgcatcaatctgctcttatattaagtattccga

SEQ ID NO: 205747 - DNA, 489 bp, Glycine max
aaaatatctcttccatacgagtagggaggcaaagtgtatgtgcctcccaaatcctactcttgtgaccacaagccttcacttgactctctctctgtctctgtgtctggtctctctctctctgtctctatgttgacacccttttttctgttctcagaccggaccatgcaagcaagtatattacactactcactcactgagaccgtgggtactaacatcgccaccgttaccgacgctcaggccaagggcgcccgcgggcgtggccgtgcctacgtgaccttgctagccggaaacggcgactatgtgaaaggagtcggtggcttggccaaaggtgtgatgaaggtgaaaagcgtgtaccctctggtgggtgcagtgttacccgatgttgcgaacatcaccgaaacatggtgaccttccaaggtcgcattgctagagaaggtgaacccgtgtaccctgctgagaatcagacgcataccgccatggcatattacg

SEQ ID NO: 205748 - DNA, 406 bp, Glycine max
gaacagttaataaagatgtttatattatcgcagcatgtataagattcaatcataacaacacaagaccggcaccagaaaattattaaacaaacaaagcaacaggcacatacggtagagggggaatatatcacacactctcacaactgatcacaagacgtaggaacagcagaaacggactccttatcaggatcatggtgcaccaagaagtgctgaagtcgagcattgcccaaattcgaacagccactaaaagcacccaaggccgatgaagccactatcccatcggaggacccactcatgtggttgtcagcatgaagctcggaaaaacggcgctcgaaatggaaaacaagctacggaaacgccagtagaggagaccctgatggcaaggtgaaccagagatccaaccgtg

SEQ ID NO: 205749 - DNA, 313 bp, Glycine max
gtcatcaagagtatgatacacctgaaatttgttgatatgtatgatactgtagtcttgacatgttataggtaaatatatgatgtccatgaatgaatggcttgttataaaaaaaaaaaaaaaaaaaaaaaaaaaaaaaaaaaaaatctacctaacatccacaactcaaaacttctccacacacaccaaataaactaaaaaaaccctacacaaaaaaactaaacaaaaaaaaaaaaaaaaaaaaaaaaaaaaaaaaaaaagggcccccccccaccttcacccccccccccccccaaatataattccccccccaccc

SEQ ID NO: 205750 - DNA, 596 bp, Glycine max
gcgtgaggttcgttactaattacaagctcaccaaggaagacattgattatatcaaaaataatttgtctgtttcatgtgaggatggctttctggactatcttagaggaattgactgttctgatgttgagttctatgctattcccaaaggatcagttgtttttcttaaggtgcccctattgagaattgaaggtccaattgccgttgttcaattgctggaaacaccttttgtctatctaattaattttgcatcattagtttctactaatgctgcaaggcatcgttttgttgctggaaaaccaaaaactctacttgagtttggactacgaagggctcaggggcctgatggtggagtgggtgcatcaaagtacagttacattgggggatttgatgcaacaaggttcgttgcttttttaataccttaggttgctattgtataacttcactttttcatatggcacaccaatagcaacgttgcagcaggaatgttatttgggattccccttcgtgacactcattcccatgcattcgttagctcatttatgcgatcgaattcactacgtggcaattttgctgagacccatcaaagtgagcttgcc

SEQ ID NO: 205751 - DNA, 540 bp, Glycine max
gttctggtgatgcttccactggctctagtaggagtttaaatgctctggctagtgcctacagtggtggacaggggagagtcaacaatggtgatagattacagaatcgtggctctgctcgggcagctcctgtttggcttgaaactggtgacgcagttgcaaatatgtattctgagctgcgggaggaggctcgtgatcatgcacgtttgcgtaatgcatattttgagcaggcacggcaagcctaccttgttggcaacaaggcccttgcaaaggagctaagtgttaaggggcaactgcacaacgtgcatatgaaagcagcacatggaaaagctcaagaatctatttatcgccagaggaatcctgttgctccagagaatggaagagggccccaaagaatgatagacctacatggtctgcacgttagtgaagcgattcacgtgcttgaacacgaactgagtgtgctacgaagcacagcctgagcccccgagcagcgtttgcaggtttacatctgtgttggcactggtcaccatactcggggctccc

SEQ ID NO: 205752 - DNA, 441 bp, Glycine max
atcagaaaaatagtctaccatactgaagaaacaaagatacatttaccataacatgcactttaatttaatttaaaagtaagcatttaacatagccacatgaacccaattgcagtaaagagaaatgcaaaattaggggtaatccctaatgtcttggataagcttggagactcaagtcttacaaatttaacaaaattaacatattatcataaccaaaacaaaagaaggcattactgaaactctccaatcacaaacaaaaaaagatggcaatccactcagtctcccttcttcctaaaggagcatccctcggttagccttgcccggccaccggttggttgacacaagacagtctggcagtttccgcatacaacaacagtctgagagtggctaaagacagtggttatgttgaagcaaccctggcacttaacattcatgaagaaagag

SEQ ID NO: 205753 - DNA, 339 bp, Glycine max
gggccaaatattttacccaaaaggatgtaaaaggaaataaaccatgaatttaacatctggcgaactgacgcaatttagcagggggtacgtttaaaaccgaaaaaacaaaatttccctttagaggggcactaatactacctaaattattaccaggacaactaggggtttgatgctctaggggaaatctgataacctggctgggccaacaccattctgattgagcctttagccgtcaattacctaatagccttccttggccgggaacccttaatccttaaacgggctgagagaatggcaggagtaatgaccctgtattcgggtgcctcatagagggacttg

SEQ ID NO: 205754 - DNA, 587 bp, Glycine max
aaggcgaaagactttaggtttggaattgggaattagggttgttcgcgtcacgaagatgatcgaggtggtgttgaacgatcgattggggaagaaggtgcgcgtgaagtgcaacgacgatgacaccatcggcgacctgaagaagctggtggcggctcagacgggcacaagagccgacaagatccgtatccagaagtggtacaccatatacaaggatcacatcactctcaaggattacgagatccacgacggcatgggtctcgaactctactacaactaaacacaaggtgtgttttatgcatgatatattactatgatctgggaatgggatgaggcgccaaatgtaattttgacttgcgaaagtccctatgatttgaataatgtacatccccgaatgatattgggtattacataccgatgacaccctaagttgctttgttatatataacctatctgatgacttgttgctaagctttattaatctgatcggtggaagtgtttgatcatgtccaattgctatattaattatttgatcttcgctactttaatctaattcactctcaatggatgttagagcttacgacatgaat

SEQ ID NO: 205755 - DNA, 546 bp, Glycine max
caaggtaagaattttattgcacaatgagaaggcagagaaaattgatggttctgtttctcagtacaagttttagaatgaaaaatgaagcaacaagtgtttgtagtggtagtagtagtagtagtaagcatacaaaactacaatggcatggtacatacatataataattgaattaccaattcagaatttgatggctctcacttccacttgttggcaacaatgtcagccaaatccacaaccctttgggagtagccccactcattgtcataccaagcaatcaccttaaccatgtcatctcccatgaccatggtcaacgatgagtcaacggttgaggacacatcagtgcacctgaagtcaacagacacaagtggctcatcacacacagagaggattccctggagctcattgtctgcactctctctgaatgctgcattcacttcttctgcaaggtcttctttgagacctgaacaacgaggtccaccactgagacgtttggtgttggcacacggagtgcaatgccatagagtttgcccttgagggttgggagga

SEQ ID NO: 205756 - DNA, 540 bp, Glycine max
cacaaatcaattaactgaatgtttagagagagaaagaggagaaggagtagtgatgaggtgatcatagagcatattataagagagtgaaaactaatggaggttggcctcaagaaggagaacatggggtttgaggaaactgagttaaggcttggactgcctggaaacggaggcactgaagaagtgctcatcaggaagaggggtttctctgagactgaaactggtcatgaagatgagtctgccaccactgtggatttgatgcttaatctttcttctaaggaggccgcaaccactgctgctgctgctgcagatccaactgataagcacaagactttgcctaaggagaagacccttctgccagcagatcctgctaagccttcagccaagacgcaggtggtgggttggccacctgtgcggtccttccggaagaacatgttggctgtgcaaaagagcgttggagaagagagcgagaagaacagcagccctaatgcaagctttgtcaaagttagcatggatcgagcaccttaccttcgcaaagtggac

SEQ ID NO: 205757 - DNA, 581 bp, Glycine max
cccgtcttcagggtcgcatcctaagagtcattttgttctactgtagatcatcagagcgaccaaagcatcagtggcctgtgaaccagaagctcttcactttggatgttatgtaccttcatgataaacctggaccagataactgcccccaggaggtttacgatacactggtggaggcacttgaacatgttagtgaatatgagggttatatcttggagagtggacaggggttggcacgtgttctattccgtcatgtgctgatactattgtcacatcctcagcagcgttgcatccaagagtatgttgacataccaaagtcaattgcaaagaagcctccccaggtggagcctatggctactgaagatagtgctcccatatcaagccaataatactatgagttgggaagtggatggcagttgcatgtggtcaacctctttaggggaatggaatatgatcataattcagcaatgttcaagttggaggttagtgtcactaggttgacaagggaatgattgtactagcgtaacagtttctgaaatggattcgattctacaccctctttcgtctaagctgatccattacta

SEQ ID NO: 205758 - DNA, 546 bp, Glycine max
  unsure (1)..(546): unsure at all n locations
gccagcgccaaagctggccacccaactttccttttggtgagggagtccactctctccaaccccgcaaaatcacccctcatcgacaatttcaaaggcctcggtgtcaatcttgttttaggagatctatacgatcaccaaagtttggtgagtgctataaagcaggtcgatgtggtaatttctactgtaggacacctgcagctagctgatcaagataagatcatttctgcaattaaagaagcaggaaatgttaagaagttctatccatctgagtttggaaatgatgtggaccggactcatgcagttgaaccagccaagtctgcatttgcaacaaaggccaaagttcgccgagctattgaggctgaaggaattcccttcacttatgtgtcaagcaacttctttgctggttacttcctgcccaacttgtcacagcctggagccacagctgcccccagagacagagttattatcctaagagatggaaaccncacagctgtttttaacatggaagaggatattggcacttataccatcaattctgtggatgat

SEQ ID NO: 205759 - DNA, 385 bp, Glycine max
cattcgaattcattttatttatatattaatattatattcaaatgaaataaaaagatattaaaagatactaattataagaatttgaaagtgaaattataaagttattaaatgattaatcaatttttttctacctgttcctgtagtaaaaagagttccatctgttcttgaatagcttccttcaaaaggacttctgcttccccagtgaatgtcttggtagaagatatgatttctttgaattgaggtttattcgtgtttaagtaagcacgtaactcaacaagaaatttccttacctgtccaatttctaatgaatcaagataaccattcgttccagtataaatagttattatctgttcttccacggtaagaggagctgattgggattgtt

SEQ ID NO: 205760 - DNA, 547 bp, Glycine max
taatgatcaaaatcacaaggaaatgaaagagcaagaaaattggaatatggatcaccctttaagagatgaagctaacaaaaaaatgttgatatgatgtgcaatctgagagcaaacccaagccaaaactgagaggctccctcttcatccattctcagcctcaaggagattcttcggtgggaaaaatccaagaggtttgaaattcgaaggcagggaagatggattatttcactgcaccaggaagaaaccatctctttgctccagggccggttaacattccggaccagatcatccgggccatgaacagaaacaatgaggactaccgttctccagcaattccagctatgacaaaaactttgcttgaggatgtcaagaagattttcaagaccactactggaaccccatttctcatccctacaactggtactggtgcttgggagagtgctctcacaaacacactgtctcctggggatcgaattgcatcgttcctgattggccaattcagcttgctttggattgatcagcagcaacgcctgaagttcaatgttga

SEQ ID NO: 205761 - DNA, 511 bp, Glycine max
gttctctcaccgtgaaagagagagagaggttaggctatggctgatgagagcgttgttgagtccccagtgaagaggcagagagatgatggtgaagaaaatggtgtctctgtttccatggacgcggagggtggcaaagaccctcttagtaacggtttatcatctgtgattcctgggtggttctctgaaatcagtgcaatgtggcctggagaggctcactccttgaaggtggaaaagattttgtttcaaggaaagtcagaataccaaaatgtcatggtcttccagtcatcaacatatggcaaggttcttgttttggatggagtaattcagctaacagaaagggatgaatgtgcctaccaagaaatgatcactcatctttctctttgctctattccaaaccctaaaaaggttttggttatcggtggaggtgatggaggggtcatacgagaagttgcacgccatttttcagttgaaaagatagacatttgtgaaattgacaagatggtttgtgatg

SEQ ID NO: 205762 - DNA, 501 bp, Glycine max
ggaatgcagccccaatcgggcggtaaattccgtccaaggctaaatactggcgagagaccgatagcgaaacagagagtggtttcagtgagtgatcggtgttcacttgatccttcataagtcgtcatcatcatcatcatcatcaccgttgattgaagaagatgccgatcagaaacatcgccatcggaaggcctgaagaggctactcaccccgacacgttgaaggcggggttggctgagttcatctccaccttgatcttcgtgttcgccggttcaggttccggcatcgcctacaacaagctcaccgacaacggcgccgacactcccgccggcctcatctccgcttccatcgcccatgctttcgccctcttcgtcgccgtcttcgtcggcgccaacatctccggcggccacgtcaaccccgccgtcaccttcggcgccttcgtgggccgcaacatcaccttactccgcggcattcgctacgtcatcgcccagctcctcggctcca

SEQ ID NO: 205763 - DNA, 521 bp, Glycine max
gtcggttaaggagtgccaccttcaccacaagggaaagaagcacaagctctggagacgcatcttctggggaatagtgatcttcgccttcatcgtgttactgacagttcttataatctgggcaatcctaaagccttcaaaaccaaccttcatcctccaagacgtcaccgtttacggcttcaatgccaccatccccaacttcctcacctcaagttttcaggtcacgctttcctcgcgcaaccccaacgacaaaatcggaatctactacgaccgtctcaacacctacgtaacttaccggaaccagcaggtcacgtaccgaacctcaatcccaccctcgtaccaaggtcacaaggaagaggatgtgtggtccccgtttgtctacggcactaatgtccccgtcgcaccctacaacttcgttggcctcagtcaagaccagaccaacggcaacgtcctcgtcctcgttaagattgacggtaaggtacgatggaaagttggctccttcgtctctgctcactacaacctca

SEQ ID NO: 205764 - DNA, 526 bp, Glycine max
atgtaaaatgtaaccatacaataaacttataaattatcacatactatcattctcgatgataaaaaaataataataataataatactatcatcatcctaaccggtcaaaaacaaaattaataacaaatattaattaattaattaattaattaattaactaactaactaaaagcttgctctctttagggaagtaatagtaacggaagaacccaagggagaagttcccacttgaatctcgaaggaatcatagcgaagaaagaactccacaacgaaaagcctcgaaaccaaggtgacgaagtcttttccggcgcattgcttgttcccaagtgttggagactcagtctcaggcccattggaccacagcacgtgcttgaggagcttctccccttccttcccgacgaacctgtccccgacaaactcctcggccctctcgaagatcctaggatccttcgtcgcgaatggttggtacccgaacagcatctacccttgcttcacctgaaacgcgtggtcgtggctctcaatgatca

SEQ ID NO: 205765 - DNA, 585 bp, Glycine max
ggttaatgtgtgctttagaagggaaatatctggtctgtgaagatgatcatatgtcaatggatcaatgctccaaagaacctgatgaacttcagtgcgtccagttttcatgttctgtccctgtgatgaatggaagaggatttattgagattgaggaccagggtttgagtagcagcttttttcctttcattgatgtggaggaggatgtttgctcagaaatctgtacacttgagcctcttctagaattaagtgaaactgatccagatattgaaggggcaggaaaaatcaaagccaaaaatcaagccatggattttattcatgaaatgggttggcttcttcacagaagccagttgaaattaaggatggtttctagtgtggatctcttttcattgaaacggttcaagtggcttattgagttttccatggatcatgattggtgtgcagcagtgagaaaactgttgaacctactgtttgatggaacttgtaatacaggagatcatccttcctcgaatcttgcgctttcagagatgggtctccttcacaaagctgtaatgagaaatagcatgctttaatggaggtgctttgaga

SEQ ID NO: 205766 - DNA, 497 bp, Glycine max
  unsure (1)..(497): unsure at all n locations
acaatataataataactttcaaataataattcgaatccaaagataatatacaaaccttaatttaaaaaaaaaaaacggacacaagaaccaacatctcctgtcagtattcacataacataaaaagacattcaatatgccgtgagcacttggtaactggcgtagaaaacatacgttacaacaagagggtcaataataaacttgatacctactccgggccttgcattggaaccatcatatgtcgaccctgagaattcgggtaagtaacattttgtgagaaagaaccttgatgagcaagctgagcattaggacttggctgaacatctctcttagcagatgagtctccacccttggcagagcccttcgtatcaccctccatctctcggtatctagtgaggtaaattttaagaggatccatataatcctcgaaaccgagagtgngccatcgccagagcaaatcatcggcgttaatagtctttctcttttctctctgacactta

SEQ ID NO: 205767 - DNA, 516 bp, Glycine max
ttcgtcttcttcgtctttactcttttcttcaccgaagcgaaaaagaaaaggcttgacttgagagaaatagagcttcgaatcgaaactcagaattagaaaaaaacacaaatcacaatcacaatggcaaggtacgaccgagcaatcaccgttttctcccccgacggccacctcttccaggtcgagtatgccctcgaagccgtccgcaagggcaacgccgccgtcggcgtccgcggcaccgacaacgtcgtcctcggcgtcgagaagaaatccaccgccaagctccaagactccaggtcggtgaggaagattgtgaatctggacaaccacattgcgctggcatgcgcggggctgaaggccgacgcacgtgtgctcataaacagggcacgtgtggagtgccagagccacaggctcaccgtggaggatcccgtcacggttgagtacataacgcggtacattgctgggctccagcagaagtacacgcagagccgccgcgtgcgaccctttgggcttcgactc

SEQ ID NO: 205768 - DNA, 416 bp, Glycine max
accaacataatttaccttgttattatagtgataaacagaaatgtgactaaattgcaggtacttgtctgaagatagcatatatctttttctaaaagcagataaaaatagacaatgaattgcaggtttaacagattaagcagctgctccaacagctacaccacccttgagcctggatttaccatacagggtttcttcaaaccggattatctcattcttggacccataagcaacttgagttctgtcatcaatgttactgatgactttgtctagcacagactgatgaccatcactgctgtaacctccagctttttcaatcaagaaccccaaaggagctaccttaaacaacagtctcagtttggctttggctgatggtgatgacacgttggtgaagattcccttttcttttacaataatct

SEQ ID NO: 205769 - DNA, 450 bp, Glycine max
ggaacttaaaaatatattttattcacaagacacacacatgcattattttttcaaacacataacataatatatataatagatgtctgccttgcatggcaagcgtctcagctcttaatttgcagatgaaacacatacatatagcaagcccctatagcactagtatgggtcttattccatagttacgtatagtacatatagctagcaagctagctttattattatgacccaatcttattccatagtggtacatatagctagcatttattattatgacccattcataaaactacctctaataattgtaactaataacttcttgcccttaagatattatttcaagattcacacatcatacatatcacataacacttctgagatgcgtgttcacccttcatgtcatacctcattcatttacaggcaggccacaattaaatttcagggatccacttg

SEQ ID NO: 205770 - DNA, 544 bp, Glycine max
agctcgtcgcgttcgtctctctctctctgagctcgatttattgggctcttcgaattcggttcccgatttccgacgagttctatcattcacttcaatcttcggaaatgcctctcagactcgaaatcaagcgaaagcttgcgcaaagatcagagagagtaaagtctgtggatctacatccaacagaaccatggattctagcaagtttgtactctggaactgtctgtatctggaactaccaatctcagaccatggccaagtcttttgaggttactgagttaccagttaggtcagccaagtttattgcacgcaaacagtgggttgttgcaggggcagatgatatgtttattcgtgtatataattacaacacaatggataaagttaaagtatttgaggcacatacagattacattaggggtgtggcagttcatcctacccttccatatgtgttgtcatcatctgatgacatgctcataaagctttgggattgggaaaagggctggatctgtacccagaattttgagggacattctcattatgtcatgca

SEQ ID NO: 205771 - DNA, 580 bp, Glycine max
atttattcccttctaaactgcttgatctgcatgtggtatggcacacctctgatatctgctgataatttgttggttacaactgttaattcaattggagctgtctttcaatttgtgtacataatcatcttcctgatgtatgctgagaaagccaaaaaggtgagaatgattggattatcgctggcagttcttggcatatttgcaatcatattagttggaagcttgcaaatagatgacattataatgcggcggttctttgtgggattcttgagctgtgcctctctcatttcaatgtttgcctctccattgtttataattaaattggtcattcagacaaagagtgttgaattcatgccgttttatctctcactttccaccttcctaatgagcacctctttcttactttatggattattcaacgatgatgcctttatttatgtgccaaatgggataggaaccatattgggattgatacagttgatattatacttctatttcgagggtaaatctagagtgaactccagagaacctttgatagtgtcatatgcatgatcagttctgctgaaaagactggagtgacaac

SEQ ID NO: 205772 - DNA, 467 bp, Glycine max
taaaatgttgttccacaatctatccacataccgactgaaaaaaaaaaactcagtttgtgggtttattatactttgattgattaattaattattagttagttagttacgtcggttaatcaactggaagcagtgtcactactgtgtttcggaaagttcgagatggtgaggcttctcggccaggggacgtttgccaaagtgtattacgggaagcaaataagcacgggccagaacgtggcaatcaaagtgatcaacacacagcaagcgacaaaagaatgaatgatggaacagatcaaatgtgaaatttccgtgatgcgtttggtgcgacacccaaacgtggtggaaatcaaggaagtgatggccacaaagacaaaaatcttcttcgtcatggaatacgtgcgtggcggggaactctttggcaagtctccaaaggcaaactcaacgaagatttcgcccgcacgtattttcag

SEQ ID NO: 205773 - DNA, 507 bp, Glycine max
attcattatcatatatgcatcacctagtatcagctggtttattcttaattaagagaaaactaaaatacaatatcttacatgctatttttgttgttcttgaattagaataatttcacctcgataactttcaaaatcctttaatgcaaattaccgaaataaaactctagttctagtacaaacaacacctagctataataattaggggttgataccatagagctttcgaatcccgtctatatcatcttgcgctagattcaccttcctagttcgaggtggtatagaaggatacatgatggctcttaggtccgacgagtggcctaatccgagcaagtgcccgatctcgtgcactgccacagatttaaggtcaaacgcacttgtcaccggcgatttggtgacatcgccagacgccacccaatattcgtcggcgtcaaagtggcacctgccatcagtgggagcgaatgcatggcccaatattccacctggaccatcaaaaggatacggatcacc

SEQ ID NO: 205774 - DNA, 442 bp, Glycine max
gccaaaaaattaattcaaactatattaaaccagggaaacaaaaaaaaaaaaaggtttatgatacaccatcaactatatctaaaagcaacctttttcgagtacaacaaaataaaattactatacatagttaaaacgaggtcaggtgcggtaagaataaaaatacataattcctgccttcctgtgagaattctaatagccaaatagcctctattttaatatgatcttcaaggaaccttgaatccccaacaaccaaatgataatctcatttgttagttaaaattccatgtactgaaagggtggagggcttgttttggtcttagaaccactaagcccacggatctccacttttttccattcttgcacaagggcacagcagcaacacatcaaatgagagaggaaatcatcaataaatccccctgtgatgttcaacattttccgaagc

SEQ ID NO: 205775 - DNA, 501 bp, Glycine max
  unsure (1)..(501): unsure at all n locations
atggtaagaagaaaaacactgtaatgtatggctgaaaatccaatattaagatttgattctgtatgaaaatgaaaatgaaaatgaaaataaagcggcacacagggctagctagctaggcaataggcaataggcatgtagaaggatccatcatactaggagggaagaggccttggcggaggagggagtagctgatggaggtttggaggagtctgattgtggttgggcagcggcggagcaatgaaggggtgttcgagcaacctggaagcagaccagcggcgagagggatcgcgctgaagacagcgcaagatgaagtccttgaagtgaggggaagcagaaggaggagcctcgggaggctgagacatacaaatggcgcacatgagactggcccaatcgccctgcctnccaaccgcgaaggggaaccttcccatgtagaactccagtatgctaaccccaaagctccatatgtcccctgcgtacgcgtcgtattgcccgtcgttatgt

SEQ ID NO: 205776 - DNA, 533 bp, Glycine max
aaatcagtctctaatatttttctcactgtcttgtctctccagagaactgtatagagagagatggcagctgcaacatctggtgctgtgttaaatgggttgggatcttccttcttgagtggaggaaacaggagccaaacccttctggccactgctattggaggcaaagttggtgctgctgctgttactgttagtcctagaagactcattgtggtagctgctgctgcaccaaagaagtcatggctccctggtgtcagaggtggtggcaacctcgtcgacccagaatggcttgatggatcgctaccaggtgactatggctttgacccactaggccttgggaaggacccagcattcctcaaatggtacagagaagctgagctgattcatgggagatgggcaatggctgcagttctaggaatctttgtgggccatgcatggagtggagtttcatggtttgaagctggagctgatccaaatgcacttgctcctttctcctttggtactcttctgggaaacccattgattctcatggggtg

SEQ ID NO: 205777 - DNA, 505 bp, Glycine max
ggcaccgccacgccgttcaactgcgtctcccaagccgattaccctgactactacttccgcattaccaacagcgaacacatgactgatctcaaagaaaagttcaagcgcatgtgtgaaaagtccatgataaagaagcgatacatgcacctgacggaggagtttctgaaagagaacccgaacatgtgcgagtacatggcgccatcgctggacgtgagacaagacgtagtggtgatggaggtgccgaagctgggaaaacaagccgcaacgaaagcgattaatgagtggggtcaaccaaagtcaaagatcacacaccttgtgttctgcaccacttcaggcgtggacatgcccggagcagattaccagctcacgaagcttctcggcctgaggccctccgtgaagcgcctcatgatgtatcagcagggctgcttcgtcggcggcaccgtacttcgtcttgcgaaggacctcgcccagaacaacaagggtgcgagggtgctcgttgtctgct

SEQ ID NO: 205778 - DNA, 526 bp, Glycine max
gttcaaaatgcaggcttcagtattggaaatatataacgagaccctcagggatttgttatcatcaaatcggtcaagtggtattgactcaacacgaatagaaaacggtgttcctgtttctggaaagcagccatacactattatgcacgatgtcaacggaaacacacatgtttcagacctcactataaagaacgtttctagtgcaagtgagatttcatctcttctgcaacaggcagcacaaagcaggtctgtaggaagaacacacatgaatgaacagtcatcacgaagtcactttgtctttactttgcgtatatctgggaccaattcgaacactgaccaacaagtgcaaggtgtgttaaacctgattgatttggctggaagtgaaagactgtccaggagtggggcaaccggtgaccggttgaaagaaactcaggctatcaacaaatgtctctcctctctgagtgatgtcatatttgctttggcaagaaacaggagcatgtaccctttatgaatcaaaattgacatacct

SEQ ID NO: 205779 - DNA, 509 bp, Glycine max
caattactactttctctctctttgtaacttgtaagcatggagtcctcaaagatctatgcttacctcttcctttgcatgctcttactctcctccgccactcccattctcggttgtggctactgtggcaaaccccccaaaaagcacaagcctgggaaaaacaccaaagacacccacagtacccgatgttaagccaccagtcacaatccctcccattgttaagccaccagtcacaatccctcccattgttaatccaccagtcacaatccctcccattgttaatccaccagtcacaatccctcccattgttaatccaccagtgacagttccacccgttgtgcttccaccaatagtgaagcccccgggttttctccctccaattcttaacccaccaagtacaccaacaccgtccccggggaagggagggaacactccatgttcaccaccaaagtcttctgcacaggctacatgccccattgacacgctcaaactaggtgcttgtgtggatcttc

SEQ ID NO: 205780 - DNA, 582 bp, Glycine max
aagaactgataataatgtgtttgtatatgggcattttcactaaattttatagtgcagctctgctacttctgtaatcaaaagtttcctgcggcttaattgatatctcgctattttcagctggaataaaaaaggaacttgctgcagctaggaagatgatagctgataggcgtgatcaagagaaaaaagcatatcaagagaaaaaagcatatagcaagatgttccaataacactctggttaatccacatactcaccaggtgcgactttggaagtgcaaaagtcttggtgaaaggcgaaccaaatatatcatagatatgttctagatattatagagcacctgagcttatatttggagcaactgaatatactacagctaggtgtattggttgagcttatgcttggacaggtaggtgattgatgaggggagctcctttgattctgtggtttaatatatgtaaaaataaatttgtttttattgttatttttccaacccttgttccctggtgagaagtgagttgatcaacttgctgagaacatcaaagtaatctttatgattattttctttgttggtactggtatgtctg

SEQ ID NO: 205781 - DNA, 455 bp, Glycine max
gaacaaataaaacagtagtcttcaattacttcaaccaaaaggtctaacaaactacacgattataagcttaaggcaagtaataaccaactaaaattcaagtttgcaaaactatgatttcttattataaagcccctaccctacattcggggaaacttcaaaaccactatttttcatccaaattattcaatgcaaaggggaagcaacatcattgcctcagatagttgtcgtcgtcattatctgtatattaacctccaccaccagaaccgtatttctttccgaacaagacgagctgtagcttatcataaccagcgagcactccagcacctgtaacagcacgtaatatgtttgcaccggcacctttaaagagtgacttagtaccctcttttgcgacaattatcttgaatgcttccaaagagctcttgtattttacagcttctccagatgtcatcatcatt

SEQ ID NO: 205782 - DNA, 596 bp, Glycine max
  unsure (1)..(596): unsure at all n locations
gctatctgcttcctcgtagtacttcattgagagagacatggacactgtactaagtactacgctgctactcatgttggcatgctccatcgtgcatgttcttcgttcactacaagcaagaatgagaagaaaatcaaactacaatcttccaccaggaccctctcttctcaccatcattagaaactctaaacaactctataaaaagccacagcagacaatggccaagcttgccaaaacctatggccccataatgcgtttcaccataggccaatcaaccaccatagtaatctcctcaatagaagccacccaagaggttctccaaacccatgactcattattctcggacagaacaaaccccgacatcacaacctcgtacaaccacaaccgttacagcttggtttttctccctgtctcacccctctggcaagaactaagaaaaatctgccacggaaacttgttttcggcaaagacccttgacgcaagcacggaccttaggcgcatgataatgnaagagcttcttaccgatatncgcccaagagcctcaacggcgaagtgtggacattggaagacagccttcatgcatgcattaatttttatcg

SEQ ID NO: 205783 - DNA, 568 bp, Glycine max
aaattctcgacgaagcaaccctgaccataaccacactctctcaagtcccaagaaagaaccctgtcacctagctagctatcaaactaccgattcatagcactcttctcttcctcacttatgcgaaacgcaaacatggttctcgatctccttttccttatggcaatcttctccgccatgaccactccgtcaacctccgcgatcgacaccttcatcttcggcggctgctcccaggccaagttcacgccgggttccgcctacgaaaacaccgtcaactccctcctaacctcgctggtcaactctgcggccttcgccaactacaacaacttcaccgttccagcctcttccgacaccgtctacggcctcttccagtgccgtggcgacctccccaacgaccagtgctcgcgctgcgtctcgcgtgcggtcacccagctcggcaccctctgctttgcctcctgcggcggtgccttgcagctcgacggctgtttcgtcaagtacgacaacaccaccttcattggggttgaggacaagaccttggtcagcaagaaaatgtggcccgtcgttgggttga

SEQ ID NO: 205784 - DNA, 451 bp, Glycine max
aaactgatattaatcaaatttcatattcaaaagcacatacatactataaacactttttacattgccaattaatattagctgccaagccaacaacaaaagcaaactaaccttaaaaaatcatgggtgctcaagcaatggtaactttaacagtttttgattttaggggaggaggaagcttctcaacaaccacagtgagaaccccattttcgcatttagctgtaatggctgacacattagcattctcaggcaaacgaaacttcctctgcaaattctgaggccctctcctcttcaacctaaaatactggcacccttacatcctatccatcttgacgcttcctcttcccattgcttcttataacaagagtgatcctatctttaaccgttacctacaaaacaaattcacacatgccaatgcaccataacattaatggaggggaagaaaagaatattg

SEQ ID NO: 205785 - DNA, 592 bp, Glycine max
attttgagcacaatggcctcgacacaatgctttttgcaccaccacgccctcaccactccagctagagcttcaacacagcgcctagttgtgagcaccaaaccaaaccacattgtttgcaaggcagcacagaagcaggttactgtccaagagggtgaggacactactactggccttgtctctcgcaggttggccctcactgtgctcattggtgctgctgctgttggctctaaggtggcacctgctgatgcagtctatggagaagctgccaatgtgtttggaaaaccaaagacaaacacagacttcctttcatacaatgggaatggattcaaactctcaattccctcaaagtggaacccaagcaaagaggttgagtacccaggtcaggttcttagatatgaggacaattttgattcaaccagcaatgttgctgtcatggtcactgcaactgacaagaagtccatcactgactatggttcacctgaggagttcctatctcacgtggattacttgcttggaaaacaagccttttttgccaaactgatgctgacggtggtttgattccatgctgtgcaactgcaatatcttgagagtc

SEQ ID NO: 205786 - DNA, 507 bp, Glycine max
ttatggtcccatttactctgttcgagaacgacttcaaatatatatatcagatgcaggagtacttgcagtatgctatggccttttctgtcttgccatggcaaaagggcttgcctgggtggtgtgtgtttatggagttccattgcttgtggtcaatggatttttggtgtagattacatttttgcagcacactcaccctgcattgccacactacacttgctctgagtgggactggatgagaggagctttagcaacagtggatagagattatggaatcctgaacaaggtcttccataatattacagacactcatgtagctcatcacttggtctccacaatgccacattatcatgcaatggaagcgacaaaggcaataaagcccatcttgggagagtattatcggtttgatgggactccatttgtcaaggcaatgtggatagaggcaagagagtgtatttatgtggagccagatcaaagtactcagagcaaaggtgtactttggtacaacaa

SEQ ID NO: 205787 - DNA, 628 bp, Glycine max
ctcattgctgttcaccattttcaattcattcctgtgttagattccaagtggtttggtttggtttgacataaataaacctttcaagatctcagaggggcagaagatcaaagccaagacaacacactcttatatataaaagagtgtctctgataatttgatctttgtttcttctctttctctcctttgagatttttcagcaccccaccaaggttttgtccgaaaagcttgaatttttcgcctaccctttacaatgatctcttcattgagacaacctgttgtagggatcagtggttctgatcttcttttgaggcaaagacatgcaaccctaattaaggcaaggtcctttttaccctctttgtcaagagaaaagggtcaaagatctcttgtttcagttcaaaagccacttcacattgctgcttctcttggtgttggaaattttgtgtcagtgaagagtgatgatgacaaaaggggtgatttggtgaagtgtgaggcctatgaagcagacagatcagaggctgagggtgcaagcacaccatcagaagctgcaaagaaggtgaaaattgtgatatattttgaacctggtgggcttgaatgtgggttccatattataacagaggtttgatgctac

SEQ ID NO: 205788 - DNA, 490 bp, Glycine max
ctctcaaatttttagttctgcgatttacacttaataatttcacatccgtttcgtgatgccaaattgcaagatttatatattcaagcatcaccatgccgtggagacaatttcaaacttattgtaaatttagatagaaacatactgcagaggtagaaactcttgatttgcttgataagtctgctaaaaacattttatcgatgtaaaacttaagctaggaccatggtttcaactgttgggggttgaatcttttgctgttggttgccatcttcaatctcccaaatttcaggtaacgcttctttgatattatgaatgctgttcagggcatgatcagctccagggaccaaatctgaatggcccactaaaacagtgttaagtccagttatttttgcactttcaacatttctaacactgtcatcaaagaaaattgttttctttggatccacattagcaatccgaatagcagcttcaaaggctttcacagatggtttac

SEQ ID NO: 205789 - DNA, 523 bp, Glycine max
aagaaagcaagaatttgaaggaagaggggatatgaatacaaggagctagttgtctatttgcaataacataacatcatcaagcaggatcatcgatccaaccttagtattcaacccagagagatttgtagtaattattactacaacaacttaaaacaatggcaggaggaggttatgtagattcgggaaatgcaaagcaatttgaagggaaggtcactgcattcgtattggttacatgctttgtggcagccatgggaggcttactcttcggttatgatcttggaataaccggaggagtgacttccatggaaccatttctcatcaaattctttcccggtgtctataaacaaatgcaagatgatgtcggccatagaagccaatattgcaaatttgacaacgagctccttacactatttacctcttctctgtatcttgctgctttagtagcttctttctttgcttcttccaccacaaggatgatgggacgcaaggccttcatgtttttaggaggtttgcttttacttgt

SEQ ID NO: 205790 - DNA, 394 bp, Glycine max
acacattcgggactttggttgatttgcattttgactagcctctaaattcatttatctacaaaaaaccccaggggacaagccgagagcaccaaggggggcctgcccttgaccagcctcaagggacacaatcagcatgggccacataaggggcctgccatgccacaggtgagccaatatcaatcttccgagctaaatcggtatccggaatgccaactccatcctcgatagtgccggccaagctgaaagggacaaacaaggcgcctggtgggaagacttgcgcaccagcggcattggcaaaggcctcagatgttcttgaccatggagtgggccattccactgactgtgacccccgggcggggaaatgcacccctttgtagcttgcaacccactccat

SEQ ID NO: 205791 - DNA, 552 bp, Glycine max
  unsure (1)..(552): unsure at all n locations
aagagggtttggcactagtaaatggcactgcagtaggatctggcttggcttccgtggtcctttttgaggcaaacttacttgtcattctttctgaagtcttgtctgcaatttttgctgaagttatgcaaggaaaaccagagttcaccgaccacttgactcataaattgaagcaccaccctggccaaattgaggctgcagctatcatggaacatatattagatggaagctcatattgtaaggcagcacggaagttacatgagattgatccacttcaaaagcctaaacaagataggtatgctcttagaacatcacctcaatggcttggaccacaaattgaagtaattaggcatgcaacacagatgattgaaagggagataaactctgtaaatgataaccccttgattgatgtttcaaggaataaggcactacatggngggaatttacaaggtaccccaattggtgtttcaatggataacacccgtttagccattgcatcaatcgggaaacttatgtatgcccattctctgaacttgtaatgacttctacaacaat

SEQ ID NO: 205792 - DNA, 431 bp, Glycine max
ggattattaatactaactttatttaaggtagcagtagctagcatgatttttatgatgagaagagtccagcgtacaaactccaaattaaaatcagaaaacataaagatctcaacaggattccactgagagaagagaagcagcatcatcagtcatcatccatacccaccaataatccaacaccgtgtggatcaccatgtctaggagagttgtccggagtcagcaacaacaacgggcttggaggtcttaccggagctggaacccaccttctcgatgtccttcacgacgtcaaggccctccaccacctgcccgaaaaccacgtgctttccgtcgagccactccgtcttaacggtgcagatgaagaactgagacccgttcgtgccaggtcccgcgtttcgcatcgatagaatgccgggacccgtgtgcttctttat

SEQ ID NO: 205793 - DNA, 574 bp, Glycine max
acaaggcagaaagcaagctcatcctataggtttaaaaatggcagcagcctcctccatggctctctcttgcccatccttggctggcaaggccgtgaagctgggcccatcagcccccgaagtcgggagggtcagcatgaggaagaccggcaccaagcaggcctactccggaagcccatggtacggaccagaccgcgtcaagtacttgggcccattctctggcgagcccccgtcctacctcactggcgagttcccaggtgactacggctgggacactgctgggctttcggccgacccagaaaccttcgccagaaaccgtgagctcgaagagatccactccaggtgggccatgctcggggccttgggctgcgtcttccccgaactgttgtcccgcaacggggtcaaagttggagaagctgtgtggttcaaggccgggtcccagatcttcagcgagggtgggctgcactacttgggcaacccaagccttggccacgcccagagcatgctcgccatctgggccacccaagttttccaatgggtgctgttgaaggttatcgaattgctggtgggccccctc

SEQ ID NO: 205794 - DNA, 602 bp, Glycine max
ggcccattctagcaagagtgaacgtgaaagacacggaaaacgtaacggaggaagcattgatcactacaatgagaaaggctatcaatttctattcctctattcaagcccatgatggccactggccagcagaatctgctggccctttgtttttccttcaacctttggtaatggcactctatattacagggtccctaaatgatgttttaggaccagaacaccagaaggaaattattcgttatttgtataatcatcagaacgaagatggaggttggggattgcatatagagagtcacagcacaatgtttgggtcagcgttgagctacattgccttgagaattcttggagaagggcctgaagatggtgaagacagggcaatggctagaggcagaaaatggatcctcgaccacggtggtttggaagctattccatcctggggaaagttctgggtcacggtacttggagtttatgagtggtcaggctgcaacccactttcaccagagatatggcttttgcccaagtacgcccccattcatccagggaaaatggtatgctactgtcgcttaattacatgcccatgtcatacttatttgggaagagatttg

SEQ ID NO: 205795 - DNA, 539 bp, Glycine max
caacattattgttttgaaaattcatatattcgatctcattctgtgcccttttctctgtgtttaccaaacaacaagtctcttcccttagtaaaaaaatatccttctttcttcttctgaatatcaatcttgcattaatccatggcagccaaaacatccaccaacggcacccatcattctctacccgagtacattccaaaccgcattcctgacccacattatgtccgcatcctggacaccacgcttcgcgatggcgagcaagcccctggagctgccatgacgtccgatcagaagctccaaattgctcgccagctcgcaaagcttggtgtggatgtcatcgaatggggctttccttcagcgtcacaggaagacttcaacgctgtcaagatgatagcgcaagaagttggcaacaactgtgacgctgatggttatgttcctgtcattgcggccctatgtaggtgcaatgagagggacataacgagagcctgggaggctctcaagtatgcccagaggcccaggcttatgcctttcatagcagtgag

SEQ ID NO: 205796 - DNA, 500 bp, Glycine max
acttgaagcattgcattctgttatttaattccactacgtatacgcacattctcctgaaagacaacaatggcaccaacagccaagactctgacttacctggcccaggagaaaaccctagaatcgagcttcgttcgggacgaggaggagcgtcccaaggttgcctacaacgaattcagcgacgagatcccagtgatttctcttgccggaatcgacgaggtggatggacgcagaagagagatttgtgagaagatcgtggaggcttgcgagaattggggtatattccaggttgttgatcacggcgtggatcaacaactcgtggccgagatgacccgtctcgccaaagagttctttgctttgccaccggacgagaagcttcgttttgatatgtccggcgccaaaaagggtggattcattgtctgcagccatctccaaggagaatcggtgcaggactggagagaaatagtgacatactcttcgtacccaacaagagagagggacta

SEQ ID NO: 205797 - DNA, 436 bp, Glycine max
gaataaaacacccaaattggtgaaatttgcaatttaggtacacaattgttcaagtatccatcagacaagaggaggctgaaccagccacattattctatgagtcctattaaaattaagcacttgactaagataatgacaaaagaagcacagtgcatacaaaaaccaaggggtgaaatattgatcatgaaactaagcagtatgagaaggttggtgctcttcctggactacttcatgttgctcttgctcttgctgtggtttttctccttgccaggtccaaacaatgtccttaaacgctggtcttatatcctgtttaaaaagcttctggtactccatggtgtcaccattggactttctaagttccaccatatggaaggtggggtaatctcaaaaatcttagcatcaacacccaaagctgcttatctgccttccttggaac

SEQ ID NO: 205798 - DNA, 443 bp, Glycine max
ctatggtcccatttactctgttctagaacgactttacatatatacataagatgcaggagtacttgcagtatgctatggccttatctgtcttgccatgggaaaagggctagcctgggtggagcgagtttatggcgttccattgcttgtggtcactggattctcgacgtcgaatacatttacgcaatacacttaccctgcattgccacactacacttgctgtaagtgggactggttgagaggagctttagcaacagtggatatagattatggaatactgcacaaggtcttacataatattacagacactcatgtcgctaatcacttgtgactccacattgccacattatcatgcaatggatgcgacaaaggcaatataccccatcttgtgagcgtctcctcggagcagatgggactacatttgtcaaggcgatgaggacagaggc

SEQ ID NO: 205799 - DNA, 417 bp, Glycine max
acgaaataaagaaacttgttttattgaattgattaacgaactttacagcgtgattgctcatagcgggccttctcttccgctattatttacaagccactgcccaaaaatatatatcatgaaacacaaaagcctatcttagacgtggaagcagagcttgataaactctcctgcggtagtaatgagcttcgcagtcaccattaggatttggggtacaagaaattttttggggaggtggttgtgtttagatgactgttccactaggaattaaagcatccttgattactgtgacaatcccactttttatgaaatacccatctgtttcccttgcagcttcttggacattgtcactgttaataatcttgacattttccccaattcgagcattcttgtcaataattgcccttttgatatgagagt

SEQ ID NO: 205800 - DNA, 525 bp, Glycine max
gcaacatcatgcaatttttaattgcttccatcaagaaggatagacaaatggaagctctcgtggaaaagctatgtcatcggtttagtggtgttacagatgttagacaatgggaatatatatcttattgtctctctcagttatcgtttactgaaaaagggatgaaaaaactaatagagttatttaagtcctatgaacatgtcttgtcagaggattctgttatggaccatttcaggaacatactgaacaagggaaagaagtttgcaaaacttgaacttaaagcttgcattgaagagtttgaggataagctgaataagtttcacacagataaaaaggaacaggaagttactgctcgaaatgctcaaatccatcaacagaagattggcagcagggaaggttttaccgtgactataaattctgaagatcacttgtcatctaattcttcttcagatgaaacagaaggtgaaataattgatgcttacactgaagaggcaactatgcctctaaatgagagatcacgatctaaac

SEQ ID NO: 205801 - DNA, 506 bp, Glycine max
acgaaataaagaaacttgttttattgaattgattaacgaactttacagcgtgattgctcatagcgggccttctcttccgctattatttacaagccactgcccaaaaatatatatcatgaaacacaaaagcctatcttagacgtggaagcagagcttgataaactctcctgcggtagtaatgagcttcgcagtcaccattaggatttggggtacaagaaattttttggggaggtggttgtgtttagatgactgttccactaggaattaaagcatccttgattactgtgacaatcccactttttatgaaatacccatctgtttcccttgcagcttcttggacattgtcactgttaataatcttgacattttccccaattcgagcattcttgtcaataattgcccttttgatatgagagttcctgcctataccaattgggacactgcctttggcagccagaaacctcttatcagcctccgtctcgtaataatctggccccattaataac

SEQ ID NO: 205802 - DNA, 500 bp, Glycine max
ttccattctctctgtgtatttccctacctctcccttcaagatgcagatcttcgtcaagaccctcaccggcaagaccatcacccttgaggtggaaagctctgacaccatcgacaacgtcaaggccaagatccaggacaaggaaggaatccccccggaccagcaacgtctcattttcgccggaaagcaacttgaggacggccgtacccttgctgactacaacattcagaaggagagtactcttcacctcgtcctccgtcttcgtggtggcatgcagatcttcgttaagacactcaccggcaagaccataaccctagaggttgaaagctccgacaccatcgataacgtcaaggccaagatccaggacaaggagggtatccccccggaccagcaacgtctcatcttcgccggaaagcagctcgaggacggccgcaccctcgccgactacaacattcagaaggaatcaacccttcacctcgtcctacggtctcgtggtggcatgc

SEQ ID NO: 205803 - DNA, 449 bp, Glycine max
agcatatacaatgctattttataactgatatttgaagcgggagcattaatacaggccattatgtaactatgaactatcaatatacgatcgttaataagtccgaggtacacacacttaaggccatggtacacttatgtgatcaacaacaacttcccccttattggatacattatgccaaaaccaggtaggagcattttccgtaatacaaaaacccttatctttggcatgatttatcaattctggcatcaggatacgctctaaactctgatgcatgacaaggaggtagccaccaggggccatattgatatgcaaacaatgccacaatcggataggatgcactattcgcgtgaccacacatgttctgacacaattacctcttgaagaagccatgttcaccccagctctgaacccatgaatttcttatgagccaatttgggacacccttttta

SEQ ID NO: 205804 - DNA, 498 bp, Glycine max
cttcccttccctcacgatctgtggaagacaccaatcttctctccacgcccttcttgggtaaccgtctgaagtgcagcaatggcagatggattgcattcgcagcatccatcggtagttcagaagttatctggacagtcttatcttgtgtccaggcttgctcctaatcactccagaaactgttctaccactggtagttacttcaatggaggtttgcagtcttcaggtttggttccagtcacggcacacgcgccggctgagaaaggggtgtctggatttttgttggatttcctgatgggcggagtgtcggcggctgtgtccaagacagctgcggctccaatcgaacgagttaagttgctcatccaaaaccaggatgaaatgatcaagagtggtcggttgtctgaaccatacaaaggaattggcgattgtttcactcgaaccatgaaggatgaaggggtgattgctctttggagaagaaacactgctaatgttatcagatac

SEQ ID NO: 205805 - DNA, 556 bp, Glycine max
  unsure (1)..(556): unsure at all n locations
ccagtgttgttacttgtgagacttgttctgcatttggtgcttcattgtcgcctccagatccaactaactgcgttcaaccggacccagaaaaagaccctttttgcccaccaccccccttcaaagactacgagctccctccacacgatgacaagacattaccccttcgaattagaccagctgctcatttggtcactgatgattacatagccaagtacgaggaagccgtgaggcgcatgcaagaccttccacctgatgatcctcgcagtttcatgcaacaggccaatgtccaccgtgcctactgcgatggtcgcggctatactcaaaagggcttcgctgactacaagcttgacgttcacggctcctggatattctttccttggcaccgctggtatctctatttctatgagaaaatcttggggaagatgatcggtgaccccactttcgctcttccgttttggaactgggacaatcccgncggcatgagaatccctcccattttcacagacaaaagttcgcctctctacgacgaacacaggaatagcgatcatgtaaatgc

SEQ ID NO: 205806 - DNA, 528 bp, Glycine max
atgatgcattcatcgcatatctgaggaagatcaatgaccttcccactgcaaagtcttatgccacaaggaccatccttttcttgaaagatgatggcaccttaaagccattggccatcgaattaagtttgccacatcctaggggagatgagtttggtgccgttagtagagtcgtcttgcccgcagaccaaggtgctgaaagtacaatttggctaattgccaaggcatatgttgttgtcaatgactcctgctatcatcaactcatgagccactggttaaatactcatgctgtgattgaaccatttgtcatagcaacaaacaggcatcttagtgtgctccaccctatttataaacttttgttgcctcactatcgtgacaccatgaacatcaatggactcgcaagacaatcactcatcaatgcaagtggcattattgagcaatcatttctgcctgggccatttgctgtggagatgtcttcggcagtttacaaggggtgggttttcactgatcaagcccttcctgcggatctta

SEQ ID NO: 205807 - DNA, 583 bp, Glycine max
ggacgagaaagtagacacagccatgtccactactggtactgttctggcttccactccaacacaaaggctattaggcaaagtggcattggttactggtggagcgtctggaattggagaaagcattgtgcgcctcttccatatccatggtgctaaaatatgtatagctgatgtgcaagacaaccttggaaagcaggtctgtcagtctcttggtgatgaagcaaatgttgtttttgtccattgtgatgttacagtagaggatgatgtttcccatgcagtggacttcactgtgggtaaatttggcacccttcacatcatagtcaacaatgccggaatttctggatcaccttgttccgatatccgcaatgcagacttatcagaattcgataaggtgtttagtgtaaatacgaagggagtgttccacgggatgaaacacgctgctcgaattatgatcccgaagaagaagggctcaatcatttctttatgcagtgtagcaagtgccataggtggcttaagaccgcatgcatacacagggttcaagtatgctgtattggggcttacaaagaatggtgcagcttaattgggg

SEQ ID NO: 205808 - DNA, 587 bp, Glycine max
atgaaaatgggttcttctttgtggactttgtgtctaattttggcttcactagcctcttctgcattctgtgcctttccacggaggccagtggatgttccattcggcagaaactacgttcccacttgggcttttgatcacatcaaatacttcaatggaggttctgagattcaacttcatcttgacaagtacactggtactggcttccagtccaaagggtcatacttgtttggtcacttcagcatgaacataaagatggttcctggcgattcagctggcacagtcactgctttttatttatcttctcaaaatgcggagcacgatgagatagattttgagttcttggggaacagaacaggacaaccttacattttgcaaacaaatgtgttcaccggaggcaagggtgacagagagcaaagaatctttctctggtttgatccaacaaaagcataccacagatactctgtgctgtggaacatgtatcaaattgtgttcctagtggataacatcccaataagggtgttcaaaaacctaaagggctttggagtgaagttcccctttgaccaacccatgaaggtgtacaacagctt

SEQ ID NO: 205809 - DNA, 592 bp, Glycine max
ttttctcttctcactgcatcgcttcaggttcttctgaaaagatgtctcgcgtgtatgttggtaacttggattcacgagtcactgagagagatctcgaagacgaattccgcgttttcggagttattcggagtgtttgggttgcacgtagaccacctggttatgcttttattgactttgatgaccgcagagacgcacaggatgctatccgtgaattggatgggttttcctcaactagctagctaagtcttctttttggcctatggggcaagcagatgctgctctctctttcttctacttctgccttggcctgcagtcatggttttttcttggttgtgtcttcgtcaaagtctgctgctttgtacagattgactacttctactactactgcatgttaagagaatttagaatgtgaacacaggggatttgcactgctatcgcgagctacacttctgttgcattatgggttcgtttatgagatatgtgcttctacacttaacctatggggaccatgtgcgtgcttgccttgtgctgtatatgttccctgtgggccatttgcgtgctcccattagttgttagcgcccatggacttctg

SEQ ID NO: 205810 - DNA, 514 bp, Glycine max
  unsure (1)..(514): unsure at all n locations
cagcgagtgagtgagcgagccaggtagggttttcggtgttcccctctttgtgttcgttcgcgacgatggggtccatccccgatccaggcgagttgagcgagttgactcagccgagcttcgacgagttccagcgccaaacctctctcatgaccagctgcaccctcctctggaaggagctctccgaccacttctcctccctcgagcaagacctcaaccacaaatccgaagccctcaagcgcaagattcacaccctcgacaactccacctcggactccctccgcctcctcgaccaccgcgaaacctctctcgacgccactctccagatcgccctccgcacgctcgacacgcgccgcaccgctgctctctccgccctcctccacgacgctgacgacacctnccccgacggcgaggtcgatgacaccgccggcctcgtcctcaagctcaagtccttctgcctncgcatggacgcgttcggcttcttcgccttcgtcagcgccaagaagaaggagctgga

SEQ ID NO: 205811 - DNA, 467 bp, Glycine max
gaataaaacacccaaattggtgaaatttgcaatttaggtacacaattgttcaagtatccatcagacaagaggaggctgaaccagccacattattctatgagtcctattaaaattaagcacttgactaagataatgacaaaagaagcacagtgcatacaaaaaccaaggggtgaaatattgatcatgaaactaagcagtatgagaaggttggtgctcttcctggactacttcatgttgctcttgctcttgctgtggtttttctccttgccaggtccaaacaatgtccttaagcgctggtcttatatcctgtttaaaaagcttctggtactccatggtgtcaccattggactttctaagttccaccatatggaaggtggggtaatctcaaaaatctcagcatcaacacccaaagttcctttcctgccttccttggaaccttccaatttgagcaagccttcatcttttct

SEQ ID NO: 205812 - DNA, 494 bp, Glycine max
cagaaagcaagctcatcctagagttttaaaaatggcagcagcctcctccatggctctctcttccccatccttggctggcaaggccgtgaagctgggcccatcagcccccgaagtcgggagggtcagcatgaggaagaccgtcaccaagcaggcctcctccggaagcccatggtacggcccagaccgcgtcaagtacttgggcccattctctggcgagcccccgtcctacctcactggcgagttcccaggtgactacggctgggacactgctgggctttcggccgacccagaaaccttcgccagaaaccgtgagctcgaagtgatccactccaggtgggccatgctcggggccttgggctgcgtcttccccgaactgttgtcccgcaacggggtcaagtttggagaagctgtgtggttcaaggccgggtcccagatcttcagcgagggtgggctggactacttgggcaacccaagccttgtccacgcccagagca

SEQ ID NO: 205813 - DNA, 572 bp, Glycine max
  unsure (1)..(572): unsure at all n locations
caacttccttgtgcagccaccattattgttgttattggagatttcaattctttgtctttcaaactcctcaagttgggtttatgtgatgatggctctcaacatctcttctccagctgaagtcaagtccatttttttcgctgattccttcaagtctaactgcctcacagcaaaattctcaggtgggtttgcttttaagagaaaagagcgtagagcagcatctggaggacgggtttattgctcagtgcaggcaacaccaccaccaccagcctggccgggacgagcggttccggaacaaggtcgcaagacttgggatggaccaaaacccatttcaattgtggggagtactggttcaattggaactcagacactagatattgtggcagagaatccagataagtttaaagttgtggcacttgcagctggttcaaatgttactcttcttgcagaccaggtaaaaagatttaagcctcaacttgttgctgttagaaatgagttcctaattgctgaacttgaagaggcctngcatgatgtcgaagaanaacctgagatcatccctggagagcanggaatca

SEQ ID NO: 205814 - DNA, 578 bp, Glycine max
tgccgtagctaattgcgtttcgacacgctcactcgtcgtcaggtacgccctttgtcgtcctttttttttttttttatttttttgtagttgtttttgcaactttttatcgaaagggcattcttacctaattcaaaggcaaaacctaaagttaacactaagaaaaataaaagcatttttattaaaccaaatataccgttagcgtacgcacttacaacataagggtatactaatagtatttctaaattaaatcataagaataataaagcaaatatgaaaaatgatatactgaattcacttctattttgtcctaaaaatgaatgatatccacactcgaaagcactgtctttttcttcgtatgggttatgtggggcaaagattaaatttacagctaataatattattgctaatataggtatagaatgtagaaaaaatgtttgactcgtcatgtaagctttaaataatataagactaagaatactaactatattaaatcattctcctggtatatatataaataatctaagtaaaagagtttaaacggaaatagtgctactgaccgcactgtatattgcaatatt

SEQ ID NO: 205815 - DNA, 550 bp, Glycine max
gttggatcaagaagccggccacagttgaggaggcctacttggattattgttctgctttccatagtgtgtgtgtttctgattgctgcctatgtttaccccccgcctagcccttcttcgtgctccgtcttttcctcacatggttgcggtagtagtgcttttgaactgcctccagctgctcatacccgcgaattgactgatgcggaggttcagtctcgggttgtcattaatgagatcctgaactattatcctgtgcaaaccaagaaacctaaagttgcttttttgtttttgactccgggctcgttgcctttcgagaagctctggcacatgttctttcagggtcatgagggaaaattctctgtttatgtacattcatcaaaggaaaaaccaatacatgtcagccccttctttgttggccgagacattcacagtgaaccggtaggctggggaaaaatttctatggctgaggcagaacggagactctcggcacatgcacttttagaccctgataaccaacattttgtcttattggctgaaagtcgtatacctgtgc

SEQ ID NO: 205816 - DNA, 512 bp, Glycine max
atcccctcccactctttctctctcttcactttccaacgttggctttctctcgcgttttccaattccccccaaatctcacgcctagggtttctatcgcaaaccctccctacctccaaccaggtcgcgtgcaaagggatttcgaagcttcggaagaaaaaaatgaaacctgttttctgtggaaacctggatttcgacgcgcgtcaatctgacgtggagaggctcttcagaagatacggcaaagttgatagagttgacatgaaatccgggtttgcttttgtctacatggaagatgaacgtgatgctgagtatgcaatcagaaggcttgatagaacagaatttggtagaaagggtcgccggattcgtgttgagtggactaagcaagaacgtgacagtagatgatcaggtggtgattccagaaaatcttcatctaattcaagaccatccaaaactgtgtctgttataaattttgatcctggtcatgccaggacacgggatctggagagacattttga

SEQ ID NO: 205817 - DNA, 447 bp, Glycine max
agcaaagacaatgctatcttataactgatatttgaagcgggagcatcaatacactacaatatgtaactatgaactatcaatatatgatcgttattatgtctgtgatacacacaattaaggccataatatacttatgtgatttacaacaacttctagcttattctatacatcatgccaacccaactaggagcaattttcatcatacaattacacttatctttaatcatcattcatcaatactggcatcagcaatacgctctaaactctgaagcatgacaaggtggtagtcaccagggaccatattgttatgcaatctatgccacaattggataagatgcacaagttgcaacaccacacatgttcttacccaattccatcttgcagtagccattttcaccccagctttctacccatgaattgtttatgagccaatatgggacaccattt

SEQ ID NO: 205818 - DNA, 532 bp, Glycine max
caagttctcaaatcactctttttcttcacccttctgatctgctaattctcaaggtattcaaaattgggtggttttcgattgaactgtgatgtccaagccactgctaggcatagcggaagaggaaggtcaaagcaatgtcactttgttggtttcttcctcagccaccatggaaagtgtgtgcctgaatagctcaaaactgaaagagcgcaactacatggggttatctgattgttcatctgtggacagctccgcgccgtccttctcagatgagactaagagcaatctgaaccttaaggctactgagctcagactggggcttacggggtcgcaatctcccgaacgagattcagatctttgcttgagaagttcgattcagtttgatgaaaagccactgtttgctttgcatcctgcaactgatgaacaccattcctcatcaaagcctgctgttttgggaaacacaagagggttctcaaatgtcatgagtggattcgccgatgagaaattgcttgttagttccgaagtccacacaata

SEQ ID NO: 205819 - DNA, 429 bp, Glycine max
ggagcaaggagtactaaaataataatagtgtcaacaaacatcatcaattataaagtaataagagattgaagaaaacaatggtaataaatttaattttagccccccgacagggtccaaaaaagacaataaatgatacaataatactatgtaacagcagcaatgaagcctcagcctcttctctagaagaacaaaacaagggtagcccagctcaaggctaagcatccaatgaccttcttcaagcacctgatggtttcagctccactctcgtcctcagatacagctggaccaggagacatggaatcctggcttgatcccggagctcctaccggaggagcgggagggccaagcaatgacggcgacggtgctggtgcagtgtgcttcttactcttctttgtcttcttctttgacttgggagcgggtgccggaacc

SEQ ID NO: 205820 - DNA, 561 bp, Glycine max
cagattttcatgctcctcctttcattaaattaaagaacagtttctaggtatggaaactctttcatatgggtcagcaccatgctgccaagttgtgaactcaaagtggaaattagttgaaaagagtttgagttcacgtcaatcaagagtttcctctataggaaaacttggagtttattacacaggtactatttctgcatgtgcgcctgtgagattttatgagatgggtactagggtgcagctaagaagctcaaaaagattcaatttcaaggtttgtagtggaagttatgatgatggttatgtgattggtgaagaggaagcaagggatatttcagggttagaggagcctgtaacaaccaaggttctgattccaggtctgcctgatgattcaaaaggtgaatctggtgctccaataagtagttgtttctggggatgaaaacctaaactcaatgtgcactatgagaaggctcggtgcgaaaacgtcaatgatttgcctcgtgttctcttttaccaggttttggcgttgctctttccatatgagaaagcacttaaggatttgggcgt

SEQ ID NO: 205821 - DNA, 564 bp, Glycine max
  unsure (1)..(564): unsure at all n locations
agcaaatattgcctattcggcaatatggcggaaaatggttcaattgagctgaacaagtttgtgttgttttgtttgttgttgctaatacaagtggcagtttctgaaatcatttttgaagagcgatttgatgatggatggcgaagtaggtgggtgaaatatgactggaaaagcagtgagggcaaagcaggttcattcaagcacacagctggaaaatgggctggtgatccagatgacaaaggtattcaaacatccagtgatgccaaacactttgccatctctgcaaaaataccagaattcacaaacaagaacagaacattggtccttcagtattctgtaaaatttgagcaagagattgaatgtggtggagggtacatcaagcttctctctggatttgttaatcaaaagaagtttggtggggatacaccatatattttaatgtttggaccagatttatgtggcacggatacaaagaagcttcatgtgatactttnctaccacggtcaaaattaccccataaagaaagacctgcaatgtgaaactgacaggttaactcatttctacaca

SEQ ID NO: 205822 - DNA, 416 bp, Glycine max
aatctaaattaaaattctggcgacaaaataagatattcaggattcctccatatggaagtttgaatttgcattgtacattaaaaaaaaaaaaaaaaaactatcagaaaggagaaagggagaaagaaagggaaagggtcaatcgaagtcgcacaacgaagtgccttgttccttgccagtctttagtttcgttgccaaggagggaaggcgtcatgctttatatgttgtgaatgccaggcagcagaacgataagcctttgacctaatacaaataatgaatgcctccattaagctcactgacccttgataactcgggaatgttaattctttcccacccttattgggggggagttctgggcttaaaaggtatgttgccaaaaccacatttccctttttttttaaaaagaattaaattttttg

SEQ ID NO: 205823 - DNA, 585 bp, Glycine max
agcgtttccttgcgcggagcttcattcagctcaagagagatggcgaacgaagagttgggtagttggactgatctgctacattcttccaccaagcttctcgaacaagctgctccttctgctcagttccctccacttcagaggaacttagatcaactggaagcattatccaagaagcttaaatccaagacagtaaggactgaagcaccttctcaatctattgctgcaacaaggctccttgctcgtgaggggataaatgcagagcagcttgcaagggatctgaagtcatttgaactgaagacaacttttgaggatgtttttcctgttgaggcaacaagcgttgaagagtatctgcagcaggttcatgaaatggcgatggtctctgctgtccaagaagctcagaaggataatctcaggagtttcaatgattatatgatgaaagtattagaggaggatcggcaaaaagaaaagcgtgattttcttcagagtttaagtcgaatttcaacattacctacgacaaacattgctgctaacagcaatgtgggtacccctaccggtcaaattgtgtctggatcttctacttcacaa

SEQ ID NO: 205824 - DNA, 514 bp, Glycine max
gtgaaactatctttggagaccgcaacggcttcaggaacgaagcgatttggaagactgagtcagagactctgaatgaatcggttggagagataagtcataagagatccttgacagaatcccttgttcattccgaaaccgctacaaaatcatgggtggcaacggcaaacacaggtggaaattcagcttccaccgttccttcacccatcctcccaaggaattcacctgccccatttccggctcactaatgtccgaccctgtcgtcgtagcttcgggccaaaccttcgaacgactcgccgttcaactctgcagagacctcaacttctcccccaagctagacgacggcacccgacccgacttctgaaccctaatccccaacctcgccatcaaaacgacaatccttcactggtgcgacaacgcccgcacccaacacccgcgccctcccgattacgcctccctccagcgcctcgtcttagagcaaaaagaacatgaccgcgttagggttttcgaaatggag

SEQ ID NO: 205825 - DNA, 552 bp, Glycine max
gatctcttgttcttgtaatatatttataaaaatttttcttattaacatgaattttttctgggtatttgtgataaatttttcgtttattcttttgaattaatgaaagacctatggtttgatacataaaaaattgtttattgttttttctagacaggcgaactggttcgataacaaatatttcttttttcataaatttgttatttttctttttccttaagcctagaagaattaaattcttctgattttgaatcatcataatatctagacctagttctcctctttgaatagaggctattgtaatttctcttaaattttttaatctaatcaggagacaatatactttgacattgttaaatattctttgacctaagaaattattccaatttaaatgtaaaatcaaaaaatttcttaataagaaattaagttctgcctccatctatgtcttgtctttctttttctttatacccttactattcttttactgtctgatcctacataatcggtttccatatctttttcttggcttgagatagatgattcaagattccgttg

SEQ ID NO: 205826 - DNA, 567 bp, Glycine max
aaacgaagatagaatgtgcacagccctaaagacgaattaccagcttagcgaggagatcggtcgcggtcgtttcggcaccatcttccgctgcttccacccactctccaacgaaccctacgcctgcaaactcatcgacaaatccctcctccatgactccaccgaccgcgactgcctccagaacgaacccaaattcatgaccctcctttcacctcacccaaacatccttcaaatcttccatgttttcgaggacgaccaatatctctccatagtaatggatctctgccaaccccacacgcttttcgaccgcatggtcgatggtcccatccaggagtcccaagccgccgccctcatgaagaaccttctggaagctgtcgcgcactgccaccgcctcggcgtggcccaccgcgacattaaacccgacaatattctgttcgattcggcggacaatcttaaactggcggacttcggtttcgcggagtggtttggggatgggaggagcatgagccgcgtggtggggacgccgtattacgtggcgcccgaggttctgttggggagggagtacgatga

SEQ ID NO: 205827 - DNA, 559 bp, Glycine max
tctttttttttttttttttttttttttttttttttttttttttttacattagtaaacaaatttattgcataaaaagatacgtgcgtgtttggaaaaaaattcaatttttgttaagttgaagggaaatatccaaatacatgtcttattcttttaaataatccatatttgtagcaatgaaataaattcctccccaaaataaaaaatgattgggattacaaatatttatgatccatattcactttaaagggccagaaatgccttgcttacgtatcattaaaaagtgcattaacctaaataccgccgtaagaagaggtaatacaaaagtatgcaaactattaaaacgagttaaggtagattgtcccacactggaacttccgcgtaataactttaccaaagacgatcctattacaggaatagcgtcgggtacgcctgttacaattttgactgcccaataaccaatttgatcccaaggtaaggaataaccggtttcaccaaaagatgcagtcaatacagccaaaacttcacccggaacccaagttaattcgcgaggttttttaaa

SEQ ID NO: 205828 - DNA, 530 bp, Glycine max
gttgagtttcttcttctgttgcgttgtgtgtgagtgtgggcacggtaagatgcagaccattgctaggcgcttagggcagcaatcgctgaggccatcgacgtcgctcaagtccatctatccaatttccgatcaccattatggaatggatcacgagcgttacgtttctaccctcgccaccaagggagttggtcacctcgttcgtaagggcactggtggacgatcctccgtcagtggcattattgctacagtatttggggcaactggattcttaggtcgttatgttgtccaacaacttgctaaaatgggatctcaagtcctagttcctttccgaggctctgaagataatccccgtcatctcaaattgatgggggatttgggacagattgtacccatgaaatacaatccaagggatgaaagttcagtaaaagctgtgatggctaaggccaatgttgttatcaaccttattggaagggattatgagacaagaaactacagctttgaagaagtgcactatcacatggctgagcaac

SEQ ID NO: 205829 - DNA, 478 bp, Glycine max
acatatataactaaagaatcttgttttgttctattatttgttattttataatattctaatgaatctttattttcctttttattattagttattagaatattttttattattagaaagaataaatagaattggcaaaaataaaaaaaaaattcaataaaatcaaaattatcgcgggcgaatatttactcttttattatcaatcaaattcagatgtaatgtagggcacaactcctaaaaaaaggattgctttttggtttcttccgccatcccacctaatgaatcattaagatttgtttttaataaaatcttaagtatttgcaggtttcgtcgttcccatcacttctcgattaatggttaggtctgaattcgacaatggagcctttctcatatcttaaaattaataatctttttttttttcgaatattgatttggtttttcgtgaatcaatattctcagtttttatcgattcagagctctt

SEQ ID NO: 205830 - DNA, 386 bp, Glycine max
caaaaaaattactacgtaaatagcatataacgagaagagatgcacatagctggggtggggaattttcctacgttttctatattctttaagaaaaaaaacaatgggagcccaattcataacctgaatctctgattttacattgaaaattattacgattacacaatagacacatccaaaagtagaaactgatcaatcctttggtgaggggattgaaatgaaaattacatagacatattaagcagtgggaagaaccttattaacaatctcctggctaagagctgcaatctgggaatcaagggacttgatggtttcttccttttgattctccaagctagacagagccttctgcagctcagcctcgactttcttcctcccctcagcaatct

SEQ ID NO: 205831 - DNA, 509 bp, Glycine max
  unsure (1)..(509): unsure at all n locations
gaaatcagaaaaatttgtgttgtccatgtccttagctccaaacgtgtccaaagctttacctcaataagacattttgaggtcaagcagatgataaaaaaaatatctaggcatgcctcatcttcaaaagttacaaatttaaatgaagtgcttatatctcttattagtactattgtatgtagaattgttttggggagaaggtatgaagaggagggatctgaaggtagcagattccataagttgttcaatgagtgtgaagctatgttgggtaacttctttgtttcagattatattcctttcatgggttggattgataaactcaggggactggatgcacgtcttgaacgcaatttcaaggagatggataagttctaccaagaagccattgatgaacacatgaattctaagaaaaagactccagaggaagaggatttagttgatgtcttacttcaactgaaagagaacaacacgtntcccatagatctcaccaatgtaacatcaaagcagtgctc

SEQ ID NO: 205832 - DNA, 477 bp, Glycine max
aaacagtaagtcttagttgtaatcataattaaccttaaaaaataaacaataatcataaaaaatataatattttaatttattggtagaatttaaaactacaacatatataattaaattagaagtacactttaaaataaatgatatgatttttaattttttaatccatattcttaaaataataaagaagatgaaggtgaatagatcttaaacaataggtgatggcgacgctgggtggtgctgaacacacgcggtgatggtggtggtgaatgcatgacatggttgaggaggcagagaaagagttgggcggacatgaagaagaagcataagcggaagtgaaacgtagaaagaaaatcgtatctctcttcttaagtttttagttgacaaatatcatacacttgggttggaatcactcaaacctaacttcccaaaaaaaaaaaaacattataatttcataattgaaaatcagacgaaaagaat

SEQ ID NO: 205833 - DNA, 542 bp, Glycine max
ctcgagccgattcggctcgaggtaaatcttcacagtggtgtcacaagaactatgtaaactaccttgccatgagaaaggttcttgaagttagagaacaactcagaagaattgcaaagaggataggcttagtcttaaaatcttgcgaaagtaatatgcaggtggtcagaaaagcagtcactgctggctttttgctaatgcgtgccatctagaggcatacaggcataacgggatgtataagacgttaagaggataacaggaagtttatattcatccattgtcagtgccattcagagtaaatccaaagtgggttatttacacttctcttgtatcaactgatcgacaatacatgcgtaatgtcataaccgtagatacctcatggctattggaagctgctcctcacttctatcagctacagcaatctaatcatcttcttcgctgattcgccgtaagctaattaactgtgtctgatgcgaagcaaagaaattgtttatatgtcaaatttcaggtcaagtagaacatgataaccagtggtgttaggactt

SEQ ID NO: 205834 - DNA, 506 bp, Glycine max
cttgagtaaaaatggaaattgcataaagggcagtgtttttcttgagacgctttctttatattaaagtcgtatattttaatgcatgctgtcgagcttttgttactttgtgacaaatggagggtccttagttctgtttctctttcttctctctgtgctttcaaccaagttctcaaatcactcttcttcttcacccttctgatctgctaattctcaaggtattcaaaattgggtggttttcgattgaactgtgatgtccaagccactgctaggcatagcggaagaggaaggtcaaagcaatgtcactttgctggtttcttcctcagccaccatggaaagtgtgtgcctgaatagctcaaaactgaaagagcgcaactacatggggttatctgattgttcatctgtggacagcttcgcgccgtccttctcagatgagactaagagcaatctgaacctcaaggctactgagctcagactggggcttccggagtcgcaatctcccgaacgag

SEQ ID NO: 205835 - DNA, 576 bp, Glycine max
aaaatattattaagatgatcaacattattggagcacttgttctactctttgcatttctcttcctcagttgtgtgtatgcacaagacacaacaacccttgtgcctgcaatcataacttttggtgattctgctgtggatgtagggaacaatgactatcttcccacccttttcaaggctgattaccctccttatgggagggactttgttaaccaccaacctactgggaggttttgcaatggcaaattagctactgatttcactgctgacacattgggtttcaagacctatgctccagcatatcttagcccacatgcatcaaggaaaaacctacttattggagcaaactttgcttcagctgcatctggttatgatgaaaatgctgctactttgaatcacgcgattccgttgtcccaacagctgagttatttcaaggaataccaaggcaagctggccaaggtagctggcagtaaaaaagcagcctcaatcatcaatgatgcgttgtatgtgctcaatgctggaagcagtgactttgtgcaaattattatgtaattcttggatcacaaattttcacttctga

SEQ ID NO: 205836 - DNA, 453 bp, Glycine max
aaataaattgaaaaagtgatagttgcacactggtttatttatttatttatacatgcaaaagtagtcaaaataattgacatacttgtctacatcaaaagttgacgaggaaaagtaaacctgcgtagctagctagctgtcccatgtacacttttatttaaaaattgaaacataaaaaaatcttgaaacgaagcagctaatagaatccattatttatatataacaataaactactatatacacatacaatgtattctagtttagtcccctaaaacacgagcaagttattctgggtgtcgtagcccaacttcttcaaattcggctggactgcaaatcgaatcataggtggcggtccacaagtcaatgccaaggtatcaggagatgcatttggaatatgctccgtcaggatactttcagtgatgaatcccacactgtattcccacccttctcttatgc

SEQ ID NO: 205837 - DNA, 539 bp, Glycine max
caataaaaattttaaacataaatattattctgtgtcgacccggagctaagatatagttttgattggtaatcttgtgaccaataaaatccacctttaaaaggcaaagcataaatacatgagtgtctaattttaccattgatttaaaaacaaaatttgcaccatcttataagaaatatggaacgcctgtcctgggccctctcatctgattgttctcctctgtttcggtgaaaaatttaacttctctttccatattttcattgaaactcagaatagaagctacatttccacatcggtaacagtaattaggtgcataccatacagttacaaggcctttatcttggaacatatacttaaggccttcctgaacgagttggtgcgctcgacaaacaagatcaaggttatttatgtgattgaactccgaactgaccctggatccaaaaagccaacctgctccacggggactgactgccatgtttcattatcttcaggatcactccacattagatcacagaaaggaccctcatgaggaatttcacagt

SEQ ID NO: 205838 - DNA, 443 bp, Glycine max
tgcttcgggaaatatgaagaatttttattaatctaggaggagccaaaggttggtgagtgtagcggtgatgggtaacaagatccctctatatggaagtggtgctagcctaagtagcacaacgggtgtgcccactgtgtctgtgctattgaacctcaactttgtgctacgatctagggcttatgtgctcgggaaattggtgaagcctaaatactacaaaaccattcaatgttccataactttggatccaaaaaagctcaatgctgcgatttccctgaagaaatcttgcacatatgattgatacatgtgacggagagcaagtgggaattatttgaaaaataataataataataaaaatattgttttatgattaatgtgttcttttgatgtgaggaaagaaatggtccagccagagagcagtgtgccaaggacgcgtttttgggact

SEQ ID NO: 205839 - DNA, 510 bp, Glycine max
cggaagctcgcctgtcgacgagctcacagtcggcgccgccctttttttttttttttttttttttttttttttttttttttttttttttttttttttttttgggggtttggggttttttttatttttttaatttctgattttttacaccaatctttggggagaactgtaggaacaatcataacaaaacaaaaggaaaaagcccccaccgaacaaatgagggggcggccggccaccaacaaggggggggggaggggcccggttaaaaaaaaggggcggagcccccccccctgaggggttcttctggcccccccaaacaagggggggcccaaaaagggccccccccccaccccccaccacggtaaaggggggggggggcccccccccccccccccaagaagaatgttccccggcgggggggggggcggccccaaaaaagggggggggaaaccccccccaaaaaaagaggcccggggggactaacaaaaccacccccggaaaaaaaaagggggg

SEQ ID NO: 205840 - DNA, 410 bp, Glycine max
aggtattccgatattcggacgcctcaacttgttatgaaatcacattgatagcctctactcgtgtcctagctcgtctaagagctagatttgcctcaattggttgtctcttgccttccgccttattcaaattagcttctgctatttcaagagtttgctgtgcttcttggggatcaatggcactacccttttccgcatcatttactaaaacagggatctcattattgtttattctagcaaaaccgcccatcagagccatcgttaaccattggtctttaagaagacgtattctcaaaatacctatatctacgggtgtggcaataggcgcatgatttggtaatactccaatttgtccgctattagtagataaaatgatttccttcacttccgaatcccaaacaattcgattgggg

SEQ ID NO: 205841 - DNA, 573 bp, Glycine max
  unsure (1)..(573): unsure at all n locations
caaaaggcctcatcacttgaatggttagctatatatatatatatacttctgtgcctcaaaattgagctgagttgtatacctgcaatgggtgttttgtggtggaagctgttttttgctgctcttgctgggattctcttctcaacccaacattgtgcttcccaaaaagttccgaactacacatttatgcacaatgcaacaacagcaccagacgtatcatactacgactacatcgtaattggcggcggcaccgcagggtgccctttagctgcaacactgtcccaaaattacagcgtattgctccttgaacgtggtgggtcgccctacggcaaccctaacatctccgacttagctgctttcggtgctgccctctccgacaccttccctacctcccccgctcagcgtttcatctccgaagacggtgtcatcaactcaagagcccgcgttctaggtggtggaagttgcttgaacgctggctttacactcgcgctagccctcaatatgtaagggaagcggngtgggatggaagggcagtgaatgaatcctacgaatgggtggagacgatagtggcgtttg
